United States Patent Application Publication US 2021/0199660 A1 - sequence listing, part 35

SEQ ID NO: 495773 - DNA, 120 bp, Artificial Sequence
  ENSG00000163359_56 (sequence is synthesized)
ggtctggatggtgaagatggagacaaaggattgcctggttcttctggagagaaagggaatcctggaagaaggggtgataaaggacctcgaggagagaaaggagaaagaggagatgttggg

SEQ ID NO: 495774 - DNA, 120 bp, Artificial Sequence
  ENSG00000163359_57 (sequence is synthesized)
attcgaggggacccgggtaacccaggacaagacagccaggagagaggacccaaaggagaaaccggtgacctcggccccatgggtgtcccagggagagatggagtacctggaggacctgga

SEQ ID NO: 495775 - DNA, 120 bp, Artificial Sequence
  ENSG00000163359_58 (sequence is synthesized)
gaaactgggaagaatggtggctttggccgaaggggaccccccggagctaagggcaacaagggcggtcctggccagccgggctttgagggagagcaggggaccagaggtgcacagggccca

SEQ ID NO: 495776 - DNA, 120 bp, Artificial Sequence
  ENSG00000163359_59 (sequence is synthesized)
gctggtcctgctggtcctccagggctgataggagaacaaggcatttctggacctcggggaagcggaggtgccgctggtgctcctggagaacgaggcagaaccggtccactgggaagaaag

SEQ ID NO: 495777 - DNA, 120 bp, Artificial Sequence
  ENSG00000163359_60 (sequence is synthesized)
ggtgagcccggagagccaggaccaaaaggaggaatcgggaaccggggccctcgtggggagacgggagatgacgggagagacggagttggcagtgaaggacgcagaggcaaaaaaggagaa

SEQ ID NO: 495778 - DNA, 120 bp, Artificial Sequence
  ENSG00000163359_61 (sequence is synthesized)
agaggattccctggatacccaggaccaaagggtaacccaggtgaacctgggctaaatggaacaacaggacccaaaggcatcagaggccgaaggggaaattcgggacctccagggatagtt

SEQ ID NO: 495779 - DNA, 120 bp, Artificial Sequence
  ENSG00000163359_62 (sequence is synthesized)
ggacagaagggagaccctggctacccaggaccagctggtcccaagggcaacaggggcgactccatcgatcaatgtgccctcatccaaagcatcaaagataaatgcccttgctgttacggg

SEQ ID NO: 495780 - DNA, 120 bp, Artificial Sequence
  ENSG00000163359_63 (sequence is synthesized)
cccctggagtgccccgtcttcccaacagaactagcctttgctttagacacctctgagggagtcaaccaagacactttcggccggatgcgagatgtggtcttgagtattgtgaatgacctg

SEQ ID NO: 495781 - DNA, 120 bp, Artificial Sequence
  ENSG00000163359_64 (sequence is synthesized)
accattgctgagagcaactgcccacggggggcccgggtggctgtggtcacctacaacaacgaggtgaccacggagatccggtttgctgactccaagaggaagtcggtcctcctggacaag

SEQ ID NO: 495782 - DNA, 120 bp, Artificial Sequence
  ENSG00000163359_65 (sequence is synthesized)
attaagaaccttcaggtggctctgacatccaaacagcagagtctggagactgccatgtcgtttgtggccaggaacacatttaagcgtgtgaggaacggattcctaatgaggaaagtggct

SEQ ID NO: 495783 - DNA, 120 bp, Artificial Sequence
  ENSG00000163359_66 (sequence is synthesized)
gttttcttcagcaacacacccacaagagcatccccacagctcagagaggctgtgctcaagctctcagatgcggggatcacccccttgttccttacaaggcaggaagaccggcagctcatc

SEQ ID NO: 495784 - DNA, 120 bp, Artificial Sequence
  ENSG00000163359_67 (sequence is synthesized)
aacgctttgcagatcaataacacagcagtggggcatgcgcttgtcctgcctgcagggagagacctcacagacttcctggagaatgtcctcacgtgtcatgtttgcttggacatctgcaac

SEQ ID NO: 495785 - DNA, 120 bp, Artificial Sequence
  ENSG00000163359_68 (sequence is synthesized)
atcgacccatcctgtggatttggcagttggaggccttccttcagggacaggagagcggcagggagcgatgtggacatcgacatggctttcatcttagacagcgctgagaccaccaccctg

SEQ ID NO: 495786 - DNA, 120 bp, Artificial Sequence
  ENSG00000163359_69 (sequence is synthesized)
ttccagttcaatgagatgaagaagtacatagcgtacctggtcagacaactggacatgagcccagatcccaaggcctcccagcacttcgccagagtggcagttgtgcagcacgcgccctct

SEQ ID NO: 495787 - DNA, 120 bp, Artificial Sequence
  ENSG00000163359_70 (sequence is synthesized)
gagtccgtggacaatgccagcatgccacctgtgaaggtggaattctccctgactgactatggctccaaggagaagctggtggacttcctcagcaggggaatgacacagttgcagggaacc

SEQ ID NO: 495788 - DNA, 120 bp, Artificial Sequence
  ENSG00000163359_71 (sequence is synthesized)
agggccttaggcagtgccattgaatacaccatagagaatgtctttgaaagtgccccaaacccacgggacctgaaaattgtggtcctgatgctgacgggcgaggtgccggagcagcagctg

SEQ ID NO: 495789 - DNA, 120 bp, Artificial Sequence
  ENSG00000163359_72 (sequence is synthesized)
gaggaggcccagagagtcatcctgcaggccaaatgcaagggctacttcttcgtggtcctgggcattggcaggaaggtgaacatcaaggaggtatacaccttcgccagtgagccaaacgac

SEQ ID NO: 495790 - DNA, 120 bp, Artificial Sequence
  ENSG00000163359_73 (sequence is synthesized)
gtcttcttcaaattagtggacaagtccaccgagctcaacgaggagcctttgatgcgcttcgggaggctgttgccatccttcgtcagcagtgaaaatgctttttacttgtccccagatatc

SEQ ID NO: 495791 - DNA, 120 bp, Artificial Sequence
  ENSG00000163359_74 (sequence is synthesized)
aggaaacagtgtgattggttccaaggggaccaacccacaaagaaccttgtgaagtttggtcacaaacaagtaaatgttccgaataacgttacttcaagtcctacatccaacccagtgacg

SEQ ID NO: 495792 - DNA, 120 bp, Artificial Sequence
  ENSG00000163359_75 (sequence is synthesized)
acaacgaagccggtgactacgacgaagccggtgaccaccacaacaaagcctgtaaccaccacaacaaagcctgtgactattataaatcagccatctgtgaagccagccgctgcaaagccg

SEQ ID NO: 495793 - DNA, 120 bp, Artificial Sequence
  ENSG00000163359_76 (sequence is synthesized)
gcccctgcgaaacctgtggctgccaagcctgtggccacaaagatggccactgttagacccccagtggcggtgaagccagcaacggcagcgaagcctgtagcagcaaagccagcagctgta

SEQ ID NO: 495794 - DNA, 120 bp, Artificial Sequence
  ENSG00000163359_77 (sequence is synthesized)
agaccccccgctgctgctgctgcaaaaccagtggcgaccaagcctgaggtccctaggccacaggcagccaaaccagctgccaccaagccagccaccactaagcccatggttaagatgtcc

SEQ ID NO: 495795 - DNA, 120 bp, Artificial Sequence
  ENSG00000163359_78 (sequence is synthesized)
cgtgaagtccaggtgtttgagataacagagaacagcgccaaactccactgggagagggctgagccccccggtccttatttttatgacctcaccgtcacctcagcccatgatcagtccctg

SEQ ID NO: 495796 - DNA, 120 bp, Artificial Sequence
  ENSG00000163359_79 (sequence is synthesized)
gttctgaagcagaacctcacggtcacggaccgcgtcattggaggcctgctcgctgggcagacataccatgtggctgtggtctgctacctgaggtctcaggtcagagccacctaccacgga

SEQ ID NO: 495797 - DNA, 120 bp, Artificial Sequence
  ENSG00000163359_80 (sequence is synthesized)
agtttcagtacaaagaaatctcagcccccacctccacagccagcaaggtcagcttctagttcaaccatcaatctaatggtgagcacagaaccattggctctcactgaaacagatatatgc

SEQ ID NO: 495798 - DNA, 120 bp, Artificial Sequence
  ENSG00000163359_81 (sequence is synthesized)
aagttgccgaaagacgaaggaacttgcagggatttcatattaaaatggtactatgatccaaacaccaaaagctgtgcaagattctggtatggaggttgtggtggaaacgaaaacaaattt

SEQ ID NO: 495799 - DNA, 120 bp, Artificial Sequence
  ENSG00000163359_82 (sequence is synthesized)
ggatcacagaaagaatgtgaaaaggtttgcgctcctgtgctcgccaaacccggagtcatcagtgtgatgggaacctaagcgtgggtggccaacatcatatacctcttgaagaagaaggag

SEQ ID NO: 495800 - DNA, 120 bp, Artificial Sequence
  ENSG00000163359_83 (sequence is synthesized)
tcagccatcgccaacttgtctctgtagaagctccgggtgtagattcccttgcactgtatcatttcatgctttgatttacactcgaactcgggagggaacatcctgctgcatgacctatca

SEQ ID NO: 495801 - DNA, 120 bp, Artificial Sequence
  ENSG00000163359_84 (sequence is synthesized)
gtatggtgctaatgtgtctgtggaccctcgctctctgtctccaggcagttctctcgaatactttgaatgttgtgtaacagttagccactgctggtgtttatgtgaacattcctatcaatc

SEQ ID NO: 495802 - DNA, 120 bp, Artificial Sequence
  ENSG00000163359_85 (sequence is synthesized)
caaattccctctggagtttcatgttatgcctgttgcaggcaaatgtaaagtctagaaaataatgcaaatgtcacggctactctatatacttttgcttggttcattttttttcccttttag

SEQ ID NO: 495803 - DNA, 120 bp, Artificial Sequence
  ENSG00000163359_86 (sequence is synthesized)
ttaagcatgactttagatgggaagcctgtgtatcgtggagaaacaagagaccaactttttcattccctgcccccaatttcccagactagatttcaagctaattttctttttctgaagcct

SEQ ID NO: 495804 - DNA, 120 bp, Artificial Sequence
  ENSG00000163359_87 (sequence is synthesized)
ctaacaaatgatctagttcagaaggaagcaaaatcccttaatctatgtgcaccgttgggaccaatgccttaattaaagaatttaaaaaagttgtaatagagaatatttttggcattcctc

SEQ ID NO: 495805 - DNA, 120 bp, Artificial Sequence
  ENSG00000163359_88 (sequence is synthesized)
taatgttgtgtgttttttttttgtgtgtgctggagggaggggatttaattttaattttaaaatgtttaggaaatttatacaaagaaactttttaataaagtatattgaaagtttcctggg

SEQ ID NO: 495806 - DNA, 120 bp, Artificial Sequence
  ENSG00000163359_89 (sequence is synthesized)
cagcgaataatggcaaactggtcaccgcagatcactgggctggtccattggaagtggagagtgaggttcctaggttgatgtagcagatgactgagccccacaacagagctagtcggtcac

SEQ ID NO: 495807 - DNA, 120 bp, Artificial Sequence
  ENSG00000163359_90 (sequence is synthesized)
agcctctgcaacaccaaccctaactttgcaaagaccgcctgggacattcataaagtcccaccccaaacctttctactgctgaggaaacaattttgaggtggaaattaatggattacttgt

SEQ ID NO: 495808 - DNA, 120 bp, Artificial Sequence
  ENSG00000163359_91 (sequence is synthesized)
gaagtaagcccacatgtttgaactaaaggtcacctctggagcatccaggaagatgttgccaagtcgtgagccctacctaagtacacgagacgtttaggtgcacatgtgtgtgcttcagat

SEQ ID NO: 495809 - DNA, 120 bp, Artificial Sequence
  ENSG00000163359_92 (sequence is synthesized)
attttacttaaccgagtgtgtgttgtgtttggccgggatcacttggagaacctgggactcccttccattataattaatgtatttcatgacttctcagtacagttgggaaggtggaagaaa

SEQ ID NO: 495810 - DNA, 120 bp, Artificial Sequence
  ENSG00000163359_93 (sequence is synthesized)
aatagacaggttgacattcccttttcacattcctcatttgaaactggctgggatcgtgcagccaaaaggagtcattattttgcttggcaggtctgcagtaattctcaaaacttccattgg

SEQ ID NO: 495811 - DNA, 120 bp, Artificial Sequence
  ENSG00000163359_94 (sequence is synthesized)
gtgattaacaggagcagcaaggaagcaaaacttcacccggatgagggtggaggaagggtgtctgtgtgtgcgagtttccccagggctgatgaggtgtggtttctggttcttggcacgatg

SEQ ID NO: 495812 - DNA, 120 bp, Artificial Sequence
  ENSG00000163359_95 (sequence is synthesized)
tgggtgcttgggaagattcccctgagtaaccgcagaataagagggtgaagtctgaaagagctctaggccccatgcccagcgtcccatgctccccctcacagtttgtgggactttttcttc

SEQ ID NO: 495813 - DNA, 120 bp, Artificial Sequence
  ENSG00000163359_96 (sequence is synthesized)
aggtctgtgctctgtgcgtgctgttggcatctccctttcttctggggctctgagaaggttctcagacacgtccatgctcctttgtggcttcatgtcccatagctcctaaaacgtccccaa

SEQ ID NO: 495814 - DNA, 120 bp, Artificial Sequence
  ENSG00000163359_97 (sequence is synthesized)
tgaggccatctgcctgagaacttctcttgtgaggtctccaggacaacctcgtggctccagcactacagggacgcctacatgcttgtagcactgcccccaggtccctcctcacatgttgac

SEQ ID NO: 495815 - DNA, 120 bp, Artificial Sequence
  ENSG00000163359_98 (sequence is synthesized)
agctcttgccggttagtgatgctagtgttggtgacactctctatctactaacaaggtggtgtgacttgtttgctttattcatgaggacctggacgtttgcatccttcctgtctcctccca

SEQ ID NO: 495816 - DNA, 120 bp, Artificial Sequence
  ENSG00000163359_99 (sequence is synthesized)
agatggccccctgtgcacactctgagctgtgtcttactgtgtactgggcatttgcttcccataactggctggtgaggtttgtatcatcagtctcacctcatggataggaagatcctgctg

SEQ ID NO: 495817 - DNA, 120 bp, Artificial Sequence
  ENSG00000163359_100 (sequence is synthesized)
ttagtgaggtgctcgtgagaggctaggaccctagtccattagactctgaaacccatgtgctgatgatacccattccagtctccactctgtcccaatcggccctgaaggtgaatatccagg

SEQ ID NO: 495818 - DNA, 120 bp, Artificial Sequence
  ENSG00000163359_101 (sequence is synthesized)
gtggccctggaggcctgtagtctctcagtgaggtccccaaaactatgccgactcagcacccccaatctacaccacaccactgtgcaaagctttcttcagtgaggccccaagggtcagccc

SEQ ID NO: 495819 - DNA, 83 bp, Artificial Sequence
  ENSG00000163359_102 (sequence is synthesized)
tgtgcaaagctttcttcagtgaggccccaagggtcagcccacggagaggccaagtgtcgcttgtaattctattaaataactgg

SEQ ID NO: 495820 - DNA, 120 bp, Artificial Sequence
  ENSG00000163359_103 (sequence is synthesized)
ctcccaaagtgctggggttacaggcgtaagccaccgcacccagacaactagtttaattcttacatcaattaatatttattcagtgcagttctggcgatactgttcaagacagatgggtga

SEQ ID NO: 495821 - DNA, 120 bp, Artificial Sequence
  ENSG00000163359_104 (sequence is synthesized)
acagatgggtgatgggtaggaaggagtccacccgggagtcaggaggccttggcctggttccacactccccccacccatttaaagtaatgtgcacgccacttagcgtccctgcgtctcaga

SEQ ID NO: 495822 - DNA, 120 bp, Artificial Sequence
  ENSG00000163359_105 (sequence is synthesized)
tttttcacctgtaaattgagactggggcaggatgattgctaatgtctttccttccacattggatattctatgcttttaccacagcctgtgtcggcgaaagacattgggtcatcactgcca

SEQ ID NO: 495823 - DNA, 120 bp, Artificial Sequence
  ENSG00000163359_106 (sequence is synthesized)
ttgttctgccgaacacaggatgatttgtgcatagagcgctgggcttgggaattcagtgttgaagttgggctaccggccatgtgctcttgatggggggattcattcacataagtctgtcct

SEQ ID NO: 495824 - DNA, 120 bp, Artificial Sequence
  ENSG00000163359_107 (sequence is synthesized)
tgtgtgggctgagggacccagaaccacgtgagtttcttagcatggtttcaacgagatcaaaaaattgttcattcattaattatttgctcattcattcattcaaactagctatttgttaaa

SEQ ID NO: 495825 - DNA, 120 bp, Artificial Sequence
  ENSG00000163359_108 (sequence is synthesized)
tgaataattactaatcgtgtgccaggtacggcgatagacaggactctttgcacccactgggagtgattttgttacttgctttaaccacacctgagagggtggggaagggatggagctccc

SEQ ID NO: 495826 - DNA, 120 bp, Artificial Sequence
  ENSG00000163359_109 (sequence is synthesized)
atattgttgctaaaaataacgataagattaagttcctactatttgccagaggatacaccagttactaacatttattatctaatttaaccctccaaatgacaccattaggaaggtattacc

SEQ ID NO: 495827 - DNA, 120 bp, Artificial Sequence
  ENSG00000163359_110 (sequence is synthesized)
ccccattttacagctgaaaaaaactgaaacccatttgaacgggatatgaactccagctcaccctagtagaataaaacctatgtctttctattatactcagagcctaaccccacccccaaa

SEQ ID NO: 495828 - DNA, 120 bp, Artificial Sequence
  ENSG00000163359_111 (sequence is synthesized)
tgagaagatattcccaatactgccctattgggaagttaatctattttattgatgtagctttgatttactcctctgccatattttcagatattactgatcatgtacgcccctaccaaaatt

SEQ ID NO: 495829 - DNA, 120 bp, Artificial Sequence
  ENSG00000163359_112 (sequence is synthesized)
aggctcctataagactctgattatcatctgcaaccaatcatctaaattttcttgggtgaaataacacattgttacaactcttatttgctaactttataaataaagtctgggtctacaaga

SEQ ID NO: 495830 - DNA, 120 bp, Artificial Sequence
  ENSG00000163359_113 (sequence is synthesized)
ggaccaacccacaaagaaccttgtgaagtttggtcacaaacaagtgtaagtgattataattattgtcttaaaaattgtagcgctgcagggaatgcacaggtcctccaaccacctcctgac

SEQ ID NO: 495831 - DNA, 120 bp, Artificial Sequence
  ENSG00000163359_114 (sequence is synthesized)
tccaggtgagatgggggcgtcggaggttctccttggagcattttccatatgaaaaataacaggctcaaaggccatggtactcataataaattaaattaaaataaaggttgtatgccctta

SEQ ID NO: 495832 - DNA, 120 bp, Artificial Sequence
  ENSG00000163359_115 (sequence is synthesized)
tgcatattactattaaagctaagactgtctagaatttctaaacaacaacaacaacaacaaaaatctaacttaaaatttactttttgcagtattgcaaaatgaatcctaaattattggctt

SEQ ID NO: 495833 - DNA, 120 bp, Artificial Sequence
  ENSG00000163359_116 (sequence is synthesized)
aatcacctgtgttaaagaagtttcaatgcagaaactagacaaaacaactaacaaaatcaccatgtcctttattatttattcttgaaattagcaatctgtagaactgatcacattttgtcc

SEQ ID NO: 495834 - DNA, 120 bp, Artificial Sequence
  ENSG00000163359_117 (sequence is synthesized)
gagtagacatgactgggccaattgtatagccctgaaggaaccatcattttgtgtttactaacgttttacttattgattctaagatgcacaattttcttctcattgggacacttctgaaac

SEQ ID NO: 495835 - DNA, 120 bp, Artificial Sequence
  ENSG00000163359_118 (sequence is synthesized)
tgaaatgtgacttagaattgacaatatatcatggtttattggtagcattttgtgttacttagtggaacataaaataatggtgcatcataaaattaagagctcttatattggatacaatac

SEQ ID NO: 495836 - DNA, 120 bp, Artificial Sequence
  ENSG00000163359_119 (sequence is synthesized)
agtatttggttggccatgttccatgtgaatatatatcatcaattagcataaaatggtatatttgggggaaatacctgactttatgttaataataatttaaagaacaaactaatcccacag

SEQ ID NO: 495837 - DNA, 120 bp, Artificial Sequence
  ENSG00000163359_120 (sequence is synthesized)
ctgaagtaagttaaatagctacagggatttaggaaatggtcctctccaggctgtctgttgttcatcgctgtgtgaggatgttttctggttagttgtcatgtgtgggttatgatgagccca

SEQ ID NO: 495838 - DNA, 120 bp, Artificial Sequence
  ENSG00000163359_121 (sequence is synthesized)
aaggagtgttttttatcttgaagtcttaaaaaatagaagtctgttggtcaagatctgaaagagtaaaatttaaccacagctacattttaaaataaagttaaaaattggccgggtgtgatg

SEQ ID NO: 495839 - DNA, 120 bp, Artificial Sequence
  ENSG00000163359_122 (sequence is synthesized)
ctgggcaacagagtgagactcagtatctaaataagtaaataaattaagtaagttaaaaatttggtaagtttccttggtaccctttgaactgaccaatgctcaaaatgtagacggcggaaa

SEQ ID NO: 495840 - DNA, 120 bp, Artificial Sequence
  ENSG00000163359_123 (sequence is synthesized)
gtgttttcattcaggcaaatcatacctgcatccaaggtatggaagtactttatactgtaacaacaatgccgagtgagaaggtgattgaattttcttgttttggggaccattaaactgatg

SEQ ID NO: 495841 - DNA, 120 bp, Artificial Sequence
  ENSG00000163359_124 (sequence is synthesized)
aggaacatgttgatgattgcagcataaacacctctcagtctgtcttccttcagtttgctcaaggaagtacttacatcgtgatttggaaatcaatatgtttgggaaatgtcaaagctgatg

SEQ ID NO: 495842 - DNA, 120 bp, Artificial Sequence
  ENSG00000163359_125 (sequence is synthesized)
cctttaaaaatgcattgaaacactatgggaatatcaaactatgaaaaagacaagattttccaatcaatatgttttccactttgaagaatacatatattttttgctgattataaagttaac

SEQ ID NO: 495843 - DNA, 120 bp, Artificial Sequence
  ENSG00000163359_126 (sequence is synthesized)
agatatgcattgtcaagcattcaggaggtacagagaaatatattacacgattctcattgtgacagcattgctggcttttgatgaaaaccaatagtgacccgatgcatagccttcctattt

SEQ ID NO: 495844 - DNA, 120 bp, Artificial Sequence
  ENSG00000163359_127 (sequence is synthesized)
ttttctatgaatattattgcttgtgggaaggtgcatgcatcgcacatgcacatccactcctgcacatcattattacaaaaatggactgtggggcttagggtgccttgcgccccagtgttt

SEQ ID NO: 495845 - DNA, 120 bp, Artificial Sequence
  ENSG00000163359_128 (sequence is synthesized)
ttgaatggttgtttttaggatgttctaggtaggcacctgtggcttctgggaacaggtgggattcccagaacagggttttaacctaacattgtgcttgcctccatttcctctcttctattt

SEQ ID NO: 495846 - DNA, 120 bp, Artificial Sequence
  ENSG00000163359_129 (sequence is synthesized)
ggttactttcctgaagcccagtgaccaatagtaaggaagtttcagcagacagtggtctgagtcaggcagcctttcccctctctgttttccaagcaaacttagttacattggtattctagg

SEQ ID NO: 495847 - DNA, 120 bp, Artificial Sequence
  ENSG00000163359_130 (sequence is synthesized)
ttaggaagccggggaaggttgtggataattttcagtccccattgtcttttaggctcccactaggttctcaataataaagaagagcaaattaaggaagactcagccatgcgctcctctcac

SEQ ID NO: 495848 - DNA, 120 bp, Artificial Sequence
  ENSG00000163359_131 (sequence is synthesized)
ataaagagaaggctctagcttcctacaggttatacctggggggcagactgatttcagagggaaaagatgaacaactattgcatccaaagacgtgtcgttctagggaaaagtccaggttaa

SEQ ID NO: 495849 - DNA, 120 bp, Artificial Sequence
  ENSG00000163359_132 (sequence is synthesized)
gttcaacgagggccagccatctcccttggtactccaggacatttaaatacttttttttttttttgctttaaaacagttgctttaacatatgcactcatagctgagtagagtccagccaaa

SEQ ID NO: 495850 - DNA, 120 bp, Artificial Sequence
  ENSG00000163359_133 (sequence is synthesized)
acgacatgtctcagaagtcaagattatgtggagtttgcattagaagccttcttaagaacataaaatcctccgttttcatgcttcagaagtagagaagtacaggtttttgtctttgaatag

SEQ ID NO: 495851 - DNA, 120 bp, Artificial Sequence
  ENSG00000163359_134 (sequence is synthesized)
tgccgggttctcacctcactaatatatttctcttggttttccaaatatcttcttgtccacagtaacagtgtccttattttccactagtaaatcttacagggtctcagtagtgactctcac

SEQ ID NO: 495852 - DNA, 120 bp, Artificial Sequence
  ENSG00000163359_135 (sequence is synthesized)
gtggaactggagggctagggtggagggccaaggaagctggagaagccaatcagacggggagtggagtgtgctgctgtgaggccactcatgggctgggtgtccgtggctctgggcagacct

SEQ ID NO: 495853 - DNA, 120 bp, Artificial Sequence
  ENSG00000163359_136 (sequence is synthesized)
ctcgtgactggttcagcagagcccaggggactgggaattgaacagctaaacacagatggtcaggactgaagtgcacttgaaacaaataaaatagagcaaatagggtccattggccaacgc

SEQ ID NO: 495854 - DNA, 120 bp, Artificial Sequence
  ENSG00000163359_137 (sequence is synthesized)
tctgggaaggaaggaagaatagggagatcatttgacgccggcctcacgctaacagggaagccaccagtaaatgaggaataaattttgatggttaaattaccttgccttgtcagttctctc

SEQ ID NO: 495855 - DNA, 120 bp, Artificial Sequence
  ENSG00000163359_138 (sequence is synthesized)
caggaccttccttgacagccaggcattttccttcagttattggcatatttgagagaaagaaggttgtttttgtaaattgtcttcattttattctgacttcctggagtcttcaaaggctct

SEQ ID NO: 495856 - DNA, 120 bp, Artificial Sequence
  ENSG00000163359_139 (sequence is synthesized)
cgtggggaccactggctttctgggccctgagagcgtctgcaactaggaggtgttgtaactgtggagccaccagccaccagcctggaatttgggtgacagcagcaaccaggaaatgtttta

SEQ ID NO: 495857 - DNA, 120 bp, Artificial Sequence
  ENSG00000163359_140 (sequence is synthesized)
gaccaattctgagcctcagtcctgtgcacctttgagtctggtccatcgtgggtgatccaagctatgattatccactgaagacttaggttttccttgtcctttttggtatctatctgaagc

SEQ ID NO: 495858 - DNA, 120 bp, Artificial Sequence
  ENSG00000163359_141 (sequence is synthesized)
acagatgctcaccacctccgcagctgtgagcagcctgcctcgctggggacaaaggagatggagaagcatctctttgtaggggagagctggataattccagcctgttagctactcacagga

SEQ ID NO: 495859 - DNA, 120 bp, Artificial Sequence
  ENSG00000163359_142 (sequence is synthesized)
acatgcagaattattggctccagggagttttggagaaagaaggtttacgttttcaaacttacagataacagttgacatcaatgcttctctttcccagaacaatctggagtttgccagaaa

SEQ ID NO: 495860 - DNA, 120 bp, Artificial Sequence
  ENSG00000163359_143 (sequence is synthesized)
actctgtaaacaggagtcgtgctgtgtgtgaactgtaaactcttctctccaggcgtcgaggggacctttgctttactttgcagctgggctacatcagacgtgtgcattggaaacataaac

SEQ ID NO: 495861 - DNA, 120 bp, Artificial Sequence
  ENSG00000163359_144 (sequence is synthesized)
ttccttaactgggaaaagaatgcttctctgtcttcaaaatagttctgctatgtgacatttttgccatcatgaattttacatcagtgctagctctttgttttacgtgtttcatttggcagg

SEQ ID NO: 495862 - DNA, 120 bp, Artificial Sequence
  ENSG00000163359_145 (sequence is synthesized)
cacacacacacacacacacacactcataaaggattttcttttctgctttacctttaattttcagtctacttggcttgtaatgaaaggtagagccttatttttgaactatatcccaacaga

SEQ ID NO: 495863 - DNA, 120 bp, Artificial Sequence
  ENSG00000163359_146 (sequence is synthesized)
tgaaaggtagagccttatttttgaactatatcccaacagaatcgaatttccattttgccaagaattataaaaccctgaggttttaaaattcagtttcttttctggggatttaacatggaa

SEQ ID NO: 495864 - DNA, 120 bp, Artificial Sequence
  ENSG00000163359_147 (sequence is synthesized)
ggacttggagggcaaatggcccagtgattggaaaggggaaaaacaattcatttcatttaaaattattcaataaccattgccagcatttgggattctgagtgctgtttatgaagccctttc

SEQ ID NO: 495865 - DNA, 120 bp, Artificial Sequence
  ENSG00000163359_148 (sequence is synthesized)
attgatataatttcatctatctctcacaaggctgtaagcaattcctatgtccatatggcagtgaggaaatggagatttgagcaggttaagggagttttcacctggaagctcttctttttt

SEQ ID NO: 495866 - DNA, 120 bp, Artificial Sequence
  ENSG00000163359_149 (sequence is synthesized)
tgtgagtgccattagggctttggggggctctgtgacaattcttagtgccataagatctgcccaacatgacctggtgcatggttagtccacagctctgcagtgagtgaatgtaaaaggatt

SEQ ID NO: 495867 - DNA, 120 bp, Artificial Sequence
  ENSG00000163359_150 (sequence is synthesized)
ccccaattcttgctctccccaaaaacatactgaacagatacttttaaaaataatatctttgctactttcaaatatcgggccaggtttgatccaactaaatatttaagagacccaaatgga

SEQ ID NO: 495868 - DNA, 120 bp, Artificial Sequence
  ENSG00000163359_151 (sequence is synthesized)
aatcctaatactgggggagggagggaataaggggcaagagggctgagggagttgtggatttgttgtttttgtaattatctgtgggtttttggggggatgctgtaagtgaaataaaaaaac

SEQ ID NO: 495869 - DNA, 120 bp, Artificial Sequence
  ENSG00000163359_152 (sequence is synthesized)
tagatttcttctttttctggcgtattgcatcttgcaatttcaagacatttcagaaatgtctgtagcagaatagctccttgtatgcctaatcctcagtcttgttgaataaatgctaaagtc

SEQ ID NO: 495870 - DNA, 120 bp, Artificial Sequence
  ENSG00000163359_153 (sequence is synthesized)
gtcagctctgtgcagcccaacatcatcttattctgcataatcccaggtgtaaatggagtcttactttacctgtgatcagactcagtgaaaatttgatgggaggtgcttttggggctatca

SEQ ID NO: 495871 - DNA, 120 bp, Artificial Sequence
  ENSG00000163359_154 (sequence is synthesized)
ctagaattcacgtatccattagacatttctcctgtgcctcatactgggactcgagttgatttgtggtctgtgatgctgtgaagattggcgtttcatttactcagtgatttaatctaataa

SEQ ID NO: 495872 - DNA, 120 bp, Artificial Sequence
  ENSG00000163359_155 (sequence is synthesized)
aaaaactgcttagaagaacacaagacaaatttggctggaatccatgaaatgcatgggtttggatctgacccatggggtgttctggtccggacatcctaagcacacaccccagcttagtgt

SEQ ID NO: 495873 - DNA, 120 bp, Artificial Sequence
  ENSG00000163362_0 (sequence is synthesized)
ggcagcctgggagggacggcaaggtaggcaggtgagccgagacggacggacggccagcagctccgtcagctggagagagagcacaggcctgtggcttgggagaccctgaggcgacatgtg

SEQ ID NO: 495874 - DNA, 120 bp, Artificial Sequence
  ENSG00000163362_1 (sequence is synthesized)
agggccctgagccccctgactggaagcaggggctgtttttcaactcctggactaaagcccagaagcagctggggaagctccaggctacctacacaacctggcccaggctggtcacggtgt

SEQ ID NO: 495875 - DNA, 120 bp, Artificial Sequence
  ENSG00000163362_2 (sequence is synthesized)
cccccctccctgctctgtgccctctccttccagaaatccaccatggagagtaaggatgaggtcagcgacaccgacagtggcatcatcctgcagtctggccccgacagcccggtctcccca

SEQ ID NO: 495876 - DNA, 120 bp, Artificial Sequence
  ENSG00000163362_3 (sequence is synthesized)
atgaaggagctgacccatgcagtgcacaagcagcagagggccctggaagcgaggctggaggcctgcctggaggagctgaggagactctgccttcgggaagcggagctgacgggcaccttg

SEQ ID NO: 495877 - DNA, 120 bp, Artificial Sequence
  ENSG00000163362_4 (sequence is synthesized)
ccagcggagtatcccctcaaaccaggggaaaaggcccccaaggttcgccgcaggatcggagcggcttacaaactggatgactgggccttgcacagagaggaccccctaagcagcctggag

SEQ ID NO: 495878 - DNA, 120 bp, Artificial Sequence
  ENSG00000163362_5 (sequence is synthesized)
cgccagctggccctgcagctgcagatcacagaggcagcccgtcggctgtgcctggaggagaacctcagcaggcaggctcggcggcagcggaagcactccatgctgcaggaggagaagaag

SEQ ID NO: 495879 - DNA, 120 bp, Artificial Sequence
  ENSG00000163362_6 (sequence is synthesized)
ctgcaggagctccagcgctgcctggtcgagcggcggcgcaatagcgagccacctccggctgctgctctccccctgggccgagagctcagtgcctctgatgacagctccctgtcagatggg

SEQ ID NO: 495880 - DNA, 120 bp, Artificial Sequence
  ENSG00000163362_7 (sequence is synthesized)
ctcctcctggaggaagaggaatcccaagtgccaaaacctcctccagagtctccagccccaccttctcggcctctcccaccccaaacccttgagggtctgcagccaacaggacctgaggct

SEQ ID NO: 495881 - DNA, 120 bp, Artificial Sequence
  ENSG00000163362_8 (sequence is synthesized)
gggagcccagaacgggctccagtccagaacagcccctggaaggaaaccagcctggaccacccctatgagaagcccaggaagtcttctgagccctggagcgagtccagcagcccagccacc

SEQ ID NO: 495882 - DNA, 120 bp, Artificial Sequence
  ENSG00000163362_9 (sequence is synthesized)
acaccacaggatgggcccagtgcctccagcctgtggcttctggagcctgcctcctaccacgtggttcccatccgtggtgttcctggccagtggcagggccgcaccagtgccccagccacc

SEQ ID NO: 495883 - DNA, 120 bp, Artificial Sequence
  ENSG00000163362_10 (sequence is synthesized)
cctgagatacaggggaggaggggccagtcgcagtctctgagggtggattccttccgggcgggtcctgagggccgaggtcgcagcgcctttccccgccgccgccccactcactacacggtg

SEQ ID NO: 495884 - DNA, 120 bp, Artificial Sequence
  ENSG00000163362_11 (sequence is synthesized)
acagtgccagattcctgctttcccgcgaccaagcccccgctgccccacgccgcctgccactcctgctcagaagacagtggctctgacgtctccagcatctcccaccccacttcgccgggc

SEQ ID NO: 495885 - DNA, 120 bp, Artificial Sequence
  ENSG00000163362_12 (sequence is synthesized)
agcagcagccccgacatctcctttctgcagcctctctcccctcccaagacccatcgtcaccgcggggcctgggtcccagccggcagcagagagctggtcgcccaccaccccaagctactg

SEQ ID NO: 495886 - DNA, 120 bp, Artificial Sequence
  ENSG00000163362_13 (sequence is synthesized)
ctgccgcctggctatttcccggcggggcggtacgtggtggtggctgagagccccctgccgcctggcgagtgggagctgcgccgcgcagccccgggccctgcttacgaggaggagggcact

SEQ ID NO: 495887 - DNA, 120 bp, Artificial Sequence
  ENSG00000163362_14 (sequence is synthesized)
cccctgcgctaccagcgtctggtgccctcccgcagccgcatcgtgcggacgccctccctgaaggacagcccggcaggccgggggctcagcaaggccgccgtgtccgaggagctcaagtgg

SEQ ID NO: 495888 - DNA, 120 bp, Artificial Sequence
  ENSG00000163362_15 (sequence is synthesized)
tggcacgagcgtgcacgcctccggagcacccgcccccactcactggaccgccaaggagctttccgggtcaggagcctgccccttgggagagagggcttcggacgagccctgggaccccgg

SEQ ID NO: 495889 - DNA, 120 bp, Artificial Sequence
  ENSG00000163362_16 (sequence is synthesized)
gcacaggtgcccacagtttgtgtgctgcggagatcgcctgatggggcccctgtgcaagtctttgtacctgaaaaaggagagatcatcagccaggtgtaactctgcgccccacgctggaaa

SEQ ID NO: 495890 - DNA, 120 bp, Artificial Sequence
  ENSG00000163362_17 (sequence is synthesized)
tttcagctcccccatccccatcgcaggccgatgacctggagctgagaccttttattattttttttttacacgacttttttcagaagccctgacctaaggatttatatatgtggattgtcc

SEQ ID NO: 495891 - DNA, 120 bp, Artificial Sequence
  ENSG00000163362_18 (sequence is synthesized)
tcaatacccctgtgatatgattatgttttatcccccagagtttggcctactggacttaaggccttgcctgtctgactgacagcctctatctccttatataagacaagtggcaggggacga

SEQ ID NO: 495892 - DNA, 120 bp, Artificial Sequence
  ENSG00000163362_19 (sequence is synthesized)
gtgaagcagagtgagccaccttgggagttctccaacgctctgtgctctggttctaagaaattccctggggaactgcccctggccctcctgtcccactattgctggaggctggacatggta

SEQ ID NO: 495893 - DNA, 120 bp, Artificial Sequence
  ENSG00000163362_20 (sequence is synthesized)
catactcatgcacatgactctcccccatttcccaggtctctgggtaccccagcctgggctgggggagaatctcttcccccttttctaatgtgctctgtgatgcacacaccaagtggtagg

SEQ ID NO: 495894 - DNA, 120 bp, Artificial Sequence
  ENSG00000163362_21 (sequence is synthesized)
tcaaaggtcagtatatcccggtggtgtattgtcttgctagaccctgctattttcctgaccccctaaatcctctttagggacccagtcactataccctgtctatgccctgtgggctcccag

SEQ ID NO: 495895 - DNA, 120 bp, Artificial Sequence
  ENSG00000163362_22 (sequence is synthesized)
acccctgagctttgagtcagtggcatcacagtttgtagcctcagggggtctggctgggggctggtccatgcttgtggttagtggacagcagccaccctttgacagctacctctgggcatc

SEQ ID NO: 495896 - DNA, 74 bp, Artificial Sequence
  ENSG00000163362_23 (sequence is synthesized)
gtggacagcagccaccctttgacagctacctctgggcatctcaagggcttgcagccccactgctccttctaaca

SEQ ID NO: 495897 - DNA, 69 bp, Artificial Sequence
  ENSG00000163362_24 (sequence is synthesized)
ctaacgttttttcatcatagtcccaaaaaccaatactttacaagtggttttggaaaggcaccacttttg

SEQ ID NO: 495898 - DNA, 120 bp, Artificial Sequence
  ENSG00000163362_25 (sequence is synthesized)
ccaatactttacaagtggttttggaaaggcaccacttttgtggcatgttctggttgggagagggagtcacagttcctactccccccaccagctatgcttctgctctgagaaggtggttat

SEQ ID NO: 495899 - DNA, 120 bp, Artificial Sequence
  ENSG00000163362_26 (sequence is synthesized)
ttatacaaacatggacatactcactcccaagggctgatgagatgctgaattttctttgggggcattcattaattgtcccagctgcagcgactggagcaagtctggaagctgcctgtgcta

SEQ ID NO: 495900 - DNA, 120 bp, Artificial Sequence
  ENSG00000163362_27 (sequence is synthesized)
agaccacccagctgtccctgggttctcatcctagggccttctttgcttccaggtcaggggacctgcttcaatgagaaagcaactgaattgaggctaggagaggtagggagagctgagttc

SEQ ID NO: 495901 - DNA, 120 bp, Artificial Sequence
  ENSG00000163362_28 (sequence is synthesized)
tgacttcacctgtgcagaactctctgcccccatgttacctggactggaacagactgtgaatatagcagaaggttccaagaactctggtgtctgacctagaagaggcacagttctctctac

SEQ ID NO: 495902 - DNA, 120 bp, Artificial Sequence
  ENSG00000163362_29 (sequence is synthesized)
tggaaagaaaacgatgtagccgattgcacaagggtgccaagggaagacccaggatggcccatcaaaggaacctgggggaggatgcaggaggctgaagggatgcacctggcatttctctca

SEQ ID NO: 495903 - DNA, 120 bp, Artificial Sequence
  ENSG00000163362_30 (sequence is synthesized)
ctgtgctcttaccgcatcagcaacccccaacttttgggcctactctgccccccatgcgtgaataccctgcttggatgctgtgcttttccggtttgtctctaagcccctttctccagggca

SEQ ID NO: 495904 - DNA, 120 bp, Artificial Sequence
  ENSG00000163362_31 (sequence is synthesized)
tgttggtttccctggcctctcagtgtcctaactggagcccagagtgccttgttctgagccaggagacggctgagcactggccctccacacctaagcgtcctttacattaacttattggtc

SEQ ID NO: 495905 - DNA, 120 bp, Artificial Sequence
  ENSG00000163362_32 (sequence is synthesized)
ttgtataacacctggtgccattgccaagtggctgtgtcctcagctacagagctggaattgtgtggggtttagtgctaaatacttcaataaagtctgttttttgtgattggctgagctggg

SEQ ID NO: 495906 - DNA, 120 bp, Artificial Sequence
  ENSG00000163362_33 (sequence is synthesized)
ggggcaaaggggacagcctcgcccctcgagcggctgctcccgcagctcgctcacccctgcgggtacgtcgtcactcccgcgtgcggccccgtcccgactcttggatcggactcttcagtc

SEQ ID NO: 495907 - DNA, 120 bp, Artificial Sequence
  ENSG00000163362_34 (sequence is synthesized)
ccttcttgcgtcttcccctctttcctctgggccttggtatgccccaggggacagatgtcttgggatctttaacatttgggatgctgcaaatgccgaagttaaatgaaatacctccgggga

SEQ ID NO: 495908 - DNA, 120 bp, Artificial Sequence
  ENSG00000163362_35 (sequence is synthesized)
gggcaggccgcagggaggctcggggggagggaagatggcctggacaaacaggtcctgaagctgcgaggctggagtggagggcgcaggggcaggcgggcggcgccagagctccatgggaca

SEQ ID NO: 495909 - DNA, 120 bp, Artificial Sequence
  ENSG00000163362_36 (sequence is synthesized)
agtacaggtgaagacagagctgtggagaggagacaactggtgtagttgctgactttcccacatcaggaatcaagatcccactggccaacttcaggccctgggatctaaagtcctgttgtg

SEQ ID NO: 495910 - DNA, 120 bp, Artificial Sequence
  ENSG00000163362_37 (sequence is synthesized)
ggatctaaagtcctgttgtgagagcacagaagggatcagttctagacaattccatccaggtcactttaggcttattctcaagatctgaaggcctggccgggtgtggtggctcacgcctgt

SEQ ID NO: 495911 - DNA, 120 bp, Artificial Sequence
  ENSG00000163362_38 (sequence is synthesized)
ccactgctctccagcctggagctcagtgcctctgatgacagctccctgtcagatgggctcctcctggaggaagggaaaggaaaggtgaactccaagagagctgatcaaccccagatgtcc

SEQ ID NO: 495912 - DNA, 120 bp, Artificial Sequence
  ENSG00000163362_39 (sequence is synthesized)
ccagggccggggagaggggccatccccgcgcgacccgcagcgccgcacagcgagggggagggcgcctgcggggaggacagggtcgggggagcgcccttccgcaggctcctttcattcttc

SEQ ID NO: 495913 - DNA, 120 bp, Artificial Sequence
  ENSG00000163362_40 (sequence is synthesized)
gcaggctcctttcattcttccacttaggggtctccaggaatgaaaactggccccagccaggccagagcgcgcgaatgaaaggcggcactgggaccaagagagaagcttcgtcccgcctgg

SEQ ID NO: 495914 - DNA, 120 bp, Artificial Sequence
  ENSG00000163374_0 (sequence is synthesized)
cctcgatcccctcgccgcggtcccatggaggaggaggcgagccgcagcgccgcggcgacgaacccagggagtcggcttacccgctggccgcctcctgacaagcgggagggatccgcggtg

SEQ ID NO: 495915 - DNA, 120 bp, Artificial Sequence
  ENSG00000163374_1 (sequence is synthesized)
gacccagggaagcggaggagcctggcggccaccccctcttcctcacttccctgtactctcatcgctctcggcctccgacacgaaaaggaagcaaatgagctgatggaagatctgtttgaa

SEQ ID NO: 495916 - DNA, 120 bp, Artificial Sequence
  ENSG00000163374_2 (sequence is synthesized)
actttccaagatgagatgggattctccaacatggaagatgatggcccagaagaggaggagcgtgtggctgagcctcaagctaactttaacacccctcaagctctacggtttgaggaacta

SEQ ID NO: 495917 - DNA, 120 bp, Artificial Sequence
  ENSG00000163374_3 (sequence is synthesized)
ctggccaacctactaaatgaacaacatcagatagcgaaggaactatttgaacagctgaagatgaagaaaccttcagccaaacagcagaaggaggtagagaaggttaaaccccagtgtaag

SEQ ID NO: 495918 - DNA, 120 bp, Artificial Sequence
  ENSG00000163374_4 (sequence is synthesized)
gaagttcatcagaccctgattctggacccagcacaaaggaagagactccagcagcagatgcagcagcatgttcagctcttgacacaaatccaccttcttgccacctgcaaccccaatctc

SEQ ID NO: 495919 - DNA, 120 bp, Artificial Sequence
  ENSG00000163374_5 (sequence is synthesized)
aatccggaggccagtagcaccaggatatgtcttaaagagctgggaacctttgctcaaagctccatcgcccttcaccatcagtacaaccccaagtttcagaccctgttccaaccctgtaac

SEQ ID NO: 495920 - DNA, 120 bp, Artificial Sequence
  ENSG00000163374_6 (sequence is synthesized)
ttgatgggagctatgcagctgattgaagacttcagcacacatgtcagcattgactgcagccctcataaaactgtcaagaagactgccaatgaatttccctgtttgccaaagcaagtggct

SEQ ID NO: 495921 - DNA, 120 bp, Artificial Sequence
  ENSG00000163374_7 (sequence is synthesized)
tggatcctggccacaagcaaggttttcatgtatccagagttacttccagtgtgttccctgaaggcaaagaatccccaggataagatcctcttcaccaaggctgaggacaacaagtacctt

SEQ ID NO: 495922 - DNA, 120 bp, Artificial Sequence
  ENSG00000163374_8 (sequence is synthesized)
ctaacctgcaagactgcccgccaactgacagtgagaatcaagaacctcaacatgaacagagctcctgacaacatcattaaattttataagaagaccaaacagctgccagtcctaggaaaa

SEQ ID NO: 495923 - DNA, 120 bp, Artificial Sequence
  ENSG00000163374_9 (sequence is synthesized)
tgctgtgaagagatccagccacatcagtggaagccacctatagagagagaagaacaccggctcccattctggttaaaggccagtctgccatccatccaggaagaactgcggcacatggct

SEQ ID NO: 495924 - DNA, 120 bp, Artificial Sequence
  ENSG00000163374_10 (sequence is synthesized)
tgctattgcctaagggtgtagtcctgaaactgaagccagttgccgaccgtttccccaagaaggcttggagacagaagcgttcatcagtcctgaaacccctccttatccaacccagcccct

SEQ ID NO: 495925 - DNA, 120 bp, Artificial Sequence
  ENSG00000163374_11 (sequence is synthesized)
ctctccagcccagcttcaaccctgggaaaacaccagcccaatcaactcattcagaagcccctccgagcaaaatggtgctccggattcctcacccaatacagccagccactgttttacaga

SEQ ID NO: 495926 - DNA, 120 bp, Artificial Sequence
  ENSG00000163374_12 (sequence is synthesized)
cagttccaggtgtccctccactgggggtcagtggaggtgagagttttgagtctcctgcagcactgcctgctatgccccctgaggccaggacaagcttccctctgtctgagtcccagactt

SEQ ID NO: 495927 - DNA, 120 bp, Artificial Sequence
  ENSG00000163374_13 (sequence is synthesized)
tgctctcttctgcccctgtgcccaaggtaatgatgccctcccctgcctcttccatgtttcgaaagccatatgtgagacggagaccctcaaaaagaaggggagccagggcctttcgctgta

SEQ ID NO: 495928 - DNA, 120 bp, Artificial Sequence
  ENSG00000163374_14 (sequence is synthesized)
tcaaacctgcccctgttatccaccctgcatctgttatcttcactgttcctgctaccactgtgaagattgtgagccttggcggtggctgtaacatgatccagcctgtcaatgcggctgtgg

SEQ ID NO: 495929 - DNA, 120 bp, Artificial Sequence
  ENSG00000163374_15 (sequence is synthesized)
cccagagtccccagactattcccatcgccaccctcttggttaaccctacttccttcccctgtccattgaaccagccccttgtggcctcctctgtctcacccttaattgtttctggcaatt

SEQ ID NO: 495930 - DNA, 120 bp, Artificial Sequence
  ENSG00000163374_16 (sequence is synthesized)
ctgtgaatcttcctataccatccacccctgaagataaggcccacatgaatgtggacattgcttgtgctgtggctgatggggaaaatgcctttcagggcctagaacccaaattagagcccc

SEQ ID NO: 495931 - DNA, 120 bp, Artificial Sequence
  ENSG00000163374_17 (sequence is synthesized)
aggaactatctcctctctctgctactgttttccccaaagtggaacatagcccagggcctccaccagtcgataaacagtgccaagaaggattgtcagagaacagtgcctatcgctggaccg

SEQ ID NO: 495932 - DNA, 120 bp, Artificial Sequence
  ENSG00000163374_18 (sequence is synthesized)
ttgtgaaaacagaggagggaaggcaagctctggagccgctccctcagggcatccaggagtctctaaacaactcttcccctggggatttagaggaagttgtcaagatggaacctgaagatg

SEQ ID NO: 495933 - DNA, 120 bp, Artificial Sequence
  ENSG00000163374_19 (sequence is synthesized)
ctacagaggaaatcagtggatttctttgagctaggagaataagagtctggagactgggagccttcacttcggcctccgattggtggcgcatagggtgtaaccaataggaaacccctaaag

SEQ ID NO: 495934 - DNA, 120 bp, Artificial Sequence
  ENSG00000163374_20 (sequence is synthesized)
ggtacttaaaccccagattttgcaactggggctcttgagcagcttgctttagcctgctcccactctgtggaatatacttttgcttcaataaatctgtgcttttattgcttcattgtttca

SEQ ID NO: 495935 - DNA, 120 bp, Artificial Sequence
  ENSG00000163374_21 (sequence is synthesized)
aacgatcccagtgtcggttgcgggatccgcctcctctcagtttgcccctttagccctccacctttcccttctcctctctcgcatttccgccagtcggcttacccgctggccgcctcctga

SEQ ID NO: 495936 - DNA, 120 bp, Artificial Sequence
  ENSG00000163374_22 (sequence is synthesized)
gtagggtgggggtgctggcggcggctgctttggcggcggttggtggccgtgcgggcggggagggagggggaggagagaagaggaggtggagaaggcttgggctcgcgccgctgaagtcgg

SEQ ID NO: 495937 - DNA, 120 bp, Artificial Sequence
  ENSG00000163374_23 (sequence is synthesized)
acgcgtgagggcctgcgctggagccggcttgacagggtctgagggggagtggagaactgggcgaggaggttcccgtgggtgagcgcgtacgggatggctggctcgcaggacggccgaagg

SEQ ID NO: 495938 - DNA, 120 bp, Artificial Sequence
  ENSG00000163374_24 (sequence is synthesized)
tggtggttggtgggagcagccagcgacgagcccgtagacactcgtacgcgtgcgggctgacgtgcgcgctacatggccggagtcgggcgaagcgggggaccgtggggaagaacgcgagga

SEQ ID NO: 495939 - DNA, 120 bp, Artificial Sequence
  ENSG00000163374_25 (sequence is synthesized)
gggaggagtgggaggttgggggtgtcgctaggcgcccttagctccctccctctggaggagctgccgcggccactctgctgccgccgctgccgccgccattttgggttcgctttgcgaggg

SEQ ID NO: 495940 - DNA, 120 bp, Artificial Sequence
  ENSG00000163374_26 (sequence is synthesized)
ctggttaaaggtacagccctcttcctcgaagtctgtaggaggcagaaggtcactgaaagttctgagagaatatcaaggacttccttaatcgtctaatgctttagttgtagaactaggact

SEQ ID NO: 495941 - DNA, 120 bp, Artificial Sequence
  ENSG00000163374_27 (sequence is synthesized)
tcaggaatcttcctgattcacctttcttcccttacttttctgcccttctccgggtgattctacaacattttcaaaataatgggtaaaatggtaatttgctaaaggaaattcagagaagag

SEQ ID NO: 495942 - DNA, 120 bp, Artificial Sequence
  ENSG00000163374_28 (sequence is synthesized)
tttctaaagtgtataattggactgtggtctttgtagaaatttcatatgcagagtcccttggaaagatgccttgagcttgtctcaggtccctaaacttagaaagtcctattctttttccca

SEQ ID NO: 495943 - DNA, 120 bp, Artificial Sequence
  ENSG00000163374_29 (sequence is synthesized)
taggatacttgcctaggaatggaggacacaggacatttgtaatttcttccttctctcttttatcctccctttgtactcattatccaagttctagaattacatgataatctccgggcctgg

SEQ ID NO: 495944 - DNA, 120 bp, Artificial Sequence
  ENSG00000163374_30 (sequence is synthesized)
ttaaaggggaaaggaggtaaaacatttttgagcatacactatgtgacaggtattactaggtactttttaagtgtttgttttactttgtgaataaagtgttacacgtaagaaagagtaaga

SEQ ID NO: 495945 - DNA, 120 bp, Artificial Sequence
  ENSG00000163374_31 (sequence is synthesized)
gaggccgggcgccgtggcttacgcctgtaatccaacactttaggaggccgaggctgtcggatgacaaggtcaggagatcaagaccatcctgtctacagtgaaaccccgtctctactaaaa

SEQ ID NO: 495946 - DNA, 120 bp, Artificial Sequence
  ENSG00000163374_32 (sequence is synthesized)
actccgtctaaaaaaaaaaaaaaaaaaagtcaacttttattgccagtgaatgggactccctttagacctaatgttagttgaggaaagactgtggaaactctttggggagtggtaggcaga

SEQ ID NO: 495947 - DNA, 120 bp, Artificial Sequence
  ENSG00000163374_33 (sequence is synthesized)
ggaaactctttggggagtggtaggcagatgggagggaatcaagttagataaggacagctctacctaaatgcaaaaatgcattcacaggctttttgaagccctcttttttcctagaagttg

SEQ ID NO: 495948 - DNA, 120 bp, Artificial Sequence
  ENSG00000163374_34 (sequence is synthesized)
gcgtgagggcctgcgctggagccggcttgacagggtctgagggggagtggagaactgggcgaggaggttcccgtggtcggcttacccgctggccgcctcctgacaagcgggagggatccg

SEQ ID NO: 495949 - DNA, 120 bp, Artificial Sequence
  ENSG00000163376_0 (sequence is synthesized)
gaaatgacatttcctttttaaatagctggagtcggggccccatcgagaaatggccgcgtcggcagatttaagtaagtcttccccaacaccgaatgggattccatcttcagacccagccag

SEQ ID NO: 495950 - DNA, 120 bp, Artificial Sequence
  ENSG00000163376_1 (sequence is synthesized)
cgatgccatggaccccttccatgcttgcagtattcttaagcaactcaaaacaatgtacgatgaaggacagttgacagacattgtagtggaagtggatcacgggaaaacattttcctgtca

SEQ ID NO: 495951 - DNA, 120 bp, Artificial Sequence
  ENSG00000163376_2 (sequence is synthesized)
tagaaacgttcttgctgcaatcagcccttacttcagatccatgttcactagcggccttacagaaagtactcaaaaagaagttcgaatagttggtgttgaagctgaatcgatggatttagt

SEQ ID NO: 495952 - DNA, 120 bp, Artificial Sequence
  ENSG00000163376_3 (sequence is synthesized)
gttgaactatgcctacacttccagagttattcttacagaggccaatgttcaagccttgttcactgcagctagcatcttccagattccttccatccaagaccaatgtgctaagtatatgat

SEQ ID NO: 495953 - DNA, 120 bp, Artificial Sequence
  ENSG00000163376_4 (sequence is synthesized)
cagtcatttggacccacagaattctattggggtctttatctttgctgatcattatggtcatcaggaactcggagatcgatcaaaagaatacattcgtaaaaagtttctgtgtgtcaccaa

SEQ ID NO: 495954 - DNA, 120 bp, Artificial Sequence
  ENSG00000163376_5 (sequence is synthesized)
agaacaagagtttctccagttgacaaaagaccaactgataagtatactagacagtgacgatttaaatgtagaccgagaagagcatgtttatgaaagcattataaggtggtttgagcatga

SEQ ID NO: 495955 - DNA, 120 bp, Artificial Sequence
  ENSG00000163376_6 (sequence is synthesized)
acagaatgaaagagaagtgcaccttccagaaatttttgctaaatgcatacgttttcctctgatggaagatacctttatagagaaaattccacctcagtttgcacaggctatagccaaaag

SEQ ID NO: 495956 - DNA, 120 bp, Artificial Sequence
  ENSG00000163376_7 (sequence is synthesized)
ctgtgtagaaaagggaccatccaacaccaatggctgtacacagaggcttggaatgactgcttctgaaatgatcatatgttttgatgctgcccacaaacactcaggaaagaagcaaacagt

SEQ ID NO: 495957 - DNA, 120 bp, Artificial Sequence
  ENSG00000163376_8 (sequence is synthesized)
gccttgtctagatatagtcacaggaagggtgtttaaactatgcaaaccaccaaatgacctgagagaagttgggattcttgtatcaccagataatgacatttacattgcaggagggtacag

SEQ ID NO: 495958 - DNA, 120 bp, Artificial Sequence
  ENSG00000163376_9 (sequence is synthesized)
gccaagcagcagtgaggtctccatcgaccataaggcagaaaatgatttctggatgtatgatcattccaccaatagatggctatccaaaccatccttgcttcgagccagaataggctgcaa

SEQ ID NO: 495959 - DNA, 120 bp, Artificial Sequence
  ENSG00000163376_10 (sequence is synthesized)
acttgtctattgctgtggtaaaatgtatgcaatcggaggtcgtgtttatgaaggtgatgggagaaactcactaaaatctgttgagtgctacgacagtagagagaattgttggacgactgt

SEQ ID NO: 495960 - DNA, 120 bp, Artificial Sequence
  ENSG00000163376_11 (sequence is synthesized)
ttgcgcgatgccagttgcaatggaatttcataatgctgtggagtacaaagagaagatctatgttttacagggagaattttttctcttctatgagcctcaaaaagactactggggtttctt

SEQ ID NO: 495961 - DNA, 120 bp, Artificial Sequence
  ENSG00000163376_12 (sequence is synthesized)
aacccccatgactgtgcctagaatccagggcttagcagctgtatacaaggactctatctactacatagctggaacctgtggaaatcatcaacgtatgtttactgtagaagcctatgatat

SEQ ID NO: 495962 - DNA, 120 bp, Artificial Sequence
  ENSG00000163376_13 (sequence is synthesized)
tgagctaaataaatggactcgtaagaaagactttccatgtgatcagtccataaatccataccttaaactggtacttttccagaacaaactccatttatttgttcgagctactcaagtgac

SEQ ID NO: 495963 - DNA, 120 bp, Artificial Sequence
  ENSG00000163376_14 (sequence is synthesized)
tgttgaagaacacgtcttcagaaccagcagaaaaaattccctttaccaatatgatgacattgctgaccagtggatgaaagtgtatgagaccccagatcggctctgggaccttggccggca

SEQ ID NO: 495964 - DNA, 120 bp, Artificial Sequence
  ENSG00000163376_15 (sequence is synthesized)
ttttgaatgtgctgttgctaaactgtatcctcagtgtcttcagaaagtactctaaatgagtagcaggccttagtgcatcactggcatctcattcttaggaaacttgtctttgatacaaaa

SEQ ID NO: 495965 - DNA, 120 bp, Artificial Sequence
  ENSG00000163376_16 (sequence is synthesized)
gagtgctgacagtatttcagaaagctgagagagttttatacatggaaaatgggtatgcttaaagattgcagggtagggagggattttccttcatccttgtgacatttcatttcagtaagg

SEQ ID NO: 495966 - DNA, 120 bp, Artificial Sequence
  ENSG00000163376_17 (sequence is synthesized)
aaaagataacaaagtgcaattatcagcatttttttttcctggcataaaattaatcatttcattttataattttgtgataaatagtaactgaggtaccagatgaatcaggacaactatgca

SEQ ID NO: 495967 - DNA, 120 bp, Artificial Sequence
  ENSG00000163376_18 (sequence is synthesized)
ctcttataagagcatttagggtattattgggtaaagacgtctaaacttgtttgatgtgacttttaattttaaatacgggtaacaatctgaggcaatatcactaggactttagctgtgacc

SEQ ID NO: 495968 - DNA, 120 bp, Artificial Sequence
  ENSG00000163376_19 (sequence is synthesized)
tctctaacacagagaagcactaacttagatcctcattcttaatatttatatgtatctatttttgtgtactgttttcaagtgtactgagatttaaatgtgttctattattagagtagatcg

SEQ ID NO: 495969 - DNA, 120 bp, Artificial Sequence
  ENSG00000163376_20 (sequence is synthesized)
aagaaaaaattagtctcagaaagagcttttagtctgattgtttccatttcccatgtaattttaagttaagctaaagttttaaagtggcagttttctgtcgatgactttttcaagtgctaa

SEQ ID NO: 495970 - DNA, 120 bp, Artificial Sequence
  ENSG00000163376_21 (sequence is synthesized)
cactgtctcttttgtgaaaatctggaaaagtgctcatattcacaggtggctggtgctagtctaacttaattcatgtgtataactagatggatttaaatggtctgagcctatgcctatctt

SEQ ID NO: 495971 - DNA, 120 bp, Artificial Sequence
  ENSG00000163376_22 (sequence is synthesized)
tcaaattggtgtggatttcatggccatagtactttacctgttgaactcttgtgatttcacaagattctctacttatgtgataggagggtatggccagttattcatctaactggactcaat

SEQ ID NO: 495972 - DNA, 120 bp, Artificial Sequence
  ENSG00000163376_23 (sequence is synthesized)
cttagaatagtaggaacattatacccagtttgcactaacatgggccatttgtagcccaaccttctcttccatctacctgtccattcattattggtacaaggaaaggtaacttatttctct

SEQ ID NO: 495973 - DNA, 120 bp, Artificial Sequence
  ENSG00000163376_24 (sequence is synthesized)
tctgcacagagcataatgtgaagttttatacctacttttaaaattctgctttccagaaacaaaattcctgcagtggtctaatttaatgtctttaagtttcatattacaattaaaacctca

SEQ ID NO: 495974 - DNA, 120 bp, Artificial Sequence
  ENSG00000163376_25 (sequence is synthesized)
ttttttttttccatttttgcacttaacagtgatgaatacttttacgttggaatcctccttctagctgaaggtgattgaaaaggaaaagagtgagtgaacagaaccatagctttctaggta

SEQ ID NO: 495975 - DNA, 120 bp, Artificial Sequence
  ENSG00000163376_26 (sequence is synthesized)
ctaaagcattttttgcatttaactgatgaaatttctaacaatcatcagttaggaatattaacatgaaggataaaccaacttatttgtatacctaaggcaggcatttggatcagtaacatg

SEQ ID NO: 495976 - DNA, 120 bp, Artificial Sequence
  ENSG00000163376_27 (sequence is synthesized)
ttttactaagcctagagtaattcgtaaagggtataagcataggacagattttgccctcaatcacaatatttgtattcacttgaaagcaaactggcatggttcgtattttaaaaatcttgc

SEQ ID NO: 495977 - DNA, 120 bp, Artificial Sequence
  ENSG00000163376_28 (sequence is synthesized)
acaaattgtaatgtgatactgtgaaacaaattgaaaacattgcctctttgcatcacatacctcgtttttcagaaactttccaaactgctttacatagacctctacaagtagggaatgttt

SEQ ID NO: 495978 - DNA, 120 bp, Artificial Sequence
  ENSG00000163376_29 (sequence is synthesized)
tctgaagcagaagttaaaatggacagcatttctagaattaacattttaaaatctagtcttagctagatatgtggtttcttcttattggtgttgatagtatgtctgtaatctctgtataaa

SEQ ID NO: 495979 - DNA, 120 bp, Artificial Sequence
  ENSG00000163376_30 (sequence is synthesized)
ctttgtcaacatttttacctccccagttttatcttctgttttgtttttgtttttatcatcatgatgttttggagttattactgtgtattttagaaatcattctttacagttttgcattgc

SEQ ID NO: 495980 - DNA, 120 bp, Artificial Sequence
  ENSG00000163376_31 (sequence is synthesized)
tgaggagagagaaaaaacaatttttttgcaagagatgttcatgtaatttatttttgaaagctttgttgaataagatttcctgccgctttttgacaatcttgtgtatttagaaaaatgtat

SEQ ID NO: 495981 - DNA, 120 bp, Artificial Sequence
  ENSG00000163376_32 (sequence is synthesized)
tacttgaaaacatgacatagaacattgagttagcaatttacatgggctgtatgttatataagagaatgacatactgtggctaattcaacagtagatttattcttttagcctgcacaacag

SEQ ID NO: 495982 - DNA, 120 bp, Artificial Sequence
  ENSG00000163376_33 (sequence is synthesized)
ttgatcttttggctatgacaatttgtatggagggtacgatctaagttaagtgtgtcaaaagcaaggcttaggatttgttatgggagtagaatatatattgaattttgtatgaagaactat

SEQ ID NO: 495983 - DNA, 120 bp, Artificial Sequence
  ENSG00000163376_34 (sequence is synthesized)
ttgtttaaattatatagctgggatattttgccactgttaaaatggattcagaagaggtcctagaaaagtaagattagtgacatgtgtgggtttatatttagatatttaaggtgcattttc

SEQ ID NO: 495984 - DNA, 120 bp, Artificial Sequence
  ENSG00000163376_35 (sequence is synthesized)
atagtgtggtaagaccttaagtaaaaggcacaatgggtactacagaattaaaatgtaggtctaacataatgccagttccactttaactttgtttttgcatttgaagaatgtatgtagcac

SEQ ID NO: 495985 - DNA, 120 bp, Artificial Sequence
  ENSG00000163376_36 (sequence is synthesized)
tttcctatatatttgtcacacattgaaaactggactgggtataactatgttataggaaagtagaaattgtattctttattttccatctttgttttctgttctacaaagttgatgcttaag

SEQ ID NO: 495986 - DNA, 120 bp, Artificial Sequence
  ENSG00000163376_37 (sequence is synthesized)
catcaagctgattttattggtcatgagaacaaatggatgtgatcatgaaggaatcagattccctatgtaaagcagtttaaaatggaattcaatgttcagtgctcaggtatgtagtaagta

SEQ ID NO: 495987 - DNA, 120 bp, Artificial Sequence
  ENSG00000163376_38 (sequence is synthesized)
ctgtagtcctgtgggggcaaatgtgtagatatttttaaacattttgccataattgcacaattttttgcatttttacctgatgtcattgtttcttataataaaaccttttctgattgaaaa

SEQ ID NO: 495988 - DNA, 120 bp, Artificial Sequence
  ENSG00000163377_0 (sequence is synthesized)
gcactgctagctgcgcgccgccctggacggggcgcaccgactgcgcgcgcggctgcgggcaaacatcgggagtcctgcctcagctgccgcttctccagcagcagcttcaggcttctcccg

SEQ ID NO: 495989 - DNA, 120 bp, Artificial Sequence
  ENSG00000163377_1 (sequence is synthesized)
caggagcttcgggcttctcctggtagagacgtgggaacttttcttctcctggcgaggctgcagaggtgatgggccgctcccggggctcccgcggggaggcggcacggtgagcgtcctcgg

SEQ ID NO: 495990 - DNA, 120 bp, Artificial Sequence
  ENSG00000163377_2 (sequence is synthesized)
gctccggtgcggcgatcagtacctagttccggacgcgccggtccgacttggatgccggctctagtcgagtcttctgagctacgataattttttggaacggcagaaatgattggttctagc

SEQ ID NO: 495991 - DNA, 120 bp, Artificial Sequence
  ENSG00000163377_3 (sequence is synthesized)
aacagatgggaatttggagtcactctgaaatatatcctggaataagtgtgtttgactagaaccacatcttatgaggtccccaaggatgagagtctgtgctaagtcagtgttgctgtcgca

SEQ ID NO: 495992 - DNA, 120 bp, Artificial Sequence
  ENSG00000163377_4 (sequence is synthesized)
ctggctctttctagcctacgtgttaatggtgtgctgtaagctgatgtccgcctcaagccagcacctccggggacatgcaggtcaccaccaaatcaagcaagggacctgtgaggtggtcgc

SEQ ID NO: 495993 - DNA, 120 bp, Artificial Sequence
  ENSG00000163377_5 (sequence is synthesized)
cgtgcacaggtgctgcaataagaaccgcatagaagagcggtcacaaacggtcaagtgctcttgcttcccgggacaggtggcgggcacaactcgggctcaaccttcttgtgttgaagcttc

SEQ ID NO: 495994 - DNA, 120 bp, Artificial Sequence
  ENSG00000163377_6 (sequence is synthesized)
cattgtgattcagaaatggtggtgtcacatgaatccgtgtttggaaggagaggattgtaaagtgctgccagattactcaggttggtcctgtagcagtggcaataaagtcaaaactacgaa

SEQ ID NO: 495995 - DNA, 120 bp, Artificial Sequence
  ENSG00000163377_7 (sequence is synthesized)
ggtaacgcggtagcgaagagagaggtgtgcttcaatcctggaggggcagcaggaggcggagctcttttgcttggattcccatcatggcccctttgcagaaaattgtctaggatttcagca

SEQ ID NO: 495996 - DNA, 120 bp, Artificial Sequence
  ENSG00000163377_8 (sequence is synthesized)
acttcatatttgtatatgtgagctgtgagaggtggcattcacttaactggcccagccctctctgcttcgtgattttatttcattgaattataaccacaagccaccacccatttgacatcc

SEQ ID NO: 495997 - DNA, 120 bp, Artificial Sequence
  ENSG00000163377_9 (sequence is synthesized)
ccactaagggcatgttcattcttcactttctttctgcttttacaaaagaacttggatgtatgttccaaagggtcctcattctgttcctcttttgaacttttccttttgtccttgtattaa

SEQ ID NO: 495998 - DNA, 120 bp, Artificial Sequence
  ENSG00000163377_10 (sequence is synthesized)
agtggttttaaaggggtctaaaaagattttggcaaaacatatttgcagatgtagattagctggtgaagaaaattactgctagagatcaactgattaactggtaaagaacgtttattttat

SEQ ID NO: 495999 - DNA, 120 bp, Artificial Sequence
  ENSG00000163377_11 (sequence is synthesized)
aacccttgaagaatagaaggacatagttggattattgtgtgtgcattgtatttttacttctattttttttttgctttccattttccagttagcagagataaaatgagagcgttttaactt

SEQ ID NO: 496000 - DNA, 120 bp, Artificial Sequence
  ENSG00000163377_12 (sequence is synthesized)
caatgtaccattttactgagtgctaaggaagcatatcaattccaatattttataaccaaagctctatcagaacatatttataaaacttgttggaatttttacggcttttgtgtagtcatg

SEQ ID NO: 496001 - DNA, 120 bp, Artificial Sequence
  ENSG00000163377_13 (sequence is synthesized)
taggtaaatcatttaaaatataaaacaatctcaatttagatcaagggttatttcttagatcaaatttatgccaattatatgaaaagattttaactccgagacaggagtctttcagtgctg

SEQ ID NO: 496002 - DNA, 120 bp, Artificial Sequence
  ENSG00000163377_14 (sequence is synthesized)
aatttttagactgtaaatgagttcttcttaacttagctgtttccctacttctgtgacttctgtgttagccatcttatttctttaaaatctgagtcctgattggcttaatgattttgcagc

SEQ ID NO: 496003 - DNA, 120 bp, Artificial Sequence
  ENSG00000163377_15 (sequence is synthesized)
agacatgtctccacatattctcaaatgctgtcatgcggaaacgtatgaaacagatgaagaatgactgacccagattttagatgtataatgttgttaaagtacatactactgtaaaaatat

SEQ ID NO: 496004 - DNA, 120 bp, Artificial Sequence
  ENSG00000163377_16 (sequence is synthesized)
gggatgaattttatatattaagaaatgccaaaaacatagtttctgcaccaagttaattatccctgtcctttcacatttatagggggaaaataaatactttaatgttgtttatagcctaac

SEQ ID NO: 496005 - DNA, 120 bp, Artificial Sequence
  ENSG00000163377_17 (sequence is synthesized)
agttatttgattttattcttgcagagggaatggaaaggaatggaaagatttgttggcgtaatttttgaatatttgttatgatcatatgaataagtaaaaaaattcatcctgctgatggca

SEQ ID NO: 496006 - DNA, 120 bp, Artificial Sequence
  ENSG00000163377_18 (sequence is synthesized)
gggggcagtgaatgaatttggcatttatttccttaaacttgtaaggaaagtgaaagtgtaaagataagaaatatgactttaaaataaaaaagtctttggttgtaatcattcgtcatgcct

SEQ ID NO: 496007 - DNA, 120 bp, Artificial Sequence
  ENSG00000163377_19 (sequence is synthesized)
ctgatacagatttccagtcttagatataaatatttcaggatcgagacgctttcatctttctctgccttgcaagaagggaagattggaaacaatcttccttaaagtaagcagctttaatca

SEQ ID NO: 496008 - DNA, 120 bp, Artificial Sequence
  ENSG00000163377_20 (sequence is synthesized)
ttgtttctaaatcaactgaactgtgtagggaaaaaaagaagatgtaagaatcctataatccctggtttagttgtaatgaaaatgtccaggctgagaagggaacagatggattttgattaa

SEQ ID NO: 496009 - DNA, 120 bp, Artificial Sequence
  ENSG00000163377_21 (sequence is synthesized)
tttctactaagaccagcaagtatcaacctcaatattctttataaacttgtcagggtaaatgttatgtagtcataagagaatgaagaaaaaaagatttataactgggttatgaagagttaa

SEQ ID NO: 496010 - DNA, 120 bp, Artificial Sequence
  ENSG00000163377_22 (sequence is synthesized)
agaggatatacttaaaaacacgatccttagcaacatgtcaaaaatgcagattcattgaatcacggcaatttttttcagagactgtttcagatttgttcctttaaaacgaagttgatattt

SEQ ID NO: 496011 - DNA, 120 bp, Artificial Sequence
  ENSG00000163377_23 (sequence is synthesized)
agaggaaatggagaattattaatgaactatgtgatcgttgtgcctcccatcactggaatgtggaaacgtatatttactgcctgaaatgacttcacttgctgagctctgaaccacagtatt

SEQ ID NO: 496012 - DNA, 120 bp, Artificial Sequence
  ENSG00000163377_24 (sequence is synthesized)
tcataaatgattaacattagatggagtcagtgggaacctcacaacatttcttaaacagcattccacaagaaagaatttctcacaattgtaaggacttgcatgctggagagaaggcaagca

SEQ ID NO: 496013 - DNA, 120 bp, Artificial Sequence
  ENSG00000163378_0 (sequence is synthesized)
gccgtctcctccgcctcctcctcggtagttcacggctgccccggctccaggcctgtggaaatcgaatcaagggtttctggagtggagtgattccagctgctttgagctgaaggaaaagta

SEQ ID NO: 496014 - DNA, 120 bp, Artificial Sequence
  ENSG00000163378_1 (sequence is synthesized)
gcctggccagtaaagcgtccgtgtgctggaggagtgcagccacccatcccggcgggccttgcaggacgaccgacaccaggaaggctttgtgccaggcccagcagccacccccagccgcct

SEQ ID NO: 496015 - DNA, 120 bp, Artificial Sequence
  ENSG00000163378_2 (sequence is synthesized)
tatgcaagtgggtacatgccctcgccagacgccagctttctgatctgcgtctttagattttttccatcgcctaagcgttacttctccactgatcggttttagagacctgaaacatcacag

SEQ ID NO: 496016 - DNA, 120 bp, Artificial Sequence
  ENSG00000163378_3 (sequence is synthesized)
aagcttctgagtggttctgaagattcaagaggtttgcaggttgctatgttaatgttgtttgtctttggagtcttacttcatgaagtctcactgagtggtcagaatgaagctcctcctaat

SEQ ID NO: 496017 - DNA, 120 bp, Artificial Sequence
  ENSG00000163378_4 (sequence is synthesized)
actcacagcattccaggcgaacctctgtataactatgccagcatccgcttgccagaggagcacattcccttctttttgcacaacaataggcatattgccactgtctgtaggaaagactct

SEQ ID NO: 496018 - DNA, 120 bp, Artificial Sequence
  ENSG00000163378_5 (sequence is synthesized)
ctttgtccatataagaaacacctagagaagctaaagtactgctggggttatgagaaatcctgcaaaccagagttcaggtttggttacccagtttgcagctatgtcgacatgggatggacg

SEQ ID NO: 496019 - DNA, 120 bp, Artificial Sequence
  ENSG00000163378_6 (sequence is synthesized)
gacactcttgagtcagctgaggacatattttggaaacaagctgactttggatatgccagagagaggctggaggagatgcatgtgctctgtcagcctaaggaaacgagtgactcaagtctg

SEQ ID NO: 496020 - DNA, 120 bp, Artificial Sequence
  ENSG00000163378_7 (sequence is synthesized)
gtgtgttcccgttatcttcagtactgcagagcaaccaatctctatcttgatttaagaaacatcaagagaaatcatgacagatttaaggaggactttttccagagtggtgaaattggaggg

SEQ ID NO: 496021 - DNA, 120 bp, Artificial Sequence
  ENSG00000163378_8 (sequence is synthesized)
cactgtaaacttgacatccgtacattgacgtctgaaggtcagcgcaaaagccctctgcagtcatggtttgctgagctacaaagctatactcagctcaacttcagacctatagaagatgct

SEQ ID NO: 496022 - DNA, 120 bp, Artificial Sequence
  ENSG00000163378_9 (sequence is synthesized)
aaatgtgacattgtcattgaaaaaccaacatatttcatgaaattagatgcaggtgttaacatgtatcaccacttctgtgatttcatcaatctttatattactcagcacgttaataactca

SEQ ID NO: 496023 - DNA, 120 bp, Artificial Sequence
  ENSG00000163378_10 (sequence is synthesized)
ttcagtactgacgtgtacatcgtgatgtgggacaccgatggaaaaattcgagtcaccattcttgcacggagcacagaataccggaaaatccttaaccaaaatgagcttgtaaatgcactg

SEQ ID NO: 496024 - DNA, 120 bp, Artificial Sequence
  ENSG00000163378_11 (sequence is synthesized)
aaaacagtatctacatttgaagtccagattgttgattacaagtatagagaacttgggtttttagatcaactaaggatcacacacaacacggacatatttattggaatgcatggagctggt

SEQ ID NO: 496025 - DNA, 120 bp, Artificial Sequence
  ENSG00000163378_12 (sequence is synthesized)
ctgacccatttacttttccttccagactgggctgctgtatttgaactgtacaactgtgaagatgaacgctgttacttagacttggccaggctgagaggcgttcactacatcacttggcga

SEQ ID NO: 496026 - DNA, 120 bp, Artificial Sequence
  ENSG00000163378_13 (sequence is synthesized)
cggcagaacaaagtctttcctcaggataagggccaccatccaaccctgggggagcacccgaagttcaccaactactctttcgatgtagaagaatttatgtatcttgtccttcaggctgca

SEQ ID NO: 496027 - DNA, 120 bp, Artificial Sequence
  ENSG00000163378_14 (sequence is synthesized)
gaccacgtattgcaacacccaaagtggccatttaagaagaaacatgatgagctataaatatgctgagtctgtttgcaaaaagagagtgtttaaacactccaacacccagacttagaatta

SEQ ID NO: 496028 - DNA, 120 bp, Artificial Sequence
  ENSG00000163378_15 (sequence is synthesized)
aatcagtaaagcaatctgttatttcctatccccgaattaccttttctatgccaaaacataccttcaggatattgttatgtgttgtatagatgttaagtgtttcatgtggtttttgtgtca

SEQ ID NO: 496029 - DNA, 120 bp, Artificial Sequence
  ENSG00000163378_16 (sequence is synthesized)
ttgctatttatcaatagcaataattttgcactgaaaactttttatagttcaaaaattaagcatggactccccagtatactttaactttctttctttctttttttttttttggagacagag

SEQ ID NO: 496030 - DNA, 120 bp, Artificial Sequence
  ENSG00000163378_17 (sequence is synthesized)
ctccccaggttcaagcgattcttttgcctcagccacctgactagctgggattgcagcctgcaccaccacacctggctaaatttttgttgttgtcgttgagatacagtttcactctgtcac

SEQ ID NO: 496031 - DNA, 72 bp, Artificial Sequence
  ENSG00000163378_18 (sequence is synthesized)
ttacaggcgtgcaccaccacgcccagttgatttttgtatttttggttcaagaaatcctcccaccttgcctcc

SEQ ID NO: 496032 - DNA, 120 bp, Artificial Sequence
  ENSG00000163378_19 (sequence is synthesized)
agccaccacgcatggccctgaactttctctttttaggaataccaaagttttcaactttttcagctttagaatttgtaaatatttttgtagaatatcatatgactgtaattccagagtgtt

SEQ ID NO: 496033 - DNA, 120 bp, Artificial Sequence
  ENSG00000163378_20 (sequence is synthesized)
ccaacttgtttatgatatatttgggtaaatttacaactgttcttttatttgccataatctggttataacactgtttgtggtaggaaaggaaaacatgcaaaacatacacacacacacaca

SEQ ID NO: 496034 - DNA, 120 bp, Artificial Sequence
  ENSG00000163378_21 (sequence is synthesized)
cacacacacacacacgcagagttgtgattctcagtaccaagctataggaccatgttatagatcagcgtttagtcacctccaggttatatgcatcgagaacctgaataaatcatgccacta

SEQ ID NO: 496035 - DNA, 120 bp, Artificial Sequence
  ENSG00000163378_22 (sequence is synthesized)
tattaatttatattacatgtttcatatttaaatcatgttttcctaaaatgtagcaactacatgtgataaaagcaaattagaacattctgtaggactgtcttgcataccttctgtctggtt

SEQ ID NO: 496036 - DNA, 120 bp, Artificial Sequence
  ENSG00000163378_23 (sequence is synthesized)
tccactgattccttcttagccatggagagcatttgtgattaattaatttatatatgaaataatggtttccattttatgcgagtatttgtaactgcatataccagtgcgtgtgcgtctacc

SEQ ID NO: 496037 - DNA, 120 bp, Artificial Sequence
  ENSG00000163378_24 (sequence is synthesized)
tctgtcagcatgaaagtattccagtctttaatttcaaaaacttcaaattagcctcatgaagagaatttttccctgtgaaaagtaagaccaagaaaaaacaaactaaagacatgtgactta

SEQ ID NO: 496038 - DNA, 120 bp, Artificial Sequence
  ENSG00000163378_25 (sequence is synthesized)
ttcaatgaaagtgaaaaagaagctctaaaacagtgtcattgattaaaaagaatatctggaatgtagccccactctttgagtgggattcatttcttactgcttatgaactttcaatttagt

SEQ ID NO: 496039 - DNA, 120 bp, Artificial Sequence
  ENSG00000163378_26 (sequence is synthesized)
agtcagaaaccatggatttattttactgcacaatgtgaagtttacattttattaacacttgagtagtctgatttagagactagttacttctattttttaaaataatggagtaacaaatta

SEQ ID NO: 496040 - DNA, 120 bp, Artificial Sequence
  ENSG00000163378_27 (sequence is synthesized)
cagaatagctaaataattttttaaaaatattttacagttgtaaaaaatatccatcagaaaaatgacacacaaaacaaaatatctggacctttacagaagacgtttgctgacccccacttt

SEQ ID NO: 496041 - DNA, 120 bp, Artificial Sequence
  ENSG00000163378_28 (sequence is synthesized)
aaaggattggaacagtcttctagaattgaggaatatttattaaaatacctgtaaagaaaatagtgaatcactgtagcaatggctttgattcagaccttaaaatcacataagaagaattac

SEQ ID NO: 496042 - DNA, 120 bp, Artificial Sequence
  ENSG00000163378_29 (sequence is synthesized)
aacatgttatggatttttaagtggcaggtattgtaactgttttttgtgtgcaaaatactgagtaaccactgggaaaatatttcagatgaaagggatgacaaaagcatgttgcgctttgca

SEQ ID NO: 496043 - DNA, 120 bp, Artificial Sequence
  ENSG00000163378_30 (sequence is synthesized)
tcagcaaggcattgacttctgaaaaaatgatctgaaaaaagtttcaccgtttgtcttcttacctcattttaagaagcatgtgaaaatgggatactatagactactgagaatttcagaaat

SEQ ID NO: 496044 - DNA, 120 bp, Artificial Sequence
  ENSG00000163378_31 (sequence is synthesized)
tgagaacaatttcataataaaacggctatatttgaagagagaatacattttatataaacaggaaaatacatttgacactttatggaattttatgagactttttgtgggaacagaaggtct

SEQ ID NO: 496045 - DNA, 120 bp, Artificial Sequence
  ENSG00000163378_32 (sequence is synthesized)
tcaaattgtaaaatgtaaagattgctctttttattaagtctttaacagggatgtatttcattgtatgttttgggtatggctttggaataaatcattttatattttatttgaatatcagaa

SEQ ID NO: 496046 - DNA, 120 bp, Artificial Sequence
  ENSG00000163378_33 (sequence is synthesized)
attctccgacacatggaatgcatttactgattatgacgttatacatttgaaaacttatgattccaaaagggtatgttttaaagaagctgttttttcattactcccccgcatgaggtatgg

SEQ ID NO: 496047 - DNA, 120 bp, Artificial Sequence
  ENSG00000163378_34 (sequence is synthesized)
gctgttctataatactcctctgatatctggctgtcaaaatactggactattcagggcatttgcccagcatgtactacacagactaaacatcacacaagaaggacctaaggatggaaaaat

SEQ ID NO: 496048 - DNA, 120 bp, Artificial Sequence
  ENSG00000163378_35 (sequence is synthesized)
aagggatattacaagaatgtgcttcctcctgtcctcctttcccccttcattggttatatctccctcacctccccaaatgttcatgtaacatacacaacccctgccaaaaaattcacccac

SEQ ID NO: 496049 - DNA, 120 bp, Artificial Sequence
  ENSG00000163378_36 (sequence is synthesized)
ccaaccaaacagacaatgtaatgagctggtttttgccttcggtggttgaagtggatacatttttattccctgagagtggtgaaggaatcaagctaaaaaagaagagttctattaatgtat

SEQ ID NO: 496050 - DNA, 120 bp, Artificial Sequence
  ENSG00000163378_37 (sequence is synthesized)
aaacagtatctacatttgaagtccagattgttgattacaagtataggtaagtaatagccaatctcagcagacactgtcaacttttgcttggatgaggtcaagggggctagaaagcatttt

SEQ ID NO: 496051 - DNA, 120 bp, Artificial Sequence
  ENSG00000163378_38 (sequence is synthesized)
attttcctgaaatgtctgtgaatatttcttgagtgcagatgactcactcataaaataaacatttattatgagttcctattagccattaccactgatttctgaatttctgaatttctttta

SEQ ID NO: 496052 - DNA, 120 bp, Artificial Sequence
  ENSG00000163378_39 (sequence is synthesized)
taattagaatcctcagtgttgttaatcatgcagcctttgaaaagttttttctataatctttccaaaaatatgaattctgttctctttgaatgaaatagtgtgctattcaagcaatgcaaa

SEQ ID NO: 496053 - DNA, 120 bp, Artificial Sequence
  ENSG00000163378_40 (sequence is synthesized)
atggagattaattaaaatctatttctcaaaattatacgtgctatttttggtgtgaagggtgcaaattacatcttcttttaatgtatctttgttcttaggtatgttttaaagaagctgttt

SEQ ID NO: 496054 - DNA, 120 bp, Artificial Sequence
  ENSG00000163380_0 (sequence is synthesized)
atcactcctagctgctcagcaaaccactgaggttcctgggaaaaaaaaaaaaatatctcaagggtgtgttaacttgggacactcgttaactgggggaccttcttgaggcttttttccttc

SEQ ID NO: 496055 - DNA, 120 bp, Artificial Sequence
  ENSG00000163380_1 (sequence is synthesized)
tttttaaaaatcatctttgattattcttcttttctagtaaaataatatttagaaaaaataatgtcagagcacagcagaaattcagatcaagaagaacttctcgatgaggagattaatgaa

SEQ ID NO: 496056 - DNA, 120 bp, Artificial Sequence
  ENSG00000163380_2 (sequence is synthesized)
gatgaaatcttggccaacttgtctgctgaagaactgaaagaactgcagtcggaaatggaagtcatggcccctgaccccagccttcccgtgggaatgattcagaaagatcaaactgacaag

SEQ ID NO: 496057 - DNA, 120 bp, Artificial Sequence
  ENSG00000163380_3 (sequence is synthesized)
ccaccgacaggaaacttcaatcataaatctcttgttgattatatgtattgggaaaaggcatccaggcgcatgctggaagaggaacgagttcctgtcacctttgtgaaatccgaggaaaag

SEQ ID NO: 496058 - DNA, 120 bp, Artificial Sequence
  ENSG00000163380_4 (sequence is synthesized)
actcaagaagagcatgaagaaatagaaaaacgtaataaaaatatggcccagtatttaaaagaaaagctcaataatgaaatagttgcaaataaaagagaatcaaagggcagcagcaatatc

SEQ ID NO: 496059 - DNA, 120 bp, Artificial Sequence
  ENSG00000163380_5 (sequence is synthesized)
caagaaacagatgaagaagatgaagaagaagaagatgatgatgatgacgacgaaggagaagatgatggtgaagagagtgaagaaacgaacagagaagaggaaggcaaagcaaaggaacaa

SEQ ID NO: 496060 - DNA, 120 bp, Artificial Sequence
  ENSG00000163380_6 (sequence is synthesized)
attagaaattgtgagaacaactgccagcaggtaactgacaaagcattcaaagaacagagagacagaccagaggcccaagaacaaagtgagaaaaaaatatcgaaattagatcctaagaag

SEQ ID NO: 496061 - DNA, 120 bp, Artificial Sequence
  ENSG00000163380_7 (sequence is synthesized)
ttagctctagacaccagctttttgaaggtaagtacaaggccttcaggaaaccagacagacctggatgggagcttgaggagagttaggaaaaatgatcctgacatgaaggaactcaacctg

SEQ ID NO: 496062 - DNA, 120 bp, Artificial Sequence
  ENSG00000163380_8 (sequence is synthesized)
aacaacattgaaaacatccccaaagaaatgttactggactttgtcaatgcaatgaagaaaaacaagcacatcaaaacattcagtttagccaatgtgggtgcagatgagaatgtagcattt

SEQ ID NO: 496063 - DNA, 120 bp, Artificial Sequence
  ENSG00000163380_9 (sequence is synthesized)
gccttggctaacatgttgcgtgaaaatagaagcatcaccactctcaacatcgagtccaatttcatcacaggtaaagggattgtggccatcatgaggtgtctccagtttaatgagacgcta

SEQ ID NO: 496064 - DNA, 120 bp, Artificial Sequence
  ENSG00000163380_10 (sequence is synthesized)
actgagcttcggtttcacaatcagaggcacatgttgggtcaccatgctgaaatggaaatagccaggcttttgaaggcaaacaacactctcctgaagatgggctaccattttgagcttccg

SEQ ID NO: 496065 - DNA, 120 bp, Artificial Sequence
  ENSG00000163380_11 (sequence is synthesized)
ggtcccagaatggtggtcactaatctgctcaccaggaatcaggataaacaaaggcagaaacgacaggaagagcaaaaacagcagcaactcaaggaacagaagaagctgatagccatgtta

SEQ ID NO: 496066 - DNA, 120 bp, Artificial Sequence
  ENSG00000163380_12 (sequence is synthesized)
gagaatgggttggggctgccccctgggatgtgggagctgttgggaggacccaagccagattccagaatgcaggaattcttccagccaccgccacctcggcctcccaacccccaaaatgtc

SEQ ID NO: 496067 - DNA, 120 bp, Artificial Sequence
  ENSG00000163380_13 (sequence is synthesized)
ccctttagtcaacgcagtgaaatgatgaaaaagccatcgcaggccccgaagtacaggacagaccctgactccttccgggtggtgaagctgaagagaatccagcgcaaatctcggatgccg

SEQ ID NO: 496068 - DNA, 120 bp, Artificial Sequence
  ENSG00000163380_14 (sequence is synthesized)
gaagccagagaaccacccgagaaaaccaacctcaaagatgtcatcaaaacgctcaagccagtgccgagaaacaggccacccccattggtggaaatcactcccagagatcagctgctaaac

SEQ ID NO: 496069 - DNA, 120 bp, Artificial Sequence
  ENSG00000163380_15 (sequence is synthesized)
gacattcgtcacagcagtgtcgcctatcttaaacctgtgcaactgccaaaagaactggcgtaagaggcaacagagccatctagaagaacaagaaatggaaatagtgactcttggattaca

SEQ ID NO: 496070 - DNA, 120 bp, Artificial Sequence
  ENSG00000163380_16 (sequence is synthesized)
gcatggagactatgtcagcagcaatactttaggatccacgtggcagaactggaaacaatgctaccatctgataagggtatttgtaaaaggcagaatgtttgggccatgaagaagtagggg

SEQ ID NO: 496071 - DNA, 120 bp, Artificial Sequence
  ENSG00000163380_17 (sequence is synthesized)
aggaaggtggaaggagataaaatataatatttagaggcaatattttctacttgcaatcaatttgagtgactcaggtgaaatttagagtcatatttcccgaagcagaagttaaagaaaatt

SEQ ID NO: 496072 - DNA, 120 bp, Artificial Sequence
  ENSG00000163380_18 (sequence is synthesized)
ttttaaacatttgctttattattgttttcttctggtaaataataaatataacagaagtgttaactattgtattcccatttttttctccttccatctcttctgcggtaattcatcacatag

SEQ ID NO: 496073 - DNA, 120 bp, Artificial Sequence
  ENSG00000163380_19 (sequence is synthesized)
tatcttaaagggaacaaataatgtttcatcctatggaaatgtgaaggatgaattgagctcctggcccttctgatgctttgaaatggaaggattgttccttagagcttctctgcagaatca

SEQ ID NO: 496074 - DNA, 120 bp, Artificial Sequence
  ENSG00000163380_20 (sequence is synthesized)
gtggagattttcagtttcccaccctgcctggctttctctcttggtgactcccttggtgttttggagtattctttctataggggtacctgtgaggggcagaacacgtaagccacagaacat

SEQ ID NO: 496075 - DNA, 120 bp, Artificial Sequence
  ENSG00000163380_21 (sequence is synthesized)
ggtgaaaactaagtgtcactaggaaaagtaatgggaaagtaaaccctgcatatatgaaaacttcctggcagcaagttttcatatatagagggacaatgggagacagcatgctgtttttat

SEQ ID NO: 496076 - DNA, 120 bp, Artificial Sequence
  ENSG00000163380_22 (sequence is synthesized)
agaaaagaagttttacataatatagttattgacaagcttttggttttggctaaatacacacacacacacacacgctcatatgtgtttactctgtaagtctaatttgattttatcactctc

SEQ ID NO: 496077 - DNA, 120 bp, Artificial Sequence
  ENSG00000163380_23 (sequence is synthesized)
aaacatattttaaaggaaacttgcttacaggaaggattaaacttgaactacttatcctattctttaaggcactccattgcctggccccaatttactaatcctgtcttatttcccacaaat

SEQ ID NO: 496078 - DNA, 120 bp, Artificial Sequence
  ENSG00000163380_24 (sequence is synthesized)
cctttatactctactcgatgaaacatccttgtgcacacccttgtgcctttgctcgcattaatccttccaagagacttccctcctgttctccattaatgaacgtcctacccagtcttcaac

SEQ ID NO: 496079 - DNA, 120 bp, Artificial Sequence
  ENSG00000163380_25 (sequence is synthesized)
tcccgggtcagatcctgtgtcctccataaaaaattttccagacaactccaatctgtccttcttccaagttcctagaggccttaattattcattctagccactaggtgcatagaatttgag

SEQ ID NO: 496080 - DNA, 90 bp, Artificial Sequence
  ENSG00000163380_26 (sequence is synthesized)
ttaattattcattctagccactaggtgcatagaatttgagatttttgtaataatagaagtagtgtgaaccctagaaattagaaaatcaag

SEQ ID NO: 496081 - DNA, 120 bp, Artificial Sequence
  ENSG00000163380_27 (sequence is synthesized)
aaaaaaaaaaaaaaaaaacctttggtgccttttctctcttctttacctgagtaaataattggcacctgccttctttctccttttatgttatcataagtggcatgtatcaaaccaaacagg

SEQ ID NO: 496082 - DNA, 120 bp, Artificial Sequence
  ENSG00000163380_28 (sequence is synthesized)
ctaggggagaataggtctaattgtgacagacttaaaaacaacacattatttggaaagacaagccatgggaaagaaatatggcgtttctatttttttaagataatttagtatgtacaaaag

SEQ ID NO: 496083 - DNA, 120 bp, Artificial Sequence
  ENSG00000163380_29 (sequence is synthesized)
tatccaaatttaaatatagttttcaatggctgatagttttgttttctcacccttcaatatttctagaaaacatccttgcatacaaagcaggatagctaagaaagggctgtaacaaacaaa

SEQ ID NO: 496084 - DNA, 120 bp, Artificial Sequence
  ENSG00000163380_30 (sequence is synthesized)
acttcaagtgtctagcacatactacatctaagaggctaaactctgataggaaaagcactttaaacataattaaaagcttaatgtaaattagtagttgaaattctaggccggtgcggtggc

SEQ ID NO: 496085 - DNA, 120 bp, Artificial Sequence
  ENSG00000163380_31 (sequence is synthesized)
gacatagcaagacctctgttccactgtgcaccactttatttgcttccacactcaccttgtagggaagaggcagaccctaagagcttgatttctaccttcaagtgaattctttacttcaga

SEQ ID NO: 496086 - DNA, 120 bp, Artificial Sequence
  ENSG00000163380_32 (sequence is synthesized)
aatatagatccggcaagagcttagctgtgatcactcctagctgctcagcaaaccactgaggttcctgggaaaaaaaaaaaaatatctcaaggtaaaataatatttagaaaaaataatgtc

SEQ ID NO: 496087 - DNA, 120 bp, Artificial Sequence
  ENSG00000163382_0 (sequence is synthesized)
gggccgggggcgcgcgctctgcgagctggatgtccaggctgcgggcgctgctgggcctcgggctgctggttgcgggctcgcgcgtgccgcggatcaaaagccagaccatcgcctgtcgct

SEQ ID NO: 496088 - DNA, 120 bp, Artificial Sequence
  ENSG00000163382_1 (sequence is synthesized)
cgggacccacctggtggggaccgcagcggctgaactcgggtggccgctgggactcagaggtcatggcgagcacggtggtgaagtacctgagccaggaggaggcccaggccgtggaccagg

SEQ ID NO: 496089 - DNA, 120 bp, Artificial Sequence
  ENSG00000163382_2 (sequence is synthesized)
agctatttaacgaataccagttcagcgtggaccaacttatggaactggccgggctgagctgtgctacagccatcgccaaggcatatccccccacgtccatgtccaggagcccccctactg

SEQ ID NO: 496090 - DNA, 120 bp, Artificial Sequence
  ENSG00000163382_3 (sequence is synthesized)
tcctggtcatctgtggcccggggaataatggaggagatggtctggtctgtgctcgacacctcaaactctttggctacgagccaaccatctattaccccaaaaggcctaacaagcccctct

SEQ ID NO: 496091 - DNA, 120 bp, Artificial Sequence
  ENSG00000163382_4 (sequence is synthesized)
ggacatccctttccttggggaaatgcccgcagagcccatgacgattgatgaactgtatgagctggtggtggatgccatctttggcttcagcttcaagggcgatgttcgggaaccgttcca

SEQ ID NO: 496092 - DNA, 120 bp, Artificial Sequence
  ENSG00000163382_5 (sequence is synthesized)
cagcatcctgagtgtcctgaagggactcactgtgcccattgccagcatcgacattccctcaggatgggacgtggagaagggaaatgctggagggatccagccagacttgctcatatccct

SEQ ID NO: 496093 - DNA, 120 bp, Artificial Sequence
  ENSG00000163382_6 (sequence is synthesized)
cacagcccccaaaaaatctgcaacccagtttaccggtcgctaccattacctggggggtcgttttgtgccacctgctctggagaagaagtaccagctgaacctgccaccctaccctgacac

SEQ ID NO: 496094 - DNA, 120 bp, Artificial Sequence
  ENSG00000163382_7 (sequence is synthesized)
cgagtgtgtctatcgtctgcagtgagggaaggtgggtgggtattcttcccaataaagacttagagcccctctcttccagaactgtggattcctgggagctcctctggcaataaaagtcag

SEQ ID NO: 496095 - DNA, 120 bp, Artificial Sequence
  ENSG00000163382_8 (sequence is synthesized)
tgaatggtggaagtcagagaccaaccctggggattgggtgccatctctctaggggtaacacaaagggcaagaggttgctatggtatttggaaacaatgaaaatggactgttagatgccaa

SEQ ID NO: 496096 - DNA, 120 bp, Artificial Sequence
  ENSG00000163382_9 (sequence is synthesized)
gactcactgtgcccattgccagcatcgacattccctcaggtgctgggatccagaaggtggggtgggggagattggggccctaccctcctgactcttgcccacaccaggtctaaaataatt

SEQ ID NO: 496097 - DNA, 120 bp, Artificial Sequence
  ENSG00000163382_10 (sequence is synthesized)
ttagtctagaggggcagaacacagctttctggacccccatcagggctggggaacagtgttcagaagtcccctttacatgttggccccatgaagagaccacggcccaagggtacgtggagc

SEQ ID NO: 496098 - DNA, 120 bp, Artificial Sequence
  ENSG00000163382_11 (sequence is synthesized)
tcgttggacgagagttcctcaggtgggaactgaggggacttcccactcctctgggactagggtaaactaaggtgtagaaggggacgagacatctggcctcttcctgaacaccaccctctt

SEQ ID NO: 496099 - DNA, 120 bp, Artificial Sequence
  ENSG00000163382_12 (sequence is synthesized)
cgctcgggacccacctggtggggaccgcagcggctgaactcgggtggccgctgggactcagaggtcatggcgagcacggtggtgaagtacctgaggaggaggcccaggccgtggaccagg

SEQ ID NO: 496100 - DNA, 120 bp, Artificial Sequence
  ENSG00000163382_13 (sequence is synthesized)
gcagaggtaggtggctccagttgaatacctccatcctacagtaaccactgcctgtgctctgctcttccttcgtgtttccaggctgagctcattttagtgcctggtacggaaggtgcctaa

SEQ ID NO: 496101 - DNA, 120 bp, Artificial Sequence
  ENSG00000163382_14 (sequence is synthesized)
cggatggtattcgaataagtgtgcaagagccttctcctccttcataaagtgtgctccatgagtcccacacaccaccttctctaaagcttccttgccctttcatctccctggtccctcctt

SEQ ID NO: 496102 - DNA, 120 bp, Artificial Sequence
  ENSG00000163382_15 (sequence is synthesized)
ccactctgtagtcagatcctcttgccctagcatgcagtaaacacatgatctacccctcaggggccggagtggctgccctatctgaaacccttcctgcagatgcatggattaagggatggg

SEQ ID NO: 496103 - DNA, 120 bp, Artificial Sequence
  ENSG00000163382_16 (sequence is synthesized)
tcaggctgccctctgaatgagacacaatacttgtgcctctgagaatggtctgcaggtgcagaggacagccctctccagttaaggctgtttgtgcagctgctggctctgacatccttttcc

SEQ ID NO: 496104 - DNA, 120 bp, Artificial Sequence
  ENSG00000163389_0 (sequence is synthesized)
gtgcggggccgcgcttccgccagcgccgcagcggggaatctgcagtaggtctgccggcgatggagtggtgggctagctcgccgcttcggctctggctgctgttgttcctcctgccctcag

SEQ ID NO: 496105 - DNA, 120 bp, Artificial Sequence
  ENSG00000163389_1 (sequence is synthesized)
cgcagggccgccagaaggagtcaggttcaaaatggaaagtatttattgaccaaattaacaggtctttggagaattacgaaccatgttcaagtcaaaactgcagctgctaccatggtgtca

SEQ ID NO: 496106 - DNA, 120 bp, Artificial Sequence
  ENSG00000163389_2 (sequence is synthesized)
tagaagaggatctaactcctttccgaggaggcatctccaggaagatgatggcagaggtagtcagacggaagctagggacccactatcagatcactaagaacagactgtaccgggaaaatg

SEQ ID NO: 496107 - DNA, 120 bp, Artificial Sequence
  ENSG00000163389_3 (sequence is synthesized)
actgcatgttcccctcaaggtgtagtggtgttgagcactttattttggaagtgatcgggcgtctccctgacatggagatggtgatcaatgtacgagattatcctcaggttcctaaatgga

SEQ ID NO: 496108 - DNA, 120 bp, Artificial Sequence
  ENSG00000163389_4 (sequence is synthesized)
tggagcctgccatcccagtcttctccttcagtaagacatcagagtaccatgatatcatgtatcctgcttggacattttgggaagggggacctgctgtttggccaatttatcctacaggtc

SEQ ID NO: 496109 - DNA, 120 bp, Artificial Sequence
  ENSG00000163389_5 (sequence is synthesized)
ttggacggtgggacctcttcagagaagatctggtaaggtcagcagcacagtggccatggaaaaagaaaaactctacagcatatttccgaggatcaaggacaagtccagaacgagatcctc

SEQ ID NO: 496110 - DNA, 120 bp, Artificial Sequence
  ENSG00000163389_6 (sequence is synthesized)
tcattcttctgtctcggaaaaacccaaaacttgttgatgcagaatacaccaaaaaccaggcctggaaatctatgaaagataccttaggaaagccagctgctaaggatgtccatcttgtgg

SEQ ID NO: 496111 - DNA, 120 bp, Artificial Sequence
  ENSG00000163389_7 (sequence is synthesized)
atcactgcaaatacaagtatctgtttaattttcgaggcgtagctgcaagtttccggtttaaacacctcttcctgtgtggctcacttgttttccatgttggtgatgagtggctagaattct

SEQ ID NO: 496112 - DNA, 120 bp, Artificial Sequence
  ENSG00000163389_8 (sequence is synthesized)
tctatccacagctgaagccatgggttcactatatcccagtcaaaacagatctctccaatgtccaagagctgttacaatttgtaaaagcaaatgatgatgtagctcaagagattgctgaaa

SEQ ID NO: 496113 - DNA, 120 bp, Artificial Sequence
  ENSG00000163389_9 (sequence is synthesized)
ggggaagccagtttattaggaaccatttgcagatggatgacatcacctgttactgggagaacctcttgagtgaatactctaaattcctgtcttataatgtaacgagaaggaaaggttatg

SEQ ID NO: 496114 - DNA, 120 bp, Artificial Sequence
  ENSG00000163389_10 (sequence is synthesized)
atcaaattattcccaaaatgttgaaaactgaactatagtagtcatcataggaccatagtcctctttgtggcaacagatctcagatatcctacggtgagaagcttaccataagcttggcac

SEQ ID NO: 496115 - DNA, 120 bp, Artificial Sequence
  ENSG00000163389_11 (sequence is synthesized)
ctataccttgaatatctgctatcaagccaaatacctggttttccttatcatgctgcacccagagcaactcttgagaaagatttaaaatgtgtctaatacactgatatgaagcagttcaac

SEQ ID NO: 496116 - DNA, 120 bp, Artificial Sequence
  ENSG00000163389_12 (sequence is synthesized)
tttttggatgaataaggaccagaaatcgtgagatgtggattttgaacccaactctacctttcattttcttaagaccaatcacagcttgtgcctcagatcatccacctgtgtgagtccatc

SEQ ID NO: 496117 - DNA, 120 bp, Artificial Sequence
  ENSG00000163389_13 (sequence is synthesized)
actgtgaaattgactgtgtccatgtgatgatgccctttgtcccattatttggagcagaaaattcgtcatttggaagtagtacaactcattgctggaattgtgaaattattcaaggcgtga

SEQ ID NO: 496118 - DNA, 120 bp, Artificial Sequence
  ENSG00000163389_14 (sequence is synthesized)
accctatggggtttatgaaaaatacttggggatcattctctgaatggtctaaggaagcggtagccatgccatgcaatgatgtaggagttctcttttgtaaaaccataaactgtgttactc

SEQ ID NO: 496119 - DNA, 120 bp, Artificial Sequence
  ENSG00000163389_15 (sequence is synthesized)
aggaggtttctataatgccacatagaaagaggccaattgcatgagtaattattgcaattggatttcaggttccctttttgtgccttcatgccctacttcttaatgcctctctaaagccaa

SEQ ID NO: 496120 - DNA, 120 bp, Artificial Sequence
  ENSG00000163389_16 (sequence is synthesized)
aaaaaaaaaaaaagacaaagcctcttaataaatttaatggaactatacatagaacagcagctcttcctcaccctttgcatacctttaatatttttccttcttaaattggccacagcaggg

SEQ ID NO: 496121 - DNA, 120 bp, Artificial Sequence
  ENSG00000163389_17 (sequence is synthesized)
gtcattcacactctcactgtcttgcaggaatcacaagaagtcttcatatgtgaacgtgccattcagttggtagttaagagcattcaacttcaaatatatagaagatatttgttttagtgc

SEQ ID NO: 496122 - DNA, 120 bp, Artificial Sequence
  ENSG00000163389_18 (sequence is synthesized)
aaatccatgatggagtgcctcccttttccttttttcactttttgaaaaagatgttttgggtagtagtttaatatctcagggtgctctttctaacatagtaaaaaatgaagaaaaatgttt

SEQ ID NO: 496123 - DNA, 120 bp, Artificial Sequence
  ENSG00000163389_19 (sequence is synthesized)
agattaaaactctgtagtctgatgacttagaaccatccttgacccttaggcccaacctttccacagagaaatcacctctcttcctttgtcttttaagaactatttggtattaactagttt

SEQ ID NO: 496124 - DNA, 120 bp, Artificial Sequence
  ENSG00000163389_20 (sequence is synthesized)
cagaattagtaaatgtgagattcagtcacataattatcagacattccatttgtcagaaatgtatttggctttttaaactcctttccacaaaagtttaagtctaatgaccttcttagagaa

SEQ ID NO: 496125 - DNA, 120 bp, Artificial Sequence
  ENSG00000163389_21 (sequence is synthesized)
gttgagcatgcctggcaagatcatttcatggaataagcagatgtttaaagttggatttttttttttttttttttttgagtactagcaatgcacagggaccgtgttcttaggttcttagtc

SEQ ID NO: 496126 - DNA, 120 bp, Artificial Sequence
  ENSG00000163389_22 (sequence is synthesized)
tgtgaatctagcaataggcagtccagatttctgagtcgtactatggttttgccttgtcactgtgaggccctactaggtgtaagcattctctctgaattttaatttcctctcattaaaata

SEQ ID NO: 496127 - DNA, 120 bp, Artificial Sequence
  ENSG00000163389_23 (sequence is synthesized)
ggaacaaaatttgctatcctttagattaggagctgaagattcatttccctgggaatgtttcccatttagcttcaagtttcagctcaaacatcaccttctttctgactcctttcattcatt

SEQ ID NO: 496128 - DNA, 120 bp, Artificial Sequence
  ENSG00000163389_24 (sequence is synthesized)
cctccaggcagtaaggggctaccatagtactttgtttatgcctgtattatatgacatcactgtagttgcttgactgtttctcctactgttctgtaaacttattaatgggtgagaatctaa

SEQ ID NO: 496129 - DNA, 120 bp, Artificial Sequence
  ENSG00000163389_25 (sequence is synthesized)
ttttactcatcttgatggcttcatgatccagcacagtgcctcacacaaagaactattgggtgggtggatggatggatggaggaatggagacagttggcttaaccagatcctatatacaga

SEQ ID NO: 496130 - DNA, 120 bp, Artificial Sequence
  ENSG00000163389_26 (sequence is synthesized)
ttattactggctccaaaggatgagtagataagaccataagaattggatcaatgtaaatcctcacctgccctttgaagagccaataagggcatctttgtctttaaatacagcaaatgttat

SEQ ID NO: 496131 - DNA, 120 bp, Artificial Sequence
  ENSG00000163389_27 (sequence is synthesized)
tcagattttgtacttgtctatctgtttacctcagtgtagatgatatgaggatggtataactatgtaaattgtttttgaaaataatttgtttccccacaacttttgaaggttttatttgtt

SEQ ID NO: 496132 - DNA, 120 bp, Artificial Sequence
  ENSG00000163389_28 (sequence is synthesized)
gttgttattactagttcagtcccaaacttaccctttccttttcagagagctaatggccatgcttttcttcaaggaaagaataatttatttgaatgaagtgggatacttgcataacacaaa

SEQ ID NO: 496133 - DNA, 120 bp, Artificial Sequence
  ENSG00000163389_29 (sequence is synthesized)
atctgcagtaggtctgccggcgatggagtggtgggctagctcgccgcttcggctctggctgctgttgttcctcctgccctcagcgcagggccgccagaaggagtcaggtgggctccgggc

SEQ ID NO: 496134 - DNA, 120 bp, Artificial Sequence
  ENSG00000163389_30 (sequence is synthesized)
agtgccgagcctgccccttgggctcggggtctggccggagtcccgaggcgctcccccgcgcggccggctcccgggaagatgccgtggccgctgtagctcggagctgggcagaaggcaccg

SEQ ID NO: 496135 - DNA, 120 bp, Artificial Sequence
  ENSG00000163389_31 (sequence is synthesized)
tggagcctgccatcccagtcttctccttcagtaagacttgttttatttcctgtgttgcaagtgggcagaggccacatttgtgttgcatttcccatggtctagcctcatttctcgaaagtg

SEQ ID NO: 496136 - DNA, 120 bp, Artificial Sequence
  ENSG00000163389_32 (sequence is synthesized)
gatagaggctcccatgctagactttggaaaatagggaaaatatatctttgacaatgtgacactaaaccaaggctgtccagatcctgtggcatgattgcagttgcctcttttcactgttcc

SEQ ID NO: 496137 - DNA, 120 bp, Artificial Sequence
  ENSG00000163389_33 (sequence is synthesized)
gagttaacgaggtagatatatcttctgactttattacatatgggcttgatacccttttatagaggagccaattcatgggactaacaagcagatccctcctcacatttcaggcggactatg

SEQ ID NO: 496138 - DNA, 120 bp, Artificial Sequence
  ENSG00000163389_34 (sequence is synthesized)
aaatagtgacgagctcttctccttgcctgggaatttttcttgcgagctcctctcaaagcctgtctcctctgtgaggcttggttcatcactggttgtactggtggtggctctgcctcttct

SEQ ID NO: 496139 - DNA, 120 bp, Artificial Sequence
  ENSG00000163389_35 (sequence is synthesized)
gctccttccctgggatatagtagcggcaggacacaggctgatgaggcctagcaggcctagcaggagggagctaggctgaaggaggaagaggaattggttgaatgtctgtcatcggccagt

SEQ ID NO: 496140 - DNA, 120 bp, Artificial Sequence
  ENSG00000163389_36 (sequence is synthesized)
ataccatatgaggatgctatgaggaaaagctttagacttcttgggagaaaactaagtaaatctgaggtgcatgtattatttcatacagttttaatcaggagcaagtgagcttaagaaact

SEQ ID NO: 496141 - DNA, 120 bp, Artificial Sequence
  ENSG00000163389_37 (sequence is synthesized)
ttgttgaataataaaaatatgaaaaaatgtgttcatttagaacaaaagttgttagcatctactgtgggaggctgcagaagcaaacaaaacttgtcccctcatcaaggagtttaccatctg

SEQ ID NO: 496142 - DNA, 120 bp, Artificial Sequence
  ENSG00000163389_38 (sequence is synthesized)
ctaaggtggatggaatgtacctggggatgtcaaactcagatgtccccaggggccagcaggtgatgtcaagaggtgagcaagagagaatactaacagttccaaatgttaataagagcccag

SEQ ID NO: 496143 - DNA, 120 bp, Artificial Sequence
  ENSG00000163389_39 (sequence is synthesized)
tttgccagatcttcctttttattctccaagaaagactggaaatctggatttttgcaagaaatatcctaccacctgtaaatgttggcaatgatttgatttaaaaaaaaaaatactttgcat

SEQ ID NO: 496144 - DNA, 120 bp, Artificial Sequence
  ENSG00000163389_40 (sequence is synthesized)
gcccaacaaaatttgagcatgggctatatacacccctaaggccatcagccagcacttgggaccttctctgcatacattatttacacagagtgaagtgtgctgcaggctgtgacatctgaa

SEQ ID NO: 496145 - DNA, 120 bp, Artificial Sequence
  ENSG00000163389_41 (sequence is synthesized)
ttcaaaggagggcaacatggctttaggtgtgcttaaactttaaaatcagacgggccctggttaaaactctgtcttctatttagagccacactgaccttgagcaaatctcaacttccaaag

SEQ ID NO: 496146 - DNA, 120 bp, Artificial Sequence
  ENSG00000163389_42 (sequence is synthesized)
ccttggcttctgcatttatataatgggaataataatgtctcctgagtatattgattatgaagcttaaatgaggtaatgttgatgaaatgtttaacaatgcttgctgcacagtgatcacaa

SEQ ID NO: 496147 - DNA, 120 bp, Artificial Sequence
  ENSG00000163389_43 (sequence is synthesized)
taaatgctgttgctgttaatactaataacttcctttccacttaaaggataccttaggaaagccagctgctaaggatgtccatcttgtggatcactgcaaatacaagtaagatttgcagga

SEQ ID NO: 496148 - DNA, 120 bp, Artificial Sequence
  ENSG00000163389_44 (sequence is synthesized)
ctcctcactttcttggtttccatactgcttttgaaatagcttcactttgggtgagaactttaatataaaggcccagctggagtaaatgaaagttgcattaattcatttcactggcttttc

SEQ ID NO: 496149 - DNA, 120 bp, Artificial Sequence
  ENSG00000163389_45 (sequence is synthesized)
ctcagggcctaaatgcactgacctgagttctgtggcgactgtagagaagaatggaacatggttcctgcttccaaacagctgcatgctagctagtaatcacagtaatggaattacctctcc

SEQ ID NO: 496150 - DNA, 120 bp, Artificial Sequence
  ENSG00000163389_46 (sequence is synthesized)
ctccatatgccccacccacccaatcattgaagttagaataaatatttctcagttaataaatattagaattattatcctggtgtgctggcatgctcctgtagtcttagctactcgggaggc

SEQ ID NO: 496151 - DNA, 120 bp, Artificial Sequence
  ENSG00000163389_47 (sequence is synthesized)
agcccaagagttcaagaccagcctgggctacatagtgagaccctgtctctaagagaaataaaataaaattctgggactaagaattagatgaacaggtaaaaccaggtctagaggagggca

SEQ ID NO: 496152 - DNA, 120 bp, Artificial Sequence
  ENSG00000163389_48 (sequence is synthesized)
ggtctagaggagggcagtggtggtgggggtggctcagagttaggagtgctaatgacacgcagagtaggagctatatggtgaaagcaactctggttggcgacaggtgcgtgcataagaaat

SEQ ID NO: 496153 - DNA, 120 bp, Artificial Sequence
  ENSG00000163389_49 (sequence is synthesized)
gctgagaagaagacagctttttttgttttttttttttcccctgtgggcaatctctgaaaattgattaggttttcctcattctcctctctacaccaggggtccccaaccccctgccatggt

SEQ ID NO: 496154 - DNA, 80 bp, Artificial Sequence
  ENSG00000163389_50 (sequence is synthesized)
ctgtcagatcagccttggcattagattctcataggagcacaaactgtattgtgaactgtgtatgcaagggatcaaggttg

SEQ ID NO: 496155 - DNA, 120 bp, Artificial Sequence
  ENSG00000163389_51 (sequence is synthesized)
cccatccatggaaaaattgtctcccatgaaactggtccctggtgccaaagaggttggggaccgctgctctatactttaagagaagagggtgatgtccaggaagcagtggagaccttcgac

SEQ ID NO: 496156 - DNA, 120 bp, Artificial Sequence
  ENSG00000163389_52 (sequence is synthesized)
cagatggggtacactagaggaaaaacaaggctttgggaggccatgactagttagagacattaggcctagaaaagcttgtgaaatttttttcactcgttttattttatgtttaccattgaa

SEQ ID NO: 496157 - DNA, 120 bp, Artificial Sequence
  ENSG00000163389_53 (sequence is synthesized)
catttattttctcagatatgttccaaatctacaagctgtcatttccttctgagccctgtatacactctacccggcacccagctcctgaccctatctagtgctgtctggagaaaatatccc

SEQ ID NO: 496158 - DNA, 120 bp, Artificial Sequence
  ENSG00000163389_54 (sequence is synthesized)
ctatttttcctcaccctgccattcccagaacaacctgtagtcctagccctggtaaagtggctgatagaaaccacttaggaacatattaatgtgtccttgaaaactcaaagtggaaagaga

SEQ ID NO: 496159 - DNA, 120 bp, Artificial Sequence
  ENSG00000163389_55 (sequence is synthesized)
atggagaggaatcataaaaggaaagaaggggaggggagaataagcataaaaggtcatatttgtggcagcaggcatatagtatcaaatgtattttgttcttttttccccaggtatctgttt

SEQ ID NO: 496160 - DNA, 120 bp, Artificial Sequence
  ENSG00000163389_56 (sequence is synthesized)
gggccttggttccctagagacaaggaaagcatttgggggtgaaggcaggaaggctagaagagagtggatggaagattctatggggtaagagtgaattgaggaaaaccccatgaaatttgg

SEQ ID NO: 496161 - DNA, 120 bp, Artificial Sequence
  ENSG00000163393_0 (sequence is synthesized)
ggggttgccgcgctgggcgggagggcagcgcctgagagggcggtggggtggcggggttcctgcgcgcggcccgccatggaggtggaggaggcgttccaggcggtgggggagatgggcatc

SEQ ID NO: 496162 - DNA, 120 bp, Artificial Sequence
  ENSG00000163393_1 (sequence is synthesized)
ggtggaggaggcgttccaggcggtgggggagatgggcatctaccagatgtacttgtgcttcctgctggccgtgctgctgcagctctacgtggccacggaggccatcctcattgcactggt

SEQ ID NO: 496163 - DNA, 120 bp, Artificial Sequence
  ENSG00000163393_2 (sequence is synthesized)
tggggccacgccatcctaccactgggacctggcagagctcctgccaaatcagagccacggtaaccagtcagctggtgaagaccaggcctttggggactggctcctgacagccaacggcag

SEQ ID NO: 496164 - DNA, 120 bp, Artificial Sequence
  ENSG00000163393_3 (sequence is synthesized)
tgagatccataagcacgtgcatttcagcagcagcttcacctccatcgcctcggagtggtttttaattgccaacagatcctacaaagtcagtgcagcaagctcttttttcttcagtggtgt

SEQ ID NO: 496165 - DNA, 120 bp, Artificial Sequence
  ENSG00000163393_4 (sequence is synthesized)
atttgttggagttatctcttttggtcagctttcagatcgcttcggaaggaaaaaagtctatctcacaggttttgctcttgacatcttatttgcaattgcaaatggattttccccctcata

SEQ ID NO: 496166 - DNA, 120 bp, Artificial Sequence
  ENSG00000163393_5 (sequence is synthesized)
tgagttctttgcagtaactcgcttcctggtgggcatgatgaatggagggatgtcgctggtggcctttgtcttgcttaatgaatgtgtgggcaccgcctactgggcacttgcaggatcgat

SEQ ID NO: 496167 - DNA, 120 bp, Artificial Sequence
  ENSG00000163393_6 (sequence is synthesized)
tggcggcctgttctttgcagttggcattgcccaatatgccctgttaggatacttcatccgctcctggaggaccctagccattctggttaacctgcagggaacggtggtctttctcttatc

SEQ ID NO: 496168 - DNA, 120 bp, Artificial Sequence
  ENSG00000163393_7 (sequence is synthesized)
tttattcattcctgaatcacctcgttggttatactcccagggtcgactgagtgaggctgaagaggcgctgtacctcattgccaagaggaaccgcaaactcaagtgcacgttctcactaac

SEQ ID NO: 496169 - DNA, 120 bp, Artificial Sequence
  ENSG00000163393_8 (sequence is synthesized)
acacccagccaacaggagctgcagggagactggaagtttcctggatctctttcgttaccgggtcctgttaggacacactttgatcctgatgttcatctggtttgtgtgcagcttggtgta

SEQ ID NO: 496170 - DNA, 120 bp, Artificial Sequence
  ENSG00000163393_9 (sequence is synthesized)
ttatggcctaactctgagtgcgggtgatctaggtggaagtatttatgccaacctggccctgtctggcctcatagagattccatcttaccctctctgtatctacttgattaaccaaaaatg

SEQ ID NO: 496171 - DNA, 120 bp, Artificial Sequence
  ENSG00000163393_10 (sequence is synthesized)
gtttggtcggaagcgaacattatcagcatttctgtgcctaggaggactggcttgtcttattgtaatgtttcttccagaaaagaaagacacaggtgtgtttgcagtggtgaacagccattc

SEQ ID NO: 496172 - DNA, 120 bp, Artificial Sequence
  ENSG00000163393_11 (sequence is synthesized)
cttgtccttgctggggaagctgaccatcagtgctgcctttaacattgtttatatctacacctctgagctttaccctacagtcatcaggaatgttgggcttggaacttgttccatgttctc

SEQ ID NO: 496173 - DNA, 120 bp, Artificial Sequence
  ENSG00000163393_12 (sequence is synthesized)
ccgagttggtgggattattgctcccttcatcccctcactgaaatatgtgcaatggtctttaccattcattgtcttcggagccacgggtctgacctccggcctcctgagtttgttattgcc

SEQ ID NO: 496174 - DNA, 120 bp, Artificial Sequence
  ENSG00000163393_13 (sequence is synthesized)
ggagacccttaacagtccgctgctagaaacattctccgaccttcaggtgtattcgtatcgcaggctgggagaagaagcattatctttacaggctttggacccccaacagtgtgtggacaa

SEQ ID NO: 496175 - DNA, 120 bp, Artificial Sequence
  ENSG00000163393_14 (sequence is synthesized)
ggagagctctttagggagtgagagtgaggaagaggaagaattttatgatgcagatgaagagactcagatgatcaagtgaagagccccagattccccctaagaagcaaaggatcgtctttt

SEQ ID NO: 496176 - DNA, 120 bp, Artificial Sequence
  ENSG00000163393_15 (sequence is synthesized)
atgcctctggctaaggcaggttcttccatgactcctaagagagttgtaaaaatagaggcttggcttgaatgtacatagatggtacctggcatggactgatgtttttaggcacagaagttg

SEQ ID NO: 496177 - DNA, 120 bp, Artificial Sequence
  ENSG00000163393_16 (sequence is synthesized)
gagaagagatttcatgaaagacaacatcactgcattgagagaatagttgttaatttgtttagaatttaagttctactcagaatcataacatctggcagaacagcccaaacccacattcca

SEQ ID NO: 496178 - DNA, 120 bp, Artificial Sequence
  ENSG00000163393_17 (sequence is synthesized)
aagtggtaggctcatttgtttctagagatttcatcatgtcgcttttccttcatcatgatctaaataaaggcagatatgtaaaatttctcaccattttggtggggtaagataagctattat

SEQ ID NO: 496179 - DNA, 120 bp, Artificial Sequence
  ENSG00000163393_18 (sequence is synthesized)
taagatttaatccttataccatgttggacatttgcccctatcagttgctcctcaggaatcttctggtacaggttaacatcagcattttcattttgtgtccagggaaaagcacccagaggt

SEQ ID NO: 496180 - DNA, 120 bp, Artificial Sequence
  ENSG00000163393_19 (sequence is synthesized)
gctttttcttagctgatgaaatatgagtcctcagcttggttcccagcctgctgattgacttgggctgctggtgccttgagtcccacagatgattcattaggaaaagccagatataccaaa

SEQ ID NO: 496181 - DNA, 120 bp, Artificial Sequence
  ENSG00000163393_20 (sequence is synthesized)
gcggtttactcagagtcaggggtgtagctctggctgcctgtcagctcccttggatactatattgtatgatttcttcctttcccactaatatgcacatccagaaaaatttccatctgagat

SEQ ID NO: 496182 - DNA, 120 bp, Artificial Sequence
  ENSG00000163393_21 (sequence is synthesized)
tctagtacttcaaaatcatgcatagtaaatgagaaagctttaagtagagggcagttaaacagtgacatgttgagcacctggaggaaaaaaaaggtgcagtttttaataagagagaaaatg

SEQ ID NO: 496183 - DNA, 120 bp, Artificial Sequence
  ENSG00000163393_22 (sequence is synthesized)
aaattatctttgataaatttttgtttgttttgctttcagcattgtgccatgagggatttggacaatatttaagaacttcttgtcctagatcagccccaatctgtttaatcaaaatggaag

SEQ ID NO: 496184 - DNA, 120 bp, Artificial Sequence
  ENSG00000163393_23 (sequence is synthesized)
gttcagtaatttcatgggaaaccttggtttttcattaagtgctaccaactttcaagtgaatcttgtatttgatttcctaaaatcatgtcttgaaaacatgttttctcatgaaacttgaat

SEQ ID NO: 496185 - DNA, 120 bp, Artificial Sequence
  ENSG00000163393_24 (sequence is synthesized)
actatctcaaataggaatataaacctggagtcaacaagcttaggcagcattgatttaggtcactttcccagtgaggaaaatttctgtgttttcagaatttccatttctactaacctcttg

SEQ ID NO: 496186 - DNA, 120 bp, Artificial Sequence
  ENSG00000163393_25 (sequence is synthesized)
gagaaaaagaaattgaattagaggtaaatagaagacgtcactgtggctgcttctggaagtgctggaagcatcaccccaattggctccaaatactgtcatgttttcttgcacactgacttc

SEQ ID NO: 496187 - DNA, 120 bp, Artificial Sequence
  ENSG00000163393_26 (sequence is synthesized)
tggtttccactgtatcagtatgtacctttgtaattgttatttttatgtcttttatgcccttgattattagttgggctcttcataaacagaggccatctctactactgtttatttttccct

SEQ ID NO: 496188 - DNA, 120 bp, Artificial Sequence
  ENSG00000163393_27 (sequence is synthesized)
gctgtgcccagaacattggcgtagacacagtaagaacctagtaaatattactgtttctagccatcagggagattgtggaactcctcccagtataatttttacaaactccaagcaaatctg

SEQ ID NO: 496189 - DNA, 120 bp, Artificial Sequence
  ENSG00000163393_28 (sequence is synthesized)
acccaaactcccaaattgtcaagtcctgcttaactttctctggaaaatagaccccttctcaacatcagaataggaagagaggaagaacttacaaagacacttaaaagttattcttaaatg

SEQ ID NO: 496190 - DNA, 120 bp, Artificial Sequence
  ENSG00000163393_29 (sequence is synthesized)
gtggttgggcatttaaaacagtgaactaacatatatataatttttgattagttggagctttctttgtattataagagtaatatatctcattacagaaaatttggaaactataaatttaga

SEQ ID NO: 496191 - DNA, 120 bp, Artificial Sequence
  ENSG00000163393_30 (sequence is synthesized)
aacgtatcacccatacgtccaacatcgaaagaaaaccagtgttatgactttgttccatttgaagactaattgggagtccatctctctattggcactgggttcgattgcctctggctaata

SEQ ID NO: 496192 - DNA, 120 bp, Artificial Sequence
  ENSG00000163393_31 (sequence is synthesized)
gagttcaattagttctatccctgggtttcctttcttagctatggggtggaagataggagggggagatctacaatttgaatatgtgttacttaataaggctaggctggccatcagttgctt

SEQ ID NO: 496193 - DNA, 120 bp, Artificial Sequence
  ENSG00000163393_32 (sequence is synthesized)
atttcagatgtgtcactaaattttccttctagatggtccttgagcaaaacttaataattactgttttttatttccactgcctttataaaatcaaaattttctccttttgataaaaactgt

SEQ ID NO: 496194 - DNA, 120 bp, Artificial Sequence
  ENSG00000163393_33 (sequence is synthesized)
tgaatactattgatgtagagaatgtgtatatgtgtatatttgcattgattaaattattggaaaacttttcattgacaggtaatgtattttggttgtgcggatggtttgtaaaaagtatcc

SEQ ID NO: 496195 - DNA, 120 bp, Artificial Sequence
  ENSG00000163393_34 (sequence is synthesized)
tgtttttttaattctattcaaaattaaaaattttttttcctaaaataaagcaagaaaaataaatgtaagatatataagaaaccccagagtttccagggtgaaagttcacattagcagctt

SEQ ID NO: 496196 - DNA, 120 bp, Artificial Sequence
  ENSG00000163393_35 (sequence is synthesized)
gtccaaaatatttacacctcacaaatattttgaaagaaaccatgttgaaattttctgattttgtgagttacaaccacagcccagtaaaaccaatacttgttatttggctactttcaagca

SEQ ID NO: 496197 - DNA, 120 bp, Artificial Sequence
  ENSG00000163393_36 (sequence is synthesized)
atgcagatattctttagtatttaaaaatgagcaaataaacaaaatgaggcaaataaatgaagaaaatgagtttctgagacactgtttaggtaaccataaatcagacagatatttttatgg

SEQ ID NO: 496198 - DNA, 120 bp, Artificial Sequence
  ENSG00000163393_37 (sequence is synthesized)
tgggcaaattgatgaagatacttttagtaggtgatttatattcataacaaatacatattgaaataattgtcactactgtatcagaattaaaaaccagcttcacattaggacttctccata

SEQ ID NO: 496199 - DNA, 120 bp, Artificial Sequence
  ENSG00000163393_38 (sequence is synthesized)
caaatgctttatcattggttcttaaattggaaaaatatctataaatgattacatttttaagctaaataaaatgcagatattttggcttcttgtgaatgtaataaagaatcataaaacata

SEQ ID NO: 496200 - DNA, 120 bp, Artificial Sequence
  ENSG00000163393_39 (sequence is synthesized)
ccttcttcagggtacagggaattttacctcttttgttagcttgaggttgttttctcaacagcaagtctcctgatccttagcgcctggttttctgcttgcgcagccccgtctttctcaagt

SEQ ID NO: 496201 - DNA, 120 bp, Artificial Sequence
  ENSG00000163393_40 (sequence is synthesized)
agcagatgatagtgcctgatgggcaggtccactgagcttgagtaagtagacatcagaagcacatctttgcttttgaggtatttatcataaatatttaagccttcctgccccttcccctgc

SEQ ID NO: 496202 - DNA, 120 bp, Artificial Sequence
  ENSG00000163393_41 (sequence is synthesized)
gcataataaatgttgaggcttggaggcatggagattaagaaaaccgttgaaagccaaacctgacaacacaacataggagctgctaatttgaggttctacccattcaaaagcaaatactta

SEQ ID NO: 496203 - DNA, 120 bp, Artificial Sequence
  ENSG00000163393_42 (sequence is synthesized)
acaagggttttgaacagtactttcattacaatgaatcataatatagtggagagatgaccatatggcatgcttcatttctgtgattgcatattgtttagcaattgtgtgggatataatggg

SEQ ID NO: 496204 - DNA, 120 bp, Artificial Sequence
  ENSG00000163394_0 (sequence is synthesized)
actgccttttccacaacaggagtacaaatgctggagtgagtgaggtgaactcaagtcgcctttaggaatggctgaaaaagcccacacctggaaatcactccctccctgctcctccacggc

SEQ ID NO: 496205 - DNA, 120 bp, Artificial Sequence
  ENSG00000163394_1 (sequence is synthesized)
aggttgcatctgcgagacgcttcggtcattagaggaatgagccgggagtgagcaattcaccagctctccagcacttggtggaaagcagcaggcaaggatggatgtggttgacagccttct

SEQ ID NO: 496206 - DNA, 120 bp, Artificial Sequence
  ENSG00000163394_2 (sequence is synthesized)
tgtgaatggaagcaacatcactcctccctgtgaactcgggctcgaaaatgagacgcttttctgcttggatcagccccgtccttccaaagagtggcagccagcggtgcagattctcttgta

SEQ ID NO: 496207 - DNA, 120 bp, Artificial Sequence
  ENSG00000163394_3 (sequence is synthesized)
ctccttgatattcctgctcagcgtgctgggaaacacgctggtcatcaccgtgctgattcggaacaagcggatgcggacggtcaccaacatcttcctcctctccctggctgtcagcgacct

SEQ ID NO: 496208 - DNA, 120 bp, Artificial Sequence
  ENSG00000163394_4 (sequence is synthesized)
catgctctgtctcttctgcatgccgttcaacctcatccccaatctgctcaaggatttcatcttcgggagcgccgtttgcaagaccaccacctacttcatgggcacctctgtgagtgtatc

SEQ ID NO: 496209 - DNA, 120 bp, Artificial Sequence
  ENSG00000163394_5 (sequence is synthesized)
tacctttaatctggtagccatatctctagagagatatggtgcgatttgcaaacccttacagtcccgggtctggcagacaaaatcccatgctttgaaggtgattgctgctacctggtgcct

SEQ ID NO: 496210 - DNA, 120 bp, Artificial Sequence
  ENSG00000163394_6 (sequence is synthesized)
ttcctttaccatcatgactccgtaccccatttatagcaacttggtgccttttaccaaaaataacaaccagaccgcgaatatgtgccgctttctactgccaaatgatgttatgcagcagtc

SEQ ID NO: 496211 - DNA, 120 bp, Artificial Sequence
  ENSG00000163394_7 (sequence is synthesized)
attaatctctttggaactctaccagggaataaaatttgaggctagccagaagaagtctgctaaagaaaggaaacctagcaccaccagcagcggcaaatatgaggacagcgatgggtgtta

SEQ ID NO: 496212 - DNA, 120 bp, Artificial Sequence
  ENSG00000163394_8 (sequence is synthesized)
cctgcaaaagaccaggcccccgaggaagctggagctccggcagctgtccaccggcagcagcagcagggccaaccgcatccggagtaacagctccgcagccaacctgatggccaagaaaag

SEQ ID NO: 496213 - DNA, 120 bp, Artificial Sequence
  ENSG00000163394_9 (sequence is synthesized)
ggtgatccgcatgctcatcgtcatcgtggtcctcttcttcctgtgctggatgcccatcttcagcgccaacgcctggcgggcctacgacaccgcctccgcagagcgccgcctctcaggaac

SEQ ID NO: 496214 - DNA, 120 bp, Artificial Sequence
  ENSG00000163394_10 (sequence is synthesized)
ccccatttccttcatcctcctcctgtcctacacctcctcctgcgtcaaccccatcatctactgcttcatgaacaaacgcttccgcctcggcttcatggccaccttcccctgctgccccaa

SEQ ID NO: 496215 - DNA, 120 bp, Artificial Sequence
  ENSG00000163394_11 (sequence is synthesized)
tcctggtcccccaggggcgaggggagaggtgggggaggaggaggaaggcgggaccacaggagcctctctgtccaggttctcgtacagccatatgagtgcctcggtgccaccccagtgaga

SEQ ID NO: 496216 - DNA, 120 bp, Artificial Sequence
  ENSG00000163394_12 (sequence is synthesized)
tgtcccctgaccctccaccgcagaaggaaggcagggaggaggcagagaagaaagaacggaagaagagatcaggaagagaaggagcagagctgatggagaaggaaggctccatctccagtg

SEQ ID NO: 496217 - DNA, 120 bp, Artificial Sequence
  ENSG00000163394_13 (sequence is synthesized)
ggaactcttcaaggtctgcttttcatccttcatctggattccagagcactgctccagtggggccatgattggtttctaggcagttcaaagcaggatatgttaagtaacactcaccatcag

SEQ ID NO: 496218 - DNA, 120 bp, Artificial Sequence
  ENSG00000163395_0 (sequence is synthesized)
gtcaatccagagcctcagcaagcagcagctggaaacggggaagagggagcagacaggaagcgggaggtcagctgtacacccagggtaatagaacttctaccctcagaggagtcaaagagg

SEQ ID NO: 496219 - DNA, 120 bp, Artificial Sequence
  ENSG00000163395_1 (sequence is synthesized)
aggcagaactatggcaggaaagctccggaagtcccacatccctggagtgagcatctggcagctggtggaggagatccctgaaggctgcagcacgccggactttgagcagaagcccgtcac

SEQ ID NO: 496220 - DNA, 120 bp, Artificial Sequence
  ENSG00000163395_2 (sequence is synthesized)
ctcggctctgccagaggggaaaaatgctgtctttcgggctgtggtctgtggggagcccaggcccgaggtgcgttggcagaactccaaaggtgacctcagtgattccagcaagtacaagat

SEQ ID NO: 496221 - DNA, 120 bp, Artificial Sequence
  ENSG00000163395_3 (sequence is synthesized)
ctcctccagccctggcagcaaggagcacgtgctgcagatcaacaagctgacaggcgaggacacggatctgtaccgctgcacagcagtaaatgcgtacggagaggccgcttgctcagtgag

SEQ ID NO: 496222 - DNA, 120 bp, Artificial Sequence
  ENSG00000163395_4 (sequence is synthesized)
actcactgtcatcgaagttggctttcggaagaatcggaagaggcacagggaaccgcaggaagacctcaggaaggagctgatggacttccggaagttgctgaaaaagagggccccaccagc

SEQ ID NO: 496223 - DNA, 120 bp, Artificial Sequence
  ENSG00000163395_5 (sequence is synthesized)
ccccaagaaaaagatggaccttgagcagatatggcagctgctgatgacagcagacaggaaggactacgagaagatctgcttgaagtatggcatcgtcgactaccgtggcatgttgcgcag

SEQ ID NO: 496224 - DNA, 120 bp, Artificial Sequence
  ENSG00000163395_6 (sequence is synthesized)
gctgcaggagatgaagaaggaacaggaggacaagatggcacagtacatcaacaccatctccagcttaagacacatcagggtcaccaaggatgggaatgcaaagtttgacttggagctgga

SEQ ID NO: 496225 - DNA, 120 bp, Artificial Sequence
  ENSG00000163395_7 (sequence is synthesized)
tctcaaggattctcagagcaagatttacctgtataaggatggtgagatgatcccctatggcttcaacaaccaaaccaagcactgtctgcgccggctggggaagcgctatgagttccagat

SEQ ID NO: 496226 - DNA, 120 bp, Artificial Sequence
  ENSG00000163395_8 (sequence is synthesized)
tcaagacctgaggcctgaggactctggcatttaccaggtcaaggtggaggatgctgtggtcttctccacagaactggaggccagtgccatccccccaagagtggtggtcccactggcgga

SEQ ID NO: 496227 - DNA, 120 bp, Artificial Sequence
  ENSG00000163395_9 (sequence is synthesized)
gacccactgtgaggagcagggtgacgcagtctttgaatgtaccctctccagcccctgccctagtgcagcctggcatttccggcaccggctactccaccccagtgacaaatatgaagtgta

SEQ ID NO: 496228 - DNA, 120 bp, Artificial Sequence
  ENSG00000163395_10 (sequence is synthesized)
tgtgtcccctgacgggctgacccaccggctggtggtgaggggggcacgtttctcagacatgggcccctattcgctgggcaccgggctctacacttccagcgcctggctggtggttgaagc

SEQ ID NO: 496229 - DNA, 120 bp, Artificial Sequence
  ENSG00000163395_11 (sequence is synthesized)
tgggaaggataaagaccttcagtccacaagtgctgaccacaaactgcagaggcaaggagcccaggcatcaggagcagaagagtctgggagcatcgagagccagggagagaaatccagaga

SEQ ID NO: 496230 - DNA, 120 bp, Artificial Sequence
  ENSG00000163395_12 (sequence is synthesized)
gcagggccccagggggggctcccttgaaggggctgggccggcttctgggctccagcacatagccagcccagacagggatggccttggcagacatggctactccttgatgggggacaaagg

SEQ ID NO: 496231 - DNA, 120 bp, Artificial Sequence
  ENSG00000163395_13 (sequence is synthesized)
gacagctgactcagcctggggccctggacaggagggcgagggctttccagtagcagagggaagcagagccactcttcccagggaaaatcaatcccacagagagggaggctgggccagaag

SEQ ID NO: 496232 - DNA, 120 bp, Artificial Sequence
  ENSG00000163395_14 (sequence is synthesized)
ccttgcagagaggccccatctacagggagagagctcagaatcagggttgggcctcccagaaaaacaacagcaagatcgtggcagagacagcaacagtgatgaatgctggaggaaagcagg

SEQ ID NO: 496233 - DNA, 120 bp, Artificial Sequence
  ENSG00000163395_15 (sequence is synthesized)
aggctgggaggctgggtccagtcggcttcaggctggaggactggggagcagcagggaaggaaaggagcacagaggggacagtggaagacaactggacaggcatgccccagagcaactgtg

SEQ ID NO: 496234 - DNA, 120 bp, Artificial Sequence
  ENSG00000163395_16 (sequence is synthesized)
ggatgctcgactgggacctgggagaggaaagagcgacctgcagggatgccagtctgatcctgtagggtcctggccaagaggaaagcagatagagatttcacaggatgacagcctggctga

SEQ ID NO: 496235 - DNA, 120 bp, Artificial Sequence
  ENSG00000163395_17 (sequence is synthesized)
gatggacagaggggatgctccaagtagggaaagggggagaggaatagtagtgtggggtggtgggactggcctgggagaagctggagacagcaatggggcaggaggtcctggcaccctgga

SEQ ID NO: 496236 - DNA, 120 bp, Artificial Sequence
  ENSG00000163395_18 (sequence is synthesized)
gcttactggaggaagaggttctggctccaaggtgggcatggcccctgaatcctggggttctcagggaggtagagatgctgactatggggaagccaggggctactgggggtcaggagagtt

SEQ ID NO: 496237 - DNA, 120 bp, Artificial Sequence
  ENSG00000163395_19 (sequence is synthesized)
gctagaacagatacctggaggcaaggacttccaggaaccatcaatatcaggtggtagaaaattccttctgggagatgggagtcctgagatcaaagctgaagactcactgcaggaggcaga

SEQ ID NO: 496238 - DNA, 120 bp, Artificial Sequence
  ENSG00000163395_20 (sequence is synthesized)
tggtatatgccggggggagtctgtagttacaggaagtgcctacaaaactggccctggaggcccaggagaccccagaggctgcgaaggtgtcctacaggagctcaggggaagggatggcca

SEQ ID NO: 496239 - DNA, 120 bp, Artificial Sequence
  ENSG00000163395_21 (sequence is synthesized)
ggaaacagcttgggcctcgggtgaggtagagtatgaccccagaagcttccagtcttcccagggctggacagcaggtcacagagcagcagggggtattggcagaatagaatctaagggcac

SEQ ID NO: 496240 - DNA, 120 bp, Artificial Sequence
  ENSG00000163395_22 (sequence is synthesized)
aagtccttgggatgacacaccatctagcctcagaaaaactggggcccaccatgggcctggagtgctggggcccagtggaggacaagagggtatgggtggtatctgggtggctggactgac

SEQ ID NO: 496241 - DNA, 120 bp, Artificial Sequence
  ENSG00000163395_23 (sequence is synthesized)
ggagtctggtcagggggtggatgccagaagccactggctaagtagggctccaggcctgggtgctcagggatctggggggacactaggagataagaaaggattaagaggtcctgggtcaat

SEQ ID NO: 496242 - DNA, 120 bp, Artificial Sequence
  ENSG00000163395_24 (sequence is synthesized)
agggtctgaaccagatttctggaatgggtcagggagctccagagtaaaaggacccagaggtgagacaggctataaggatggcttggaaggtcccgggagaatggaatctaggtacgaggg

SEQ ID NO: 496243 - DNA, 120 bp, Artificial Sequence
  ENSG00000163395_25 (sequence is synthesized)
tggcttaggatattctagggaaataagctctaaaagcggggctggttatagctatggctcaggggttccaggagaaatggggtccggccatggtgctggttgtagagtttcccctagggc

SEQ ID NO: 496244 - DNA, 120 bp, Artificial Sequence
  ENSG00000163395_26 (sequence is synthesized)
acctgcgggagtggagtctgaggaagggggtgggtacaggcatggctccggagcgcctgggggagtgtggtctggaaatgaagattctggccctgcaggaggagggtctgggagagttgc

SEQ ID NO: 496245 - DNA, 120 bp, Artificial Sequence
  ENSG00000163395_27 (sequence is synthesized)
cagtcttaaaaatggctcaggtggtcctgatggagcacccatgaatgacaccaggaattgggcctctgcatgccaggcaggcatggaccctaggggagggcaccattcagatggtggcct

SEQ ID NO: 496246 - DNA, 120 bp, Artificial Sequence
  ENSG00000163395_28 (sequence is synthesized)
agggagtcctggggtgacagggtctgcgggtagaggtggtctcaaggcccctggagtagtggagactgttgggatgggatgtgtggaagcagaaccagagagctctggaagaataaggcc

SEQ ID NO: 496247 - DNA, 120 bp, Artificial Sequence
  ENSG00000163395_29 (sequence is synthesized)
ttggggtcagactggaaattatgggggcttcagagcctcagaggccctgggggcctttggagaaggaggctatgaagatggctctgggggtccaggagccatgggaccagggtctctgag

SEQ ID NO: 496248 - DNA, 120 bp, Artificial Sequence
  ENSG00000163395_30 (sequence is synthesized)
ggcaggaagcaaagtgggtgagggggatgggacaagatgccctggtgctaaggcctctggagctggagctggttatagggatgataccaggcaccctgagtcactcgcacctcacaatgg

SEQ ID NO: 496249 - DNA, 120 bp, Artificial Sequence
  ENSG00000163395_31 (sequence is synthesized)
ggccgcttctgggagccagtgggcttatggggctggcaatgtgctgggttatgaggatggatcagaacttccagggcctcagggaactggggtcagaacagcctatggagaaaggtcaag

SEQ ID NO: 496250 - DNA, 120 bp, Artificial Sequence
  ENSG00000163395_32 (sequence is synthesized)
gggccttgggcctaggagtacagggccagggggtgaggcaggctttagagatggttcaggaggcctccaaggaatgggatcagcagatgggccaggttgtaggaagggtattgggagttc

SEQ ID NO: 496251 - DNA, 120 bp, Artificial Sequence
  ENSG00000163395_33 (sequence is synthesized)
tggggaaatggggtcagtggataaggaaggttataagaaagatttgggggctcctgagaatatgggttcggggagcaaggcagattatagggatggtgtagggggttctggggcaatggg

SEQ ID NO: 496252 - DNA, 120 bp, Artificial Sequence
  ENSG00000163395_34 (sequence is synthesized)
gtcaatggatgaagcaggttataggaaagatttaggggctcctgagggaataagttcagggagcaaggcagattataggggtggtttacaggattccagggaagcgggttcagggagcaa

SEQ ID NO: 496253 - DNA, 120 bp, Artificial Sequence
  ENSG00000163395_35 (sequence is synthesized)
ggcagattatagcggtggtttaaagggttccagggaaatcgggtcaatggatgaaacagataataggaaagatttgggggttcctgagggaatgggtgcaggttacagggctggtttaag

SEQ ID NO: 496254 - DNA, 120 bp, Artificial Sequence
  ENSG00000163395_36 (sequence is synthesized)
gggtcctggggagatggggtcactggatgagtcaggtcataggaatgggattggaggttatggggaaatggggtcaggttatagggaggatttgggggctcctgagggaatgggcacagg

SEQ ID NO: 496255 - DNA, 120 bp, Artificial Sequence
  ENSG00000163395_37 (sequence is synthesized)
gagcaaggcaggttatagggatggcttaaggggttctggagaaatgaggtcaatggatgaggcaggttataggaaaaatttgggagctcctgagagaatggattcagggagcaaggcagg

SEQ ID NO: 496256 - DNA, 120 bp, Artificial Sequence
  ENSG00000163395_38 (sequence is synthesized)
ttacaggggtggtttaaggggttctggggaaatggggttaattgaggcaggctataggaaagatttgggggtttctgagggagggggttcagggagcaaagcaggttataggggtggctt

SEQ ID NO: 496257 - DNA, 120 bp, Artificial Sequence
  ENSG00000163395_39 (sequence is synthesized)
aggttctggggaaatggggtctgtggataaggcaggctataggaaggatttgggggcttctgaggcaataggttcagggagtaaggcaggttttacggatggtttaggaggttctgaaga

SEQ ID NO: 496258 - DNA, 120 bp, Artificial Sequence
  ENSG00000163395_40 (sequence is synthesized)
caggttataggaaggatttgggggctcctaagggaatgggttcagggagtaaggcaagttttagggatggtttaggaggttctggagaaatggggtcagtgaatgaagcaggttatagga

SEQ ID NO: 496259 - DNA, 120 bp, Artificial Sequence
  ENSG00000163395_41 (sequence is synthesized)
ggatggtttaggaggttctggagaaatggggtcagtgaatgaagcaggttataggaaggacttgggggttcctgagggaataggttcaggaagtaaggcaggttttagggatggtttagg

SEQ ID NO: 496260 - DNA, 88 bp, Artificial Sequence
  ENSG00000163395_42 (sequence is synthesized)
gggagctggggaaatggggtcaatggatgaggcaggttataggaagaatttgggggctcctgagggaataggttcagggagtaaggca

SEQ ID NO: 496261 - DNA, 76 bp, Artificial Sequence
  ENSG00000163395_43 (sequence is synthesized)
gggaaatggggtcaatggatgaggcaggttataggaagaatttgggggctcctgagggaatatgtagaaatggggt

SEQ ID NO: 496262 - DNA, 120 bp, Artificial Sequence
  ENSG00000163395_44 (sequence is synthesized)
tgagggaatgggttcagggagtaaggcaggtttcagggatggtttagggggttctggagaaatggggtcagtgaatgaagcaggttataggaaggatttgggtgctcctaagggaatagg

SEQ ID NO: 496263 - DNA, 120 bp, Artificial Sequence
  ENSG00000163395_45 (sequence is synthesized)
caggttataggaaggatttgggtgctcctaagggaataggttcagggagcaaggcagattttagggatgctttagggagttctggggaaatggggtcaatggatgaggcaggttatagga

SEQ ID NO: 496264 - DNA, 85 bp, Artificial Sequence
  ENSG00000163395_46 (sequence is synthesized)
gggtcagtgagagggaatgggttcagggagtaaggcaggtttcagggatggtttagggggttctggagaaatggggtcagtgaat

SEQ ID NO: 496265 - DNA, 120 bp, Artificial Sequence
  ENSG00000163395_47 (sequence is synthesized)
ggatggtttagggggttctggagaaatggggtcagtgaatgaagcaggttataggaaggatttgggtgctcctaagggaataggttcagggagcaaggcagattttagggatgctttagg

SEQ ID NO: 496266 - DNA, 85 bp, Artificial Sequence
  ENSG00000163395_48 (sequence is synthesized)
taggttcagggagcaaggcagattttagggatgctttagggagttctggggaaatggtgggctcctgagggaataggttcaggaa

SEQ ID NO: 496267 - DNA, 120 bp, Artificial Sequence
  ENSG00000163395_49 (sequence is synthesized)
gatttgggggctcctgagggaatgggttcagggagtaaggaaggtttcagggatggtttagggggttctgaagaaatggggtcagtgaataaggcaggttataggaaggatttgggggct

SEQ ID NO: 496268 - DNA, 120 bp, Artificial Sequence
  ENSG00000163395_50 (sequence is synthesized)
ggttataggaaggatttgggggctcctaagggaatgggttcagggagtaaggaaggtttcagggatggtttagggggttctgaggaaatggggtcaatggatgaggcaggttataggaag

SEQ ID NO: 496269 - DNA, 79 bp, Artificial Sequence
  ENSG00000163395_51 (sequence is synthesized)
gatttgggggctcctgagggaataggttcagggagtaaggcaggtttcagggatggtttagggggttctgaagaaatgc

SEQ ID NO: 496270 - DNA, 120 bp, Artificial Sequence
  ENSG00000163395_52 (sequence is synthesized)
atggtttagggagttctgtagaaatggggtcagtgaatgaggcaggttataggaaggatttaggggctcctaagggaatgggttcagggagtaagacaggtttcagggatggtttagggg

SEQ ID NO: 496271 - DNA, 77 bp, Artificial Sequence
  ENSG00000163395_53 (sequence is synthesized)
ggttcagggagtaagacaggtttcagggatggtttagggggttctgaagaaatggagagggaataggttcaggaagt

SEQ ID NO: 496272 - DNA, 85 bp, Artificial Sequence
  ENSG00000163395_54 (sequence is synthesized)
caggttttagggatggtttagggagttctacagaaatggggtcagtgaaagggaatgggttcagagagtaaggcaggttttaggg

SEQ ID NO: 496273 - DNA, 120 bp, Artificial Sequence
  ENSG00000163395_55 (sequence is synthesized)
atgaggcaggttataggaaggatttgggagctcctgagggaatgggttcagggagtaaggcaggtttcagggatggtttagggggttctgaagaaatggggtcagtgaataaggcaggtt

SEQ ID NO: 496274 - DNA, 120 bp, Artificial Sequence
  ENSG00000163395_56 (sequence is synthesized)
ataggaaggatttgggggctcctaagggaatgggttcagggagtaaggcaggtttcagggatggtttagggagttctggggaaatggggtcaatggatgaggcagattataggaaggatt

SEQ ID NO: 496275 - DNA, 120 bp, Artificial Sequence
  ENSG00000163395_57 (sequence is synthesized)
tgggagctcctgaggaaatgggttcaggcagttacacagattacaggaatggtttaggcagttctggaaaaatcagttcaggggatgaggcaggttataagaatgttttagggggttctg

SEQ ID NO: 496276 - DNA, 120 bp, Artificial Sequence
  ENSG00000163395_58 (sequence is synthesized)
ggaggaatccattagggagcgaggcaggttctaggggtagtttggaggattctgggtacattttgtcatggaatgaggcaggttctaggcaaggctttgggggaactagtggcatggggt

SEQ ID NO: 496277 - DNA, 120 bp, Artificial Sequence
  ENSG00000163395_59 (sequence is synthesized)
cagggagtgaggtcagttatagaggaggctcaggaggatctggggaaacgggaccagagggtaagatgggttatggagatggttcagggaggcttggagtaccaggctcactggctggaa

SEQ ID NO: 496278 - DNA, 120 bp, Artificial Sequence
  ENSG00000163395_60 (sequence is synthesized)
taggacatgaggctggacccagaggccataaagccatgggtcacaggtcaggatattgggtagcatcagagggtgacacgaactccaaggatggtccagagcgagccagggaaaccaggc

SEQ ID NO: 496279 - DNA, 120 bp, Artificial Sequence
  ENSG00000163395_61 (sequence is synthesized)
ttgtggatggggcaggacctggggtggaacctgggatggctggaatgccaggcactgcaggtggcatggcacacagagacagcctcaggggcacaggggtgctggggtctcagggagggc

SEQ ID NO: 496280 - DNA, 120 bp, Artificial Sequence
  ENSG00000163395_62 (sequence is synthesized)
gacagactctttcagatgagcgaggctccaccaaagatcttgggggctatggaacttcagggatccctgaggcctcggaggctgctggtgccaagggaaaaccagatgtcaaagaatggc

SEQ ID NO: 496281 - DNA, 120 bp, Artificial Sequence
  ENSG00000163395_63 (sequence is synthesized)
aagacagttctgggactccagggtcttctagagacagaggggctcccagggtgaaggataggtctccagaccaagcagggataatgggggcttctgggtttcttgatggcaagggggcag

SEQ ID NO: 496282 - DNA, 120 bp, Artificial Sequence
  ENSG00000163395_64 (sequence is synthesized)
tggaaggtgagacctgggcaggaatggctgctctagggtctggatatgaacgggacatctggaaagcaggcccaggaatgacagacaggggtagagttgctggccagggggggttggcat

SEQ ID NO: 496283 - DNA, 120 bp, Artificial Sequence
  ENSG00000163395_65 (sequence is synthesized)
ctcagggaggtggggactcacttttgggaggcagaagggtaggctcagggagttcagtggggacaggtcaggatctggacagcggctctatgcctgggggaaggggcaagtcaacatcag

SEQ ID NO: 496284 - DNA, 120 bp, Artificial Sequence
  ENSG00000163395_66 (sequence is synthesized)
ggcctgctgatagacaagggacgagcaatgcttgggctcctgattgggaaaaccaggggtttagccaaggcagcatagatgctgggaagcagcccgcaggctccagagcttccggttctc

SEQ ID NO: 496285 - DNA, 120 bp, Artificial Sequence
  ENSG00000163395_67 (sequence is synthesized)
tgcaggagaaagatgccgcttttggtgggacccatgaagggccagggggctttaagggtggggagggtgcaccaggccaagaggcggctggtggatgccgaagcccatggtccctggata

SEQ ID NO: 496286 - DNA, 120 bp, Artificial Sequence
  ENSG00000163395_68 (sequence is synthesized)
gcaaaggttcaagtcctggaaggggcagttctgttgatgcagaggactcaggtatcctgggcaaggggaattctactgagtgggggaatgccctcaccccaaaacctggggagtccggac

SEQ ID NO: 496287 - DNA, 120 bp, Artificial Sequence
  ENSG00000163395_69 (sequence is synthesized)
ctcagggagcctggaatggcttagatggtccctttggcagaaaagcctctagagataggtcaggagggacccaggacctgagctctcagcgaggcaagggacagagaggaggaaagaggt

SEQ ID NO: 496288 - DNA, 120 bp, Artificial Sequence
  ENSG00000163395_70 (sequence is synthesized)
ccctcggggagcaggggtccctggaggctgagaatggtgaggtccagggtcctggggccctaaaggaggatgaagggcagggagtggaagaggctgggaggtcaggcaggaggcctggct

SEQ ID NO: 496289 - DNA, 120 bp, Artificial Sequence
  ENSG00000163395_71 (sequence is synthesized)
cactcaggagcaggtctcaggcacagtcaggggctgaggttggaggaggaaagagaaggggagcagacgaggctggaagcatggggtggcagcctatgggagagaactgggggtgcctgg

SEQ ID NO: 496290 - DNA, 120 bp, Artificial Sequence
  ENSG00000163395_72 (sequence is synthesized)
aggagatgctgaatgaagatcagagccgggagccccctggtcaccttggtagcaggagaagtggcaaagacggcaggttggacatctatggagagaggagagatgctacccggagttcca

SEQ ID NO: 496291 - DNA, 120 bp, Artificial Sequence
  ENSG00000163395_73 (sequence is synthesized)
catccagatacaagcctggcactggcagtttctccaaggatgcccaaggccccatgggccacttctcccagggcctggctgacatggaagtgcagccgggggaggccgccacactctcct

SEQ ID NO: 496292 - DNA, 120 bp, Artificial Sequence
  ENSG00000163395_74 (sequence is synthesized)
gtaccctcaccagtgacctgggacctggcacctggtttaaggatggcgtcaagctcaccacccaggatggagtcatctttaagcaagacggtctcgtgcacagcctcttcatcacgcatg

SEQ ID NO: 496293 - DNA, 120 bp, Artificial Sequence
  ENSG00000163395_75 (sequence is synthesized)
tgcaggggacccaagctgggaggtacacctttgtagctggtgaccagcagagcgaggccaccctgaccgtccaggattcccctaccattgctccagatgtgacagagaaactgagagagc

SEQ ID NO: 496294 - DNA, 120 bp, Artificial Sequence
  ENSG00000163395_76 (sequence is synthesized)
cactggtggtcaaggctgggaagccggtgatagtgaagatccccttccagagccacctccccattcaggctgcctggaggaaggacggggctgaggtggtgggcagcagtgacagggagg

SEQ ID NO: 496295 - DNA, 120 bp, Artificial Sequence
  ENSG00000163395_77 (sequence is synthesized)
cccaggtggacctgggggatggctacacgcggctgtgcctccccagcgcaggcaggaaggactgtggccagtacagcgtgacactgaggagtgagggaggctctgtgcaggccgagctca

SEQ ID NO: 496296 - DNA, 120 bp, Artificial Sequence
  ENSG00000163395_78 (sequence is synthesized)
ctctgcaagtcatagacaagcctgatcccccacaaggccccatggaggttcaggattgccatagggctggcgtctgcctccgctggcggcccccaagggacaatgggggccggactgtag

SEQ ID NO: 496297 - DNA, 120 bp, Artificial Sequence
  ENSG00000163395_79 (sequence is synthesized)
agtgctacgtggtggagagacggcaggctggcaggagcacttggctgaaggtgggcgaggcccccgctgacagcaccaccttcacggatgcccatgtggagccaggcaggaagtatacct

SEQ ID NO: 496298 - DNA, 120 bp, Artificial Sequence
  ENSG00000163395_80 (sequence is synthesized)
tccgagtgcgggctgtgacctcagagggggctggcgaggccctggagtctgaggagatattggtggctcctgaggctctccccaaggccccttccgcgccagccatcctgtcggcctcca

SEQ ID NO: 496299 - DNA, 120 bp, Artificial Sequence
  ENSG00000163395_81 (sequence is synthesized)
gccagggcatcacactgacatggacagcacctcggggccccggcagcgcccacatcctgggctacctgatcgagaggcgtaagaaggggagcaacacctggacggcagtgaacgaccagc

SEQ ID NO: 496300 - DNA, 120 bp, Artificial Sequence
  ENSG00000163395_82 (sequence is synthesized)
cggtgcctgagaggaggtggacggtggcggacgtgcggcagggctgtcagtatgagttccgggtcacagctgtggctccctcaggtcccggagagcctggacctccatcggatgctgtct

SEQ ID NO: 496301 - DNA, 120 bp, Artificial Sequence
  ENSG00000163395_83 (sequence is synthesized)
ttgctcgggaccccatgagaccccctgggctggtgaggaatctccaagtcacagacagatcgaacaccagcatcactctgagctgggctgggccagacacccaggaaggggatgaagccc

SEQ ID NO: 496302 - DNA, 120 bp, Artificial Sequence
  ENSG00000163395_84 (sequence is synthesized)
aggggtatgtggtggagctgtgcagctcagacagtctccagtggctcccgtgccatgtgggcaccgtgccagtcaccacctacacggccaaggggcttcggcctggagagggctacttcg

SEQ ID NO: 496303 - DNA, 120 bp, Artificial Sequence
  ENSG00000163395_85 (sequence is synthesized)
tgcgggtgacagcagttaatgaaggaggccagagccagcccagtgccctggacacattagtgcaagccatgcctgttactgtctgtcccaagttcctcgtggactccagcaccaaggact

SEQ ID NO: 496304 - DNA, 120 bp, Artificial Sequence
  ENSG00000163395_86 (sequence is synthesized)
tgctgacagtcaaggtcggggacacagttcgtgtgcccgtctcctttgaagccatgcccatgcctgaggtgacctggctgaaggatggcttgcccttgcccaaaagaagtgtgactgtca

SEQ ID NO: 496305 - DNA, 120 bp, Artificial Sequence
  ENSG00000163395_87 (sequence is synthesized)
ctaaggatggcctcacccagcttctgatccctgtggctggactctcagacagtggtctctacactgtggtgctgaggaccctgcaggggaaggaggttgcccacagcttccgtatcaggg

SEQ ID NO: 496306 - DNA, 120 bp, Artificial Sequence
  ENSG00000163395_88 (sequence is synthesized)
tggcagcatgcccgcaggcccctgggcccatccacctgcaggagaacgtgcctgggacggtgacggccgagtgggaaccctctcctgacgaggcccaggatgtcccgctgcactacgcgg

SEQ ID NO: 496307 - DNA, 120 bp, Artificial Sequence
  ENSG00000163395_89 (sequence is synthesized)
tgttcacacgctcctcagcgcacggtccctggcacgaggcagccgaccgcatccacaccaaccgcttcaccctcctgggcatcctccccggccacgaataccacttcagggtggtggcca

SEQ ID NO: 496308 - DNA, 120 bp, Artificial Sequence
  ENSG00000163395_90 (sequence is synthesized)
agaatgagctgggggccagcaaaccctcggacaccagccagccctggtgcatcccccggcagcgcgacaggttcacagtgaaggctccgtgctaccgggagcccgacctgagccagaagc

SEQ ID NO: 496309 - DNA, 120 bp, Artificial Sequence
  ENSG00000163395_91 (sequence is synthesized)
cccggttcctggtgggcctgcggtcccacctgctgccccagggctgcgagtgctgcatgagctgtgccgtgcagggctcgccccggccccacgtcacctggttcaagaatgaccgcagcc

SEQ ID NO: 496310 - DNA, 120 bp, Artificial Sequence
  ENSG00000163395_92 (sequence is synthesized)
tggaaggaaaccccgcggtgtacagcactgacctgctgggcgtgtgctccctcaccatccccagcgtatccccgaaggacagcggggagtacaaggctgtggctgagaacacgctgggcc

SEQ ID NO: 496311 - DNA, 120 bp, Artificial Sequence
  ENSG00000163395_93 (sequence is synthesized)
aggcagtcagcactgccaccctcattgtcatagaacccagcacctagcctcacctcaccctgggatggtcctggacccttgaagcttcacttccgacacctgcactggcccgggaagcca

SEQ ID NO: 496312 - DNA, 120 bp, Artificial Sequence
  ENSG00000163395_94 (sequence is synthesized)
atcccaaggatggaggctgtgcccagagccccaggaaaatgggagtgagaagatgcctggcgaggttttggccaggaggacgtgaagtccttggggaagaaaaacaagggaggagggcat

SEQ ID NO: 496313 - DNA, 120 bp, Artificial Sequence
  ENSG00000163395_95 (sequence is synthesized)
tccacctcctggctccaagctaagtcactcaacagaatgacagcgaacctcctggaccctcaccatatgggtttctttcttcttcgcttcaggagatccagagggcacctgcctgcagga

SEQ ID NO: 496314 - DNA, 120 bp, Artificial Sequence
  ENSG00000163395_96 (sequence is synthesized)
tgggccggctccttattttcctgggctgagccgtttggagggagggtgggcacagctgggcctgctgtgaccactgggagggaagaggagaggaggtcagaggacctgggtgaggactag

SEQ ID NO: 496315 - DNA, 120 bp, Artificial Sequence
  ENSG00000163395_97 (sequence is synthesized)
ggcatcaaggtcgtgtgtgtgggtgggggcagcctccacctcctggattcaagagattccaggggtgcagcaagtgctttctatgcgtttcttcattaaaacattaggctaatacaggca

SEQ ID NO: 496316 - DNA, 120 bp, Artificial Sequence
  ENSG00000163395_98 (sequence is synthesized)
ctgcaagtcataggtaccagccctgtcttcccccaactaaggcctgagagtccctggggttctgggccctccctgccatcaagggcaggcctgggatatgatctctgctggctctgatcc

SEQ ID NO: 496317 - DNA, 120 bp, Artificial Sequence
  ENSG00000163395_99 (sequence is synthesized)
tcatttgcatgctgtttaagatccagacctaccactaactctgctcagactgcttaggaagaagcagttgagatgaacacagtgctgggctcctgctgggggggaggagccggttatgct

SEQ ID NO: 496318 - DNA, 80 bp, Artificial Sequence
  ENSG00000163399_0 (sequence is synthesized)
ggagctgcggcggggtctggggcgcagagcagcggcgggaggaggcggacacgtggcaacagcggtagcagcccgggcgg

SEQ ID NO: 496319 - DNA, 120 bp, Artificial Sequence
  ENSG00000163399_1 (sequence is synthesized)
ccgccctcccaccctcccgccccgcggcagccctagctccctccacttggctcccctggtcccgctcgctcggccgggagctgctctgtgcttttctctctgattctccagcgacaggac

SEQ ID NO: 496320 - DNA, 120 bp, Artificial Sequence
  ENSG00000163399_2 (sequence is synthesized)
ccggcgccgggcactgagcaccgccaccatggggaagggggttggacgtgataagtatgagcctgcagctgtttcagaacaaggtgataaaaagggcaaaaagggcaaaaaagacaggga

SEQ ID NO: 496321 - DNA, 120 bp, Artificial Sequence
  ENSG00000163399_3 (sequence is synthesized)
catggatgaactgaagaaagaagtttctatggatgatcataaacttagccttgatgaacttcatcgtaaatatggaacagacttgagccggggattaacatctgctcgtgcagctgagat

SEQ ID NO: 496322 - DNA, 120 bp, Artificial Sequence
  ENSG00000163399_4 (sequence is synthesized)
cctggcgcgagatggtcccaacgccctcactccccctcccactactcctgaatggatcaagttttgtcggcagctctttggggggttctcaatgttactgtggattggagcgattctttg

SEQ ID NO: 496323 - DNA, 120 bp, Artificial Sequence
  ENSG00000163399_5 (sequence is synthesized)
tttcttggcttatagcatccaagctgctacagaagaggaacctcaaaacgataatctgtacctgggtgtggtgctatcagccgttgtaatcataactggttgcttctcctactatcaaga

SEQ ID NO: 496324 - DNA, 120 bp, Artificial Sequence
  ENSG00000163399_6 (sequence is synthesized)
agctaaaagttcaaagatcatggaatccttcaaaaacatggtccctcagcaagcccttgtgattcgaaatggtgagaaaatgagcataaatgcggaggaagttgtggttggggatctggt

SEQ ID NO: 496325 - DNA, 120 bp, Artificial Sequence
  ENSG00000163399_7 (sequence is synthesized)
ggaagtaaaaggaggagaccgaattcctgctgacctcagaatcatatctgcaaatggctgcaaggtggataactcctcgctcactggtgaatcagaaccccagactaggtctccagattt

SEQ ID NO: 496326 - DNA, 120 bp, Artificial Sequence
  ENSG00000163399_8 (sequence is synthesized)
cacaaatgaaaaccccctggagacgaggaacattgccttcttttcaaccaattgtgttgaaggcaccgcacgtggtattgttgtctacactggggatcgcactgtgatgggaagaattgc

SEQ ID NO: 496327 - DNA, 120 bp, Artificial Sequence
  ENSG00000163399_9 (sequence is synthesized)
cacacttgcttctgggctggaaggaggccagacccccattgctgcagaaattgaacattttatccacatcatcacgggtgtggctgtgttcctgggtgtgtctttcttcatcctttctct

SEQ ID NO: 496328 - DNA, 120 bp, Artificial Sequence
  ENSG00000163399_10 (sequence is synthesized)
catccttgagtacacctggcttgaggctgtcatcttcctcatcggtatcatcgtagccaatgtgccggaaggtttgctggccactgtcacggtctgtctgacacttactgccaaacgcat

SEQ ID NO: 496329 - DNA, 120 bp, Artificial Sequence
  ENSG00000163399_11 (sequence is synthesized)
ggcaaggaaaaactgcttagtgaagaacttagaagctgtggagaccttggggtccacgtccaccatctgctctgataaaactggaactctgactcagaaccggatgacagtggcccacat

SEQ ID NO: 496330 - DNA, 120 bp, Artificial Sequence
  ENSG00000163399_12 (sequence is synthesized)
gtggtttgacaatcaaatccatgaagctgatacgacagagaatcagagtggtgtctcttttgacaagacttcagctacctggcttgctctgtccagaattgcaggtctttgtaacagggc

SEQ ID NO: 496331 - DNA, 120 bp, Artificial Sequence
  ENSG00000163399_13 (sequence is synthesized)
agtgtttcaggctaaccaggaaaacctacctattcttaagcgggcagttgcaggagatgcctctgagtcagcactcttaaagtgcatagagctgtgctgtggttccgtgaaggagatgag

SEQ ID NO: 496332 - DNA, 120 bp, Artificial Sequence
  ENSG00000163399_14 (sequence is synthesized)
agaaagatacgccaaaatcgtcgagatacccttcaactccaccaacaagtaccagttgtctattcataagaaccccaacacatcggagccccaacacctgttggtgatgaagggcgcccc

SEQ ID NO: 496333 - DNA, 120 bp, Artificial Sequence
  ENSG00000163399_15 (sequence is synthesized)
aaagacgcctttcagaacgcctatttggagctggggggcctcggagaacgagtcctaggtttctgccacctctttctgccagatgaacagtttcctgaagggttccagtttgacactgac

SEQ ID NO: 496334 - DNA, 120 bp, Artificial Sequence
  ENSG00000163399_16 (sequence is synthesized)
gatgtgaatttccctatcgataatctgtgctttgttgggctcatctccatgattgaccctccacgggcggccgttcctgatgccgtgggcaaatgtcgaagtgctggaattaaggtcatc

SEQ ID NO: 496335 - DNA, 120 bp, Artificial Sequence
  ENSG00000163399_17 (sequence is synthesized)
atggtcacaggagaccatccaatcacagctaaagctattgccaaaggtgtgggcatcatctcagaaggcaatgagaccgtggaagacattgctgcccgcctcaacatcccagtcagccag

SEQ ID NO: 496336 - DNA, 120 bp, Artificial Sequence
  ENSG00000163399_18 (sequence is synthesized)
gtgaaccccagggatgccaaggcctgcgtagtacacggcagtgatctaaaggacatgacctccgagcagctggatgacattttgaagtaccacactgagatagtgtttgccaggacctcc

SEQ ID NO: 496337 - DNA, 120 bp, Artificial Sequence
  ENSG00000163399_19 (sequence is synthesized)
cctcagcagaagctcatcattgtggaaggctgccaaagacagggtgctatcgtggctgtgactggtgacggtgtgaatgactctccagctttgaagaaagcagacattggggttgctatg

SEQ ID NO: 496338 - DNA, 120 bp, Artificial Sequence
  ENSG00000163399_20 (sequence is synthesized)
gggattgctggctcagatgtgtccaagcaagctgctgacatgattcttctggatgacaactttgcctcaattgtgactggagtagaggaaggtcgtctgatctttgataacttgaagaaa

SEQ ID NO: 496339 - DNA, 120 bp, Artificial Sequence
  ENSG00000163399_21 (sequence is synthesized)
tccattgcttataccttaaccagtaacattcccgagatcaccccgttcctgatatttattattgcaaacattccactaccactggggactgtcaccatcctctgcattgacttgggcact

SEQ ID NO: 496340 - DNA, 120 bp, Artificial Sequence
  ENSG00000163399_22 (sequence is synthesized)
gacatggttcctgccatctccctggcttatgagcaggctgagagtgacatcatgaagagacagcccagaaatcccaaaacagacaaacttgtgaatgagcggctgatcagcatggcctat

SEQ ID NO: 496341 - DNA, 120 bp, Artificial Sequence
  ENSG00000163399_23 (sequence is synthesized)
gggcagattggaatgatccaggccctgggaggcttctttacttactttgtgattctggctgagaacggcttcctcccaattcacctgttgggcctccgagtggactgggatgaccgctgg

SEQ ID NO: 496342 - DNA, 120 bp, Artificial Sequence
  ENSG00000163399_24 (sequence is synthesized)
atcaacgatgtggaagacagctacgggcagcagtggacctatgagcagaggaaaatcgtggagttcacctgccacacagccttcttcgtcagtatcgtggtggtgcagtgggccgacttg

SEQ ID NO: 496343 - DNA, 120 bp, Artificial Sequence
  ENSG00000163399_25 (sequence is synthesized)
gtcatctgtaagaccaggaggaattcggtcttccagcaggggatgaagaacaagatcttgatatttggcctctttgaagagacagccctggctgctttcctttcctactgccctggaatg

SEQ ID NO: 496344 - DNA, 120 bp, Artificial Sequence
  ENSG00000163399_26 (sequence is synthesized)
ggtgttgctcttaggatgtatcccctcaaacctacctggtggttctgtgccttcccctactctcttctcatcttcgtatatgacgaagtcagaaaactcatcatcaggcgacgccctggc

SEQ ID NO: 496345 - DNA, 120 bp, Artificial Sequence
  ENSG00000163399_27 (sequence is synthesized)
ggctgggtggagaaggaaacctactattagccccccgtcctgcacgccgtggagcatcaggccacacactctgcatccgacacccaccccctctttgtgtacttcagtcttggagtttgg

SEQ ID NO: 496346 - DNA, 120 bp, Artificial Sequence
  ENSG00000163399_28 (sequence is synthesized)
aactctaccctggtaggaaagcaccgcagcatgtggggaagcaagacgtcctggaatgaagcatgtagctctatggggggaggggggagggctgcctgaaaaccatccatctgtggaaat

SEQ ID NO: 496347 - DNA, 120 bp, Artificial Sequence
  ENSG00000163399_29 (sequence is synthesized)
gacagcggggaaggtttttatgtgcctttttgtttttgtaaaaaaggaacacccggaaagactgaaagaatacattttatatctggatttttacaaataaagatggctattataatggaa

SEQ ID NO: 496348 - DNA, 120 bp, Artificial Sequence
  ENSG00000163399_30 (sequence is synthesized)
agcagcgggggcggccccgggactgagccggcatccctgagcctggctcccctccctgcgaccgccgtcacctccttctccttccttttccctccgccctccgtgccctgaggaaaggcg

SEQ ID NO: 496349 - DNA, 120 bp, Artificial Sequence
  ENSG00000163399_31 (sequence is synthesized)
cttccttttccctccgccctccgtgccctgaggaaaggcgcgctcctccccttcccctggggcgctccgccggggcctcctcccgggcctccgttcccgccgcggccccggttccggcgg

SEQ ID NO: 496350 - DNA, 120 bp, Artificial Sequence
  ENSG00000163399_32 (sequence is synthesized)
tggggcttagcttgctccgcgcagaggcggccgccctcccccaaagaaaaaactggctgcttctaagtgcgaagccggctgggcgggctggtgccagaaagggtgtgtcttcactgccct

SEQ ID NO: 496351 - DNA, 120 bp, Artificial Sequence
  ENSG00000163399_33 (sequence is synthesized)
tgtcacggtaagaggcaggtgatggtcaccctgactcagatcagcttgcacgaatgttacactcttccgctatcctattctaaggtattgccaacttatgttttattctggatgtttgat

SEQ ID NO: 496352 - DNA, 120 bp, Artificial Sequence
  ENSG00000163399_34 (sequence is synthesized)
atagttcttcttgagagccacatcacgtggtgaattttgacagtgagaaaacctcagcatttgtttatacgtaagataaccccaaagcatacattttgcttttaaattatcacgtggtcc

SEQ ID NO: 496353 - DNA, 120 bp, Artificial Sequence
  ENSG00000163399_35 (sequence is synthesized)
caagagctgtaccgaaagaggcaccaacaaatgtggttgctccataatggagagaatgtcaagaatgttgactatctttagacctgcttcattaatagataagatagaaactaaagaacc

SEQ ID NO: 496354 - DNA, 120 bp, Artificial Sequence
  ENSG00000163399_36 (sequence is synthesized)
gatatgtaataatgtctttgcaaagcaaagaatataaacagtataaaagtactagcatttagatgtattgtatcatttaatccttaaaaacatgaaatgaggttggcactattctttatc

SEQ ID NO: 496355 - DNA, 120 bp, Artificial Sequence
  ENSG00000163399_37 (sequence is synthesized)
aacgcacatacgctgctgcgatgaaggtcatgggcatttcctgatgcaaaagatttgaaacactctgagactttagcttttgacaaggggaccccagagaacgttaagccagtgtttctc

SEQ ID NO: 496356 - DNA, 120 bp, Artificial Sequence
  ENSG00000163399_38 (sequence is synthesized)
gaaggctctgaacttcacacctgattttccaccagaacatttctgcccttttctgtgtgacaatcctttgaatagaaagttctacagccaaacatttgatttaggaagagcaggactctg

SEQ ID NO: 496357 - DNA, 120 bp, Artificial Sequence
  ENSG00000163399_39 (sequence is synthesized)
acgcagtacagttaatctgtgcacaggaaagaagagctgtttgaagaggttattcggtaaatgcagagaatgtctttgtagtataaattattgctctatataaaactgcttgtaagtttt

SEQ ID NO: 496358 - DNA, 120 bp, Artificial Sequence
  ENSG00000163399_40 (sequence is synthesized)
agcgcccggggaggccatccgcaggtgggcgcggggcctggattccacagaggggcggagtccctcagtcaggcgctggctgcaatcacacccgagcgccagccccctccagcatccctg

SEQ ID NO: 496359 - DNA, 120 bp, Artificial Sequence
  ENSG00000163399_41 (sequence is synthesized)
agtcccagaggagatcgccgaagcgctggaaaagccgttccgcccacgacttctggtgccgggtcggcggcgactgggggagcccagttccgagaccgtaccgcacccactgcggacctc

SEQ ID NO: 496360 - DNA, 120 bp, Artificial Sequence
  ENSG00000163399_42 (sequence is synthesized)
agctccaaaaagtatgaaatagtatgtgtggcttttccccccattacttgtggtaatagttgttattttcagaattttgagtggtatgtacaaaaattcctatgggttggaaaactgtga

SEQ ID NO: 496361 - DNA, 120 bp, Artificial Sequence
  ENSG00000163399_43 (sequence is synthesized)
aagcttgacatgtcagtaaatcagactaacaaatcctgaggcttccatgatagcagctagtgtttaggatttggcccaagataagataaagccacacaggctctagctccatggaactgc

SEQ ID NO: 496362 - DNA, 120 bp, Artificial Sequence
  ENSG00000163399_44 (sequence is synthesized)
tcaacagcgaactgcattgagcactcaggtctgccacagctgtagtccagttgtctttagaggccaactgggggtatgctggagcgtaggcgcccaggctcaaatcttgatttgcttgct

SEQ ID NO: 496363 - DNA, 120 bp, Artificial Sequence
  ENSG00000163399_45 (sequence is synthesized)
ttcccctgtattacatacaggtctaacctcaggggctctagtaagaaaatgacagacaccatctgcgtatctaccatgtgacatgcacagaatttgggcatttatatgctaccgtttctt

SEQ ID NO: 496364 - DNA, 120 bp, Artificial Sequence
  ENSG00000163399_46 (sequence is synthesized)
ttccctgaaactttttgaaagtagatgttattttcttttccctattttatagcagttgagagccagtaagtgggaacaccaggacttgcagttggcttcaaagccatgcttatgccttga

SEQ ID NO: 496365 - DNA, 120 bp, Artificial Sequence
  ENSG00000163399_47 (sequence is synthesized)
ccttttgatgataaattttccctttatttttctacatttgttaaatagagttgaatctttcacctagttgaatcttcaacaattcccatttttgcacttttcccagctagcccattgcag

SEQ ID NO: 496366 - DNA, 120 bp, Artificial Sequence
  ENSG00000163399_48 (sequence is synthesized)
ggaaattgttttgtacaaaaattaaagaaaccttttcataaaataggcgttatgtatccttgttatgtagaggattttgatattaaatgtgtaacaaatgttataaaagtaaatagtcta

SEQ ID NO: 496367 - DNA, 120 bp, Artificial Sequence
  ENSG00000163399_49 (sequence is synthesized)
gggatgtcttatttccagataatcactgaaatgtctgggaataacttgaatagcaagccaatatgtagcattttttcagtaaggcatcaagagacatgggtactgtggtattctgatata

SEQ ID NO: 496368 - DNA, 120 bp, Artificial Sequence
  ENSG00000163399_50 (sequence is synthesized)
tattggtttttgtccacagttcctggttcataactcccatagcccttattacagtcgtttgttataatgttgggtgtgttagacctcagtggcaggcttcaagaaacaggatctctctcc

SEQ ID NO: 496369 - DNA, 120 bp, Artificial Sequence
  ENSG00000163399_51 (sequence is synthesized)
tgccctccttttcacctgtcgcaaggcaggactctaatcttgttccacttttctgattttccaggtagatagtgttggaattgaattggaggaaaccttggtggtggggagaaaccgcca

SEQ ID NO: 496370 - DNA, 120 bp, Artificial Sequence
  ENSG00000163399_52 (sequence is synthesized)
attggaggaaaccttggtggtggggagaaaccgccacacctttgctcacagaagtcatcttctgtgttgattgttggggtgtaagagtagagaagaggccgggtgcggtggctcatgcct

SEQ ID NO: 496371 - DNA, 120 bp, Artificial Sequence
  ENSG00000163399_53 (sequence is synthesized)
ccccaagcatgtcagcctgtgaattagtgtgaagttaaggttttccaagtattacatgactcatcagagagatggatgtcttctaccccacccaaaaccaacctattttccttctatcca

SEQ ID NO: 496372 - DNA, 120 bp, Artificial Sequence
  ENSG00000163399_54 (sequence is synthesized)
aaaagtggtagcctttcttttgaatgtaaactctgaatacaggcacaccatgtaacagcaatatctcttaaactggcgagcaagcttttgtaacttgtgtaaataaaaaagtgaataata

SEQ ID NO: 496373 - DNA, 120 bp, Artificial Sequence
  ENSG00000163406_0 (sequence is synthesized)
agagtaggctggcagctgtcctaactgcctactaaagccaaatgcttgaggagagagagagagtaaggagccagccatgaatcctttccagaaaaatgagtccaaggaaactcttttttc

SEQ ID NO: 496374 - DNA, 120 bp, Artificial Sequence
  ENSG00000163406_1 (sequence is synthesized)
acctgtctccattgaagaggtaccacctcgaccacctagccctccaaagaagccatctccgacaatctgtggctccaactatccactgagcattgccttcattgtggtgaatgaattctg

SEQ ID NO: 496375 - DNA, 120 bp, Artificial Sequence
  ENSG00000163406_2 (sequence is synthesized)
cgagcgcttttcctattatggaatgaaagctgtgctgatcctgtatttcctgtatttcctgcactggaatgaagatacctccacatctatataccatgccttcagcagcctctgttattt

SEQ ID NO: 496376 - DNA, 120 bp, Artificial Sequence
  ENSG00000163406_3 (sequence is synthesized)
tactcccatcctgggagcagccattgctgactcgtggttgggaaaattcaagacaatcatctatctctccttggtgtatgtgcttggccatgtgatcaagtccttgggtgccttaccaat

SEQ ID NO: 496377 - DNA, 120 bp, Artificial Sequence
  ENSG00000163406_4 (sequence is synthesized)
actgggaggacaagtggtacacacagtcctatcattgatcggcctgagtctaatagctttggggacaggaggcatcaaaccctgtgtggcagcttttggtggagaccagtttgaagaaaa

SEQ ID NO: 496378 - DNA, 120 bp, Artificial Sequence
  ENSG00000163406_5 (sequence is synthesized)
acatgcagaggaacggactagatacttctcagtcttctacctgtccatcaatgcagggagcttgatttctacatttatcacacccatgctgagaggagatgtgcaatgttttggagaaga

SEQ ID NO: 496379 - DNA, 120 bp, Artificial Sequence
  ENSG00000163406_6 (sequence is synthesized)
ctgctatgcattggcttttggagttccaggactgctcatggtaattgcacttgttgtgtttgcaatgggaagcaaaatatacaataaaccaccccctgaaggaaacatagtggctcaagt

SEQ ID NO: 496380 - DNA, 120 bp, Artificial Sequence
  ENSG00000163406_7 (sequence is synthesized)
tttcaaatgtatctggtttgctatttccaatcgtttcaagaaccgttctggagacattccaaagcgacagcactggctagactgggcggctgagaaatatccaaagcagctcattatgga

SEQ ID NO: 496381 - DNA, 120 bp, Artificial Sequence
  ENSG00000163406_8 (sequence is synthesized)
tgtaaaggcactgaccagggtactattcctttatatcccattgcccatgttctgggctcttttggatcagcagggttcacgatggactttgcaagccatcaggatgaataggaatttggg

SEQ ID NO: 496382 - DNA, 120 bp, Artificial Sequence
  ENSG00000163406_9 (sequence is synthesized)
gttttttgtgcttcagccggaccagatgcaggttctaaatccccttctggttcttatcttcatcccgttgtttgactttgtcatttatcgtctggtctccaagtgtggaattaacttctc

SEQ ID NO: 496383 - DNA, 120 bp, Artificial Sequence
  ENSG00000163406_10 (sequence is synthesized)
atcacttaggaaaatggctgttggtatgatcctagcatgcctggcatttgcagttgcggcagctgtagagataaaaataaatgaaatggccccagcccagccaggtccccaggaggtttt

SEQ ID NO: 496384 - DNA, 120 bp, Artificial Sequence
  ENSG00000163406_11 (sequence is synthesized)
cctacaagtcttgaatctggcagatgatgaggtgaaggtgacagtggtgggaaatgaaaacaattctctgttgatagagtccatcaaatcctttcagaaaacaccacactattccaaact

SEQ ID NO: 496385 - DNA, 120 bp, Artificial Sequence
  ENSG00000163406_12 (sequence is synthesized)
gcacctgaaaacaaaaagccaggattttcacttccacctgaaatatcacaatttgtctctctacactgagcattctgtgcaggagaagaactggtacagtcttgtcattcgtgaagatgg

SEQ ID NO: 496386 - DNA, 120 bp, Artificial Sequence
  ENSG00000163406_13 (sequence is synthesized)
gaacagtatctccagcatgatggtaaaggatacagaaagcagaacaaccaatgggatgacaaccgtgaggtttgttaacactttgcataaagatgtcaacatctccctgagtacagatac

SEQ ID NO: 496387 - DNA, 120 bp, Artificial Sequence
  ENSG00000163406_14 (sequence is synthesized)
ctctctcaatgttggtgaagactatggtgtgtctgcttatagaactgtgcaaagaggagaataccctgcagtgcactgtagaacagaagataagaacttttctctgaatttgggtcttct

SEQ ID NO: 496388 - DNA, 120 bp, Artificial Sequence
  ENSG00000163406_15 (sequence is synthesized)
agactttggtgcagcatatctgtttgttattactaataacaccaatcagggtcttcaggcctggaagattgaagacattccagccaacaaaatgtccattgcgtggcagctaccacaata

SEQ ID NO: 496389 - DNA, 120 bp, Artificial Sequence
  ENSG00000163406_16 (sequence is synthesized)
tgccctggttacagctggggaggtcatgttctctgtcacaggtcttgagttttcttattctcaggctccctctagcatgaaatctgtgctccaggcagcttggctattgacaattgcagt

SEQ ID NO: 496390 - DNA, 120 bp, Artificial Sequence
  ENSG00000163406_17 (sequence is synthesized)
tgggaatatcatcgtgcttgttgtggcacagttcagtggcctggtacagtgggccgaattcattttgttttcctgcctcctgctggtgatctgcctgatcttctccatcatgggctacta

SEQ ID NO: 496391 - DNA, 120 bp, Artificial Sequence
  ENSG00000163406_18 (sequence is synthesized)
ctatgttcctgtaaagacagaggatatgcggggtccagcagataagcacattcctcacatccaggggaacatgatcaaactagagaccaagaagacaaaactctgatgactccctagatt

SEQ ID NO: 496392 - DNA, 120 bp, Artificial Sequence
  ENSG00000163406_19 (sequence is synthesized)
ctgtcctgaccccaattcctggccctgtcttgaagcattttttttcttctactggattagacaagagagatagcagcatatcagagctgatctcctccacctttctccaatgacagaagt

SEQ ID NO: 496393 - DNA, 120 bp, Artificial Sequence
  ENSG00000163406_20 (sequence is synthesized)
tccaggactggttttccagtacatctttaaacaaggccccagagactctatgtctgcccgtccatcagtgaactcattaaaacttgtgcagtgttgctggagctggcctggtgtctccaa

SEQ ID NO: 496394 - DNA, 120 bp, Artificial Sequence
  ENSG00000163406_21 (sequence is synthesized)
atgaccatgaaaatacacacgtataatggagatcattctctgtgggtatgcaaagttatgggaattcctttataggtaactgccatttaggactgatggccctaatttttgaggtgctga

SEQ ID NO: 496395 - DNA, 120 bp, Artificial Sequence
  ENSG00000163406_22 (sequence is synthesized)
ttttttttataagcaatgtaattatgctattcacaggggcctcaagaattggtatgtatgatgtgatctggtccagccagggcctggcttgtcagctctctaggtttgatatgactttag

SEQ ID NO: 496396 - DNA, 120 bp, Artificial Sequence
  ENSG00000163406_23 (sequence is synthesized)
taaatttgtcaatatagatggtaggaagcagaatgccattttattaaaacacaggagaagttatatctctctgattatgatagtattttatttacttatccaaaccctcctttctcagta

SEQ ID NO: 496397 - DNA, 120 bp, Artificial Sequence
  ENSG00000163406_24 (sequence is synthesized)
tggatagatcatggaaaccagattagagatagtaagcattagtaaacattgttctggagaacaggaacaggtgtaagttgtagaaatcctgaagagccagtcattcttttacagagtaca

SEQ ID NO: 496398 - DNA, 120 bp, Artificial Sequence
  ENSG00000163406_25 (sequence is synthesized)
ttcttcttagcctctatggcgctggtctatgcccttcagtgaacagttgtataaacaataattataatttgcaaccttgtcttgtcaaccttgctgatccagctttttcttattattaca

SEQ ID NO: 496399 - DNA, 120 bp, Artificial Sequence
  ENSG00000163406_26 (sequence is synthesized)
ccttgtcttgcttattgcagcaaatattcaataacaacaatgtttctataagtccaacttcctttattaatgtttccatttagcctcaaaaatatcaaagtagttcctttttgatgttgt

SEQ ID NO: 496400 - DNA, 120 bp, Artificial Sequence
  ENSG00000163406_27 (sequence is synthesized)
tttcctgatttacttttcccataagttttaaataccatttctgccttgaagcctagaaattttctttttattcaaaaaaagttacattaatgctctaggtttgaggttctaaaatggaaa

SEQ ID NO: 496401 - DNA, 120 bp, Artificial Sequence
  ENSG00000163406_28 (sequence is synthesized)
tgtcaatagaggagcatggtcctatgtgaggttcctatcaaaatttgtgggagtagggatggtagagcatgagggttttgtttgtgtatgtgtatggtcatgaaaaaaaattgagaaaca

SEQ ID NO: 496402 - DNA, 120 bp, Artificial Sequence
  ENSG00000163406_29 (sequence is synthesized)
ttacctcatacacaatgaatgaatcagaggacagacacgggaatggcacgactgtgcagtgtgttactaggaaaaaagttcagaatcactgttctagagagcttcatttccattggtttt

SEQ ID NO: 496403 - DNA, 120 bp, Artificial Sequence
  ENSG00000163406_30 (sequence is synthesized)
aaaacattattctcatgtagaacagtgttgggtctcatactgttaatgttaatacgtaacaatgttcatgttaacaggcacctgttaatattaacagataatgttactgttaacaggtaa

SEQ ID NO: 496404 - DNA, 120 bp, Artificial Sequence
  ENSG00000163406_31 (sequence is synthesized)
gagaaattgctctaagtgcccaaactttatatacttcagttttaatgacaagcatttcagaaatataagagcggcagccagaccaaccagtttttccagatatcttgatgtgaacctgac

SEQ ID NO: 496405 - DNA, 120 bp, Artificial Sequence
  ENSG00000163406_32 (sequence is synthesized)
cctactcctttagaagacagcctgttcatttttaaatagctttaacccaaactgttctatgaccattgtttcaagagacattaacacagttctgtaaatagaagtgtctatggacaaata

SEQ ID NO: 496406 - DNA, 120 bp, Artificial Sequence
  ENSG00000163406_33 (sequence is synthesized)
agtttgggaaatgtggcatactgtatccttttcttaacatttgcatattaaagactctgagatatcctgcagtaaagacacaagataccttgtttaaattaacatgtacgctgcagaaca

SEQ ID NO: 496407 - DNA, 120 bp, Artificial Sequence
  ENSG00000163406_34 (sequence is synthesized)
ttggtttggaaaaaactgttgagcagttcttccttgtaagtgctgagcttcctctctgaaacctcctaccattgttttttttcccctgtagctaacaagaataagtataacagccggcca

SEQ ID NO: 496408 - DNA, 120 bp, Artificial Sequence
  ENSG00000163406_35 (sequence is synthesized)
gcctgggggacaagagtgagacttcatctaaaaaaaaaaagaaaagaatatgtataccccctttttcatgtggcagatgtttagctatttggggagaactttcatggctcttccctaatc

SEQ ID NO: 496409 - DNA, 120 bp, Artificial Sequence
  ENSG00000163406_36 (sequence is synthesized)
ccctaatcatcaagtattcaaggtaaagattctcggttcctgtaatggttcctcaccaggcataatttgtccttttaccatcctactttctgtcttctgaaaaacattctttatctgaaa

SEQ ID NO: 496410 - DNA, 120 bp, Artificial Sequence
  ENSG00000163406_37 (sequence is synthesized)
tacagcaattaatattaagatatcttaatatgaagtgcctggagtcaaatataacattccaaagtagtctgactggaagaactagcacctgcctttcttcaaacaatgcacttctgttaa

SEQ ID NO: 496411 - DNA, 120 bp, Artificial Sequence
  ENSG00000163406_38 (sequence is synthesized)
tgcagtgtaaggtaacatgagttgtttttggaaactacatcataatgtgggcttacattctagcacttatcacttaatgacagggatacatttgaggaatgcattgttaggcaattttgt

SEQ ID NO: 496412 - DNA, 120 bp, Artificial Sequence
  ENSG00000163406_39 (sequence is synthesized)
atcatagagtgtacttacacaaacctatggtatagcctactacacatctaagttatatggtatagactgtttctccagctatatggtgtagactgtttctcctaggctacaaacctgcac

SEQ ID NO: 496413 - DNA, 120 bp, Artificial Sequence
  ENSG00000163406_40 (sequence is synthesized)
acaaacctgcacagcatgttactgtattaaatgctgtaggcaattgtaacacaatggtatttttatacttaaacatatctaaacatagaaacggtacaaaaaactttacacattatatag

SEQ ID NO: 496414 - DNA, 120 bp, Artificial Sequence
  ENSG00000163406_41 (sequence is synthesized)
atgtatcaaattattcatatgtgctctgaaaatgtctatatctgttatgtatcaattttttaaaaagtgaatgacataattcatttgaaaaaatgtggacacacaaattggaaaagaggt

SEQ ID NO: 496415 - DNA, 120 bp, Artificial Sequence
  ENSG00000163406_42 (sequence is synthesized)
ataaatgcagtattataatctaatgggaccaccatcacatatttggtctgtcattgactgaaactgcaatatagagtttttcttaacatttgcatattaaagactctgactatatatgga

SEQ ID NO: 496416 - DNA, 120 bp, Artificial Sequence
  ENSG00000163406_43 (sequence is synthesized)
ttttcagagggagaaaactatgtctacttggctagtggactaggctgtcagaaacaactgagatatgtgttgccattgtatctgaaggattatttgttggtgattctgacatgtgttctt

SEQ ID NO: 496417 - DNA, 120 bp, Artificial Sequence
  ENSG00000163406_44 (sequence is synthesized)
ttttgaaaagctggaattgtgtagaaatgctcaatttcctgaaaatggctgaagaatgaaaatacaaaaaggatggatataagatcgtagaatgctgtagttagaaatatttacttgaga

SEQ ID NO: 496418 - DNA, 120 bp, Artificial Sequence
  ENSG00000163406_45 (sequence is synthesized)
attaatattagaatagctatatacaggatacggtagtggcactgaagacaggaagattatttttaacctatgaaaagggaggaaaagaatgctaaagctgctctggagtttgaaaggcag

SEQ ID NO: 496419 - DNA, 120 bp, Artificial Sequence
  ENSG00000163412_0 (sequence is synthesized)
agccgccgctcggcctgcagcagctgtcggcgctgcagcctgagccgggcggggtcccgctgcactcgtcctggaccttctggctcgacagatccctccctggtgccacagcagctgagt

SEQ ID NO: 496420 - DNA, 120 bp, Artificial Sequence
  ENSG00000163412_1 (sequence is synthesized)
gcgcatcaaatctgaagaaaatctacacagtacagacagtacagatattttggagtgtatacaataatatccctcctgtgactagcctgcctttgagatgtagttatcatttaatgagag

SEQ ID NO: 496421 - DNA, 120 bp, Artificial Sequence
  ENSG00000163412_2 (sequence is synthesized)
gagagaggcgaccactttgggaagaggagagtaatgcaaagggtggcgtatggaagatgaaagtccccaaggacagcacgtccacagtttggaaagagttgctgttagcaaccatcgggg

SEQ ID NO: 496422 - DNA, 120 bp, Artificial Sequence
  ENSG00000163412_3 (sequence is synthesized)
aacagttcacagactgtgccgcagcagatgatgaagtaataggagttagtgtcagtgttcgggaccgagaagacgtcgtccaagtctggaatgtaaatgcctctttagtgggtgaagcga

SEQ ID NO: 496423 - DNA, 120 bp, Artificial Sequence
  ENSG00000163412_4 (sequence is synthesized)
ctgttttagaaaagatctatgaacttctgccccacataacttttaaagcagtattttataaaccccatgaagagcatcatgcttttgaaggtggacgtggaaaacactaattgcactctg

SEQ ID NO: 496424 - DNA, 120 bp, Artificial Sequence
  ENSG00000163412_5 (sequence is synthesized)
taaagaattctttgtcctttgctgattggttttggaaacggtcttaacaggagggagagtgaagagaagacttgccgaagccgatgctggtcaatttagagtgggtttctgtccttgcag

SEQ ID NO: 496425 - DNA, 120 bp, Artificial Sequence
  ENSG00000163412_6 (sequence is synthesized)
atgggcaattaggactcaaagtggcaggtggggtggggggagattgtgtgggtttctaccgtcacattacttgctttttaaaaaaaacacacacaaaaaactttttttttggctttctaa

SEQ ID NO: 496426 - DNA, 120 bp, Artificial Sequence
  ENSG00000163412_7 (sequence is synthesized)
attctctgttcttttcactctgatttttttttttttttgccgtttaaaattccttattcagcctaattattgttttctacactcccctttcattgaggcacaagaaatgggtttcccttt

SEQ ID NO: 496427 - DNA, 120 bp, Artificial Sequence
  ENSG00000163412_8 (sequence is synthesized)
aagtagctctgctgtacctagttaatgagaatatgcataatcgtgacaatactgcttttgaataccacactgtacaaggaggaacactagcttggagaaatctgtcttctgattatttgt

SEQ ID NO: 496428 - DNA, 120 bp, Artificial Sequence
  ENSG00000163412_9 (sequence is synthesized)
tgtgacacattcctatgtactgtgagctgggcattgtttttttctgtcccagggaaaagaaaaaccatacttaatgtgattttgcactgacagcacacaaatctttaattttccttttta

SEQ ID NO: 496429 - DNA, 120 bp, Artificial Sequence
  ENSG00000163412_10 (sequence is synthesized)
aaacatttttttttagtgataaaaggaaaataatagttggattgcataacatgaaaactataatcacaattcagtatcaggatataaatcaagctctaagtctttggaccctctgtggaa

SEQ ID NO: 496430 - DNA, 120 bp, Artificial Sequence
  ENSG00000163412_11 (sequence is synthesized)
acatttctaacccgaattttaatttggccttttcaaccaaaggcttagagtggtagcaagggatttcttccaataggaaacctgatgtttctgatttaaagagaaggtgatattttaatt

SEQ ID NO: 496431 - DNA, 120 bp, Artificial Sequence
  ENSG00000163412_12 (sequence is synthesized)
gtttgaattaagctccttgcaaagttcgggtgtgtttacccacttagggctttctttcccagtcaacgctaacacattttgttaaatgatccctttccctgctcacattgtgtgtcattt

SEQ ID NO: 496432 - DNA, 120 bp, Artificial Sequence
  ENSG00000163412_13 (sequence is synthesized)
ctcatcatcagtagtcctccagcctgggcagctgtccccaccctttttcatgtaggtgcaggaagttaaatctcatttccaggatgcatgtgaacatttacaaagttgaactttgagtgc

SEQ ID NO: 496433 - DNA, 120 bp, Artificial Sequence
  ENSG00000163412_14 (sequence is synthesized)
attctgctcatatgaattattgggattgttgatatatattgtattatgctaccaaagaaatattggttttattagaaggaaatggtcatcctctggaccatggagactagctcagaatac

SEQ ID NO: 496434 - DNA, 120 bp, Artificial Sequence
  ENSG00000163412_15 (sequence is synthesized)
gctgatttccctctcctgactttgccaagcctttggctgcttttgcctgataaagggcagggccatctgaagacacttcccccagtcggctttggagtcacgggagctagtgcctgctca

SEQ ID NO: 496435 - DNA, 120 bp, Artificial Sequence
  ENSG00000163412_16 (sequence is synthesized)
cacatttttcaaaagggcagtgcactcagaacttcactgtacctgggatttttaattcctcttgcagtgttgaccagcagagagacttgaggctactttaagcctccactatgtgtttgt

SEQ ID NO: 496436 - DNA, 120 bp, Artificial Sequence
  ENSG00000163412_17 (sequence is synthesized)
agataaaattctccattcaaacattttaaaggactttgaacattatctgcttatggaagttgtgcccttcacttggttagtaaccacctcagccataatacttaccatcataggtttctt

SEQ ID NO: 496437 - DNA, 120 bp, Artificial Sequence
  ENSG00000163412_18 (sequence is synthesized)
aaaatgctttttttttttccctaaacttgagtttccttagtgatttcaaaatgaagtataagaatatcagatccagttagcaaaagcctaggacttgtttctccaaacattgtactaaca

SEQ ID NO: 496438 - DNA, 120 bp, Artificial Sequence
  ENSG00000163412_19 (sequence is synthesized)
tgactcaagaattttaaaaaattattctggacatgaattaaaacttttttataatataagtatttttctgattgaaaaaaggatataattgacttcactctaattgtcatgtatatttcc

SEQ ID NO: 496439 - DNA, 120 bp, Artificial Sequence
  ENSG00000163412_20 (sequence is synthesized)
taattgtcatgtatatttccataagtaaatggattttgaagtatttttattttttgaactttatttaaagcatttgtgatgacatgttcaacttttgcatgtatgtagcctttgaagtaa

SEQ ID NO: 496440 - DNA, 120 bp, Artificial Sequence
  ENSG00000163412_21 (sequence is synthesized)
aaataaataggaatgttaggctcacgttaatatttctagtttctgtttatgatcatggaacatgactagcacacaaagtagatttttgccccagtgaacttctgcaactgtttctgaccc

SEQ ID NO: 496441 - DNA, 120 bp, Artificial Sequence
  ENSG00000163412_22 (sequence is synthesized)
tttagaaaataccaactgtgagaaggatttaatttgcctaatgttaaaaacctatcatctaaattactttcagagaggattttgtcagattttggtttggaaattgttttaattgaatat

SEQ ID NO: 496442 - DNA, 120 bp, Artificial Sequence
  ENSG00000163412_23 (sequence is synthesized)
ttaatcataatagactttgtatgaactaagctgatttaatcagtttaaaaacctctcattaccttcttagattaaagaagctaatactgttttgagatagaaggaaatattttgtggggc

SEQ ID NO: 496443 - DNA, 120 bp, Artificial Sequence
  ENSG00000163412_24 (sequence is synthesized)
atgtgacttttgtgttaaggcagtttacccatcttggctgatgtggggaaagtgcaaacttccagtagaatcccggtcttttcatccaagtgcttgcaggggcagccttgtagtctgcaa

SEQ ID NO: 496444 - DNA, 120 bp, Artificial Sequence
  ENSG00000163412_25 (sequence is synthesized)
agaaccatgcagaaaccaaagagcttgcttttttgtctttgtaattccttagggtctgtgatatatgccaggaaatctgattgaaactaatatgctttttattctcccattattccctaa

SEQ ID NO: 496445 - DNA, 120 bp, Artificial Sequence
  ENSG00000163412_26 (sequence is synthesized)
attgttatatcacaggcacttgcctacattgggaaagtaaggacaaataatacccatttaaagtaacttgcctatattttgactgtctttcgtaagcacttgctgaactgctgacttaac

SEQ ID NO: 496446 - DNA, 120 bp, Artificial Sequence
  ENSG00000163412_27 (sequence is synthesized)
tcagttttaagatttcctctttccccccaacttttccacatttcttaaatgagggtgtaatttactgcaaacatgtacatttaatataatattgctgttagattcgtggtacactttatg

SEQ ID NO: 496447 - DNA, 120 bp, Artificial Sequence
  ENSG00000163412_28 (sequence is synthesized)
aagcaaaaacatgaaaaggaaaccacaactctaataaactttaaattaaagattaagatgactctttctcacccctcttcttgagtttagcccatgtctacaccatgcacacagtcacaa

SEQ ID NO: 496448 - DNA, 120 bp, Artificial Sequence
  ENSG00000163412_29 (sequence is synthesized)
gactttatagcttagaaactttaggtataattgggtcctatagacataatatacaatccaccaactgagccttggccgaacttgtcccttgttaaagacgtagggctagccagccacaga

SEQ ID NO: 496449 - DNA, 120 bp, Artificial Sequence
  ENSG00000163412_30 (sequence is synthesized)
gctgggtattgaagtcggcaagttgtatcccggtgcaggcgtccttaaatggagagtactcagaatctgccagccttaacctgcccactagccaccctaatcaagcattaaatatctgat

SEQ ID NO: 496450 - DNA, 120 bp, Artificial Sequence
  ENSG00000163412_31 (sequence is synthesized)
ccaatctggccactggtgtaactccgtaatcagacatcctgtttgtaaacagctcctccttctctccctctccctctcagagacagaagtggtgctggggtttggagtttgaaaataacc

SEQ ID NO: 496451 - DNA, 120 bp, Artificial Sequence
  ENSG00000163412_32 (sequence is synthesized)
ttcctatgacaggaagtgggcttttgctattagttgcccaactcttagaggatcccagcttgtgtctttagacaaaactgacagcctttggaacgatcgcatggtggcgctgccttccag

SEQ ID NO: 496452 - DNA, 120 bp, Artificial Sequence
  ENSG00000163412_33 (sequence is synthesized)
ccaacagttctggctcagcagcagaatttatccagctatgtttgtagaatttttttaagatcctactgcattttgctcttaagcttttataaaaatttgacgagaaaatgtaaaaatgat

SEQ ID NO: 496453 - DNA, 120 bp, Artificial Sequence
  ENSG00000163412_34 (sequence is synthesized)
acttggcaataagacatttagttttcatgcacctaataaaaatgtgtcaaagctagatcgctccagatgtgcttaaaatatctcaaatcctaggctctcattggccttataagtgattgg

SEQ ID NO: 496454 - DNA, 120 bp, Artificial Sequence
  ENSG00000163412_35 (sequence is synthesized)
gaagaaaaagaataaaataaactcacatataggagatatggaaaatatttcatcaaatattatgcccaaagagagaaaattaggagttgattttttttagcactctgaatatggaacttc

SEQ ID NO: 496455 - DNA, 120 bp, Artificial Sequence
  ENSG00000163412_36 (sequence is synthesized)
cttttaaaaatgtaattctacccttcacctttcctacattgtatgtttctgtgagattttactcattacaagtgaaagtagaggactgcctgtgaattgttcacttctgaaaagaatata

SEQ ID NO: 496456 - DNA, 120 bp, Artificial Sequence
  ENSG00000163412_37 (sequence is synthesized)
ttgagatcagttaaaattactcaagagtttggtgactcaggattgtaaaaagcctggatctcaacagctgggaggagtcagagggtgaagtgggaaaaaatagggactgagaggcaacga

SEQ ID NO: 496457 - DNA, 120 bp, Artificial Sequence
  ENSG00000163412_38 (sequence is synthesized)
aaagtccctttgaacctgtggtcatttatagcaattagagtgggttgcccctctacttctcccaagaagaaatcccaaatagattcctttcatgtcagattatactgttctgattttatt

SEQ ID NO: 496458 - DNA, 120 bp, Artificial Sequence
  ENSG00000163412_39 (sequence is synthesized)
ttctattatttttacatatacatccaaatctaagaatacttattcagattggcccactcaggccaaaagtcactgtcttgtgttctagaaattctttcatgttgctgacataaatccatt

SEQ ID NO: 496459 - DNA, 120 bp, Artificial Sequence
  ENSG00000163412_40 (sequence is synthesized)
gactcttagaattttagagtggaagggacctttgagatcatctaccagtgcttctcaccccttagcatgcagcaaaatcactcagatacttacttattattcacatttcttgaccccagc

SEQ ID NO: 496460 - DNA, 120 bp, Artificial Sequence
  ENSG00000163412_41 (sequence is synthesized)
actagaaatctgggaggatatctgcatttttaacaagtgccctagtgattctaatgctgatggtgctcagatcgctcttggagaacccctgattttatccaactcccacatatgacaaat

SEQ ID NO: 496461 - DNA, 120 bp, Artificial Sequence
  ENSG00000163412_42 (sequence is synthesized)
gaggaaagcctcccaaccctaagctctgtcaggtgacctgattccaatgtatgataccaacaatcttatgaaggctggagaaaaccattaatactgagacttgagtagatgatgctcgtg

SEQ ID NO: 496462 - DNA, 120 bp, Artificial Sequence
  ENSG00000163412_43 (sequence is synthesized)
aataagaactttatggctgggaccacagcagtcatgggagcccatccctggaagtccataatataaagcctttaatacagagtggtggtttttctcttttctaaataccatttcagtctg

SEQ ID NO: 496463 - DNA, 120 bp, Artificial Sequence
  ENSG00000163412_44 (sequence is synthesized)
ttaagagaaaagaaattagtgttcagaaaagtagttactccatatgtgcagtaactacttttctataatgtcttatggcatctggggttcagcatcattgaacaagattaaatgaacgtt

SEQ ID NO: 496464 - DNA, 120 bp, Artificial Sequence
  ENSG00000163412_45 (sequence is synthesized)
atagagctataaaattgcatgtaaaataacacaaaactgttcaaatgactatcaaagtagcctgggaatgaatttccactaaaattaattgtcactttcaaaacgtagcttagcaaagct

SEQ ID NO: 496465 - DNA, 120 bp, Artificial Sequence
  ENSG00000163412_46 (sequence is synthesized)
gttactaaactggagagatcctttaatacatagaaatgtcaaaaaaatcaaataagtattccctaaacgatgtgagtgataagcaaaagtcattgcaaagtcagtatttttttgttcatc

SEQ ID NO: 496466 - DNA, 120 bp, Artificial Sequence
  ENSG00000163412_47 (sequence is synthesized)
attgctactgaaattcagagttccattgtatatgtgtgtcttgagtgtaccttattagaatatccaatacaatagcttttggatattctatgcttttgtgtccttcagaaatcatgagat

SEQ ID NO: 496467 - DNA, 120 bp, Artificial Sequence
  ENSG00000163412_48 (sequence is synthesized)
tgaaggaatctgtgttaaatgtttttgttttggttgctgcctgaaaaaagttaccaactcatttagtgaaatgcaagatttctttatgaaaatttcaatttctaatatcgaagtcagata

SEQ ID NO: 496468 - DNA, 120 bp, Artificial Sequence
  ENSG00000163412_49 (sequence is synthesized)
atttttcttgaacttttattttggaacagatgtttatttcggatctattaaagtgtcaactttgcattatagaactgaacatgaagtaaattgagtgtttctgagttttctatagaaaat

SEQ ID NO: 496469 - DNA, 120 bp, Artificial Sequence
  ENSG00000163412_50 (sequence is synthesized)
ttatgctacctctcatcttttcacatacaaataagcaacttttaatgaaggcttagggtgaaaattttaattttagcactttacattacatgatgaatggtgaatattaaaggactttga

SEQ ID NO: 496470 - DNA, 120 bp, Artificial Sequence
  ENSG00000163412_51 (sequence is synthesized)
acattttaataaacttacagtgtttctgttttcaaatagaggtattgatgctgtggatatacattaaattctccccaaagttctcagactttaatcagataatgtggcttacaaccattg

SEQ ID NO: 496471 - DNA, 120 bp, Artificial Sequence
  ENSG00000163412_52 (sequence is synthesized)
tttttgtttttaagttttaacactgtcttttcagtattcatttaaaacaagtcaccatgactttgaatatattctcatggagaatttatttcaatgattatataaaagaatttcaaaatt

SEQ ID NO: 496472 - DNA, 120 bp, Artificial Sequence
  ENSG00000163412_53 (sequence is synthesized)
taaactagtgagcatactttagcttgagacagctaacattatttgtcccaaatttaaaatcttacattgaaagttattaattctttagaatagtcttacctgtgtaagttgaaccaggtt

SEQ ID NO: 496473 - DNA, 120 bp, Artificial Sequence
  ENSG00000163412_54 (sequence is synthesized)
tgtttgattatgttttggatctgcttgtgcccccacccccctattttataccatctgtgccctgtgcagttggggaccctttcacatctggctacaagctggtgtaatgcccttcctttt

SEQ ID NO: 496474 - DNA, 120 bp, Artificial Sequence
  ENSG00000163412_55 (sequence is synthesized)
gatctggcttcatctagtgatttgctcagtatttttaaggtcagactgaaaacttttctgttctagttatttttgattttatattgtgtgttgtgtttgatgttcagatacatgtgaaag

SEQ ID NO: 496475 - DNA, 120 bp, Artificial Sequence
  ENSG00000163412_56 (sequence is synthesized)
ttgcttctataagtcagtattttttattccagccttttgcagcaataaggtaagactagactatacttttcttacttgaaaaggtagtgatttatgtgtttagtgcaaatgtttagactg

SEQ ID NO: 496476 - DNA, 120 bp, Artificial Sequence
  ENSG00000163412_57 (sequence is synthesized)
ttttgcaattttctaatttgggactatattgctatgaatttgtgcttcttcatttttcagggtagtagttcacagggtttgtttaagtgttagtttgtagaactttattttgagatcttt

SEQ ID NO: 496477 - DNA, 120 bp, Artificial Sequence
  ENSG00000163412_58 (sequence is synthesized)
tgtaatctgttgctactaattctcattctgtattgaggttcttatagtatagaaatgtcattttcatcctccagtttaaaaatttcatgcagtttaatcaaccacatcacttaatcatta

SEQ ID NO: 496478 - DNA, 120 bp, Artificial Sequence
  ENSG00000163412_59 (sequence is synthesized)
ttagatttccagtgtgtgtgtggtgattagaataaccttgtttattacaacacatattaaaagtttctgtccaacacctctaatatgtgtgacgctgctagcatggagtctgacgcttag

SEQ ID NO: 496479 - DNA, 120 bp, Artificial Sequence
  ENSG00000163412_60 (sequence is synthesized)
taggttatctggtattctgatggggagtaactgttgttatttttacacttccctgttgaacacatttgataatagggctcatctgggtctcttagaaaacgtatcttgcttattttaatt

SEQ ID NO: 496480 - DNA, 120 bp, Artificial Sequence
  ENSG00000163412_61 (sequence is synthesized)
ctttttctttaccctctattaagaatggttccgttttagaataagtcaattactctcgttgctcttttgtgctgcaatttgctggtgagattcagttgtcccctgtttcggcaagtaaag

SEQ ID NO: 496481 - DNA, 120 bp, Artificial Sequence
  ENSG00000163412_62 (sequence is synthesized)
tgaatttactcctcctttctggctgtctaatatattcctttaaaaacaaacaaaacgtaccaacaaactcttcttccattcatctgcagactttcctatctctccctgcagaaacaagca

SEQ ID NO: 496482 - DNA, 120 bp, Artificial Sequence
  ENSG00000163412_63 (sequence is synthesized)
attcaggatcttatgtgtgatgcctaattaattttaacacagcgaatttaatgaaatcgttgaagagcagggcataacactaggaaggctttaaaatttcataatgtttccctctcatat

SEQ ID NO: 496483 - DNA, 120 bp, Artificial Sequence
  ENSG00000163412_64 (sequence is synthesized)
ttgcatctgattactgccaccatgcattctgtgtgtactttatcatctagtcgttattgatgcactttttggaatgtgttctcggttgttctattagcataggttcctctgccttgtcac

SEQ ID NO: 496484 - DNA, 120 bp, Artificial Sequence
  ENSG00000163412_65 (sequence is synthesized)
ctaacgtacagttttcttggaagccaagaccatgcatgccttttcttcctcagtgatcctttcgctgcagtaactgctattaaagaacttttaactgcttttcgttaatgaatgcataaa

SEQ ID NO: 496485 - DNA, 120 bp, Artificial Sequence
  ENSG00000163412_66 (sequence is synthesized)
aaaatctctggaatcctacaagacgatggttcttttgttacatgaagaaaagaaaaaacagtagcatttgcaagggccagcaagttaaaatatatgtcattaaaatatgtttctatttcc

SEQ ID NO: 496486 - DNA, 120 bp, Artificial Sequence
  ENSG00000163412_67 (sequence is synthesized)
catcatctggctaggctgtggtgctgactagcttatttcttgccagagaaaataagtttaaatcataagcatatttaactagcaagcataaatcataaattctttataatcgtaagcatg

SEQ ID NO: 496487 - DNA, 120 bp, Artificial Sequence
  ENSG00000163412_68 (sequence is synthesized)
ttgaactctggtaccatttgtacagatggcagggctaaatgtgtgtgctcctctaagcattaaagatgtggacaagctcttactccccaatttcctctttaactcaggaaacttaaatca

SEQ ID NO: 496488 - DNA, 120 bp, Artificial Sequence
  ENSG00000163412_69 (sequence is synthesized)
tttgttttttgcacatataggattatataaagtatggacctagagaaaggtttcagatcttaggaaacatttgagttttgtgattcatgcttactggaaaagaatgatggaagtgaaggt

SEQ ID NO: 496489 - DNA, 120 bp, Artificial Sequence
  ENSG00000163412_70 (sequence is synthesized)
taaacactaaagccgtgtcccctttttaaggcgaaaataattagtgtttcatgaagatagtcaagttataaaggacaagactgtttttcagaatttttttttttttttgaaaacaaacat

SEQ ID NO: 496490 - DNA, 120 bp, Artificial Sequence
  ENSG00000163412_71 (sequence is synthesized)
cttggaatccacattttaacagaggtccatcagctttcaaagagtgttccctagaagggtggttccacagaaacactttcagatatggcaaagttttcattgtaaaatacattttaagaa

SEQ ID NO: 496491 - DNA, 120 bp, Artificial Sequence
  ENSG00000163412_72 (sequence is synthesized)
gtatttttaaaagtgtaataaagcaataacacacagtgacatgcatcacatggccaaattttaacattttggaagccagtaagtataacttatgtactcactgattttgttttatgaaat

SEQ ID NO: 496492 - DNA, 120 bp, Artificial Sequence
  ENSG00000163412_73 (sequence is synthesized)
gaaacaaaggttttataaaacctttttattgtaaaataaaggtacagaaaaccacacaaaacaaatgtgtaacttactgaattgttacaaggagaacactctataacagcaggccaagaa

SEQ ID NO: 496493 - DNA, 120 bp, Artificial Sequence
  ENSG00000163412_74 (sequence is synthesized)
atagaactttgccggtcaccccaggagccctttcttgtgtccccgccctctccactaaaataaccattatcctgacctacaggagacacttgcatttctctctggttttatcacaggtga

SEQ ID NO: 496494 - DNA, 120 bp, Artificial Sequence
  ENSG00000163412_75 (sequence is synthesized)
taaacatcattttacatatagaatcttctctaactatgaacgttggttcagaaaacttatttgtaagtcttttaaatgatgagtgcaaaatgacacactataagcaattgatacccccgt

SEQ ID NO: 496495 - DNA, 120 bp, Artificial Sequence
  ENSG00000163412_76 (sequence is synthesized)
aagttagtaactgggcagaatttaatgtgcttttgctgtagtgtgtggctctgtccatagctataatatccacaataacaatagcatgtatggagttccatgccatctaagcatagaggt

SEQ ID NO: 496496 - DNA, 120 bp, Artificial Sequence
  ENSG00000163412_77 (sequence is synthesized)
tagttctccccaacactctacgaggtagatgctgtcattgttgtccccagtttgtgtatgtggaaacatatgcatgaggttcagagaggtgaaataacttgccgaaggtcacaccagtag

SEQ ID NO: 496497 - DNA, 120 bp, Artificial Sequence
  ENSG00000163412_78 (sequence is synthesized)
tcagttgcagaaccaagatacatctaaggtactgtggctccagcctgttcttcagtgaggctgccttggtggaagttgaagatatgatgtgcaagaattttgagattccttatgagagtt

SEQ ID NO: 496498 - DNA, 120 bp, Artificial Sequence
  ENSG00000163412_79 (sequence is synthesized)
tgtttacaaagaaaaggttttacagctttaagaaaaagatggaaaaatcactggcctagttcaaacttttcattttacagatgaagaaatgacccagaaagtataaagaattcgttcaag

SEQ ID NO: 496499 - DNA, 120 bp, Artificial Sequence
  ENSG00000163412_80 (sequence is synthesized)
gtcacacaagtagttggtggcaaagttgcagctatatcccaaatctcctggctgttaaaatcaatgatcttttcttcattccatatattatgtggaaaaaatgcatgttttctaacctgc

SEQ ID NO: 496500 - DNA, 120 bp, Artificial Sequence
  ENSG00000163412_81 (sequence is synthesized)
ttctttgcgacaactccatgtaagcagatttgtcttaaaaccagtttatagctaggacacaccatctacttgcttattttctcaaggttttaactgggaattaaaaaatttatatctgaa

SEQ ID NO: 496501 - DNA, 80 bp, Artificial Sequence
  ENSG00000163412_82 (sequence is synthesized)
ggaaggcggcgtggaagcagaagagcgcggccaggaaggcgagcagcttgcagcccagcgcgcccggcggcgcccccgcc

SEQ ID NO: 496502 - DNA, 120 bp, Artificial Sequence
  ENSG00000163412_83 (sequence is synthesized)
ggcaggcgagcgcgcgcagcccgtcggccaggcacaggtcgagcagcaggggctgtggggtcaccttctcttcctctcttctgccaccccaagtcgtctgtgttgcgtgtcatgcagtgg

SEQ ID NO: 496503 - DNA, 120 bp, Artificial Sequence
  ENSG00000163412_84 (sequence is synthesized)
agttggcggccgcctggccggtggcgcccgggccgtggaaggtccagtcgtggctgacggcgggcaccaggcgcgcgggccgcatcttgcggcggtcgtggatgaagaagagcaggcgga

SEQ ID NO: 496504 - DNA, 120 bp, Artificial Sequence
  ENSG00000163412_85 (sequence is synthesized)
ggtgactggatgctggaggggaggggagtagctgctgcagctaattgcttaattatttatgagtgcctcaagtccttcttgttgtttttgttgctaggggctgtggggtcaccttctctt

SEQ ID NO: 496505 - DNA, 80 bp, Artificial Sequence
  ENSG00000163412_86 (sequence is synthesized)
gctgggggcgcctccgcagcagccgcggggtcgggaggcggccgggagggaggcagggcccaggacgcaaggtggcgaca

SEQ ID NO: 496506 - DNA, 120 bp, Artificial Sequence
  ENSG00000163412_87 (sequence is synthesized)
gtagaagagagaggaccacttgttgctaggcaaccagcacccacctcacccatgttgccatggtgatgatgaaagttgggctgatgggattaccagctcctgctaattgcatatgagtgc

SEQ ID NO: 496507 - DNA, 80 bp, Artificial Sequence
  ENSG00000163421_0 (sequence is synthesized)
gccggcgtgagtcacggcggggctagcctttataacggcccggaggctcgcgggagccgccgcgcccgtccgcccgccgc

SEQ ID NO: 496508 - DNA, 120 bp, Artificial Sequence
  ENSG00000163421_1 (sequence is synthesized)
ctgcctccggcggccgcccagtcccgagggcgccatgaggagcctgtgctgcgccccactcctgctcctcttgctgctgccgccgctgctgctcacgccccgcgctggggacgccgccgt

SEQ ID NO: 496509 - DNA, 120 bp, Artificial Sequence
  ENSG00000163421_2 (sequence is synthesized)
gatcaccggggcttgtgacaaggactcccaatgtggtggaggcatgtgctgtgctgtcagtatctgggtcaagagcataaggatttgcacacctatgggcaaactgggagacagctgcca

SEQ ID NO: 496510 - DNA, 120 bp, Artificial Sequence
  ENSG00000163421_3 (sequence is synthesized)
tccactgactcgtaaagttccattttttgggcggaggatgcatcacacttgcccatgtctgccaggcttggcctgtttacggacttcatttaaccgatttatttgtttagcccaaaagta

SEQ ID NO: 496511 - DNA, 120 bp, Artificial Sequence
  ENSG00000163421_4 (sequence is synthesized)
atcgctctggagtagaaaccaaatgtgaatagccacatcttacctgtaaagtcttacttgtgattgtgccaaacaaaaaatgtgccagaaagaaatgctcttgcttcctcaactttccaa

SEQ ID NO: 496512 - DNA, 120 bp, Artificial Sequence
  ENSG00000163421_5 (sequence is synthesized)
gtaacatttttatctttgatttgtaaatgatttttttttttttttatcgaaagagaattttacttttggatagaaatatgaagtgtaaggcattatggaactggttcttatttccctgtt

SEQ ID NO: 496513 - DNA, 120 bp, Artificial Sequence
  ENSG00000163421_6 (sequence is synthesized)
ttttctcaccaccccaagccccatttgtgccctgccacacaaatacacctacagcttttggtcccttgcctcttccacctcaaagaatttcaaggctcttaccttactttatttttgtcc

SEQ ID NO: 496514 - DNA, 120 bp, Artificial Sequence
  ENSG00000163421_7 (sequence is synthesized)
atttctcttccctcctcttgcattttaaagtggagggtttgtctctttgagtttgatggcagaatcactgatgggaatccagctttttgctggcatttaaatagtgaaaagagtgtatat

SEQ ID NO: 496515 - DNA, 120 bp, Artificial Sequence
  ENSG00000163421_8 (sequence is synthesized)
gtgaacttgacactccaaactcctgtcatggcacggaagctaggagtgctgctggacccttcctaaacctgtcactcaagaggacttcagctctgctgttgggctggtgtgtggacagaa

SEQ ID NO: 496516 - DNA, 120 bp, Artificial Sequence
  ENSG00000163421_9 (sequence is synthesized)
ggaatggaaagccaaattaatttagtccagatttctaggtttgggtttttctaaaaataaaagattacatttacttcttttactttttataaagttttttttccttagtctcctacttag

SEQ ID NO: 496517 - DNA, 120 bp, Artificial Sequence
  ENSG00000163421_10 (sequence is synthesized)
agatattctagaaaatgtcacttgaagaggaagtatttattttaatctggcacaacactaattaccatttttaaagcagtattaagttgtaatttaaaccttgtttgtaactgaaaggtc

SEQ ID NO: 496518 - DNA, 120 bp, Artificial Sequence
  ENSG00000163421_11 (sequence is synthesized)
gattgtaatggattgccgtttgtacctgtatcagtattgctgtgtaaaaattctgtatcagaataataacagtactgtatatcatttgatttattttaatattatatccttatttttgtc

SEQ ID NO: 496519 - DNA, 120 bp, Artificial Sequence
  ENSG00000163424_0 (sequence is synthesized)
agaccagtcagggacgcggcaggaaatggaagagcctccgcaagaggctctggctgaacccttgaaacatgaaagcccagccgctccctcaagtgctggccacactaagggccaggaaga

SEQ ID NO: 496520 - DNA, 120 bp, Artificial Sequence
  ENSG00000163424_1 (sequence is synthesized)
agacgaccagaagaaccaggccgaaaggaaggcagataaccacactgctcacagaatagctgaccagactgccctaagagtgcctagccaggctgaatccagcatatttagccaagctac

SEQ ID NO: 496521 - DNA, 120 bp, Artificial Sequence
  ENSG00000163424_2 (sequence is synthesized)
caacggagtagctgaacaaaatgggcatagtacacctggtcaggctggccgcagagcatccaaccctgctgatgtttctgaccttagagcagatgatcaggttaatcaaacaccgtctga

SEQ ID NO: 496522 - DNA, 120 bp, Artificial Sequence
  ENSG00000163424_3 (sequence is synthesized)
acagactaaaggcaaggcatctagccaagctaataatgtacagcatgaacagagtgatggtcaggtgtctggcctgacggaggaaagaactgctgaacagactgaacgaagattacctac

SEQ ID NO: 496523 - DNA, 120 bp, Artificial Sequence
  ENSG00000163424_4 (sequence is synthesized)
ccaggctgagagaagaacttctgggcagattgatggtagactggctatgccatctgaccagagaggttccagacagaccgaccacagaatggcaggccagtctgagagaagagcttccga

SEQ ID NO: 496524 - DNA, 120 bp, Artificial Sequence
  ENSG00000163424_5 (sequence is synthesized)
gcagatggaccgcagaatgtctggcgaggctgagcgaagaacttctgagcagattacacacagattatccaaactatctgagagaagaccttctgtgcagattgacagtgggtcatccgt

SEQ ID NO: 496525 - DNA, 120 bp, Artificial Sequence
  ENSG00000163424_6 (sequence is synthesized)
cccatctgaccaaagtccttctgtacagattgacagtggatcgtccgtaccatctgaccaaagaccttccgtacagattgaccgcagaatgtcagggaaagttaggagaagaagttctga

SEQ ID NO: 496526 - DNA, 120 bp, Artificial Sequence
  ENSG00000163424_7 (sequence is synthesized)
gaagactgactacagattggctggcctggctgacccaggaacttctgagcagactgacctcagattgtatggcctcgttgaccacaaaacatctgtaaagactcaccaccaagtgtacgg

SEQ ID NO: 496527 - DNA, 120 bp, Artificial Sequence
  ENSG00000163424_8 (sequence is synthesized)
ccaagccactgaactagctgaacaccaggctattgaccaagctcatagtaatgctgatcaacctccagttgacaatgctcactacactgaatctgaccagactgaccacttagcagacag

SEQ ID NO: 496528 - DNA, 120 bp, Artificial Sequence
  ENSG00000163424_9 (sequence is synthesized)
acaagctaatcataaagaccagctgtcttactatgaaacacgtggccagtctgaagacagaatatttccccagttaggcaacagcaaagaggacaaagaggctgactacagagtacaacc

SEQ ID NO: 496529 - DNA, 120 bp, Artificial Sequence
  ENSG00000163424_10 (sequence is synthesized)
ctgcaaatttgaggatagccaagtagacctcaattccaagccttcagttgaaatggaaactcagaatgcaaccactatcccaccctacaacccagttgatgccagattcaccagtaactt

SEQ ID NO: 496530 - DNA, 120 bp, Artificial Sequence
  ENSG00000163424_11 (sequence is synthesized)
ccaagcaaaagaccaagctcttttcccaagactcccctccatctcatccaaattgaactataccagcagtcaagaaaaaactcaagccatagtaaccaaatctgatgaattttcagaaat

SEQ ID NO: 496531 - DNA, 120 bp, Artificial Sequence
  ENSG00000163424_12 (sequence is synthesized)
tgaccaaggaaagggttatcatatacgcaatcaaacttatagaaggttcccttctatagtttatgaagatccttaccaagtttcactccaatacatggaaaaacaccacattctgcaaat

SEQ ID NO: 496532 - DNA, 120 bp, Artificial Sequence
  ENSG00000163424_13 (sequence is synthesized)
attccagcagattactgaaaacttagtctatgaaaagccagaggaccccctgaattttatgctgtgccaggtatagaattggagaaaaagaacaacctttttattctctttattgtaaaa

SEQ ID NO: 496533 - DNA, 120 bp, Artificial Sequence
  ENSG00000163424_14 (sequence is synthesized)
tacagcacacatacagcaaagtgtatagaacaaagtacgtacaactctgaattcttatgaagtaaacatacctgtaactaccattcaagtttttaaaaaataaataaaacataaccagca

SEQ ID NO: 496534 - DNA, 120 bp, Artificial Sequence
  ENSG00000163424_15 (sequence is synthesized)
atgtgaaatctacaaagaacgagcctctcttcagtattgtttacaatcatgtgtcaatactatgttctgttttccatctgaaaaaaaaatggttttgaatagacattagtggtgactcta

SEQ ID NO: 496535 - DNA, 120 bp, Artificial Sequence
  ENSG00000163428_0 (sequence is synthesized)
acttccgactcagccctcggttcaggttccggggcgccgcagagctcccggcctctggaccgcgcgcggcgctctggggaatccggcgccacgcgccgtgcggtggccaggatggaggag

SEQ ID NO: 496536 - DNA, 120 bp, Artificial Sequence
  ENSG00000163428_1 (sequence is synthesized)
gccggagcagcggtggtcacggccggggaggccgaactgaactggtcccgcctcagcgtgtccaccgagacgctggagtctgagctggaggcgcggggggaggagcggcgcggggcgcgg

SEQ ID NO: 496537 - DNA, 120 bp, Artificial Sequence
  ENSG00000163428_2 (sequence is synthesized)
gaggcgctgctgcggctgctgctgcctcacaaccgtctggtgtcgctgccacgggcgctgggcagcggcttcccgcacctccagctgctggacgtgagcggcaacgcgttgaccgcgctc

SEQ ID NO: 496538 - DNA, 120 bp, Artificial Sequence
  ENSG00000163428_3 (sequence is synthesized)
gggccggagctgctcgctctgcgcggcctgcgcacgctgctggccaagaacaaccggctcggcgggcccagtgcgctgcccaagggcctggcccagtcgccgctctgccgcagcctccag

SEQ ID NO: 496539 - DNA, 120 bp, Artificial Sequence
  ENSG00000163428_4 (sequence is synthesized)
gtgctcaacctcagcggcaactgtttccaggaggtgcctgcctcgctcttagagctgcgcgcgctgcagaccctgagcctgggcggcaaccaactgcagagcatcccggctgagatcgag

SEQ ID NO: 496540 - DNA, 120 bp, Artificial Sequence
  ENSG00000163428_5 (sequence is synthesized)
aacttgcagagtttagagtgtttatatcttggaggaaatttcattaaagaaatcccaccagaattaggaaatctgccttctctgaattatttggtattatgtgacaacaaaatccaaagc

SEQ ID NO: 496541 - DNA, 120 bp, Artificial Sequence
  ENSG00000163428_6 (sequence is synthesized)
atacctcctcaactttcacagttacattcacttcgttccctaagtcttcacaataacttgctgacatatctgcctcgagagatcctcaaccttattcatttggaagagttgagtttacga

SEQ ID NO: 496542 - DNA, 120 bp, Artificial Sequence
  ENSG00000163428_7 (sequence is synthesized)
ggaaatccattggttgttcgttttgttagagatttaacctatgatcctccaactctcctggaattagctgcacggaccattaagattcgaaatatttcctacactccctatgatcttcct

SEQ ID NO: 496543 - DNA, 120 bp, Artificial Sequence
  ENSG00000163428_8 (sequence is synthesized)
ggaaatcttcttagatacttgggttcagccagcaattgcccaaacccaaagtgtggaggagtctactttgactgctgtgtcagacaaattaaatttgtggacttctgtgggaagtatcgc

SEQ ID NO: 496544 - DNA, 120 bp, Artificial Sequence
  ENSG00000163428_9 (sequence is synthesized)
ctcccactgatgcactacttgtgttcaccagaatgttcttccccttgcagttctgcctctcacagctccacttcccagagtgaatctgactcagaagatgaagctagtgttgctgcacgc

SEQ ID NO: 496545 - DNA, 120 bp, Artificial Sequence
  ENSG00000163428_10 (sequence is synthesized)
agaatgcagaaagttcttcttggttgaacaggagtgcacagtgttgtgaaatacttaaaaaactgagcaaaatggttagacaagaaaatagagcttgaagttcactagaaatcttatctt

SEQ ID NO: 496546 - DNA, 120 bp, Artificial Sequence
  ENSG00000163428_11 (sequence is synthesized)
catcttaagtgttcatcaaagagtctgggatgatataaaacattttgtgtttcatctacccattcagcaagaatgagtccagtcccatgtttagattattttaacataatttgtgaatga

SEQ ID NO: 496547 - DNA, 120 bp, Artificial Sequence
  ENSG00000163428_12 (sequence is synthesized)
tagtttcacatttggctgatggtttgcagttttcactcaagttttgcatgaatcacaaagcagaatggtaccttttgaagagcagttctgcaataagtcatgagtagtataacttttgga

SEQ ID NO: 496548 - DNA, 120 bp, Artificial Sequence
  ENSG00000163428_13 (sequence is synthesized)
cattgagatggagaaagtgagaaattatcaaagctataattgccagagttgcccttgggtttaggtagaacactgtataccatatatactatataccatatatactatatataccatata

SEQ ID NO: 496549 - DNA, 120 bp, Artificial Sequence
  ENSG00000163428_14 (sequence is synthesized)
tattatatgccataaacaggattaaccctcccttttctaattgcctgtatgtctagattacagaactattcaaagaagctcacagatggttacatgggacaaacctttctgacaaactaa

SEQ ID NO: 496550 - DNA, 120 bp, Artificial Sequence
  ENSG00000163428_15 (sequence is synthesized)
ctggtaaagtaaggcatataacatttacatgagatattaaaactttttcattattatcctttgttctatatgattgctattaaccttatgtaatctagcaatgactgttatagtgcctta

SEQ ID NO: 496551 - DNA, 120 bp, Artificial Sequence
  ENSG00000163428_16 (sequence is synthesized)
atccagcaaggatataaaaatgtattcaagaagtaatgccagagcaacctataacctgacataccatgcagaacattgtaaaatattctttaacagaactaggtaaataactgtgtatct

SEQ ID NO: 496552 - DNA, 120 bp, Artificial Sequence
  ENSG00000163428_17 (sequence is synthesized)
aatatccgatctcatggccctcttaacatttttttgtttaaatgtgcactcatcccttataagcacattacttttacacttaatggtaggccacaatcttcatcaatctgttcatcataa

SEQ ID NO: 496553 - DNA, 120 bp, Artificial Sequence
  ENSG00000163428_18 (sequence is synthesized)
gacagagtaagaatttttaacagaaaattctaaaagagatagaagctaggaaagcttctttatatcttgcattaaatgggtagggaaaaaatatgactctcacccatgtcatgtactgga

SEQ ID NO: 496554 - DNA, 120 bp, Artificial Sequence
  ENSG00000163428_19 (sequence is synthesized)
ccatctttctctactttttaaagaaaaactaatacaactagaaaaacatcacaacaagccaaataaaaatggagaaaaggagtcattgtccttatacctaatggaacagtttccagaact

SEQ ID NO: 496555 - DNA, 120 bp, Artificial Sequence
  ENSG00000163428_20 (sequence is synthesized)
aacagtttccagaactactttaactatggaagcatttttgaaaataaagtattaataaaatagaaaaaaattattaaatatattgtatccttaatgtatagcaggaaaatagtttcacaa

SEQ ID NO: 496556 - DNA, 120 bp, Artificial Sequence
  ENSG00000163428_21 (sequence is synthesized)
accaaatttttattaagtactttaatatgcaatacaaattgaataatagtacaactataagttgatataaagtaagtgcttactggtaatcattaaataactaataacatgacttgttgg

SEQ ID NO: 496557 - DNA, 120 bp, Artificial Sequence
  ENSG00000163428_22 (sequence is synthesized)
ttggttaatgttaaacctacagtaagaaatgttatacagatcagataggcattagaacatcaggtgtaccttttctgatttctggcattcatggcacaccatttcttaaaagcagattgt

SEQ ID NO: 496558 - DNA, 120 bp, Artificial Sequence
  ENSG00000163428_23 (sequence is synthesized)
taataacatatacatgtattagggtttttttcatatatattttttattttagaagaaactagcataattcagggtttatgtgtttatttgtatattaattcatgaaacatgagagtttca

SEQ ID NO: 496559 - DNA, 120 bp, Artificial Sequence
  ENSG00000163428_24 (sequence is synthesized)
ttcatgaactgcagatgtgaaacgctgctatagaatgaatcccttcacctttaccttgttataatgtagtaagattttgttttccttttgactcagaaattttctatgtctatagaggta

SEQ ID NO: 496560 - DNA, 120 bp, Artificial Sequence
  ENSG00000163428_25 (sequence is synthesized)
atctaatatgttcctactgcctagaagagtaatacataggtgattatatcataaaatagaggtataaagtctttgcttacttctccatgtgggccacagcaagctgcagactgtacagtt

SEQ ID NO: 496561 - DNA, 120 bp, Artificial Sequence
  ENSG00000163428_26 (sequence is synthesized)
atgaaaggtaaagatgacttaggctgtgcctaagtgacaaatgtaaaatgttttgtaaataagtgacttacctaagatacataagatattttcatagaaaataatgtattcatagtaaaa

SEQ ID NO: 496562 - DNA, 120 bp, Artificial Sequence
  ENSG00000163428_27 (sequence is synthesized)
tactcaaattgataggaccaattttttctggcctaaatgcttatgcctacttcctaatcaattaccagcttgacttaagtaactgcttgagtagtcttctaagagttagtcttcgtaaaa

SEQ ID NO: 496563 - DNA, 120 bp, Artificial Sequence
  ENSG00000163428_28 (sequence is synthesized)
taaatggataggtatgtaaatatataatcttacataccctttccagcttcctagaaaggtctactgcttcatcttttacagatgtaaataggtccaaccagagacagtttctggcctttg

SEQ ID NO: 496564 - DNA, 120 bp, Artificial Sequence
  ENSG00000163428_29 (sequence is synthesized)
catataagaatatagatgtataccacagtattatttcaacaaaatgttatggttctatgtatagttgaaaactctatgatcagcatacaactgtcttttggtaatttttaatgaagtcta

SEQ ID NO: 496565 - DNA, 120 bp, Artificial Sequence
  ENSG00000163428_30 (sequence is synthesized)
catttagccgtcggttttatctttcttaaatctttgacctaaacttttgtaagagcagctaataatttctaagattttccctgtttctttttcctacctttccttttctcataactgatt

SEQ ID NO: 496566 - DNA, 120 bp, Artificial Sequence
  ENSG00000163428_31 (sequence is synthesized)
ggagaaattaatcagaagtcaaatacaagggacttcataatctagaaaccagataatcagctcccaagtcatgtagctaactatgcatttaaaataagtctgtctctttagttcttaagt

SEQ ID NO: 496567 - DNA, 120 bp, Artificial Sequence
  ENSG00000163428_32 (sequence is synthesized)
ttttagtgaccaaaactatggataaaactgcctaagcataacattaatatatttagaatggcattcttcagtgctagtatttgaaattggaattagtacattgtgcattcttagtagtct

SEQ ID NO: 496568 - DNA, 120 bp, Artificial Sequence
  ENSG00000163428_33 (sequence is synthesized)
ttatccctagaatcaattctctcagcatcaccaaactgaattggtgaaatagtgctaagattctgggcaataggaagattagtgaatatgatacattgattccagggtgccagggattgg

SEQ ID NO: 496569 - DNA, 120 bp, Artificial Sequence
  ENSG00000163428_34 (sequence is synthesized)
ctgacattaaggaccagctggctatggtcctcaggctacggtcctcagtattctagtatttgagtagtggaggtaaatccaaaggcgactggttatattttacttctaaatgtgtgctga

SEQ ID NO: 496570 - DNA, 120 bp, Artificial Sequence
  ENSG00000163428_35 (sequence is synthesized)
agtgtctcttgttcaaaaattcttgatatttagagcttcaagttaccacatttaaaagtaaagacttggcacggtggcacacacctataatcttagcactttgggaggccgaagtggatg

SEQ ID NO: 496571 - DNA, 73 bp, Artificial Sequence
  ENSG00000163428_36 (sequence is synthesized)
tgtgacgcacacccatagtcccagctaactccggaggctaagacaagagaatcacttgaacttgggagacaga

SEQ ID NO: 496572 - DNA, 120 bp, Artificial Sequence
  ENSG00000163428_37 (sequence is synthesized)
gaggctaagacaagagaatcacttgaacttgggagacagaggttgcagtaatctgagatcactccgctgcactccagcctgagtgagagtgagactgtgtctcaaacaaacaaacaaaaa

SEQ ID NO: 496573 - DNA, 120 bp, Artificial Sequence
  ENSG00000163428_38 (sequence is synthesized)
acaaacaaaaaaatttgcattgtaaattgtacctcaaatttgagcagtttttgtgtttgtgtaaattaaagtaaaaagcagtccacaataatgttttgtaatactgcacaccagttctac

SEQ ID NO: 496574 - DNA, 120 bp, Artificial Sequence
  ENSG00000163428_39 (sequence is synthesized)
atactgcacaccagttctaccagattttgtaactatcagatttaaatgaaaaaagagaaggaagaggctgattgctggagtgttaaagaaatcttggccgggcgtggtggctcacgcttg

SEQ ID NO: 496575 - DNA, 120 bp, Artificial Sequence
  ENSG00000163428_40 (sequence is synthesized)
aaaaaaaaaaaaaaaaaaaaagaaatctttagaagccacagggctagaagagaagtcaccaaacacctagggacagtcctaggcctagaaagccctttaaagtaatagtgaattgtttta

SEQ ID NO: 496576 - DNA, 120 bp, Artificial Sequence
  ENSG00000163428_41 (sequence is synthesized)
aaattaagttattgagtggcctactgactaccatccaaaaacctttatcaccaaatttgttcagtgtttgctattgggagattgtccatatccctccgtaattaagggccagcaagtaat

SEQ ID NO: 496577 - DNA, 120 bp, Artificial Sequence
  ENSG00000163428_42 (sequence is synthesized)
acgatcttcttacagccaaccttgctcttcccaaagggagaaagtaatacatcattaacctggaatttgtgatataacaggtagccttggttaatgtttaccttttcactatgtaaaaaa

SEQ ID NO: 496578 - DNA, 120 bp, Artificial Sequence
  ENSG00000163428_43 (sequence is synthesized)
gaaaaaacacacagcaaatagtgcaaataaaatttggtcttttaaagcattttagcagtagctatgtaaaaaaagttaatggttattattcctaaattttcataagacccttggtagaca

SEQ ID NO: 496579 - DNA, 120 bp, Artificial Sequence
  ENSG00000163428_44 (sequence is synthesized)
aaactatcggttatattatgtatatatgaggttagttaagctgcatttagttaggaacatttaatttttacctaaatgatccttttttcatccagaggtagagattttattgtcattatg

SEQ ID NO: 496580 - DNA, 120 bp, Artificial Sequence
  ENSG00000163428_45 (sequence is synthesized)
aatgttactccccatttagtccaaaatagtgagcttttaagttgtgccaggtacttaacaatagtaaaagctattgtatagatttttattcaatgtgacctataatacatttctgattcc

SEQ ID NO: 496581 - DNA, 120 bp, Artificial Sequence
  ENSG00000163428_46 (sequence is synthesized)
ttctgtattgaatgtcccagtttccatattaagtgctatgccctgtataacattaatgaatttaatagtgtacaattttgggccaggcatggtggctcacgccagtaatcctggcacttt

SEQ ID NO: 496582 - DNA, 120 bp, Artificial Sequence
  ENSG00000163428_47 (sequence is synthesized)
tcaaaaataaaaataaaaaaaaaattgcgtgcaattttgtattttcatagtcgtatctttttaaaggtatcatgatttcagttgtggtcaggaagtatgtgccttaaatcctctactcta

SEQ ID NO: 496583 - DNA, 120 bp, Artificial Sequence
  ENSG00000163428_48 (sequence is synthesized)
gacccaaagtttggagagctatattatttaataagttgtttgtgacagccttgttacctttttcatttgatttgagggagaaagactgtgatcctgacagattccttctcataaaatggc

SEQ ID NO: 496584 - DNA, 120 bp, Artificial Sequence
  ENSG00000163428_49 (sequence is synthesized)
ctaatgtgtatcagtctaggacttctggggagggaacctctaccatgcattctgtcccaggatgtcaaagtcataagaatcagggtcccctgaaataaaatcactgaaaagatatgttct

SEQ ID NO: 496585 - DNA, 120 bp, Artificial Sequence
  ENSG00000163428_50 (sequence is synthesized)
gttatatattatttaaaaaatttatctggtgccaccaaagaatgacagcagtttctaaccaacttcatatttatagcatcttatgaagatattgtaaggcttagcatattttgccactgg

SEQ ID NO: 496586 - DNA, 120 bp, Artificial Sequence
  ENSG00000163428_51 (sequence is synthesized)
ttttctttgtaatataggttgaaagtgagacatgtttgaatacttttgtatgtaaatatctcccattctttttctatctcttcttggtctatatttactaagaattgatatttaaaaaac

SEQ ID NO: 496587 - DNA, 120 bp, Artificial Sequence
  ENSG00000163428_52 (sequence is synthesized)
agttcactaatgaactctacatattattgaacactcacagggcaatattgatttgggtgctactagacttttacctaacattagtctttctcaatagttgttgtaaaggatagtattcaa

SEQ ID NO: 496588 - DNA, 120 bp, Artificial Sequence
  ENSG00000163428_53 (sequence is synthesized)
tccagtaaatattaaagtgtattagtttaatgaaggttatttatatactgtcataccacaaacctatggtggaaagaacatctgcattcaccagaatgtacttgttcctttggctgtgaa

SEQ ID NO: 496589 - DNA, 120 bp, Artificial Sequence
  ENSG00000163428_54 (sequence is synthesized)
taaattggataagacttttttattgtaagttccagctgttggaagatacggggataagattgacattgctgttgcagtattgcaaaaacatgactaaattggttaattatgtctaccgct

SEQ ID NO: 496590 - DNA, 120 bp, Artificial Sequence
  ENSG00000163428_55 (sequence is synthesized)
tatgtttaagagaatcctttcactaacttaaattgttaacattgttgtgatattgagaaagaatattaacctaaacagtcactttacaacaatcatgtaaagacgtgtgcctgcagttga

SEQ ID NO: 496591 - DNA, 120 bp, Artificial Sequence
  ENSG00000163428_56 (sequence is synthesized)
ggttttttgcatttctgagcctgctttgtattcatgagaaacaaaaacataatgggagaaaagttttagataagcagcattgtaagtttttgtaaagtttgggatgtcaaagtattaacg

SEQ ID NO: 496592 - DNA, 120 bp, Artificial Sequence
  ENSG00000163428_57 (sequence is synthesized)
aagggtactgaaaacatacttttacttgggtcaaattactttttatgatctgatttcttaattttctgtatttgaaatcttgcaaattaggaatatctacatctatagataaataagtaa

SEQ ID NO: 496593 - DNA, 120 bp, Artificial Sequence
  ENSG00000163428_58 (sequence is synthesized)
taatggtagaaataagtgtaattcagcaacatgattcaacaatttttatatttaggataagttattgtttattatattaatatcaaatttatatattgccttgtaatgctaaatgctctt

SEQ ID NO: 496594 - DNA, 120 bp, Artificial Sequence
  ENSG00000163428_59 (sequence is synthesized)
tcttaaaagaatatatgggctacttcaattctaccaccttcttccccctcccccaggacgtacaaaagatcttatattaaccaatcctctgtgaattttgccatatcaaacattgtgcct

SEQ ID NO: 496595 - DNA, 120 bp, Artificial Sequence
  ENSG00000163428_60 (sequence is synthesized)
tattttaataaaactgttttgttggaatccagttctatattaaagtctctataatgttgatatttgcctgattacttgttacatcattgaatacatacattaaatatgtactaacattga

SEQ ID NO: 496596 - DNA, 120 bp, Artificial Sequence
  ENSG00000163430_0 (sequence is synthesized)
cctccgaggctggcgatcggcggagctcccacctccgcttacagctcgctgccgccgtcctgccccgcgcccccaggagacctggaccagaccacgatgtggaaacgctggctcgcgctc

SEQ ID NO: 496597 - DNA, 120 bp, Artificial Sequence
  ENSG00000163430_1 (sequence is synthesized)
gcgctcgcgctggtggcggtcgcctgggtccgcgccgaggaagagctaaggagcaaatccaagatctgtgccaatgtgttttgtggagccggccgggaatgtgcagtcacagagaaaggg

SEQ ID NO: 496598 - DNA, 120 bp, Artificial Sequence
  ENSG00000163430_2 (sequence is synthesized)
gaacccacctgtctctgcattgagcaatgcaaacctcacaagaggcctgtgtgtggcagtaatggcaagacctacctcaaccactgtgaactgcatcgagatgcctgcctcactggatcc

SEQ ID NO: 496599 - DNA, 120 bp, Artificial Sequence
  ENSG00000163430_3 (sequence is synthesized)
aaaatccaggttgattacgatggacactgcaaagagaagaaatccgtaagtccatctgccagcccagttgtttgctatcagtccaaccgtgatgagctccgacgtcgcatcatccagtgg

SEQ ID NO: 496600 - DNA, 120 bp, Artificial Sequence
  ENSG00000163430_4 (sequence is synthesized)
ctggaagctgagatcattccagatggctggttctctaaaggcagcaactacagtgaaatcctagacaagtattttaagaactttgataatggtgattctcgcctggactccagtgaattc

SEQ ID NO: 496601 - DNA, 120 bp, Artificial Sequence
  ENSG00000163430_5 (sequence is synthesized)
ctgaagtttgtggaacagaatgaaactgccatcaatattacaacgtatccagaccaggagaacaacaagttgcttaggggactctgtgttgatgctctcattgaactgtctgatgaaaat

SEQ ID NO: 496602 - DNA, 120 bp, Artificial Sequence
  ENSG00000163430_6 (sequence is synthesized)
gctgattggaaactcagcttccaagagtttctcaagtgcctcaacccatctttcaaccctcctgagaagaagtgtgccctggaggatgaaacgtatgcagatggagctgagaccgaggtg

SEQ ID NO: 496603 - DNA, 120 bp, Artificial Sequence
  ENSG00000163430_7 (sequence is synthesized)
gactgtaaccgctgtgtctgtgcctgtggaaattgggtctgtacagccatgacctgtgacggaaagaatcagaagggggcccagacccagacagaggaggagatgaccagatatgtccag

SEQ ID NO: 496604 - DNA, 120 bp, Artificial Sequence
  ENSG00000163430_8 (sequence is synthesized)
gagctccaaaagcatcaggaaacagctgaaaagaccaagagagtgagcaccaaagagatctaatgaggaggcacagaccagtgtctggatcccagcatcttctccacttcagcgctgagt

SEQ ID NO: 496605 - DNA, 120 bp, Artificial Sequence
  ENSG00000163430_9 (sequence is synthesized)
tcagtatacacaagtgtctgctacagtcgccaaatcaccagtatttgcttatatagcaatgagttttattttgtttatttgttttgcaataaaggatatgaaggtggctggctaggaagg

SEQ ID NO: 496606 - DNA, 120 bp, Artificial Sequence
  ENSG00000163430_10 (sequence is synthesized)
gaagggccacagccttcatttctaggagtgctttaagagaaactgtaaatggtgctctggggctggaggctagtaaggaaactgcatcacgattgaaagaggaacagacccaaatctgaa

SEQ ID NO: 496607 - DNA, 120 bp, Artificial Sequence
  ENSG00000163430_11 (sequence is synthesized)
cctcttttgagtttactgcatctgtcagcaggctgcagggagtgcacacgatgccagagagaacttagcagggtgtccccggaggagaggtttgggaagctccacggagaggaacgctct

SEQ ID NO: 496608 - DNA, 120 bp, Artificial Sequence
  ENSG00000163430_12 (sequence is synthesized)
ctgcttccagcctctttccattgccgtcagcatgacagacctccagcatccacgcatctcttggtcccaataactgcctctagatacatagccatactgctagttaacccagtgtccctc

SEQ ID NO: 496609 - DNA, 120 bp, Artificial Sequence
  ENSG00000163430_13 (sequence is synthesized)
agacttggatggagtttctgggagggtacacccaaatgatgcagatacttgtatactttgagccccttagcgacctaaccaaattttaaaaatactttttaccaaaggtgctatttctct

SEQ ID NO: 496610 - DNA, 120 bp, Artificial Sequence
  ENSG00000163430_14 (sequence is synthesized)
aacacttttttttggcaagttgactttattcttcaattattatcattatattattgttttttaatattttattttcttgactaggtattaagcttttgtaattatttttcagtagtccca

SEQ ID NO: 496611 - DNA, 120 bp, Artificial Sequence
  ENSG00000163430_15 (sequence is synthesized)
cccaccacttcataggtggaaggagtttggggttcttcctggtgcaggggctgaaataacccagatgcccccaccctgccacatactagatgcagcccatagttggcccccctagcttcc

SEQ ID NO: 496612 - DNA, 120 bp, Artificial Sequence
  ENSG00000163430_16 (sequence is synthesized)
agcagtccactatctgccagaggagcaagggtgccttagaccgaagccaggggaagaagcatcttcataaaaaactttcaagatccaaacattaatttgtttttatttattctgagaagt

SEQ ID NO: 496613 - DNA, 120 bp, Artificial Sequence
  ENSG00000163430_17 (sequence is synthesized)
tgaggcaaatcagtattcccaaggatggcgacaagggcagccaagcagggcttaggatatcccagcctaccaatatgctcattcgactaactaggagggtgagttggccctgtctcttct

SEQ ID NO: 496614 - DNA, 120 bp, Artificial Sequence
  ENSG00000163430_18 (sequence is synthesized)
tttttctggacctcagtttcctcagtgagctggtaagaatgcactaaccttttgatttgataagttataaattctgtggttctgatcattggtccagaggggagataggttcctgtgatt

SEQ ID NO: 496615 - DNA, 120 bp, Artificial Sequence
  ENSG00000163430_19 (sequence is synthesized)
tttccttcttctctatagaataaatgaaatcttgttactagaacaagaaatgtcagatggccaaaaacaagatgaccagatttgatctcagcctgatgaccctacaggtcgtgctatgat

SEQ ID NO: 496616 - DNA, 120 bp, Artificial Sequence
  ENSG00000163430_20 (sequence is synthesized)
atggagtcctcatgggtaaagcaggaagagagtgggaaagagaaccaccccactctgtcttcatatttgcatttcatgtttaacctccggctggaaatagaaagcattcccttagagatg

SEQ ID NO: 496617 - DNA, 120 bp, Artificial Sequence
  ENSG00000163430_21 (sequence is synthesized)
aggataaaagaaagtttcagattcaacagggggaagaaaatggagatttaatcctaaaactgtgacttggggaggtcagtcatttacagttagtcctgtgtctttcgacttctgtgatta

SEQ ID NO: 496618 - DNA, 120 bp, Artificial Sequence
  ENSG00000163430_22 (sequence is synthesized)
ttaaccccactcactaccctgtttcagatgcatttggaataccaaagattaaatccttgacataagatctcatttgcagaaagcagattaaagaccatcagaaggaaattatttaggttg

SEQ ID NO: 496619 - DNA, 120 bp, Artificial Sequence
  ENSG00000163430_23 (sequence is synthesized)
aattccttctagtttttcttgttctcatttgaaaggagaaaattccactttgtttagcatttcaagcttttatgtatccatcccatctaaaaactcttcaaactccacttgttcagtctg

SEQ ID NO: 496620 - DNA, 120 bp, Artificial Sequence
  ENSG00000163430_24 (sequence is synthesized)
aaatgcagctccctgtccaagtgccttggagaactcacagcagcacgccttaatcaaaggttttaccagcccttggacactatgggaggagggcaagagtacaccaatttgttaaaagca

SEQ ID NO: 496621 - DNA, 120 bp, Artificial Sequence
  ENSG00000163430_25 (sequence is synthesized)
agaaaccacagtgtctcttcactagtcatttagaacatggttatcatccaagactactctaccctgcaacattgaactcccaagagcaaatccacattcctcttgagttctgcagcttct

SEQ ID NO: 496622 - DNA, 120 bp, Artificial Sequence
  ENSG00000163430_26 (sequence is synthesized)
gtgtaaatagggcagctgtcgtctatgccgtagaatcacatgatctgaggaccattcatggaagctgctaaatagcctagtctggggagtcttccataaagttttgcatggagcaaacaa

SEQ ID NO: 496623 - DNA, 120 bp, Artificial Sequence
  ENSG00000163430_27 (sequence is synthesized)
acaggattaaactaggtttggttccttcagccctctaaaagcatagggcttagcctgcaggcttccttgggctttctctgtgtgtgtagttttgtaaacactatagcatctgttaagatc

SEQ ID NO: 496624 - DNA, 120 bp, Artificial Sequence
  ENSG00000163430_28 (sequence is synthesized)
cagtgtccatggaaacattcccacatgccgtgactctggactatatcagtttttggaaagcagggttcctctgcctgctaacaagcccacgtggaccagtctgaatgtctttcctttaca

SEQ ID NO: 496625 - DNA, 120 bp, Artificial Sequence
  ENSG00000163430_29 (sequence is synthesized)
cctatgtttttaagtagtcaaacttcaagaaacaatctaaacaagtttctgttgcatatgtgtttgtgaacttgtatttgtatttagtaggcttctatattgcatttaacttgtttttgt

SEQ ID NO: 496626 - DNA, 120 bp, Artificial Sequence
  ENSG00000163430_30 (sequence is synthesized)
aactcctgattcttccttttcggatactattgatgaataaagaaattaaagtgatggttttattggtttcctttcccccaattaaggccaaataaagtcgtgagaacattacccatttac

SEQ ID NO: 496627 - DNA, 120 bp, Artificial Sequence
  ENSG00000163430_31 (sequence is synthesized)
ttcctaagagtggatttgagtttcaggagccttaaaaaggactgaagagtttctcctgggactacagcttggatggaaagtttactcggggactggtagaacaagtttctttgaaaggat

SEQ ID NO: 496628 - DNA, 120 bp, Artificial Sequence
  ENSG00000163430_32 (sequence is synthesized)
catggatagtgggtctggagtagaaggtgatgacaagtcagaaagtgtcttagtcccttcaagttgctataacaaaatgcctcagactgggtaattataggcaacagaaatgtattgctc

SEQ ID NO: 496629 - DNA, 120 bp, Artificial Sequence
  ENSG00000163430_33 (sequence is synthesized)
acagttctgaaggctgggaagcctaagatcaaggtaccagcagattcagtgtctgatgacggcttgttgaagcttgcctgcttcaaagaatgcacctttttgatgcatccccacatggtg

SEQ ID NO: 496630 - DNA, 120 bp, Artificial Sequence
  ENSG00000163430_34 (sequence is synthesized)
aaaagggtgaacaaactcccttaggcctcttttataagggcacttacccattcatgagggttaaactttgatgacctaatcatctcccaagagcctcacctctcaataccattgctttgg

SEQ ID NO: 496631 - DNA, 120 bp, Artificial Sequence
  ENSG00000163430_35 (sequence is synthesized)
ggattcaattttaacatatgaattttgggggacataaacattcaaaccatagcaggtgcattcctgtattgggaagacattaaattaaatgactcgtaaatcccccatatgatttaggag

SEQ ID NO: 496632 - DNA, 120 bp, Artificial Sequence
  ENSG00000163430_36 (sequence is synthesized)
actaaatggcatccagtgaggctgactgcagtagcctgtgagaaggcaaataaacatgggaaggtagtacagggaacatggaatcattgccagggacaggctaaataaccttaatggcac

SEQ ID NO: 496633 - DNA, 120 bp, Artificial Sequence
  ENSG00000163430_37 (sequence is synthesized)
ttccttgatacacacattccatgggggtaaacagttccaagtgggctgaacgttagctggttaaaacctcttttgcttggggacacatgactaacgctttccaacctgccattttcatat

SEQ ID NO: 496634 - DNA, 120 bp, Artificial Sequence
  ENSG00000163430_38 (sequence is synthesized)
gtatcatgcactctccacccacaataattctgcctcccaaaagagcatattatagtcaatgaggtttaaggtttcttcggttcagtcatgtggaagttttgctttcctaaaattatagct

SEQ ID NO: 496635 - DNA, 120 bp, Artificial Sequence
  ENSG00000163430_39 (sequence is synthesized)
ggatcactttgattggatttgggatattacccaaatgctaatcaaatattaaaaggcaatcttttttgttatgtgattgctacagattactgctcttacagtttgattcttcaaattttc

SEQ ID NO: 496636 - DNA, 120 bp, Artificial Sequence
  ENSG00000163430_40 (sequence is synthesized)
attctcagaagggaatcttaaacccagtttgaagggtaccttgtccacaaccacttttaaattttggctaacttcccaaccttccaccatgttctgggaaaactttttctgctgttatag

SEQ ID NO: 496637 - DNA, 120 bp, Artificial Sequence
  ENSG00000163430_41 (sequence is synthesized)
tatgtatgtattcaggaagtgcaacattattaaactaagcataattcagaagctaagtttcctttcatcaaaatttaatattacgaattgtgcaaagaagtatgttactttgatcagctt

SEQ ID NO: 496638 - DNA, 120 bp, Artificial Sequence
  ENSG00000163430_42 (sequence is synthesized)
tattttagagcttctttatcaagttatcatcagtcctcttgaattatttctgaaataaggggaaggaaggaagggaaaaaatatgaatgcatagatagatctaagcagatgccttcagag

SEQ ID NO: 496639 - DNA, 120 bp, Artificial Sequence
  ENSG00000163430_43 (sequence is synthesized)
ccctggaataatcctagctgggatatgggacatgaaaacaactctggcctactgctgctgggggctgttgcatggtgtgacataggaagtaaaatgttgctgtatgaataggaaggaggg

SEQ ID NO: 496640 - DNA, 120 bp, Artificial Sequence
  ENSG00000163430_44 (sequence is synthesized)
tcttcctgtcaatgagaattaatgttttcctaatgatttaacttttttactgaaaaaataatatgtgtacatggtaaaaatccaaattgtatcacagaaaatacagtgaataaaaccatc

SEQ ID NO: 496641 - DNA, 120 bp, Artificial Sequence
  ENSG00000163430_45 (sequence is synthesized)
ctcttaagagggtgtgtacatttataaatttgcctatgattgcctataaagtcaaagaagttgcaccagtatgcatgactgccaaaagtacataaactgagcatatccatttccctacat

SEQ ID NO: 496642 - DNA, 120 bp, Artificial Sequence
  ENSG00000163430_46 (sequence is synthesized)
tcttgcaaacattgtgccttcgaactttttggcctctgatagaggaaaaatggtaactccttgttttattttttatattcattattccttttgtaagattaaatatcatctcatgaataa

SEQ ID NO: 496643 - DNA, 120 bp, Artificial Sequence
  ENSG00000163430_47 (sequence is synthesized)
gcgctcgcgctggtggcggtcgcctgggtccgcgccgaggcctgtgctactgggttccagaagagctgcctgggagcaaccagcatctcaccccatacgccccactgcagacctccccct

SEQ ID NO: 496644 - DNA, 120 bp, Artificial Sequence
  ENSG00000163430_48 (sequence is synthesized)
aggggccctggtgttcctgtgaagtttccatgactaattctggcaaagcaaagagagcctttctcacgtcaacaaagccactctgtcgcagaatagtggcaagtagagccaaaattccac

SEQ ID NO: 496645 - DNA, 120 bp, Artificial Sequence
  ENSG00000163430_49 (sequence is synthesized)
cttggcataagtagagctgttcttttttaaaagagttggaaggaggaaaagaatggaggggacagagccggcccacttcatgttagtgaaatgatggtatattaaactgacagttttatg

SEQ ID NO: 496646 - DNA, 120 bp, Artificial Sequence
  ENSG00000163430_50 (sequence is synthesized)
cgccgaggcattcatcaaatagcattttgatgggtttaaatcattttccttggccattactgaagaagactggaggatttatactctctacattggccttcaaagtggacaagtcttagg

SEQ ID NO: 496647 - DNA, 120 bp, Artificial Sequence
  ENSG00000163430_51 (sequence is synthesized)
tagaaacttccacttggactttcctaagaaaccgaagggtgaaattatgaaactagtggcagccttacaaaaacattttttaggaagagtgacaagatatcttgggaactcctaagaatc

SEQ ID NO: 496648 - DNA, 120 bp, Artificial Sequence
  ENSG00000163430_52 (sequence is synthesized)
actctgaggagtgttgctttcataatggggagcccgaaagaccctgtcagtagcagtggagtcactgggtgttcctgtgttgagaaggcggtgtggtatgtcacaggggagactctccaa

SEQ ID NO: 496649 - DNA, 120 bp, Artificial Sequence
  ENSG00000163430_53 (sequence is synthesized)
ctcgtcactgtggaccatgagaacagaagcacctctctcaagtaccggagttggagccacctgggtctgactcttacctcagtcatggcccagctcttgaagtcacagtctcctcagtgc

SEQ ID NO: 496650 - DNA, 120 bp, Artificial Sequence
  ENSG00000163430_54 (sequence is synthesized)
tgatagaaattttgtgttccacaatccctgccaagctcataagatcttctatgcatcagaattgtgtcccagaactggccactcctcaacacagctcagaaaagctgcaaaactacattt

SEQ ID NO: 496651 - DNA, 120 bp, Artificial Sequence
  ENSG00000163430_55 (sequence is synthesized)
tgagttcatttttcaacatcctataagacatgctcgtgtcatgggaccagcaaatagaaggcacaactctttttgaaaggggataactggaaatgccagtaagacttctgtggttttcta

SEQ ID NO: 496652 - DNA, 120 bp, Artificial Sequence
  ENSG00000163430_56 (sequence is synthesized)
ttagtgatcactaaaattttatcatgatttatagttacagagcttttttgcacatactttccttagattctcacggtagcctttgtgaagtagatcttattgtaattaccatatagatga

SEQ ID NO: 496653 - DNA, 120 bp, Artificial Sequence
  ENSG00000163430_57 (sequence is synthesized)
ggaaattgaggctcaaagaggctaagtgagttttctatatcacacagctagtaattggcagactggggaagaactcccagattttcattcccctggcccagtgcccttttcacccacagc

SEQ ID NO: 496654 - DNA, 120 bp, Artificial Sequence
  ENSG00000163430_58 (sequence is synthesized)
atgtgttgtcttccaggaattctcttttgccaaagctttctctcctctgcttccccatccactcaactctcagcaccccctgttatttccagtggacaacagctgtccagagcagggctt

SEQ ID NO: 496655 - DNA, 120 bp, Artificial Sequence
  ENSG00000163430_59 (sequence is synthesized)
cgacgtagccctcactggccttcacattctgttgttcataataaaggatgatgcaggtggtatacagttgtaagtggggggaagtttggatggacctagttggtgagaaagggagaaact

SEQ ID NO: 496656 - DNA, 120 bp, Artificial Sequence
  ENSG00000163430_60 (sequence is synthesized)
ggagaaaatcagaaatctagtagcataaaaactgtaatattctcatttattcatgtattatttcagctcatctttgagtcaagagagctgctttattgattttttccccttcagcttcct

SEQ ID NO: 496657 - DNA, 120 bp, Artificial Sequence
  ENSG00000163430_61 (sequence is synthesized)
ctccgaggctggcgatcggcggagctcccacctccgcttacagctcgctgccgccgtcctgccccgcgcccccaggagacctggaccagaccacggtcagcgcggggcccggcgccttca

SEQ ID NO: 496658 - DNA, 120 bp, Artificial Sequence
  ENSG00000163430_62 (sequence is synthesized)
gtggcggtcgcctgggtccgcgccgaggaagagattgaagtactcatggagcatctcctgtgcagaggcagtaggatgggaagccagcataggttctccctaaaggtagagtgagtgaat

SEQ ID NO: 496659 - DNA, 120 bp, Artificial Sequence
  ENSG00000163430_63 (sequence is synthesized)
aaataactgggaagaaaacagaaagaaaaggcaaaaaaagagtgagtggaatataaacagtacggcatgtggcacctgaacagtcttcatgcccaggaatcccaaatgctgtttactcta

SEQ ID NO: 496660 - DNA, 120 bp, Artificial Sequence
  ENSG00000163430_64 (sequence is synthesized)
cagaaaggaatcacttgattttccacttcagaagccaaccgctcaacaacactggggaagaaatgaagaatcctgggtctccttgtagtcgatcaagaaattttggggggaaaaagggaa

SEQ ID NO: 496661 - DNA, 120 bp, Artificial Sequence
  ENSG00000163430_65 (sequence is synthesized)
aacaagaagctgtttcccaggtgattgtctccactccattccctgtccagaatgattctccatttgaattctcaaaatcccagtgacccctcaatgcaacaggaggaggtatgaggccag

SEQ ID NO: 496662 - DNA, 120 bp, Artificial Sequence
  ENSG00000163430_66 (sequence is synthesized)
aagggtaactcagtggccctaaattgtcagacaaagcaggagacagaagatcctcatacctgggccctagaagaaggaaaggaagggaaaggattcaagacaaaatgatgaaaaggttac

SEQ ID NO: 496663 - DNA, 120 bp, Artificial Sequence
  ENSG00000163430_67 (sequence is synthesized)
atgtgggtaattcacctctccttccacaagttaaatgggagatgaattgagagcctctaggtagatcttggcggattcctcactggcttaccacagctgctactgctctgagctttggtt

SEQ ID NO: 496664 - DNA, 120 bp, Artificial Sequence
  ENSG00000163431_0 (sequence is synthesized)
gtccactagccctgggcttcagggaggctgctgcgtccagtgaacacttcagcacctgtagcacagaagggccaaggagctgcagtcctcgaccagcaggaggtttgctcctcagcccac

SEQ ID NO: 496665 - DNA, 120 bp, Artificial Sequence
  ENSG00000163431_1 (sequence is synthesized)
tcgctgcatccagatcagctcacccctctcccttccctgcccaccaggactctgatagcccctggcagccacagcccattttgccaagatgtctagagtagccaaatatcgccggcaggt

SEQ ID NO: 496666 - DNA, 120 bp, Artificial Sequence
  ENSG00000163431_2 (sequence is synthesized)
gagtgaagaccccgacatcgacagcctgctggagaccctgtctcccgaggagatggaggagctggagaaggagctggacgtggtggacccagacgggagtgttcccgtggggctgcggca

SEQ ID NO: 496667 - DNA, 120 bp, Artificial Sequence
  ENSG00000163431_3 (sequence is synthesized)
gagaaaccagacggagaaacagtccacgggtgtgtacaaccgggaggccatgctcaacttctgtgaaaaggagaccaagaaacttatgcagagggagatgtccatggatgaaagcaagca

SEQ ID NO: 496668 - DNA, 120 bp, Artificial Sequence
  ENSG00000163431_4 (sequence is synthesized)
agtggagaccaagacagatgccaagaatggagaggaaaggggcagagatgccagcaaaaaagccctgggccccagacgggactcagatctggggaaggagccaaagaggggtggtttaaa

SEQ ID NO: 496669 - DNA, 120 bp, Artificial Sequence
  ENSG00000163431_5 (sequence is synthesized)
gaaaagcttctctagagacagagatgaagctggtggcaagagtggcgagaagcccaaggaggagaagatcatccggggcattgacaagggccgggtcagggctgcagtggataagaagga

SEQ ID NO: 496670 - DNA, 120 bp, Artificial Sequence
  ENSG00000163431_6 (sequence is synthesized)
ggcagggaaggatgggagaggagaggagagggcagtggccaccaagaaggaagaggagaagaaagggagtgacaggaacacaggcttgagcagggacaaggataaaaagagagaggagat

SEQ ID NO: 496671 - DNA, 120 bp, Artificial Sequence
  ENSG00000163431_7 (sequence is synthesized)
gaaggaggtggccaagaaagaggatgatgagaaggtaaaaggggagcgtaggaacacagacaccagaaaagagggtgagaagatgaaaagagcaggtgggaacacagacatgaaaaagga

SEQ ID NO: 496672 - DNA, 120 bp, Artificial Sequence
  ENSG00000163431_8 (sequence is synthesized)
ggatgagaaggtaaaaagaggaactgggaacacagacaccaaaaaggacgatgaaaaagtcaagaagaatgaacccttacatgaaaaggaagccaaggatgacagcaagaccaaaacacc

SEQ ID NO: 496673 - DNA, 120 bp, Artificial Sequence
  ENSG00000163431_9 (sequence is synthesized)
cgagaaacagacgcccagtggccccaccaagccctctgaaggaccggccaaggtggaggaggaggcagctcccagcatatttgatgagcctctggagagagtgaagaacaatgaccccga

SEQ ID NO: 496674 - DNA, 120 bp, Artificial Sequence
  ENSG00000163431_10 (sequence is synthesized)
gatgactgaggtgaacgtcaacaactcagactgcatcacaaatgagatcttggtccggtttactgaggctctggagttcaacactgtggttaagctgttcgccttggccaacacgcgagc

SEQ ID NO: 496675 - DNA, 120 bp, Artificial Sequence
  ENSG00000163431_11 (sequence is synthesized)
cgatgaccacgtggcctttgccattgccatcatgctcaaggccaacaagaccatcaccagcctcaacctggactccaaccacatcacaggcaaaggcatcctggccatcttccgggccct

SEQ ID NO: 496676 - DNA, 120 bp, Artificial Sequence
  ENSG00000163431_12 (sequence is synthesized)
cctccagaacaacacgctgaccgagctccgcttccacaaccagcgacacatctgtggaggcaagacggagatggagatcgccaagctgctgaaggagaatactaccctgctcaagctggg

SEQ ID NO: 496677 - DNA, 120 bp, Artificial Sequence
  ENSG00000163431_13 (sequence is synthesized)
ctaccattttgagctggccgggccccgaatgactgtcaccaatctgctcagccgcaacatggacaagcagagacaaaagcggctgcaggagcaaaggcaggcacaggaagccaagggaga

SEQ ID NO: 496678 - DNA, 120 bp, Artificial Sequence
  ENSG00000163431_14 (sequence is synthesized)
gaagaaggatctgctggaggtacccaaggccggggccgtggctaagggctccccaaaaccttcacctcaaccatctccaaagccctctccaaagaactcacccaaaaaagggggtgctcc

SEQ ID NO: 496679 - DNA, 120 bp, Artificial Sequence
  ENSG00000163431_15 (sequence is synthesized)
agctgccccaccaccccctccccctcccttggctccaccccttatcatggagaacctgaagaattcactctcaccagctacccagaggaagatgggagacaaagtcctccctgcccagga

SEQ ID NO: 496680 - DNA, 120 bp, Artificial Sequence
  ENSG00000163431_16 (sequence is synthesized)
gtaggaccaggctgccaggcaccatctgccaatgccatgactgctcaggcctcacctcccagggctacacagaccctgcccaccccatccctggctgacctgctgtggatgtccctattc

SEQ ID NO: 496681 - DNA, 120 bp, Artificial Sequence
  ENSG00000163431_17 (sequence is synthesized)
tgccatgggagagtccaggcctgggtcacgctcaaggaaggatgccttatctcttctcactttccttttcttgtctctgaggctctccaaattttgctttagtacatggagctcaggttt

SEQ ID NO: 496682 - DNA, 120 bp, Artificial Sequence
  ENSG00000163431_18 (sequence is synthesized)
ctggacaagaagagtccttttagcacatcactgagaagatggcactgtccagggcccatgtagctggcaagctgcaaaaggcctgtgatccaggaaagatgtcccacagggaccacatcc

SEQ ID NO: 496683 - DNA, 120 bp, Artificial Sequence
  ENSG00000163431_19 (sequence is synthesized)
accccagccccactgccctccagggccaggattcaggcctctgaggagcccacggggcaaagctgctgggccagtggcactctgtgtgggaaaatggcagaaagatggagaggcatgggg

SEQ ID NO: 496684 - DNA, 120 bp, Artificial Sequence
  ENSG00000163431_20 (sequence is synthesized)
gcccaaaggggagcgtggggaggggctgaggataccccaaagtccaggctaattagaggatgtggcaggggcagtggcctggatgcacagtgcctgatgggagtaggctccagacaggag

SEQ ID NO: 496685 - DNA, 120 bp, Artificial Sequence
  ENSG00000163431_21 (sequence is synthesized)
gagtgggacagacagcagctggacttgaaggtttgatgccaaagcagacattttcctcacacccacctgctgctgtatgaatagctgtgtatctgtttttccataagattttgataatat

SEQ ID NO: 496686 - DNA, 120 bp, Artificial Sequence
  ENSG00000163431_22 (sequence is synthesized)
atacaaacctttagctgtgaatggctgtgccccacctgttgtcctgaactgtgagtcctgatcctaaccctgggctccctggaggactctagaagctcaggttccctgccacactatttg

SEQ ID NO: 496687 - DNA, 120 bp, Artificial Sequence
  ENSG00000163431_23 (sequence is synthesized)
agttggccaagaaataaattcacatcctcagaaagtgcagcatggaggaaaatctgaactctaagcagaagactctccactgacctggttgtccaggtctagaaggccaggcctctacta

SEQ ID NO: 496688 - DNA, 120 bp, Artificial Sequence
  ENSG00000163431_24 (sequence is synthesized)
ggtctgctcctgaaccagtcctgctgcctggagtcagtagccagagttgttctcaggggtgctggggcagagtggagcccagggtgctgggatggctatattaggcatgttcagggatgc

SEQ ID NO: 496689 - DNA, 120 bp, Artificial Sequence
  ENSG00000163431_25 (sequence is synthesized)
tcattccatgactctgcctaaccatgggctcagggccaggtcctcacagcagtcacaggcccaggaaggcggcaggcagagaagtggagtgactatttggagaatagcacccatatctgt

SEQ ID NO: 496690 - DNA, 120 bp, Artificial Sequence
  ENSG00000163431_26 (sequence is synthesized)
gtgccctagggctcagaggggcctcatcttccccagccctccccacctgctcaccaattccacttcctgccccaactgcaggaatgctgacaatgctgccatgcccaccatcgggtgtag

SEQ ID NO: 496691 - DNA, 120 bp, Artificial Sequence
  ENSG00000163431_27 (sequence is synthesized)
gtgaaaggcatctttctgaatttcattctcttgaaggtgctgccaccccttggcactgtggaactgccaccttgggtctgtgtcacttgtaggtttctctgcctccaggttgcctcaaca

SEQ ID NO: 496692 - DNA, 120 bp, Artificial Sequence
  ENSG00000163431_28 (sequence is synthesized)
gcaggaggcacagcagtttcaccatctttgaggtgagggtggggtgccccagctaggaagcaagatcgctgtgctaggtctgaccaaaaccagagggcagtctagtcctgggggtaaagc

SEQ ID NO: 496693 - DNA, 120 bp, Artificial Sequence
  ENSG00000163431_29 (sequence is synthesized)
cctcagatcccagggtacactcttctccattccctccacccacttgcctgtcaccccagtcacctaagcaatcactgggcccagaggagaggagacagacacacactggctcctggacct

SEQ ID NO: 496694 - DNA, 120 bp, Artificial Sequence
  ENSG00000163431_30 (sequence is synthesized)
aaagggtatgagctggagctaaggccagctagagcttccactgtcagccctcactgtcagtcccactgcacccccctgtgcctgctgggcactgggcactagctagatgctttaggttgc

SEQ ID NO: 496695 - DNA, 120 bp, Artificial Sequence
  ENSG00000163431_31 (sequence is synthesized)
ttcagctgatccttcaactctgtgaggtggataccaatattctattttgcagatagaatttggcccagagaggttaactaatatatccatgatcacacagctaataaaagtcagagctca

SEQ ID NO: 496696 - DNA, 120 bp, Artificial Sequence
  ENSG00000163435_0 (sequence is synthesized)
gtgctgccgtgtgggcaagctctgtggggagaggggaggccagtgggttgtttttgccatcacagaatactgggaagcccctggcatcctgctccatagctctcttcaccactatcctgg

SEQ ID NO: 496697 - DNA, 120 bp, Artificial Sequence
  ENSG00000163435_1 (sequence is synthesized)
aaccttctccccacccccatccccatgcctccaaggcactgacctcaaatccaagtctttctcacttatctcaagctgccagcctgtagggattccttatctcagctccatgtcagcggt

SEQ ID NO: 496698 - DNA, 120 bp, Artificial Sequence
  ENSG00000163435_2 (sequence is synthesized)
gaggaagccccaagaaggcaagggagctgacagccttctcatttttctcgtacatcctcctgttcaccccgccatcccgggagccccagccagatgctcttcagggcagggagcacgtga

SEQ ID NO: 496699 - DNA, 120 bp, Artificial Sequence
  ENSG00000163435_3 (sequence is synthesized)
gcagccctggggctagaagccggttctcccacattcctgggtgagggactgggtggagggtgtgcctgcctcaggctccttgggggaggccccctgaagggctggggaaaatcctactga

SEQ ID NO: 496700 - DNA, 120 bp, Artificial Sequence
  ENSG00000163435_4 (sequence is synthesized)
gccccaggctctcctgcctgcactggcccagtgcgggggcgggggggcggggggatcctggacattaactctctcctaggcacctgggagcttcagagaggaagaaggtaaggtaagaag

SEQ ID NO: 496701 - DNA, 120 bp, Artificial Sequence
  ENSG00000163435_5 (sequence is synthesized)
cagattctctgcgcaggactttcttagtcctcaggctatagagttaaagaaagaagtatctgtagaaggtggagtcaccttttgtttgagtaaccgtttcacccaccctggctgagggtg

SEQ ID NO: 496702 - DNA, 90 bp, Artificial Sequence
  ENSG00000163435_6 (sequence is synthesized)
tttgtttgagtaaccgtttcacccaccctggctgagggtggccaggaactccccaagttgtgcattaatggaggggggtcacacagatcc

SEQ ID NO: 496703 - DNA, 67 bp, Artificial Sequence
  ENSG00000163435_7 (sequence is synthesized)
tgagacgcagtgattacaggtgtgagccaccggatcctacatttcaaatgcataaaaatctagatat

SEQ ID NO: 496704 - DNA, 120 bp, Artificial Sequence
  ENSG00000163435_8 (sequence is synthesized)
gggcgacagagcgagactccacctcaaaacaaaataaacaaaatactagatctggaagagatcttagggattattaaattcagacaacctcattttttatagatggggaaacaagcacag

SEQ ID NO: 496705 - DNA, 120 bp, Artificial Sequence
  ENSG00000163435_9 (sequence is synthesized)
cagacaacctcattttttatagatggggaaacaagcacagactccaagggtctcatccaagatcacacagttgcagatgctggctacaagtctcctgcctcaaccacctgtattacccca

SEQ ID NO: 496706 - DNA, 120 bp, Artificial Sequence
  ENSG00000163435_10 (sequence is synthesized)
ttcagggtctcaagaagggtctataagacactatccattgtgtttcgggctgagtccatagagacaaccacagacatgggggactctgcccacagggaaggcaagggctctggccatgga

SEQ ID NO: 496707 - DNA, 120 bp, Artificial Sequence
  ENSG00000163435_11 (sequence is synthesized)
gctggatgggaagactctgaagcccgaagacattgaatcctgtgcagggaaagagcgagggttttgtgtacaacacacctgcatacctggatgtgaatctcagctccaccccttcaccaa

SEQ ID NO: 496708 - DNA, 120 bp, Artificial Sequence
  ENSG00000163435_12 (sequence is synthesized)
ctctgtgtggcctgggcaagccattctaagggaaccctccacactgcaactttcatgtctataaaatgggaataaccatgcattccttacaggacttttttggtgtgaggattaaatgag

SEQ ID NO: 496709 - DNA, 120 bp, Artificial Sequence
  ENSG00000163435_13 (sequence is synthesized)
agaatatgttgaaaagtgcttggtaaatatattaatactatgcattccctcttctttgaatgacgtgacccaggtagtcaggcttctgaccactagagggcagcagaaggtactggaaaa

SEQ ID NO: 496710 - DNA, 120 bp, Artificial Sequence
  ENSG00000163435_14 (sequence is synthesized)
ctgggccgagtgaaccagagattagatggggtccagagagcagggatgaacttacccgtgtggattctggcaactccggcagggagggctccagcaggcgctgagggaagaactttcaag

SEQ ID NO: 496711 - DNA, 120 bp, Artificial Sequence
  ENSG00000163435_15 (sequence is synthesized)
cagagccgggtctcttcaggagcgactgcagcaaccctgatgcttggatggagtccaggcaggtgatggtagtgaagaccttgccaacagagtgggcgctggagaaggagccctttagtg

SEQ ID NO: 496712 - DNA, 120 bp, Artificial Sequence
  ENSG00000163435_16 (sequence is synthesized)
gggaccctggggccacgactaggctggcaggcccagccagcaccaattaatccatgagtattgcccagcattgagcctggagcaccttccagcccctggccagagtcctgggtgttctgg

SEQ ID NO: 496713 - DNA, 120 bp, Artificial Sequence
  ENSG00000163435_17 (sequence is synthesized)
gaaaaacccctaaacctagtaactcctctccctactaggcctctttgttgctgaatctctggaatttaggggccagcagctttctgactcaggtcagccaggggttcatgttccctcact

SEQ ID NO: 496714 - DNA, 120 bp, Artificial Sequence
  ENSG00000163435_18 (sequence is synthesized)
tgccctccccctgcctggcccatctctggcctggcccctgggaggaatttcctgggccagagggcagccgaaagcacagatgcccaccccagcaacgttcccgccacctgcccaggccag

SEQ ID NO: 496715 - DNA, 120 bp, Artificial Sequence
  ENSG00000163435_19 (sequence is synthesized)
cagcactgcctgctaagatccgggccaagtggcactgaatatgcaaatcacctggggccaggagcccagtctaaaggccaggaaatcccctccatccaatgagacaccagctcaggttac

SEQ ID NO: 496716 - DNA, 120 bp, Artificial Sequence
  ENSG00000163435_20 (sequence is synthesized)
tgcaggggacacactataaagccctgagctcagggaggagctccctccaggctctatttagagccgggtaggggagcgcagcggccagatacctcagcgctacctggcggaactggattt

SEQ ID NO: 496717 - DNA, 120 bp, Artificial Sequence
  ENSG00000163435_21 (sequence is synthesized)
ctctcccgcctgccggcctgcctgccacagccggactccgccactccggtaggattccccgcctgtcattccctagcccagctcttgggaaactgcagaggggtccagaggatttgcagt

SEQ ID NO: 496718 - DNA, 120 bp, Artificial Sequence
  ENSG00000163435_22 (sequence is synthesized)
tctgaacctgcacactccagtctaggatctccgagcaagagcgtaggtgtcctgagggtcaaagaacagagagagattgtctctgggaaggcagaatggccatgacgccgctagtctggc

SEQ ID NO: 496719 - DNA, 120 bp, Artificial Sequence
  ENSG00000163435_23 (sequence is synthesized)
tccagggccccagagatctgaggagggaagcccagctggaggctcctgtggtcctgccctggtctgagatcttggagcccttcttgaagagacggtgtccgcagagttgctgatcttcct

SEQ ID NO: 496720 - DNA, 120 bp, Artificial Sequence
  ENSG00000163435_24 (sequence is synthesized)
gcccctgggggctactcttgcccagggttgggcaaagcagagtagctgggagtgtaaggagaggaccctcgtcccctcaccaacctcatcctctctccccctacccacaggtagcctcat

SEQ ID NO: 496721 - DNA, 120 bp, Artificial Sequence
  ENSG00000163435_25 (sequence is synthesized)
ggctgcaacctgtgagattagcaacatttttagcaactacttcagtgcgatgtacagctcggaggactccaccctggcctctgttccccctgctgccacctttggggccgatgacttggt

SEQ ID NO: 496722 - DNA, 120 bp, Artificial Sequence
  ENSG00000163435_26 (sequence is synthesized)
actgaccctgagcaacccccagatgtcattggagggtacagagaaggccagctggttgggggaacagccccagttctggtcgaagacgcaggttctggactggatcagctaccaagtgga

SEQ ID NO: 496723 - DNA, 120 bp, Artificial Sequence
  ENSG00000163435_27 (sequence is synthesized)
gaagaacaagtacgacgcaagcgccattgacttctcacgatgtgacatggatggcgccaccctctgcaattgtgcccttgaggagctgcgtctggtctttgggcctctgggggaccaact

SEQ ID NO: 496724 - DNA, 120 bp, Artificial Sequence
  ENSG00000163435_28 (sequence is synthesized)
ccatgcccagctgcgagacctcacttccagctcttctgatgagctcagttggatcattgagctgctggagaaggatggcatggccttccaggaggccctagacccagggccctttgacca

SEQ ID NO: 496725 - DNA, 120 bp, Artificial Sequence
  ENSG00000163435_29 (sequence is synthesized)
gggcagcccctttgcccaggagctgctggacgacggtcagcaagccagcccctaccaccccggcagctgtggcgcaggagccccctcccctggcagctctgacgtctccaccgcagggac

SEQ ID NO: 496726 - DNA, 120 bp, Artificial Sequence
  ENSG00000163435_30 (sequence is synthesized)
tggtgcttctcggagctcccactcctcagactccggtggaagtgacgtggacctggatcccactgatggcaagctcttccccagcgatggttttcgtgactgcaagaagggggatcccaa

SEQ ID NO: 496727 - DNA, 120 bp, Artificial Sequence
  ENSG00000163435_31 (sequence is synthesized)
gcacgggaagcggaaacgaggccggccccgaaagctgagcaaagagtactgggactgtctcgagggcaagaagagcaagcacgcgcccagaggcacccacctgtgggagttcatccggga

SEQ ID NO: 496728 - DNA, 120 bp, Artificial Sequence
  ENSG00000163435_32 (sequence is synthesized)
catcctcatccacccggagctcaacgagggcctcatgaagtgggagaatcggcatgaaggcgtcttcaagttcctgcgctccgaggctgtggcccaactatggggccaaaagaaaaagaa

SEQ ID NO: 496729 - DNA, 120 bp, Artificial Sequence
  ENSG00000163435_33 (sequence is synthesized)
cagcaacatgacctacgagaagctgagccgggccatgaggtactactacaaacgggagatcctggaacgggtggatggccggcgactcgtctacaagtttggcaaaaactcaagcggctg

SEQ ID NO: 496730 - DNA, 120 bp, Artificial Sequence
  ENSG00000163435_34 (sequence is synthesized)
gaaggaggaagaggttctccagagtcggaactgagggttggaactatacccgggaccaaactcacggaccactcgaggcctgcaaaccttcctgggaggacaggcaggccagatggcccc

SEQ ID NO: 496731 - DNA, 120 bp, Artificial Sequence
  ENSG00000163435_35 (sequence is synthesized)
tccactggggaatgctcccagctgtgctgtggagagaagctgatgttttggtgtattgtcagccatcgtcctgggactcggagactatggcctcgcctccccaccctcctcttggaatta

SEQ ID NO: 496732 - DNA, 120 bp, Artificial Sequence
  ENSG00000163435_36 (sequence is synthesized)
caagccctggggtttgaagctgactttatagctgcaagtgtatctccttttatctggtgcctcctcaaacccagtctcagacactaaatgcagacaacaccttcctcctgcagacacctg

SEQ ID NO: 496733 - DNA, 120 bp, Artificial Sequence
  ENSG00000163435_37 (sequence is synthesized)
gactgagccaaggaggcctggggaggccctaggggagcaccgtgatggagaggacagagcaggggctccagcaccttctttctggactggcgttcacctccctgctcagtgcttgggctc

SEQ ID NO: 496734 - DNA, 120 bp, Artificial Sequence
  ENSG00000163435_38 (sequence is synthesized)
cacgggcaggggtcagagcactccctaatttatgtgctatataaatatgtcagatgtacatagagatctattttttctaaaacattcccctccccactcctctcccacagagtgctggac

SEQ ID NO: 496735 - DNA, 120 bp, Artificial Sequence
  ENSG00000163435_39 (sequence is synthesized)
tgttccaggccctccagtgggctgatgctgggacccttaggatggggctcccagctcctttctcctgtgaatggaggcagagacctccaataaagtgccttctgggctttttctaacctt

SEQ ID NO: 496736 - DNA, 120 bp, Artificial Sequence
  ENSG00000163435_40 (sequence is synthesized)
gtgagggcaaaggctgacgaagaggggagttacagatttcctgtagcaggtgtgggcttacagacacatggactgggctgggaggcgagcaaaggaagcagctgagactgttggagaacg

SEQ ID NO: 496737 - DNA, 120 bp, Artificial Sequence
  ENSG00000163435_41 (sequence is synthesized)
cttacaagacttcatgcaagcaaggacatgaactcagaacactgaggtcagaagcatcctgctgtcatgacaccgctcgagtgaccttgaccttgaccaagtctgtcctgtttaggactg

SEQ ID NO: 496738 - DNA, 120 bp, Artificial Sequence
  ENSG00000163435_42 (sequence is synthesized)
atttttcctattaggctagggtttggacctgatgttctcaagatgtctagaattgcatggctggccttgtggaatagatggttttgcattccagccaagtgtgctgtaaactgtatatct

SEQ ID NO: 496739 - DNA, 120 bp, Artificial Sequence
  ENSG00000163435_43 (sequence is synthesized)
gttttgcattccagccaagtgtgctgtaaactgtatatctgtaatatgaatcccagcttttgagtctgacaaaatcagagttaggatcttgtaaaggaaaaaaaaaaaaaaacaaaacaa

SEQ ID NO: 496740 - DNA, 120 bp, Artificial Sequence
  ENSG00000163435_44 (sequence is synthesized)
gttggcatttgttgaaagtgtagtctttttctcttttttttttaattgcaacttttactttagatttaggaggtcgtgcgcaggtttgttacatgggtatattgtgtgatgctgagcttg

SEQ ID NO: 496741 - DNA, 120 bp, Artificial Sequence
  ENSG00000163435_45 (sequence is synthesized)
ggatgcgaatgatcctgtcacccaggtagtgagtatagcacccagtgaaactgtagtctcatgccaggcactgtgctagcccactctggctcatttaatcctctcctaagaagagaggag

SEQ ID NO: 496742 - DNA, 120 bp, Artificial Sequence
  ENSG00000163435_46 (sequence is synthesized)
acacagcgtccccatttgacagatgcagaaagaggttccacaggtgtgccttgattctgtcctaaaaccgtttcccggaagcttttcctggtgtgggcgcttctaacctaatcctcaatc

SEQ ID NO: 496743 - DNA, 120 bp, Artificial Sequence
  ENSG00000163435_47 (sequence is synthesized)
gattccagaactattactctgtttccacagtgatactgtgtctaggttttagggaggacagttcattgatgttacttaagaatgctttccaggtggaaagttccttaagtttgaggcttc

SEQ ID NO: 496744 - DNA, 120 bp, Artificial Sequence
  ENSG00000163435_48 (sequence is synthesized)
aaattccatacagcacattaaaatcccattcatgagtttgaaatactgctctgttgtcttggaaataccaatcagattgttggctgaagtgatgtggataaagaagggatcttagaaaaa

SEQ ID NO: 496745 - DNA, 120 bp, Artificial Sequence
  ENSG00000163435_49 (sequence is synthesized)
tccacatgttgagctgagtcgagttcagtgtggccgtaggcaggccctggagctctgggccagctgcacagccagagagagcccttgagggagggattaggggagtgtgacccttccttc

SEQ ID NO: 496746 - DNA, 120 bp, Artificial Sequence
  ENSG00000163435_50 (sequence is synthesized)
ctccttccttccccagcctgtcttgtcccatccctgcccctccacagagtgctagagatgaccccctccccagacttcttcctccctcaattagaaaaattgcagcaggtcatcagaccc

SEQ ID NO: 496747 - DNA, 120 bp, Artificial Sequence
  ENSG00000163435_51 (sequence is synthesized)
tcctgagagccagcagcgtggttgagcagagggtgggccggcaggggacttactctgaccccgccccccagggactggtgcttctcggagctcccactcctcagactccggtggaagtga

SEQ ID NO: 496748 - DNA, 120 bp, Artificial Sequence
  ENSG00000163435_52 (sequence is synthesized)
ttggagggtacaggtgggtctcagcggggtgggatggggcacggagtgggagacagatccatctaagggcctgttagacaaatgggggaataggcagggaggagggtctctaggcaaatt

SEQ ID NO: 496749 - DNA, 120 bp, Artificial Sequence
  ENSG00000163435_53 (sequence is synthesized)
ttgtggggctgtgacaggcagagggaggtgtcagataccaggacaagggtgttgtgaatgctacctcctgcccctactcttgggatggctccaagggctgaggtgtgaatccccagtgtg

SEQ ID NO: 496750 - DNA, 65 bp, Artificial Sequence
  ENSG00000163435_54 (sequence is synthesized)
tgggatggctccaagggctgaggtgtgaatccccagtgtgctccaggaatggggctgtgtagcgg

SEQ ID NO: 496751 - DNA, 120 bp, Artificial Sequence
  ENSG00000163435_55 (sequence is synthesized)
gagccgggtaggggagcgcagcggccagatacctcagcgctacctggcggaactggatttctctcccgcctgccggcctgcctgccacagccggactccgccactccgagaaggccagct

SEQ ID NO: 496752 - DNA, 120 bp, Artificial Sequence
  ENSG00000163440_0 (sequence is synthesized)
ctcttctggcggtcactcgaaaccgccgggcctgaagcgggcgctcttccagcctggagaaggctgcgggtctccatccgtggcgcctcgccagctgcaggacgacgcgggctcttgagg

SEQ ID NO: 496753 - DNA, 120 bp, Artificial Sequence
  ENSG00000163440_1 (sequence is synthesized)
ggcagagcagcgcatcatgcaggatcccaatgaagatacagaatggaatgacattttaagagatttcggcattcttcctcctaaagaagagtcaaaagatgaaattgaagaaatggtttt

SEQ ID NO: 496754 - DNA, 120 bp, Artificial Sequence
  ENSG00000163440_2 (sequence is synthesized)
acgtttacagaaagaagcaatggtgaaaccatttgaaaagatgactcttgcacagctaaaggaagctgaagatgaatttgatgaagaagatatgcaggctgttgaaacatatagaaagaa

SEQ ID NO: 496755 - DNA, 120 bp, Artificial Sequence
  ENSG00000163440_3 (sequence is synthesized)
ttctggaaatcagtatgtgaatgaagtcacaaatgcagaagaagatgtgtgggttataattcatctatacagatcaagcatcccaatgtgtttgttggttaaccagcatcttagtcttct

SEQ ID NO: 496756 - DNA, 120 bp, Artificial Sequence
  ENSG00000163440_4 (sequence is synthesized)
agcaagaaagtttccagaaactaaatttgttaaagccatcgtgaatagctgtattcaacactaccatgacaattgtttaccaacaatttttgtgtataaaaatggtcagatagaagccaa

SEQ ID NO: 496757 - DNA, 120 bp, Artificial Sequence
  ENSG00000163440_5 (sequence is synthesized)
attcattggaattatagaatgtggagggataaatctcaagctggaagaacttgaatggaagctagcagaagttggagcaatacagactgatttggaagaaaaccccagaaaagacatggt

SEQ ID NO: 496758 - DNA, 120 bp, Artificial Sequence
  ENSG00000163440_6 (sequence is synthesized)
agatatgatggtatcttcaattagaaacacttctattcatgatgacagtgatagctccaacagtgataatgataccaaatagagagaaatattcaataaatagcttttagtatatgtgta

SEQ ID NO: 496759 - DNA, 120 bp, Artificial Sequence
  ENSG00000163444_0 (sequence is synthesized)
agccgggcggagctggcttgcggctcccggggccggctctccggccggagacatggcccgggggcccggcccgctaggcaggcctcgccccgatacggtcgccatgcccaagagaggaaa

SEQ ID NO: 496760 - DNA, 120 bp, Artificial Sequence
  ENSG00000163444_1 (sequence is synthesized)
ggcctcgccccgatacggtcgccatgcccaagagaggaaagcgactcaagttccgggcccacgacgcctgctccggccgagtgaccgtggcggattacgccaactcggatccggcggtcg

SEQ ID NO: 496761 - DNA, 120 bp, Artificial Sequence
  ENSG00000163444_2 (sequence is synthesized)
tgaggtctggacgagtcaagaaagccgtagccaacgctgttcagcaggaagtaaaatctctttgtggcttggaagcctctcaggttcctgcagaggaagctctttctggggctggtgagc

SEQ ID NO: 496762 - DNA, 120 bp, Artificial Sequence
  ENSG00000163444_3 (sequence is synthesized)
cctgtgacatcatcgacagcagtgatgagatggatgcccaggaggaaagcatccatgagagaactgtctccagaaaaaagaaaagcaagagacacaaagaagaactggacggggctggag

SEQ ID NO: 496763 - DNA, 120 bp, Artificial Sequence
  ENSG00000163444_4 (sequence is synthesized)
gagaagagtatcccatggatatttggctattgctggcctcctatatccgtcctgaggacattgtgaatttttccctgatttgtaagaatgcctggactgtcacttgcactgctgcctttt

SEQ ID NO: 496764 - DNA, 120 bp, Artificial Sequence
  ENSG00000163444_5 (sequence is synthesized)
ggaccaggttgtaccgaaggcactacacgctggatgcttccctgcctttgcgtctgcgaccagagtcaatggagaagctgcgctgtctccgggcttgtgtgatccgatctctgtaccata

SEQ ID NO: 496765 - DNA, 120 bp, Artificial Sequence
  ENSG00000163444_6 (sequence is synthesized)
tgtatgagccatttgctgctcgaatctccaagaatccagccattccagaaagcacccccagcacattaaagaattccaaatgcttacttttctggtgcagaaagattgttgggaacagac

SEQ ID NO: 496766 - DNA, 120 bp, Artificial Sequence
  ENSG00000163444_7 (sequence is synthesized)
aggaaccaatgtgggaattcaacttcaagttcaaaaaacagtcccctaggttaaagagcaagtgtacaggaggattgcagcctcccgttcagtacgaagatgttcataccaatccagacc

SEQ ID NO: 496767 - DNA, 120 bp, Artificial Sequence
  ENSG00000163444_8 (sequence is synthesized)
aggactgctgcctactgcaggtcaccaccctcaatttcatctttattccgattgtcatgggaatgatatttactctgtttactatcaatgtgagcacggacatgcggcatcatcgagtga

SEQ ID NO: 496768 - DNA, 120 bp, Artificial Sequence
  ENSG00000163444_9 (sequence is synthesized)
gactggtgttccaagattcccctgtccatggtggtcggaaactgcgcagtgaacagggtgtgcaagtcatcctggacccagtgcacagcgttcggctctttgactggtggcatcctcagt

SEQ ID NO: 496769 - DNA, 120 bp, Artificial Sequence
  ENSG00000163444_10 (sequence is synthesized)
acccattctccctgagagcgtagttactgcttcccatcccttgggggcagcctcgagtgtagtccattagtaatcagattccagtttggacagggtggctggattgtatatctcgttagt

SEQ ID NO: 496770 - DNA, 120 bp, Artificial Sequence
  ENSG00000163444_11 (sequence is synthesized)
aatgtacatgctcttcaggttctagggctcctgttaggggagggagaaatgttgaatcaagagggaaaacaactactatgatttataaacatattttaatgtaaaaatttgcatttaaaa

SEQ ID NO: 496771 - DNA, 120 bp, Artificial Sequence
  ENSG00000163444_12 (sequence is synthesized)
atttggtgctattgagtttgttctttattcttttatcccagtgaaaattgttgatcttgctgtagggaaaaattaaactctttgaatctccaaacaaggaagtttcagcattcccttatg

SEQ ID NO: 496772 - DNA, 120 bp, Artificial Sequence
  ENSG00000163444_13 (sequence is synthesized)
gatcagaggaaccttagaggcctgaaattgttgcttccagtttagctgcccctcaaattcaagtgaatattttcccttctccctttacccttctccagaaataaagcaggtgacagggtt

SEQ ID NO: 496773 - DNA, 120 bp, Artificial Sequence
  ENSG00000163444_14 (sequence is synthesized)
ttcagaatcttaccatattgacttgtgtatcttttttaaaaaataatttgtgatatttattgcatacattttcttttggcagttttggattttaggtatttttttgcatgaggctgataa

SEQ ID NO: 496774 - DNA, 120 bp, Artificial Sequence
  ENSG00000163444_15 (sequence is synthesized)
tggtgatgatgactttatacccttggtactatactaggaactttacatagtatctctacttctcacagtcttgcaaagtaggtgatattattcccattttatagttgagaaaacggaatt

SEQ ID NO: 496775 - DNA, 120 bp, Artificial Sequence
  ENSG00000163444_16 (sequence is synthesized)
agtgactgtacctataacaccagtaaatgcagagccaagattctgacccaggtctttttgttgtaccataagtttaaaagatgagtctcatttttcttgtggtagatggtggtaaaaagg

SEQ ID NO: 496776 - DNA, 120 bp, Artificial Sequence
  ENSG00000163444_17 (sequence is synthesized)
agtaggcagagtgtacatagataaaaaaaagtaaaagggtaagtaaaaaattgattgtggtatatgttattctaatcagccaaaaaagtttagaagattgatgaaatgatcttttaaata

SEQ ID NO: 496777 - DNA, 120 bp, Artificial Sequence
  ENSG00000163444_18 (sequence is synthesized)
tgtatttctgaataaaatgtaaaaccaagaaagttatttcaggaaggatagtgaccctttccttgaactgttagaagggcatttattaggctaaaacgtcattaacaaaatgcattgcat

SEQ ID NO: 496778 - DNA, 120 bp, Artificial Sequence
  ENSG00000163444_19 (sequence is synthesized)
gttgaaaccagcctcttgaaccataagcacttagcgactttgctctgccctgtactgtgctgcttctgctgtcatcctgtgtgcctacagaagcctggtcttccgtccatgcagaaatgc

SEQ ID NO: 496779 - DNA, 120 bp, Artificial Sequence
  ENSG00000163444_20 (sequence is synthesized)
ttatgtcctcctgttgtttagatgactcctattgttcaggtgtactctgagaagagaatcacgtttttctgttttgctaaggagaaaaccttgctgcttgtctctcctcccaccctccac

SEQ ID NO: 496780 - DNA, 120 bp, Artificial Sequence
  ENSG00000163444_21 (sequence is synthesized)
catccaaaattaaccagtgagctggatattacctggatattgccaggaggtgggcattaagacagtattctttaaaagtgaaaatcttgtgaggcaaactgctaaattcacatttttgtt

SEQ ID NO: 496781 - DNA, 120 bp, Artificial Sequence
  ENSG00000163444_22 (sequence is synthesized)
tttttttttttaccatcttccctaggaatattcctagaaagcatctgcttaattttgctgctaacagctaaccttatcccacgttgagggtggtattaaaactgttcacacagagtgagc

SEQ ID NO: 496782 - DNA, 120 bp, Artificial Sequence
  ENSG00000163444_23 (sequence is synthesized)
ctgggtcagtcaaaaacagaatttgggcatttgagtgataacagacaacctaaggacaatgagcactttgcagatctctacaattaaaagttgcctctttgaggcaggaggggagaagca

SEQ ID NO: 496783 - DNA, 120 bp, Artificial Sequence
  ENSG00000163444_24 (sequence is synthesized)
cagtccctgccaggttgcctgaactaaagatgccatggagcaggagtgtcttggtgcattgttccccgcttaggagtacctttaaaaagggggtgaaataaatttggcttaataattgta

SEQ ID NO: 496784 - DNA, 120 bp, Artificial Sequence
  ENSG00000163444_25 (sequence is synthesized)
gaagtgttttccccttaaagccaagcccattaattttgatggaacagcaggacgtacagggcatgtctgaagggcaggacagctggcacggcggacgacccaccccttatcccctgggag

SEQ ID NO: 496785 - DNA, 120 bp, Artificial Sequence
  ENSG00000163444_26 (sequence is synthesized)
cagagagctcactcttttatctgtgtggctgatttcattactgtttgtgatttggagctactcactggatggtgacctcttttcactttctctactccatgtctgggcatgacccagctt

SEQ ID NO: 496786 - DNA, 120 bp, Artificial Sequence
  ENSG00000163444_27 (sequence is synthesized)
tattattaattatccaggtaattgtcttccgtgtggttgcctccttccccactccagtatccactttcagcaaaacgtcttgcttcaagtcccagatagaagagtctttgacttttcttc

SEQ ID NO: 496787 - DNA, 120 bp, Artificial Sequence
  ENSG00000163444_28 (sequence is synthesized)
agaggcttattttagctagaatgtttaaagctacagatgcctatctgctcatctttccagctggattaggtgttgcttagatttgctagttgtctttaagtattacacagtttttgtatt

SEQ ID NO: 496788 - DNA, 120 bp, Artificial Sequence
  ENSG00000163444_29 (sequence is synthesized)
tatgcagccttatgtatagttgtagtggtgaggagtaggcaaattatatgattagtaaaagggctagtttttgatgctaggtatggaagtgtagtgacaattgtaaactgtcaggctgtg

SEQ ID NO: 496789 - DNA, 120 bp, Artificial Sequence
  ENSG00000163444_30 (sequence is synthesized)
tatctactggccagtggaatagtgcagtaaagttcatacagagaccaggagtcttagaaaactgacctagagcaggagagacaggtcacatattggtaggagtaatgtgtcatgtttcag

SEQ ID NO: 496790 - DNA, 120 bp, Artificial Sequence
  ENSG00000163444_31 (sequence is synthesized)
cgaggtgagcgctcgcgtgcccgcggctggagggcggctcggtccgggggcctgcagcgaggaggaggtgttggcggggaagacgctgacgagagaaggcctcttccttgagggttggtg

SEQ ID NO: 496791 - DNA, 120 bp, Artificial Sequence
  ENSG00000163449_0 (sequence is synthesized)
ggcaaagccgcatcctcccggagcagaaccgctccccgccggctgtccgcaacctccgccagcgtcggtccctgggcaggtgtggaatgcatccttgggacatctttgcatagccccatc

SEQ ID NO: 496792 - DNA, 120 bp, Artificial Sequence
  ENSG00000163449_1 (sequence is synthesized)
taggaagaagttctgtgatgtgtgaactgtgagtttactcaaacaagtccaactctttataagacataggtagacgtcaggtctggaatggaagagccaacagcagtagaaggccaggtc

SEQ ID NO: 496793 - DNA, 120 bp, Artificial Sequence
  ENSG00000163449_2 (sequence is synthesized)
cagcttccaagcccccaccagggctctctcaggaaggctgtggctgctgccctggcgctggatggggaatccacaatggggcacaggaaaaagaagaggaaagagtcacgcccagaatcc

SEQ ID NO: 496794 - DNA, 120 bp, Artificial Sequence
  ENSG00000163449_3 (sequence is synthesized)
atcatcatctaccgctcagacaatgagaaaacagatgaggagcccggagaatcagaaggtggagatcagcctaaagaggaggagggagatgatttcctagactatcctgtggatgatgat

SEQ ID NO: 496795 - DNA, 120 bp, Artificial Sequence
  ENSG00000163449_4 (sequence is synthesized)
atgtggaacctgcctctggacagccgctacgtcaccttaactgggaccatcacacgagggaagaaaaagggtcagatggtggacatccatgtcacattgacagagaaagagctgcaggaa

SEQ ID NO: 496796 - DNA, 120 bp, Artificial Sequence
  ENSG00000163449_5 (sequence is synthesized)
ctgaccaaacctaaagagtcatcaagggaaacgacgcctgaaggaagaatggcctgccagatgggagctgaccgtgggccccatgtggtcctctggacgctgatctgcctgcctgtggtt

SEQ ID NO: 496797 - DNA, 120 bp, Artificial Sequence
  ENSG00000163449_6 (sequence is synthesized)
ttcatcctttcttttgttgtctctttctactacggcactatcacctggtacaacatcttcctcgtgtataatgaggaaaggaccttctggcacaagatctcgtattgcccttgcctcgtt

SEQ ID NO: 496798 - DNA, 120 bp, Artificial Sequence
  ENSG00000163449_7 (sequence is synthesized)
ctcttctatccagtgctcatcatggccatggcttcttccctcggcctctacgctgctgtggtccagctctcgtggtcctgggaagcatggtggcaagctgcccgggacatggagaaaggc

SEQ ID NO: 496799 - DNA, 120 bp, Artificial Sequence
  ENSG00000163449_8 (sequence is synthesized)
ttctgtggctggctctgcagcaagctgggtctggaggactgttctccctacagcattgtggagttgcttgaatccgacaatatctcaagcactctctccaacaaggaccccatccaagaa

SEQ ID NO: 496800 - DNA, 120 bp, Artificial Sequence
  ENSG00000163449_9 (sequence is synthesized)
gtagaaacctccacggtctaaactcccaacaacttactccctcctctggccccagtagcctatatatcatcttaaaattccagcagattatttctttaaattaccccctactctccgcag

SEQ ID NO: 496801 - DNA, 120 bp, Artificial Sequence
  ENSG00000163449_10 (sequence is synthesized)
ttcttctgggaaatcagagtccatactgatcagttttaccatcttgagggttccaggagggcatggagcagacaagcaattgtgccaaagcagttcacccaatggacaaactctttttga

SEQ ID NO: 496802 - DNA, 120 bp, Artificial Sequence
  ENSG00000163449_11 (sequence is synthesized)
ttccctgccctaaaatcaccatttatttaggacaatggaactctgctgtgtgtcgttttgggagcctggaagtgttactggtgcctggaactgaggggagtatgtgactaaatgtgtcag

SEQ ID NO: 496803 - DNA, 120 bp, Artificial Sequence
  ENSG00000163449_12 (sequence is synthesized)
ggagaataaagaacctcggggtaaccaaatccaccaagataatagacagggatggagtgagacatttaggaagctggactaccacagtgtagcagaaggtaaagatttgtgtgtatcatt

SEQ ID NO: 496804 - DNA, 120 bp, Artificial Sequence
  ENSG00000163449_13 (sequence is synthesized)
accatcctgggaccctgtgaagtaatccaggtcccaggcttcttctatttctctaccattagtaggatgtgacccttctcacccttatccccaacatcccagtgctgattacatcttcag

SEQ ID NO: 496805 - DNA, 120 bp, Artificial Sequence
  ENSG00000163449_14 (sequence is synthesized)
ccatcacatccatgtttctgataaaatagaggaaagggcagagaagcacacacccttcctgttcaaggagacttcccagaagtcccactcgattcttcttatatctcattggcaagacct

SEQ ID NO: 496806 - DNA, 120 bp, Artificial Sequence
  ENSG00000163449_15 (sequence is synthesized)
cagtcacatgatgtcatgagcaaaagaggctggaaatgtagttgtttggctgggtagctatattctcagctaaatactgggttcacgctaattggcaagaaaaaggaagaatggttattt

SEQ ID NO: 496807 - DNA, 83 bp, Artificial Sequence
  ENSG00000163449_16 (sequence is synthesized)
gttcacgctaattggcaagaaaaaggaagaatggttatttgggttttgttttgttttgttttgtttcgctttagagacgacta

SEQ ID NO: 496808 - DNA, 120 bp, Artificial Sequence
  ENSG00000163449_17 (sequence is synthesized)
ctgcctcggcctcccaaaatgctgggattgtaggcaagaatggttatcttggtaggcaagtcagaatctttgcctcacaatgatcatttaaatacattcagaacccccaaactgctaata

SEQ ID NO: 496809 - DNA, 120 bp, Artificial Sequence
  ENSG00000163449_18 (sequence is synthesized)
ttcagaacccccaaactgctaatatggttttatttatttatttattcattcatttgtttattcatttatttatttaggcctgaatcttacacagagaatttatatatagatattagctac

SEQ ID NO: 496810 - DNA, 120 bp, Artificial Sequence
  ENSG00000163449_19 (sequence is synthesized)
atatactttgaatatgctatacatcgatattagcacctcacgtactttgcaattaagcttctgtaatgtcatgtgatttgtttttggaaaggaatagtggacaggagagtacaatttata

SEQ ID NO: 496811 - DNA, 120 bp, Artificial Sequence
  ENSG00000163449_20 (sequence is synthesized)
atagtagcataactctttgtcctggtggtggaggtgggacgaggtggtgatatttaacctagattaaagaccaggaagggaggaattgcatctgccaaagtttcctccaacagcgatcag

SEQ ID NO: 496812 - DNA, 120 bp, Artificial Sequence
  ENSG00000163449_21 (sequence is synthesized)
tagccctaagtacaaagaagccagatttagccttctgttgtttggcaaaacctcactcagagctttactccctcagacctttctgagtttaaccacagacatgatctttgctgtgctgag

SEQ ID NO: 496813 - DNA, 120 bp, Artificial Sequence
  ENSG00000163449_22 (sequence is synthesized)
aaacttgtgtctacctggcctgtagggagtgtaaactagattaatacagattaacagactctgaacttaaaaaaaaaaatcactcctaagggtgtccttctaatttcaaaatatcaactc

SEQ ID NO: 496814 - DNA, 120 bp, Artificial Sequence
  ENSG00000163449_23 (sequence is synthesized)
ctaagaggtcagcagaatttggagatttgggtccttataagaatagctggtgctcttttcttgttcatgtctcaaaacaaagctgttgagagaactgctgcgatgaatcaaaccagagga

SEQ ID NO: 496815 - DNA, 120 bp, Artificial Sequence
  ENSG00000163449_24 (sequence is synthesized)
gtttgtcatgctccccacagagagcccaggacatttgcctgatgtatggtgctgagctccaccttcagaggaactctctcttttttttttttttaaataactattattagcttgacaaga

SEQ ID NO: 496816 - DNA, 120 bp, Artificial Sequence
  ENSG00000163449_25 (sequence is synthesized)
aaaaaaaagtgcccaacagttttagtgttaatcttggtgctctatggtgcattagcagagatatgaacaattaaatgaagacaaagaaaataaaaataaagtctgattaacttttgctca

SEQ ID NO: 496817 - DNA, 120 bp, Artificial Sequence
  ENSG00000163449_26 (sequence is synthesized)
agaaccgctccccgccggctgtccgcaacctccgccagcgtcggtccctgggcaggtgtgggtgagactgctcgttcgtttctttaaatttcgatgccattggggagggtggaagggaaa

SEQ ID NO: 496818 - DNA, 120 bp, Artificial Sequence
  ENSG00000163449_27 (sequence is synthesized)
aaaaaaaaaaaagaagaagaaagaaacaagcagggtgtgctctatttcaaaaattcaatcctcagggctgaagctctcacgattaattaaaattaaatctccagtgcagctggaaaaaga

SEQ ID NO: 496819 - DNA, 120 bp, Artificial Sequence
  ENSG00000163449_28 (sequence is synthesized)
cccgccccgcccgccggccgcggcaaagccgcatcctcccggagcagaaccgctccccgccggctgtccgcaacctccgccagcgtcggtccctgggcaggtgtggtgcagctggaaaaa

SEQ ID NO: 496820 - DNA, 120 bp, Artificial Sequence
  ENSG00000163449_29 (sequence is synthesized)
cggccccgccccgcccgccggccgcggcaaagccgcatcctcccggagcagaaccgctccccgccggctgtccgcaacctccgccagcgtcggtccctgggcaggtggaatgcatccttg

SEQ ID NO: 496821 - DNA, 120 bp, Artificial Sequence
  ENSG00000163453_0 (sequence is synthesized)
actcgcgcccttgccgctgccaccgcaccccgccatggagcggccgtcgctgcgcgccctgctcctcggcgccgctgggctgctgctcctgctcctgcccctctcctcttcctcctcttc

SEQ ID NO: 496822 - DNA, 120 bp, Artificial Sequence
  ENSG00000163453_1 (sequence is synthesized)
ttcctcctcttcggacacctgcggcccctgcgagccggcctcctgcccgcccctgcccccgctgggctgcctgctgggcgagacccgcgacgcgtgcggctgctgccctatgtgcgcccg

SEQ ID NO: 496823 - DNA, 120 bp, Artificial Sequence
  ENSG00000163453_2 (sequence is synthesized)
gccgtgcgggggtggcggcgccggcagggggtactgcgcgccgggcatggagtgcgtgaagagccgcaagaggcggaagggtaaagccggggcagcagccggcggtccgggtgtaagcgg

SEQ ID NO: 496824 - DNA, 120 bp, Artificial Sequence
  ENSG00000163453_3 (sequence is synthesized)
cgtgtgcgtgtgcaagagccgctacccggtgtgcggcagcgacggcaccacctacccgagcggctgccagctgcgcgccgccagccagagggccgagagccgcggggagaaggccatcac

SEQ ID NO: 496825 - DNA, 120 bp, Artificial Sequence
  ENSG00000163453_4 (sequence is synthesized)
ccaggtcagcaagggcacctgcgagcaaggtccttccatagtgacgccccccaaggacatctggaatgtcactggtgcccaggtgtacttgagctgtgaggtcatcggaatcccgacacc

SEQ ID NO: 496826 - DNA, 120 bp, Artificial Sequence
  ENSG00000163453_5 (sequence is synthesized)
aaaagcatgaagtaactggctgggtgctggtatctcctctaagtaaggaagatgctggagaatatgagtgccatgcatccaattcccaaggacaggcttcagcatcagcaaaaattacag

SEQ ID NO: 496827 - DNA, 120 bp, Artificial Sequence
  ENSG00000163453_6 (sequence is synthesized)
tggttgatgccttacatgaaataccagtgaaaaaaggtgaaggtgccgagctataaacctccagaatattattagtctgcatggttaaaagtagtcatggataactacattacctgttct

SEQ ID NO: 496828 - DNA, 120 bp, Artificial Sequence
  ENSG00000163453_7 (sequence is synthesized)
tgcctaataagtttcttttaatccaatccactaacactttagttatattcactggttttacacagagaaatacaaaataaagatcacacatcaagactatctacaaaaatttattatata

SEQ ID NO: 496829 - DNA, 120 bp, Artificial Sequence
  ENSG00000163453_8 (sequence is synthesized)
tttacagaagaaaagcatgcatatcattaaacaaataaaatactttttatcacaacacagtacatatttgtcatttttaaaaagccacacaatagaaacaagacaccaagatatttaatt

SEQ ID NO: 496830 - DNA, 120 bp, Artificial Sequence
  ENSG00000163453_9 (sequence is synthesized)
atcttgttgactcctgtaaaatagctaaacactcatcattcgcggtgcaatactcatagacataagttcctgaaacaatagtttgcatgcgtaaggcattcgcaccaaagaaatctgaaa

SEQ ID NO: 496831 - DNA, 120 bp, Artificial Sequence
  ENSG00000163453_10 (sequence is synthesized)
agaaaaaacaaatggtaattagcagaattgtattgaagtgaccccacttctctaccccagaaaaagacaaagatctggtactgtagataatgaataaatgagtggagctgagaacacaca

SEQ ID NO: 496832 - DNA, 120 bp, Artificial Sequence
  ENSG00000163453_11 (sequence is synthesized)
aaatgactagtacatttgctttaaaaagaacagaactaagtatgaaagtatcagacgtagctattgatgaaattctgtagttagcaacccataagggcattaagtatgccattaaaatgt

SEQ ID NO: 496833 - DNA, 120 bp, Artificial Sequence
  ENSG00000163453_12 (sequence is synthesized)
acagcatgagactccaaaagattatctggatgggtgactgaacatcgttattatgacttagatgcttttaccttatctaacatgtaagagtcaaaatcaaacttgcctggaatggcttct

SEQ ID NO: 496834 - DNA, 120 bp, Artificial Sequence
  ENSG00000163453_13 (sequence is synthesized)
atttcccatagctttctacctatctacttggcattttccctttgtgttgtgactattaaattcctatttaaaagaaaatgattgtgggcaattctcgcccttcacttttgcttttaaaag

SEQ ID NO: 496835 - DNA, 120 bp, Artificial Sequence
  ENSG00000163453_14 (sequence is synthesized)
agactgcacgtttttgcggattgggaggagggccgacgccgtggccggatagtctctggagctgccttttgggggtgtttgcctgttggcattttcagtactccacgcgtcaagagtcct

SEQ ID NO: 496836 - DNA, 120 bp, Artificial Sequence
  ENSG00000163462_0 (sequence is synthesized)
gcagtgacacctcaacccccagccctcctcacacccccactgggctcctgcattaagcccggggttcgcagccgcagccgggatcgggcacccaggggcgggcgggcacggtagggccat

SEQ ID NO: 496837 - DNA, 120 bp, Artificial Sequence
  ENSG00000163462_1 (sequence is synthesized)
ggcagagggtgaggatatgcagaccttcacttccatcatggacgcactggtccgcatcagtaccagcatgaagaacatggagaaggaactgctgtgcccagtgtgtcaagagatgtacaa

SEQ ID NO: 496838 - DNA, 120 bp, Artificial Sequence
  ENSG00000163462_2 (sequence is synthesized)
gcagccactggtgctgccctgtacccacaacgtgtgccaggcctgtgcccgagaggtcttgggccagcagggctacataggacatggtggggaccccagctccgagcccacctctcctgc

SEQ ID NO: 496839 - DNA, 120 bp, Artificial Sequence
  ENSG00000163462_3 (sequence is synthesized)
ctccaccccttccacccgcagcccccgcctctcccgcagaactctccccaagccagaccgcctggaccggctgcttaagtcaggctttgggacataccctgggaggaagcgaggtgcttt

SEQ ID NO: 496840 - DNA, 120 bp, Artificial Sequence
  ENSG00000163462_4 (sequence is synthesized)
gcacccccaagtgatcatgttcccgtgcccagcctgccaaggtgatgtggagcttggggagcggggtctggcagggcttttccggaacctgaccctggagcgtgtggtggagcggtaccg

SEQ ID NO: 496841 - DNA, 120 bp, Artificial Sequence
  ENSG00000163462_5 (sequence is synthesized)
ccagagtgtgagtgtgggaggtgccatcctgtgccagttgtgcaagcccccaccactagaggccaccaagggctgcacagagtgccgcgccaccttctgcaatgagtgcttcaagctctt

SEQ ID NO: 496842 - DNA, 120 bp, Artificial Sequence
  ENSG00000163462_6 (sequence is synthesized)
ccacccctggggcacccagaaggcccagcatgagcccaccctgcctaccctctccttccgacccaagggccttatgtgcccagaccacaaggaagaggtgacccactactgcaagacatg

SEQ ID NO: 496843 - DNA, 120 bp, Artificial Sequence
  ENSG00000163462_7 (sequence is synthesized)
ccaacgcctggtatgtcaactctgccgggtgcggcgcacccacagcgggcacaagatcacaccagtgctcagtgcctaccaggccctcaaggacaagctgacaaagagcctgacatacat

SEQ ID NO: 496844 - DNA, 120 bp, Artificial Sequence
  ENSG00000163462_8 (sequence is synthesized)
cctgggaaaccaggacacggtacagacccagatctgtgagctggaggaggccgtgaggcacaccgaggtgagtggtcagcaggccaaggaggaggtgtcgcagctggtgcgggggctggg

SEQ ID NO: 496845 - DNA, 120 bp, Artificial Sequence
  ENSG00000163462_9 (sequence is synthesized)
ggctgtgctggaggagaagcgggcatcactgcttcaggccattgaagaatgccagcaggagcggctggcccgtctcagcgcccagatccaggagcaccggagcctgctggatggctcagg

SEQ ID NO: 496846 - DNA, 120 bp, Artificial Sequence
  ENSG00000163462_10 (sequence is synthesized)
tctggtgggctatgcccaggaagtacttaaggaaacagaccagccttgctttgtgcaagccgccaagcagctgcacaacaggattgcccgagccactgaagccctccagacattccggcc

SEQ ID NO: 496847 - DNA, 120 bp, Artificial Sequence
  ENSG00000163462_11 (sequence is synthesized)
agctgccagctcctccttccgccattgccagctcgacgtgggacgtgagatgaagctgctgacagagcttaacttcctgcgagtgcctgaggcccccgtcattgacacccagcgcacctt

SEQ ID NO: 496848 - DNA, 120 bp, Artificial Sequence
  ENSG00000163462_12 (sequence is synthesized)
tgcctatgatcagatcttcctgtgctggcggctgcccccccattcaccacctgcctggcactataccgttgagttccggcgcacggatgtgcctgctcagccaggccccacccgctggca

SEQ ID NO: 496849 - DNA, 120 bp, Artificial Sequence
  ENSG00000163462_13 (sequence is synthesized)
gtgtatgtgctgcgtgtccgcggctgcaacaaggccggctacggcgaatacagtgaagatgtgcacctgcacacgcccccggcacctgtcctgcacttcttcctcgatagccgctggggc

SEQ ID NO: 496850 - DNA, 120 bp, Artificial Sequence
  ENSG00000163462_14 (sequence is synthesized)
gcaagccgagagcggctggctatcagcaaggaccagcgagcagtacggagtgttccagggctgcccctgctgctggctgctgaccggctgctgaccggctgccacctgagtgtggatgtg

SEQ ID NO: 496851 - DNA, 120 bp, Artificial Sequence
  ENSG00000163462_15 (sequence is synthesized)
gtcctgggcgacgtggctgtgacccagggccgcagctactgggcctgcgccgtagacccagcctcctacttggtcaaggtgggcgtcgggctggagagcaagcttcaagaaagtttccag

SEQ ID NO: 496852 - DNA, 120 bp, Artificial Sequence
  ENSG00000163462_16 (sequence is synthesized)
ggtgcccccgatgtgatcagccccaggtacgacccggacagcgggcacgacagcggtgccgaggatgccacagtggaggcgtcgccacccttcgctttcctaaccattggcatgggcaag

SEQ ID NO: 496853 - DNA, 120 bp, Artificial Sequence
  ENSG00000163462_17 (sequence is synthesized)
atcctgctggggtcgggggcaagctcaaacgcagggctgacagggagggatggccccacagccggctgcacagtgcccctgccaccccgcctgggcatctgcctggactatgagcggggc

SEQ ID NO: 496854 - DNA, 120 bp, Artificial Sequence
  ENSG00000163462_18 (sequence is synthesized)
cgggtttccttcctggatgctgtttccttccgtgggctcttggagtgccccctggactgctcagggcctgtgtgccctgccttttgcttcatcgggggtggcgcagtacagctccaggag

SEQ ID NO: 496855 - DNA, 120 bp, Artificial Sequence
  ENSG00000163462_19 (sequence is synthesized)
ccagtgggcactaagcctgagaggaaagtcaccattgggggcttcgccaagctggactgagccttccaggcccctcatgcagacctggggtcctcctgggccctggcccccaaacctctt

SEQ ID NO: 496856 - DNA, 120 bp, Artificial Sequence
  ENSG00000163462_20 (sequence is synthesized)
ggcacccggttgttaccccctggcagcttctcccccaaactctcctaccatgtggccctgctccttctcccgtgtctgtcttcccacagttttctcttgacccaggggctctcttctgcc

SEQ ID NO: 496857 - DNA, 120 bp, Artificial Sequence
  ENSG00000163462_21 (sequence is synthesized)
cacctctctggatggcccccgttctctccattgcttgttagccaggcccccacccccactgagtctgccctatgacctgcctttggcatgttacccaagccatggagagagccccttctc

SEQ ID NO: 496858 - DNA, 120 bp, Artificial Sequence
  ENSG00000163462_22 (sequence is synthesized)
catccctgtcctgtgccccccaggctgattgggagggagggcacctggaacactgggcatgatctccagctctgcccttgccctgccaagctccctgccctgttgatgctgaactacagc

SEQ ID NO: 496859 - DNA, 120 bp, Artificial Sequence
  ENSG00000163462_23 (sequence is synthesized)
cttgggacaggcaggctttggggctggacgctgtccaggcattcctggtgaggggaaggggaccctgtcatcctgctttatttatttgggtcccaacaccccgcagccgcatgcccctta

SEQ ID NO: 496860 - DNA, 120 bp, Artificial Sequence
  ENSG00000163462_24 (sequence is synthesized)
tgtccctcttctccctcttgcatgctttacctgtcccacacccatgccaatgtgccaagtctcccttggggacccagctgagtctgggtgttcccattgggttgggccaggcaaggcctc

SEQ ID NO: 496861 - DNA, 120 bp, Artificial Sequence
  ENSG00000163462_25 (sequence is synthesized)
tggtgcccgctgccgtccccctgcagtgggctctgctaggcctgtgctgagcaacagctgttattgtcatggtttataaacaataaactgtgatgccaggcacatctctgccttccctga

SEQ ID NO: 496862 - DNA, 120 bp, Artificial Sequence
  ENSG00000163462_26 (sequence is synthesized)
agttcggagaagggggtgccgctgaccgggttgcgctgcgggagagggcgggagggcctgatgggggcgaaggggaatgggttggtaagaccgatggggaagtgaaggatggggaatgga

SEQ ID NO: 496863 - DNA, 120 bp, Artificial Sequence
  ENSG00000163462_27 (sequence is synthesized)
ggctggagtggccgcaggccggagctgcggcaggaggacgtatggagcgagcaggatggagtgccaacctcgcctggctatcgggaggaatcacgctctgcagcggggaaagagaagcaa

SEQ ID NO: 496864 - DNA, 120 bp, Artificial Sequence
  ENSG00000163462_28 (sequence is synthesized)
gggacagaggtctgggaaggtctgtgaaccagcccaaggcaggtgctctggaaaagctgcagaccagcatgaagaacatggagaaggaactgctgtgcccagtgtgtcaagagatgtaca

SEQ ID NO: 496865 - DNA, 120 bp, Artificial Sequence
  ENSG00000163462_29 (sequence is synthesized)
gccccaggtcagacccctctggaagggatggggtgtgggggtcctggtgggagtgaggggcacagaaggggtggcaagtggagcacagacttgctagggtggggctgggaggggattagg

SEQ ID NO: 496866 - DNA, 120 bp, Artificial Sequence
  ENSG00000163462_30 (sequence is synthesized)
aggaagtagtaggagcctggaagccaggctgggaggcctgtgtccaggagacgcatgggctcagcaaaagggcttttgaggactgattttcagagcatgtcgtgtggtcagggaaaggga

SEQ ID NO: 496867 - DNA, 120 bp, Artificial Sequence
  ENSG00000163462_31 (sequence is synthesized)
tgatagaagagggagccatctctgcttccttccaaccatctgtcactctggatcaacacaccatctctccaagcatctgtgtcctttcttcctaacactccatttccaacataccttctc

SEQ ID NO: 496868 - DNA, 120 bp, Artificial Sequence
  ENSG00000163462_32 (sequence is synthesized)
tttcttcctaacactccatttccaacataccttctccataaaacctttgctctccaagacctccttcacccgtatcttaaaattcttcccttagccggatgcggtggctcacgcctgtaa

SEQ ID NO: 496869 - DNA, 76 bp, Artificial Sequence
  ENSG00000163462_33 (sequence is synthesized)
gttcgagaccagcttgaccaacatggagttagcgcatgcctgtaaccccggctactcgtgaggctgaggcaggaga

SEQ ID NO: 496870 - DNA, 120 bp, Artificial Sequence
  ENSG00000163462_34 (sequence is synthesized)
agttcggagaagggggtgccgctgaccgggttgcgctgcgggagagggcgggagggcctgatgggggcgaaggggaatgggttgaccagcatgaagaacatggagaaggaactgctgtgc

SEQ ID NO: 496871 - DNA, 120 bp, Artificial Sequence
  ENSG00000163463_0 (sequence is synthesized)
ggagtagcaagtccgcggtaagcgctgacgcatgcgcatagctaaccgcacccggttcagctcgcctttcttggccagaggcgccggttggactcacgggcggggcatgatggtggtggg

SEQ ID NO: 496872 - DNA, 120 bp, Artificial Sequence
  ENSG00000163463_1 (sequence is synthesized)
tacgggcacctcgctggcgctctcctccctcctgtccctgctgctctttgctgggatgcagatgtacagccgtcagctggcctccaccgagtggctcaccatccagggcggcctgcttgg

SEQ ID NO: 496873 - DNA, 120 bp, Artificial Sequence
  ENSG00000163463_2 (sequence is synthesized)
agcaaagatcttccctgagattctcctgtgcctcctgttggctctctttgcatctggcctcatccaccgagtctgtgtcaccacctgcttcatcttctccatggttggtctgtactacat

SEQ ID NO: 496874 - DNA, 120 bp, Artificial Sequence
  ENSG00000163463_3 (sequence is synthesized)
caacaagatctcctccaccctgtaccaggcagcagctccagtcctcacaccagccaaggtcacaggcaagagcaagaagagaaactgaccctgaatgttcaataaagttgattctttgta

SEQ ID NO: 496875 - DNA, 120 bp, Artificial Sequence
  ENSG00000163463_4 (sequence is synthesized)
cggcctgcttggttcgggtctcttcgtgttctcgctcactgccttcaataatctggagaatcttgtctttggcaaaggattccaagcaaagatcttccctgagaatgcttaggtgaaagg

SEQ ID NO: 496876 - DNA, 120 bp, Artificial Sequence
  ENSG00000163463_5 (sequence is synthesized)
acgggcggggcatgatgggtaacaggaccggtggggtccccaggaagtcctagagggggtcggggtttgggtggacaagctttcctcgtcctctcccgacagagctgacgtgtcctgggt

SEQ ID NO: 496877 - DNA, 120 bp, Artificial Sequence
  ENSG00000163463_6 (sequence is synthesized)
tccaccgggagcgggcatttccaccggacgggagggttcggggtgtccggggctggggaatacgtaggggttgccgcgcggtgtggggagttggggcgtgtggctgcagtcccgggagtt

SEQ ID NO: 496878 - DNA, 120 bp, Artificial Sequence
  ENSG00000163463_7 (sequence is synthesized)
gtatcctccctgcagttggagggggcgggccacgtaggcatgtgcccttccccttccccacacagctctgtccccgttgcacaccctactccttaactccctcaaccaggccttcaataa

SEQ ID NO: 496879 - DNA, 120 bp, Artificial Sequence
  ENSG00000163463_8 (sequence is synthesized)
ttcgattctgcaccttgtatagctcctggagttggagctggaagagaaggcctttgaaagcaagaaactttggtaccttctggccagctcccagggaaggtttgaggggaacaggcaaat

SEQ ID NO: 496880 - DNA, 120 bp, Artificial Sequence
  ENSG00000163463_9 (sequence is synthesized)
ttgggctgatgttttgcatctattcgctgggaggcggtccttgttcccaccagaagaagcagcaggaccaagttcactatggagttctgatgtgaagttaactcaatattagagaattct

SEQ ID NO: 496881 - DNA, 120 bp, Artificial Sequence
  ENSG00000163463_10 (sequence is synthesized)
acttatttgagggaattgtgaagagcctaaatactagaggcaccaaatatctatggcagcaggaatcctgaccaaatcagaataactgttagattatttcctgtttggaataattcttgt

SEQ ID NO: 496882 - DNA, 120 bp, Artificial Sequence
  ENSG00000163463_11 (sequence is synthesized)
tcaattgctcatgtaatcaagaattgatgattcagttatttatggagaattaagtttataaagcaaattaagtgtcaaggccagattacttaaggaatgccacgtgctcagaaattcaca

SEQ ID NO: 496883 - DNA, 120 bp, Artificial Sequence
  ENSG00000163463_12 (sequence is synthesized)
cttaaggaatgccacgtgctcagaaattcacagcagatgcaatctcatgtaaaaccctcatgtggtaaaacaaagatctatcatggttgcccttaatcttttctcttttttttttttttt

SEQ ID NO: 496884 - DNA, 120 bp, Artificial Sequence
  ENSG00000163463_13 (sequence is synthesized)
aggctggagtgcagggatgtgatcactgaagccttgacctggtctcaagcaatcttccctcctcagtcttaccagtagctgggactaccagtgagtgccaccacacccagctactgtttt

SEQ ID NO: 496885 - DNA, 120 bp, Artificial Sequence
  ENSG00000163463_14 (sequence is synthesized)
cctggctgccctcatttctttgcccccctctaggacttgctttctccgcatagcccttttgcaggcttcagagttctttccatccagtagccccgggacttctctctgttaggttttgtt

SEQ ID NO: 496886 - DNA, 64 bp, Artificial Sequence
  ENSG00000163463_15 (sequence is synthesized)
catccagtagccccgggacttctctctgttaggttttgtttccatatgtattaccttcacttga

SEQ ID NO: 496887 - DNA, 89 bp, Artificial Sequence
  ENSG00000163463_16 (sequence is synthesized)
ctgggattacaggggtgagccactgtgcctggcttttcagttgcttctgaaagaaaccattggctgggtgggatggcataggctggcag

SEQ ID NO: 496888 - DNA, 120 bp, Artificial Sequence
  ENSG00000163463_17 (sequence is synthesized)
atcctagcactttgggaggtgtaggctggcagatagcttgggcccaggaattcaagaccagcttgggcaacatagagagaccctgtctctccaaaaaaatacaaaaattagccgggcatg

SEQ ID NO: 496889 - DNA, 87 bp, Artificial Sequence
  ENSG00000163463_18 (sequence is synthesized)
acaaaaattagccgggcatggtggtacgcacctatagtcccaggtactcgggaagctgaggtgggatgatcggaaactgcaccactg

SEQ ID NO: 496890 - DNA, 120 bp, Artificial Sequence
  ENSG00000163463_19 (sequence is synthesized)
ataaaaaaaaataataaaaaaagaaaagatgccattgtggtggggcaaagttcttggcccactttgccttctctgccctctccacctgggcaggtggggccctgtttgtctttgcttttg

SEQ ID NO: 496891 - DNA, 120 bp, Artificial Sequence
  ENSG00000163463_20 (sequence is synthesized)
tttgtctttgcttttgtcctctcaccttctctcccatcatattccaggtaacctaaaatcctttcctgcccccatgaagaagtagatccaagcactctgccctccaacctgtgtccaggg

SEQ ID NO: 496892 - DNA, 120 bp, Artificial Sequence
  ENSG00000163463_21 (sequence is synthesized)
agcaaggccttcaacttccaccactggtcacccagcttaatgaattgactctcattgtctggcttcttttggaaagggtttaactgggttccccaaatgggaacacaccttgcccttcag

SEQ ID NO: 496893 - DNA, 120 bp, Artificial Sequence
  ENSG00000163463_22 (sequence is synthesized)
actctgttgtccatcacctttcctttttccttttatgggaggaaagccagggtagggaagttatgtgagatatggggcagagctggtaaaaaaaagcatacatctacatccatgttcttt

SEQ ID NO: 496894 - DNA, 68 bp, Artificial Sequence
  ENSG00000163463_23 (sequence is synthesized)
ttcactgcaactttgaacttcctggctcaagggttcctccaacttcagcctcctgaatagctgggact

SEQ ID NO: 496895 - DNA, 120 bp, Artificial Sequence
  ENSG00000163463_24 (sequence is synthesized)
ctgaatagctgggactacaggcatgtgtaccactgtactacctggctaaattttttttaattcaattttttttttttttaagagatgggtctcactttgttgttcaggctggtctcaaac

SEQ ID NO: 496896 - DNA, 120 bp, Artificial Sequence
  ENSG00000163463_25 (sequence is synthesized)
cctcagcctcccgaagtgctgggattccaggtgcaagccaccacactcaacctcctacctccatgttctgggtatcattaaggtaatcagaatcctcctgctgtagtcacgcttaccctt

SEQ ID NO: 496897 - DNA, 120 bp, Artificial Sequence
  ENSG00000163463_26 (sequence is synthesized)
tcctcctgctgtagtcacgcttacccttctaagcaggttccccaggattcagagagccccggatttctcctggactccatgtgcagatgcctagtatttccattctgaccgttgccctcc

SEQ ID NO: 496898 - DNA, 120 bp, Artificial Sequence
  ENSG00000163463_27 (sequence is synthesized)
gagtggcagcagacgcaccaggtacgaggaaagcctgaggaccagggcggtggccgaggatgccccctcgacgcattatttcctccctgtcgcaagagggcgctgcgtccaggcactgag

SEQ ID NO: 496899 - DNA, 120 bp, Artificial Sequence
  ENSG00000163464_0 (sequence is synthesized)
actctgatctctgactgcagctcctactgttggacacacctggccggtgcttcagttagatcaaaccattgctgaaactgaagaggacatgtcaaatattacagatccacagatgtggga

SEQ ID NO: 496900 - DNA, 120 bp, Artificial Sequence
  ENSG00000163464_1 (sequence is synthesized)
ttttgatgatctaaatttcactggcatgccacctgcagatgaagattacagcccctgtatgctagaaactgagacactcaacaagtatgttgtgatcatcgcctatgccctagtgttcct

SEQ ID NO: 496901 - DNA, 120 bp, Artificial Sequence
  ENSG00000163464_2 (sequence is synthesized)
gctgagcctgctgggaaactccctggtgatgctggtcatcttatacagcagggtcggccgctccgtcactgatgtctacctgctgaacctggccttggccgacctactctttgccctgac

SEQ ID NO: 496902 - DNA, 120 bp, Artificial Sequence
  ENSG00000163464_3 (sequence is synthesized)
cttgcccatctgggccgcctccaaggtgaatggctggatttttggcacattcctgtgcaaggtggtctcactcctgaaggaagtcaacttctacagtggcatcctgctgttggcctgcat

SEQ ID NO: 496903 - DNA, 120 bp, Artificial Sequence
  ENSG00000163464_4 (sequence is synthesized)
cagtgtggaccgttacctggccattgtccatgccacacgcacactgacccagaagcgtcacttggtcaagtttgtttgtcttggctgctggggactgtctatgaatctgtccctgccctt

SEQ ID NO: 496904 - DNA, 120 bp, Artificial Sequence
  ENSG00000163464_5 (sequence is synthesized)
cttccttttccgccaggcttaccatccaaacaattccagtccagtttgctatgaggtcctgggaaatgacacagcaaaatggcggatggtgttgcggatcctgcctcacacctttggctt

SEQ ID NO: 496905 - DNA, 120 bp, Artificial Sequence
  ENSG00000163464_6 (sequence is synthesized)
catcgtgccgctgtttgtcatgctgttctgctatggattcaccctgcgtacactgtttaaggcccacatggggcagaagcaccgagccatgagggtcatctttgctgtcgtcctcatctt

SEQ ID NO: 496906 - DNA, 120 bp, Artificial Sequence
  ENSG00000163464_7 (sequence is synthesized)
cctgctttgctggctgccctacaacctggtcctgctggcagacaccctcatgaggacccaggtgatccaggagagctgtgagcgccgcaacaacatcggccgggccctggatgccactga

SEQ ID NO: 496907 - DNA, 120 bp, Artificial Sequence
  ENSG00000163464_8 (sequence is synthesized)
gattctgggatttctccatagctgcctcaaccccatcatctacgccttcatcggccaaaattttcgccatggattcctcaagatcctggctatgcatggcctggtcagcaaggagttctt

SEQ ID NO: 496908 - DNA, 120 bp, Artificial Sequence
  ENSG00000163464_9 (sequence is synthesized)
ggcacgtcatcgtgttacctcctacacttcttcgtctgtcaatgtctcttccaacctctgaaaaccatcgatgaaggaatatctcttctcagaaggaaagaataaccaacaccctgaggt

SEQ ID NO: 496909 - DNA, 120 bp, Artificial Sequence
  ENSG00000163464_10 (sequence is synthesized)
taggatgtggggaagttaggaactggtgtcttcaggggccacaccaaccttctgaggagctgttgaggtacctccaaggaccggcctttgcacctccatggaaacgaagcaccatcattc

SEQ ID NO: 496910 - DNA, 120 bp, Artificial Sequence
  ENSG00000163464_11 (sequence is synthesized)
ccgttgaacgtcacatctttaacccactaactggctaattagcatggccacatctgagccccgaatctgacattagatgagagaacagggctgaagctgtgtcctcatgagggctggatg

SEQ ID NO: 496911 - DNA, 120 bp, Artificial Sequence
  ENSG00000163464_12 (sequence is synthesized)
ctctcgttgaccctcacaggagcatctcctcaactctgagtgttaagcgttgagccaccaagctggtggctctgtgtgctctgatccgagctcaggggggtggttttcccatctcaggtg

SEQ ID NO: 496912 - DNA, 120 bp, Artificial Sequence
  ENSG00000163464_13 (sequence is synthesized)
tgttgcagtgtctgctggagacattgaggcaggcactgccaaaacatcaacctgccagctggccttgtgaggagctggaaacacatgttccccttgggggtggtggatgaacaaagagaa

SEQ ID NO: 496913 - DNA, 120 bp, Artificial Sequence
  ENSG00000163464_14 (sequence is synthesized)
agagggtttggaagccagatctatgccacaagaaccccctttacccccatgaccaacatcgcagacacatgtgctggccacctgctgagccccaagtggaacgagacaagcagcccttag

SEQ ID NO: 496914 - DNA, 120 bp, Artificial Sequence
  ENSG00000163464_15 (sequence is synthesized)
cccttcccctctgcagcttccaggctggcgtgcagcatcagcatccctagaaagccatgtgcagccaccagtccattgggcaggcagatgttcctaataaagcttctgttccgtgcttgt

SEQ ID NO: 496915 - DNA, 120 bp, Artificial Sequence
  ENSG00000163464_16 (sequence is synthesized)
ccctgtggaagtatcttggttgtgacagagtcaagggtgtgtgcagcattgttggctgttcctgcagtagaatgggggcagcacctcctaagaaggcacctctctgggttgaagggcagt

SEQ ID NO: 496916 - DNA, 120 bp, Artificial Sequence
  ENSG00000163464_17 (sequence is synthesized)
gttccctggggctttaactcctgctagaacagtctcttgaggcacagaaactcctgttcatgcccatacccctggccaaggaagatccctttgtccacaagtaaaaggaaatgctcctcc

SEQ ID NO: 496917 - DNA, 120 bp, Artificial Sequence
  ENSG00000163464_18 (sequence is synthesized)
agggagtctcagcttcaccctgaggtgagcatcatcttctgggttaggccttgcctaggcatagccctgcctcaagctatgtgagctcaccagtccctccccaaatgctttccatgagtt

SEQ ID NO: 496918 - DNA, 120 bp, Artificial Sequence
  ENSG00000163464_19 (sequence is synthesized)
gcagttttttcctagtctgttttccctccttggagacagggccctgtcggtttattcactgtatgtccttggtgcctggagcctactaaatgctcaataaataatgatcacaggaatgaa

SEQ ID NO: 496919 - DNA, 120 bp, Artificial Sequence
  ENSG00000163466_0 (sequence is synthesized)
gcggcggcggcggctcggcaggcgggttcaggcttcgggggccaggtcggttgggtgggtgggtgtctccacagtctgcgtgcgtgggccagcgcgttcgtcttacccttccctccaccc

SEQ ID NO: 496920 - DNA, 120 bp, Artificial Sequence
  ENSG00000163466_1 (sequence is synthesized)
cggcccctctccccttctcccctaacctcctaccccacccagccccactcagggggcagcagggccgctccctccgtccttgcctcccttacccaccctcaccggcccttgtttctcctt

SEQ ID NO: 496921 - DNA, 120 bp, Artificial Sequence
  ENSG00000163466_2 (sequence is synthesized)
cccctgggggcagccgccgccatgatcctgctggaggtgaacaaccgcatcatcgaggagacgctcgcgctcaagttcgagaacgcggccgccggaaacaaaccggaagcagtagaagta

SEQ ID NO: 496922 - DNA, 120 bp, Artificial Sequence
  ENSG00000163466_3 (sequence is synthesized)
acatttgcagatttcgatggggtcctctatcatatttcaaatcctaatggagacaaaacaaaagtgatggtcagtatttctttgaaattctacaaggaacttcaggcacatggtgctgat

SEQ ID NO: 496923 - DNA, 120 bp, Artificial Sequence
  ENSG00000163466_4 (sequence is synthesized)
gagttattaaagagggtgtacgggagtttcttggtaaatccagaatcaggatacaatgtctctttgctatatgaccttgaaaatcttccggcatccaaggattccattgtgcatcaagct

SEQ ID NO: 496924 - DNA, 120 bp, Artificial Sequence
  ENSG00000163466_5 (sequence is synthesized)
ggcatgttgaagcgaaattgttttgcctctgtctttgaaaaatacttccaattccaagaagagggcaaggaaggagagaacagggcagttatccattatagggatgatgagaccatgtat

SEQ ID NO: 496925 - DNA, 120 bp, Artificial Sequence
  ENSG00000163466_6 (sequence is synthesized)
tttaaggatgacgacgatgtggtcattggaaaggtgttcatgcaggagttcaaagaaggacgcagagccagccacacagccccacaggtcctctttagccacagggaacctcctctggag

SEQ ID NO: 496926 - DNA, 120 bp, Artificial Sequence
  ENSG00000163466_7 (sequence is synthesized)
ctgaaagacacagacgccgctgtgggtgacaacattggctacattacctttgtgctgttccctcgtcacaccaatgccagtgctcgagacaacaccatcaacctgatccacacgttccgg

SEQ ID NO: 496927 - DNA, 120 bp, Artificial Sequence
  ENSG00000163466_8 (sequence is synthesized)
gactacctgcactaccacatcaagtgctctaaggcctatattcacacacgtatgcgggcgaaaacgtctgacttcctcaaggtgctgaaccgcgcacgcccagatgccgagaaaaaagaa

SEQ ID NO: 496928 - DNA, 120 bp, Artificial Sequence
  ENSG00000163466_9 (sequence is synthesized)
atgaaaacaatcacggggaagacgttttcatcccgctaatcttgggaataagaggaggaagcggctggcaactgaaggctggaacacttgctactggataatcgtagcttttaatgttgc

SEQ ID NO: 496929 - DNA, 120 bp, Artificial Sequence
  ENSG00000163466_10 (sequence is synthesized)
gcctcttcaggttcttaagggattctccgttttggttccattttgtacacgtttggaaaataatctgcagaaacgagctgtgcttgcaaagacttcatagttcccaagaattaaaaaaaa

SEQ ID NO: 496930 - DNA, 120 bp, Artificial Sequence
  ENSG00000163466_11 (sequence is synthesized)
aaaaaaaagaattccacttgatcaacttaattccttttctttatcttccctccctcacttcccttttctcccaccctcttttccaagctgtttcgctttgcaatatattactggtaatga

SEQ ID NO: 496931 - DNA, 120 bp, Artificial Sequence
  ENSG00000163466_12 (sequence is synthesized)
gttgcaggataatgcagtcataacttgttttctcctaagtatttgagttcaaaactcctgtatctaaagaaatacggttggggtcattaataaagaaaatctttctatcttacatgagaa

SEQ ID NO: 496932 - DNA, 120 bp, Artificial Sequence
  ENSG00000163466_13 (sequence is synthesized)
taatttttttaatattttgtagaaacagagtctcactgtctgctgcccatactgccaaaacagagtaaggaggtctcaaactcctagccttgagcaatctacccacctcagcctccgcct

SEQ ID NO: 496933 - DNA, 120 bp, Artificial Sequence
  ENSG00000163466_14 (sequence is synthesized)
cccagagagttgggatcacaggcatgagccaccatacccagcaccttttttttttttaatctccaaattggcgggatgaatgtgtcacagaaataaaagccaagataacactgtaggctt

SEQ ID NO: 496934 - DNA, 120 bp, Artificial Sequence
  ENSG00000163466_15 (sequence is synthesized)
ttggcaaaatcaaggtattaaaagaaagaaacaaacagatctagaacagaaaaatcatgtccaaagtcttgggcatgcttgtcacagccaacatcctgacatggaaagtttatgtttctg

SEQ ID NO: 496935 - DNA, 120 bp, Artificial Sequence
  ENSG00000163466_16 (sequence is synthesized)
tccctgggcctccttctacctcccactaaatcatagacattgccagattgcagaccctgtcttcatagaagtgtgaaatgtaaaagtgtgtgaaagtagtgtctcaaccaggtgcagtgg

SEQ ID NO: 496936 - DNA, 120 bp, Artificial Sequence
  ENSG00000163466_17 (sequence is synthesized)
atcccagcactttggggaggccaaggtgagtgaattgcttgagctcagaagttcaggaccagcctgggcagcataatgagatacctgtctctataaaaaatacagaaattagccaggcat

SEQ ID NO: 496937 - DNA, 90 bp, Artificial Sequence
  ENSG00000163466_18 (sequence is synthesized)
cagcataatgagatacctgtctctatacagccacctgtaataccaggtactcaggtggctgaagcacgagaatcgcttgaacccaggagg

SEQ ID NO: 496938 - DNA, 120 bp, Artificial Sequence
  ENSG00000163466_19 (sequence is synthesized)
gcctaggcgacagagcaagattcagtctcgagaaaaaaaaaaaaaagaccgtagagtctctcctcctcttttttaatgggtttatctaggcacgtttggaaaactcagcaagttatacta

SEQ ID NO: 496939 - DNA, 120 bp, Artificial Sequence
  ENSG00000163466_20 (sequence is synthesized)
gatttttacttctcttcatcctcagtatattctgttcatcatgttagaagccttacttaaagacagactttaccttagctatagttttatttgctcttatttggcttcctaaaactagca

SEQ ID NO: 496940 - DNA, 120 bp, Artificial Sequence
  ENSG00000163466_21 (sequence is synthesized)
aacctcagctctaaatcttttcttttttaatctaaccttgtaatctgtgtgcttatttggttttcaagtacccaaaatagaatgatgattgatattatttaatactggagtgcctctcca

SEQ ID NO: 496941 - DNA, 83 bp, Artificial Sequence
  ENSG00000163466_22 (sequence is synthesized)
gcattatctagagcaaagatttagcccatcctcccgaagagcccatgctcaacaaaaaacacagacctcaatcggaggccagg

SEQ ID NO: 496942 - DNA, 120 bp, Artificial Sequence
  ENSG00000163466_23 (sequence is synthesized)
aaggatgacgacgatgtggtcattggaaaggtgttcatgcaggtatggagcagacatcttgggggaaacccatgcatggcgacttatacctttgcacccaaacataccatgagcgtagga

SEQ ID NO: 496943 - DNA, 120 bp, Artificial Sequence
  ENSG00000163466_24 (sequence is synthesized)
ttcaagaaaccatggtctttcttcatcaagccactgtcccccatccctccctatagcagagatgaatatttgtttccagaattgctcaccttcctgcttccctgcagggcctgggtcaat

SEQ ID NO: 496944 - DNA, 120 bp, Artificial Sequence
  ENSG00000163466_25 (sequence is synthesized)
cccagggtgtatgttcccaaccgcccttgatgacctctctgatgaaagacagcaaagctgtctttctagaccatgactgtgctttagtacctgttatgtttgttcccaggcctatattca

SEQ ID NO: 496945 - DNA, 90 bp, Artificial Sequence
  ENSG00000163466_26 (sequence is synthesized)
aaattctacaaggaacttcaggcacatggtgctgatgagttattaaagagggtgtacgggagtttcttggtaaatccagaatcatgcagt

SEQ ID NO: 496946 - DNA, 120 bp, Artificial Sequence
  ENSG00000163466_27 (sequence is synthesized)
gctcaagcaatcctcccgctttagcctctccggtagctgggaactacaggcacatgccaccatacccaattaatttttttaatattttgtagaaacagagtctcactgtctgctgcccat

SEQ ID NO: 496947 - DNA, 120 bp, Artificial Sequence
  ENSG00000163466_28 (sequence is synthesized)
ctcaacattcatggccagaggaattgaaaggcaccgtgtcatccttgaatagaacagctatgttatactgctttaaaaaggaggtttaaagtggaaaaactgaacagcctttttaccctg

SEQ ID NO: 496948 - DNA, 120 bp, Artificial Sequence
  ENSG00000163466_29 (sequence is synthesized)
aatgtttttctcataaaatgtcttaagccaggaagtagatgatagggcagaaatcagccactcctcctactctccagatactgagagctgacagatggtggaaagagaatccagtgcttt

SEQ ID NO: 496949 - DNA, 120 bp, Artificial Sequence
  ENSG00000163466_30 (sequence is synthesized)
cctttaaggcaccactgttctgagtcatgtttaagagtatagcctggataatcagcaggcagggtgaccataggtccatgttatatttacaagtcaataaaatctacttctgataatttc

SEQ ID NO: 496950 - DNA, 120 bp, Artificial Sequence
  ENSG00000163466_31 (sequence is synthesized)
ggaagtggccggctagagccgggggctgggcggggaccgggcttgtcggtgaagcggcagtggcggcggcggcggcggctcggcaggcgggttcaggcttcgggggccagccccactcag

SEQ ID NO: 496951 - DNA, 120 bp, Artificial Sequence
  ENSG00000163466_32 (sequence is synthesized)
ccacatgactacttgctcacctaactaggggctcttgacttgattcctataatgaattgtgtttcctagaaaaggttttgactcttgcttgcttgctttaaaacaatggaaacaaaaata

SEQ ID NO: 496952 - DNA, 120 bp, Artificial Sequence
  ENSG00000163466_33 (sequence is synthesized)
gctttagttctccaaaaacatagcaaagaatacttttccttgatcagtacaaaaatagctgttgcaagaattaggttctgttctatttttgtaatattatcaaggcagatagataacttc

SEQ ID NO: 496953 - DNA, 120 bp, Artificial Sequence
  ENSG00000163466_34 (sequence is synthesized)
tagcttgtttaaattttatagtctcaggttctcattctggaggcttaggcacaaatagctgtcttttgaaatttttaattaaagctctttaaagctaccgtctttaaatatctcttcttt

SEQ ID NO: 496954 - DNA, 120 bp, Artificial Sequence
  ENSG00000163466_35 (sequence is synthesized)
taatcccagtactttgggaggccaaggtagaaggatcacttgagcctagaagttcaaggctgcagtgagctattgtatcaatgcactgtagcctggactacagagtaagaccctgcttcc

SEQ ID NO: 496955 - DNA, 120 bp, Artificial Sequence
  ENSG00000163466_36 (sequence is synthesized)
gtgagctattgtatcaatgcactgtagcctggactacagagtaagaccctgcttccaaaacaataataataatcgtaaattttggctgggtgtggaaaaattagccaggcatggtggtgc

SEQ ID NO: 496956 - DNA, 120 bp, Artificial Sequence
  ENSG00000163466_37 (sequence is synthesized)
aaaaatcataatttttaacatgagttttcgaaaggacattcaaaccatagcagaaggtataaaaggggttcttggttttttgggttttttttgttgttgttttcatttaattcaaaaacc

SEQ ID NO: 496957 - DNA, 120 bp, Artificial Sequence
  ENSG00000163466_38 (sequence is synthesized)
tggaaagtagccagcagtaggttctggtttggggggaaagacatggagagtatacaaccttctggacaccagtattaatagctagctaagatttcattattgactgtcctttgccttaag

SEQ ID NO: 496958 - DNA, 120 bp, Artificial Sequence
  ENSG00000163466_39 (sequence is synthesized)
agctggctatgcactgagtaattttaaagcatacaagatcagcagacaaacagatcagttcccgagagtcctggttttttctctttattcacctgggttagtggctcagtctgtacttag

SEQ ID NO: 496959 - DNA, 120 bp, Artificial Sequence
  ENSG00000163466_40 (sequence is synthesized)
gttgataactaacaatctgttctctcacttggaatttggcatccttttgctctcttgaaaacaaaacatgattaagtacaatgtaggatctggaggagaacagagaacatattaagggtg

SEQ ID NO: 496960 - DNA, 83 bp, Artificial Sequence
  ENSG00000163466_41 (sequence is synthesized)
atgtaggatctggaggagaacagagaacatattaagggtgtagtcaagtcctaaaaaaggatgagctttgattaaagattctc

SEQ ID NO: 496961 - DNA, 120 bp, Artificial Sequence
  ENSG00000163466_42 (sequence is synthesized)
gcataaaaagatactcatctcagttttgtgacttgtttggtgactaaatccacttcccctctgtctctactttcccatccaccaaatgaaagttaggaagaatgccaacttaggaagagc

SEQ ID NO: 496962 - DNA, 120 bp, Artificial Sequence
  ENSG00000163466_43 (sequence is synthesized)
gtttcttggtaaatccagaatcaggtatgtagtcatgtgagcaactatggaatgacatgggaagagaggtgtcctttttatattatgctttttttacccaaaggatttcgtttaaatatt

SEQ ID NO: 496963 - DNA, 120 bp, Artificial Sequence
  ENSG00000163466_44 (sequence is synthesized)
ccaatatggaacacagtagaggtacaaaattgatgtgtgacatttttaacatttacttgatggggccacatgactcttacttaatctttcagccagagggccacatttgtttgttcatgg

SEQ ID NO: 496964 - DNA, 120 bp, Artificial Sequence
  ENSG00000163466_45 (sequence is synthesized)
tgattaaaatggctttgaaaagaatgagcaaacattgattcccaccctcggcccttagtaattctgcatactacatatttggagaaagaagaggaatattcaccacactattcttgtgat

SEQ ID NO: 496965 - DNA, 120 bp, Artificial Sequence
  ENSG00000163467_0 (sequence is synthesized)
tgaggctgtgagcagtaccggagggcaccacacctgttggtgttcagatggagcggcacactagtcatcctaacagaaaagttccagccaaagaggaagctaatgctgtgcctctctgta

SEQ ID NO: 496966 - DNA, 120 bp, Artificial Sequence
  ENSG00000163467_1 (sequence is synthesized)
agctgccctcggttgatcacaagcccaaggaatgcctaggactcctggaatgtatgtatgcaaacctccagcttcagacccagctcgcccaacaacagatggctgttttggaacatttac

SEQ ID NO: 496967 - DNA, 120 bp, Artificial Sequence
  ENSG00000163467_2 (sequence is synthesized)
aggcatctgtgacacaactggctcctgggaggggaagcaataactcttctctcccagccttatctcctaatccattgttaaatcacctgccccaattcagtaaatgaattgtggaacaaa

SEQ ID NO: 496968 - DNA, 120 bp, Artificial Sequence
  ENSG00000163467_3 (sequence is synthesized)
ggcgcaggcgccaaggctctggcagttggccagcacaccactacgcatgtgtgtcaactctagggttgggtgctggggttgcggctttcggttaacaccgcaggcaccacacctgttggt

SEQ ID NO: 496969 - DNA, 120 bp, Artificial Sequence
  ENSG00000163467_4 (sequence is synthesized)
ggcagttggccagcacaccactacgcatgtgtgtcaactctagggttgggtgctggggttgcggctttcggttaacaccgcagattggaacaggctgagatctgctggagacaacttagg

SEQ ID NO: 496970 - DNA, 84 bp, Artificial Sequence
  ENSG00000163467_5 (sequence is synthesized)
acagagatcgcgccactgcaactataaaaagaaaaaaaataagggatcttccaaaaggaaaaggtgaccagtcgagaaatctgg

SEQ ID NO: 496971 - DNA, 120 bp, Artificial Sequence
  ENSG00000163467_6 (sequence is synthesized)
gatcttccaaaaggaaaaggtgaccagtcgagaaatctgggaaaacccaactggttagtgggaaagagtacaacgccggggacacggagggaacgattacatctaagatcagtgagattg

SEQ ID NO: 496972 - DNA, 120 bp, Artificial Sequence
  ENSG00000163467_7 (sequence is synthesized)
tgcgactcggctcctatcggaccgtgaaggctaagaaaggcttcacagttcccactcttttggtctagccttagcaacaggtggactagagaggcgggactccagccagcacatggggga

SEQ ID NO: 496973 - DNA, 120 bp, Artificial Sequence
  ENSG00000163467_8 (sequence is synthesized)
aagacctgccggcttggcgcagggtgaagtgggagttgtagtcttaccgggccggactgcgcagcctttttccgggcacactgggagttgtggtttatcgcctctggactaatggctatt

SEQ ID NO: 496974 - DNA, 120 bp, Artificial Sequence
  ENSG00000163468_0 (sequence is synthesized)
gtaagccctgaggaggcagcgttttctgggcttctgtctggttctctctctccagaaggttctgccggttcccccagctctgggtacccggctctgcatcgcgtcgccatgatgggccat

SEQ ID NO: 496975 - DNA, 120 bp, Artificial Sequence
  ENSG00000163468_1 (sequence is synthesized)
cgtccagtgctcgtgctcagccagaacacaaagcgtgaatccggaagaaaagttcaatctggaaacatcaatgctgccaagactattgcagatatcatccgaacatgtttgggacccaag

SEQ ID NO: 496976 - DNA, 120 bp, Artificial Sequence
  ENSG00000163468_2 (sequence is synthesized)
tccatgatgaagatgcttttggacccaatgggaggcattgtgatgaccaatgatggcaatgccattcttcgagagattcaagtccagcatccagcggccaagtccatgatcgaaattagc

SEQ ID NO: 496977 - DNA, 120 bp, Artificial Sequence
  ENSG00000163468_3 (sequence is synthesized)
cggacccaggatgaagaggttggagatgggaccacatcagtaattattcttgcaggggaaatgctgtctgtagctgagcacttcctggagcagcagatgcacccaacagtggtgatcagt

SEQ ID NO: 496978 - DNA, 120 bp, Artificial Sequence
  ENSG00000163468_4 (sequence is synthesized)
gcttaccgcaaggcattggatgatatgatcagcaccctaaagaaaataagtatcccagtcgacatcagtgacagtgatatgatgctgaacatcatcaacagctctattactaccaaagcc

SEQ ID NO: 496979 - DNA, 120 bp, Artificial Sequence
  ENSG00000163468_5 (sequence is synthesized)
atcagtcggtggtcatctttggcttgcaacattgccctggatgctgtcaagatggtacagtttgaggagaatggtcggaaagagattgacataaaaaaatatgcaagagtggaaaagata

SEQ ID NO: 496980 - DNA, 120 bp, Artificial Sequence
  ENSG00000163468_6 (sequence is synthesized)
cctggaggcatcattgaagactcctgtgtcttgcgtggagtcatgattaacaaggatgtgacccatccacgtatgcggcgctatatcaagaaccctcgcattgtgctgctggattcttct

SEQ ID NO: 496981 - DNA, 120 bp, Artificial Sequence
  ENSG00000163468_7 (sequence is synthesized)
ctggaatacaagaaaggagaaagccagactgacattgagattacacgagaggaggacttcacccgaattctccagatggaggaagagtacatccagcagctctgtgaggacattatccaa

SEQ ID NO: 496982 - DNA, 120 bp, Artificial Sequence
  ENSG00000163468_8 (sequence is synthesized)
cttatgcgggccaatatcacagccatccgcagagtccggaagacagacaataatcgcattgctagagcctgtggggcccggatagtcagccgaccagaggaactgagagaagatgatgtt

SEQ ID NO: 496983 - DNA, 120 bp, Artificial Sequence
  ENSG00000163468_9 (sequence is synthesized)
ggaacaggagcaggcctgttggaaatcaagaaaattggagatgaatactttactttcatcactgactgcaaagaccccaaggcctgcaccattctcctccggggggctagcaaagagatt

SEQ ID NO: 496984 - DNA, 120 bp, Artificial Sequence
  ENSG00000163468_10 (sequence is synthesized)
ctctcggaagtagaacgcaacctccaggatgccatgcaagtgtgtcgcaatgttctcctggaccctcagctggtgccagggggtggggcctccgagatggctgtggcccatgccttgaca

SEQ ID NO: 496985 - DNA, 120 bp, Artificial Sequence
  ENSG00000163468_11 (sequence is synthesized)
gaaaaatccaaggccatgactggtgtggaacaatggccatacagggctgttgcccaggccctagaggtcattcctcgtaccctgatccagaactgtggggccagcaccatccgtctactt

SEQ ID NO: 496986 - DNA, 120 bp, Artificial Sequence
  ENSG00000163468_12 (sequence is synthesized)
acctcccttcgggccaagcacacccaggagaactgtgagacctggggtgtaaatggtgagacgggtactttggtggacatgaaggaactgggcatatgggagccattggctgtgaagctg

SEQ ID NO: 496987 - DNA, 120 bp, Artificial Sequence
  ENSG00000163468_13 (sequence is synthesized)
cagacttataagacagcagtggagacggcagttctgctactgcgaattgatgacatcgtttcaggccacaaaaagaaaggcgatgaccagagccggcaaggcggggctcctgatgctggc

SEQ ID NO: 496988 - DNA, 120 bp, Artificial Sequence
  ENSG00000163468_14 (sequence is synthesized)
caggagtgagtgctaggcaaggctacttcaatgcacagaaccagcagagtctccccttttcctgagccagagtgccaggaacactgtggacgtctttgttcagaagggatcaggttgggg

SEQ ID NO: 496989 - DNA, 120 bp, Artificial Sequence
  ENSG00000163468_15 (sequence is synthesized)
ggcagcccccagtccctttctgtcccagctcagttttccaaaagacactgacatgtaattcttctctattgtaaggtttccatttagtttgcttccgatgattaaatctaagtcatttga

SEQ ID NO: 496990 - DNA, 120 bp, Artificial Sequence
  ENSG00000163468_16 (sequence is synthesized)
ggtgatctggaaggacaatctatgaattggacaagtgaagaaggaagaggagacattataagaagtgggaccaacatagaccgagcctggcagtactattgcagatatcatccgaacatg

SEQ ID NO: 496991 - DNA, 120 bp, Artificial Sequence
  ENSG00000163468_17 (sequence is synthesized)
gagaaggtaatgaatgtatgaaggtgatctggaaggacaatctatgaattggacaagtgaagaaggaagaggagacattataagaagtgggaccaacatagaccgagcctggcagtgcca

SEQ ID NO: 496992 - DNA, 120 bp, Artificial Sequence
  ENSG00000163468_18 (sequence is synthesized)
gtctggttctctctctccagaaggttctgccggttcccccagctctgggtacccggctctgcatcgcgtcgccatgatgggccatcgtccagtgctcgtgctcattaggtctagctttat

SEQ ID NO: 496993 - DNA, 120 bp, Artificial Sequence
  ENSG00000163468_19 (sequence is synthesized)
ctctctccagaaggttctgccggttcccccagctctgggtacccggctctgcatcgcgtcgccatgatgggccatcgtccagtgctcgtgctcaagacggagtttcaccatgttgaccag

SEQ ID NO: 496994 - DNA, 68 bp, Artificial Sequence
  ENSG00000163468_20 (sequence is synthesized)
ccttatttttttctgatgagcaccacctccattgtcttcctttggccagaacacaaagcgtgaatccg

SEQ ID NO: 496995 - DNA, 120 bp, Artificial Sequence
  ENSG00000163468_21 (sequence is synthesized)
ctttgctctgtggatataccatgaaacctgcattcttatttttcaaagacggggaaataaatagcttgtgtacgatggggcagtcctgggctgttgacttgtgtttttgtctattttagg

SEQ ID NO: 496996 - DNA, 120 bp, Artificial Sequence
  ENSG00000163468_22 (sequence is synthesized)
tgcctcccagcaggggaaatgctgtctgtagctgagcacttcctggagcagcagatgcacccaacagtggtgatcagtgcttaccgcaaggcattggatgatatgatcagcaccctaaag

SEQ ID NO: 496997 - DNA, 120 bp, Artificial Sequence
  ENSG00000163468_23 (sequence is synthesized)
gtcaccacaaacactgaattggcaaataataaatcattgcttctataggaaatacagggttagatacctataagcctctggtcacactttcatcaactgataaatatataccttattgta

SEQ ID NO: 496998 - DNA, 120 bp, Artificial Sequence
  ENSG00000163468_24 (sequence is synthesized)
tgtgtttgtcttcaagacacccatttaatatatatagttgatttattagcattgaactcatagcccatagcaatataactcatgcctggacaaagctcacctaacgtattttctctgtaa

SEQ ID NO: 496999 - DNA, 120 bp, Artificial Sequence
  ENSG00000163468_25 (sequence is synthesized)
ggcacatcacagccttcttgcacatagaagcattagctagcacttaagcactacacttgtgagccattataaataccgaaatcatcaagaaaaatgtgaaaaacataaccttaaatatac

SEQ ID NO: 497000 - DNA, 120 bp, Artificial Sequence
  ENSG00000163468_26 (sequence is synthesized)
cccggctctgcatcgcgtcgccatgatgggccatcgtccagtgctcgtgctcagccagaacacaaagcgtgaatccggaagaaaagttcaatctggaaacatcaatgctgccaaggtcac

SEQ ID NO: 497001 - DNA, 120 bp, Artificial Sequence
  ENSG00000163468_27 (sequence is synthesized)
aaatcttttaagtgtttatggtagtttgcctccagctatctttcctggtatttggtcatagccatgtgtcctgtgcatctagactttatagagtaggcaaataggcagaggaaaagttga

SEQ ID NO: 497002 - DNA, 120 bp, Artificial Sequence
  ENSG00000163468_28 (sequence is synthesized)
cctctttcagaacattttcctgatgatgttaggggaaaggaagccctccccttctgagttaggactgataatcttctcgtattaacttgtgcattattctgttgctgtgtattgttttat

SEQ ID NO: 497003 - DNA, 120 bp, Artificial Sequence
  ENSG00000163468_29 (sequence is synthesized)
cggtaaatgtcttttgaatgaaatagtgaaatagccttatatctgatttaggatggtgtagaggccaccgtcatggaaagaaatactaagacatggacttctagtaattaggactgctgg

SEQ ID NO: 497004 - DNA, 120 bp, Artificial Sequence
  ENSG00000163468_30 (sequence is synthesized)
gaaacaagctctgggagccatttcccccttattcttgtgaaaagtcatttctgtatccattctgaaagcattcccaaggggagaaaaacaacagagctagccacatcctatatctaaagt

SEQ ID NO: 497005 - DNA, 120 bp, Artificial Sequence
  ENSG00000163468_31 (sequence is synthesized)
aagtggcatgctatgtctaaagtgatggctaaccatgctttaggggtgtcattaaaaacactgactctggctgggcggaatggctcacgcctctaatcccaacactttgggaggctgagg

SEQ ID NO: 497006 - DNA, 120 bp, Artificial Sequence
  ENSG00000163468_32 (sequence is synthesized)
gcttctgtctggttctctctctccagaaggttctgccggttcccccagctctgggtacccggctctgcatcgcgtcgccatgatgggccatcgtccagtgctcgtgctcaactattgcag

SEQ ID NO: 497007 - DNA, 120 bp, Artificial Sequence
  ENSG00000163472_0 (sequence is synthesized)
ggcagcatggcgtctttccggcttctccaaacccttgcgaaaaactttattggcaaagctatcagagaacggacagtgtacccactgaggcggccaaagcttaactggatcagggcagga

SEQ ID NO: 497008 - DNA, 120 bp, Artificial Sequence
  ENSG00000163472_1 (sequence is synthesized)
tgacatgaccttgtggtagatcccagaactgaggccccaggatgacagaacaggagaccctggccctactggaagtgaagaggtctgattccccagagaagagctcaccccaggccttgg

SEQ ID NO: 497009 - DNA, 120 bp, Artificial Sequence
  ENSG00000163472_2 (sequence is synthesized)
ttcccaatggccggcagccagaaggggaaggtggggccgaatccccgggagctgagtccctcagagtggggtcttcagctggatctcccacagccatagagggggctgaggatggtctag

SEQ ID NO: 497010 - DNA, 120 bp, Artificial Sequence
  ENSG00000163472_3 (sequence is synthesized)
acagcacagtaagtgaggctgccaccttgccctgggggactggccctcagcccagtgctccgttcccggatccccctggctggcgggacattgaaccagagccccctgagtcagaaccac

SEQ ID NO: 497011 - DNA, 120 bp, Artificial Sequence
  ENSG00000163472_4 (sequence is synthesized)
ttaccaagctagaggagctgcccgaagacgatgccaacctgctgcctgagaaagcggcccgtgccttcgtgcctattgacctacagtgcattgagcggcagccccaagaagaccttatcg

SEQ ID NO: 497012 - DNA, 120 bp, Artificial Sequence
  ENSG00000163472_5 (sequence is synthesized)
tgcgctgtgaggcaggcgagggcgagtgccgaaccttcatgcccccccgggtcacccaccccgaccccactgagcgcaagtgggctgaggcagtggtgaggccgcctggctgttcctgtg

SEQ ID NO: 497013 - DNA, 120 bp, Artificial Sequence
  ENSG00000163472_6 (sequence is synthesized)
ggggctgcgggagctgtggagaccgtgagtggctaagggctgtggcctccgtgggagccgcactcattctcttcccttgcctactatacggggcatatgccttcctgccgtttgatgtcc

SEQ ID NO: 497014 - DNA, 120 bp, Artificial Sequence
  ENSG00000163472_7 (sequence is synthesized)
cacggctgcccaccatgagttcccgcctgatctacacactgcgctgcggggtctttgccaccttccccattgtgctggggatcctggtgtacgggctgagcctgttatgcttttctgccc

SEQ ID NO: 497015 - DNA, 120 bp, Artificial Sequence
  ENSG00000163472_8 (sequence is synthesized)
ttcggccctttggggagccacggcgggaggtggagatccaccggcgatatgtggcccagtcggtccagctctttattctctacttcttcaacctggccgtgctttccacttacctgcccc

SEQ ID NO: 497016 - DNA, 120 bp, Artificial Sequence
  ENSG00000163472_9 (sequence is synthesized)
tggtctctttgccgtctcccggctgatctactggctgacctttgccgtgggccgctccttccgaggcttcggctacggcctgacgtttctgccactgctgtcgatgctgatgtggaacct

SEQ ID NO: 497017 - DNA, 120 bp, Artificial Sequence
  ENSG00000163472_10 (sequence is synthesized)
ctactacatgttcgtggtggagccggagcgcatgctcactgccaccgagagccgcctggactacccggaccacgcccgctcggcctccgactacaggccccgcccctggggctgagcctc

SEQ ID NO: 497018 - DNA, 120 bp, Artificial Sequence
  ENSG00000163472_11 (sequence is synthesized)
tccgccctcgccctcggagtagggggtagcggcttgggtctgacacatctttgaaccttgtggccaggcctggacttcgcccccaggcctaggaccgcggtgggtggaaccctgctactg

SEQ ID NO: 497019 - DNA, 120 bp, Artificial Sequence
  ENSG00000163472_12 (sequence is synthesized)
ccccaacagggactccaatcaatcggagttctccccttgccggagctgcccttcacctttggggcccgagacagtcataagggatggacttagttttcttgcagggaaaaaggtggacag

SEQ ID NO: 497020 - DNA, 120 bp, Artificial Sequence
  ENSG00000163472_13 (sequence is synthesized)
ccgtgtttcttaaggatgctgagggcatggggccaggaccaggggagaggcacagctccttcctgagcagcctctcaccactgccacaaggctccctaatgctggtctctgctccactcc

SEQ ID NO: 497021 - DNA, 120 bp, Artificial Sequence
  ENSG00000163472_14 (sequence is synthesized)
ccggcttcccgtgaggcaggaggcagagccacagccaaggccctgaccacttctgtgccagttgtctaagcagagcgcctcagggacgctggaaatgccttaaggatagaggctgggcat

SEQ ID NO: 497022 - DNA, 120 bp, Artificial Sequence
  ENSG00000163472_15 (sequence is synthesized)
cacatcaaatgggactgtggtgtttggtgaaaaccttcctgaggatctggattcaggaccctccatgactggcctatttactgtttacagctggccagtgcagagctgctgctcttttac

SEQ ID NO: 497023 - DNA, 120 bp, Artificial Sequence
  ENSG00000163472_16 (sequence is synthesized)
ctttttaggcccctgtaacttcccacctttaaactgcccagaaggcatgcctctcccacaggaagaggggagcagacagggaaatctgcctaccaagaggggtgtgtgtgtctttgtgcc

SEQ ID NO: 497024 - DNA, 87 bp, Artificial Sequence
  ENSG00000163472_17 (sequence is synthesized)
gaaatctgcctaccaagaggggtgtgtgtgtctttgtgcccacacgtggtggctggggagtgcctggatggtgcggtggttgatgtt

SEQ ID NO: 497025 - DNA, 120 bp, Artificial Sequence
  ENSG00000163472_18 (sequence is synthesized)
gggagcaggaggatttcccttcacttgacctgggcccctcagggtctcccaccccctgccagtctgcatgcccatctcctcccaggaccacctccaccccactgtgtagagcccatgcac

SEQ ID NO: 497026 - DNA, 120 bp, Artificial Sequence
  ENSG00000163472_19 (sequence is synthesized)
tgcccacagtgaatctgcccccagcttactgcctcttgtgcccttcccctgccttttctgaccctaccctgtttcccaactccacccagggatcctggtgtacgggctgagcctgttatg

SEQ ID NO: 497027 - DNA, 120 bp, Artificial Sequence
  ENSG00000163472_20 (sequence is synthesized)
aatagccctgtcccctgcccgcctccaaagtcccccaacaaagtatgaaggaagccccacctgggggtctccaggaagtcgaggctggcctctgaggttccacagaaaagcaagatgggg

SEQ ID NO: 497028 - DNA, 120 bp, Artificial Sequence
  ENSG00000163472_21 (sequence is synthesized)
gagtgaaggggccggctggaacttgatgctccaacctccagagtttcgaggcacagcaagacaggttcagtaatgtccttccctccagagagcgggccttaatttatggactggtactct

SEQ ID NO: 497029 - DNA, 120 bp, Artificial Sequence
  ENSG00000163472_22 (sequence is synthesized)
gagtacttcttgtggtgcagcagcagaaccaagccgccccctagcagcatgagccctggggcacccagggccactgccatgatgcccaggactagtggggacaagccgtccactggaggg

SEQ ID NO: 497030 - DNA, 120 bp, Artificial Sequence
  ENSG00000163479_0 (sequence is synthesized)
ctttcggatgctgacgctctcttcctgtctttgtggctccggaaaggcgtttgggatgccaacgatgaggctgctgtcatttgtggtgttggctctatttgctgtcactcaagcagagga

SEQ ID NO: 497031 - DNA, 120 bp, Artificial Sequence
  ENSG00000163479_1 (sequence is synthesized)
aggagccaggcttttggcttccaaatcactgctgaacagatacgccgtggagggacgagacctgaccttgcagtacaacatctacaatgttggctcaagtgctgcattagacgtggaact

SEQ ID NO: 497032 - DNA, 120 bp, Artificial Sequence
  ENSG00000163479_2 (sequence is synthesized)
atctgatgattccttccctccagaagactttggcattgtgtctggaatgctcaatgtcaaatgggaccggattgcccctgctagcaatgtctcccacactgtggtcctgcgccctctcaa

SEQ ID NO: 497033 - DNA, 120 bp, Artificial Sequence
  ENSG00000163479_3 (sequence is synthesized)
ggctggttatttcaacttcacctcggcaacaattacttacctggcccaggaggatgggcccgttgtgattggctctaccagtgcacctggacagggaggaatcctggctcagcgggagtt

SEQ ID NO: 497034 - DNA, 120 bp, Artificial Sequence
  ENSG00000163479_4 (sequence is synthesized)
gactgggcagcctttggggtcatgacccttccctccatcggcatccccctgctattgtggtactccagcaagaggaaatatgacactcccaaaacgaagaagaactgattggggcttcca

SEQ ID NO: 497035 - DNA, 120 bp, Artificial Sequence
  ENSG00000163479_5 (sequence is synthesized)
cagccctcctctcccaagaaatccaggctcctctcccaagaaatccaggtgctttccagactccaaagggtatcttaaatgcaatctcttctctcttagcccttggccactttctcctgg

SEQ ID NO: 497036 - DNA, 120 bp, Artificial Sequence
  ENSG00000163479_6 (sequence is synthesized)
atcctgccctgctctcagccatagtgaaggaccagccctaggagtctgcgagagcctccttggttccatcgtgaagccataaacaggaatgcctttggcaatagccttgagcctagaggg

SEQ ID NO: 497037 - DNA, 120 bp, Artificial Sequence
  ENSG00000163479_7 (sequence is synthesized)
ccctctgatgccccactgaggtgctgttggtttattgctggcaacgtgaattctctcaggggtctaggaggggcattttggagactgcctgacaccacccctatcccctgcctccccctc

SEQ ID NO: 497038 - DNA, 120 bp, Artificial Sequence
  ENSG00000163479_8 (sequence is synthesized)
tcagaagagggtggaagatgaaatgaaagctatgggactcttggaggatacccagtgtctattctgggttagagaagtgcttactaaggggttttctaataaaaacaaatgccacattga

SEQ ID NO: 497039 - DNA, 120 bp, Artificial Sequence
  ENSG00000163479_9 (sequence is synthesized)
cggtaagtccggaggcttagggcgtccgaacgggagaggcgagagcctcgtgtccgcgcatcaccccgtggctgggggttagctaggggagggcgggaagggcagaggacgcggtggctg

SEQ ID NO: 497040 - DNA, 120 bp, Artificial Sequence
  ENSG00000163479_10 (sequence is synthesized)
ggcagaggacgcggtggctggaggacgtgtaaccttgcaagaggcgggaggcggggggcagaggtgattgacccccgcccccccgcccgtgggaccaagaaagggatgtgacagatgagg

SEQ ID NO: 497041 - DNA, 120 bp, Artificial Sequence
  ENSG00000163479_11 (sequence is synthesized)
tggttctacctggtagttgatgggttaatagacataaaatcaaaggctttgctgccactttggaataaagttgtttgcagtgtgctccaaactcttggcttcctctccaagacaaaggaa

SEQ ID NO: 497042 - DNA, 120 bp, Artificial Sequence
  ENSG00000163479_12 (sequence is synthesized)
tgtggaccagactcaacccctcctctaataatgtacatttggattggctctaccagtgcacctggacagggaggaatcctggctcagcgggagtttgacaggcgattctcccctcatttt

SEQ ID NO: 497043 - DNA, 120 bp, Artificial Sequence
  ENSG00000163479_13 (sequence is synthesized)
agcagcaggggtacttcaaataggctggatatgtgtggctgtcctcctgtcatctctctggataagatggagcaagagagattggctctaccagtgcacctggacagggaggaatcctgg

SEQ ID NO: 497044 - DNA, 120 bp, Artificial Sequence
  ENSG00000163479_14 (sequence is synthesized)
tatttatagatcttccctctccccacccccacctcccaatttaattataaactccctgaggccagtaactgtcttagatttctttttcccatatatgatagaaactcagtagtaaacagt

SEQ ID NO: 497045 - DNA, 120 bp, Artificial Sequence
  ENSG00000163479_15 (sequence is synthesized)
cttttgattgatgtaaaggtcaatagacatttatgaagcccctgcaatgtgccagactctggggaataccaagaggattaatatactgtccaagtcctcaaaaagcttaagtcataaatg

SEQ ID NO: 497046 - DNA, 120 bp, Artificial Sequence
  ENSG00000163479_16 (sequence is synthesized)
tataaagccaaataaatgtataaatttatgaagccaaaatgtgtgatcctccataccagtagggctgtaggctaattagtacacagtagggaagggacttaacacagtcaaccatagaat

SEQ ID NO: 497047 - DNA, 120 bp, Artificial Sequence
  ENSG00000163479_17 (sequence is synthesized)
gaaaagaactaacattcattgcaccttctgcattttcgtttttcataaactacatggaaccatattcttctaaacctagcggtgttttcacatccggtatcatttctgctttcagaacca

SEQ ID NO: 497048 - DNA, 120 bp, Artificial Sequence
  ENSG00000163479_18 (sequence is synthesized)
agtagtggatttttgctggaggattaagtaaatgattaccaagggtaagtcattccacgcacaccttgccctgtagagggaccagtggtggtgagcaacttcactctttgcagagtctga

SEQ ID NO: 497049 - DNA, 120 bp, Artificial Sequence
  ENSG00000163479_19 (sequence is synthesized)
ttgcatgcctggcctaccttgtttaatatatgttctccatggggtatttctcaggtcttctggctcctaggtactcctctttataacacactaagagagaatcatccaactctctctagc

SEQ ID NO: 497050 - DNA, 120 bp, Artificial Sequence
  ENSG00000163479_20 (sequence is synthesized)
caaaagctttccctcatcttcttgaagttcttctgagcctttgggaactaagactctaatgcatagagttgggttggttgggactgccctttctcagagtagatgaggtggaacttcatg

SEQ ID NO: 497051 - DNA, 120 bp, Artificial Sequence
  ENSG00000163479_21 (sequence is synthesized)
tggaatttggatctgccttcccttaaaatctcttgtggtgggggtaagagggggatgaagagaggttgattaatagataccaaaatacagttaggactgggcgcagtggctcacacctgt

SEQ ID NO: 497052 - DNA, 120 bp, Artificial Sequence
  ENSG00000163479_22 (sequence is synthesized)
atatagttagaaagaataagacctagtgttcgatagtttagtagggtgactatagttaacagtaatctaatgtatatttcaaaatagccagatgagaagcatttgaacatttccatcata

SEQ ID NO: 497053 - DNA, 74 bp, Artificial Sequence
  ENSG00000163479_23 (sequence is synthesized)
ttcaaataattagccaggcatggtgcacgtgcctgtgatcccaggtactcaggaggctgaggtgggaggattgc

SEQ ID NO: 497054 - DNA, 120 bp, Artificial Sequence
  ENSG00000163479_24 (sequence is synthesized)
cagagtgagaccctgtctcaaaaaaaagataaatgtttaaggtgatggatatccatctaaaaagtatagattgtaaaaacaaaaacctcttacagaaaatttacacagtagctactaaat

SEQ ID NO: 497055 - DNA, 120 bp, Artificial Sequence
  ENSG00000163479_25 (sequence is synthesized)
cagaaaatttacacagtagctactaaattctgagggagataacattaaccagacacttggtattgtcctaaggaagtatgtttcaaattaaagttctggactagagtgattgaaatggat

SEQ ID NO: 497056 - DNA, 120 bp, Artificial Sequence
  ENSG00000163479_26 (sequence is synthesized)
gggagaggtgtaccatggccttccccttctcttcattccttctgccttccttttcatctggagtgtgtcatttgctgcctactgatgtccttgtctttctgatctgtcttctctgccact

SEQ ID NO: 497057 - DNA, 120 bp, Artificial Sequence
  ENSG00000163479_27 (sequence is synthesized)
gtcagattcttcccagtctccactgttactctctccttcccttgcttagattgctcctgcttacggcatcagggctgagcttttctgcctctcactgcacccccctccagtagtctagct

SEQ ID NO: 497058 - DNA, 120 bp, Artificial Sequence
  ENSG00000163479_28 (sequence is synthesized)
attttctgcctccagccttctctcccactctgcccatacagaccctacatcctaattaggccaagctacttcccataccttctcccccaactcagtccttattctttcctttgtgccttt

SEQ ID NO: 497059 - DNA, 120 bp, Artificial Sequence
  ENSG00000163479_29 (sequence is synthesized)
gttctgtttgaagtacccttttccctccactccattatatctgaagccttctcaagacccagctttgagctatgtctccttgttttctgccttcagttcatattgctctttgctattcat

SEQ ID NO: 497060 - DNA, 70 bp, Artificial Sequence
  ENSG00000163479_30 (sequence is synthesized)
tcaagcgattctctgcctcagcctcccgagtaactaggacaacaggtgtgtgctaccgtgcccggctact

SEQ ID NO: 497061 - DNA, 77 bp, Artificial Sequence
  ENSG00000163479_31 (sequence is synthesized)
attcattctttcataaacatatattgactgcatctaaacttctgtagcacttatagtctatggcacttgaacattta

SEQ ID NO: 497062 - DNA, 120 bp, Artificial Sequence
  ENSG00000163479_32 (sequence is synthesized)
ttccttggtatgagaatgcccttttggttctggaccctcttggcttccacagatttgttttgttggttggttcttgccctgtgtgttttttggtgtctgatatagatactcatcaaatag

SEQ ID NO: 497063 - DNA, 120 bp, Artificial Sequence
  ENSG00000163479_33 (sequence is synthesized)
attgatttagccatgtccagagatttttggcaatgagatcacaattgccaaaaccataaaactgacttaagtagagtcccatctttgagtagatacccatcttaaactcctgggtctatt

SEQ ID NO: 497064 - DNA, 120 bp, Artificial Sequence
  ENSG00000163479_34 (sequence is synthesized)
ttgaggtttaaaaaaaaaaaatctgattagattcagagggtcatagatcattgggtaggttaagtgggaactttactgtggtctagtctaggaaagaattttttgaagatgagcctgaag

SEQ ID NO: 497065 - DNA, 120 bp, Artificial Sequence
  ENSG00000163479_35 (sequence is synthesized)
tactgaatgctggaattcattcagtgaataagtatgatgttccagattatgtgctcattctgtgctctgctttggggacacagtgatgaataagacacagtcccttccattaaagatctt

SEQ ID NO: 497066 - DNA, 120 bp, Artificial Sequence
  ENSG00000163479_36 (sequence is synthesized)
attaaagatcttacaggctggcgaggcaccatggctcatgcctgtaatgccagtgctttgggaggcagaggcgagaggaccacttgcggccaagagtttgaggctgcagtgagccatgat

SEQ ID NO: 497067 - DNA, 120 bp, Artificial Sequence
  ENSG00000163479_37 (sequence is synthesized)
cacaccactgcactctagcctgggtgacacagcaaaaccctgcctctgaaaataacaagatcttacgagctcatagaggactcaaaatagtaaatggggaggctgaggcaggggaattgc

SEQ ID NO: 497068 - DNA, 120 bp, Artificial Sequence
  ENSG00000163479_38 (sequence is synthesized)
agtgagccaagatcgagccactgcactctagctgcctggacaacaagagcgaaacgctgtcaaaaaaaaaaaaggtaaatggggaaaatgctgtgatagaggttatatgccaggtgctgg

SEQ ID NO: 497069 - DNA, 120 bp, Artificial Sequence
  ENSG00000163479_39 (sequence is synthesized)
gccaggtgctggaggagcctgcagcaggaacatctaatgagaggggactttctggaggaggtaaggaagggcaggcacttgaggagagagagcagccgagattgagaaaagcatggtgtg

SEQ ID NO: 497070 - DNA, 120 bp, Artificial Sequence
  ENSG00000163479_40 (sequence is synthesized)
attcaggaatggcaagtagtttatcaaggctgaagggcagaatgtgaggtggaggaatggaaaagagggggcctgaagtgtaaacaagggttagatcataggtggcttgactgtcagggg

SEQ ID NO: 497071 - DNA, 120 bp, Artificial Sequence
  ENSG00000163479_41 (sequence is synthesized)
caagaccagggcatctccattctcaaaaattgtctggaacagaagcttctcttccagtctggtttgggtcgggtgagtcctttggtttcacagcttgaaagattggtctttagagagcca

SEQ ID NO: 497072 - DNA, 120 bp, Artificial Sequence
  ENSG00000163479_42 (sequence is synthesized)
ttctatatcaggattggtcagagaggaaccttcttgcctaaagttctgcttaaaatttgtgctgagttaggcctggtggtgtgtacctataatctctgctggaggatcgcttgagcccag

SEQ ID NO: 497073 - DNA, 120 bp, Artificial Sequence
  ENSG00000163479_43 (sequence is synthesized)
gagtttgaggctgcagtggctatgattgtgccactgcactccaacctgagcaacagagtgagactctatctctaaaaaaataaaataaaaattaagaaaatttaggctgggtgttgtggc

SEQ ID NO: 497074 - DNA, 84 bp, Artificial Sequence
  ENSG00000163479_44 (sequence is synthesized)
caggagaatcacttgagcccaggaattggagaccggcttgggcaacatagtgatattttgcctctacaaaaaataaaaaaaaaa

SEQ ID NO: 497075 - DNA, 120 bp, Artificial Sequence
  ENSG00000163479_45 (sequence is synthesized)
gtttgggatgccaacgggtgaagatggtaggagagtctggagaacgggtctgctctggtggcttatggactactctgtggaaggggctgctgttctgatgaggctgctgtcatttgtggt

SEQ ID NO: 497076 - DNA, 120 bp, Artificial Sequence
  ENSG00000163479_46 (sequence is synthesized)
gcctcgtgtccgcgcatcaccccgtggctgggggttagctaggggagggcgggaagggcagaggacgcggtggctggaggacgtgtaaccttgcaagaggcgggaggcggggggcagagg

SEQ ID NO: 497077 - DNA, 120 bp, Artificial Sequence
  ENSG00000163479_47 (sequence is synthesized)
tgattgacccccgcccccccgcccgtgggaccaagaaagggatgtgacaggcgaggacgaatgggatctcaggggctggactggagagtggggtacagggatgtgaggaggaccccgcga

SEQ ID NO: 497078 - DNA, 120 bp, Artificial Sequence
  ENSG00000163479_48 (sequence is synthesized)
caggtccgagatcggccgaaatcaggcaccccaaggaagccctgctctggccacatggtgtcccctcagaagactccaccagccgatgaggctgctgtcatttgtggtgttggctctatt

SEQ ID NO: 497079 - DNA, 120 bp, Artificial Sequence
  ENSG00000163479_49 (sequence is synthesized)
aaggatgaacttggacctattgcctcctggatacttgattattttggtgcttctgagcaatagaatccagtccttgacctggattcttcagtgcaacagaaccaagttgctatattactc

SEQ ID NO: 497080 - DNA, 120 bp, Artificial Sequence
  ENSG00000163481_0 (sequence is synthesized)
atttccggttccggctgcgggccggtgaagatatggcggcgtctgcgtctgcagctgcaggggaggaggactgggtccttccctctgaagttgaagtattggagtccatctatctagatg

SEQ ID NO: 497081 - DNA, 120 bp, Artificial Sequence
  ENSG00000163481_1 (sequence is synthesized)
aactacaggtgattaaaggaaatggcagaacttcaccatgggagatctacatcactttgcatcctgccactgcagaggaccaggattcacagtatgtctgcttcactctggtgcttcagg

SEQ ID NO: 497082 - DNA, 120 bp, Artificial Sequence
  ENSG00000163481_2 (sequence is synthesized)
tcccagcagagtatccccatgaggtgccacagatctctatccgaaatccccgaggactttcagatgaacagatccacacgatcttacaggtgctgggccacgtggccaaggctgggctgg

SEQ ID NO: 497083 - DNA, 120 bp, Artificial Sequence
  ENSG00000163481_3 (sequence is synthesized)
gcactgccatgctgtatgaactcattgagaaagggaaggaaattctcacagataacaacatccctcatggccagtgtgtcatctgcctctatggtttccaggagaaggaggcctttacca

SEQ ID NO: 497084 - DNA, 120 bp, Artificial Sequence
  ENSG00000163481_4 (sequence is synthesized)
aaacaccctgttaccactacttccactgccactgccttgctcggtacatccagcacatggagcaagagctgaaggcacaaggacaggagcaggaacaggaacggcagcatgctacaacca

SEQ ID NO: 497085 - DNA, 120 bp, Artificial Sequence
  ENSG00000163481_5 (sequence is synthesized)
aacagaaggcagtcggtgtgcagtgtccagtgtgcagagagcccctcgtgtatgatcttgcctcactgaaagcagcccctgaaccccaacagcccatggagctgtaccagcccagtgcag

SEQ ID NO: 497086 - DNA, 120 bp, Artificial Sequence
  ENSG00000163481_6 (sequence is synthesized)
ccagaggcagcaggagcgggggggaatcattgaccttgaggctgagcgaaaccgatacttcatcagccttcagcagcctcctgcccctgcggaacctgagtcagctgtagatgtctccaa

SEQ ID NO: 497087 - DNA, 120 bp, Artificial Sequence
  ENSG00000163481_7 (sequence is synthesized)
aggatcccaaccacccagcacccttgcagcagaactatccacctcaccagccgtccaatccactttgccacctcctctgcctgtggcgacccagcacatatgtgagaagattccagggac

SEQ ID NO: 497088 - DNA, 120 bp, Artificial Sequence
  ENSG00000163481_8 (sequence is synthesized)
caggtcaaatcagcaaaggttgggcgaaacccagaaagctatgctagatccccccaagcccagtcgaggtccctggcgacagcccgaacggaggcacccaaagggaggggagtgccacgc

SEQ ID NO: 497089 - DNA, 120 bp, Artificial Sequence
  ENSG00000163481_9 (sequence is synthesized)
ccctaaaggtacccgtgacacccaggaactgccacctcctgaggggcccctcaaggagcccatggacctaaagccagaaccccatagccaaggagttgaaggtcctccacaagagaaggg

SEQ ID NO: 497090 - DNA, 120 bp, Artificial Sequence
  ENSG00000163481_10 (sequence is synthesized)
gcctggcagctggcaggggcccccaccccgcaggactcgggactgtgttcgctgggagcgctctaaaggccggacacccggttcttcctaccctcgcctgcctcggggccagggagcata

SEQ ID NO: 497091 - DNA, 120 bp, Artificial Sequence
  ENSG00000163481_11 (sequence is synthesized)
ccggcctggtactcggagggagtccctgggcctggaatctaaggatggttcctagcaggacttggtggggggaacagggaattggggatgggagggaggcaataaagatatttggccttc

SEQ ID NO: 497092 - DNA, 120 bp, Artificial Sequence
  ENSG00000163481_12 (sequence is synthesized)
caggtatgtattcaaccagtggtgggcaggagtccccctagtaatgaggagaggttctatgctgaatttgggtcttaagacattgtgagccttgattcagagataatatttctcttgtgt

SEQ ID NO: 497093 - DNA, 120 bp, Artificial Sequence
  ENSG00000163481_13 (sequence is synthesized)
agacaaaagctattcctttaatcctaccccaaaagaaagagtccaatgtgtacttcctttgcccacttcactgtctcagccccatcctccccagcccccaagcccctacccagtcacatc

SEQ ID NO: 497094 - DNA, 120 bp, Artificial Sequence
  ENSG00000163481_14 (sequence is synthesized)
tgcgtgtccacttgatccacctgcagaacttcaccatgggagatctacatcactttgcatcctgccactgcagaggaccaggattcacagtatgtctgcttcactctggtgcttcaggtc

SEQ ID NO: 497095 - DNA, 120 bp, Artificial Sequence
  ENSG00000163482_0 (sequence is synthesized)
agccgggcctgatggccctgaggcagttcggatgtgtcccaggaagtgcccatgtgtggtccgccgtccattccacacctctgagcgcctttgtcctctgaacttctcaccagttctagc

SEQ ID NO: 497096 - DNA, 120 bp, Artificial Sequence
  ENSG00000163482_1 (sequence is synthesized)
gagtaaaattgcgtcccagatgttgtggaactgtccctggatctatagctcttcaccgtctctactttcttccttctaagagatcctgaaacctctgtcatggaaaagtaccacgtgttg

SEQ ID NO: 497097 - DNA, 120 bp, Artificial Sequence
  ENSG00000163482_2 (sequence is synthesized)
gagatgattggagaaggctcttttgggagggtgtacaagggtcgaagaaaatacagtgctcaggtcgtggccctgaagttcatcccaaaattggggcgctcagagaaggagctgaggaat

SEQ ID NO: 497098 - DNA, 120 bp, Artificial Sequence
  ENSG00000163482_3 (sequence is synthesized)
ttgcaacgagagattgaaataatgcggggtctgcggcatcccaacattgtgcatatgcttgacagctttgaaactgataaagaggtggtggtggtgacagactatgctgagggagagctc

SEQ ID NO: 497099 - DNA, 120 bp, Artificial Sequence
  ENSG00000163482_4 (sequence is synthesized)
tttcagatcctagaagatgacggaaaacttcctgaagaccaggttcaggccattgctgcccagttggtgtcagccctgtactatctgcattcccaccgcatcctacaccgagatatgaag

SEQ ID NO: 497100 - DNA, 120 bp, Artificial Sequence
  ENSG00000163482_5 (sequence is synthesized)
cctcagaacatcctcctcgccaagggtggtggcatcaagctctgtgactttggatttgcccgggctatgagcaccaatacaatggtgctgacatccatcaaaggcacaccactctatatg

SEQ ID NO: 497101 - DNA, 120 bp, Artificial Sequence
  ENSG00000163482_6 (sequence is synthesized)
tctccagagctggtggaggagcgaccatacgaccacacagcggacctctggtctgttggctgcatactatatgaactggcagtaggcacccctcccttctatgctacaagcatctttcag

SEQ ID NO: 497102 - DNA, 120 bp, Artificial Sequence
  ENSG00000163482_7 (sequence is synthesized)
ctggtcagcctcattctcaaggaccctgtgcgctggccctcaaccatcagtccctgctttaagaacttcctgcagggactgctcaccaaagacccacggcagcgactgtcctggccagac

SEQ ID NO: 497103 - DNA, 120 bp, Artificial Sequence
  ENSG00000163482_8 (sequence is synthesized)
ctcttatatcacccctttattgctggtcatgtcaccataataactgagccagcaggcccagatttggggaccccattcaccagccgcctacccccagaacttcaggtcctaaaggacgaa

SEQ ID NO: 497104 - DNA, 120 bp, Artificial Sequence
  ENSG00000163482_9 (sequence is synthesized)
caggcccatcggttggcccccaagggtaatcagtctcgcatcttgactcaggcctataaacgcatggctgaggaggccatgcagaagaaacatcagaacacaggacctgcccttgagcaa

SEQ ID NO: 497105 - DNA, 120 bp, Artificial Sequence
  ENSG00000163482_10 (sequence is synthesized)
gaggacaagaccagcaaggtggctcctggcacagcccctctgcccagactcggggccactcctcaggaatcaagcctcctggccgggatcttagcctcagaattgaagagcagctgggct

SEQ ID NO: 497106 - DNA, 120 bp, Artificial Sequence
  ENSG00000163482_11 (sequence is synthesized)
aaatcagggactggagaggtgccctctgcacctcgggaaaaccggaccaccccagattgtgaacgagcattcccagaggagaggccagaggtgctgggccagcggagcactgatgtagtg

SEQ ID NO: 497107 - DNA, 120 bp, Artificial Sequence
  ENSG00000163482_12 (sequence is synthesized)
gacctggaaaatgaggagccagacagtgacaatgagtggcagcacctgctagagaccactgagcctgtgcctattcaactgaaggctcctctcaccttgctgtgtaatcctgacttctgc

SEQ ID NO: 497108 - DNA, 120 bp, Artificial Sequence
  ENSG00000163482_13 (sequence is synthesized)
cagcgcatccagagtcagctgcatgaagctggagggcagatcctgaaaggcatcttggagggtgcttcccacatcctgcctgcattccgggtcctgagcagtcttctctccagctgcagt

SEQ ID NO: 497109 - DNA, 120 bp, Artificial Sequence
  ENSG00000163482_14 (sequence is synthesized)
gattctgttgccttgtattccttctgccgggaggcagggcttcctgggctgctgctgagtctactcaggcacagtcaggagagcaacagcctccagcagcaatcttggtatgggaccttc

SEQ ID NO: 497110 - DNA, 120 bp, Artificial Sequence
  ENSG00000163482_15 (sequence is synthesized)
ttacaggacctgatggctgtgattcaggcctactttgcctgtaccttcaatctggagaggagccagacaagtgacagcctgcaggtgtttcaggaggctgccaacctttttctggacctg

SEQ ID NO: 497111 - DNA, 120 bp, Artificial Sequence
  ENSG00000163482_16 (sequence is synthesized)
ttggggaaactgctggcccaaccagatgactctgagcagactttgcggagggacagccttatgtgctttactgtcctgtgcgaagccatggatgggaacagccgggccatctccaaagcc

SEQ ID NO: 497112 - DNA, 120 bp, Artificial Sequence
  ENSG00000163482_17 (sequence is synthesized)
ttttactccagcttgctgacgacacagcaggttgtcttggatgggctccttcatggcttgacagttccacagctccctgtccacactccccaaggagccccgcaagtgagccagccactg

SEQ ID NO: 497113 - DNA, 120 bp, Artificial Sequence
  ENSG00000163482_18 (sequence is synthesized)
cgagagcagagtgaggatatacctggagccatttcctctgccctggcagccatatgcactgctcctgtgggactgcccgactgctgggatgccaaggagcaggtctgttggcatttggca

SEQ ID NO: 497114 - DNA, 120 bp, Artificial Sequence
  ENSG00000163482_19 (sequence is synthesized)
aatcagctaactgaagacagcagccagctcaggccatccctcatctctggcctgcagcatcccatcctgtgcctgcaccttctcaaggttctatactcctgctgccttgtcagtgagggc

SEQ ID NO: 497115 - DNA, 120 bp, Artificial Sequence
  ENSG00000163482_20 (sequence is synthesized)
tagtagattgggaagagtctactgaagtgacactctacttcctctcccttcttgtctttcggctccaaaacctgccttgtggaatggagaagctaggcagtgacgttgctactctcttta

SEQ ID NO: 497116 - DNA, 120 bp, Artificial Sequence
  ENSG00000163482_21 (sequence is synthesized)
cccattcgcatgtcgtctctcttgtgagtgcagcagcctgtctattgggacagcttggtcagcaaggggtgacctttgacctccagcccatggaatggatggctgcagccacacatgcct

SEQ ID NO: 497117 - DNA, 120 bp, Artificial Sequence
  ENSG00000163482_22 (sequence is synthesized)
tgtctgcccctgcagaggttcggttgactccaccaggtagttgtggattctatgatggcctccttatccttctgttgcagctcctcactgagcaggggaaggctagcctaatcagggata

SEQ ID NO: 497118 - DNA, 120 bp, Artificial Sequence
  ENSG00000163482_23 (sequence is synthesized)
tgtccagttcagaaatgtggaccgttttgtggcaccgcttctccatggtcctgaggctccccgaggaggcatctgcacaggaaggggagctttcgctatccagtccaccaagccctgagc

SEQ ID NO: 497119 - DNA, 120 bp, Artificial Sequence
  ENSG00000163482_24 (sequence is synthesized)
cagactggacactgatttctccccagggcatggcagccctgctgagcctggccatggccacctttacccaggagccccagttatgcctgagctgcctgtcccagcatggaagtatcctca

SEQ ID NO: 497120 - DNA, 120 bp, Artificial Sequence
  ENSG00000163482_25 (sequence is synthesized)
tgtccatcctgaagcatctgctttgccccagcttcctgaatcaactgcgccaggcgcctcatgggtctgagtttctccctgtcgtggtgctctctgtctgccagctcctttgcttcccct

SEQ ID NO: 497121 - DNA, 120 bp, Artificial Sequence
  ENSG00000163482_26 (sequence is synthesized)
ttgcgctggacatggatgctgacctccttataggtgtcttggccgacctcagggactcagaagttgcagcccatctgctgcaggtctgctgctaccatcttccgttgatgcaagtggagc

SEQ ID NO: 497122 - DNA, 120 bp, Artificial Sequence
  ENSG00000163482_27 (sequence is synthesized)
tgcccatcagccttctcacacgcctggccctcatggatcccacctctctcaaccagtttgtgaacacagtgtctgcctcccctagaaccatcgtctcgtttctctcagttgccctcctga

SEQ ID NO: 497123 - DNA, 120 bp, Artificial Sequence
  ENSG00000163482_28 (sequence is synthesized)
gtgaccagccactgttgacctccgaccttctctctctgctggcccatactgccagggtcctgtctcccagccacttgtcctttatccaagagcttctggctggctctgatgaatcctatc

SEQ ID NO: 497124 - DNA, 120 bp, Artificial Sequence
  ENSG00000163482_29 (sequence is synthesized)
ggcccctgcgcagcctcctgggccacccagagaattctgtgcgggcacacacttataggctcctgggacacttgctccaacacagcatggccctgcgtggggcactgcagagccagtctg

SEQ ID NO: 497125 - DNA, 120 bp, Artificial Sequence
  ENSG00000163482_30 (sequence is synthesized)
gactgctcagccttctgctgcttgggcttggagacaaggatcctgttgtgcggtgcagtgccagctttgctgtgggcaatgcagcctaccaggctggtcctctgggacctgccctggcag

SEQ ID NO: 497126 - DNA, 120 bp, Artificial Sequence
  ENSG00000163482_31 (sequence is synthesized)
ctgcagtgcccagtatgacccagctgcttggagatcctcaggctggtatccggcgcaatgttgcatcagctctgggcaacttgggacctgaaggtttgggagaggagctgttacagtgcg

SEQ ID NO: 497127 - DNA, 120 bp, Artificial Sequence
  ENSG00000163482_32 (sequence is synthesized)
aagtaccccagcggctcctagaaatggcatgtggagacccccagccaaatgtgaaggaggctgccctcattgccctccggagcctgcaacaggagcctggcatccatcaggtactggtgt

SEQ ID NO: 497128 - DNA, 120 bp, Artificial Sequence
  ENSG00000163482_33 (sequence is synthesized)
ccctgggtgccagtgagaaactatccttgctctctctggggaatcagtcactgccacacagcagtcctaggcctgcctctgccaaacactgcaggaaactcattcacctcctgaggccag

SEQ ID NO: 497129 - DNA, 120 bp, Artificial Sequence
  ENSG00000163482_34 (sequence is synthesized)
cccatagcatgtgattccagattcctgcggtccagcctccaactttggttgccagctctttcttattctactacacaagccgccaactcaactgagagctaaagagactagaaaagagat

SEQ ID NO: 497130 - DNA, 120 bp, Artificial Sequence
  ENSG00000163482_35 (sequence is synthesized)
aagctgccaactcaactgagaacaagaaactagaagagatttatatataaagcttcttccttctcccagatgcaggatgttttcaaccagtaaattttattgctgttggtgccagagaag

SEQ ID NO: 497131 - DNA, 120 bp, Artificial Sequence
  ENSG00000163482_36 (sequence is synthesized)
agtcctttcttctctacatccaggggccttttctccaataatgtgcctttaactctagggacctgcctcacggaccttagggaaaaacctcaacctgaaagatctcttcctttctggagc

SEQ ID NO: 497132 - DNA, 120 bp, Artificial Sequence
  ENSG00000163482_37 (sequence is synthesized)
tcctttaatcttcccagcaggtttttgccttagacgtgctggccccaggacagtgatgaagacagagcctgtctcagctctaggctgtggggatcaatgccatcagtccctgttattgag

SEQ ID NO: 497133 - DNA, 120 bp, Artificial Sequence
  ENSG00000163482_38 (sequence is synthesized)
ggattatcccttagccaacattcctatctgtgggtgggcgtggagagtgtatctttttttggggtgtgtgtgtatatgtgtgtgtgtatgtgtgtgtgtgtttaatagttctgtttgtaa

SEQ ID NO: 497134 - DNA, 120 bp, Artificial Sequence
  ENSG00000163482_39 (sequence is synthesized)
actcttttaataaaagttgtgcctcaccatacttgaagctcccaggacaagggttgagaggctcaacccctctttcagcttctatgtggtgttggaggtgctggtatcgtgttcacacaa

SEQ ID NO: 497135 - DNA, 120 bp, Artificial Sequence
  ENSG00000163482_40 (sequence is synthesized)
taaggtactgactccctcatacttcttatggagtataagctttgaagttggattatttgggtgcaaattccatctccaccgctttctagccctagaattatggacaaattacttaacttc

SEQ ID NO: 497136 - DNA, 120 bp, Artificial Sequence
  ENSG00000163482_41 (sequence is synthesized)
cctatgtctcaatttccttatctctagaatggggataagaacagcaactgattgatggagtttgaggattaaatatgttttcacattaaatcacttagtacagtgcctggctgttagtaa

SEQ ID NO: 497137 - DNA, 120 bp, Artificial Sequence
  ENSG00000163482_42 (sequence is synthesized)
aataacctcatcgtattttctaatatggatggaccctggtttattattcccttagtgactgactttatgatcttttcctttttaaaattattacaaaccatgctgcagcggacgtctttc

SEQ ID NO: 497138 - DNA, 120 bp, Artificial Sequence
  ENSG00000163482_43 (sequence is synthesized)
taggtatctctttatgcacacatgccggtgttctccaagagactcttccagacccctcacagactgccagctgtaccttttttagcaggtgactgaagatatacatctgtgctaaagggg

SEQ ID NO: 497139 - DNA, 120 bp, Artificial Sequence
  ENSG00000163482_44 (sequence is synthesized)
gggaggttctcttgacttacttgttgcataggtcaggctccgctctttctattgccatcacctagatcgcacctggcatttagtaggtgctcaataaataactgtgaactgagagaatga

SEQ ID NO: 497140 - DNA, 120 bp, Artificial Sequence
  ENSG00000163482_45 (sequence is synthesized)
atggggatctgagggaaacaaacagacctcatcctgcattcttcccactcccttaggttccctactcctgctgccatgtcggtgagtactggtgctattgtctagggcaagagcctcagg

SEQ ID NO: 497141 - DNA, 120 bp, Artificial Sequence
  ENSG00000163482_46 (sequence is synthesized)
ctgtgatagccttggaacttccccgcctgccctcagtactgaccctttgaaggaaaccattcgctgcgtcccctgggatccagtgggagataaaatgaattccctgggtttcagcagaca

SEQ ID NO: 497142 - DNA, 120 bp, Artificial Sequence
  ENSG00000163482_47 (sequence is synthesized)
tacacatgagttgtgaggtcagagggttaaggtttgataagaaaatgaaataagacgacagggaaatactaggtgggaaagcggaaggaattatttctgggacttcctttacttgtaagt

SEQ ID NO: 497143 - DNA, 120 bp, Artificial Sequence
  ENSG00000163482_48 (sequence is synthesized)
catccagagtcagctgcatgaagctggagggcaggtgaagggctggagaagggagggagcagatgggaatggcacttagtctgacagagatcctgaggagaggcccctatccgttggtca

SEQ ID NO: 497144 - DNA, 120 bp, Artificial Sequence
  ENSG00000163485_0 (sequence is synthesized)
atgagtgtcagaagtgtgaagggtgcctgttctgaatcccagagcctcctctccctctgtgaggctggcaggtgaggaagggtttaacctcactggaaggaatccctggagctagcggct

SEQ ID NO: 497145 - DNA, 120 bp, Artificial Sequence
  ENSG00000163485_1 (sequence is synthesized)
gctgaaggcgtcgaggtgtgggggcacttggacagaacagtcaggcagccgggagctctgccagctttggtgaccttgggccgggctgggagcgctgcggcgggagccggaggactatga

SEQ ID NO: 497146 - DNA, 120 bp, Artificial Sequence
  ENSG00000163485_2 (sequence is synthesized)
gctgccgcgcgttgtccagagcccagcccagccctaccgcgcgcggcccggagctctgttccctggaactttgggcactgcctctgggacccctgccggccagcaggcaggatggtgctt

SEQ ID NO: 497147 - DNA, 120 bp, Artificial Sequence
  ENSG00000163485_3 (sequence is synthesized)
gcctcgtgccccttggtgcccgtctgctgatgtgcccagcctgtgcccgccatgccgccctccatctcagctttccaggccgcctacatcggcatcgaggtgctcatcgccctggtctct

SEQ ID NO: 497148 - DNA, 120 bp, Artificial Sequence
  ENSG00000163485_4 (sequence is synthesized)
gtgcccgggaacgtgctggtgatctgggcggtgaaggtgaaccaggcgctgcgggatgccaccttctgcttcatcgtgtcgctggcggtggctgatgtggccgtgggtgccctggtcatc

SEQ ID NO: 497149 - DNA, 120 bp, Artificial Sequence
  ENSG00000163485_5 (sequence is synthesized)
cccctcgccatcctcatcaacattgggccacagacctacttccacacctgcctcatggttgcctgtccggtcctcatcctcacccagagctccatcctggccctgctggcaattgctgtg

SEQ ID NO: 497150 - DNA, 120 bp, Artificial Sequence
  ENSG00000163485_6 (sequence is synthesized)
gaccgctacctccgggtcaagatccctctccggtacaagatggtggtgaccccccggagggcggcggtggccatagccggctgctggatcctctccttcgtggtgggactgacccctatg

SEQ ID NO: 497151 - DNA, 120 bp, Artificial Sequence
  ENSG00000163485_7 (sequence is synthesized)
tttggctggaacaatctgagtgcggtggagcgggcctgggcagccaacggcagcatgggggagcccgtgatcaagtgcgagttcgagaaggtcatcagcatggagtacatggtctacttc

SEQ ID NO: 497152 - DNA, 120 bp, Artificial Sequence
  ENSG00000163485_8 (sequence is synthesized)
aacttctttgtgtgggtgctgcccccgcttctcctcatggtcctcatctacctggaggtcttctacctaatccgcaagcagctcaacaagaaggtgtcggcctcctccggcgacccgcag

SEQ ID NO: 497153 - DNA, 120 bp, Artificial Sequence
  ENSG00000163485_9 (sequence is synthesized)
aagtactatgggaaggagctgaagatcgccaagtcgctggccctcatcctcttcctctttgccctcagctggctgcctttgcacatcctcaactgcatcaccctcttctgcccgtcctgc

SEQ ID NO: 497154 - DNA, 120 bp, Artificial Sequence
  ENSG00000163485_10 (sequence is synthesized)
cacaagcccagcatccttacctacattgccatcttcctcacgcacggcaactcggccatgaaccccattgtctatgccttccgcatccagaagttccgcgtcaccttccttaagatttgg

SEQ ID NO: 497155 - DNA, 120 bp, Artificial Sequence
  ENSG00000163485_11 (sequence is synthesized)
aatgaccatttccgctgccagcctgcacctcccattgacgaggatctcccagaagagaggcctgatgactagaccccgccttccgctcccaccagcccacatccagtggggtctcagtcc

SEQ ID NO: 497156 - DNA, 120 bp, Artificial Sequence
  ENSG00000163485_12 (sequence is synthesized)
ctgtcccaggggtctccctgagcctgccccagctgggctgttggctgggggcatgggggaggctctgaagagatacccacagagtgtggtccctccactaggagttaactaccctacacc

SEQ ID NO: 497157 - DNA, 120 bp, Artificial Sequence
  ENSG00000163485_13 (sequence is synthesized)
tctgggccctgcaggaggcctgggagggcaagggtcctacggagggaccaggtgtctagaggcaacagtgttctgagcccccacctgcctgaccatcccatgagcagtccagagcttcag

SEQ ID NO: 497158 - DNA, 120 bp, Artificial Sequence
  ENSG00000163485_14 (sequence is synthesized)
ggctgggcaggtcctggggaggctgagactgcagaggagccacctgggctgggagaaggtgcttgggcttctgcggtgaggcaggggagtctgcttgtcttagatgttggtggtgcagcc

SEQ ID NO: 497159 - DNA, 120 bp, Artificial Sequence
  ENSG00000163485_15 (sequence is synthesized)
ccaggaccaagcttaaggagaggagagcatctgctctgagacggatggaaggagagaggttgaggatgcactggcctgttctgtaggagagactggccagaggcagctaaggggcaggaa

SEQ ID NO: 497160 - DNA, 120 bp, Artificial Sequence
  ENSG00000163485_16 (sequence is synthesized)
tcaaggagcctccgttcccacctctgaggactctggaccccaggccataccaggtgctagggtgcctgctctccttgccctgggccagcccaggattgtacgtgggagaggcagaaaggg

SEQ ID NO: 497161 - DNA, 120 bp, Artificial Sequence
  ENSG00000163485_17 (sequence is synthesized)
taggttcagtaatcatttctgatatttgctggagtgctggctccacgccctggggagtgagcttggtgcggtaggtgctggcctcaaacagccacgaggtggtagctctgagccctcctt

SEQ ID NO: 497162 - DNA, 120 bp, Artificial Sequence
  ENSG00000163485_18 (sequence is synthesized)
cttgccctgagctttccggggaggagccttggagtgtaattacctgtcatctgggccaccagctccactggcctgcccgttgccgggcctggactgtcctaggtgaccccatctctgctg

SEQ ID NO: 497163 - DNA, 120 bp, Artificial Sequence
  ENSG00000163485_19 (sequence is synthesized)
cttctgggcctgatggagaggagaacactagacatgccaactcgggagcattctgcctgcctgggaacggggtggacgagggagtgtctgtaaggactcagtgttgactgtaggcgcccc

SEQ ID NO: 497164 - DNA, 120 bp, Artificial Sequence
  ENSG00000163485_20 (sequence is synthesized)
tggggtgggtttagcaggctgcagcaggcagaggagagtacccccctgagagcatgtgggggaaggccttgctgtcatgtgaatccctcaatacccctagtatctggctgggttttcagg

SEQ ID NO: 497165 - DNA, 120 bp, Artificial Sequence
  ENSG00000163485_21 (sequence is synthesized)
ggctttggaagctctgttgcaggtgtccgggggtctaggactttagggatctggggaaggaccaacccatgccctgccaagcctggagcccctgtgttggggggcaaggtgggggagcct

SEQ ID NO: 497166 - DNA, 120 bp, Artificial Sequence
  ENSG00000163485_22 (sequence is synthesized)
ggagcccctgtgtgggagggcgaggcgggggagcctggagcccctgtgtgggagggcgaggcgggggatcctggagcccctgtgtcggggggcgagggaggggaggtggccgtcgagttg

SEQ ID NO: 497167 - DNA, 120 bp, Artificial Sequence
  ENSG00000163485_23 (sequence is synthesized)
accttctgaacatgagtgtcaactccaggacttgcttccaagcccttccctctgttggaaattgggtgtgccctggctcccaagggaggcccatgtgactaataaaaaactgtgaaccct

SEQ ID NO: 497168 - DNA, 120 bp, Artificial Sequence
  ENSG00000163485_24 (sequence is synthesized)
actcagctcctgcgccgggggcgacagagccgcaggcgcccgagtcgagtcccagccagctaccatccctctggagcttaccggccggccttggcttccccaggaatccctggagctagc

SEQ ID NO: 497169 - DNA, 120 bp, Artificial Sequence
  ENSG00000163485_25 (sequence is synthesized)
aacatgaggggattggactggatgccttatggcttagcgctgtgctatgaagaggaagaaggaggaaggaaaaggagcgcagagcgggttacactgccaggagatcctgggaagctaggt

SEQ ID NO: 497170 - DNA, 120 bp, Artificial Sequence
  ENSG00000163485_26 (sequence is synthesized)
cacttccctgagcctcagcatccttatctgcaaaatagaaattgctaatagactaaaaggcaattctgaaagatggatgagaaaggaatataatgactcagggtagagcctgcaaaacaa

SEQ ID NO: 497171 - DNA, 120 bp, Artificial Sequence
  ENSG00000163485_27 (sequence is synthesized)
tatgggatgagaagatgcagggactggtttcatggagagagcagggttttaggattgggggagggtgccagggctaccgactgctttgggagatcccagagggggcattctgaagtcctg

SEQ ID NO: 497172 - DNA, 120 bp, Artificial Sequence
  ENSG00000163485_28 (sequence is synthesized)
cagaagagatgctgtgccgtgaggggtgaggggtcgctggaggccagaccagggctcccaggagtcctgcattgagaagggagagagtggacacaggaaggatgcgcctctgtccagtcc

SEQ ID NO: 497173 - DNA, 120 bp, Artificial Sequence
  ENSG00000163485_29 (sequence is synthesized)
tgaggctgggcgcacacaccaggcccttcgaaaagctcacattttttccagcttttctcacccagtatcacttcctttgttaagaggagggggtgggggaggagacggaggatgaggagg

SEQ ID NO: 497174 - DNA, 120 bp, Artificial Sequence
  ENSG00000163485_30 (sequence is synthesized)
gctgcttctccagccagaccacggcaggcttcccaaaggcacgctttggctctctcattcaccaggagaataagccaatgcatggcaagcactaaatcttagatcctgaagactcagccc

SEQ ID NO: 497175 - DNA, 120 bp, Artificial Sequence
  ENSG00000163485_31 (sequence is synthesized)
tcgagcaaaagacatgcacctccccactcaccgggccctggaagaggagggtgctcctcttagaggcccctggaggccaggcgtgcctcagaggggcctttcgaggcagctgggaggcag

SEQ ID NO: 497176 - DNA, 120 bp, Artificial Sequence
  ENSG00000163485_32 (sequence is synthesized)
gctccttttgccatcccggtcttccttggagagatggagagaatcaaatctcagtgcagaaagagctgagaatgccaaggtctgggtccagttttcctgcatttactgtccaggtacaag

SEQ ID NO: 497177 - DNA, 120 bp, Artificial Sequence
  ENSG00000163485_33 (sequence is synthesized)
gtcccaaaagtggtgtcttcttgagttctgatgcagcaggaagaactgaagttagactctgggaaggactttctaatgtggaagcacaagctgtggaatgcggagctgagtgtgggggtg

SEQ ID NO: 497178 - DNA, 120 bp, Artificial Sequence
  ENSG00000163491_0 (sequence is synthesized)
ggtgcagctggccgcggtgtccctgaggttgaggggaccgggaataggctggggggaggacgggacgggctgagactggacgggacccccggtctgcagcagcaggtgacagcagcaggg

SEQ ID NO: 497179 - DNA, 120 bp, Artificial Sequence
  ENSG00000163491_1 (sequence is synthesized)
acaatgataaggagattggcctgaaggagggaccgtccctcccgcgcgtggtataaccagaagaattcacattcccagacttgtcaacttgcatcagtggagacagtggcattcatataa

SEQ ID NO: 497180 - DNA, 120 bp, Artificial Sequence
  ENSG00000163491_2 (sequence is synthesized)
tacacatgtgtatgctacacttgacacaatgtgaatactcatctttcctttaggaaaccttattgtcctgttcatgtatacttgaggaatgcgatgttaattctggggcattgatgtttt

SEQ ID NO: 497181 - DNA, 120 bp, Artificial Sequence
  ENSG00000163491_3 (sequence is synthesized)
acaatgcctgatcaagataaaaaggtgaagaccacagaaaaatcaactgataaacagcaagaaatcaccatcagggactattcagatcttaaaagacttcggtgccttttgaacgtccaa

SEQ ID NO: 497182 - DNA, 120 bp, Artificial Sequence
  ENSG00000163491_4 (sequence is synthesized)
tcaagcaaacaacagcttccagccattaacttcgatagtgcccaaaatagcatgacgaagtctgagcccgccatcagggcgggtggacacagagctcggggtcagtggcatgaatccaca

SEQ ID NO: 497183 - DNA, 120 bp, Artificial Sequence
  ENSG00000163491_5 (sequence is synthesized)
gaagctgttgaacttgaaaattttagtataaactacaagaatgagagaaatttcagcaaacatcctcagcgtaaactatttcaggagatctttaccgccttggtgaaaaatagactcata

SEQ ID NO: 497184 - DNA, 120 bp, Artificial Sequence
  ENSG00000163491_6 (sequence is synthesized)
agcagagagtgggttaatcgagccccatctattcattttctgagagtgttaatctgtctgaggctactaatgagggatccatgttatcaggaaatactccatagcttgggtgggattgaa

SEQ ID NO: 497185 - DNA, 120 bp, Artificial Sequence
  ENSG00000163491_7 (sequence is synthesized)
aacctagctcagtatatggagattgtagccaatgagtacctcggctatggagaagagcagcacactgtggacaagctggtcaacatgacatatatttttcaaaaacttgctgcagtcaaa

SEQ ID NO: 497186 - DNA, 120 bp, Artificial Sequence
  ENSG00000163491_8 (sequence is synthesized)
gatcaaagagaatgggtcaccacaagtggagcccacaagacattagtaaatttacttggtgcccgagatactaatgttctattgggttcccttctggctctggctagtttagcagaaagt

SEQ ID NO: 497187 - DNA, 120 bp, Artificial Sequence
  ENSG00000163491_9 (sequence is synthesized)
caagaatgtagggagaagataagtgaactcaacattgtagaaaatctgttgatgattttacatgaatatgacttgctttctaaaagactaacagcggagttgctgcgcctactttgtgca

SEQ ID NO: 497188 - DNA, 120 bp, Artificial Sequence
  ENSG00000163491_10 (sequence is synthesized)
gagccccaggtgaaagagcaggtgaagctctatgaggggataccggtcctcctcagtctgctccactctgaccacttgaagctcctctggagcattgtctggattctggtacaggtttgt

SEQ ID NO: 497189 - DNA, 120 bp, Artificial Sequence
  ENSG00000163491_11 (sequence is synthesized)
gaggaccctgagaccagcgtggaaattcgcatttggggaggcatcaaacagcttcttcatattttacaaggagacagaaattttgtttctgatcactcctccattggaagcctgtccagt

SEQ ID NO: 497190 - DNA, 120 bp, Artificial Sequence
  ENSG00000163491_12 (sequence is synthesized)
gcaaatgctgcaggccgaatccagcagcttcatttatcagaagacttgagccctagggaaatacaagaaaatactttctcacttcaagcagcctgctgtgctgccctcactgagctggtg

SEQ ID NO: 497191 - DNA, 120 bp, Artificial Sequence
  ENSG00000163491_13 (sequence is synthesized)
ctcaatgacaccaatgcccaccaggtggttcaggaaaatggtgtatatacaatagcaaaattaattttaccaaataagcaaaagaatgcagcaaaaagtaatctattacagtgttatgct

SEQ ID NO: 497192 - DNA, 120 bp, Artificial Sequence
  ENSG00000163491_14 (sequence is synthesized)
ttcagagccttgagatttctcttcagtatggaaagaaacagaccactctttaaaagacttttccccacagacttgtttgagatcttcattgacatagggcattatgtacgtgatatcagt

SEQ ID NO: 497193 - DNA, 120 bp, Artificial Sequence
  ENSG00000163491_15 (sequence is synthesized)
gcttatgaagaattggtatccaagctgaatttattagtggaggatgaactgaagcaaattgctgaaaatattgaaagcattaatcagaacaaagctcctttgaaatatataggcaactat

SEQ ID NO: 497194 - DNA, 120 bp, Artificial Sequence
  ENSG00000163491_16 (sequence is synthesized)
gcaattttggatcatcttggaagtggagcttttggctgtgtttacaaggttagaaagcatagtggtcaaaatcttttagcaatgaaagaggtcaatttacataacccagcatttggaaag

SEQ ID NO: 497195 - DNA, 120 bp, Artificial Sequence
  ENSG00000163491_17 (sequence is synthesized)
aataattaaagagcagctttatcatcccaacattgtacgttattacaaaacatttctggaaaatgataggttgtacatagttatggagctgatagaaggagccccgcttggagagcattt

SEQ ID NO: 497196 - DNA, 120 bp, Artificial Sequence
  ENSG00000163491_18 (sequence is synthesized)
cagttctttgaaggaaaaacatcaccattttactgaagaaagactatggaaaatatttatacagctgtgcttagctcttcgatacttacacaaggagaagaggattgtccatagagatct

SEQ ID NO: 497197 - DNA, 120 bp, Artificial Sequence
  ENSG00000163491_19 (sequence is synthesized)
gacaccaaacaacattatgttgggggataaggacaaagtaaccgttactgactttggcctggcaaagcaaaaacaagaaaacagtaaactcacctctgtggttggaacaatcctgtattc

SEQ ID NO: 497198 - DNA, 120 bp, Artificial Sequence
  ENSG00000163491_20 (sequence is synthesized)
ttgccccgaggtactgaagagtgagccgtatggggagaaggctgatgtctgggcagtaggctgcatcctttatcagatggcgactttgagtccccccttctacagcactaacatgctgtc

SEQ ID NO: 497199 - DNA, 120 bp, Artificial Sequence
  ENSG00000163491_21 (sequence is synthesized)
cttggctacaaaaatagtggaggcggtatatgaaccagtcccagaaggtatctactctgaaaaagtaacagacaccatcagcaggtgcctcactcctgatgcggaagctcgtccagatat

SEQ ID NO: 497200 - DNA, 120 bp, Artificial Sequence
  ENSG00000163491_22 (sequence is synthesized)
tgtagaagtcagttcgatgatatcagatgtcatgatgaaatatttagacaacttatctacatcccagttgtccttggaaaagaagctagaacgggaacgaagacgcacacaaaggtattt

SEQ ID NO: 497201 - DNA, 120 bp, Artificial Sequence
  ENSG00000163491_23 (sequence is synthesized)
tatggaagccaaccggaacaccgtcacatgtcaccatgagctggctgttctatctcacgagacctttgagaaggcaagtttgagtagcagcagcagtggagcagccagcctgaaaagtga

SEQ ID NO: 497202 - DNA, 120 bp, Artificial Sequence
  ENSG00000163491_24 (sequence is synthesized)
actttcagaaagcgcagacctgccccctgaaggcttccaggcctcctatggtaaagacgaagacagggcctgtgacgaaatcctgtcagatgataacttcaacctggaaaatgctgagaa

SEQ ID NO: 497203 - DNA, 120 bp, Artificial Sequence
  ENSG00000163491_25 (sequence is synthesized)
agatacatattcagaggtagatgatgaattggacatttcggataactccagcagctccagttcaagccctctgaaagaatctacattcaacattttaaagagaagttttagtgcttcagg

SEQ ID NO: 497204 - DNA, 120 bp, Artificial Sequence
  ENSG00000163491_26 (sequence is synthesized)
aggagaaagacaatcccaaacaagggacttcactggaggaacaggatcaagaccaagaccagctttgctgcctcttgacctgcttctgaaagtgccaccccacatgctcagggcccacat

SEQ ID NO: 497205 - DNA, 120 bp, Artificial Sequence
  ENSG00000163491_27 (sequence is synthesized)
taaggaaatagaggctgagttagtgacagggtggcagtcccatagccttcctgctgtgattcttcgaaatctcaaagatcatgggccacagatgggcacattcttgtggcaagcatcagc

SEQ ID NO: 497206 - DNA, 120 bp, Artificial Sequence
  ENSG00000163491_28 (sequence is synthesized)
aggaattgctgtgtcccagaggaaagtgcgtcagatcagtgatcctattcagcagatattaattcagctgcacaaaataatctatatcacacagcttcctccagctttgcaccacaattt

SEQ ID NO: 497207 - DNA, 120 bp, Artificial Sequence
  ENSG00000163491_29 (sequence is synthesized)
gaaaagaagggttatagagagattcaagaaatccctcttcagccagcagagtaacccttgtaatttgaaatctgaaattaaaaagttatctcagggatctccagaaccgattgagcccaa

SEQ ID NO: 497208 - DNA, 120 bp, Artificial Sequence
  ENSG00000163491_30 (sequence is synthesized)
ctttttcacagcagattaccatttattacatcgttcatccggtggaaacagcctgtccccaaatgaccctacaggtttaccaaccagcattgaattggaggaaggaataacatatgaaca

SEQ ID NO: 497209 - DNA, 120 bp, Artificial Sequence
  ENSG00000163491_31 (sequence is synthesized)
gatgcagactgtgattgaagaagtccttgaggaaagtggctattacaattttacatctaacaggtatcattcctatccatgggggaccaagaatcacccaaccaaaagatgaaaatgctg

SEQ ID NO: 497210 - DNA, 120 bp, Artificial Sequence
  ENSG00000163491_32 (sequence is synthesized)
cattttgagtggacttgattttctcagtgaagttcaagttctggacttcagccgctattgcaagatgcccaaggattgggtgctgctagagggtgtggaaaagaccaagatgccatgggg

SEQ ID NO: 497211 - DNA, 120 bp, Artificial Sequence
  ENSG00000163491_33 (sequence is synthesized)
cctgcaggacttctttctgggggtcctgtgctggagtatatgacagctgcggtacttgagggcttcattgccagaacacattatatacaggatgtcagagctaccagtgtgctgctggga

SEQ ID NO: 497212 - DNA, 120 bp, Artificial Sequence
  ENSG00000163491_34 (sequence is synthesized)
gaaaatgctgcaaaattcatcttttggagggtggggggaaaacccaaaaacaacaacaaaaaaactctcttacagaattttccttaacattaaaaaaaacttgtcatatttttcaaaggc

SEQ ID NO: 497213 - DNA, 120 bp, Artificial Sequence
  ENSG00000163491_35 (sequence is synthesized)
gctctggccacataaaacgtgctggctcctcctttgccttctgctatcattggaagcttcctgatgcctcccaagaagcaaatgccatcatggttcctgtacagcctgcagaaccgtgag

SEQ ID NO: 497214 - DNA, 120 bp, Artificial Sequence
  ENSG00000163491_36 (sequence is synthesized)
ccaattaaacctctcttctttctaaattacctagtctcaggtatttctttgtagtagtgcaagaacggattcatacactctttaaatgtgataaacaaaataaagtacaatccttatttc

SEQ ID NO: 497215 - DNA, 120 bp, Artificial Sequence
  ENSG00000163491_37 (sequence is synthesized)
agaaataatgtatggagggactatacaagggcatatatactagtaaaagtgttttctcaatagatcaccaaagaatttgccacacctgatatatagaaaagtttattgtgcagcacctct

SEQ ID NO: 497216 - DNA, 120 bp, Artificial Sequence
  ENSG00000163491_38 (sequence is synthesized)
atatattgggtgattcactgtatcctccatttttacatttaaagaaattcaaaatacgtgattaaatttttttttttttaatggatgggttggttctcgcttaaccacttgggtgctagt

SEQ ID NO: 497217 - DNA, 120 bp, Artificial Sequence
  ENSG00000163491_39 (sequence is synthesized)
ggtcttgaactgtgatacagtgtagacagtatttgtaaccttgcacagcctctgggggtaactgtcaaactgtcagatttaacttagactaatagaatatattgctgtacagtgtgtgta

SEQ ID NO: 497218 - DNA, 120 bp, Artificial Sequence
  ENSG00000163491_40 (sequence is synthesized)
tatgtttatatatgagggcggaaggagagaggttttgattagactaatgctttgctgctaatcaaacttatagtatttttagagcactttgaagagtttatagaatctatgaaaaagatg

SEQ ID NO: 497219 - DNA, 120 bp, Artificial Sequence
  ENSG00000163491_41 (sequence is synthesized)
caatattcctcatcctaaatccctccttattacaattacctaaattgtttatgaattgtttaggattttgaaatgaaaataagttaaatcccttttttactcattgaggcagctcagtgg

SEQ ID NO: 497220 - DNA, 120 bp, Artificial Sequence
  ENSG00000163491_42 (sequence is synthesized)
aagtgaaatcagaatgccaaactgtgtatcatcctttatgccgggagaattatgatgaaaatctgctagattctcactgggcttaaactccttctcttcaatcagcttcttaaaactctg

SEQ ID NO: 497221 - DNA, 120 bp, Artificial Sequence
  ENSG00000163491_43 (sequence is synthesized)
gtgtaatgtcaagaaatacccttattgcgaaatctgtctacacttctagctacctaaagagcaatttattctacataattagtaatctgaaagttgaaattatactttttatttactttt

SEQ ID NO: 497222 - DNA, 120 bp, Artificial Sequence
  ENSG00000163491_44 (sequence is synthesized)
aaggacaaatggatctttatatttttcacccctttcaattctttgtatcttaaaacatgacatgaatgtaattgaataaggtatccttctaattctttccatctggcctttcagagtgga

SEQ ID NO: 497223 - DNA, 120 bp, Artificial Sequence
  ENSG00000163491_45 (sequence is synthesized)
cagaccccgattcagtggtacatggggtgagacacagtcaacatttgccctaaatactgtcacttgccaaataaggtccatattgtgccatcacattacaaaatgactcttgagggaatt

SEQ ID NO: 497224 - DNA, 120 bp, Artificial Sequence
  ENSG00000163491_46 (sequence is synthesized)
tggtaaaactgaacttacccttgaacccaccattccagatttcttgaccttttcaaaaacccttattttaatgtaaaccttccatgtccgcttgcctcctctgctttcaaataaaaaagg

SEQ ID NO: 497225 - DNA, 120 bp, Artificial Sequence
  ENSG00000163491_47 (sequence is synthesized)
gtgccggcgagcagcttgagtcagggtctccggggagacgtcctcaggtccctgtggagcggccccgaagcctcgggagccagcttcactagacaagaggcagaggtagagaatgcggct

SEQ ID NO: 497226 - DNA, 120 bp, Artificial Sequence
  ENSG00000163491_48 (sequence is synthesized)
aggaaacaaggatactttaaatatttattaatgttcgcacacacagctcaggtgttgagcatccaggccaattgttatattcagtggcaacatacagccagaagaaagatgtttagatta

SEQ ID NO: 497227 - DNA, 120 bp, Artificial Sequence
  ENSG00000163491_49 (sequence is synthesized)
caacctttaccttgaaaagcacaatttatttaatgcaagagaggcttccataaaagcaaattttggtaaaatctatttttgcgtctttttatttctgttaaaatgtcagagactatccag

SEQ ID NO: 497228 - DNA, 120 bp, Artificial Sequence
  ENSG00000163491_50 (sequence is synthesized)
ttttttttctataaagttgggttaatcatgattgcctacctcatagaatctgaaacatccagagcatgaaaaagaaaaataacaacaaaccttatctgatgctgcgaatgtgaaaacatt

SEQ ID NO: 497229 - DNA, 120 bp, Artificial Sequence
  ENSG00000163491_51 (sequence is synthesized)
ggactgtgagtgtgaggtattccttagtcactcaatcttctcccgttggaggctcttcccagccctgctgtcctgcactccagctttgatgagtcacagacgtcctgccgtgtgggatgc

SEQ ID NO: 497230 - DNA, 120 bp, Artificial Sequence
  ENSG00000163491_52 (sequence is synthesized)
ctgtccgttttctttgtgtgactggactggctcttcatatctgcttgtggagcagcacagtgattctcagatccagggagagaagagtttatggcaagccctgggcactaggaagtctct

SEQ ID NO: 497231 - DNA, 120 bp, Artificial Sequence
  ENSG00000163491_53 (sequence is synthesized)
ttgaggatgactattttcctcagctgaggaaacgtgcaggttcctctcatttgctggccttccctctcttctttataagttgaaatcttcacagagaggatctttgaagaataggcctca

SEQ ID NO: 497232 - DNA, 120 bp, Artificial Sequence
  ENSG00000163491_54 (sequence is synthesized)
ctttgaactggtaatgatgttaaggaacttcaagtggaaagagaggtttgccttttttggtatttttatatttcattattacaataatattagaaaataaataccagtggagcttgagga

SEQ ID NO: 497233 - DNA, 120 bp, Artificial Sequence
  ENSG00000163491_55 (sequence is synthesized)
gtaattcttggggtaaaaaagtagccatgctgctcctgcatctgttgttccttttgtgctgtgttccctttgacctttctctgcctgcccatatgcactgcagatctgtgctcctggaag

SEQ ID NO: 497234 - DNA, 120 bp, Artificial Sequence
  ENSG00000163491_56 (sequence is synthesized)
cccacaaggtgagtggcccctgaaagagttaatgcttcagctccctatggcaatagttcacattagggaagttcagagcctttgcggttaagtcatgtgtaattagaatccacaaaccta

SEQ ID NO: 497235 - DNA, 120 bp, Artificial Sequence
  ENSG00000163491_57 (sequence is synthesized)
ccagcctggcctgagattgtggatctttgtcaacccttttatattctttaccagcattacaagttaatagagatataataaatacaagttttctggaactcttttcttttttttcctatg

SEQ ID NO: 497236 - DNA, 120 bp, Artificial Sequence
  ENSG00000163491_58 (sequence is synthesized)
ccatttaataccaactaggtttattacttaaatattatttgaaaagccccagctatgtataaatacaccctaggtgtgcatttataaataagtcaacagaaataaacaaaatgtacatat

SEQ ID NO: 497237 - DNA, 120 bp, Artificial Sequence
  ENSG00000163491_59 (sequence is synthesized)
gtatacatataaattccatatggcatgtggggctatattagtttgaaccatatatgattgccattgtaggtcaaaacagactatatttatagcaaaactgtttagactgtagccatgtgg

SEQ ID NO: 497238 - DNA, 120 bp, Artificial Sequence
  ENSG00000163491_60 (sequence is synthesized)
agccaagtttcagaaacctgttgagtttcatatcccgggaagccactttctagtgtatatgggagcaagattgcctaaaatgtgttaacacatgctgctcatggtctagaggatgattct

SEQ ID NO: 497239 - DNA, 120 bp, Artificial Sequence
  ENSG00000163491_61 (sequence is synthesized)
aggtgatacacaggtcaacattttttgtttcagtagccagctatttcacaggtattattgcttacaattggaaaaaatttttttgagttaacattaaagatgttagttgaatatggcaaa

SEQ ID NO: 497240 - DNA, 120 bp, Artificial Sequence
  ENSG00000163491_62 (sequence is synthesized)
aaatgtgaaaatgatatgtaatggattgaagtttgggaaacattagaagacagagaagaaagagagaagaaaaagaggaaaggatcagacaaataaagataatgataacttcattaagat

SEQ ID NO: 497241 - DNA, 120 bp, Artificial Sequence
  ENSG00000163491_63 (sequence is synthesized)
aaaatgaaatcataaaggcaaaaaatccatatactggaaacataaaaattaccttagccgttgttgcgcaggttgcagctctgacctgagacattttgggaggcacttttcaggggcact

SEQ ID NO: 497242 - DNA, 120 bp, Artificial Sequence
  ENSG00000163491_64 (sequence is synthesized)
ccgcattctgaaaatgtagagaattttccaaataagaaaatttgccttaacgagaattcagggaaagccactgacaagctacagacttccagctaagtcatgttagttaggatgatgctt

SEQ ID NO: 497243 - DNA, 120 bp, Artificial Sequence
  ENSG00000163491_65 (sequence is synthesized)
gggagcatcagtgatgcactttcaacatcaattagaaatctgggaggcaaatggaatgctcgatagtattcatatcttgtttagtttggcaaaagaatgaaagtttcaatattttgttga

SEQ ID NO: 497244 - DNA, 120 bp, Artificial Sequence
  ENSG00000163491_66 (sequence is synthesized)
aaaatcgtttcataatttggaaagtgcctagcacaatgcctggctcaaagtgagttctcaatggctgatcactaccactattgtaatttatgtcattaatcttcctggttcttcccagcg

SEQ ID NO: 497245 - DNA, 120 bp, Artificial Sequence
  ENSG00000163491_67 (sequence is synthesized)
tgggatcagaagggggagagaatacttgggcacatggaaatagaaggatgtatgagaaccaggctggtcatgtagcttgatgccttttcttcctgtcctgggcaaggaatggctacaaga

SEQ ID NO: 497246 - DNA, 120 bp, Artificial Sequence
  ENSG00000163491_68 (sequence is synthesized)
ggttactatcaagagttccaaagtaaggagagatggactcctgccatctgtaaagaactggatattttgaatgtttaataaaactctttttaagataaacttttatattgactgcaaaaa

SEQ ID NO: 497247 - DNA, 120 bp, Artificial Sequence
  ENSG00000163491_69 (sequence is synthesized)
ataaaaaggaagctgcataaggcttgatagggcataatttttttcactattctatgggtaaagccataataaaataaacaacttgattatattgacaaaaagtgtttataaagatatatt

SEQ ID NO: 497248 - DNA, 120 bp, Artificial Sequence
  ENSG00000163491_70 (sequence is synthesized)
taatgccatgaaaaaatttcagtagataacattaagaaaaaaacataagagagagcagctttaacattatatatagtttgtgcttaattgtatatgcacatacattataaactactaagc

SEQ ID NO: 497249 - DNA, 120 bp, Artificial Sequence
  ENSG00000163491_71 (sequence is synthesized)
tgaacgatgcttgggtggtaattttaatacaaagagcggagaattctgccttgtttgttcaccattattagtttggcgatttgatggtaacaaaatgccttctgtgttcactgttggttg

SEQ ID NO: 497250 - DNA, 120 bp, Artificial Sequence
  ENSG00000163491_72 (sequence is synthesized)
tctacttatcctcttaacagtaaggctgacctactcgttactttctgagagaagaataattttcttttgtttcactgtgtactgtttttataaaataaacaataaaatttgatcataaaa

SEQ ID NO: 497251 - DNA, 120 bp, Artificial Sequence
  ENSG00000163492_0 (sequence is synthesized)
aatcagtgtgagctgagctctttccctgaatgaatccaagtaaccctggccttctgaaatgaccagcagacacacaactgtccagaggctgcccaaagtataaactctggttctaaagta

SEQ ID NO: 497252 - DNA, 120 bp, Artificial Sequence
  ENSG00000163492_1 (sequence is synthesized)
ccatgtccagccaaggaagtcctagtgttgcgctttctacgacgacagtcagttcagttgctgtgcaggctggggactccaaaatcgttatagctgtcataaagtgtggcaaatgggtac

SEQ ID NO: 497253 - DNA, 120 bp, Artificial Sequence
  ENSG00000163492_2 (sequence is synthesized)
aacttcaactggctgaatcacagcccaatcttctagaaattggcagcagtcaagatgaaaccaaaaaacttcttcatgatcatgaacttcttttggccaagctcaaggctttggaagatc

SEQ ID NO: 497254 - DNA, 120 bp, Artificial Sequence
  ENSG00000163492_3 (sequence is synthesized)
gggtatgggaactcttgcaggaagcagacaagacagctgaagagaacaaggatcagagtcaggtctatgatgccatggccgagactctgggtgaagcatgggcagctctggtgtccatgc

SEQ ID NO: 497255 - DNA, 120 bp, Artificial Sequence
  ENSG00000163492_4 (sequence is synthesized)
ttgaaagaagaacagagctccttaggttgacttctgaattttttgaaaatgccttagagtttgctattaaaatagaccaagctgaagatttcctccagaatactcatgagtttgagagtg

SEQ ID NO: 497256 - DNA, 120 bp, Artificial Sequence
  ENSG00000163492_5 (sequence is synthesized)
ctgagtccttaaaatcacttcttcagcttcatgaacatcatactaaagaactcttggaacggtctttagcccttttaaacaaaagtcaacaactcactgacttcatagaaaaattcaagt

SEQ ID NO: 497257 - DNA, 120 bp, Artificial Sequence
  ENSG00000163492_6 (sequence is synthesized)
gtgaaggacctaatgtgaatcctgagttgactcagggagctcatagcagctgtctgaaggttgaccgccttcttgaacttctacaagacaggagaagacaactagacaagtacttgaagc

SEQ ID NO: 497258 - DNA, 120 bp, Artificial Sequence
  ENSG00000163492_7 (sequence is synthesized)
aacagtggcaagaattgagtcaagttctgcagatatgtcagtgggaccaacaagaaaaccaggttacttgttggtttcagaaaactataagaaatttacaggaacaaagtctaggttcat

SEQ ID NO: 497259 - DNA, 120 bp, Artificial Sequence
  ENSG00000163492_8 (sequence is synthesized)
cactttcagacaatgaggatcgaattcataagcaagaggaactgataataaaagcaaaggaatggaattctgctgttgagaagctgaagagtgaggcactgagaattctgctgtcaaagg

SEQ ID NO: 497260 - DNA, 120 bp, Artificial Sequence
  ENSG00000163492_9 (sequence is synthesized)
actacgtggagaaagaacacctccagctctctcaccagaaactcagtcagcttcaagaagaatttggtcaactcatggtggaaaggaatacctggttaaagaaggcgaatgaatttttta

SEQ ID NO: 497261 - DNA, 120 bp, Artificial Sequence
  ENSG00000163492_10 (sequence is synthesized)
acagtgctaacaaggcatttgatgtacttggaagagttgaagcttaccttaagctccttaaatcagagggtttaagtctggctgttttggcagtgaggcatgaggaattacacagaaaaa

SEQ ID NO: 497262 - DNA, 120 bp, Artificial Sequence
  ENSG00000163492_11 (sequence is synthesized)
ttaaagactgcacaactgatgctttgcaaaagggacaaaccttaatcagccaagtagactcctgcagctctcaggtgtccggcatccatgagatgatggggtgcattaagagacgagtgg

SEQ ID NO: 497263 - DNA, 120 bp, Artificial Sequence
  ENSG00000163492_12 (sequence is synthesized)
atcatctgaccgaacagtgttcagcgcacaaggaatatgctcttaagaaacaacaactaacagcctcagtggagggttacctacggaaggtggaaatgtcaattcagaaaatcagtccag

SEQ ID NO: 497264 - DNA, 120 bp, Artificial Sequence
  ENSG00000163492_13 (sequence is synthesized)
tactttctaatgcaatggatgttggttctacccgttctgaatcagagaagattttgaataaatatctggaactagatatccaagctaaggagacatcacatgaattagaagcagctgcaa

SEQ ID NO: 497265 - DNA, 120 bp, Artificial Sequence
  ENSG00000163492_14 (sequence is synthesized)
aaaccatgatggagaaaaatgaatttgtatctgatgaaatggtatcactttcctctaaagctagatggctagcagaagaattaaacctatttggccaaagcattgactatagatcgcaag

SEQ ID NO: 497266 - DNA, 120 bp, Artificial Sequence
  ENSG00000163492_15 (sequence is synthesized)
tcctgcaaacttacgtggcatttctgaagtcatcagaggaggtagagatgcagtttcagagcttaaaagaattttatgaaaccgaaatccctcagaaggagcaggatgatgctaaagcca

SEQ ID NO: 497267 - DNA, 120 bp, Artificial Sequence
  ENSG00000163492_16 (sequence is synthesized)
agcattgttctgactcggctgagaagcagtggcagctatttttaaagaagagttttataacacaagatctagggcttgagttccttaatttaataaatatggcaaaagagaacgagatat

SEQ ID NO: 497268 - DNA, 120 bp, Artificial Sequence
  ENSG00000163492_17 (sequence is synthesized)
tagatgtgaaaaatgaagtgtacctcatgaagaacaccatggaaaaccagaaagcagaacgggaagaacttagcctccttcggctggcatggcagcttaaagccacggaaagcaagcctg

SEQ ID NO: 497269 - DNA, 120 bp, Artificial Sequence
  ENSG00000163492_18 (sequence is synthesized)
gaaaacagcagtgggcggcattcaaagagcaacttaaaaagacttctcacaacttaaaacttcttcaggaagcacttatgcctgtgtctgcacttgacctcggagggagcctccagttca

SEQ ID NO: 497270 - DNA, 120 bp, Artificial Sequence
  ENSG00000163492_19 (sequence is synthesized)
ttttagatctacgacaaaaatggaatgacatgaagcctcagttccagcaattgaatgatgaggttcagtacattatgaaagaatcagaggagttaactggcagaggagcccctgtaaaag

SEQ ID NO: 497271 - DNA, 120 bp, Artificial Sequence
  ENSG00000163492_20 (sequence is synthesized)
aaaagtctcaacaactgaaggaccttattcacttccatcaaaaacagaaagagagaatccaggattacgaggatatcctgtacaaggtggtccagttccatcaagtcaaggaagagctgg

SEQ ID NO: 497272 - DNA, 120 bp, Artificial Sequence
  ENSG00000163492_21 (sequence is synthesized)
gacgtctcatcaaatcaagagagctggagtttgtagagcagccgaaggaactgggtgatgcccatgatgtgcagattcacctccggtgctctcaggaaaagcaagcccgtgtagaccatc

SEQ ID NO: 497273 - DNA, 120 bp, Artificial Sequence
  ENSG00000163492_22 (sequence is synthesized)
tccacagactggccctttccttaggagtcgacatcatctcatcagtgcagcggcctcactgctctaatgtttctgcaaagaacctacagcagcagctggagctccttgaggaggacagca

SEQ ID NO: 497274 - DNA, 120 bp, Artificial Sequence
  ENSG00000163492_23 (sequence is synthesized)
tgaagtggcgtgccaaagctgaggagtatggacggaccctgtcccgtagtgtggagtactgcgccatgagagacgagataaatgagctcaaagactcattcaaagatatcaaaaagaaat

SEQ ID NO: 497275 - DNA, 120 bp, Artificial Sequence
  ENSG00000163492_24 (sequence is synthesized)
tcaataatttgaagtttaattacactaagaaaaatgaaaaatctcggaatctgaaggcgcttaaatatcaaattcagcaagttgatatgtatgctgaaaaaatgcaggctttgaaaagga

SEQ ID NO: 497276 - DNA, 120 bp, Artificial Sequence
  ENSG00000163492_25 (sequence is synthesized)
aaatggaaaaagttagtaataaaacctctgattctttcttaaattatccaagtgataaagttaatgtccttttggaagtcatgaaggatttgcaaaaacatgtggatgactttgacaaag

SEQ ID NO: 497277 - DNA, 120 bp, Artificial Sequence
  ENSG00000163492_26 (sequence is synthesized)
ttgtgacagattacaagaagaatttggacctgactgagcatttccaggaggtgatagaagagtgtcatttttggtacgaagatgcaagtgccacagttgtaagagttggaaaatattcca

SEQ ID NO: 497278 - DNA, 120 bp, Artificial Sequence
  ENSG00000163492_27 (sequence is synthesized)
cagagtgcaagacaaaggaagctgtgaaaattctccaccagcagtttaataagtttattgcaccctcagtgccgcagcaagaagaaaggattcaggaggccactgaccttgctcagcact

SEQ ID NO: 497279 - DNA, 120 bp, Artificial Sequence
  ENSG00000163492_28 (sequence is synthesized)
tatatggtttggaagaaggacagaaatatattgagaaaatagtgacaaaacacaaagaggttcttgaatctgtgactgaattatgtgagtccctcacagagctcgaagaaaaactgaagc

SEQ ID NO: 497280 - DNA, 120 bp, Artificial Sequence
  ENSG00000163492_29 (sequence is synthesized)
agggagatgttttaaagatgaatccgaatttggaagacttccattatgattacattgacttgctaaaggaaccagcaaaaaataagcagacaatattcaatgaagaaaggaataaggggc

SEQ ID NO: 497281 - DNA, 120 bp, Artificial Sequence
  ENSG00000163492_30 (sequence is synthesized)
aggtgcaggtggcagatcttttgggcatcaatggaacaggggaagagcgactaccacaagacctgaaggtgtccactgacaaggagggtggcgtccaggacctgctcctgcctgaagaca

SEQ ID NO: 497282 - DNA, 120 bp, Artificial Sequence
  ENSG00000163492_31 (sequence is synthesized)
tgctctcaggggaagaatatgagtgtgtctcacctgatgacatctccttgcctcctctcccaggaagccctgagtcccctcttgcaccatctgacatggaggtggaagagcctgtcagct

SEQ ID NO: 497283 - DNA, 120 bp, Artificial Sequence
  ENSG00000163492_32 (sequence is synthesized)
cctccctcagccttcacataagcagctatggggtgcaggctgggaccagcagcccaggggatgcccaggaatctgttcttccaccacctgttgcctttgcggatgcatgcaatgataaga

SEQ ID NO: 497284 - DNA, 120 bp, Artificial Sequence
  ENSG00000163492_33 (sequence is synthesized)
gagaaacattttcaagtcattttgagaggccttacctccagttcaaagctgagcccccactaacctccagaggattcgtggaaaagagtactgccttacacagaatcagtgctgaacatc

SEQ ID NO: 497285 - DNA, 120 bp, Artificial Sequence
  ENSG00000163492_34 (sequence is synthesized)
cagagagcatgatgagtgaagtgcatgagagagctttacagcagcaccctcaggctcagggtggtttgctagaaacacgggagaaaatgcatgctgataataacttcactaaaacccaag

SEQ ID NO: 497286 - DNA, 120 bp, Artificial Sequence
  ENSG00000163492_35 (sequence is synthesized)
ataggctgcatgcttcctctgatgcattctcgggcctcaggtttcaatcaggcaccagcaggggctatcagaggcaaatggttcctcgagaagagattaaaagcacatcagcaaagagca

SEQ ID NO: 497287 - DNA, 120 bp, Artificial Sequence
  ENSG00000163492_36 (sequence is synthesized)
gcgtggtcagcctagctgaccaggcacctaatttctccaggctcctgtctaatgtaactgtcatggaaggttctccagtgactttggaagttgaagtaacaggatttccagagcctacac

SEQ ID NO: 497288 - DNA, 120 bp, Artificial Sequence
  ENSG00000163492_37 (sequence is synthesized)
tgacatggtacaagaagggccagaaattgtctgcagatgggcacttacaggttttacacaaggagacaaggcattcggtgttcattccaaaggtatgcaaggcagacgcaggcctctatg

SEQ ID NO: 497289 - DNA, 120 bp, Artificial Sequence
  ENSG00000163492_38 (sequence is synthesized)
caaaactctagcggcgctctctcttccaatgtcatcctccacgtgacaggtaactgcaggctgccaatcacaagagtaaactggataaccctgtgtgtcgtctatgttagtgtgtcccta

SEQ ID NO: 497290 - DNA, 120 bp, Artificial Sequence
  ENSG00000163492_39 (sequence is synthesized)
atgtactggctcctcacacaataactgtggtgttggcaccaatggacatcattctcatgtgcctaaagaaaagtgccgccgtttatcttcctgcacctcctgcaaagcatctcccaccaa

SEQ ID NO: 497291 - DNA, 120 bp, Artificial Sequence
  ENSG00000163492_40 (sequence is synthesized)
gtgtatctccagtctgatcaccatacttgtttggctaataccactgctaggtgaaataatcaaattttctggagcgtttaatatatttgagaagcttggtaaattatctgtagtggataa

SEQ ID NO: 497292 - DNA, 120 bp, Artificial Sequence
  ENSG00000163492_41 (sequence is synthesized)
gaacagatttttgtactctagaaacagatgttttcaacataatatgcagcaaaattattctatgcctattccctcctaatttaagggcgtgcagatgaaggctgacatcggcatagaaat

SEQ ID NO: 497293 - DNA, 120 bp, Artificial Sequence
  ENSG00000163492_42 (sequence is synthesized)
gtgctaaatttcaaatatggttgttcaataatatatttttaattgtattttaaaacatccctttgtagggaatatcagtagaactattgaattgatgttgtatttttgcattagctgtcc

SEQ ID NO: 497294 - DNA, 120 bp, Artificial Sequence
  ENSG00000163492_43 (sequence is synthesized)
tttaattttgctttccatgtcttgatcttgttaccgaaatgcattctgtgtaatttcaacgtagactacgttcctgagtctgatgatgtcattgtaaataatcattcctcatgttgctct

SEQ ID NO: 497295 - DNA, 120 bp, Artificial Sequence
  ENSG00000163492_44 (sequence is synthesized)
cacgggtttgacattggaggatagatgtgccatcaactttaaatagagtttccatcttttgtcagctctgcatgtcatacagcaagatggaacacaggttgcaagaaagaaccaacgtta

SEQ ID NO: 497296 - DNA, 120 bp, Artificial Sequence
  ENSG00000163492_45 (sequence is synthesized)
ttcctgacattctattgatgtgttttgagcagcaatgtgtaaccaggtgtttctgcttctaatcttgattctgctgatgaccatttttatactttatggcaaagcctcattgcctcagtt

SEQ ID NO: 497297 - DNA, 120 bp, Artificial Sequence
  ENSG00000163492_46 (sequence is synthesized)
tcctgtctggaaaatgagttcatcatctacctcttgggcaattgagagttttcattttgtgtcttttaaacatctggaaaatggaaaacactgagggctaaggataatgatattgtttaa

SEQ ID NO: 497298 - DNA, 120 bp, Artificial Sequence
  ENSG00000163492_47 (sequence is synthesized)
tgtaatttgtcatcagaccggcctcctgctcactatttctttttttttagatgctgtttttttagaatattaaattaaaggagtgctgttaatatgtaatcttcaactagttccatggag

SEQ ID NO: 497299 - DNA, 120 bp, Artificial Sequence
  ENSG00000163492_48 (sequence is synthesized)
gaaagtgatgttttatgaattagagcttaaattcctatctaatttctgaagactgcattcttttcaaagacttgaaattaaactcaggaggatacattttgtttgttctagggggaaacg

SEQ ID NO: 497300 - DNA, 120 bp, Artificial Sequence
  ENSG00000163492_49 (sequence is synthesized)
taatagaatggtatgagatgaattctatccttttacaataattattactataatattgaagtattctatgcctttctgaaacactttattcagaaaagatcattttttggcttcctttta

SEQ ID NO: 497301 - DNA, 120 bp, Artificial Sequence
  ENSG00000163492_50 (sequence is synthesized)
aaaataagcttgaagtagggaagcatttgcttcttagattttaaatgtagtcttattatgctgaggaaaatctttagttgaaagaataattcattacagatttttgatgaagggaagaaa

SEQ ID NO: 497302 - DNA, 120 bp, Artificial Sequence
  ENSG00000163492_51 (sequence is synthesized)
ttaattatgttgctggaagactgtctacaaataatcaaaatatttaaatgtaatgtattcaagttgttattaaaaagttactgaatgttatctgaagatgtgaaatgtgtagtcaagtaa

SEQ ID NO: 497303 - DNA, 120 bp, Artificial Sequence
  ENSG00000163492_52 (sequence is synthesized)
aaagttggcgtatactttcttgggctgcatatccaatttaattaaaaaattaaatctcagtttccttctaaattttgatagaactatattaaaagcttgtatacacagcattctaggaaa

SEQ ID NO: 497304 - DNA, 75 bp, Artificial Sequence
  ENSG00000163492_53 (sequence is synthesized)
gaactatattaaaagcttgtatacacagcattctaggaaatttctcttaaaagagtcttgctctcttgcccagtg

SEQ ID NO: 497305 - DNA, 86 bp, Artificial Sequence
  ENSG00000163492_54 (sequence is synthesized)
ctacctaatatttacatttttagtagaaaccaggtttcaccatgttggccaggctgggcctcagcctcccaaagtgccaggattac

SEQ ID NO: 497306 - DNA, 120 bp, Artificial Sequence
  ENSG00000163492_55 (sequence is synthesized)
aaagtgccaggattacaggtatgagccaccatagccggcctcttgtatcctttttgtccaatttcaaataatgtgtgaatcttgcctaactgctgttgcccacgttgaagctaaagagta

SEQ ID NO: 497307 - DNA, 120 bp, Artificial Sequence
  ENSG00000163492_56 (sequence is synthesized)
agtaaaaacctattcatgaacaaagaaggcaggtgagacccggtaacaaactgtctctcttcccactttctctttcttattaatttggcaggatctcccttcccattttgtcaacatggt

SEQ ID NO: 497308 - DNA, 120 bp, Artificial Sequence
  ENSG00000163492_57 (sequence is synthesized)
tgaatttgtgtgttggggttgttagggcatgggaattcctggtttgctttctctattgcatgcttgttcatgttaactctttggggagcagaatgagatacatatgcatccatggttatg

SEQ ID NO: 497309 - DNA, 120 bp, Artificial Sequence
  ENSG00000163492_58 (sequence is synthesized)
atggaaaaaagcatgcaaaatccatttttagagagagagagaaagagaaaggtgggggtgggggagcacaaagatcagaagagtactatgctgatattcaagatatagtacagatagctt

SEQ ID NO: 497310 - DNA, 120 bp, Artificial Sequence
  ENSG00000163492_59 (sequence is synthesized)
tctgtgtacctatccatctacctattcatctgggctattgattgactcccacagcagtaaagaataattacgcagttattcttctggttatgttttaatttcaaaaagttaagtgtgatt

SEQ ID NO: 497311 - DNA, 120 bp, Artificial Sequence
  ENSG00000163492_60 (sequence is synthesized)
ttcctttttgctgggatttctgtcttgagcaaataattattcttatgaaagtatcaattgcagttactggttaaaaatgtaagacctaggaaatttaagtgttgtttctattttaaggta

SEQ ID NO: 497312 - DNA, 120 bp, Artificial Sequence
  ENSG00000163492_61 (sequence is synthesized)
tatacataatttataaccatttacttctagagaaaatcctgaatggttagtaatatcaaaacattttcaacaagaaaactaaaatgaaaagaaagtttaaaaattacatgtgttacagct

SEQ ID NO: 497313 - DNA, 120 bp, Artificial Sequence
  ENSG00000163492_62 (sequence is synthesized)
cttttagaatttgtctagcaggttttctggtgaaaattaaactcaagattttcaccagaaaacgttttaaaacttctaaactcttaaacaaattataaatacttgatactttgaagaact

SEQ ID NO: 497314 - DNA, 120 bp, Artificial Sequence
  ENSG00000163492_63 (sequence is synthesized)
gcaaaacaaaatgtttttaagttttcataaggcaaaatcattgagttttccagctttgattttccaataaaaggatgtataaatatttggtggtagtttttcacactcaattccaagaga

SEQ ID NO: 497315 - DNA, 120 bp, Artificial Sequence
  ENSG00000163492_64 (sequence is synthesized)
aatttactgtaggaatctgtacatttgaatctctgaatattctatgatatttaaaatatttgaacaagatgcagaaaattttttagctatattaatcaataatggtaacctctatcactc

SEQ ID NO: 497316 - DNA, 120 bp, Artificial Sequence
  ENSG00000163492_65 (sequence is synthesized)
ataatcaagacacatacttaaaatagatgactacaagacccttctaactgctttgctcaaatttaaatttcctcaagtagttcatagaccctttacaacctggcctcccctctctggcct

SEQ ID NO: 497317 - DNA, 120 bp, Artificial Sequence
  ENSG00000163492_66 (sequence is synthesized)
cggtttgatcccctcctattacccccaacccctagtaaagtgacatttaacttcagggttttaacatatcatgctcttctctccagccctttcttcctataactctcttactatcttcac

SEQ ID NO: 497318 - DNA, 120 bp, Artificial Sequence
  ENSG00000163492_67 (sequence is synthesized)
caccctatcttcatgtgacttaactcttgcttatgttccagttctgctgagacacaacttcccctgggaagcctcctgacccatcaagtccagagtagatggtcctgccatgtgcactgt

SEQ ID NO: 497319 - DNA, 120 bp, Artificial Sequence
  ENSG00000163492_68 (sequence is synthesized)
cagcacctgcactgcccagccacgcccctgaatatacacaaaggaatcgcaggtttgagcatcagtctcctctggctaggctgtaagaaccttatcagcaggattcatgacagccctgtt

SEQ ID NO: 497320 - DNA, 120 bp, Artificial Sequence
  ENSG00000163492_69 (sequence is synthesized)
gtcattgtattgccagtacctaagacacagtcacactcagtaaactcttttgaattgaattgttgccaaaggtaaacaaagataaacctagcttgtttttctcccctttttagagggagg

SEQ ID NO: 497321 - DNA, 120 bp, Artificial Sequence
  ENSG00000163492_70 (sequence is synthesized)
agaggggaaatgtaaaaagacaaagatgattctcccttcttatagacaggagtcaatccgaatcaggccctaacaatgaagcactcatgaaaatctctcacctcatctgcaaaacttgtg

SEQ ID NO: 497322 - DNA, 120 bp, Artificial Sequence
  ENSG00000163492_71 (sequence is synthesized)
tgagaaccctccagaccctctgggctagaccctgattgaaaatttgaatttaaaaatagatgctggctccacggactaaaataatagtaaggaggaaagaggaaaggtccaggattgttg

SEQ ID NO: 497323 - DNA, 120 bp, Artificial Sequence
  ENSG00000163492_72 (sequence is synthesized)
ttcctggatcaatattgttccaacattttaaagtgttccaacattttaaaacatatgtacttaggcataaatcatcatccggtatgaggaactggatgcctccactctctatgactaaat

SEQ ID NO: 497324 - DNA, 120 bp, Artificial Sequence
  ENSG00000163492_73 (sequence is synthesized)
ccaaactgtcaaaaccagaatttatgtacttctttagaacactacgtaaatgatcaatatttaattgtagctggggctcagtagtctgggctgtgaacagatcttatttgaaaccagtat

SEQ ID NO: 497325 - DNA, 120 bp, Artificial Sequence
  ENSG00000163492_74 (sequence is synthesized)
ttcatacaaacttgtaaatataaagaaagccaaatccaagaacttaagagtatttgaattccaaatgaagaaaggaaagaatatcttattttgttctgctttatgtttgtctttattcat

SEQ ID NO: 497326 - DNA, 120 bp, Artificial Sequence
  ENSG00000163492_75 (sequence is synthesized)
gaccatttcttactaaaaatcaccatctgaagcttttgaaactcctgttgtatgcacagcattttaagtgcagccatgaaataagttagttgaaacaaaataaaatatctccttccagta

SEQ ID NO: 497327 - DNA, 120 bp, Artificial Sequence
  ENSG00000163492_76 (sequence is synthesized)
acaccttctgcagggatactcatcaaagtcaaaataataatttcaaaggttcagctgtctattaatcagcagttctctcctagggagttctctttagcttcattcaacctagaccagtcc

SEQ ID NO: 497328 - DNA, 120 bp, Artificial Sequence
  ENSG00000163492_77 (sequence is synthesized)
tgaagcccaacatttaaatgcttgcttggcctagaactttggttagtttataacaggaaggctgttttaactattaagaagaaagtgactgtaatccaaatgcaacattgttattattaa

SEQ ID NO: 497329 - DNA, 120 bp, Artificial Sequence
  ENSG00000163492_78 (sequence is synthesized)
atagagtcctcagaagtccacccaaaagttctgtgttattttgaaagcatgcaacaaggtcctttcaaaatttctaggggctaaagacaacttctaagatgaatcttcttttgaagagtt

SEQ ID NO: 497330 - DNA, 120 bp, Artificial Sequence
  ENSG00000163492_79 (sequence is synthesized)
tcttaccatagcagatctctttgtagtgaagatccattgcatttagaaaaataccctaacctttaactgtcttgaattatatctgtaaaatattttagaatccttatatccacccataac

SEQ ID NO: 497331 - DNA, 120 bp, Artificial Sequence
  ENSG00000163492_80 (sequence is synthesized)
ccatataaaattccctgtaggatacttaaaagatagtccacttctctttcaatacctcaagtattttcctaatgaaactgctcatttgattgttggagaatgccagctgctagaaacctt

SEQ ID NO: 497332 - DNA, 120 bp, Artificial Sequence
  ENSG00000163492_81 (sequence is synthesized)
ctttttttaatgttaaatatatctgtttccgtatctactcctaatcatctgtagctacacagggacaaaaagtattcatatttaatttctcttacacatgaaagtccttccaacattaaa

SEQ ID NO: 497333 - DNA, 120 bp, Artificial Sequence
  ENSG00000163492_82 (sequence is synthesized)
aacagttgctatgtctgagttttttctgcagcattaaaaatcctttccatcatttatgaaggagctttatttttctttctatgctgatccccccttctcaggattttctatggtttgtca

SEQ ID NO: 497334 - DNA, 120 bp, Artificial Sequence
  ENSG00000163492_83 (sequence is synthesized)
agatcattcattaaatgtaaccaaaaagtgaactacaggtgcaacacagagtacagtaaactggacattattattcactaatgagacctacaattatgctaacatttttagcagtagttt

SEQ ID NO: 497335 - DNA, 120 bp, Artificial Sequence
  ENSG00000163492_84 (sequence is synthesized)
cactttgctggtacatattaagcttgtgatagaacaaaactctcataatatttttattgcagcttctgtcaaaccatgtctctcccatattatacctgtgtcagccatttacctttttta

SEQ ID NO: 497336 - DNA, 120 bp, Artificial Sequence
  ENSG00000163492_85 (sequence is synthesized)
tacaaatgtgggcctttatattttttcttatttaattttattttgttagtcttcacacatgatcccatcttgctaaactaatttgaacctacctagtatattagccatctgtcttgggtt

SEQ ID NO: 497337 - DNA, 120 bp, Artificial Sequence
  ENSG00000163492_86 (sequence is synthesized)
taattctgtagatatgacaagtaagctttctatggcagcaattagttcttaaatataaatgcctaaagggcagattggcattccagttcatgaagcagtctattgattaaaccagttttt

SEQ ID NO: 497338 - DNA, 120 bp, Artificial Sequence
  ENSG00000163492_87 (sequence is synthesized)
aaaataatcatgaatgctcccaatagtacttcattcagccgctacttcataatctttgtattaagtctataatgggagactttctcaaataaactgctcaaaagaaggtttacctaccta

SEQ ID NO: 497339 - DNA, 120 bp, Artificial Sequence
  ENSG00000163492_88 (sequence is synthesized)
gtatcttatcaatgacatagacaatttgacataaatcaggttggctcctagcgatcaaggcattctttccaaaatgctcacaaagtgcttgataagtaatgaacttattgcactgatttt

SEQ ID NO: 497340 - DNA, 120 bp, Artificial Sequence
  ENSG00000163492_89 (sequence is synthesized)
cagtgtgaagcttaccaatctgtaaattgtgtagtccatcctttcctccttttgaaaatcagggcattttctgttctctaattttatggctcttctagtttctgtagattttcaaagata

SEQ ID NO: 497341 - DNA, 120 bp, Artificial Sequence
  ENSG00000163492_90 (sequence is synthesized)
actgacagctgcaattttctctgtacctgggatgtgattaatctcagtctggagcctgaattcatttggaagagttaggttctaactaccctcatctacttggagctgcaattttctctt

SEQ ID NO: 497342 - DNA, 120 bp, Artificial Sequence
  ENSG00000163492_91 (sequence is synthesized)
tatcttgtttcaacttttgttgtttgaagaccattcttgataaacctacttggaaataaaatatgcattagctgattctcatttattcaacatgattcttaagcactaaagaaaacttgc

SEQ ID NO: 497343 - DNA, 120 bp, Artificial Sequence
  ENSG00000163492_92 (sequence is synthesized)
taagcaatttgcccatgttcctatgtgatctaggtgctttactgcaaaaaaaaagaaaagttatttttcgtttagaacatttagaacatgtattatctatctatctatctctgtctctct

SEQ ID NO: 497344 - DNA, 120 bp, Artificial Sequence
  ENSG00000163492_93 (sequence is synthesized)
ctcacacttctacgtggttcaatcagtcttctcccatctgttgatgatgtatgtttctgatttacctaagggaattcaaatactttcaaactgcgtaattttgtctacctttttattact

SEQ ID NO: 497345 - DNA, 120 bp, Artificial Sequence
  ENSG00000163492_94 (sequence is synthesized)
aacttcatttcagaaattttagttctggaatctacagtcggtacttttatttattaaattactgatgaaattctgtttcttgtctgctcttttcccatctttccaatactttcttgaact

SEQ ID NO: 497346 - DNA, 120 bp, Artificial Sequence
  ENSG00000163492_95 (sequence is synthesized)
aactatattaaccctaggcacttaaagtgttcatcagctagctacaacatttgtacctggagctctttctttctttctttcctttcttttcttttttttttagatggagtctcgctctgt

SEQ ID NO: 497347 - DNA, 120 bp, Artificial Sequence
  ENSG00000163492_96 (sequence is synthesized)
gaaccacagcgcccggccaatctggagctgtttctgttgtctaatttttctcttggtttccagtcctgtagtcctgtttcttggcagaactagcgaatatttatcaaatgccagacatta

SEQ ID NO: 497348 - DNA, 120 bp, Artificial Sequence
  ENSG00000163492_97 (sequence is synthesized)
tgtataaaaaattggaggatcagcagatggtgttttcttcttctagaaagggtcacccttctttctccaggcaggcattggtgggcaatcactcaagccaatcagaagctggcagagttg

SEQ ID NO: 497349 - DNA, 120 bp, Artificial Sequence
  ENSG00000163492_98 (sequence is synthesized)
tgtttgcagtgtagtcctgtcccctcaggctcccagagttttgtattgagagccaagtgctttctctgacgtctctgcccctggcaggtcacaaactccaatctttgtttgggtagtctg

SEQ ID NO: 497350 - DNA, 120 bp, Artificial Sequence
  ENSG00000163492_99 (sequence is synthesized)
ctgaaaaactccactctgcttttcagaggccttttgcttaggttttttaatccactgcccgatatacccctggtattttgtcaacgtctttagaagatcattgtgcttgaagccctccaa

SEQ ID NO: 497351 - DNA, 120 bp, Artificial Sequence
  ENSG00000163492_100 (sequence is synthesized)
gtgtctgccaaaatctctggtgttttctcggctccagggaagtctcgattatcagcttcctgtctgcacagaattgggaaatccccctgggatgataggtgagctcacccctgtcaggtt

SEQ ID NO: 497352 - DNA, 120 bp, Artificial Sequence
  ENSG00000163492_101 (sequence is synthesized)
cttccctctctggagtcagcctctctagttccggttgtccgaccagttctctgcttccttcaaatggattccttctgcattttacccagcttttctaggtattctaagcaaaagcactgc

SEQ ID NO: 497353 - DNA, 120 bp, Artificial Sequence
  ENSG00000163492_102 (sequence is synthesized)
tctgccactggctaccccattctactcagaagtcctttgttacttatttagaatgtttaagattgtacagtcagatttttgtttttaaagatctgcaacaataacttattccaaattata

SEQ ID NO: 497354 - DNA, 120 bp, Artificial Sequence
  ENSG00000163492_103 (sequence is synthesized)
ttttgtatctatatctaaataaacttaggttatcataatattcaatgcccacttagatctcccagaaatagcatatattttactactgtgctttggtgttcttttatcttgatgtcataa

SEQ ID NO: 497355 - DNA, 120 bp, Artificial Sequence
  ENSG00000163492_104 (sequence is synthesized)
acacggtcactctaccctaaggtctttaccactatcatatgataaataagttcctccttattgataaaattaaagcccacgtactaaggaaatttattggttagcaacatttggagagat

SEQ ID NO: 497356 - DNA, 120 bp, Artificial Sequence
  ENSG00000163492_105 (sequence is synthesized)
gaaattgttggtaaagtaagtaaaacgattttttttattcttatatcttttggaccactaggcttttaaacaaacattattgttgaatcatggtgactagtttgcttgctaagaaggcag

SEQ ID NO: 497357 - DNA, 120 bp, Artificial Sequence
  ENSG00000163492_106 (sequence is synthesized)
aggccagctggtatattcagttgagtgttctgttctttattgggttgtcgtggctcatattttcaagccagaaatagaaaaaatttcagttcatctaaaaatcattaagatcagagaaac

SEQ ID NO: 497358 - DNA, 120 bp, Artificial Sequence
  ENSG00000163492_107 (sequence is synthesized)
tgattcaggcccaaattatggcagacatcttgatgaaagtgctaatttattaatttataatggccaataccaagaatgctatctgggatacagccttcctattatcaaggtatctgaaaa

SEQ ID NO: 497359 - DNA, 120 bp, Artificial Sequence
  ENSG00000163492_108 (sequence is synthesized)
gcaagacatcagaaaaccattcatggtgcatgaatataaacgaaaaatgaatgctttagtggcctgtttagactggattatgacaaacattttccatgtcctacacagaagtaaaatgag

SEQ ID NO: 497360 - DNA, 120 bp, Artificial Sequence
  ENSG00000163492_109 (sequence is synthesized)
tactgtgtttactaattagacctcaggcaaattattcaatcttcttgagtggccaaaatattcgtctgccaaatacatgatcacttttcacagatcctactagctagacatctacaaatc

SEQ ID NO: 497361 - DNA, 120 bp, Artificial Sequence
  ENSG00000163492_110 (sequence is synthesized)
ctactttagctctcctttctctagacctcactcagaccaccatatccttctgattaaagttgtcattggcatgctgcagtttcaaaatttatattaaattatataatacattacattctg

SEQ ID NO: 497362 - DNA, 120 bp, Artificial Sequence
  ENSG00000163492_111 (sequence is synthesized)
acattctggttaatcatttctttaaaatatgtgaaagataattttatttatgataaaagtataatttggggtgaattctgctgtagttgtctaatatctttcataatttattatgtatca

SEQ ID NO: 497363 - DNA, 120 bp, Artificial Sequence
  ENSG00000163492_112 (sequence is synthesized)
aatgagggaatataacgttttattactagattcttaagttcatgggggaaatctcatttaggacctacagatatatatttttttggagttgccactttataatgtgtaaaataacataaa

SEQ ID NO: 497364 - DNA, 120 bp, Artificial Sequence
  ENSG00000163492_113 (sequence is synthesized)
aatataagtgtgcaacatcaatatcatttaaaataattttaaaataaaatggcctatctttaaaatatcctgttaagtatttatgatactgtcaattgctgtcattgagatgatagaaat

SEQ ID NO: 497365 - DNA, 120 bp, Artificial Sequence
  ENSG00000163492_114 (sequence is synthesized)
ttgaagatttattgagaaagcctggctattaaagtaaaaaacataagaattgtttcgccaaatgaatgttcctgtgcattttttaaatgtttctacagaaataaagcacgcatagtctta

SEQ ID NO: 497366 - DNA, 120 bp, Artificial Sequence
  ENSG00000163492_115 (sequence is synthesized)
cattctgtgagcactaactgaaaggtttagggctagctgattaatattctatgacactgcaactctgcatgattcaatctcacatcagacccctctcattttagtagcagcatagttaat

SEQ ID NO: 497367 - DNA, 120 bp, Artificial Sequence
  ENSG00000163492_116 (sequence is synthesized)
acctttaagaaaaataaaaggtaaccatataaagtactaataatttaacaaatttccaaagcactgtaggttggttgtgcttgttttcttctgtgtttaacattccacatttctaaagat

SEQ ID NO: 497368 - DNA, 120 bp, Artificial Sequence
  ENSG00000163492_117 (sequence is synthesized)
tgtgggttgaaattattttttattgtctatttccatataagcatggcatctgcttgctttaactacctttatgcaattgaaaatataagaatttgtttttatttccctttactctcattt

SEQ ID NO: 497369 - DNA, 120 bp, Artificial Sequence
  ENSG00000163492_118 (sequence is synthesized)
acctctttcatctttttcctctttccaacagagtcacacgtgtcatctttgtaacattttgttttactaggatttctttttacaaattttttcaatgtgagaggtggaatataaatattt

SEQ ID NO: 497370 - DNA, 120 bp, Artificial Sequence
  ENSG00000163492_119 (sequence is synthesized)
ctgtcacagttcctccaggtgacaggcaataaactcatttttgaaaggtagtataataactgagctgtaaacaatatgatttcactctggagacatcattattttttagcctcttttttt

SEQ ID NO: 497371 - DNA, 120 bp, Artificial Sequence
  ENSG00000163492_120 (sequence is synthesized)
cagtaaaagcaaactgtagaatactggttttggatcacctactattggtaacaaaagcagttctttctcaatatgtgggttacttttaaacatttagaaaattctcatccttaagtaaat

SEQ ID NO: 497372 - DNA, 120 bp, Artificial Sequence
  ENSG00000163492_121 (sequence is synthesized)
ttatttcaggacaaagttacaaatctgcaaaagccagtttatacttataaactaagattaagtaaaatagcatttattgatcacaatgtttcagtagatattaaatgatcagtttcagtt

SEQ ID NO: 497373 - DNA, 120 bp, Artificial Sequence
  ENSG00000163492_122 (sequence is synthesized)
attgtgtgtgcccattgatggtacttgaaatatgaaccagttatctaaggaacttatgagaaaactttggtttctcaaattatttaaaaaactgcacttgtgctatattagtgcagtcac

SEQ ID NO: 497374 - DNA, 120 bp, Artificial Sequence
  ENSG00000163492_123 (sequence is synthesized)
ttttgctttttgttttattgtctttactgttgcatgttttttacaaatcaagagtgtcatatttatgaattttaaagatatttaattcattattaaatctcagttcactccaaagaaaaa

SEQ ID NO: 497375 - DNA, 120 bp, Artificial Sequence
  ENSG00000163492_124 (sequence is synthesized)
tggcacctttgttgagacaatgatgtgaatgaagaaagtaggaagaaatgcgtcagtttcatctttatgaattaagactaatgatatccaatattgcacagggctgtttaaactcctgat

SEQ ID NO: 497376 - DNA, 120 bp, Artificial Sequence
  ENSG00000163497_0 (sequence is synthesized)
gcggcgagtggagcgggagccgactggaagaagggctctagggagggggctgtggctgctggggtccgaggtggggccgggtacaccagccccatcactgtttgcagagagtcagggagg

SEQ ID NO: 497377 - DNA, 120 bp, Artificial Sequence
  ENSG00000163497_1 (sequence is synthesized)
gaggcggaaaagacacgcgctctaggctcccatcagggcacatggcccgggcccatcccccgcgcgtctccccggctgcggggcgcggggggctgccgggtgcgcttggctgtggcgcgg

SEQ ID NO: 497378 - DNA, 120 bp, Artificial Sequence
  ENSG00000163497_2 (sequence is synthesized)
ttggagactttattgcgatgggacgataagaggggcgggggcggggtcctgggggccgaggcggcagcgctttaattaaaacggaaattgcggccccgggccgcgcgggggccggagggt

SEQ ID NO: 497379 - DNA, 120 bp, Artificial Sequence
  ENSG00000163497_3 (sequence is synthesized)
tccaagcggccccttagctggaagcgtttctccaggacccccccgcaacccccgccacgcccgggctgccccctcccgccaggccctgccggacccggcgccgtcttctcctccttgtca

SEQ ID NO: 497380 - DNA, 120 bp, Artificial Sequence
  ENSG00000163497_4 (sequence is synthesized)
cccgcggtcgcttcgggcggggatcggtgccaccgagcgcaaagcctgcctcgccccccttccccgtcccccccatctcccaccgcccagtccccggcggcgatgagacagagcggcgcc

SEQ ID NO: 497381 - DNA, 120 bp, Artificial Sequence
  ENSG00000163497_5 (sequence is synthesized)
tcccagcccctgctgatcaacatgtacctgccagatcccgtcggagacggtctcttcaaggacgggaagaacccgagctgggggccgctgagccccgcggttcagaaaggcagcggacag

SEQ ID NO: 497382 - DNA, 120 bp, Artificial Sequence
  ENSG00000163497_6 (sequence is synthesized)
atccagctgtggcagtttctgctggagctgctggctgaccgcgcgaacgccggctgcatcgcgtgggagggcggtcacggcgagttcaagctcacggacccggacgaggtggcgcggcgg

SEQ ID NO: 497383 - DNA, 120 bp, Artificial Sequence
  ENSG00000163497_7 (sequence is synthesized)
tcatgagcaaggtgcatggcaagcgctacgcctaccgcttcgacttccagggcctggcgcaggcctgccagccgccgcccgcgcacgctcatgccgccgccgcagctgctgccgccgccg

SEQ ID NO: 497384 - DNA, 120 bp, Artificial Sequence
  ENSG00000163497_8 (sequence is synthesized)
cggccgcccaggacggcgcgctctacaagctgcccgccggcctcgccccgctgcccttccccggcctctccaaactcaacctcatggccgcctcggccggggtcgcgcccgccggcttct

SEQ ID NO: 497385 - DNA, 120 bp, Artificial Sequence
  ENSG00000163497_9 (sequence is synthesized)
ccgccaccgctgccgccgccaccgccgcgctctaccccagtcccagcttgcagcccccgcccgggcccttcggggccgtggccgcagcctcgcacttggggggccattaccactagacgg

SEQ ID NO: 497386 - DNA, 120 bp, Artificial Sequence
  ENSG00000163497_10 (sequence is synthesized)
tggggggccattaccactagacggggcggtcgggtgcctgcggcctcgcccgcacgcctagagtctcgcccgatcccatcggcatcccggggagggcccgggagcctccgtcaaccgtcc

SEQ ID NO: 497387 - DNA, 120 bp, Artificial Sequence
  ENSG00000163497_11 (sequence is synthesized)
tctaatccagagtttactccacctgccgcacttagcagggggacgggaccgaagctccctcaatccttgtctggtactagatttgctcctgtcccaccccgcagtcccctgaggagggcg

SEQ ID NO: 497388 - DNA, 120 bp, Artificial Sequence
  ENSG00000163497_12 (sequence is synthesized)
atgtgcgccctctttcactttttttcttctaggtctccaggtcccggaggggatttgtggacctctcttgtctccccaccactccagtgcatttccgcctggctcctagaagccccattc

SEQ ID NO: 497389 - DNA, 120 bp, Artificial Sequence
  ENSG00000163497_13 (sequence is synthesized)
aatatcactactctttaacgagtgccaaatcttttcccacttttgctcttccccaaggaactgctcccacctcagcacgtggaggcctctcacggtcctccttcctgggacctgagcagg

SEQ ID NO: 497390 - DNA, 120 bp, Artificial Sequence
  ENSG00000163497_14 (sequence is synthesized)
tttggtgaaagccaccgtcctccgtgacacacggcccccttcctcctgtccccacactcccaggagaaactcccggtgtgtttctgaccctttcagccccattaaagctcctgagctctc

SEQ ID NO: 497391 - DNA, 120 bp, Artificial Sequence
  ENSG00000163497_15 (sequence is synthesized)
cgcgcagcgcgcctggaccaggctccgggaggaggagccgggtggcccgggcccccagcctcgcgcctggggaccacagcaccccccttaagccttggcccggggcccttttgtcaagcc

SEQ ID NO: 497392 - DNA, 120 bp, Artificial Sequence
  ENSG00000163499_0 (sequence is synthesized)
agcctcgcagccggtccatttccctcgcgtgccgcgctcacccacccggtgaatgccctctgctggggtggggaagggaggggagcgcgggaagactgcgagcccctggcagccgggtcc

SEQ ID NO: 497393 - DNA, 120 bp, Artificial Sequence
  ENSG00000163499_1 (sequence is synthesized)
agagctaggccgggtccagcccccgggttcttcatccgctacccaggttgggcaggctgtgtgtggctcgaaacggggctcttgagacgctgagcgcgtggtgccacccttcctgtccgc

SEQ ID NO: 497394 - DNA, 120 bp, Artificial Sequence
  ENSG00000163499_2 (sequence is synthesized)
agcggcatgagcagcgcccccgcgccgggcccggcgcccgccagcctcacgctctgggacgaggaggacttccagggccgtcgctgtcggctgctaagcgactgtgcgaacgtctgcgag

SEQ ID NO: 497395 - DNA, 120 bp, Artificial Sequence
  ENSG00000163499_3 (sequence is synthesized)
gtaccccgacttccagggacagcagttcattctggagaagggagactatcctcgctggagcgcctggagtggcagcagcagccacaacagcaaccagctgctgtccttccggccagtgct

SEQ ID NO: 497396 - DNA, 120 bp, Artificial Sequence
  ENSG00000163499_4 (sequence is synthesized)
ctgcgcgaaccacaatgacagccgtgtgacactgtttgagggggacaacttccaaggctgcaagtttgacctcgttgatgactacccatccctgccctccatgggctgggccagcaagga

SEQ ID NO: 497397 - DNA, 120 bp, Artificial Sequence
  ENSG00000163499_5 (sequence is synthesized)
tgtgggttccctcaaagtcagctccggagcgtgggtggcctaccagtacccaggctaccgaggctaccagtatgtgttggagcgggaccggcacagcggagagttctgtacttacggtga

SEQ ID NO: 497398 - DNA, 120 bp, Artificial Sequence
  ENSG00000163499_6 (sequence is synthesized)
gctcggcacacaggcccacactgggcagctgcagtccatccggagagtccagcactaggctccacggccccagacaccttccctgaggacactcaataaaggttcctgaatcttcctgcc

SEQ ID NO: 497399 - DNA, 120 bp, Artificial Sequence
  ENSG00000163499_7 (sequence is synthesized)
aagtcatgggaggggccaggttcgggggaacctctgagcgatccatttcccagactgccagggagctgatggggtgagctctgggagtgcctgtgggtcctagacagcttcacagcttgt

SEQ ID NO: 497400 - DNA, 120 bp, Artificial Sequence
  ENSG00000163499_8 (sequence is synthesized)
ttctcctcccctgcctcctagctccaggccctggcctcaccatggcacctagaaaggctgttcaagccctgcatggggtgtgtgtaaacaaactccgagatgggtggtagtagcattatt

SEQ ID NO: 497401 - DNA, 120 bp, Artificial Sequence
  ENSG00000163499_9 (sequence is synthesized)
tctcagaatcagaagggtgtctccaagaaagttgggattgtgggcgtaggcccggagcccagaaatcatcaccacggacagcgctgaggccatcccagtcctgagtgcccagggttcccc

SEQ ID NO: 497402 - DNA, 80 bp, Artificial Sequence
  ENSG00000163501_0 (sequence is synthesized)
actcggccccgggctgcgccgcagacggcagcagctcccgctccgcccgagccgcctgaccgccgggccggggtgctaac

SEQ ID NO: 497403 - DNA, 120 bp, Artificial Sequence
  ENSG00000163501_1 (sequence is synthesized)
cgcagccccgccgcccgccgccccccgccgccgccgcgttgccaaaacaaacgggccggcctatttattggcggccggcgagcccggcagctcagagtcgaggcgccgagggggacagcg

SEQ ID NO: 497404 - DNA, 80 bp, Artificial Sequence
  ENSG00000163501_2 (sequence is synthesized)
cagagtcgaggcgccgagggggacagcgcgccgccaccagctcgggccctgggcccccgccccgcacttgagtcccgccg

SEQ ID NO: 497405 - DNA, 120 bp, Artificial Sequence
  ENSG00000163501_3 (sequence is synthesized)
ccgcagcgctcccgtcgacgcgcctgcccatcagcccaccaggagacctcgcccgccgctcccccgggctccccggccatgtctcccgcccggctccggccccgactgcacttctgcctg

SEQ ID NO: 497406 - DNA, 120 bp, Artificial Sequence
  ENSG00000163501_4 (sequence is synthesized)
actgcacttctgcctggtcctgttgctgctgctggtggtgccggcggcatggggctgcgggccgggtcgggtggtgggcagccgccggcgaccgccacgcaaactcgtgccgctcgccta

SEQ ID NO: 497407 - DNA, 120 bp, Artificial Sequence
  ENSG00000163501_5 (sequence is synthesized)
caagcagttcagccccaatgtgcccgagaagaccctgggcgccagcggacgctatgaaggcaagatcgctcgcagctccgagcgcttcaaggagctcacccccaattacaatccagacat

SEQ ID NO: 497408 - DNA, 120 bp, Artificial Sequence
  ENSG00000163501_6 (sequence is synthesized)
catcttcaaggacgaggagaacacaggcgccgaccgcctcatgacccagcgctgcaaggaccgcctgaactcgctggctatctcggtgatgaaccagtggcccggtgtgaagctgcgggt

SEQ ID NO: 497409 - DNA, 120 bp, Artificial Sequence
  ENSG00000163501_7 (sequence is synthesized)
gaccgagggctgggacgaggacggccaccactcagaggagtccctgcattatgagggccgcgcggtggacatcaccacatcagaccgcgaccgcaataagtatggactgctggcgcgctt

SEQ ID NO: 497410 - DNA, 120 bp, Artificial Sequence
  ENSG00000163501_8 (sequence is synthesized)
ggcagtggaggccggctttgactgggtgtattacgagtcaaaggcccacgtgcattgctccgtcaagtccgagcactcggccgcagccaagacgggcggctgcttccctgccggagccca

SEQ ID NO: 497411 - DNA, 120 bp, Artificial Sequence
  ENSG00000163501_9 (sequence is synthesized)
ggtacgcctggagagtggggcgcgtgtggccttgtcagccgtgaggccgggagaccgtgtgctggccatgggggaggatgggagccccaccttcagcgatgtgctcattttcctggaccg

SEQ ID NO: 497412 - DNA, 120 bp, Artificial Sequence
  ENSG00000163501_10 (sequence is synthesized)
gctcacctgctctttacggctgacaatcacacggagccggcagcccgcttccgggccacatttgccagccacgtgcagcctggccagtacgtgctggtggctggggtgccaggcctgcag

SEQ ID NO: 497413 - DNA, 120 bp, Artificial Sequence
  ENSG00000163501_11 (sequence is synthesized)
cctgcccgcgtggcagctgtctctacacacgtggccctcggggcctacgccccgctcacaaagcatgggacactggtggtggaggatgtggtggcatcctgcttcgcggccgtggctgac

SEQ ID NO: 497414 - DNA, 120 bp, Artificial Sequence
  ENSG00000163501_12 (sequence is synthesized)
caccacctggctcagttggccttctggcccctgagactctttcacagcttggcatggggcagctggactccgggggagggtgtgcattggtacccccagctgctctaccgcctggggcgt

SEQ ID NO: 497415 - DNA, 120 bp, Artificial Sequence
  ENSG00000163501_13 (sequence is synthesized)
ctcctgctagaagagggcagcttccacccactgggcatgtccggggcagggagctgaaaggactccaccgctgccctcctggaactgctgtactgggtccagaagcctctcagccaggag

SEQ ID NO: 497416 - DNA, 120 bp, Artificial Sequence
  ENSG00000163501_14 (sequence is synthesized)
ggagctggccctggaagggacctgagctgggggacactggctcctgccatctcctctgccatgaagatacaccattgagacttgactgggcaacaccagcgtcccccacccccgtcgtgg

SEQ ID NO: 497417 - DNA, 120 bp, Artificial Sequence
  ENSG00000163501_15 (sequence is synthesized)
tgtagtcatagagctgcaagctgagctggcgaggggatggttgttgacccctctctcctagagaccttgaggctggcacggcgactcccaactcagcctgctctcactacgagttttcat

SEQ ID NO: 497418 - DNA, 120 bp, Artificial Sequence
  ENSG00000163501_16 (sequence is synthesized)
actctgcctcccccattggggagggcccattccatccatcttaggcccctttgggtgggcttgcgcctcagttgatgctgctaaattccctgggagccagcatggatctggctggacccg

SEQ ID NO: 497419 - DNA, 120 bp, Artificial Sequence
  ENSG00000163501_17 (sequence is synthesized)
atgctgtccagaactgggaaggccacaggggtggggcagccatcccggccattctgaggtatgacattcctccccggccacactcctcaagacacatccagagactgttgctgtctgtgg

SEQ ID NO: 497420 - DNA, 120 bp, Artificial Sequence
  ENSG00000163501_18 (sequence is synthesized)
gcagagttctgtgttctggccaatgtgaccgtagtgccggggactgggggaggtgggttggatgtgcttgccacccccccggctaagctcccccttctgctgaaccatgatccccacccc

SEQ ID NO: 497421 - DNA, 120 bp, Artificial Sequence
  ENSG00000163501_19 (sequence is synthesized)
ctccgccggtcagtctcccataccttatttattggagtggagggggaagcccatgggagaattttggggatgttttggtcttttcttccttttgtaataaaaattatttaagttgttaga

SEQ ID NO: 497422 - DNA, 120 bp, Artificial Sequence
  ENSG00000163507_0 (sequence is synthesized)
gaaagctaaaggccggcgcacgctgggcggtggtggtccctaagccgggccgcggccggtgcaatggactccactgcctgcttgaagtccttgctcctgactgtcagtcagtacaaagcc

SEQ ID NO: 497423 - DNA, 120 bp, Artificial Sequence
  ENSG00000163507_1 (sequence is synthesized)
gtgaagtcagaggcgaacgccactcagcttttgcggcacttggaggtaatttctggacagaaactcacacgactatttacatcaaatcagatattaacaagtgaatgcttgagttgcctt

SEQ ID NO: 497424 - DNA, 120 bp, Artificial Sequence
  ENSG00000163507_2 (sequence is synthesized)
gtagagctacttgaagaccccaacataagtgcttcactgatcttaagtattatcggtttgctgtctcaactagcagtagacattgaaaccagagattgtcttcagaatacatataatctg

SEQ ID NO: 497425 - DNA, 120 bp, Artificial Sequence
  ENSG00000163507_3 (sequence is synthesized)
aatagtgtgctggcgggagtggtttgtcggagcagccacactgattcggtgtttttgcagtgcattcaacttctacagaagttaacatataatgtcaaaattttctattctggtgccaat

SEQ ID NO: 497426 - DNA, 120 bp, Artificial Sequence
  ENSG00000163507_4 (sequence is synthesized)
atagatgaattaattacgttcctgatagatcacattcaatcttctgaagatgagttaaaaatgccttgtctaggattattggcaaatctttgtcggcacaatctttctgttcaaacgcac

SEQ ID NO: 497427 - DNA, 120 bp, Artificial Sequence
  ENSG00000163507_5 (sequence is synthesized)
ataaagacattgagtaatgtgaaatctttttatcgaactcttatcaccttgttggcccatagtagtttaactgtggttgtgtttgcactttcaatattatccagtttgacattaaatgaa

SEQ ID NO: 497428 - DNA, 120 bp, Artificial Sequence
  ENSG00000163507_6 (sequence is synthesized)
gaggtgggggaaaagctattccatgctcgaaacattcatcagacttttcaactaatatttaatattctcataaacggtgatggcactctaactagaaagtattcagttgacctactgatg

SEQ ID NO: 497429 - DNA, 120 bp, Artificial Sequence
  ENSG00000163507_7 (sequence is synthesized)
gatctccttaagaatcctaaaattgctgattatctcaccagatatgagcacttttcttcatgtcttcaccaagtattaggtcttcttaatggaaaggatcctgattcctcttcaaaggtt

SEQ ID NO: 497430 - DNA, 120 bp, Artificial Sequence
  ENSG00000163507_8 (sequence is synthesized)
ttagaattacttcttgccttctgttcagtgactcagctgcgccatatgctcactcagatgatgtttgaacagtctccacctggcagcgccactctgggaagccatactaaatgtttagaa

SEQ ID NO: 497431 - DNA, 120 bp, Artificial Sequence
  ENSG00000163507_9 (sequence is synthesized)
cctactgtggctctactgcgctggttaagccaacctttggacggatcagaaaactgttctgttttagcattggagttgttcaaggaaatatttgaggatgtcatagatgctgctaactgt

SEQ ID NO: 497432 - DNA, 120 bp, Artificial Sequence
  ENSG00000163507_10 (sequence is synthesized)
tcctcggctgatcgttttgtgacccttctgctgcctacaatccttgatcaacttcagttcacagaacaaaatctagatgaggctttaacaagaaaaaaatgtgaaaggattgccaaggcc

SEQ ID NO: 497433 - DNA, 120 bp, Artificial Sequence
  ENSG00000163507_11 (sequence is synthesized)
attgaagttttgttaactctctgtggagatgatacactaaaaatgcatattgcaaaaatcttgacaactgtcaagtgtaccactcttatagaacaacaatttacatatggcaagattgac

SEQ ID NO: 497434 - DNA, 120 bp, Artificial Sequence
  ENSG00000163507_12 (sequence is synthesized)
ctgggatttggaacaaaggttgcagattctgaattatgcaaacttgctgctgatgtaattttgaaaactcttgatttgattaacaaacttaaaccattggttcctggtatggaagtaagc

SEQ ID NO: 497435 - DNA, 120 bp, Artificial Sequence
  ENSG00000163507_13 (sequence is synthesized)
ttctacaaaatacttcaggacccacgtttgattactcctttggcttttgctttaacgtcagataatagagaacaagtacagtctggactgagaatattattggaggctgctccactgcca

SEQ ID NO: 497436 - DNA, 120 bp, Artificial Sequence
  ENSG00000163507_14 (sequence is synthesized)
gattttcctgctttagtacttggagaaagtatagcagcaaacaatgcctatagacaacaggaaacagaacatatacccagaaaaatgccctggcaatcatcaaatcacagttttccaaca

SEQ ID NO: 497437 - DNA, 120 bp, Artificial Sequence
  ENSG00000163507_15 (sequence is synthesized)
tcaataaagtgtttaactcctcatttgaaagatggtgttcctggattgaatattgaagaattaatagagaaacttcagtctggaatggtggtaaaggatcagatttgtgatgtgagaata

SEQ ID NO: 497438 - DNA, 120 bp, Artificial Sequence
  ENSG00000163507_16 (sequence is synthesized)
atagactgattgctcagcatcgctgtcaaagaactcaagctgaaacagaggcacggacacttgctagtatgttgagagaagttgagagaaaaaatgaagagcttagtgtgttgctgaagg

SEQ ID NO: 497439 - DNA, 120 bp, Artificial Sequence
  ENSG00000163507_17 (sequence is synthesized)
cgcagcaagttgaatcagaaagagcgcagagtgatattgagcatctctttcaacataataggaagttagagtctgtggctgaagaacatgaaatactgacaaaatcctacatggaacttc

SEQ ID NO: 497440 - DNA, 120 bp, Artificial Sequence
  ENSG00000163507_18 (sequence is synthesized)
ttcagagaaatgaaagtactgaaaagaagaataaagatttacagatcacatgtgattctctgaataaacaaattgagacagtgaaaaagttgaatgagtcactcaaggaacaaaatgaaa

SEQ ID NO: 497441 - DNA, 120 bp, Artificial Sequence
  ENSG00000163507_19 (sequence is synthesized)
aaagtattgcccaattaatagagaaagaagaacagagaaaagaagtacagaatcagctagtagacagagaacataagctagcaaatttgcatcaaaaaacaaaagtacaagaagaaaaga

SEQ ID NO: 497442 - DNA, 120 bp, Artificial Sequence
  ENSG00000163507_20 (sequence is synthesized)
ttaaaaccttacaaaaggaaagggaagataaggaagaaaccattgatatccttagaaaagaattaagcagaacagaacagataagaaaagagttgagcattaaggcttcctccctagagg

SEQ ID NO: 497443 - DNA, 120 bp, Artificial Sequence
  ENSG00000163507_21 (sequence is synthesized)
ttcaaaaggcacaattagaaggtcgtttggaagagaaagagtccttggtgaaacttcagcaagaggaattgaacaaacactcccacatgatagcaatgatccacagtttaagtggtggaa

SEQ ID NO: 497444 - DNA, 120 bp, Artificial Sequence
  ENSG00000163507_22 (sequence is synthesized)
aaataaatccagaaactgtgaatctcagtatatagacattatggcattttggaatttgtaatctcatgatatttttgatgtatttatctattggagggggggtgggtaggggagttaatt

SEQ ID NO: 497445 - DNA, 120 bp, Artificial Sequence
  ENSG00000163507_23 (sequence is synthesized)
tgtgacttcgtaacaataagaagttattatctaatttagtaaagaccctgatctgttgcatgttttttatttgatagtttgaatagaaatttaattttctaagttttactttttgtttct

SEQ ID NO: 497446 - DNA, 120 bp, Artificial Sequence
  ENSG00000163507_24 (sequence is synthesized)
ggcttttatggcttaaggttttctttggttcttacattagaaaatcatttttaacctccattatcatttttctaaggttctttcctttttcttagttgctttctattctgttttgcctgt

SEQ ID NO: 497447 - DNA, 120 bp, Artificial Sequence
  ENSG00000163507_25 (sequence is synthesized)
cttatttattctcatttgtgattatttagatcttaagaccaaactttcttggtataacagtcctaaagattacaaaataaaaatatagagagagtaaaagtaaaaagtaaagtaaaaaga

SEQ ID NO: 497448 - DNA, 120 bp, Artificial Sequence
  ENSG00000163507_26 (sequence is synthesized)
gagaaggtatgattttactgctagagaagtttgtctctgaagaagcacaaaagaaaatattagtgaatttaaaataatttttatactgctgtagcataatttctaaatttgaaaaaaatg

SEQ ID NO: 497449 - DNA, 120 bp, Artificial Sequence
  ENSG00000163507_27 (sequence is synthesized)
aatgcaatggtaataaaatgtataaaaattagaaaactgtcattgtgttaaactattacatttaaatgattacatttaacacaatagctgtctcataaaaaatctaagaacttgtagaat

SEQ ID NO: 497450 - DNA, 120 bp, Artificial Sequence
  ENSG00000163507_28 (sequence is synthesized)
tgtaaggtatatttagtgtttttttctcttttttcaaatgttgcatagtggtccagatcatctataattaattataagtttcttatgatttacataaggataatttggattctactcttg

SEQ ID NO: 497451 - DNA, 120 bp, Artificial Sequence
  ENSG00000163507_29 (sequence is synthesized)
cttgctgcatattcagaaaaatattatttactgttaattctgatatgaattgtatttaatttgttgtcctaatagtttttaattggttcatttaattttaaagcataggttaaatatctt

SEQ ID NO: 497452 - DNA, 120 bp, Artificial Sequence
  ENSG00000163507_30 (sequence is synthesized)
ttttttaaaatacaagggtccttctgtacttttcatttgaatcatatcctctaactactctgtaagaaacgtttttacatcaatattttgattgattttattgctataccaatacagtca

SEQ ID NO: 497453 - DNA, 120 bp, Artificial Sequence
  ENSG00000163507_31 (sequence is synthesized)
ttaattttacttggtgttttcttcaccatatgtctgtttgatttaagtgaatttagatttgtacagttctggaaattttttaaaaaatattatgcagagtaaaacattttaaattactat

SEQ ID NO: 497454 - DNA, 120 bp, Artificial Sequence
  ENSG00000163507_32 (sequence is synthesized)
ttgttctatagaggagatacattctgtttctcttttgaaattgcatgcattttcaaccaaatatgaaaaagtttaagtggatagataagactgaagaataaaagggtctataaaataaaa

SEQ ID NO: 497455 - DNA, 120 bp, Artificial Sequence
  ENSG00000163507_33 (sequence is synthesized)
gatcttaagtattatcggtttgctgtctcaactaggtaatgcatttaatttctcctttttagtttttggaagatgtatgaacaatattttaaagtgcaggcttagttatagaatctctta

SEQ ID NO: 497456 - DNA, 120 bp, Artificial Sequence
  ENSG00000163507_34 (sequence is synthesized)
aagaatgattcaccttcaaagacttctcagtctagtgtgcattgtgaatcttttgacactgaggaagtcatagctaccgatcaaagaatgatccttctgtaatagattacactgaattta

SEQ ID NO: 497457 - DNA, 120 bp, Artificial Sequence
  ENSG00000163507_35 (sequence is synthesized)
ccttaacttctgagctcacctattgtctttgggaagaagcagaaggaataatcccataactaccctctgggcttcatttttcattctcctccctcaaagtaatttctggacagaaactca

SEQ ID NO: 497458 - DNA, 120 bp, Artificial Sequence
  ENSG00000163507_36 (sequence is synthesized)
aaacctcgcggcctctcagacgagggtgggttagcgggggcagctcccaacccccgtcctggacccacaaatcacctcgacccctggcccaccccggccgtcaccgagaacggtccccta

SEQ ID NO: 497459 - DNA, 120 bp, Artificial Sequence
  ENSG00000163507_37 (sequence is synthesized)
tgctttagtgtgaacttggagaaagtatagcagcaaacaatgcctatagacaacaggaaacagaacatatacccagaaaaatgccctggcaatcatcaaatcacagttttccaacatcaa

SEQ ID NO: 497460 - DNA, 120 bp, Artificial Sequence
  ENSG00000163508_0 (sequence is synthesized)
tttccttccggaaaggacgctggattcagggcgcgccagtacgcgcagtagcggcccgcgagtcggcaggtgggtagccccggcgcgggaggaaggggaagttaccttcccctcggaaga

SEQ ID NO: 497461 - DNA, 120 bp, Artificial Sequence
  ENSG00000163508_1 (sequence is synthesized)
gggcgctggctcccccatcctgcctttataataaggccaccggaggagaggaagcagccagctgccgtctgcgctttgcaaagcatgcagttaggggagcagctcttggtgagctcagtg

SEQ ID NO: 497462 - DNA, 120 bp, Artificial Sequence
  ENSG00000163508_2 (sequence is synthesized)
aacctgcctggcgcgcacttctacccgctggagagtgcgcgaggcggcagcggcgggagcgctggccacctccccagcgcggccccctctcctcagaagttggacttagacaaagcgtcc

SEQ ID NO: 497463 - DNA, 120 bp, Artificial Sequence
  ENSG00000163508_3 (sequence is synthesized)
aagaagttttccggcagtctctcctgcgaggcggtgagcggggagcccgcagccgccagcgcaggggcccccgcggccatgcttagtgacaccgacgccggggacgcatttgccagcgct

SEQ ID NO: 497464 - DNA, 120 bp, Artificial Sequence
  ENSG00000163508_4 (sequence is synthesized)
aagggctccccctgcggggaggaggagctgccctccgccgctgcagccgccgccgccgccgccgccgcggctgcggccactgcgcgctactccatggacagcctgagctccgagcggtac

SEQ ID NO: 497465 - DNA, 120 bp, Artificial Sequence
  ENSG00000163508_5 (sequence is synthesized)
cgctactccatggacagcctgagctccgagcggtactacctccagtcccccggtcctcaggggtcggagctggctgcgccctgctcactcttcccgtaccaggcggcggctggggcgccc

SEQ ID NO: 497466 - DNA, 120 bp, Artificial Sequence
  ENSG00000163508_6 (sequence is synthesized)
cacggacctgtgtacccggctcctaacggggcgcgctacccctacggctccatgctgccccccggcggcttccccgcggctgtgtgcccacccgggagggcgcagttcggcccaggagcc

SEQ ID NO: 497467 - DNA, 120 bp, Artificial Sequence
  ENSG00000163508_7 (sequence is synthesized)
ggtgcgggcagtggcgcgggcggtagcagcggcgggggcggcggcccgggcacctatcagtacagccagggggctccgctctacgggccgtaccctggagccgcagcggcgggatcttgc

SEQ ID NO: 497468 - DNA, 120 bp, Artificial Sequence
  ENSG00000163508_8 (sequence is synthesized)
ggaggactggggggcctgggggttccaggttctggcttccgtgcccacgtctacctgtgcaaccggcctctgtggctcaaattccaccgccaccaaactgagatgatcattacgaaacag

SEQ ID NO: 497469 - DNA, 120 bp, Artificial Sequence
  ENSG00000163508_9 (sequence is synthesized)
ggcaggcgcatgtttcctttcttgagcttcaacataaacggactcaatcccactgcccactacaatgtgttcgtagaggtggtgctggcggaccccaaccactggcgcttccaggggggc

SEQ ID NO: 497470 - DNA, 120 bp, Artificial Sequence
  ENSG00000163508_10 (sequence is synthesized)
aaatgggtgacctgtggcaaagccgacaataacatgcagggcaacaaaatgtatgttcacccagagtctcctaatactggttcccactggatgagacaggagatttcattcgggaaatta

SEQ ID NO: 497471 - DNA, 120 bp, Artificial Sequence
  ENSG00000163508_11 (sequence is synthesized)
aaactcaccaataacaaaggcgcaaataacaacaacacccagatgatagtcttacaatccttacacaaataccaaccccgactgcatattgttgaagttacagaggatggcgtggaggac

SEQ ID NO: 497472 - DNA, 120 bp, Artificial Sequence
  ENSG00000163508_12 (sequence is synthesized)
ttgaatgagccctcaaagacccagacttttaccttctcagaaacgcaattcattgcagtgactgcctaccaaaacaccgatattactcaactaaagattgatcataacccctttgcaaaa

SEQ ID NO: 497473 - DNA, 120 bp, Artificial Sequence
  ENSG00000163508_13 (sequence is synthesized)
ggcttcagagacaactatgattcatcccatcagattgtccctggaggtcggtacggcgttcaatccttcttcccggagccctttgtcaacactttacctcaagcccgctattataatggc

SEQ ID NO: 497474 - DNA, 120 bp, Artificial Sequence
  ENSG00000163508_14 (sequence is synthesized)
cctcctttcaccccaacagagcgaagaggtggccaaccctccccagcggtggcttgtcacgcctgtccagcaacctgggaccaacaaactagacatcagttcctatgaatctgaatatac

SEQ ID NO: 497475 - DNA, 120 bp, Artificial Sequence
  ENSG00000163508_15 (sequence is synthesized)
ttctagcacattgctcccatatggcattaaatccttgccccttcagacatcccatgccctggggtattacccagacccaacctttcctgcaatggcagggtggggaggtcgaggttctta

SEQ ID NO: 497476 - DNA, 120 bp, Artificial Sequence
  ENSG00000163508_16 (sequence is synthesized)
ccagaggaagatggcagctggactaccatggacctccagaacaagccccactgtgttctctgaagatcagctctccaaggagaaagtgaaagaggaaattggctcttcttggatagagac

SEQ ID NO: 497477 - DNA, 120 bp, Artificial Sequence
  ENSG00000163508_17 (sequence is synthesized)
acccccttccatcaaatctctagattccaatgattcaggagtatacaccagtgcttgtaagcgaaggcggctgtctcctagcaactccagtaatgaaaattcaccctccataaagtgtga

SEQ ID NO: 497478 - DNA, 120 bp, Artificial Sequence
  ENSG00000163508_18 (sequence is synthesized)
ggacattaatgctgaagagtatagtaaagacacctcaaaaggcatgggagggtattatgctttttacacaactccctaaagagttattttaacctcaaaaattagctaactttttgcaga

SEQ ID NO: 497479 - DNA, 120 bp, Artificial Sequence
  ENSG00000163508_19 (sequence is synthesized)
tggacttggtggtgttttttgttgtcttctttgcctaggttgccaaaaagatgtttgccttccaccttgatgcatcctgttttgtgcaattctctaaaagaaggtgccaaagctttttga

SEQ ID NO: 497480 - DNA, 120 bp, Artificial Sequence
  ENSG00000163508_20 (sequence is synthesized)
ttgctgcaggtaactgaaacaaacctagcatttttaaaaaataagattaatggaagactttaaggtattttaaaattcgaagggtatccaaggttctgtatttatttattggggagacac

SEQ ID NO: 497481 - DNA, 120 bp, Artificial Sequence
  ENSG00000163508_21 (sequence is synthesized)
taacccttcaaagaagcaggctgtgaacattgggtgcccagtgctatcagatgagttaaaacctttgattctcatttctatttgtaaattcttaagcaaatagaagccgagtgttaaggt

SEQ ID NO: 497482 - DNA, 120 bp, Artificial Sequence
  ENSG00000163508_22 (sequence is synthesized)
gttttgcttctgaaagagggctgtgccttccgtttcagaaggagacattttgctgttacattctgccaggggcaaaagatactaggcccaggagtcaagaaaagcttttgtgaaagtgat

SEQ ID NO: 497483 - DNA, 120 bp, Artificial Sequence
  ENSG00000163508_23 (sequence is synthesized)
agtttcacctgactttgattccttaacccccggcttttggaacaagccatgtttgccctagtccaggattgcctcacttgagacttgctaggcctctgctgtgtgctggggtggccagtg

SEQ ID NO: 497484 - DNA, 120 bp, Artificial Sequence
  ENSG00000163508_24 (sequence is synthesized)
ggactcaggagagagcaagctaaggagtcaccaaaaaaaaaaaaaaaaaaaagggagaatttaaaagtgtacagttgtgtgtttagatacactatagaataatgtggtatatattgtaca

SEQ ID NO: 497485 - DNA, 120 bp, Artificial Sequence
  ENSG00000163508_25 (sequence is synthesized)
aatagtctacataggtgtctgggataatgtaaaactggtgctttggctttgtaaagaatttgcaaatcacttaacagctgcaggggcaaggggagagtttcatcatccccatgatatttg

SEQ ID NO: 497486 - DNA, 120 bp, Artificial Sequence
  ENSG00000163508_26 (sequence is synthesized)
ggaatattctgtttacttcttagatagttaagaatgtattcagctactatgtactaacttgaaccgtgtttaaggaaaactcctatttcatcctcttcttgcgccatcccctctccctaa

SEQ ID NO: 497487 - DNA, 120 bp, Artificial Sequence
  ENSG00000163508_27 (sequence is synthesized)
cttggtaatgtgaagaaactaaaacctgataccacagctcctataggcattttagagatcttggatttttatgtacagtcttagtcatttttaataaatgtggttcagtaagggaacgga

SEQ ID NO: 497488 - DNA, 120 bp, Artificial Sequence
  ENSG00000163508_28 (sequence is synthesized)
ttccaagtggtcaacttgaccgatgctttggcaattgaaaaagggcagaaaggcgcgggctagtgggtggatggggacaaagatctaagtcaccttcttccagcgtgtgagcctgggagg

SEQ ID NO: 497489 - DNA, 120 bp, Artificial Sequence
  ENSG00000163508_29 (sequence is synthesized)
agggtgggggtcctgaggagcaagaggtacgaggaaggaaaaggagagggcttctgggttagtttccacctcctgctttccaactcacggcgctttccttccggaaaggacgctggattc

SEQ ID NO: 497490 - DNA, 120 bp, Artificial Sequence
  ENSG00000163510_0 (sequence is synthesized)
aacttctcttttttgtcgccattttggcaacaagacagtgtgcctggatcgactactttgactctggtattatgatatggtatttgaaataaattaaagggataacgtgtcaagccaatt

SEQ ID NO: 497491 - DNA, 120 bp, Artificial Sequence
  ENSG00000163510_1 (sequence is synthesized)
gagcgtcaagtttttaaatatttcactattcgccttcttcctaccgtcggtgctcgggaagaggaagtgacgtacgtccggtgtaatggcggcgcggtggagctctaggtaattatcgaa

SEQ ID NO: 497492 - DNA, 120 bp, Artificial Sequence
  ENSG00000163510_2 (sequence is synthesized)
ctccgtggagtccccgcaggcagagacgcggagtgggggtggcgggtcgccggatcgggtgggaagtaaaagacccccaggagtgggtgcgggctcactgatacggctgtgagcggcatt

SEQ ID NO: 497493 - DNA, 120 bp, Artificial Sequence
  ENSG00000163510_3 (sequence is synthesized)
ggagtgtgcgtgggtcttctcgctacgctcgggcccgcaagaggggtgtgagagcggctaggtccaagcaggtgatgtttgcagacagaaaaagtaaactgtcaaggaattcagagcatt

SEQ ID NO: 497494 - DNA, 120 bp, Artificial Sequence
  ENSG00000163510_4 (sequence is synthesized)
gggtacttgttatttggaccagtttgaagcatctttgatttattggaccaactggcaacagaaaatgaaaagtagtgtggcacagataaaaccttcttctggtcatgacagaagggaaaa

SEQ ID NO: 497495 - DNA, 120 bp, Artificial Sequence
  ENSG00000163510_5 (sequence is synthesized)
ccttaattcatatcagaggaactcctctccagaagacagatatgaagaacaagaacgatccccccgggatagagattactttgattacagcagatcagactatgagcattcaagaagagg

SEQ ID NO: 497496 - DNA, 120 bp, Artificial Sequence
  ENSG00000163510_6 (sequence is synthesized)
acgttcttatgatagtagcatggagtcacgaaacagggaccgagaaaaacgcagagaaagagaaagagatacggatcggaaaaggtctcggaaatccccatctcctgggaggagaaaccc

SEQ ID NO: 497497 - DNA, 120 bp, Artificial Sequence
  ENSG00000163510_7 (sequence is synthesized)
agaaacatcagtaactcagagttcctctgctcaggatgaacctgctacaaagaaaaagaaagatgagctggatcctcttcttactcgcactggtggagcatatattccccctgcaaagct

SEQ ID NO: 497498 - DNA, 120 bp, Artificial Sequence
  ENSG00000163510_8 (sequence is synthesized)
caggatgatgcaggaacagattacagataaaaacagcttagcataccagaggatgagttgggaggccctgaagaagtcaattaatggccttatcaacaaagtcaacatttccaacataag

SEQ ID NO: 497499 - DNA, 120 bp, Artificial Sequence
  ENSG00000163510_9 (sequence is synthesized)
tattattattcaagagcttcttcaagaaaatatagttagaggaagaggactgctgtccaggtctgttttgcaagcacagagtgcttctccaatcttcacccatgtttatgcagcattagt

SEQ ID NO: 497500 - DNA, 120 bp, Artificial Sequence
  ENSG00000163510_10 (sequence is synthesized)
ggcaattatcaactcaaaatttccacaaattggagaattaatcctcaaaaggttaattcttaattttcgaaaaggctatcgaagaaatgacaagcaactttgcctgactgcttcaaaatt

SEQ ID NO: 497501 - DNA, 120 bp, Artificial Sequence
  ENSG00000163510_11 (sequence is synthesized)
tgtggcgcatcttattaaccaaaatgtggcacacgaagtattatgcttagagatgctcactttgctcctggaaagaccaacagatgatagcgttgaagtagctattggttttcttaagga

SEQ ID NO: 497502 - DNA, 120 bp, Artificial Sequence
  ENSG00000163510_12 (sequence is synthesized)
atgtggcctcaaattaacacaagtgtcaccaagaggaatcaatgctatatttgaacgccttcgaaacattctgcatgagtctgaaattgacaaaagagttcaatatatgattgaagtgat

SEQ ID NO: 497503 - DNA, 120 bp, Artificial Sequence
  ENSG00000163510_13 (sequence is synthesized)
gtttgctgtacggaaagatggattcaaggaccaccccattatcctagaaggtcttgatttggtggaagaagatgatcaattcactcatatgctccctctggaggatgactataatccaga

SEQ ID NO: 497504 - DNA, 120 bp, Artificial Sequence
  ENSG00000163510_14 (sequence is synthesized)
atgaagagaagtacaaagctattaagaaagaaattcttgatgagggagatactgactcgaacacagaccaggatgctgggagtagtgaagaggacgaggaagaagaagaggaagagggag

SEQ ID NO: 497505 - DNA, 120 bp, Artificial Sequence
  ENSG00000163510_15 (sequence is synthesized)
aagaagatgaagaaggacaaaaagtaactattcatgacaaaacagaaattaacctggtctcatttcgtcgtacaatttatcttgctattcagtcaagtttagattttgaagaatgtgctc

SEQ ID NO: 497506 - DNA, 120 bp, Artificial Sequence
  ENSG00000163510_16 (sequence is synthesized)
acaaattgctgaaaatggagtttcctgaaagccaaacaaaagaactctgcaacatgatacttgattgctgtgcccaacagaggacatacgaaaaattttttggcttattagctgggcgat

SEQ ID NO: 497507 - DNA, 120 bp, Artificial Sequence
  ENSG00000163510_17 (sequence is synthesized)
tttgcatgctaaagaaagagtacatggaatcctttgaaggtatattcaaagaacagtatgataccatccatcgcttggaaacaaacaagttgcgaaatgttgctaagatgtttgctcacc

SEQ ID NO: 497508 - DNA, 120 bp, Artificial Sequence
  ENSG00000163510_18 (sequence is synthesized)
ttttatacactgattcacttccatggagtgttcttgaatgtataaaactgagtgaagaaaccactacatcatccagtagaatttttgtcaaaatatttttccaggaactgtgtgaataca

SEQ ID NO: 497509 - DNA, 120 bp, Artificial Sequence
  ENSG00000163510_19 (sequence is synthesized)
tgggtcttcctaaacttaatgcaagattaaaggatgaaactctgcagccattctttgaaggattattaccccgagataatccaagaaacactcggtttgccatcaacttctttacttcta

SEQ ID NO: 497510 - DNA, 120 bp, Artificial Sequence
  ENSG00000163510_20 (sequence is synthesized)
taggtcttggaggtttaacggatgaactgcgggagcatctcaaaaatacaccaaaggtcattgtggcgcagaaaccagatgttgagcaaaataaatcctccccatcctcttcctcttcag

SEQ ID NO: 497511 - DNA, 120 bp, Artificial Sequence
  ENSG00000163510_21 (sequence is synthesized)
cgtcctcctcttcagagtctgactcatccgactctgattctgacagcagtgatagcagttcagagtcttccagtgaagagagcgactcttcatccatcagtagtcatagctctgcctcag

SEQ ID NO: 497512 - DNA, 120 bp, Artificial Sequence
  ENSG00000163510_22 (sequence is synthesized)
ctaatgatgtaagaaagaagggacatgggaagaccagaagtaaagaggtagataaattgatcagaaaccagcaaacaaatgataggaaacaaaaagaaagaagacaagaacacgggcacc

SEQ ID NO: 497513 - DNA, 120 bp, Artificial Sequence
  ENSG00000163510_23 (sequence is synthesized)
aggaaacaaggactgagagagaaagaaggtcagaaaaacacagagatcaaaattcaagtggttcaaattggagagatcctataacaaagtacacatcagacaaagatgttccttctgaac

SEQ ID NO: 497514 - DNA, 120 bp, Artificial Sequence
  ENSG00000163510_24 (sequence is synthesized)
gaaataactacagtagagttgcgaatgacagagaccaagaaatgcatatagatttggaaaataagcatggtgatcccaaaaagaagagaggagagagaagaaattctttttctgaaaatg

SEQ ID NO: 497515 - DNA, 120 bp, Artificial Sequence
  ENSG00000163510_25 (sequence is synthesized)
agaagcatacacaccgaattaaagacagtgaaaatttcagaagaaaagatagatcaaagtcaaaggaaatgaatagaaagcactcaggctcaagaagtgatgaagatagatatcaaaatg

SEQ ID NO: 497516 - DNA, 120 bp, Artificial Sequence
  ENSG00000163510_26 (sequence is synthesized)
gtgccgagagacgatgggaaaaatctagcagatactctgaacaatccagagaatcaaagaaaaatcaggaccggcgaagagaaaagtctccagcaaaacaaaaataattctacaaaatga

SEQ ID NO: 497517 - DNA, 120 bp, Artificial Sequence
  ENSG00000163510_27 (sequence is synthesized)
cataaactggacatgccttatattcagttgaaacaaattattttttactttgacgaactttatagagaattcttgtataaagtattggtttgtatttgtaaatttaaaaaatgttttcat

SEQ ID NO: 497518 - DNA, 120 bp, Artificial Sequence
  ENSG00000163510_28 (sequence is synthesized)
tttaacatgttttataattgatacatctcaaggccctacccataaaattatttgaaaactttcaccagaaagggatgtaagtctcgcttatattttgtgaataaaatgatcaaaagctca

SEQ ID NO: 497519 - DNA, 120 bp, Artificial Sequence
  ENSG00000163512_0 (sequence is synthesized)
ctccttccagaacgtcccgggctcctgccgagtcagaagaaatgggactccctccgcgacgtgcccggagcagctcccttcgctgtggaagcggcggtgtcttcgaagaaaccggaagcc

SEQ ID NO: 497520 - DNA, 120 bp, Artificial Sequence
  ENSG00000163512_1 (sequence is synthesized)
cgtggtgacccctggcgacccggtttgttttcggtccgtttccaaacactaaggaatcgaaactcggcggccttgggggcggccctacgtagcctggcttctggttgtcatggatgcact

SEQ ID NO: 497521 - DNA, 120 bp, Artificial Sequence
  ENSG00000163512_2 (sequence is synthesized)
ggtagaagatgatatctgtattctgaatcatgaaaaagcccataagagagatacagtgactccagtttcaatatattcaggagatgaatctgttgcttcccattttgctcttgtcactgc

SEQ ID NO: 497522 - DNA, 120 bp, Artificial Sequence
  ENSG00000163512_3 (sequence is synthesized)
atatgaagacatcaaaaaacgacttaaggattcagagaaagagaactctttgttaaagaagagaataagatttttggaagaaaagctaatagctcgatttgaagaagaaacaagttccgt

SEQ ID NO: 497523 - DNA, 120 bp, Artificial Sequence
  ENSG00000163512_4 (sequence is synthesized)
gggacgagaacaagtaaataaggcctatcatgcatatcgagaggtttgcattgatagagataatttgaagagcaaactggacaaaatgaataaagacaactctgaatctttgaaagtatt

SEQ ID NO: 497524 - DNA, 120 bp, Artificial Sequence
  ENSG00000163512_5 (sequence is synthesized)
gaatgagcagctacaatctaaagaagtagaactcctccagctgaggacagaggtggaaactcagcaggtgatgaggaatttaaatccaccttcatcaaactgggaggtggaaaagttgag

SEQ ID NO: 497525 - DNA, 120 bp, Artificial Sequence
  ENSG00000163512_6 (sequence is synthesized)
ctgtgacctgaagatccatggtttggaacaagagctggaactgatgaggaaagaatgtagcgatctcaaaatagaactacagaaagccaaacaaacggatccatatcaggaagacaatct

SEQ ID NO: 497526 - DNA, 120 bp, Artificial Sequence
  ENSG00000163512_7 (sequence is synthesized)
gaagagcagagatctccaaaaactaagcatttcaagtgataatatgcagcatgcatactgggaactgaagagagaaatgtctaatttacatctggtgactcaagtacaagctgaactact

SEQ ID NO: 497527 - DNA, 120 bp, Artificial Sequence
  ENSG00000163512_8 (sequence is synthesized)
aagaaaactgaaaacctcaactgcaatcaagaaagcctgtgcccctgtaggatgcagtgaagaccttggaagagacagcacaaaactgcacttgatgaattttactgcaacatacacaag

SEQ ID NO: 497528 - DNA, 120 bp, Artificial Sequence
  ENSG00000163512_9 (sequence is synthesized)
acatccccctctcttaccaaatggcaaagctctttgtcataccacatcttcccctttaccaggagatgtaaaggttttatcagagaaagcaatcctccaatcatggacagacaatgagag

SEQ ID NO: 497529 - DNA, 120 bp, Artificial Sequence
  ENSG00000163512_10 (sequence is synthesized)
atccattcctaatgatggtacatgctttcaggaacacagttcttatggcagaaattctctggaagacaattcctgggtatttccaagtcctcctaaatcaagtgagacagcatttgggga

SEQ ID NO: 497530 - DNA, 120 bp, Artificial Sequence
  ENSG00000163512_11 (sequence is synthesized)
aactaaaactaaaactttgcctttacccaaccttccaccactgcattacttggatcaacataatcagaactgcctttataagaattaatttggaagagattcacgatttcaccatgagga

SEQ ID NO: 497531 - DNA, 120 bp, Artificial Sequence
  ENSG00000163512_12 (sequence is synthesized)
cacttatctctttcagtggtcctcccaagaaattatttaacaaactgaaaggagattttgattaaaattttgcagaggtcttcagtatctatatttgaacacactgtacaatagtacaaa

SEQ ID NO: 497532 - DNA, 120 bp, Artificial Sequence
  ENSG00000163512_13 (sequence is synthesized)
aaccaacatagttggttttctagtatgaaagagcaccctctagctccatattctaagaatctgaaatatgctactatactaattaataagtaaacttaaggtgtttaaaaaactctgcct

SEQ ID NO: 497533 - DNA, 120 bp, Artificial Sequence
  ENSG00000163512_14 (sequence is synthesized)
tctatattaattgtaaaattttgcctctcagaagaatggaattggagattgtagacgtggttttacaaaatgtgaaatgtctaaatatctgttcataaaaataaaaggaaaacatgtttc

SEQ ID NO: 497534 - DNA, 120 bp, Artificial Sequence
  ENSG00000163512_15 (sequence is synthesized)
ttcaaattgcataatggaacaaatggcaatgtgagtaggttacatttctgttgttataatgcgtaaagatattgaaaatataatgaaataaaagcatcttaggttataccatctttatat

SEQ ID NO: 497535 - DNA, 120 bp, Artificial Sequence
  ENSG00000163512_16 (sequence is synthesized)
gctattgcgtttcaatatttaagatttaaagtgattttttggtcacagtgttttgttgataaaatttttttagaattgaagtttgaattctaagacttgaaacaacctgatcactgaagc

SEQ ID NO: 497536 - DNA, 120 bp, Artificial Sequence
  ENSG00000163512_17 (sequence is synthesized)
caactttgtcccagcacattccttaagtcctaattgggaaaaaaaaaaaaaaaaatgaaatagttgaaaaactctggggtgtaaacaaatgattgtaaccctacacactattcaataagt

SEQ ID NO: 497537 - DNA, 120 bp, Artificial Sequence
  ENSG00000163512_18 (sequence is synthesized)
aagtcattttcttcaaagagactacagctagctgcacattgtgtagagcagcttctaaattgttagactttgtgttgaaatgtaatattctatttattgagaaagtgatttaaaattatt

SEQ ID NO: 497538 - DNA, 120 bp, Artificial Sequence
  ENSG00000163512_19 (sequence is synthesized)
atttttaatcatagaaatcagggtttgggctgtattgatattgtcgatcatgaaatgtccacacttattctaagtggccaattatttggaaataaagaaggaaataaagatggcttcaca

SEQ ID NO: 497539 - DNA, 120 bp, Artificial Sequence
  ENSG00000163512_20 (sequence is synthesized)
tggaaatttaagttctttcagggtggagatttacttggttcatacaccttttgcctgaattaaagtatttcatgtaggaggacttttatcctttttgatagacagtttcatatatcttga

SEQ ID NO: 497540 - DNA, 120 bp, Artificial Sequence
  ENSG00000163512_21 (sequence is synthesized)
actcaatatctcagatctcttctactgtattactgaatagcatacatacatagacaatgttcgccattcactagatatttttttctattatcttacacttattcaagcttgtctgtgatt

SEQ ID NO: 497541 - DNA, 120 bp, Artificial Sequence
  ENSG00000163512_22 (sequence is synthesized)
aatggaattggtgtcagatgctggaatttattctgaccaatgaacacagctgactcaggggagtacaatctcctgccaagtaatagaaccaaacccaatatgcataaaagaaatacaata

SEQ ID NO: 497542 - DNA, 120 bp, Artificial Sequence
  ENSG00000163512_23 (sequence is synthesized)
ctccaggctttagctgaaggaagcaactacctgtgtaataacaaagcagcaaaaactatttctcatgtggctgcataggctgtatattatatctgatctctaatgtagcttactggtttg

SEQ ID NO: 497543 - DNA, 120 bp, Artificial Sequence
  ENSG00000163512_24 (sequence is synthesized)
ccttttttaaaaccaaaattggaaattttcctttgtaaagaaaaaaagtcttatgagataattgcttgattaatgttttgaacaataccaagaaattgtttaattaaaataaatattttt

SEQ ID NO: 497544 - DNA, 120 bp, Artificial Sequence
  ENSG00000163512_25 (sequence is synthesized)
gtttgaaattgaagtggatgtgaaatattgtccttgcctatagatctcaaaatctagtactaattgttggttgttaatatgattcatacaatagacatttgttaaaccagcttttgagtg

SEQ ID NO: 497545 - DNA, 120 bp, Artificial Sequence
  ENSG00000163512_26 (sequence is synthesized)
gagaaaattattttccatttaaacagtacagtgatgatagctatcaaacaggtatactaaaaagtcagtgactgtgacagtttaaagtgttagacaaatgatgtataaggttctttagta

SEQ ID NO: 497546 - DNA, 120 bp, Artificial Sequence
  ENSG00000163512_27 (sequence is synthesized)
aggaaagattagccaaaaattttttacccagctagaagcttttaaatctacacttgatatctctgttctaggtaaaattcaaacaaccaaaaaacagtggcccatctgtagcttatgaat

SEQ ID NO: 497547 - DNA, 120 bp, Artificial Sequence
  ENSG00000163512_28 (sequence is synthesized)
ctatttaaaattgaatattttatgttgacttctttcatactagctgaaacttgctctaaagagcttcctttggaatctttagatttctttttataaggttcaattcagtacatccataaa

SEQ ID NO: 497548 - DNA, 120 bp, Artificial Sequence
  ENSG00000163512_29 (sequence is synthesized)
tcgacagaatgaagaaaacataacaaaaagccacctattccttcctcttgctcccttattagctaaagtaaaatttacatctgtaagacttactgagttgctgccaaaatggaactgaat

SEQ ID NO: 497549 - DNA, 120 bp, Artificial Sequence
  ENSG00000163512_30 (sequence is synthesized)
tcttaaaagcaggaacatgcctatgtgaaacattagaaaaccaaaataaatgggaaaattcagacttgaagagctgaatcatgtgacaacaaagtactgatcttaattcagaaaggctac

SEQ ID NO: 497550 - DNA, 120 bp, Artificial Sequence
  ENSG00000163512_31 (sequence is synthesized)
ttggagaaggtgtatcttaaggggtaaaaaacctgtgggttaccacatattaacagggaataatatcaacagaggcacccataagcaagcaagacacaactgagacagatgtaccaggtg

SEQ ID NO: 497551 - DNA, 120 bp, Artificial Sequence
  ENSG00000163512_32 (sequence is synthesized)
aaaaaaatcttcagtatggatacacatgggtattctgaaggctacaatgaatggtttagtctttgacataaggaggatgaacatattatttatactgtgtaatctaatctggcttctatg

SEQ ID NO: 497552 - DNA, 120 bp, Artificial Sequence
  ENSG00000163512_33 (sequence is synthesized)
gggaaagcaacatgtacataagtgaattttctacatgaagtgggctacttctgattttaatcaaagctataaaatagattgtatatttcactagcttcttaaagtaactcttccattttc

SEQ ID NO: 497553 - DNA, 120 bp, Artificial Sequence
  ENSG00000163512_34 (sequence is synthesized)
atttatctctaaaaacagttaacttcctgtgctctaggaaatgcaccaataccaaaggtcaatgtggaaatatgggcatgtttgcccctatgctgtgtggtctctagatttctatatttg

SEQ ID NO: 497554 - DNA, 120 bp, Artificial Sequence
  ENSG00000163512_35 (sequence is synthesized)
ctttgcttttgtctgctctagtaatctccctccttttgatctgtggcctgggaaaatgtggtttctttgtatttcaaataaaagtaaaatagttttttgagtggttcactcaagagtaaa

SEQ ID NO: 497555 - DNA, 120 bp, Artificial Sequence
  ENSG00000163512_36 (sequence is synthesized)
tcatttttacttaagtaacttcaattctgtgttttaagctatctaataattgttgtttctactatgttaagatagcctctctacattgttaccctccatccaataaaaaatactgatctg

SEQ ID NO: 497556 - DNA, 120 bp, Artificial Sequence
  ENSG00000163512_37 (sequence is synthesized)
ctgggaacccacggtgtaaaggacaagtaaagactggattaaaattaaatctacaaaatactgtgacagagctactctcatgaactactctggtccctccttctgaccactggctgccct

SEQ ID NO: 497557 - DNA, 120 bp, Artificial Sequence
  ENSG00000163512_38 (sequence is synthesized)
agttccagactctgccacccctcatctactgtaagtaagcaactatttccaagtgagatcttaaacatcgtccttacaaagaagctgtaggcaaaaaaatgaaaataaaaataaattgtg

SEQ ID NO: 497558 - DNA, 120 bp, Artificial Sequence
  ENSG00000163512_39 (sequence is synthesized)
tgcttattttagtgtagttgtctttagaaattctaaaacaagattgctagatttctcattctccttagcatagatatttgaaagtattaataattactgtttttaaaaaactattgatca

SEQ ID NO: 497559 - DNA, 120 bp, Artificial Sequence
  ENSG00000163512_40 (sequence is synthesized)
tatatgttttatgttagtttttctattatctacattttaccagaataacctatttttaagaattgcagtcaatgtagaaggaaaagataacaatttcagtgtccatcctttttgtagtga

SEQ ID NO: 497560 - DNA, 120 bp, Artificial Sequence
  ENSG00000163512_41 (sequence is synthesized)
cacagtttctccttccatcatgtttttcaggaacctaactctcagagaagtaatgctgaacctaacagcaaaagtagatgttcagagcaagtcagtttttcgttaaacaatgaagttgtc

SEQ ID NO: 497561 - DNA, 120 bp, Artificial Sequence
  ENSG00000163512_42 (sequence is synthesized)
ctgtagcacagcctggagtgcagtggcgcaatcatgggatagcatgaattttgaggactgttccctcttcgcataagaatagaagtagccatcagagttcatatactttttcaacccttt

SEQ ID NO: 497562 - DNA, 120 bp, Artificial Sequence
  ENSG00000163512_43 (sequence is synthesized)
ctttgactagggagcggcccactcctgggcatccctttccccagtcacccccacacccagctgtccacaccctttcccctgtcaccctcacccccagctgtccaggcccttcttggtcat

SEQ ID NO: 497563 - DNA, 120 bp, Artificial Sequence
  ENSG00000163512_44 (sequence is synthesized)
tcacttctctaattactccttttcttttcgtactcttactggggcgccttcagttttttttcattcattgagactgctaaatgcttctttccgatacaaattatcggaaagaaaagaggg

SEQ ID NO: 497564 - DNA, 120 bp, Artificial Sequence
  ENSG00000163512_45 (sequence is synthesized)
ctcatccacacttccaatcactttccggagtgcttcccctccctccggcccgtgctggtcccgacggcgggcctgggtctcgcgcgcgtattgctgggtaacgggccttctctcgcgtcg

SEQ ID NO: 497565 - DNA, 120 bp, Artificial Sequence
  ENSG00000163512_46 (sequence is synthesized)
caactgcaatcaagaaaggcaagtcactgtttaccggaaaccactgattccagccaaactgcctgaagagcaactagctgtcatatcttatcaaaatctcatcaaatgagagattgataa

SEQ ID NO: 497566 - DNA, 120 bp, Artificial Sequence
  ENSG00000163512_47 (sequence is synthesized)
gccaaagtatatatagtacattcgcagcctacccattctctgctttggcttcagtctcatactggtcaacttcacacataaaggtgttgctgatgtgttttttcttcagtactgtattct

SEQ ID NO: 497567 - DNA, 120 bp, Artificial Sequence
  ENSG00000163512_48 (sequence is synthesized)
tttccccttgtggcttttctcagccaagtgttgcttatgtgtataagactgaggtgttaagtttgctctagttgaccttttaccacagctacttcatatatttgaaaaaaaaaaaaaaaa

SEQ ID NO: 497568 - DNA, 120 bp, Artificial Sequence
  ENSG00000163513_0 (sequence is synthesized)
ggagagggagaaggctctcgggcggagagaggtcctgcccagctgttggcgaggagtttcctgtttcccccgcagcgctgagttgaagttgagtgagtcactcgcgcgcacggagcgacg

SEQ ID NO: 497569 - DNA, 120 bp, Artificial Sequence
  ENSG00000163513_1 (sequence is synthesized)
gtcactcgcgcgcacggagcgacgacacccccgcgcgtgcacccgctcgggacaggagccggactcctgtgcagcttccctcggccgccgggggcctccccgcgcctcgccggcctccag

SEQ ID NO: 497570 - DNA, 120 bp, Artificial Sequence
  ENSG00000163513_2 (sequence is synthesized)
cggggtccggagagggcgcggcgcggaggcgcagccaggggtccgggaaggcgccgtccgctgcgctgggggctcggtctatgacgagcagcggggtctgccatgggtcgggggctgctc

SEQ ID NO: 497571 - DNA, 120 bp, Artificial Sequence
  ENSG00000163513_3 (sequence is synthesized)
atgacgagcagcggggtctgccatgggtcgggggctgctcaggggcctgtggccgctgcacatcgtcctgtggacgcgtatcgccagcacgatcccaccgcacgttcagaagtcggttaa

SEQ ID NO: 497572 - DNA, 120 bp, Artificial Sequence
  ENSG00000163513_4 (sequence is synthesized)
taacgacatgatagtcactgacaacaacggtgcagtcaagtttccacaactgtgtaaattttgtgatgtgagattttccacctgtgacaaccagaaatcctgcatgagcaactgcagcat

SEQ ID NO: 497573 - DNA, 120 bp, Artificial Sequence
  ENSG00000163513_5 (sequence is synthesized)
cacctccatctgtgagaagccacaggaagtctgtgtggctgtatggagaaagaatgacgagaacataacactagagacagtttgccatgaccccaagctcccctaccatgactttattct

SEQ ID NO: 497574 - DNA, 120 bp, Artificial Sequence
  ENSG00000163513_6 (sequence is synthesized)
ggaagatgctgcttctccaaagtgcattatgaaggaaaaaaaaaagcctggtgagactttcttcatgtgttcctgtagctctgatgagtgcaatgacaacatcatcttctcagaagaata

SEQ ID NO: 497575 - DNA, 120 bp, Artificial Sequence
  ENSG00000163513_7 (sequence is synthesized)
taacaccagcaatcctgacttgttgctagtcatatttcaagtgacaggcatcagcctcctgccaccactgggagttgccatatctgtcatcatcatcttctactgctaccgcgttaaccg

SEQ ID NO: 497576 - DNA, 120 bp, Artificial Sequence
  ENSG00000163513_8 (sequence is synthesized)
gcagcagaagctgagttcaacctgggaaaccggcaagacgcggaagctcatggagttcagcgagcactgtgccatcatcctggaagatgaccgctctgacatcagctccacgtgtgccaa

SEQ ID NO: 497577 - DNA, 120 bp, Artificial Sequence
  ENSG00000163513_9 (sequence is synthesized)
caacatcaaccacaacacagagctgctgcccattgagctggacaccctggtggggaaaggtcgctttgctgaggtctataaggccaagctgaagcagaacacttcagagcagtttgagac

SEQ ID NO: 497578 - DNA, 120 bp, Artificial Sequence
  ENSG00000163513_10 (sequence is synthesized)
agtggcagtcaagatctttccctatgaggagtatgcctcttggaagacagagaaggacatcttctcagacatcaatctgaagcatgagaacatactccagttcctgacggctgaggagcg

SEQ ID NO: 497579 - DNA, 120 bp, Artificial Sequence
  ENSG00000163513_11 (sequence is synthesized)
gaagacggagttggggaaacaatactggctgatcaccgccttccacgccaagggcaacctacaggagtacctgacgcggcatgtcatcagctgggaggacctgcgcaagctgggcagctc

SEQ ID NO: 497580 - DNA, 120 bp, Artificial Sequence
  ENSG00000163513_12 (sequence is synthesized)
cctcgcccgggggattgctcacctccacagtgatcacactccatgtgggaggcccaagatgcccatcgtgcacagggacctcaagagctccaatatcctcgtgaagaacgacctaacctg

SEQ ID NO: 497581 - DNA, 120 bp, Artificial Sequence
  ENSG00000163513_13 (sequence is synthesized)
ctgcctgtgtgactttgggctttccctgcgtctggaccctactctgtctgtggatgacctggctaacagtgggcaggtgggaactgcaagatacatggctccagaagtcctagaatccag

SEQ ID NO: 497582 - DNA, 120 bp, Artificial Sequence
  ENSG00000163513_14 (sequence is synthesized)
gatgaatttggagaatgttgagtccttcaagcagaccgatgtctactccatggctctggtgctctgggaaatgacatctcgctgtaatgcagtgggagaagtaaaagattatgagcctcc

SEQ ID NO: 497583 - DNA, 120 bp, Artificial Sequence
  ENSG00000163513_15 (sequence is synthesized)
atttggttccaaggtgcgggagcacccctgtgtcgaaagcatgaaggacaacgtgttgagagatcgagggcgaccagaaattcccagcttctggctcaaccaccagggcatccagatggt

SEQ ID NO: 497584 - DNA, 120 bp, Artificial Sequence
  ENSG00000163513_16 (sequence is synthesized)
gtgtgagacgttgactgagtgctgggaccacgacccagaggcccgtctcacagcccagtgtgtggcagaacgcttcagtgagctggagcatctggacaggctctcggggaggagctgctc

SEQ ID NO: 497585 - DNA, 120 bp, Artificial Sequence
  ENSG00000163513_17 (sequence is synthesized)
ggaggagaagattcctgaagacggctccctaaacactaccaaatagctcttctggggcaggctgggccatgtccaaagaggctgcccctctcaccaaagaacagaggcagcaggaagctg

SEQ ID NO: 497586 - DNA, 120 bp, Artificial Sequence
  ENSG00000163513_18 (sequence is synthesized)
cccctgaactgatgcttcctggaaaaccaagggggtcactcccctccctgtaagctgtggggataagcagaaacaacagcagcagggagtgggtgacatagagcattctatgcctttgac

SEQ ID NO: 497587 - DNA, 120 bp, Artificial Sequence
  ENSG00000163513_19 (sequence is synthesized)
aatatgaatagctatgttttatatatatatatatatatctatatatgtctatagctctatatatatagccataccttgaaaagagacaaggaaaaacatcaaatattcccaggaaattgg

SEQ ID NO: 497588 - DNA, 120 bp, Artificial Sequence
  ENSG00000163513_20 (sequence is synthesized)
gacaaggaaaaacatcaaatattcccaggaaattggttttattggagaactccagaaccaagcagagaaggaagggacccatgacagcattagcatttgacaatcacacatgcagtggtt

SEQ ID NO: 497589 - DNA, 120 bp, Artificial Sequence
  ENSG00000163513_21 (sequence is synthesized)
ctctgactgtaaaacagtgaactttgcatgaggaaagaggctccatgtctcacagccagctatgaccacattgcacttgcttttgcaaaataatcattccctgcctagcacttctcttct

SEQ ID NO: 497590 - DNA, 120 bp, Artificial Sequence
  ENSG00000163513_22 (sequence is synthesized)
ggccatggaactaagtacagtggcactgtttgaggaccagtgttcccggggttcctgtgtgcccttatttctcctggacttttcatttaagctccaagccccaaatctggggggctagtt

SEQ ID NO: 497591 - DNA, 120 bp, Artificial Sequence
  ENSG00000163513_23 (sequence is synthesized)
tagaaactctccctcaacctagtttagaaactctaccccatctttaataccttgaatgttttgaaccccactttttaccttcatgggttgcagaaaaatcagaacagatgtccccatcca

SEQ ID NO: 497592 - DNA, 120 bp, Artificial Sequence
  ENSG00000163513_24 (sequence is synthesized)
tgcgattgccccaccatctactaatgaaaaattgttctttttttcatctttcccctgcacttatgttactattctctgctcccagccttcatccttttctaaaaaggagcaaattctcac

SEQ ID NO: 497593 - DNA, 120 bp, Artificial Sequence
  ENSG00000163513_25 (sequence is synthesized)
tctaggctttatcgtgtttactttttcattacacttgacttgattttctagttttctatacaaacaccaatgggttccatctttctgggctcctgattgctcaagcacagtttggcctga

SEQ ID NO: 497594 - DNA, 120 bp, Artificial Sequence
  ENSG00000163513_26 (sequence is synthesized)
tgaagaggatttcaactacacaatactatcattgtcaggactatgacctcaggcactctaaacatatgttttgtttggtcagcacagcgtttcaaaaagtgaagccactttataaatatt

SEQ ID NO: 497595 - DNA, 120 bp, Artificial Sequence
  ENSG00000163513_27 (sequence is synthesized)
tggagattttgcaggaaaatctggatccccaggtaaggatagcagatggttttcagttatctccagtccacgttcacaaaatgtgaaggtgtggagacacttacaaagctgcctcacttc

SEQ ID NO: 497596 - DNA, 120 bp, Artificial Sequence
  ENSG00000163513_28 (sequence is synthesized)
tcactgtaaacattagctctttccactgcctacctggaccccagtctaggaattaaatctgcacctaaccaaggtcccttgtaagaaatgtccattcaagcagtcattctctgggtatat

SEQ ID NO: 497597 - DNA, 120 bp, Artificial Sequence
  ENSG00000163513_29 (sequence is synthesized)
aatatgattttgactaccttatctggtgttaagatttgaagttggccttttattggactaaaggggaactcctttaagggtctcagttagcccaagtttcttttgcttatatgttaatag

SEQ ID NO: 497598 - DNA, 120 bp, Artificial Sequence
  ENSG00000163513_30 (sequence is synthesized)
ttttaccctctgcattggagagaggagtgctttactccaagaagctttcctcatggttaccgttctctccatcatgccagccttctcaacctttgcagaaattactagagaggatttgaa

SEQ ID NO: 497599 - DNA, 120 bp, Artificial Sequence
  ENSG00000163513_31 (sequence is synthesized)
tgtgggacacaaaggtcccatttgcagttagaaaatttgtgtccacaaggacaagaacaaagtatgagctttaaaactccataggaaacttgttaatcaacaaagaagtgttaatgctgc

SEQ ID NO: 497600 - DNA, 120 bp, Artificial Sequence
  ENSG00000163513_32 (sequence is synthesized)
aagtaatctcttttttaaaactttttgaagctacttattttcagccaaataggaatattagagagggactggtagtgagaatatcagctctgtttggatggtggaaggtctcattttatt

SEQ ID NO: 497601 - DNA, 120 bp, Artificial Sequence
  ENSG00000163513_33 (sequence is synthesized)
gagatttttaagatacatgcaaaggtttggaaatagaacctctaggcaccctcctcagtgtgggtgggctgagagttaaagacagtgtggctgcagtagcatagaggcgcctagaaattc

SEQ ID NO: 497602 - DNA, 120 bp, Artificial Sequence
  ENSG00000163513_34 (sequence is synthesized)
cacttgcaccgtagggcatgctgataccatcccaatagctgttgcccattgacctctagtggtgagtttctagaatactggtccattcatgagatattcaagattcaagagtattctcac

SEQ ID NO: 497603 - DNA, 120 bp, Artificial Sequence
  ENSG00000163513_35 (sequence is synthesized)
ttctgggttatcagcataaactggaatgtagtgtcagaggatactgtggcttgttttgtttatgtttttttttcttattcaagaaaaaagaccaaggaataacattctgtagttcctaaa

SEQ ID NO: 497604 - DNA, 120 bp, Artificial Sequence
  ENSG00000163513_36 (sequence is synthesized)
aatactgacttttttcactactatacataaagggaaagttttattcttttatggaacacttcagctgtactcatgtattaaaataggaatgtgaatgctatatactctttttatatcaaa

SEQ ID NO: 497605 - DNA, 120 bp, Artificial Sequence
  ENSG00000163513_37 (sequence is synthesized)
agtctcaagcacttatttttattctatgcattgtttgtcttttacataaataaaatgtttattagattgaataaagcaaaatactcaggtgagcatcctgcctcctgttcccattcctag

SEQ ID NO: 497606 - DNA, 120 bp, Artificial Sequence
  ENSG00000163513_38 (sequence is synthesized)
tacaggcgtgagccaccgtgccaggccgggagtagatattttaatcacaggaggtagcatcagaaaagttgcagctactcaccacaagagagacctttatgatgtttactgcaaattgca

SEQ ID NO: 497607 - DNA, 120 bp, Artificial Sequence
  ENSG00000163513_39 (sequence is synthesized)
caagagagacctttatgatgtttactgcaaattgcatcaaggtcatgacagcaatgagtaatgcccaggaaaggcgaagatcaaccttacactttttcatctaactgcactgtgagaaaa

SEQ ID NO: 497608 - DNA, 120 bp, Artificial Sequence
  ENSG00000163513_40 (sequence is synthesized)
caagcaaaattgcccagtttaagggcagattctcagattttgtttcaaatttcctgccctttgttgtcctttctagaagccttaacaatacttgcaacttctttcttttttttttttttt

SEQ ID NO: 497609 - DNA, 120 bp, Artificial Sequence
  ENSG00000163513_41 (sequence is synthesized)
tttttttacttcctctgcttgaaaaacatgaagggggaagtttcaaagtgtttggtgttatcttagaaaccaaagtgaatctgaatgtgtctttctgtcctttttgtgtcatttttcaaa

SEQ ID NO: 497610 - DNA, 120 bp, Artificial Sequence
  ENSG00000163513_42 (sequence is synthesized)
atgaaagggacctttaagttcatcatgtccaacccatttgtttgactggttggagaacaggcacagagagtggttgggtaattgcccttgaactcaaagccccctcatggtcgattcaga

SEQ ID NO: 497611 - DNA, 120 bp, Artificial Sequence
  ENSG00000163513_43 (sequence is synthesized)
gccttctccactgcaacctgctgccattcccagcatggtgaattctcctccagtagaagtcatatagcaatgttttataattaacttttacgtgagcaaatgagctccaggagagaagat

SEQ ID NO: 497612 - DNA, 120 bp, Artificial Sequence
  ENSG00000163513_44 (sequence is synthesized)
taaggaatattgctttccatatatctggatggcccagaacactttttaactaggtacttaaaaatctactacaattgttgttgcccatattcttctgtaattctttcatcagctgtgaat

SEQ ID NO: 497613 - DNA, 120 bp, Artificial Sequence
  ENSG00000163513_45 (sequence is synthesized)
gaaagtacagcagttttatttccttgaaaagtaagccaaacatgattttatttcaatattttagaattccacaatcttaagacacatcattgccttcccatctctgcatgtcaaacttac

SEQ ID NO: 497614 - DNA, 120 bp, Artificial Sequence
  ENSG00000163513_46 (sequence is synthesized)
taattttattagcatgttgcgaaataacacactaagtgtctcaaagccaaagtagatcagctctcgcctgataaatgtgcaggagtaagcagaggatttgaaaattgaactggattctca

SEQ ID NO: 497615 - DNA, 120 bp, Artificial Sequence
  ENSG00000163513_47 (sequence is synthesized)
agttactgcctgtttgccagacctatgctggttatgaacaatatttcaaaaccagattatttggttctagatcctaaacactcttggcaactttattgtaacgatgattgattccattgt

SEQ ID NO: 497616 - DNA, 120 bp, Artificial Sequence
  ENSG00000163513_48 (sequence is synthesized)
atatttgaaagcatcagggcacagtggtaacaaaaaattattatatttcaatttgtctattcattcaaatttcctgaaaggttttttagaagtcatcaaactgctacattctattgatga

SEQ ID NO: 497617 - DNA, 120 bp, Artificial Sequence
  ENSG00000163513_49 (sequence is synthesized)
gtaggaatagatttaccaaactcatacttatcttgtcatttgtttcctgcaattttctttggtgtgagagagcattgcatggaatgttacctttctagcaagtgaatgcttgtgtggcat

SEQ ID NO: 497618 - DNA, 120 bp, Artificial Sequence
  ENSG00000163513_50 (sequence is synthesized)
tttttactgtctagaggattttcacaggtacttcaagcatgtttgctcttcatcatgatcctacatgggacgatttcataaatcaggaaatggaggtttcaagaagttaagtggcccaca

SEQ ID NO: 497619 - DNA, 120 bp, Artificial Sequence
  ENSG00000163513_51 (sequence is synthesized)
attctttaaaacagcactttgattttttaaaaaaatcctctgcacgtgtcaggggccaccatcagctatattgtgaaaataaaaaggcagctggaattaaatgatgggcctcactgtctg

SEQ ID NO: 497620 - DNA, 120 bp, Artificial Sequence
  ENSG00000163513_52 (sequence is synthesized)
ttatttcccctgtagcttttctcaagagacttcatggactaatttcccaataatcatagtagctaccacttattgaggtcttgctactgcacggatcatgctgagtacttcaggtgtatt

SEQ ID NO: 497621 - DNA, 120 bp, Artificial Sequence
  ENSG00000163513_53 (sequence is synthesized)
aagaaagagacagaaaaaaaggaggcgttggagagacggctgaggagagaccaggattgaaacgcttcattttcctggatttcaagggagcacagtctggaaagcagatatgaaaactcg

SEQ ID NO: 497622 - DNA, 120 bp, Artificial Sequence
  ENSG00000163513_54 (sequence is synthesized)
ggggtactgctttggggaaaaccatcaacaactttgctgccctgttacattgggactacagtcaaaacagcagctgtgcaccagatgctgactttccgaggaataccattgctgtcccag

SEQ ID NO: 497623 - DNA, 120 bp, Artificial Sequence
  ENSG00000163515_0 (sequence is synthesized)
aataaatctgttcttcagcaaccctacctgcttctccaaactgcctaaagagatccagtactgatgacgctgttcttccatctttactccctggaaactaaccacgttgtcttctttcct

SEQ ID NO: 497624 - DNA, 120 bp, Artificial Sequence
  ENSG00000163515_1 (sequence is synthesized)
tcaccaccacccaggagctcagagatctaagctgctttccatcttttctcccagccccaggacactgactctgtacaggatggggccgtcctcttgcctccttctcatcctaatccccct

SEQ ID NO: 497625 - DNA, 120 bp, Artificial Sequence
  ENSG00000163515_2 (sequence is synthesized)
aacagtctagagtacagtccctctcctataagcaagaagctctcgtgtgctagtgtcaaaagccaaggcagaccgtcctcctgccctgctgggatggctgtcactggctgtgcttgtggc

SEQ ID NO: 497626 - DNA, 120 bp, Artificial Sequence
  ENSG00000163515_3 (sequence is synthesized)
tatggctgtggttcgtgggatgttcagctggaaaccacctgccactgccagtgcagtgtggtggactggaccactgcccgctgctgccacctgacctgacagggaggaggctgagaactc

SEQ ID NO: 497627 - DNA, 120 bp, Artificial Sequence
  ENSG00000163515_4 (sequence is synthesized)
agttttgtgaccatgacagtaatgaaaccagggtcccaaccaagaaatctaactcaaacgtcccacttcatttgttccattcctgattcttgggtaataaagacaaactttgtacctctc

SEQ ID NO: 497628 - DNA, 120 bp, Artificial Sequence
  ENSG00000163515_5 (sequence is synthesized)
atttctcctgttcttaaactctagctttgtctctatcccatcccaagatcccaaccaagcccaacccctgatgagggctttctacactaccctacccgtgtttgaagtcttggctaaaag

SEQ ID NO: 497629 - DNA, 120 bp, Artificial Sequence
  ENSG00000163515_6 (sequence is synthesized)
ctgaggttttcctgatgaggaggaagaggtggaggagaatggtagctgtaatttatgaacactcattatgaaccagagtacagtccctctcctataagcaagaagctctcgtgtgctagt

SEQ ID NO: 497630 - DNA, 120 bp, Artificial Sequence
  ENSG00000163515_7 (sequence is synthesized)
ctgctgaatgcaatccctcaggctgcccaaaacatctctcctgaaccaacatcactaatgaaagcaacctgtcctcctgcccctcaggtgtggcaaggccaacagatcaggaaatgactg

SEQ ID NO: 497631 - DNA, 120 bp, Artificial Sequence
  ENSG00000163515_8 (sequence is synthesized)
ccatggaaaagaggattatactcacagattccaagagaaggcggcatgccagaatctggaaccggatcctctaatgatgtcataagacctgagctgtattcacctaggaatcatgttgta

SEQ ID NO: 497632 - DNA, 120 bp, Artificial Sequence
  ENSG00000163516_0 (sequence is synthesized)
ctcttcgctgctccgtagtgacggggattgttgtgttgcagaaatccggcaatcgacctgaggacttgcgagccgctcagctcccgggacgtttggagctgctgctaaataatttctgct

SEQ ID NO: 497633 - DNA, 120 bp, Artificial Sequence
  ENSG00000163516_1 (sequence is synthesized)
cagccatgtcgccggctccagatgcagccccggctcctgcgtcgatctccctgtttgacctcagcgcggatgctccggtctttcagggcctgagcctggtgagccacgcgcctggggagg

SEQ ID NO: 497634 - DNA, 120 bp, Artificial Sequence
  ENSG00000163516_2 (sequence is synthesized)
ctctggcccgggctccgcgtacttcctgttcaggctcaggggagagagaaagcccagaaagaaagctactccagggtcctatggatatttcagagaagttattttgttcaacttgtgacc

SEQ ID NO: 497635 - DNA, 120 bp, Artificial Sequence
  ENSG00000163516_3 (sequence is synthesized)
agaccttccagaaccaccaagaacagagggaacattataagcttgactggcatcggtttaacctaaagcaacgtctcaaggacaagcctctcctgtctgccctggactttgaaaagcaga

SEQ ID NO: 497636 - DNA, 120 bp, Artificial Sequence
  ENSG00000163516_4 (sequence is synthesized)
gctccacaggagatctttccagcatctcgggatcagaagactcagactcagccagtgaggaggacttgcagacactggatcgggagagggctacatttgagaagttgagccgacccccag

SEQ ID NO: 497637 - DNA, 120 bp, Artificial Sequence
  ENSG00000163516_5 (sequence is synthesized)
gcttttaccctcatcgagttcttttccagaatgcccagggccagtttctttatgcctaccgctgtgtcctaggccctcatcaggatcccccagaagaggcagaactgctgctacagaacc

SEQ ID NO: 497638 - DNA, 120 bp, Artificial Sequence
  ENSG00000163516_6 (sequence is synthesized)
tgcaaagtagaggtcccagagactgcgtggtgctcatggctgcagctgggcactttgctggtgctatatttcaaggaagagaagtggtgacacacaaaacttttcaccgctatacggttc

SEQ ID NO: 497639 - DNA, 120 bp, Artificial Sequence
  ENSG00000163516_7 (sequence is synthesized)
gggccaagcggggcacagcccaggggcttcgggatgcccgaggtgggccatcacactctgctggagccaacctgaggcgctacaatgaagccacactatataaggatgttcgtgacctgc

SEQ ID NO: 497640 - DNA, 120 bp, Artificial Sequence
  ENSG00000163516_8 (sequence is synthesized)
tggcagggccaagctgggctaaggcgctggaggaggctggtacaatactgttgcgtgctccccgctctggccggtctttgttctttggaggcaagggagcacccctgcaaaggggggatc

SEQ ID NO: 497641 - DNA, 120 bp, Artificial Sequence
  ENSG00000163516_9 (sequence is synthesized)
cccgactttgggatatccccctcgccacccgcagacccaccttccaagagctacagcgtgtgctccataagctgaccactttgcatgtctatgaagaagaccctcgggaagcagtcagac

SEQ ID NO: 497642 - DNA, 120 bp, Artificial Sequence
  ENSG00000163516_10 (sequence is synthesized)
tggaaaacagtaagagaggagagaaagaagcctactgaggaagaaataagaaagatctgcagggatgaaaaggaagcgctggggcagaatgaggaatctcccaaacagggttcagggtcg

SEQ ID NO: 497643 - DNA, 120 bp, Artificial Sequence
  ENSG00000163516_11 (sequence is synthesized)
gagggagaagatggctttcaggtagagttggagctagtggagttgactgtggggactctggatctttgtgagtctgaagtattgcccaagcggaggaggagaaaaaggaataagaaggag

SEQ ID NO: 497644 - DNA, 120 bp, Artificial Sequence
  ENSG00000163516_12 (sequence is synthesized)
aaaagccgagaccaggaggctggggcacatcggactcttctccagcaaactcaagaagaggagccttccacacagtcatcccaggcagttgctgcccccttgggccctttgctggatgag

SEQ ID NO: 497645 - DNA, 120 bp, Artificial Sequence
  ENSG00000163516_13 (sequence is synthesized)
gccaaagcccctggtcagccagagctctggaatgcactgcttgctgcttgccgagctggagatgttggagtgctaaagctgcagctagctcccagccctgcagaccctagagttctgtct

SEQ ID NO: 497646 - DNA, 120 bp, Artificial Sequence
  ENSG00000163516_14 (sequence is synthesized)
ctgctcagtgcccccttgggctccggtggctttactctcctgcatgcagcagctgcagctggaagaggctcagtggttcgtctgctgctggaagcaggtgctgaccccactgtgcaggac

SEQ ID NO: 497647 - DNA, 120 bp, Artificial Sequence
  ENSG00000163516_15 (sequence is synthesized)
tctcgggcccggccaccttatactgttgcggctgacaaatcaacacgtaatgagttccgaaggttcatggagaagaatccagatgcctacgattacaacaaggctcaggtgccaggacca

SEQ ID NO: 497648 - DNA, 120 bp, Artificial Sequence
  ENSG00000163516_16 (sequence is synthesized)
ttgacaccagaaatggaggcacggcaggctacacggaaaagggagcagaaggcagcccggcggcaacgggaggaacagcagcagaggcagcaggagcaggaggagcgtgaacgagaagag

SEQ ID NO: 497649 - DNA, 120 bp, Artificial Sequence
  ENSG00000163516_17 (sequence is synthesized)
cagcggcgatttgccgccctcagtgaccgagagaagagagctctggctgcagagcgccgactcgctgcccagttgggagcccctacctctccaatccctgactctgcaatcgtcaatact

SEQ ID NO: 497650 - DNA, 120 bp, Artificial Sequence
  ENSG00000163516_18 (sequence is synthesized)
cgacgctgctggagttgtggggcatccctccaaggcctgactccctttcactacctcgacttctctttctgctccacacgttgcctccaggatcatcgccgtcaggcagggaggccctct

SEQ ID NO: 497651 - DNA, 120 bp, Artificial Sequence
  ENSG00000163516_19 (sequence is synthesized)
tcctgatctcttacagctctacctggggccaactcagggacctgagagggcacattcacagcagccctaggttttttcttccccgtgaaaccagagatgatttggaagatgggggtgaag

SEQ ID NO: 497652 - DNA, 120 bp, Artificial Sequence
  ENSG00000163516_20 (sequence is synthesized)
gacactcgggaactagggcaaagacagggctagaggtatgtggagctggtactgtctctggaattttaatcacaataaagtttggcaaggaatgtgtacttgtacttacattcagaggca

SEQ ID NO: 497653 - DNA, 120 bp, Artificial Sequence
  ENSG00000163516_21 (sequence is synthesized)
gcacagtattcagaagggtggttgagggaatttgggatgttctggcagatgctgcagtgaaaacagaaatggcaggaggagggacggggagagcgtggattggaaagtttctggggtacc

SEQ ID NO: 497654 - DNA, 120 bp, Artificial Sequence
  ENSG00000163516_22 (sequence is synthesized)
cagatctgagtttctgtcctaaaaatgcactggcaaattccctactctcataactgacccatttccttatttaaacacacacccacagtgtctatcttagcaattactgagacatgttta

SEQ ID NO: 497655 - DNA, 120 bp, Artificial Sequence
  ENSG00000163516_23 (sequence is synthesized)
gtgacctttccaaatctattatctcttttgttatggatgtttccccagagctaagaaaatctttgtgtggagcagatgcgtggatgtgttgcatggatctcacatagtttatctttgatt

SEQ ID NO: 497656 - DNA, 120 bp, Artificial Sequence
  ENSG00000163516_24 (sequence is synthesized)
ggatgctgtggtttgaggctgagggctgcttccatgctttcctctattgtgcggcaccctaaggctactcatacggagagtccagggacttgttcttgtctgggctgagagcctcatttc

SEQ ID NO: 497657 - DNA, 120 bp, Artificial Sequence
  ENSG00000163516_25 (sequence is synthesized)
attgtgattctaccacttcatcttgactgcctcgccaagcctcaaatttccttgtttgtcaaatggaaacaagcctcagggtggtaatattaaatgagataatgtttgtgaaaattggcc

SEQ ID NO: 497658 - DNA, 120 bp, Artificial Sequence
  ENSG00000163516_26 (sequence is synthesized)
gcggacgccgccggttgtcctcttcgctgctccgtagtgacggggattgttgtgttgcagaaatccggcaatcgacctgaggacttgcgagccgctcagctcccgggacgtttggagatc

SEQ ID NO: 497659 - DNA, 120 bp, Artificial Sequence
  ENSG00000163516_27 (sequence is synthesized)
cctgttcaggtatcctggaaggtttcgtgtgaaacgtgacagggctccttacagcgtattgcccgttcagggaacacattcttattggtattcccgagcttaggaggccaattgatttat

SEQ ID NO: 497660 - DNA, 120 bp, Artificial Sequence
  ENSG00000163516_28 (sequence is synthesized)
ctttctgcttgattaaattcacttaatctctgggtaatgtccagcacagcccttgttttcaaacaagtctttttgccattgcatgtatctcctcacgttaacaccattcccttcaaaaac

SEQ ID NO: 497661 - DNA, 120 bp, Artificial Sequence
  ENSG00000163516_29 (sequence is synthesized)
actttaaactttgtagagataaaattctcagatgtattccacatttaaccaggccccactcaaattattcctttttgctgaatatgaaacaatttattatttgtttcgtatagctttatt

SEQ ID NO: 497662 - DNA, 120 bp, Artificial Sequence
  ENSG00000163516_30 (sequence is synthesized)
catggctgcagctgggcactttgctggtgctatatttcaagggtgagagggtgctgcatgggggtaaggatggagtggatcctgttagccagggagcaccagctggtctccagtactgag

SEQ ID NO: 497663 - DNA, 120 bp, Artificial Sequence
  ENSG00000163516_31 (sequence is synthesized)
ctgagattacaggcatgagccaccgtgtcggtcctgttttgtgtaactttagtttggctacatcttttcttgcacctctccttagacaaactgtacactaattggaaatgtaaactttaa

SEQ ID NO: 497664 - DNA, 120 bp, Artificial Sequence
  ENSG00000163516_32 (sequence is synthesized)
attggaaatgtaaactttaaaaagcatttgggaagtagtttttgtgcagtgaaaaataattttaaactgaacagaaattattttctttaggattcacctaaacaatctgtttggctaatt

SEQ ID NO: 497665 - DNA, 120 bp, Artificial Sequence
  ENSG00000163516_33 (sequence is synthesized)
taaattagacaagactcaaactcagccagtggggaggacttgcagacgctggatctcgggagagggctacgttggagaagtttaaccgaccccaaggcttttaccctcatcggattcttt

SEQ ID NO: 497666 - DNA, 120 bp, Artificial Sequence
  ENSG00000163516_34 (sequence is synthesized)
accccaaggcttttaccctcatcggattcttttccagaatgcccagggccagtttttatttacattcgttttatttattttatttttcttcatcttttttgagacagagtctcgttctgt

SEQ ID NO: 497667 - DNA, 68 bp, Artificial Sequence
  ENSG00000163516_35 (sequence is synthesized)
acttcctgcacctggccaattttattttatttacattcattttacgtacatgttttcagaagcatgtt

SEQ ID NO: 497668 - DNA, 120 bp, Artificial Sequence
  ENSG00000163516_36 (sequence is synthesized)
atttacattcattttacgtacatgttttcagaagcatgtttattgcattaagtgattgctgtactgtttatttcatgactattagagtgtaaattccttgaaggcagtatcatgccatct

SEQ ID NO: 497669 - DNA, 120 bp, Artificial Sequence
  ENSG00000163516_37 (sequence is synthesized)
cttttgtatcctcctctgctttgtatatcacactctgaatataattcttgtcactgtggatttgggctccctttctatgtccaattcctcttcccttatttaggctcaggggagagagaa

SEQ ID NO: 497670 - DNA, 120 bp, Artificial Sequence
  ENSG00000163516_38 (sequence is synthesized)
gctcccgggacgtttggtgcgtcttctaagggcgtgggcgagtttacgcgggccagttgttgctggtcgcatgggtaacgaagaaagttcggctaggcaagctcagtgatttttaactct

SEQ ID NO: 497671 - DNA, 120 bp, Artificial Sequence
  ENSG00000163516_39 (sequence is synthesized)
gttggactcgatttgggagccgaatgcctatttcattcttttgtgggctgagactgggggtttgagaaagtggacgggggccaaggtattcatctcacagttggtagcaggatgagagac

SEQ ID NO: 497672 - DNA, 120 bp, Artificial Sequence
  ENSG00000163516_40 (sequence is synthesized)
ctgagtcattttgggtatagagaggataatttggaggttaaagttggcattggctacttggcaatattcccttggtctggttgggtgatgttgggaaaggcaggaggcaagttaaaccca

SEQ ID NO: 497673 - DNA, 120 bp, Artificial Sequence
  ENSG00000163516_41 (sequence is synthesized)
cctcatcaggcaagtgacagtacaggttgcatggctaaccccagccttttgtacacccagcctagatttcccttagcctagtgcatttctccctgcttctcttccttcctgttggttgtg

SEQ ID NO: 497674 - DNA, 120 bp, Artificial Sequence
  ENSG00000163516_42 (sequence is synthesized)
aggtgcggacgccgccggttgtcctcttcgctgctccgtagtgacggggattgttgtgttgcagaaatccggcaatcgacctgaggacttgcgagccgctcagctcccgggacgtttggc

SEQ ID NO: 497675 - DNA, 120 bp, Artificial Sequence
  ENSG00000163517_0 (sequence is synthesized)
ggtcgcggagctgcggccagctttgggagggccggccccgggatgctacacacaacccagctgtaccagcatgtgccagagacacgctggccaatcgtgtactcgccgcgctacaacatc

SEQ ID NO: 497676 - DNA, 120 bp, Artificial Sequence
  ENSG00000163517_1 (sequence is synthesized)
accttcatgggcctggagaagctgcatccctttgatgccggaaaatggggcaaagtgatcaatttcctaaaagaagagaagcttctgtctgacagcatgctggtggaggcgcgggaggcc

SEQ ID NO: 497677 - DNA, 120 bp, Artificial Sequence
  ENSG00000163517_2 (sequence is synthesized)
tcggaggaggacctgctggtggtgcacacgaggcgctatcttaatgagctcaagtggtcctttgctgttgctaccatcacagaaatcccccccgttatcttcctccccaacttccttgtg

SEQ ID NO: 497678 - DNA, 120 bp, Artificial Sequence
  ENSG00000163517_3 (sequence is synthesized)
cagaggaaggtgctgaggccccttcggacccagacaggaggaaccataatggcggggaagctggctgtggagcgaggctgggccatcaacgtggggggtggcttccaccactgctccagc

SEQ ID NO: 497679 - DNA, 120 bp, Artificial Sequence
  ENSG00000163517_4 (sequence is synthesized)
gaccgtggcgggggcttctgtgcctatgcggacatcacgctcgccatcaagtttctgtttgagcgtgtggagggcatctccagggctaccatcattgatcttgatgcccatcagggcaat

SEQ ID NO: 497680 - DNA, 120 bp, Artificial Sequence
  ENSG00000163517_5 (sequence is synthesized)
gggcatgagcgagacttcatggacgacaagcgtgtgtacatcatggatgtctacaaccgccacatctacccaggggaccgctttgccaagcaggccatcaggcggaaggtggagctggag

SEQ ID NO: 497681 - DNA, 120 bp, Artificial Sequence
  ENSG00000163517_6 (sequence is synthesized)
tggggcacagaggatgatgagtacctggataaggtggagaggaacatcaagaaatccctccaggagcacctgcccgacgtggtggtatacaatgcaggcaccgacatcctcgagggggac

SEQ ID NO: 497682 - DNA, 120 bp, Artificial Sequence
  ENSG00000163517_7 (sequence is synthesized)
cgccttggggggctgtccatcagcccagcgggcatcgtgaagcgggatgagctggtgttccggatggtccgtggccgccgggtgcccatccttatggtgacctcaggcgggtaccagaag

SEQ ID NO: 497683 - DNA, 120 bp, Artificial Sequence
  ENSG00000163517_8 (sequence is synthesized)
cgcacagcccgcatcattgctgactccatacttaatctgtttggcctggggctcattgggcctgagtcacccagcgtctccgcacagaactcagacacaccgctgcttccccctgcagtg

SEQ ID NO: 497684 - DNA, 120 bp, Artificial Sequence
  ENSG00000163517_9 (sequence is synthesized)
ccctgacccttgctgccctgcctgtcacgtggccctgcctatccgccccttagtgctttttgttttctaacctcatggggtggtggaggcagccttcagtgagcatggaggggcagggcc

SEQ ID NO: 497685 - DNA, 120 bp, Artificial Sequence
  ENSG00000163517_10 (sequence is synthesized)
atccctggctggggcctggagctggcccttcctctacttttccctgctggaagccagaagggcttgaggcctctatgggtgggggcagaaggcagagcctgtgtcccagggggacccaca

SEQ ID NO: 497686 - DNA, 120 bp, Artificial Sequence
  ENSG00000163517_11 (sequence is synthesized)
aggctaggtcccaggcacagcgagggccctgggcttggggtgttctggttttgagaacggcagacccaggtcggagtgaggaagcttccacctccatcctgactaggcctgcatcctaac

SEQ ID NO: 497687 - DNA, 120 bp, Artificial Sequence
  ENSG00000163517_12 (sequence is synthesized)
tgggcctccctccctccccttggtcatgggatttgctgccctctttgccccagagctgaagagctataggcactggtgtggatggcccaggaggtgctggagctaggtctccaggtgggc

SEQ ID NO: 497688 - DNA, 120 bp, Artificial Sequence
  ENSG00000163517_13 (sequence is synthesized)
ctggttcccaggcagcaggtgggaaccctgggcctggatgtgaggggcggtcaggaaggggtacaggtgggttccctcatctggagttccccctcaataaagcaaggtctggacctgcct

SEQ ID NO: 497689 - DNA, 120 bp, Artificial Sequence
  ENSG00000163517_14 (sequence is synthesized)
tcccaggcccttctgtgggggtgaaggtggggaaggcctgcggcgcccagatcactgccttagcagtagtcttgcctgttcagtgcaaggggcaggttttggggggaggaattcttagcg

SEQ ID NO: 497690 - DNA, 120 bp, Artificial Sequence
  ENSG00000163517_15 (sequence is synthesized)
caaggacgggcctcagccctgtcgcctccagggggccgctgacccaggtggggagagggcagaagaagggtgggggacgtgggcaggccaggctcacaggtggaaatcagggatgcaggg

SEQ ID NO: 497691 - DNA, 120 bp, Artificial Sequence
  ENSG00000163517_16 (sequence is synthesized)
tggtgcccaagccaggtcctgcaggaacccaggcccagggagggacccagacactggtgaggcggggcaggggttcctggagagagggcagcgaggatctctatcctggcctggggatta

SEQ ID NO: 497692 - DNA, 120 bp, Artificial Sequence
  ENSG00000163517_17 (sequence is synthesized)
tgaacataggtagccggggcagggccctgggtgggactgtggcctccactggcctcaccaaagtgcctgggccccaatccttctccatgcccaggggccccaggtgggccagacctctgg

SEQ ID NO: 497693 - DNA, 120 bp, Artificial Sequence
  ENSG00000163517_18 (sequence is synthesized)
cctgttcctcagccctactcatggggacattcagggacctccaggaagtgggcgggggagcatccacccctgctagccggcagctgtggccctgatcaaatcaggggctggggagggaaa

SEQ ID NO: 497694 - DNA, 120 bp, Artificial Sequence
  ENSG00000163517_19 (sequence is synthesized)
gtgggtccattgaggtggccctgctccatcagccccctacgggacttgtgttcattacagtgagggggtgctcccactgtctcccggcctccctaatgctccctctgctgcagggagaag

SEQ ID NO: 497695 - DNA, 120 bp, Artificial Sequence
  ENSG00000163517_20 (sequence is synthesized)
ggttccaagatcacaaaatgtcaacaatgctggcctcctggaccagaccccgaggctctaacaatgcactctgagatccctacccttgccgttggtctctgtcgctgactcgaggcacct

SEQ ID NO: 497696 - DNA, 120 bp, Artificial Sequence
  ENSG00000163517_21 (sequence is synthesized)
aacatccattcacacccaacacaggccagcgacttctggggctcagccacagacatggtttgtcactgttgagcttctgttcctagagaatcctagaggcttgattggcccaggctgctg

SEQ ID NO: 497697 - DNA, 120 bp, Artificial Sequence
  ENSG00000163517_22 (sequence is synthesized)
tgtgtgctggaggcaaagaatccctacctcctaggggtgaaaggaaatgaaaatggaaagttcttgtagcgcaaggcctgacatgggtagctgctcaataaatgctagtgtgttatttca

SEQ ID NO: 497698 - DNA, 120 bp, Artificial Sequence
  ENSG00000163517_23 (sequence is synthesized)
gcaggctctgagagcctacatgtcttcgccgggagtgcttgtcccggagctgctcgcagactgggccgggggtgggctcgggtcggagaggtcacggggctccttaggtcacaggcggca

SEQ ID NO: 497699 - DNA, 120 bp, Artificial Sequence
  ENSG00000163517_24 (sequence is synthesized)
gggccagagaaactcccccgcccctacgtttaactcgcggaaacaagggcccagagagcccagacgccagcccaaggtcacacagcgaagccccggcacagcccgccgggaacctgtcgt

SEQ ID NO: 497700 - DNA, 120 bp, Artificial Sequence
  ENSG00000163517_25 (sequence is synthesized)
ttctaacccccagcctctcgccgtttctacccagcttgggaagcgcaggaacaggacatacggtggtcgcgccccttccgcgaggccggggtgaaacccgcttggccctcccgccagggg

SEQ ID NO: 497701 - DNA, 120 bp, Artificial Sequence
  ENSG00000163517_26 (sequence is synthesized)
gcgagggcgggggtgggctcccaggggtcccggtgggcgggcgcgctagggcgagggcggggacggccgggcgggcgcgccaggctacacacaacccagctgtaccagcatgtgccagag

SEQ ID NO: 497702 - DNA, 120 bp, Artificial Sequence
  ENSG00000163517_27 (sequence is synthesized)
accgtggcgggggcttctgtgcctatgcggacatcacgctcgccatcaagggcacaggacatgccccctcctccagggagccttccctgaccacctcctgcatgcacacatggagcccca

SEQ ID NO: 497703 - DNA, 120 bp, Artificial Sequence
  ENSG00000163517_28 (sequence is synthesized)
atcttcccggggcaggagagtctccctcctcatgtccccacggctctcacggcttctgtcttctgtctctcgggctacaaatgcagggtctgtctttgtcactctgtccaggacagcggg

SEQ ID NO: 497704 - DNA, 120 bp, Artificial Sequence
  ENSG00000163517_29 (sequence is synthesized)
tcctcctcattgctcccgagggtcctccctccctcctcctgactgcccccacatgaggctcttcctgaagcccactctgatgggactgctctcgtgtgcagagctctgctgtgggtcccc

SEQ ID NO: 497705 - DNA, 120 bp, Artificial Sequence
  ENSG00000163517_30 (sequence is synthesized)
attgcttatgaataatttggggcactgccccctgcccagagctgctgagcactggccacctgcccctcaggcggatgcccacacacatggcttggctcgggcacctggggtcaccattta

SEQ ID NO: 497706 - DNA, 120 bp, Artificial Sequence
  ENSG00000163517_31 (sequence is synthesized)
agaactcggcgcctagggagtaaagtgtcaaagcagagggttacctcctcctcaggacccctaatgaggccagtgcctctggtcagacagggaggggacccagtgggctccggaaggcac

SEQ ID NO: 497707 - DNA, 120 bp, Artificial Sequence
  ENSG00000163517_32 (sequence is synthesized)
ccccctgcaccattactgctgtggctttgtgctagttggggccctgccttgggttcttgcgaccccgaactcctgagccaggtcacatgtggacagtcctttacagtttgcttttcacat

SEQ ID NO: 497708 - DNA, 80 bp, Artificial Sequence
  ENSG00000163517_33 (sequence is synthesized)
agatttgctggtgaggggtgagggacgctcgggacgggtgtttccaggccctcccggcgcgccaggccagccccgcgccc

SEQ ID NO: 497709 - DNA, 120 bp, Artificial Sequence
  ENSG00000163517_34 (sequence is synthesized)
gggcccggacccggagcggtcgggcgatgtgcgcgggtctgacgtctgcgctgcccagccccctggctacgcggacgcccccacggaggcagccactggggcggatttctgtctctgggt

SEQ ID NO: 497710 - DNA, 120 bp, Artificial Sequence
  ENSG00000163517_35 (sequence is synthesized)
ttaagcagctgttgttgaggggcccttgtctgcggctgaggggctagtggtgctgggcaatggctggtgggtcagtccaggcgggctcgggagggagctgctttctgccgaggctgcccc

SEQ ID NO: 497711 - DNA, 120 bp, Artificial Sequence
  ENSG00000163517_36 (sequence is synthesized)
atttctaccaaaggaagtgtgcttgaccagggagttcatccaagggcacctggaaactgtcctcaaggcatttcccggggaaccaatttctcacgggttgcctcagggtggggaagcgga

SEQ ID NO: 497712 - DNA, 120 bp, Artificial Sequence
  ENSG00000163517_37 (sequence is synthesized)
ctcatcttgggtgtgtccttgtggatgaggctctctcctgagtgtctcctgtctgctaggccctgcagaagccactgcagtggttcatagcatccctgtgaggtgatcctttccatttta

SEQ ID NO: 497713 - DNA, 120 bp, Artificial Sequence
  ENSG00000163517_38 (sequence is synthesized)
cagatgaggaaaccgagacctggagaagtcactcgacccacccaagatcacataacccttacaataaacatgcatttgtctggcaaaaaacaggaaagaatgaaagaaaaaaaagaaaaa

SEQ ID NO: 497714 - DNA, 120 bp, Artificial Sequence
  ENSG00000163517_39 (sequence is synthesized)
gagtgcttactgtgctcagctcctcagttgcattctctgagtcctcacaacagccacacattttgcagccgaagccttgtgccacacagctgtgggggcatttattacggtgcagaggtg

SEQ ID NO: 497715 - DNA, 120 bp, Artificial Sequence
  ENSG00000163517_40 (sequence is synthesized)
atgcgcggaggccttgcagccagacacacctgagtgcacgcctgcttctccacagacctgcactgtgaccttgggcacacctggtctgctctctgagcctctggctacacacaacccagc

SEQ ID NO: 497716 - DNA, 120 bp, Artificial Sequence
  ENSG00000163518_0 (sequence is synthesized)
attatctcaatcagctttatgcagagaagaagcttactgagctcactgctggtgctggtgtaggcaagtgctgctttggcaatctgggctgacctggcttgtctcctcagaactccttct

SEQ ID NO: 497717 - DNA, 120 bp, Artificial Sequence
  ENSG00000163518_1 (sequence is synthesized)
ccaatcctggagcaggcttccatgctgctgtgggcgtccttgctggcctttgctccagtctgtggacaatctgcagctgcacacaaacctgtgatttccgtccatcctccatggaccaca

SEQ ID NO: 497718 - DNA, 120 bp, Artificial Sequence
  ENSG00000163518_2 (sequence is synthesized)
ttcttcaaaggagagagagtgactctgacttgcaatggatttcagttctatgcaacagagaaaacaacatggtatcatcggcactactggggagaaaagttgaccctgaccccaggaaac

SEQ ID NO: 497719 - DNA, 120 bp, Artificial Sequence
  ENSG00000163518_3 (sequence is synthesized)
accctcgaggttcgggaatctggactgtacagatgccaggcccggggctccccacgaagtaaccctgtgcgcttgctcttttcttcagactccttaatcctgcaggcaccatattctgtg

SEQ ID NO: 497720 - DNA, 120 bp, Artificial Sequence
  ENSG00000163518_4 (sequence is synthesized)
tttgaaggtgacacattggttctgagatgccacagaagaaggaaagagaaattgactgctgtgaaatatacttggaatggaaacattctttccatttctaataaaagctgggatcttctt

SEQ ID NO: 497721 - DNA, 120 bp, Artificial Sequence
  ENSG00000163518_5 (sequence is synthesized)
atcccacaagcaagttcaaataacaatggcaattatcgatgcattggatatggagacgagaatgatgtatttagatcaaatttcaaaataattaaaattcaagaactatttccacatcca

SEQ ID NO: 497722 - DNA, 120 bp, Artificial Sequence
  ENSG00000163518_6 (sequence is synthesized)
gagctgaaagctacagactctcagcctacagaggggaattctgtaaacctgagctgtgaaacacagcttcctccagagcggtcagacaccccacttcacttcaacttcttcagagatggc

SEQ ID NO: 497723 - DNA, 120 bp, Artificial Sequence
  ENSG00000163518_7 (sequence is synthesized)
gaggtcatcctgtcagactggagcacgtacccggaactccagctcccaaccgtctggagagaaaactcaggatcctattggtgtggtgctgaaacagtgaggggtaacatccacaagcac

SEQ ID NO: 497724 - DNA, 120 bp, Artificial Sequence
  ENSG00000163518_8 (sequence is synthesized)
agtccctcgctacagatccatgtgcagcggatccctgtgtctggggtgctcctggagacccagccctcagggggccaggctgttgaaggggagatgctggtccttgtctgctccgtggct

SEQ ID NO: 497725 - DNA, 120 bp, Artificial Sequence
  ENSG00000163518_9 (sequence is synthesized)
gaaggcacaggggataccacattctcctggcaccgagaggacatgcaggagagtctggggaggaaaactcagcgttccctgagagcagagctggagctccctgccatcagacagagccat

SEQ ID NO: 497726 - DNA, 120 bp, Artificial Sequence
  ENSG00000163518_10 (sequence is synthesized)
gcagggggatactactgtacagcagacaacagctacggccctgtccagagcatggtgctgaatgtcactgtgagagagaccccaggcaacagagatggccttgtcgccgcgggagccact

SEQ ID NO: 497727 - DNA, 120 bp, Artificial Sequence
  ENSG00000163518_11 (sequence is synthesized)
ggagggctgctcagtgctcttctcctggctgtggccctgctgtttcactgctggcgtcggaggaagtcaggagttggtttcttgggagacgaaaccaggctccctcccgctccaggccca

SEQ ID NO: 497728 - DNA, 120 bp, Artificial Sequence
  ENSG00000163518_12 (sequence is synthesized)
ggagagtcctcccattccatctgccctgcccaggtggagcttcagtcgttgtatgttgatgtacaccccaaaaagggagatttggtatactctgagatccagactactcagctgggagaa

SEQ ID NO: 497729 - DNA, 120 bp, Artificial Sequence
  ENSG00000163518_13 (sequence is synthesized)
gaagaggaagctaatacctccaggacacttctagaggataaggatgtctcagttgtctactctgaggtaaagacacaacacccagataactcagctggaaagatcagctctaaggatgaa

SEQ ID NO: 497730 - DNA, 120 bp, Artificial Sequence
  ENSG00000163518_14 (sequence is synthesized)
ctcattccagctttctaattcttctcatgcatatgcattcactcccaggaatactcattcgtctactctgatgttgggatggaatggcctctgaaagacttcactaaaatgaccaggatc

SEQ ID NO: 497731 - DNA, 120 bp, Artificial Sequence
  ENSG00000163518_15 (sequence is synthesized)
cacagttaagagaagaccctgtagtatttgctgtgggcctgacctaatgtattccctagggtctgctttagagaagggggataaagagagagaaggactgttatgaaaaacagaagcaca

SEQ ID NO: 497732 - DNA, 120 bp, Artificial Sequence
  ENSG00000163518_16 (sequence is synthesized)
aattttggtgaattgggatttgcagagatgaaaaagactgggtgacctggatctctgcttaatacatctacaaccattgtctcactggagactcacttgcatcagtttgtttaactgtga

SEQ ID NO: 497733 - DNA, 120 bp, Artificial Sequence
  ENSG00000163518_17 (sequence is synthesized)
gtggctgcacaggcactgtgcaaacaatgaaaagccccttcacttctgcctgcacagcttacactgtcaggattcagttgcagattaaagaacccatctggaatggtttacagagagagg

SEQ ID NO: 497734 - DNA, 120 bp, Artificial Sequence
  ENSG00000163518_18 (sequence is synthesized)
aatttaaaagaggacatcagaagagctggagatgcaagctctaggctgcgcttccaaaagcaaatgataattatgttaatgtcattagtgacaaagatttgcaacattagagaaaagaga

SEQ ID NO: 497735 - DNA, 120 bp, Artificial Sequence
  ENSG00000163518_19 (sequence is synthesized)
cacaaatataaaattaaaaacttaagtaccaactctccaaaactaaatttgaacttaaaatattagtataaactcataataaactctgcctttaaaaaaagataaatatttcctacgtct

SEQ ID NO: 497736 - DNA, 120 bp, Artificial Sequence
  ENSG00000163518_20 (sequence is synthesized)
gttcactgaaataattaccaaccccttagcaataagcactccttgcagagaggttttattctctaaataccattcccttctcaaaggaaataaggttgcttttcttgtaggaactgtgtc

SEQ ID NO: 497737 - DNA, 120 bp, Artificial Sequence
  ENSG00000163518_21 (sequence is synthesized)
tttgagttactaattagtttatatgagaataattcttgcaataaatgaagaaggaataaaagaaataggaagccacaaatttgtatggatatttcatgatacacctactggttaaataat

SEQ ID NO: 497738 - DNA, 120 bp, Artificial Sequence
  ENSG00000163518_22 (sequence is synthesized)
tgacaaaaaccagcagccaaatattagaggtctcctgatggaagtgtacaataccacctacaaattatccatgccccaagtgttaaaactgaatccattcaagtctttctaactgaatac

SEQ ID NO: 497739 - DNA, 120 bp, Artificial Sequence
  ENSG00000163518_23 (sequence is synthesized)
ttgttttatagaaaatgcatggagaaaaggaatttgtttaaataacattatgggattgcaaccagcaaaacataaactgagaaaaagttctatagggcaaatcacctggcttctataaca

SEQ ID NO: 497740 - DNA, 120 bp, Artificial Sequence
  ENSG00000163518_24 (sequence is synthesized)
aataaatgggaaaaaaatgaaataaaaagaagagagggaggaagaaagggagagagaagaaaagaaaaatgaagaaaagtaattagaatattttcaacataaagaaaagacgaatattta

SEQ ID NO: 497741 - DNA, 120 bp, Artificial Sequence
  ENSG00000163518_25 (sequence is synthesized)
aggtgacagatatcccaactacgctgatttgatctttacaaattatatgagtgtatgaatttgtcacatgtatcacccccaaaaaaagagaaaaagaaaaatagaagacatataaattaa

SEQ ID NO: 497742 - DNA, 120 bp, Artificial Sequence
  ENSG00000163518_26 (sequence is synthesized)
atgagacgagacatgtcgaccaaaaggaatgtgtgggtcttgtttggatcctgactcaaattaagaaaaaataaaactacctacgaaatactaagaaaaatttgtatactaatattaaga

SEQ ID NO: 497743 - DNA, 120 bp, Artificial Sequence
  ENSG00000163518_27 (sequence is synthesized)
aattgttgtgtgttttggatataagtgatagtttattgtagtgatgtttttataaaagcaaaaggatattcactttcagcgcttatactgaagtattagattaaagcttattaacgtaaa

SEQ ID NO: 497744 - DNA, 120 bp, Artificial Sequence
  ENSG00000163518_28 (sequence is synthesized)
agtcctggcctcaaaaagttatatgctttgtacaatctttttttcacctcattttcatgaaaacccaggactgggcaggtgtttgaattgactgtcttgattacctctcttagatagctc

SEQ ID NO: 497745 - DNA, 120 bp, Artificial Sequence
  ENSG00000163518_29 (sequence is synthesized)
ccatggaaagataatgcgctttcagccctgggaaatgcccctggactccctaaagtgtcccaaatccagatattcccagataattgttccattatgtgtccaagaagagtggagatgatg

SEQ ID NO: 497746 - DNA, 120 bp, Artificial Sequence
  ENSG00000163518_30 (sequence is synthesized)
cttaggaagaggcatctgtagcactttaatactaacaggaacagccttgaaaatgtcttttctttccagtacaccccaaaaagggagatttggtatactctgagatccagactactcagc

SEQ ID NO: 497747 - DNA, 120 bp, Artificial Sequence
  ENSG00000163519_0 (sequence is synthesized)
ggcacagataaagataagttttactgtcatgctgcttttaacataacagagcaacatcacctaggaaaaaagtttgtaggaggatttttaatccatatatttgtcttatggctagataaa

SEQ ID NO: 497748 - DNA, 120 bp, Artificial Sequence
  ENSG00000163519_1 (sequence is synthesized)
gatttctctgaaaaaaagaagcatgtcaggaatctctgggtgcccctttttcctctggggacttctagcattgttgggcttggctttggttatatcactgatcttcaatatttcccacta

SEQ ID NO: 497749 - DNA, 120 bp, Artificial Sequence
  ENSG00000163519_2 (sequence is synthesized)
tgtggaaaagcaacgacaagataaaatgtacagctactccagtgaccacaccagggttgatgagtattatattgaagacacaccaatttatggtaacttagatgatatgatttcagaacc

SEQ ID NO: 497750 - DNA, 120 bp, Artificial Sequence
  ENSG00000163519_3 (sequence is synthesized)
aatggatgaaaattgctatgaacaaatgaaagcccgaccagagaaatctgtaaataagatgcaggaagccaccccatctgcacaggcaaccaatgaaacacagatgtgctacgcctcact

SEQ ID NO: 497751 - DNA, 120 bp, Artificial Sequence
  ENSG00000163519_4 (sequence is synthesized)
tgatcacagcgttaaggggaagcgtagaaagcccaggaaacagaatactcatttctcagacaaggatggagatgagcaactacatgcaatagatgccagcgtttctaagaccaccttagt

SEQ ID NO: 497752 - DNA, 120 bp, Artificial Sequence
  ENSG00000163519_5 (sequence is synthesized)
agacagtttctccccagaaagccaggcagtagaggaaaacattcatgatgatcccatcagactgtttggattgatccgtgctaagagagaacctataaactagctggaccatgatctagt

SEQ ID NO: 497753 - DNA, 120 bp, Artificial Sequence
  ENSG00000163519_6 (sequence is synthesized)
tcaatgatttggctcctattgaagatggcttctaagaaaacaagatgcacagaggacacagaaggacttggcagcagggtgatgacctgatcatttgttgatgggatggtggcttacctc

SEQ ID NO: 497754 - DNA, 120 bp, Artificial Sequence
  ENSG00000163519_7 (sequence is synthesized)
tgtaaggccatgaaaatcagtatttcaaataacttaaaaaatgctttactactaaaatgtaaaaaattaatgtgctcacctcggcagcacatatactaaaaattaataagacccagcttg

SEQ ID NO: 497755 - DNA, 120 bp, Artificial Sequence
  ENSG00000163519_8 (sequence is synthesized)
aaaattgagcctgataacaagattacaaattcacaatacctaatacttagggaaatataaaaatttaagcatgaatgtgttctggaacacgttagaagaaaaataaaagccaatgagttt

SEQ ID NO: 497756 - DNA, 120 bp, Artificial Sequence
  ENSG00000163519_9 (sequence is synthesized)
ttttttaattctcctttctcaccaatgggcaatagcccataattgaaataaatttctgattgaaaggtataggaaacattaaaatgcattactaagagaagtaatataattttcttacaa

SEQ ID NO: 497757 - DNA, 120 bp, Artificial Sequence
  ENSG00000163519_10 (sequence is synthesized)
agtatttttcccaaagatagctttactatttcaaaaattgtcaaattaatgcatgctccttacaacaaacaaatatcaaaaagagtttaggaattctactagccagagatagtcacttgg

SEQ ID NO: 497758 - DNA, 120 bp, Artificial Sequence
  ENSG00000163519_11 (sequence is synthesized)
agaaactttctatatatccttctaaatatttttctgggcatgcttatgtatgtacatcagttgtttctttttattttgaaccaaaaatgtggtttcttttgtacacattacttaaacttt

SEQ ID NO: 497759 - DNA, 120 bp, Artificial Sequence
  ENSG00000163519_12 (sequence is synthesized)
ctttccagtcaacaatatattgtggatttattttcactgttatatttaactatatataaatacgcatatattgtaattttaatgtctgcttagcaccccactgataaccaaatcacagtt

SEQ ID NO: 497760 - DNA, 120 bp, Artificial Sequence
  ENSG00000163519_13 (sequence is synthesized)
tatttaaataattttaatgacttttcaaaaacaatttattgatgcaaaaagcaaggttgagatgacaatgtttctttcaataattaaaaaatactgcttcactgtcttctctctgtttca

SEQ ID NO: 497761 - DNA, 120 bp, Artificial Sequence
  ENSG00000163519_14 (sequence is synthesized)
tcagaaacacatactataatacttgtctctgtccttaagtgtgatacacgctatttttctgattgttaagactttccttattactggttctaatttgattataatatgccaaggtatggt

SEQ ID NO: 497762 - DNA, 120 bp, Artificial Sequence
  ENSG00000163519_15 (sequence is synthesized)
tgagttttaattacttttactctcatctaaagatcagaagctataacattattatctgtcctagttatttgcacactgtgagtcaacaagaaagctggttgaaggataaaatgagattct

SEQ ID NO: 497763 - DNA, 120 bp, Artificial Sequence
  ENSG00000163519_16 (sequence is synthesized)
aacctgataactatagaattatcattaatttcagaggtagatagcctagattatgatccagcttagatacagaattgtgctacacttcaaaatccatagtagaaaacaatctggcaacct

SEQ ID NO: 497764 - DNA, 120 bp, Artificial Sequence
  ENSG00000163519_17 (sequence is synthesized)
ataagttaaatttataaataagtaaatcccagttggtttcacaaaataatttaagtggcgctttaaaaaaatcaaatcacacttagctatcccagtgataaccatcaattcaagaacttt

SEQ ID NO: 497765 - DNA, 120 bp, Artificial Sequence
  ENSG00000163519_18 (sequence is synthesized)
tagtatattaattaggctacatttccaaagctgcatattgtaagttgtattacaatagccactctaaatcaacatcctgtttttctatattctcttcatttcactctagtagtaatgaga

SEQ ID NO: 497766 - DNA, 120 bp, Artificial Sequence
  ENSG00000163520_0 (sequence is synthesized)
gcacacagccaggggccgcccgggctctcgacgcgccgacggccgggcggacggacggacggacgccgagcgcagtgccccgcgggtcttacaggagaggggaccgtcctgggctggcct

SEQ ID NO: 497767 - DNA, 120 bp, Artificial Sequence
  ENSG00000163520_1 (sequence is synthesized)
ggaccatggtgctgctctgggagcctgcaggagcctggcttgctctgggcctggccctggccctgggccccagcgtggccgcagctgcccctcggcaggactgcacgggcgtggagtgcc

SEQ ID NO: 497768 - DNA, 120 bp, Artificial Sequence
  ENSG00000163520_2 (sequence is synthesized)
cgccgctggagaactgcattgaggaggcgctggagccgggtgcctgctgtgccacgtgtgtgcagcagggctgcgcctgcgagggctaccagtactatgactgcctacagggtggcttcg

SEQ ID NO: 497769 - DNA, 120 bp, Artificial Sequence
  ENSG00000163520_3 (sequence is synthesized)
tgcgcggccgcgtgcccgccggtcagtcctattttgtggacttcgggagcactgagtgctcctgcccaccaggcggcggcaagatcagctgccagttcatgctgtgcccggagctgccgc

SEQ ID NO: 497770 - DNA, 120 bp, Artificial Sequence
  ENSG00000163520_4 (sequence is synthesized)
ccaactgcatcgaggctgtagtggtggctgacagctgcccacagtgcggccaggtgggctgcgtccacgcgggccacaagtacgccgctggccacactgttcacctgccgccctgccggg

SEQ ID NO: 497771 - DNA, 120 bp, Artificial Sequence
  ENSG00000163520_5 (sequence is synthesized)
cctgccactgccctgacgccggtggagagctcatctgctaccagctccccggttgccacgggaacttctcagatgccgaggagggtgaccccgagcgacactacgaagacccctacagct

SEQ ID NO: 497772 - DNA, 120 bp, Artificial Sequence
  ENSG00000163520_6 (sequence is synthesized)
atgaccaggaggtggccgaggtggaagcagcaacagccctggggggtgaggtccaggcgggtgcagtccaggcaggcgcagggggccccccagctgctctgggaggtgggagtcagccac

SEQ ID NO: 497773 - DNA, 120 bp, Artificial Sequence
  ENSG00000163520_7 (sequence is synthesized)
tgtccaccatccaggcacccccctggccagctgtcctccccaggcccacagcggctgctgccctgggtcccccagccccagtgcaggccaaagctaggagagtgaccgaggacagtgagg

SEQ ID NO: 497774 - DNA, 120 bp, Artificial Sequence
  ENSG00000163520_8 (sequence is synthesized)
aggaagaagaggaggaggaggagagagaggaaatggctgtcactgagcagctggcagcaggtggccacagggggctggatgggctgcccactacagccccagctggacccagtcttccta

SEQ ID NO: 497775 - DNA, 120 bp, Artificial Sequence
  ENSG00000163520_9 (sequence is synthesized)
tccaggaggagagggcagaagctggggcaagggcagaagctggggcaaggcctgaagagaacctcatcctggatgcccaagccacgtcccgcagcactgggccggagggcgtgacgcatg

SEQ ID NO: 497776 - DNA, 120 bp, Artificial Sequence
  ENSG00000163520_10 (sequence is synthesized)
caccgagcctgggcaaggctgctctcgtcccaactcaggccgtgcctggctctcccagggacccagtcaagcccagcccccacaacatcctgtccacatcactgcctgatgcagcctgga

SEQ ID NO: 497777 - DNA, 120 bp, Artificial Sequence
  ENSG00000163520_11 (sequence is synthesized)
tcccacccacccgagaagtgcccaggaagccgcaagttctgccccattcccacgtggaggaggacacagaccccaactctgtccattctatccccagaagtagccctgaaggctccacca

SEQ ID NO: 497778 - DNA, 120 bp, Artificial Sequence
  ENSG00000163520_12 (sequence is synthesized)
aggacctgatcgagacttgctgcgcagccggacagcagtgggccattgacaatgacgagtgcctggagatccctgagagtggcactgaggacaacgtctgcaggacagcccagaggcact

SEQ ID NO: 497779 - DNA, 120 bp, Artificial Sequence
  ENSG00000163520_13 (sequence is synthesized)
gctgtgtctcctacttgcaggagaagagctgcatggccggcgtcctgggagccaaggagggtgagacctgtggggctgaggacaacgacagctgcggcatctccctgtacaagcaatgct

SEQ ID NO: 497780 - DNA, 120 bp, Artificial Sequence
  ENSG00000163520_14 (sequence is synthesized)
gtgactgctgtggcctgggcctccgcgtgcgggccgagggccagtcgtgtgagtccaatcctaacctgggctatccctgcaatcatgtcatgctctcctgctgtgagggtgaagagcctc

SEQ ID NO: 497781 - DNA, 120 bp, Artificial Sequence
  ENSG00000163520_15 (sequence is synthesized)
tcatagtacctgaggttcgccgacctccagagcccgcagctgcaccacggagagtttcagaggcagagatggcgggccgagaggccctgtcactgggcacagaggccgagctgccgaaca

SEQ ID NO: 497782 - DNA, 120 bp, Artificial Sequence
  ENSG00000163520_16 (sequence is synthesized)
gcctgccgggcgatgaccaggatgagtgccttctcctcccgggagagctgtgccagcacctttgcatcaatactgtgggttcttaccactgtgcctgctttcctggcttctcactgcagg

SEQ ID NO: 497783 - DNA, 120 bp, Artificial Sequence
  ENSG00000163520_17 (sequence is synthesized)
gctgccactgccgcagcccaatacctgcaaagacaatggaccctgcaagcaggtgtgcagcactgttgggggctcagccatatgctcctgttttcccggctatgccatcatggcggatgg

SEQ ID NO: 497784 - DNA, 120 bp, Artificial Sequence
  ENSG00000163520_18 (sequence is synthesized)
cgtgtcctgtgaagaccaagacgagtgcctgatgggtgctcacgattgtagccggcgacagttctgtgtgaacaccctgggatccttctactgtgtcaaccacacagtgctctgtgccga

SEQ ID NO: 497785 - DNA, 120 bp, Artificial Sequence
  ENSG00000163520_19 (sequence is synthesized)
tggctatatcctcaatgcgcacaggaagtgcgtggacatcaacgagtgtgtgacggacctgcacacgtgcagccggggcgagcactgtgtgaacacactgggctccttccactgctacaa

SEQ ID NO: 497786 - DNA, 120 bp, Artificial Sequence
  ENSG00000163520_20 (sequence is synthesized)
ggcactcacctgtgagccaggctatgccctcaaggatggcgagtgcgaagacgtggatgagtgtgcgatgggcacgcacacctgccagccgggcttcttgtgccagaacaccaagggctc

SEQ ID NO: 497787 - DNA, 120 bp, Artificial Sequence
  ENSG00000163520_21 (sequence is synthesized)
cttctactgccaggccaggcagcgctgcatggatggcttcctgcaggatcctgaaggcaactgtgtggacatcaacgagtgcacgtcactgtccgagccatgtcggccaggcttcagctg

SEQ ID NO: 497788 - DNA, 120 bp, Artificial Sequence
  ENSG00000163520_22 (sequence is synthesized)
catcaacacggtgggctcctacacatgccagaggaacccgctgatctgcgcgcgcggctaccacgccagcgatgatgggaccaagtgtgtggacgtgaatgagtgtgagacaggtgtgca

SEQ ID NO: 497789 - DNA, 120 bp, Artificial Sequence
  ENSG00000163520_23 (sequence is synthesized)
ccgctgcggtgagggccaagtgtgccacaacctccctggctcctaccgctgtgactgcaaagccggctttcagcgggatgcctttggccggggctgcatcgacgtgaatgagtgctgggc

SEQ ID NO: 497790 - DNA, 120 bp, Artificial Sequence
  ENSG00000163520_24 (sequence is synthesized)
ctcgccaggccgcctgtgccagcacacgtgtgagaacacactcggctcctaccgctgttcctgcgcctccgggttcctgctagcagcggacggcaagcgctgtgaagacgtgaatgagtg

SEQ ID NO: 497791 - DNA, 120 bp, Artificial Sequence
  ENSG00000163520_25 (sequence is synthesized)
tgaggcccagcgctgcagccaggagtgtgccaacatctatggctcctaccagtgctactgccgccagggctaccagctggctgaggatgggcacacctgcacagacatcgacgagtgtgc

SEQ ID NO: 497792 - DNA, 120 bp, Artificial Sequence
  ENSG00000163520_26 (sequence is synthesized)
tcaaggcgccggcatcctctgcaccttccgctgtctcaacgtgccagggagctaccagtgtgcatgccctgagcagggctacaccatgacggccaacgggaggtcctgcaaggacgtgga

SEQ ID NO: 497793 - DNA, 120 bp, Artificial Sequence
  ENSG00000163520_27 (sequence is synthesized)
tgagtgtgcactgggtacccacaactgttccgaggctgagacctgccacaacatccagggtagcttccgctgcctgcgcttcgagtgtcctcccaactatgtccaagtctccaaaacgaa

SEQ ID NO: 497794 - DNA, 120 bp, Artificial Sequence
  ENSG00000163520_28 (sequence is synthesized)
gtgcgagcgcaccacgtgccatgacttcctggagtgccagaactcgccagcgcgcatcacgcactaccagctcaacttccagacgggcctcctggtgcctgcgcatatcttccgcattgg

SEQ ID NO: 497795 - DNA, 120 bp, Artificial Sequence
  ENSG00000163520_29 (sequence is synthesized)
ccccgcgccagccttcacgggggacaccatcgccctgaacatcatcaagggcaatgaggagggctactttggcacgcgcaggctcaatgcctacacgggtgtggtctacctgcagcgggc

SEQ ID NO: 497796 - DNA, 120 bp, Artificial Sequence
  ENSG00000163520_30 (sequence is synthesized)
cgtgctggagccccgggactttgccctggacgtggagatgaagctctggaggcagggctccgtcaccaccttcctggccaagatgcacatcttcttcaccacctttgccctgtgaggtgc

SEQ ID NO: 497797 - DNA, 120 bp, Artificial Sequence
  ENSG00000163520_31 (sequence is synthesized)
cagcacgggccacctgcgggtgtggcgcagcccagggctcacactgcgtgggagggactgggtcactattgtggtttttactataactttgtaaattaacttaattttgctgacttgact

SEQ ID NO: 497798 - DNA, 120 bp, Artificial Sequence
  ENSG00000163520_32 (sequence is synthesized)
cctgtggcttctggacccctcctctgccccgcaggaggaagttccacggcaggtggtgcgttcccacgcaggcaccaagtggaagcttgcacggtgggccacggccgtggcgggtgccct

SEQ ID NO: 497799 - DNA, 120 bp, Artificial Sequence
  ENSG00000163520_33 (sequence is synthesized)
gtgggtgaggctgggtgatgacctgaggaccagagacacgcgaccatgttggggctcttggactcctctggatgacccgtccccaaagttgacattccatttcatgttccactgtgatta

SEQ ID NO: 497800 - DNA, 120 bp, Artificial Sequence
  ENSG00000163520_34 (sequence is synthesized)
tgttccactgtgattaattcttttcttttttaaaaaatcattttaaagttttttgtttaactataaagtagtacatgtacattatataaaaaaaagttcaactagtatgaaagggttata

SEQ ID NO: 497801 - DNA, 120 bp, Artificial Sequence
  ENSG00000163520_35 (sequence is synthesized)
gattcccttcatttatttcatcatggggctcatgcctgcctggcgttcagttctctacagatttgctcttgggtttattatctgcccctccacccctgagggtgtcagtgctgtgaggac

SEQ ID NO: 497802 - DNA, 120 bp, Artificial Sequence
  ENSG00000163520_36 (sequence is synthesized)
gctgggaacctgtcttgctggctgataaacccctggttcctagaggggctgggtgcagaggaggcgttcctttagaaatggggcaggcttggggaccactgctgtggtaacgagtcctgc

SEQ ID NO: 497803 - DNA, 120 bp, Artificial Sequence
  ENSG00000163520_37 (sequence is synthesized)
tgtccctctgtcactgccctatggggctgcgctttaggctgggagtcggagaaggagctcttgcctgtgactttggggagcacgctgtctataagagtcagggtcttacaggagagggga

SEQ ID NO: 497804 - DNA, 120 bp, Artificial Sequence
  ENSG00000163521_0 (sequence is synthesized)
ggtatctcagcaaccgctgggcatccggaggatgtggggacgcggagctgagaggctccgggctagctaggtgtaggggtggacgggtcccaggaccctggtgagggttctctacttggc

SEQ ID NO: 497805 - DNA, 120 bp, Artificial Sequence
  ENSG00000163521_1 (sequence is synthesized)
cttcggtgggggtcaagacgcaggcacctacgccaaaggggagcaaagccgggctcggcccgaggcccccaggacctccatctcccaatgttggaggttccctcccaggaatccgacacg

SEQ ID NO: 497806 - DNA, 120 bp, Artificial Sequence
  ENSG00000163521_2 (sequence is synthesized)
tgacggtctgtccgccgtctcagactagaggagcgctgtaaacgccatggctcccaagaagctgtcctgccttcgttccctgctgctgccgctcagcctgacgctactgctgccccaggc

SEQ ID NO: 497807 - DNA, 120 bp, Artificial Sequence
  ENSG00000163521_3 (sequence is synthesized)
agacactcggtcgttcgtagtggataggggtcatgaccggtttctcctagacggggccccgttccgctatgtgtctggcagcctgcactactttcgggtaccgcgggtgctttgggccga

SEQ ID NO: 497808 - DNA, 120 bp, Artificial Sequence
  ENSG00000163521_4 (sequence is synthesized)
ccggcttttgaagatgcgatggagcggcctcaacgccatacagttttatgtgccctggaactaccacgagccacagcctggggtctataactttaatggcagccgggacctcattgcctt

SEQ ID NO: 497809 - DNA, 120 bp, Artificial Sequence
  ENSG00000163521_5 (sequence is synthesized)
tctgaatgaggcagctctagcgaacctgttggtcatactgagaccaggaccttacatctgtgcagagtgggagatggggggtctcccatcctggttgcttcgaaaacctgaaattcatct

SEQ ID NO: 497810 - DNA, 120 bp, Artificial Sequence
  ENSG00000163521_6 (sequence is synthesized)
aagaacctcagatccagacttccttgccgcagtggactcctggttcaaggtcttgctgcccaagatatatccatggctttatcacaatgggggcaacatcattagcattcaggtggagaa

SEQ ID NO: 497811 - DNA, 120 bp, Artificial Sequence
  ENSG00000163521_7 (sequence is synthesized)
tgaatatggtagctacagagcctgtgacttcagctacatgaggcacttggctgggctcttccgtgcactgctaggagaaaagatcttgctcttcaccacagatgggcctgaaggactcaa

SEQ ID NO: 497812 - DNA, 120 bp, Artificial Sequence
  ENSG00000163521_8 (sequence is synthesized)
gtgtggctccctccggggactctataccactgtagattttggcccagctgacaacatgaccaaaatctttaccctgcttcggaagtatgaaccccatgggccattggtaaactctgagta

SEQ ID NO: 497813 - DNA, 120 bp, Artificial Sequence
  ENSG00000163521_9 (sequence is synthesized)
ctacacaggctggctggattactggggccagaatcactccacacggtctgtgtcagctgtaaccaaaggactagagaacatgctcaagttgggagccagtgtgaacatgtacatgttcca

SEQ ID NO: 497814 - DNA, 120 bp, Artificial Sequence
  ENSG00000163521_10 (sequence is synthesized)
tggaggtaccaactttggatattggaatggtgccgataagaagggacgcttccttccgattactaccagctatgactatgatgcacctatatctgaagcaggggaccccacacctaagct

SEQ ID NO: 497815 - DNA, 120 bp, Artificial Sequence
  ENSG00000163521_11 (sequence is synthesized)
cctgtgactctgcacctggttgggcatttactggctttcctagacttgctttgcccccgtgggcccattcattcaatcttgccaatgacctttgaggctgtcaagcaggaccatggcttc

SEQ ID NO: 497816 - DNA, 120 bp, Artificial Sequence
  ENSG00000163521_12 (sequence is synthesized)
atgttgtaccgaacctatatgacccataccatttttgagccaacaccattctgggtgccaaataatggagtccatgaccgtgcctatgtgatggtggatggggtgttccagggtgttgtg

SEQ ID NO: 497817 - DNA, 120 bp, Artificial Sequence
  ENSG00000163521_13 (sequence is synthesized)
gagcgaaatatgagagacaaactatttttgacggggaaactggggtccaaactggatatcttggtggagaacatggggaggctcagctttgggtctaacagcagtgacttcaagggcctg

SEQ ID NO: 497818 - DNA, 120 bp, Artificial Sequence
  ENSG00000163521_14 (sequence is synthesized)
ttgaagccaccaattctggggcaaacaatccttacccagtggatgatgttccctctgaaaattgataaccttgtgaagtggtggtttcccctccagttgccaaaatggccatatcctcaa

SEQ ID NO: 497819 - DNA, 120 bp, Artificial Sequence
  ENSG00000163521_15 (sequence is synthesized)
gctccttctggccccacattctactccaaaacatttccaattttaggctcagttggggacacatttctatatctacctggatggaccaagggccaagtctggatcaatgggtttaacttg

SEQ ID NO: 497820 - DNA, 120 bp, Artificial Sequence
  ENSG00000163521_16 (sequence is synthesized)
ggccggtactggacaaagcaggggccacaacagaccctctacgtgccaagattcctgctgtttcctaggggagccctcaacaaaattacattgctggaactagaagatgtacctctccag

SEQ ID NO: 497821 - DNA, 120 bp, Artificial Sequence
  ENSG00000163521_17 (sequence is synthesized)
ccccaagtccaatttttggataagcctatcctcaatagcactagtactttgcacaggacacatatcaattccctttcagctgatacactgagtgcctctgaaccaatggagttaagtggg

SEQ ID NO: 497822 - DNA, 83 bp, Artificial Sequence
  ENSG00000163521_18 (sequence is synthesized)
gagacccttggacctgggacatggagtgggcaggatcccttggtgctggccacggtgaccctaaggaactaaaggccacagtg

SEQ ID NO: 497823 - DNA, 120 bp, Artificial Sequence
  ENSG00000163521_19 (sequence is synthesized)
tgctggccacggtgaccctaaggaactaaaggccacagtgcctctgaatgtaagtacaagtacacattccttgccaaactttattgtgattaaaattccagagacagtaccagctccaca

SEQ ID NO: 497824 - DNA, 120 bp, Artificial Sequence
  ENSG00000163521_20 (sequence is synthesized)
attacaggcgtgagccatcgtgcccagccagattctccatttctaacaagttcccaggtgatgtcgatgaagctggttcgtgaactgcactttaacatgatgtagaaattttacaaacta

SEQ ID NO: 497825 - DNA, 120 bp, Artificial Sequence
  ENSG00000163521_21 (sequence is synthesized)
tttttctaccgcccccttataaagaaggtcgggacaggaagactgccaggactcctaggccaagggtgggaaagggcaggccaggacctccttccaaccgcttcctggagattccctgca

SEQ ID NO: 497826 - DNA, 120 bp, Artificial Sequence
  ENSG00000163521_22 (sequence is synthesized)
agactagaggagcgctgtaaacgccatggctcccaagaagctgtcctgccttcgttccctgctgctgccgctcagcctgacgctactgctgccccagacggggccccgttccgctatgtg

SEQ ID NO: 497827 - DNA, 120 bp, Artificial Sequence
  ENSG00000163527_0 (sequence is synthesized)
gtccccgcccagcacccctcgcaccaggcggcggcggcggaggaggagagctagacccgccgccggggcacaacatggcggagccctcggccccggagagcaagcacaagtcgtccctca

SEQ ID NO: 497828 - DNA, 120 bp, Artificial Sequence
  ENSG00000163527_1 (sequence is synthesized)
cacaagtcgtccctcaactcgtccccgtggagtggcctcatggccctgggaaacagccggcacggccaccacgggcccggggcccagtgcgcgcacaaggcggcgggcggcgcggcgccg

SEQ ID NO: 497829 - DNA, 120 bp, Artificial Sequence
  ENSG00000163527_2 (sequence is synthesized)
cggggctgtccggggggctgtcgcagccggctgggtggcagtcgcttctctccttcaccatcctcttcctggcctggcttgccggcttcagctcgcgcctcttcgccgtcatccgcttcg

SEQ ID NO: 497830 - DNA, 120 bp, Artificial Sequence
  ENSG00000163527_3 (sequence is synthesized)
aaagcatcatccacgagttcgacccgtggtttaactatagatcaacacatcatcttgcatctcatgggttctatgaatttttaaattggtttgatgaaagagcatggtatccactaggaa

SEQ ID NO: 497831 - DNA, 120 bp, Artificial Sequence
  ENSG00000163527_4 (sequence is synthesized)
gaatagtaggtggtactgtttacccagggttgatgataaccgctggccttattcattggattttaaatacattgaacataactgttcacataagagacgtatgtgtgttccttgcaccaa

SEQ ID NO: 497832 - DNA, 120 bp, Artificial Sequence
  ENSG00000163527_5 (sequence is synthesized)
cttttagcggccttacatctatatctactttcctgcttacaagagaactttggaaccaaggagcaggacttttagctgcttgttttattgctattgtaccaggctacatatctcggtcag

SEQ ID NO: 497833 - DNA, 120 bp, Artificial Sequence
  ENSG00000163527_6 (sequence is synthesized)
tagctggatcctttgataatgaaggcattgctatttttgcacttcagttcacatactatttatgggtaaaatctgtaaaaactgggtcagttttttggacaatgtgctgctgcttatcct

SEQ ID NO: 497834 - DNA, 120 bp, Artificial Sequence
  ENSG00000163527_7 (sequence is synthesized)
atttctatatggtctctgcttggggtggttatgtatttatcatcaatcttattccactgcatgtatttgtgttgttactgatgcagagatacagcaaaagagtctacatagcatatagca

SEQ ID NO: 497835 - DNA, 120 bp, Artificial Sequence
  ENSG00000163527_8 (sequence is synthesized)
ctttctacattgtgggtttaatattatcaatgcagataccttttgtgggattccagccaatcagaacaagtgaacacatggcagctgcaggtgtctttgcattgctgcaagcttatgctt

SEQ ID NO: 497836 - DNA, 120 bp, Artificial Sequence
  ENSG00000163527_9 (sequence is synthesized)
tcttgcagtatctgagagaccgattaacaaaacaagagttccagacccttttctttttgggtgtatcactagctgcaggtgctgtgttccttagtgtcatctatttgacttatacaggtt

SEQ ID NO: 497837 - DNA, 120 bp, Artificial Sequence
  ENSG00000163527_10 (sequence is synthesized)
acattgcaccatggagtggcaggttttattcattgtgggatactgggtatgcaaaaatacacattccaattattgcatcagtgtctgagcatcaacctacgacttgggtgtctttcttct

SEQ ID NO: 497838 - DNA, 120 bp, Artificial Sequence
  ENSG00000163527_11 (sequence is synthesized)
ttgatctacatattcttgtatgtaccttcccagcaggcctttggttctgcatcaaaaatatcaacgatgaaagagtatttgttgctctatatgcaatcagtgctgtctactttgctggag

SEQ ID NO: 497839 - DNA, 120 bp, Artificial Sequence
  ENSG00000163527_12 (sequence is synthesized)
tgatggtgcgactgatgttgactttgactccagtcgtgtgtatgctgtctgcaattgccttttcaaatgtttttgagcactatttgggggatgacatgaaaagggaaaatccacctgtgg

SEQ ID NO: 497840 - DNA, 120 bp, Artificial Sequence
  ENSG00000163527_13 (sequence is synthesized)
aggacagcagtgatgaggatgacaaaagaaaccaaggaaatttgtatgataaggcaggtaaagtgaggaaacatgcaactgaacaggaaaaaactgaagagggattaggccctaatataa

SEQ ID NO: 497841 - DNA, 120 bp, Artificial Sequence
  ENSG00000163527_14 (sequence is synthesized)
aaagcattgtcaccatgttgatgctgatgctattgatgatgtttgctgtccactgtacctgggtcacaagcaatgcctactctagtccaagtgtagtcctggcctcatacaatcatgatg

SEQ ID NO: 497842 - DNA, 120 bp, Artificial Sequence
  ENSG00000163527_15 (sequence is synthesized)
gcaccaggaatatcttagatgattttagagaagcttacttttggctaaggcaaaatacagatgaacatgcacgagtaatgtcttggtgggattatggctatcagatagctggaatggcta

SEQ ID NO: 497843 - DNA, 120 bp, Artificial Sequence
  ENSG00000163527_16 (sequence is synthesized)
atagaactacgttggtggataataacacctggaataacagccacatagcactggtgggaaaagctatgtcttctaatgaaacagcagcctataaaatcatgaggactctagatgtagatt

SEQ ID NO: 497844 - DNA, 120 bp, Artificial Sequence
  ENSG00000163527_17 (sequence is synthesized)
ttggctattctggtgatgatatcaacaaatttctctggatggttaggatagctgaaggagaacatcccaaagacattcgggaaagtgactattttaccccacagggagaattccgtgtag

SEQ ID NO: 497845 - DNA, 120 bp, Artificial Sequence
  ENSG00000163527_18 (sequence is synthesized)
acaaagcaggatcccctactttgttgaattgccttatgtataaaatgtcatactacagatttggagaaatgcagctggattttcgtacacccccaggttttgaccgaacacgtaatgctg

SEQ ID NO: 497846 - DNA, 120 bp, Artificial Sequence
  ENSG00000163527_19 (sequence is synthesized)
agattggaaataaggacattaaattcaaacatttggaagaagcctttacatcagaacactggcttgttaggatatataaagtaaaagcacctgataacagggagacattagatcacaaac

SEQ ID NO: 497847 - DNA, 120 bp, Artificial Sequence
  ENSG00000163527_20 (sequence is synthesized)
ctcgagtcaccaacattttcccaaaacagaagtatttgtcaaagaagactaccaaaaggaagcgtggctacattaaaaataagctggtttttaagaaaggcaagaaaatatctaagaaga

SEQ ID NO: 497848 - DNA, 120 bp, Artificial Sequence
  ENSG00000163527_21 (sequence is synthesized)
ctgtttaaatgcactgttctggttcctaacttgaagcagttgtccttgtgagaaccggtctttgcctttagctcatgtcgtgtttcacagcaaagagggtacagaaccatcactggtcca

SEQ ID NO: 497849 - DNA, 120 bp, Artificial Sequence
  ENSG00000163527_22 (sequence is synthesized)
ggttaatgtacaaaattttctggcaatgcctgattaaaaaaataaaattggcttgttgagaacagctgttttcgatttctaatgtgaagcaagacagagcactgctgtaaatgtctagca

SEQ ID NO: 497850 - DNA, 120 bp, Artificial Sequence
  ENSG00000163527_23 (sequence is synthesized)
gcagattttttttttattggtacatattatccttcaaatctgagaatttggactaactgcaccaaagaaccctctaatttggtccctggcacatgcatacttgtcaatgtttttattctt

SEQ ID NO: 497851 - DNA, 120 bp, Artificial Sequence
  ENSG00000163527_24 (sequence is synthesized)
ttacaagacctgcattttatttgaattacccgaatagcaatatgtaaaatacaagtgacaaaatgtgatgagagcttcttgaaccggtaaactagtacaggtctgagaaagacatattag

SEQ ID NO: 497852 - DNA, 120 bp, Artificial Sequence
  ENSG00000163527_25 (sequence is synthesized)
aagaatcattatacttccttgaattatatttattttcatgtttctctaatgcaaagaatgtttcatcaaatgtatattttctgttgcttactgtttgctctgagaagaagctgctgtttc

SEQ ID NO: 497853 - DNA, 120 bp, Artificial Sequence
  ENSG00000163527_26 (sequence is synthesized)
aaagatggacctctgagtagctaattgattcaagtagtttttttatgttgacacattattactgctgttagcagtcgttttcaccaggtacttacagagcagatttcatacatcattcat

SEQ ID NO: 497854 - DNA, 120 bp, Artificial Sequence
  ENSG00000163527_27 (sequence is synthesized)
tcaagggctaaatttatattttttggaaatcatggcaactacacaggatgttgcttaccaggacggagttttggtatcttagtactgaagttagcactatgtttacatgcaaaagattaa

SEQ ID NO: 497855 - DNA, 120 bp, Artificial Sequence
  ENSG00000163527_28 (sequence is synthesized)
ggaaaaaacccttaaagtggacaggtatccaaagttcattttctgtgactcatcaaagtgacaaaagacttgtaacaactttgcctggacttttttcattttacaacagttcatccattc

SEQ ID NO: 497856 - DNA, 120 bp, Artificial Sequence
  ENSG00000163527_29 (sequence is synthesized)
acaatgattttgttctctgctccatattttttaatcccttaagcatttgatgaaacactctttagtgctatatgcattttcttacttttgttaaaaatgtgacagttgtcaaaaaatgca

SEQ ID NO: 497857 - DNA, 120 bp, Artificial Sequence
  ENSG00000163527_30 (sequence is synthesized)
ctaaaatgtaaatggagattgaacaagttcactttccagcttataggcaactttatacagacttgaacattttctccagttgtttagtaaaagtgaaagagaaagggtttttcctgccac

SEQ ID NO: 497858 - DNA, 120 bp, Artificial Sequence
  ENSG00000163527_31 (sequence is synthesized)
aggatataacttttttttatataacaagcataacacaccactgcttttggtggaaaagtgcagaatagtatgtaccttttatgaagaaaaatgtaatttacaatattcagtgagaatgtt

SEQ ID NO: 497859 - DNA, 120 bp, Artificial Sequence
  ENSG00000163527_32 (sequence is synthesized)
actgctgattttcttttccaaggtgtagaatattctttgatttatagaattcatttttgacccagatgatggttcctttacagaacaataaaatggctgaacattttcacaaatagagtg

SEQ ID NO: 497860 - DNA, 120 bp, Artificial Sequence
  ENSG00000163527_33 (sequence is synthesized)
taacgaagtctggatttctgataccttgtcatttgggggattttattttactttgttgctttaaaattcaatgcagagaagttgttgactgtaggggaaataaagttaattcaaattttg

SEQ ID NO: 497861 - DNA, 120 bp, Artificial Sequence
  ENSG00000163527_34 (sequence is synthesized)
attgcttctcagagccgtggtgccgcctccgtctgctgcttctttcctggcgccctcgtcccgtcggctttcgccgccgccgccgcagctgcactggggatacggatggctagtggggcg

SEQ ID NO: 497862 - DNA, 120 bp, Artificial Sequence
  ENSG00000163527_35 (sequence is synthesized)
ccggggccatctgggttgagagagcggcgattgcggccgctgctgaggcggagactccccgccgccgcttcctccacccccagtccgccggcctcgcggcgctgagggcgggagcgcgca

SEQ ID NO: 497863 - DNA, 120 bp, Artificial Sequence
  ENSG00000163527_36 (sequence is synthesized)
tgaaagagtatttggtaagagaggtttttaatgaatactttgatatggaatagttatttttctttttgagattatttactttaaatttttgtttttctatgtttgactctatatattcaa

SEQ ID NO: 497864 - DNA, 120 bp, Artificial Sequence
  ENSG00000163527_37 (sequence is synthesized)
atttttgtttttctatgtttgactctatatattcaagataaattttctcctttattttgcataggtgcttaaccaagaaaaattcactgagaggctgggcatggtggcacacgcctgtaa

SEQ ID NO: 497865 - DNA, 120 bp, Artificial Sequence
  ENSG00000163528_0 (sequence is synthesized)
ccgcggttgcgagggcgccgaggcaggcgcgcggcgggcaggcctgggagggggcgggtccgcgcgggcttcggaggagcccgccctgccagaggagagggaggtcacggcgtaaaggtg

SEQ ID NO: 497866 - DNA, 120 bp, Artificial Sequence
  ENSG00000163528_1 (sequence is synthesized)
gagggaggtcacggcgtaaaggtgcagctgccgccaccgccgcttctgcaaggtctcagggacgggctgcagccatgtcctattgccggcaggaaggctttgcccaggatggttccttct

SEQ ID NO: 497867 - DNA, 120 bp, Artificial Sequence
  ENSG00000163528_2 (sequence is synthesized)
ggaatgtctattcccctccttccctccctgaagctctttgtcagggacaaaggtaggatccctccccttccgtcttctccactggatgcctgtgtcgtattcatctgtgaccaccaggta

SEQ ID NO: 497868 - DNA, 120 bp, Artificial Sequence
  ENSG00000163528_3 (sequence is synthesized)
ctaccacagagctggagctgaggaagggaaggatcgaatcatatttgtaaccaaagaagatcatgaaactccaagcagtgcagaattggtggctgatgaccccaacgatccatacgagga

SEQ ID NO: 497869 - DNA, 120 bp, Artificial Sequence
  ENSG00000163528_4 (sequence is synthesized)
gcatggattgatactgccaaatggaaacattaactggaactgcccatgccttgggggaatggccagcggtccctgtggagaacagtttaagtcagccttttcctgcttccactatagcac

SEQ ID NO: 497870 - DNA, 120 bp, Artificial Sequence
  ENSG00000163528_5 (sequence is synthesized)
ggaggagatcaaggggtcagactgtgtagaccagttccgggccatgcaggaatgcatgcagaaatacccagacctctatccccaagaggatgaggatgaggaagaggaaagagagaagaa

SEQ ID NO: 497871 - DNA, 120 bp, Artificial Sequence
  ENSG00000163528_6 (sequence is synthesized)
gcaaccaaagaagaggagggatcaagttaatgaaggccacaaggcactgggcaccagtccttttggagtggaccttttgcaaaaggccttgtcatcaccttccaagaaagtttccttctg

SEQ ID NO: 497872 - DNA, 120 bp, Artificial Sequence
  ENSG00000163528_7 (sequence is synthesized)
ttgtcctgtgcattataatatacaaaataacttattttgatgatcagaggtcttgaggtcttgacatcttgacatatacactgaaaaaaatgggggttgtatgtatgtgtgtcctaccca

SEQ ID NO: 497873 - DNA, 120 bp, Artificial Sequence
  ENSG00000163528_8 (sequence is synthesized)
aacctgtggccgccacttttgaattctcagattgccctgaattttgccacttttaaataatgtgctgaataagctcagcaactaaaaaccattacccaagaacgtttcttgtgagtgagc

SEQ ID NO: 497874 - DNA, 120 bp, Artificial Sequence
  ENSG00000163528_9 (sequence is synthesized)
tgatttattctgattcattatattccttttggtagattttataccccttggggaaataatacaacaaaaacatctcttaaaaatgctgggatggggccatatctactagcagaggccaga

SEQ ID NO: 497875 - DNA, 120 bp, Artificial Sequence
  ENSG00000163528_10 (sequence is synthesized)
tggtcagatatgatttctgcaaacccatcttgaccttgagtatgtgaaggggtactgtactttattcctgatacattttggtttccatgtaggtgttgagctcctggttttctgtgtttg

SEQ ID NO: 497876 - DNA, 120 bp, Artificial Sequence
  ENSG00000163528_11 (sequence is synthesized)
gatgatgaagatttggacccttccattcataatccctttctaagtgaagggagaggctggcttggctgttccttgttattccgaaagccctggtttggggcccatgttcacactggctct

SEQ ID NO: 497877 - DNA, 120 bp, Artificial Sequence
  ENSG00000163528_12 (sequence is synthesized)
cagtctagtcaggtgcaatgttcttgagaggtggggacctaattattaccagagtagcagcaagagaggaaacgttgtgaattaagtattcaattaaaaggaaacatgatttctacctga

SEQ ID NO: 497878 - DNA, 120 bp, Artificial Sequence
  ENSG00000163530_0 (sequence is synthesized)
agccctttgtttatggcctgatctagctaaggcttctagacttcaggagcttaagaatcgtccggagggctgggcgtggcggtgcaggcctgtagtcccacccactccgaaggctgcgga

SEQ ID NO: 497879 - DNA, 120 bp, Artificial Sequence
  ENSG00000163530_1 (sequence is synthesized)
aggaattcaagaccagcctgggcaacacagtgaggccccctacccacatcctctccgtccccgcaatctccttccatcccagggtgttgctgaaaatgtcagatgcaaatttggatagca

SEQ ID NO: 497880 - DNA, 120 bp, Artificial Sequence
  ENSG00000163530_2 (sequence is synthesized)
gctgaaaatgtcagatgcaaatttggatagcagcaagaagaatttcttggagggggaagtagatgatgaggaaagtgtgattttgacactggtgccagttaaagatgacgcaaatatgga

SEQ ID NO: 497881 - DNA, 120 bp, Artificial Sequence
  ENSG00000163530_3 (sequence is synthesized)
acaaatggaaccaagcgtttcttcaacttctgatgtcaaactggagaagcctaagaaatacaatccaggtcatctacttcaaacaaatgagcaatttacagctccacaaaaagctagatg

SEQ ID NO: 497882 - DNA, 120 bp, Artificial Sequence
  ENSG00000163530_4 (sequence is synthesized)
caaaataccagcccttcccttgccgaccattttgcctcccattaataaggtgtgtcgggacactttgcgggactggtgtcaacaactcggtttgagtactaatggcaagaaaatcgaagt

SEQ ID NO: 497883 - DNA, 120 bp, Artificial Sequence
  ENSG00000163530_5 (sequence is synthesized)
agagaccagattacagcgatgttcgaggaaacgcaaggcagtgaccaagagagcaaggcttcagagaagttatgagatgaatgagagagcagaagagaccaatacagttgaagtgataac

SEQ ID NO: 497884 - DNA, 120 bp, Artificial Sequence
  ENSG00000163530_6 (sequence is synthesized)
ttcagcaccgggagccatgttggcatcatgggcaagaattgctgcaagagctgttcagcctaaggctttgaattcatgttccattcctgtttctgttgaggcctttttgatgcaagcctc

SEQ ID NO: 497885 - DNA, 120 bp, Artificial Sequence
  ENSG00000163530_7 (sequence is synthesized)
tggcgtcaggtggtgtgtggtccatggcagacttctctcggcagacacaaagggttgggtacgcctgcagtttcatgcaggtcaggcctgggtgcctaccactcacaggaggatgatttc

SEQ ID NO: 497886 - DNA, 120 bp, Artificial Sequence
  ENSG00000163530_8 (sequence is synthesized)
tctcttcttgttacctgcctgcattttcccatccccaggcatagaagataatatgttatgccccgactgtgctaagaggaataagaagatgatgaaaagattaatgacagtagagaagta

SEQ ID NO: 497887 - DNA, 120 bp, Artificial Sequence
  ENSG00000163530_9 (sequence is synthesized)
gcagcaacctgtttgaatacaatgtactaaaggagggatgtactttcagatcatgtaacctattacgaaggagtggaagaggagacaatttgaatgaatcctcatgatctacaaaacaaa

SEQ ID NO: 497888 - DNA, 120 bp, Artificial Sequence
  ENSG00000163530_10 (sequence is synthesized)
atcatagtgactaggactccacagtgaagatggttgactagtgacacagccccatctaaagaatccctttctgtatgtctgaaaacccattaaaataaagtcactgcaattggccttgta

SEQ ID NO: 497889 - DNA, 120 bp, Artificial Sequence
  ENSG00000163531_0 (sequence is synthesized)
gcacgggctggtctctgccctaatgcggcggctggcggcgagaggcgctgcaggggacgcgggggaagtggcggcgccggcagcggacagctcggacagcgcccagggccggagcccgag

SEQ ID NO: 497890 - DNA, 120 bp, Artificial Sequence
  ENSG00000163531_1 (sequence is synthesized)
cccttggaggttgattgacttatgtgcaatttgggacgctggagtttaccttccctccgcagcctggaacagagcctcctctggtgttgcaaggaagaggctgaatgaggcagagaagct

SEQ ID NO: 497891 - DNA, 120 bp, Artificial Sequence
  ENSG00000163531_2 (sequence is synthesized)
gagtgctgtccaggaggcccagttaaagcggctcgaggtgacaagaccccgagtgctggggagcagggagcagggccaggtgccgaggatggccaggcagccaccgccgccctgggtcca

SEQ ID NO: 497892 - DNA, 120 bp, Artificial Sequence
  ENSG00000163531_3 (sequence is synthesized)
tgcagccttcctcctctgcctcctcagtcttggcggagccatcgaaattcctatggatctgacgcagccgccaaccatcaccaagcagtcagcgaaggatcacatcgtggacccccgtga

SEQ ID NO: 497893 - DNA, 120 bp, Artificial Sequence
  ENSG00000163531_4 (sequence is synthesized)
taacatcctgattgagtgtgaagcaaaagggaaccctgcccccagcttccactggacacgaaacagcagattcttcaacatcgccaaggacccccgggtgtccatgaggaggaggtctgg

SEQ ID NO: 497894 - DNA, 120 bp, Artificial Sequence
  ENSG00000163531_5 (sequence is synthesized)
gaccctggtgattgacttccgcagtggcgggcggccggaggaatatgagggggaatatcagtgcttcgcccgcaacaaatttggcacggccctgtccaataggatccgcctgcaggtgtc

SEQ ID NO: 497895 - DNA, 120 bp, Artificial Sequence
  ENSG00000163531_6 (sequence is synthesized)
taaatctcctctgtggcccaaggaaaacctagaccctgtcgtggtccaagagggcgctcctttgacgctccagtgcaaccccccgcctggacttccatccccggtcatcttctggatgag

SEQ ID NO: 497896 - DNA, 120 bp, Artificial Sequence
  ENSG00000163531_7 (sequence is synthesized)
cagctccatggagcccatcacccaagacaaacgtgtctctcagggccataacggagacctatacttctccaacgtgatgctgcaggacatgcagaccgactacagttgtaacgcccgctt

SEQ ID NO: 497897 - DNA, 120 bp, Artificial Sequence
  ENSG00000163531_8 (sequence is synthesized)
ccacttcacccacaccatccagcagaagaaccctttcaccctcaaggtcctcaccaaccacccttataatgactcgtccttaagaaaccaccctgacatgtacagtgcccgaggagttgc

SEQ ID NO: 497898 - DNA, 120 bp, Artificial Sequence
  ENSG00000163531_9 (sequence is synthesized)
agaaagaacaccaagcttcatgtatccccagggcaccgcgagcagccagatggtgcttcgtggcatggacctcctgctggaatgcatcgcctccggggtcccaacaccagacatcgcatg

SEQ ID NO: 497899 - DNA, 120 bp, Artificial Sequence
  ENSG00000163531_10 (sequence is synthesized)
gtacaagaaaggtggggacctcccatctgataaggccaagtttgagaactttaataaggccctgcgtatcacaaatgtctctgaggaagactccggggagtatttctgcctggcctccaa

SEQ ID NO: 497900 - DNA, 120 bp, Artificial Sequence
  ENSG00000163531_11 (sequence is synthesized)
caagatgggcagcatccggcacacgatctcggtgagagtaaaggctgctccctactggctggacgaacccaagaaccttattctggctcctggcgaggatgggagactggtgtgtcgagc

SEQ ID NO: 497901 - DNA, 120 bp, Artificial Sequence
  ENSG00000163531_12 (sequence is synthesized)
caatggaaaccccaaacccactgtccagtggatggtgaatggggaacctttgcaatcggcaccacctaacccaaaccgtgaggtggccggagacaccatcatcttccgggacacccagat

SEQ ID NO: 497902 - DNA, 120 bp, Artificial Sequence
  ENSG00000163531_13 (sequence is synthesized)
cagcagcagggctgtgtaccagtgcaacacctccaacgagcatggctacctgctggccaacgcctttgtcagtgtgctggatgtgccgcctcggatgctgtcgccccggaaccagctcat

SEQ ID NO: 497903 - DNA, 120 bp, Artificial Sequence
  ENSG00000163531_14 (sequence is synthesized)
tcgagtgattctttacaaccggacgcggctggactgccctttctttgggtctcccatccccacactgcgatggtttaagaatgggcaaggaagcaacctggatggtggcaactaccatgt

SEQ ID NO: 497904 - DNA, 120 bp, Artificial Sequence
  ENSG00000163531_15 (sequence is synthesized)
ttatgagaacggcagtctggaaattaagatgatccgcaaagaggaccagggcatctacacctgtgtcgccaccaacatcctgggcaaagctgaaaaccaagtccgcctggaggtcaaaga

SEQ ID NO: 497905 - DNA, 120 bp, Artificial Sequence
  ENSG00000163531_16 (sequence is synthesized)
ccccaccaggatctaccggatgcccgaggaccaggtggccagaaggggcaccacggtgcagctggagtgtcgggtgaagcacgacccctccctgaaactcaccgtctcctggctgaagga

SEQ ID NO: 497906 - DNA, 120 bp, Artificial Sequence
  ENSG00000163531_17 (sequence is synthesized)
tgacgagccgctctatattggaaacaggatgaagaaggaagacgactccctgaccatctttggggtggcagagcgggaccagggcagttacacgtgtgtcgccagcaccgagctagacca

SEQ ID NO: 497907 - DNA, 120 bp, Artificial Sequence
  ENSG00000163531_18 (sequence is synthesized)
agacctggccaaggcctacctcaccgtgctaggacggccagaccggccccgggacctggagctgaccgacctggccgagaggagcgtgcggctgacctggatccccggggatgctaacaa

SEQ ID NO: 497908 - DNA, 120 bp, Artificial Sequence
  ENSG00000163531_19 (sequence is synthesized)
cagccccatcacagactacgtcgtccagtttgaagaagaccagttccaacctggggtctggcatgaccattccaagtaccccggcagcgttaactcagccgtcctccggctgtccccgta

SEQ ID NO: 497909 - DNA, 120 bp, Artificial Sequence
  ENSG00000163531_20 (sequence is synthesized)
tgtcaactaccagttccgtgtcattgccatcaacgaggttgggagcagccaccccagcctcccatccgagcgctaccgaaccagtggagcaccccccgagtccaatcctggtgacgtgaa

SEQ ID NO: 497910 - DNA, 120 bp, Artificial Sequence
  ENSG00000163531_21 (sequence is synthesized)
gggagaggggaccagaaagaacaacatggagatcacgtggacgcccatgaatgccacctcggcctttggccccaacctgcgctacattgtcaagtggaggcggagagagactcgagaggc

SEQ ID NO: 497911 - DNA, 120 bp, Artificial Sequence
  ENSG00000163531_22 (sequence is synthesized)
ctggaacaacgtcacagtgtggggctctcgctacgtggtggggcagaccccagtctacgtgccctatgagatccgagtccaggctgaaaatgacttcgggaagggccctgagccagagtc

SEQ ID NO: 497912 - DNA, 120 bp, Artificial Sequence
  ENSG00000163531_23 (sequence is synthesized)
cgtcatcggttactccggagaagattatcccagggctgcgcccactgaagttaaagtccgagtcatgaacagcacagccatcagccttcagtggaaccgcgtctactccgacacggtcca

SEQ ID NO: 497913 - DNA, 120 bp, Artificial Sequence
  ENSG00000163531_24 (sequence is synthesized)
gggccagctcagagagtaccgagcctactactggagggagagcagcttgctgaagaacctgtgggtgtctcagaagagacagcaagccagcttccctggtgaccgcctccgtggcgtggt

SEQ ID NO: 497914 - DNA, 120 bp, Artificial Sequence
  ENSG00000163531_25 (sequence is synthesized)
gtcccgcctcttcccctacagtaactacaagctggagatggttgtggtcaatgggagaggtgatgggcctcgcagtgagaccaaggagttcaccaccccggaaggagtacccagtgcccc

SEQ ID NO: 497915 - DNA, 120 bp, Artificial Sequence
  ENSG00000163531_26 (sequence is synthesized)
taggcgtttccgagtccggcagcccaacctggagacaatcaacctggaatgggatcatcctgagcatccaaatgggatcatgattggatacactctcaaatatgtggcctttaacgggac

SEQ ID NO: 497916 - DNA, 120 bp, Artificial Sequence
  ENSG00000163531_27 (sequence is synthesized)
caaagtaggaaagcagatagtggaaaacttctctcccaatcagaccaagttcacggtgcaaagaacggaccccgtgtcacgctaccgctttaccctcagcgccaggacgcaggtgggctc

SEQ ID NO: 497917 - DNA, 120 bp, Artificial Sequence
  ENSG00000163531_28 (sequence is synthesized)
tggggaagccgtcacagaggagtcaccagcacccccgaatgaagcttacaccaacaaccaagcggacatcgccacccagggctggttcattgggcttatgtgcgccatcgccctcctggt

SEQ ID NO: 497918 - DNA, 120 bp, Artificial Sequence
  ENSG00000163531_29 (sequence is synthesized)
gctgatcctgctcatcgtctgtttcatcaagaggagtcgcggcggcaagtacccagtacgagaaaagaaggatgttccccttggccctgaagaccccaaggaagaggatggctcatttga

SEQ ID NO: 497919 - DNA, 120 bp, Artificial Sequence
  ENSG00000163531_30 (sequence is synthesized)
ctatagtgatgaggacaacaagcccctgcagggcagtcagacatctctggacggcaccatcaagcagcaggagagtgacgacagcctggtggactatggcgagggtggcgagggtcagtt

SEQ ID NO: 497920 - DNA, 120 bp, Artificial Sequence
  ENSG00000163531_31 (sequence is synthesized)
caatgaagacggctccttcatcggccagtacacggtcaaaaaggacaaggaggaaacagagggcaacgaaagctcagaggccacgtcacctgtcaatgctatctactctctggcctaacg

SEQ ID NO: 497921 - DNA, 120 bp, Artificial Sequence
  ENSG00000163531_32 (sequence is synthesized)
gagcccacccaggcacagccaccactttgcaagtgggaggaggggagaaggggagacaaaaccactgcagacctaccacgaagccaccaccaccttcagtaacaagggtacgatatgggg

SEQ ID NO: 497922 - DNA, 120 bp, Artificial Sequence
  ENSG00000163531_33 (sequence is synthesized)
gtctgccaagctgtgaggaccagtagccaccaagccacccacaagccccctcccaatgaccccccttcagccccgggtgccaccagtgtgggagagctggagccgtggctgagctcagct

SEQ ID NO: 497923 - DNA, 120 bp, Artificial Sequence
  ENSG00000163531_34 (sequence is synthesized)
ggagggagcctggccccttgcccggtctcgcagccaccccgagcgttccaccacactgtccgcccttggcctcggcacacgctcaccttttctgttggttacgggacttctcattgtctt

SEQ ID NO: 497924 - DNA, 120 bp, Artificial Sequence
  ENSG00000163531_35 (sequence is synthesized)
aatttcgctttgtgcatcttcccctccagacccaatgtctctgttttcttttccttttgaaaaagagtccctggaaaagaaagaataagtggattctcccccaggagaatcctttttgca

SEQ ID NO: 497925 - DNA, 120 bp, Artificial Sequence
  ENSG00000163531_36 (sequence is synthesized)
aagataggcaaaaaggattgaatccataccagaacacgtagacaggctgtaatattcaaaccacctctgggccaatgcatttccaaaggatgcctttctcgccatatgcctcccctggcc

SEQ ID NO: 497926 - DNA, 120 bp, Artificial Sequence
  ENSG00000163531_37 (sequence is synthesized)
cccagcccctctgcctcggccttgtcagttgctgagctgggcttggctcctttctggaaaatgacagtatttttggcagggagaaggtgcgcaggcctccttgctgctctctggtttggt

SEQ ID NO: 497927 - DNA, 120 bp, Artificial Sequence
  ENSG00000163531_38 (sequence is synthesized)
tgggaggtgtgtttacctcttgctcctcattcctcccctgcccttttctctggaatatctaagatgtgagctgcattgactctgaagacgtttgaggaacaggagtgggcactgatagaa

SEQ ID NO: 497928 - DNA, 120 bp, Artificial Sequence
  ENSG00000163531_39 (sequence is synthesized)
aggacttcaacgccagtgactgtgtacctccagcagaagaaaatcaggtgtctggtcttgggggcactgtgctcacttctagagagaagaaaaaggctgggtttggacttcatgcctcct

SEQ ID NO: 497929 - DNA, 120 bp, Artificial Sequence
  ENSG00000163531_40 (sequence is synthesized)
cactggtgaaacccaggatgtagatagagggccacacccaccctgtccagagtagagggcacctgtccacgtggccagggcccatgctgccaccctcgaggagatggaaccctgtgatgc

SEQ ID NO: 497930 - DNA, 120 bp, Artificial Sequence
  ENSG00000163531_41 (sequence is synthesized)
aaaagctttgctggtgtgtttggggcataaggcactgctccccttccatctctagcagatatcatcttctcagccaattctgtaggacactgaggctcttgtttgacatggtgtgtggat

SEQ ID NO: 497931 - DNA, 120 bp, Artificial Sequence
  ENSG00000163531_42 (sequence is synthesized)
ggggtgtatacatatcaggggaccctgaggtggcaccgtactcagtgttgtgatgcccccacctagggaggactcaatgctctttgtatgccttatgcagcgctgatctgtccctggagt

SEQ ID NO: 497932 - DNA, 120 bp, Artificial Sequence
  ENSG00000163531_43 (sequence is synthesized)
tcccaggttcccagctccccccctgcaagccttgaagcctccagcaacgtctatctccaggagagcagggcagcctatgcaagtgttccggcaggaccagaagtggccactcaacacacg

SEQ ID NO: 497933 - DNA, 120 bp, Artificial Sequence
  ENSG00000163531_44 (sequence is synthesized)
tcctcaccagtcaccccaaatggagacactcgcagacctgcagttctcagaccgaaggtgctgccttcatcctccccacctaatgcatttttgaaaccaaaggtacctagcctcagagac

SEQ ID NO: 497934 - DNA, 120 bp, Artificial Sequence
  ENSG00000163531_45 (sequence is synthesized)
agagaaggagagggggagatcttgagtctaagaggaaccctttagctgtttctgcagctgaggtcagtttcaggagggtgaagctgatccccaggaatggatcagctgccatgggcacag

SEQ ID NO: 497935 - DNA, 120 bp, Artificial Sequence
  ENSG00000163531_46 (sequence is synthesized)
cctccgatttgagcctctccggctgccagccagggggcctgggccagaccagggctctgtccttccgtgactttattaaagcaacatttgccacatgtttaagccgcaaaggtattagca

SEQ ID NO: 497936 - DNA, 120 bp, Artificial Sequence
  ENSG00000163531_47 (sequence is synthesized)
atgcttgcatcattaataatcattcagttgaaggtcaagcccatagacacacactctctgctggtaagaaaccatagcccagaactgagccaataaggttgtttgaacctgagagtgtgt

SEQ ID NO: 497937 - DNA, 120 bp, Artificial Sequence
  ENSG00000163531_48 (sequence is synthesized)
aatggtcatttgggccaagcctcagctagggctgctgcctggacgcctgaggggcagcttatcacagtgcaaggggacagggtaaacagcagggggtggggtgtgagcttggagggcccc

SEQ ID NO: 497938 - DNA, 120 bp, Artificial Sequence
  ENSG00000163531_49 (sequence is synthesized)
tcccctggatttcctccaacacctgcttggatactaggcccactgtccctgaagggaatgtcagggaagtgtgcctgtgagctgaattaaaggactggcctttccagaaaacgctttgga

SEQ ID NO: 497939 - DNA, 120 bp, Artificial Sequence
  ENSG00000163531_50 (sequence is synthesized)
tctgagcagagtagtcagtttctcagacactcattccatactgcaccgtacatgccagcgtacccattgcaccgaaagcaggcccttagggcaggaagggacgatgagcaagtctgccac

SEQ ID NO: 497940 - DNA, 120 bp, Artificial Sequence
  ENSG00000163531_51 (sequence is synthesized)
accacctggtgactgggaagggctgcttctctcgtaagggtcttggggagaagtaagcccgcagcctgcctctgcacctcgttccagtgtcctgccaggctctgtactgtcctttgtgta

SEQ ID NO: 497941 - DNA, 120 bp, Artificial Sequence
  ENSG00000163531_52 (sequence is synthesized)
tgaagaaaatgctgttagccctctctcaggctgctgttctgtgggtgctgagagctgccccccatcaccacgccatcacacccctctgagcagaagcaaatctgaggctgaagaattaag

SEQ ID NO: 497942 - DNA, 120 bp, Artificial Sequence
  ENSG00000163531_53 (sequence is synthesized)
ttttccccaagcaaggaaggcaggtggtcagagagatcaaacgctgaggcgtggggattgcaggattcaggaggcagcccctttggggaagaggagggtgcattttccatggagcccatg

SEQ ID NO: 497943 - DNA, 120 bp, Artificial Sequence
  ENSG00000163531_54 (sequence is synthesized)
tcagagtccactccagctcagcaggaaagtggaattgcccagtactgcctgccagctgggtctcccaagcaactaccccaagacataccaacagtgaagccaggacagcaccatgccatc

SEQ ID NO: 497944 - DNA, 120 bp, Artificial Sequence
  ENSG00000163531_55 (sequence is synthesized)
ggcgctccagtctgtctggctgggaggaaagtgctgggcatcttacagtaactctagaagttcctttgactaggctgcaatcccacctatatgctcagccctaagagctgtggtttcctg

SEQ ID NO: 497945 - DNA, 120 bp, Artificial Sequence
  ENSG00000163531_56 (sequence is synthesized)
tgctctcatttgtccattcattcattcattcattcattcagcaaataatctgaaatccagtctgaactaaggcctgagctgtggataccatggcgcgtgagttagatgtggtccctgccc

SEQ ID NO: 497946 - DNA, 120 bp, Artificial Sequence
  ENSG00000163531_57 (sequence is synthesized)
tcatggggctgacagtcctaaaatcaagtgctaggacacagtggccattgagctgggagcattcttccctctaccgcttaagccactgatggctgcgagcttgaagagagggattctgag

SEQ ID NO: 497947 - DNA, 120 bp, Artificial Sequence
  ENSG00000163531_58 (sequence is synthesized)
ggagagcttggtccatctggtcaccaaggctgggcgggacagagcagtcaagaaccacggtgtggcttgagaaacagtcctgcttcctgagcctctttgctctgcctcttggggcaagct

SEQ ID NO: 497948 - DNA, 120 bp, Artificial Sequence
  ENSG00000163531_59 (sequence is synthesized)
ccttaacctgtctgtatttttatgcctctgtctcccattcagttcctccttgaatacctctttctacagagaggcacgggctcccctgaaggattgtcgaggccagggttcgggaagtac

SEQ ID NO: 497949 - DNA, 120 bp, Artificial Sequence
  ENSG00000163531_60 (sequence is synthesized)
actgccatcggtcaggggacagctgcctcccaccttgcctgggtgatggtgaatgggactcatcttttcctgccttgcttttgaggagatggttgaatttaagctaacaggaaagccaaa

SEQ ID NO: 497950 - DNA, 120 bp, Artificial Sequence
  ENSG00000163531_61 (sequence is synthesized)
ccagcaccctcctttgtgctctgagaggttggagacatctggtccaccccattgcccctgcccctggcaagccctgaagtcgggagaggtgaccacaggtctgaaaatcagccagtgcca

SEQ ID NO: 497951 - DNA, 120 bp, Artificial Sequence
  ENSG00000163531_62 (sequence is synthesized)
acattgcttgccctgcaaggtgcaactgagcccacatagcgcattcatagtttccctgaccacagccttgggaagacggtggaaacccgaggatgtgtgggtttcccagctaacggacaa

SEQ ID NO: 497952 - DNA, 120 bp, Artificial Sequence
  ENSG00000163531_63 (sequence is synthesized)
gctcccctgccacacccagtgcccacgcatgctcacatacatacagcagaccacaaccctgttgccaagcagtgcttccaagggatagcgatccagattccaacattgtcttggagaggg

SEQ ID NO: 497953 - DNA, 120 bp, Artificial Sequence
  ENSG00000163531_64 (sequence is synthesized)
ttagtccacatccaagttgcgtgagataagatgcaaagggctctgtgtggatgaggaacgcaccttagaggagtgggaaaggccaccagggttgggccctgtttaggtaattcctgttgg

SEQ ID NO: 497954 - DNA, 120 bp, Artificial Sequence
  ENSG00000163531_65 (sequence is synthesized)
cagcacctagagagagcatctgagctgaaggagtgggaaactttgcccaagcaatggcacgggcagcgggctctttctggcgccctgtgctggagcagggccaagtcttagggcatcaca

SEQ ID NO: 497955 - DNA, 120 bp, Artificial Sequence
  ENSG00000163531_66 (sequence is synthesized)
aacagcccatttgatggagggagcagggacatagcacatttttgtctgtctttgtgaggctgctttgctaactctctgaggagaggaagcctctcgggctttccgtcggctggggctagt

SEQ ID NO: 497956 - DNA, 120 bp, Artificial Sequence
  ENSG00000163531_67 (sequence is synthesized)
gccagagaatcccttctcagtggccagcaggttcctgggaggccggcacaaggcaccgctccccactcatgacaccttggtgcagagtgacctcctgcccagtcaccactccggccagcc

SEQ ID NO: 497957 - DNA, 120 bp, Artificial Sequence
  ENSG00000163531_68 (sequence is synthesized)
ccagccaaacacacaaaagcccatggttgcggttgcatctacaccgttagttggcaaaggatcctgcttgagctctgcgtggtggccaaggagtagcatggaggagggccctgattttaa

SEQ ID NO: 497958 - DNA, 120 bp, Artificial Sequence
  ENSG00000163531_69 (sequence is synthesized)
aaaggaaaaatagagaggcctcaaaacaatgaaacaaagagcttgatatgtcaagaggagaccaaggccctgggaggcataggcaagccgggcagagtcagaccagtgccctcccttgac

SEQ ID NO: 497959 - DNA, 120 bp, Artificial Sequence
  ENSG00000163531_70 (sequence is synthesized)
catctcctagcattccttaacctagacaggggctaccccatgtgagtccaagccagactttgtggctgtccccagcctgcacagcccaagcccagggaagtgtcctttctttcccttcct

SEQ ID NO: 497960 - DNA, 120 bp, Artificial Sequence
  ENSG00000163531_71 (sequence is synthesized)
tactaataatgggccttcctgagacacattcagagaaggatcagagagaaaggagaaccatccaggagagccacaagcgtccaccaaacagtgtctcaggcctcacctgaagctgctgtt

SEQ ID NO: 497961 - DNA, 120 bp, Artificial Sequence
  ENSG00000163531_72 (sequence is synthesized)
cctcctatcagcacactagtattaaatgggtgttccataatgaggagaatggaaataggtacaaggcatctagcttaggacagaatcggatttcggcatgtgaaggaatcccagagctga

SEQ ID NO: 497962 - DNA, 120 bp, Artificial Sequence
  ENSG00000163531_73 (sequence is synthesized)
tctcattgaaatgatctatcgtacagacaaggatatgcaaatccacagaagtgaagggatttttgctcaagatcacatagctggtaaactaaggtaaggttagggcttgaacttgggcct

SEQ ID NO: 497963 - DNA, 120 bp, Artificial Sequence
  ENSG00000163531_74 (sequence is synthesized)
tctgactccttgtccagtcagtgttctttcatctcaccacagctgcctcctttgaaacagaggtattaagatctgtccttctggttcaccctctcatacctctttactgcgtctcccaca

SEQ ID NO: 497964 - DNA, 120 bp, Artificial Sequence
  ENSG00000163531_75 (sequence is synthesized)
tcccccacatgcctcccaaaatgaaagacaaacaggattgtttctgagaccaagatcagtctgtctgtgatcagcctgtgtgtggttcacccagtcatgcaattaagggcagatctgggc

SEQ ID NO: 497965 - DNA, 120 bp, Artificial Sequence
  ENSG00000163531_76 (sequence is synthesized)
cagtggaataggatagctgattggtgtttgttactgtgaaccctagaccgtaccccgtagaatggtgtctcttgctttgtaacacatcgggccttcagtgtgctgtattcctcagaagtg

SEQ ID NO: 497966 - DNA, 120 bp, Artificial Sequence
  ENSG00000163531_77 (sequence is synthesized)
agggcatctcggtccattctgcccatggccacagggtgcagagaggcagcagggcccatgcaagctgccaccctgggatttgctgggctggagttcaacagatgtaaagacttcagtgaa

SEQ ID NO: 497967 - DNA, 120 bp, Artificial Sequence
  ENSG00000163531_78 (sequence is synthesized)
gcaataaacacaaaactctgggagaagatatccagaattttgtacattactctgtttctttttcaaaaatgaggcagatcagatgcccctgagctgcccctttttttctgattcccaact

SEQ ID NO: 497968 - DNA, 120 bp, Artificial Sequence
  ENSG00000163531_79 (sequence is synthesized)
gcaatgtcctcagtcagtgttgtccctctgcccggctccccagctctttgccaacctcttcacactccccttgagctgagcatcagtcgcctgtgacgtggccaccttctgtcctgctcc

SEQ ID NO: 497969 - DNA, 120 bp, Artificial Sequence
  ENSG00000163531_80 (sequence is synthesized)
cactcccgacccatgctggaccccggaggacctcctgccccgcccccaccacacacccatatcccccaccattccaatttgttctttcccgtggggaattttttttcccagcgtctccat

SEQ ID NO: 497970 - DNA, 120 bp, Artificial Sequence
  ENSG00000163531_81 (sequence is synthesized)
cccttcctacatatccacacacacacaaattggtctgatcttttttccattggttaaacatttaactccatgccagaccttgttttaacccctctcacatcatgttctttccttttttgc

SEQ ID NO: 497971 - DNA, 120 bp, Artificial Sequence
  ENSG00000163531_82 (sequence is synthesized)
gagttattttgcattaaccaactttgtcagtgacagatgcgtatctgagggtgtcacacacgaccttcagcagggaagacttctgggccatggagggccgtctaatacatggacttataa

SEQ ID NO: 497972 - DNA, 120 bp, Artificial Sequence
  ENSG00000163531_83 (sequence is synthesized)
actgactgcatgagcaatgaaaaggccaaattattctgaattttttttgaatcactgtaaaaaaactgatttcttttgtatagagaacactaaacgtataataaaagttgttcaaaatgg

SEQ ID NO: 497973 - DNA, 120 bp, Artificial Sequence
  ENSG00000163531_84 (sequence is synthesized)
tgcagccttcctcctctgcctcctcagtcttggcggagccatcgaaattcctatggatccaagcattcagaatgagctgacgcagccgccaaccatcaccaagcagtcagcgaaggatca

SEQ ID NO: 497974 - DNA, 120 bp, Artificial Sequence
  ENSG00000163531_85 (sequence is synthesized)
attgcccccgactaccgtgggtgcgacgggcgctgtgagcagtaccgatgctactgccattgctgccaccaccgaagccacaacagtccccatcatcccaactgtcgcacctaccaccat

SEQ ID NO: 497975 - DNA, 120 bp, Artificial Sequence
  ENSG00000163531_86 (sequence is synthesized)
cgccaccaccaccaccgtcgccacaactactacaaccactgctgccgccaccaccaccacggagagtcctcccaccaccacctccgggactaagatacacgaatccgcccctgatgagca

SEQ ID NO: 497976 - DNA, 120 bp, Artificial Sequence
  ENSG00000163531_87 (sequence is synthesized)
gtccatatggaacgtcacggtgctccccaacagtaaatgggccaacatcacctggaagcacaatttcgggcccggaactgactttgtggttgagtacatcgacagcaaccatacgaaaaa

SEQ ID NO: 497977 - DNA, 120 bp, Artificial Sequence
  ENSG00000163531_88 (sequence is synthesized)
aactgtcccagttaaggcccaggctcagcctatacagctgacagacctctatcccgggatgacatacacgttgcgggtttattcccgggacaacgagggcatcagcagtaccgtcatcac

SEQ ID NO: 497978 - DNA, 120 bp, Artificial Sequence
  ENSG00000163531_89 (sequence is synthesized)
gacaaggagcagggaagccaggaattattttgattccacccagggcagggctgctgtgttttctctgaggccaactttcagggaaaagaaggatcttgctgggattttgctcaggcctaa

SEQ ID NO: 497979 - DNA, 120 bp, Artificial Sequence
  ENSG00000163531_90 (sequence is synthesized)
ggtgtttgccaccacctccctttgtgtttcctttggaaactcacccgtgactggatgctcagtcccgtagcctggaggcccagatctccccagcctggccctgacacacacacactcctt

SEQ ID NO: 497980 - DNA, 120 bp, Artificial Sequence
  ENSG00000163531_91 (sequence is synthesized)
gggtggtcctccaccactcagtaccccaaattctagcttcagatccctgttccttaacagacggccaagctccttgggcagggcccccaggttccagatgttaggaccgcctccagctac

SEQ ID NO: 497981 - DNA, 120 bp, Artificial Sequence
  ENSG00000163531_92 (sequence is synthesized)
atgtcaggcagtcagctcagagccgagcactccagaaggaagacagcgtgaggaggggaaaaggaccagatactgtacagctggcctgagggagtttcctgccctggccacgtctgcgtc

SEQ ID NO: 497982 - DNA, 120 bp, Artificial Sequence
  ENSG00000163531_93 (sequence is synthesized)
cggcctagaggctgagcagcagggagtggctgtgccaggcagctctgttcccagaacccctgtcccttccttgcctctccttccgcgaggaacacttacagacttttcttttacaaagtc

SEQ ID NO: 497983 - DNA, 120 bp, Artificial Sequence
  ENSG00000163531_94 (sequence is synthesized)
agagcttccaggaaactgtattgccaaggaggcccttaatgccaaactcacattccccaagccctcaaatgcaggcatggagggaaaattacgggcattctcagagcccctggtaagaat

SEQ ID NO: 497984 - DNA, 120 bp, Artificial Sequence
  ENSG00000163531_95 (sequence is synthesized)
cgatcccagggctggtacgctgagccacgagaatgcactgttcctgtatcatgcagccaggccaggaagctctgttcttccagttcggggagaccccaggggaattcagcgatacttcca

SEQ ID NO: 497985 - DNA, 120 bp, Artificial Sequence
  ENSG00000163531_96 (sequence is synthesized)
agcactgagcatcagtcttttattaccaacaaggggaaggtctgtagcttcctgagctcacaggccagctataaaatcagcgtgaggcagccaggaagcacccagaactcttctgccaca

SEQ ID NO: 497986 - DNA, 120 bp, Artificial Sequence
  ENSG00000163531_97 (sequence is synthesized)
gttgtagaattgtaggacccagtgggcaccacctttgtctcctgggcaagtccctttaccttccaaggcctcctttctcccaccctgctccacttttctcagcctcctgaatgaggatgg

SEQ ID NO: 497987 - DNA, 120 bp, Artificial Sequence
  ENSG00000163531_98 (sequence is synthesized)
aggcttaatagacatgagaggattttgttttcagttcaatgacatagagttaagtgagctgtcagggaagacgagaggcatagctgctgtgagctcctgagaccctgaaaatgctggttt

SEQ ID NO: 497988 - DNA, 120 bp, Artificial Sequence
  ENSG00000163531_99 (sequence is synthesized)
gcttcacaggtgccatctagaacttaacaggcactttcggaaaaagttggctgaggaggaacctgctggggtattagaagctgccaccagcgggttggtgattgatgttctttggggcca

SEQ ID NO: 497989 - DNA, 120 bp, Artificial Sequence
  ENSG00000163531_100 (sequence is synthesized)
cggtgaggcatctttttcattaaaaagtggggctttgtgtcctacaagtgctttgagttcagagaaaagatgaaccaaaaatgaagaaaggaagtggctcttgcttccccagcaaagagt

SEQ ID NO: 497990 - DNA, 120 bp, Artificial Sequence
  ENSG00000163531_101 (sequence is synthesized)
catggccttgatcttatctagaccttgggaacacccctcaaccatcctcacctcacttcagcagaatggctgtctaggactttaaaaatgaatgttcacctttatcgtgccttacatctt

SEQ ID NO: 497991 - DNA, 120 bp, Artificial Sequence
  ENSG00000163531_102 (sequence is synthesized)
ggaaaaagatgtttcataagtttactcttctcagggtgaaataggcctttttatttgtccttcgcctgtctttttcagatttccagggagattccttaattcttacattccaggagtcag

SEQ ID NO: 497992 - DNA, 120 bp, Artificial Sequence
  ENSG00000163531_103 (sequence is synthesized)
tgagacaatctatgcttcccctccctgaccctttttgtgtttctcggtgttgatatttcacatgcttggtccttctctttgaactttttagtgcttccgggtcatcatcctgatctctct

SEQ ID NO: 497993 - DNA, 120 bp, Artificial Sequence
  ENSG00000163531_104 (sequence is synthesized)
gtggcaatgccttcctccagctcccacctctaaatcatcttggcttcccactgcctggccttttctaaaagaaccccaatcttcattgcctttaaaacagccagatttgagtcaatttca

SEQ ID NO: 497994 - DNA, 120 bp, Artificial Sequence
  ENSG00000163531_105 (sequence is synthesized)
tattggtggccagactgtttaaacacaaattctctagctatttacagggctcagagctgaggaggaagaaactcaagtccccaaataatgactaatcacaattcattctcaccagcaaga

SEQ ID NO: 497995 - DNA, 120 bp, Artificial Sequence
  ENSG00000163531_106 (sequence is synthesized)
gccatgaaattctaaggagctggaatttgggatggcttcaagtggccagtacaattgaagcgtctggcagacaggcaaagaagcctaccttctcccctccccacggtgccatcaatggaa

SEQ ID NO: 497996 - DNA, 120 bp, Artificial Sequence
  ENSG00000163531_107 (sequence is synthesized)
tcactttcttggtccctcacttaatatgaatcatattcacctggggcaaccaacgcctgacagagttgtagtgcagaaggcacctctttgaagtgaaaaccaggagatcttttatcactt

SEQ ID NO: 497997 - DNA, 120 bp, Artificial Sequence
  ENSG00000163531_108 (sequence is synthesized)
ccccagccctgcaggctcagtcacatgtcaaatagataatgaataaatgcatcgccaatgcactctattcatttatttttgacaagtgagttggtgacagtgcccccttgcatgctaata

SEQ ID NO: 497998 - DNA, 120 bp, Artificial Sequence
  ENSG00000163531_109 (sequence is synthesized)
aaatatacagcagccacacttgtaaagtctttgaaatacgaggcttcatgcaagtactccactattaaatctttgctggaaaatggggtaaccagactgctgggactcttgcaaaatgat

SEQ ID NO: 497999 - DNA, 120 bp, Artificial Sequence
  ENSG00000163531_110 (sequence is synthesized)
tacgtttgaagattagtgccattctcctctacacaggctatggtttcagacagcaccatggctttgataaagtggctcccagctcataggaacttgataattaatgtcctctgtgttgca

SEQ ID NO: 498000 - DNA, 120 bp, Artificial Sequence
  ENSG00000163531_111 (sequence is synthesized)
tagagatcaggcatcaaaaactcggtggtgctgagacgccaacagaacaggattcttctggtgtctggaccactgagggctggttgtcaaggagttatcttctcttggtcgcacctagtc

SEQ ID NO: 498001 - DNA, 120 bp, Artificial Sequence
  ENSG00000163531_112 (sequence is synthesized)
cacgtgagggagaggaaggcttcacattgtctttacttgggcccctgagattctaggctttagacaatctgaagctgttagacctatcagccaggcttctctctgaccaaggacaaccca

SEQ ID NO: 498002 - DNA, 120 bp, Artificial Sequence
  ENSG00000163531_113 (sequence is synthesized)
aggggctccttagaccagcctcacctgtctggatcaccattctcctccagcttcaaaagtccatccttcctgcaaatctcatcaagactcgcggctcttaaagataaccctctccttcct

SEQ ID NO: 498003 - DNA, 120 bp, Artificial Sequence
  ENSG00000163531_114 (sequence is synthesized)
gcagcacttctatgcttgaaggggaaggggctggcacacatcttctctgtgtggcctcctcctcctggccacacggcctttttcctggcccctttccttacactgttgacatgacaaggg

SEQ ID NO: 498004 - DNA, 120 bp, Artificial Sequence
  ENSG00000163531_115 (sequence is synthesized)
agggatctgaaaagggaataagtccaggttaaagcctcaaatggcacagatcaaaacccactctttctacaaaaatttgccgggcatggtggcgggggcctgtaatctcagctacttggg

SEQ ID NO: 498005 - DNA, 81 bp, Artificial Sequence
  ENSG00000163531_116 (sequence is synthesized)
acagtgagtcgagatcgcaccactgtactccagcttgggcaacagaacaatactccatctcaaaaaaaaaaaaacagaaaa

SEQ ID NO: 498006 - DNA, 120 bp, Artificial Sequence
  ENSG00000163531_117 (sequence is synthesized)
tacctcaccgtgctaggtaactgcccatgctcaccctggcactgaccagccccaccccctccccagcagccagagaagcagtggcccggggcagttccgagggcagtgcctgcagtcaag

SEQ ID NO: 498007 - DNA, 120 bp, Artificial Sequence
  ENSG00000163531_118 (sequence is synthesized)
tggccgggtcaggcgtggtgatctcttcttgcctcgtgatgtcagggttagggagctgccagtttcagaacaagctgtgctggacaggttacctcctgagtggagtcattaacttcccca

SEQ ID NO: 498008 - DNA, 120 bp, Artificial Sequence
  ENSG00000163531_119 (sequence is synthesized)
cgtctcaactgaaaggggcctgagtgatatagagaaagtggagaggggtttctcgttgtgatcattttacctttcttacagctaactccaccactaagtcaattaaaacaatccatcctt

SEQ ID NO: 498009 - DNA, 120 bp, Artificial Sequence
  ENSG00000163531_120 (sequence is synthesized)
cgggctataagatatttgaaagaaaccctagcgttgtttattgaatccagggttgactcaagaagataatgtctagggttagatgttcaaaaatatacccagaaaaaaaaattatatata

SEQ ID NO: 498010 - DNA, 120 bp, Artificial Sequence
  ENSG00000163531_121 (sequence is synthesized)
ggggaagccgtcacagaggagtcaccagcacccccgaatgaaggtaggtgcatggcagcagcccctggggtaaaaggtcccagctaattccgaggcctagagaaacactgagatctgtag

SEQ ID NO: 498011 - DNA, 120 bp, Artificial Sequence
  ENSG00000163531_122 (sequence is synthesized)
ctggctgcctgggatggagaggaaatgagacttgcaagtcctcaagccctcggaaggtgagaacccatcttatgtgtgagaggtaggtgctggcattgtatctggagctcagctctcctt

SEQ ID NO: 498012 - DNA, 120 bp, Artificial Sequence
  ENSG00000163531_123 (sequence is synthesized)
ggaccactgtggtcacacctgggtccccacttgccctgacttgctcagtcacttgacatctatcatctttccttcttgtagaggaataaggaagagagcatgagttgagaaatgagagaa

SEQ ID NO: 498013 - DNA, 120 bp, Artificial Sequence
  ENSG00000163531_124 (sequence is synthesized)
atcataatgaactccaaagaacagtgagtgttcacctcttgagggaggcaggaatatgattgtgagtgctcccatgagggctctggggacaaccttctttcttcgaaggcacatgggttc

SEQ ID NO: 498014 - DNA, 120 bp, Artificial Sequence
  ENSG00000163531_125 (sequence is synthesized)
aaggaggtaggggaaaccgtcaggatgacgctgttactggcatcatgagtagagcagagaatgtggtccttccttgcagcctgaattggatgcgttgtcaggctgcagagaggaggagga

SEQ ID NO: 498015 - DNA, 120 bp, Artificial Sequence
  ENSG00000163531_126 (sequence is synthesized)
gttaggaaacagccatttgccaagccagcttcacaaagagcaaatgagttcatcacctgggtccaggcgtcatctggcagcatttcagccccaccagagctgcacctgcctgaggactcc

SEQ ID NO: 498016 - DNA, 120 bp, Artificial Sequence
  ENSG00000163531_127 (sequence is synthesized)
actagagggggctccaggctcacccgcacacgcactggcatcaggggaatgtgcagtctgggacctctcgaggaggcaaggctgcaaaagcctcaatactggcacaccctctgggaaagg

SEQ ID NO: 498017 - DNA, 120 bp, Artificial Sequence
  ENSG00000163531_128 (sequence is synthesized)
ctggggacccccgtgtgtctccagagatacaatggtctattcaacagccatttcttgagtacccacaatgtgaggtgccagacactgccacacacaagggatatacaaaggtaacaagaa

SEQ ID NO: 498018 - DNA, 120 bp, Artificial Sequence
  ENSG00000163531_129 (sequence is synthesized)
gctcacaccatctagagggggagtcatctataagaatatctaattgcatgtctaaatgagggggcgcagtggctgggcagagaaggggattcagtcttcacgggaagactccagagaaga

SEQ ID NO: 498019 - DNA, 120 bp, Artificial Sequence
  ENSG00000163531_130 (sequence is synthesized)
ggtgatgtgagtgggcactctggaagctgacaagtcatcgtgtctggtgctttccacagaagggtcaggtcccgtggcctggcccaggcccagacggggtcttctgaataccacccctac

SEQ ID NO: 498020 - DNA, 120 bp, Artificial Sequence
  ENSG00000163531_131 (sequence is synthesized)
ccgcattccaggagagcatcagtgctgccttctctggggctaccaggcccgctgcgtcaccccgggatcccaggcagcttcacaagctgcccacatccttccccagcccaccactctagc

SEQ ID NO: 498021 - DNA, 120 bp, Artificial Sequence
  ENSG00000163531_132 (sequence is synthesized)
cagtagaccagcgctgaggcaggagaagaggggccaggcagaagcagagaaaggctgacagcccgctctgcatccctctctggtctcagaaaccaggagtgagtcacacaaccagctctc

SEQ ID NO: 498022 - DNA, 120 bp, Artificial Sequence
  ENSG00000163531_133 (sequence is synthesized)
cctcctgctgtgctcttctgcactctcccaagcccctgggcactcgggaagtttattagggcagggggacttaggttagtggctgatgtgtgtctgtcaccaaaggccaggccaggccag

SEQ ID NO: 498023 - DNA, 120 bp, Artificial Sequence
  ENSG00000163531_134 (sequence is synthesized)
gccatgatgcactttcttgattactcaattctgcaaatagatagataaagagagccccttcttccctccctatgtgcaccccaatacagaacatcagataacaaagccctattgtccagc

SEQ ID NO: 498024 - DNA, 120 bp, Artificial Sequence
  ENSG00000163531_135 (sequence is synthesized)
cccagtaaccaccacagagaatgttctgcagccccaggggacaaaaggacaaatagaggcttttttcttaacttagggctttgcagaaaattcaagaatttcacttagggctctcagtcc

SEQ ID NO: 498025 - DNA, 120 bp, Artificial Sequence
  ENSG00000163531_136 (sequence is synthesized)
cagttcttacttgcctttctaatgtctgatatattcaaatccacacccttcgggccctcttggctggagtaatcaggaggacacaggcctgggaagggctgggagcagaattatctttgc

SEQ ID NO: 498026 - DNA, 120 bp, Artificial Sequence
  ENSG00000163531_137 (sequence is synthesized)
aaaagacatggctaaatgagacattaaaatagagccccattatcatgccgcatgggagaaccaggcatggattccttctcattgttttcaactttcctgcagtaaagataaaaagtaaaa

SEQ ID NO: 498027 - DNA, 120 bp, Artificial Sequence
  ENSG00000163531_138 (sequence is synthesized)
ggggagaaggaccgctgctgagatggcctgccctgggggccacacagtggcctctgggatcccaacacaagctgctctggagtagatctcgcactgctcagacagcccctccccgttcca

SEQ ID NO: 498028 - DNA, 120 bp, Artificial Sequence
  ENSG00000163531_139 (sequence is synthesized)
gcacgtccactttcccgtgagtctccaggtctccagccagatccggggaatgtgttctctcagtgaagccagcccttgcccggattggaaatacaatcctcttgcctgtgcatcttcaga

SEQ ID NO: 498029 - DNA, 120 bp, Artificial Sequence
  ENSG00000163531_140 (sequence is synthesized)
ctgccagcgagcacttgagttaattaagttcgcctgagttgggcggatggcacagtccaggcggcctcagagaggggatggaaggaaccctggctcctattaagaatgacctttcctccc

SEQ ID NO: 498030 - DNA, 120 bp, Artificial Sequence
  ENSG00000163531_141 (sequence is synthesized)
cttgactcaccacccatctgttctataaattggctttttttcagcctgaatctcattaggatcctgtgtcccagggaaggagaaaggaagagaggcattttccctaaccgtgtcccagag

SEQ ID NO: 498031 - DNA, 120 bp, Artificial Sequence
  ENSG00000163531_142 (sequence is synthesized)
aatggggagaggaggggcctgggcagaagcagcacccacatgagagagttccagaggtgggcgctcagcaggacaacagtgtaactgccaataccactagcaagggtcagaagcgaggag

SEQ ID NO: 498032 - DNA, 120 bp, Artificial Sequence
  ENSG00000163531_143 (sequence is synthesized)
cagggagaggctgaagatgggtggcactggtagggacccccatggccctaaagcactttgggcttccctaaaatcccaaggatacctcaagatccttcagcccctagccaggcacaatga

SEQ ID NO: 498033 - DNA, 81 bp, Artificial Sequence
  ENSG00000163531_144 (sequence is synthesized)
agcaggtcacttaaggtcaggagtttgaggccagcccaaccaacatgacgaaactccgtctctactaaatatacaaaaatt

SEQ ID NO: 498034 - DNA, 120 bp, Artificial Sequence
  ENSG00000163531_145 (sequence is synthesized)
agctgggtgtggtggcaggtgtcggaggtcccagctattcaacaggctgaggtgggaggattacctgagcctggagaggtcaaggctgccatgaggcgtgattgtgccactgcactccag

SEQ ID NO: 498035 - DNA, 69 bp, Artificial Sequence
  ENSG00000163531_146 (sequence is synthesized)
caaggctgccatgaggtaaataaaattttttaaaagatcctccaggccgggcgcagtggctcacacctg

SEQ ID NO: 498036 - DNA, 120 bp, Artificial Sequence
  ENSG00000163531_147 (sequence is synthesized)
agcaaaaagagaagcaaacagcctctagtgagcagggtgttgcaaaccatagtcatctccatcctatcctggccatctctgttttggataatgaggaaagaaggtgattaggcatcccgt

SEQ ID NO: 498037 - DNA, 120 bp, Artificial Sequence
  ENSG00000163531_148 (sequence is synthesized)
agatgcgttagaatctcgtgggaccttagctaagccttcaggctctctgtggctgagcatcctcctctgcacaggaaagatcagcttttagaggacatgcatcctcctgggcccaagtat

SEQ ID NO: 498038 - DNA, 120 bp, Artificial Sequence
  ENSG00000163531_149 (sequence is synthesized)
acttttaggccacctgggtgtccccagctgtatagaagaggagaaaggccacgtttagtgataacttgtttcctgcttggcgcctctcctagcccaacaccagacatcgcatggtacaag

SEQ ID NO: 498039 - DNA, 120 bp, Artificial Sequence
  ENSG00000163531_150 (sequence is synthesized)
gggtcacctgtctcatcttctccttcccatctggcccatagtaggtgttcagcaagacctgggaatcttaaagggtcaaagctgggaggaagttagcagatcatctggatcaacctcctc

SEQ ID NO: 498040 - DNA, 120 bp, Artificial Sequence
  ENSG00000163531_151 (sequence is synthesized)
attgtacagaatgggaaaccaagaccttgagagggatggaggcttgccagggccacctggtggctagaggcagaccctccgaggctcagggctccagtctcctagcatggggctccttcc

SEQ ID NO: 498041 - DNA, 120 bp, Artificial Sequence
  ENSG00000163531_152 (sequence is synthesized)
acagcccccatggtctctcttgattggctgctgcccctgcccttgggctggtcctgtctcaggatgctgtgtgttctgctgctctgttgtgaggtttaagaatgggcaaggaagcaacct

SEQ ID NO: 498042 - DNA, 120 bp, Artificial Sequence
  ENSG00000163531_153 (sequence is synthesized)
ctggttccagggttactctgggtgtattcagttcctttgatccttcccttctgtcacagtctcacgttctgtgacaggctgcatttcaggaggggtcgcttttgttctccagccggtaga

SEQ ID NO: 498043 - DNA, 120 bp, Artificial Sequence
  ENSG00000163531_154 (sequence is synthesized)
aaggagaagggtgagttggtactgaccacaccccccctcccaaacccaaacccagccattgggtcatcaaggacaccctcaggtgactccttagcacctgtacttcaggccgtcctgcag

SEQ ID NO: 498044 - DNA, 120 bp, Artificial Sequence
  ENSG00000163531_155 (sequence is synthesized)
gccttttaaatcacaaagggatctgcccactttgaaacaggtctgcacatacgctgggcatggacagagagggactcactgtcacaggggttggagggggaacatcggcttgtcacagac

SEQ ID NO: 498045 - DNA, 120 bp, Artificial Sequence
  ENSG00000163531_156 (sequence is synthesized)
caccgggggggtcaccctgtgtggagtagcctggaagtggcatggagtgagcagaaggcacagccccagccccacatcgctgctggcctggctaggggtacccacaccaggattgccttt

SEQ ID NO: 498046 - DNA, 120 bp, Artificial Sequence
  ENSG00000163531_157 (sequence is synthesized)
gctgtcaggaagcgcaggatccactagagagatgtgaaaagatgacagggcatcctgggcctccacttggtccagtccccaccctcaggaagcctggatggcttcagagccatgctggtg

SEQ ID NO: 498047 - DNA, 120 bp, Artificial Sequence
  ENSG00000163531_158 (sequence is synthesized)
ggcagggatgctgccgtgtgcctgtgcaggcctgcgaaggtgttctcatagcaggtttttgcaacgtggccacggcctgcactccctgatgggtagcttgccggctcccatttctccacc

SEQ ID NO: 498048 - DNA, 120 bp, Artificial Sequence
  ENSG00000163531_159 (sequence is synthesized)
ctggactcatccatggggaatcatacttccatggccaatccgtggccatccctcagtccccattaggctgtgaccagccctctggtttccaagaatgccgtgcttcatccctatgacact

SEQ ID NO: 498049 - DNA, 120 bp, Artificial Sequence
  ENSG00000163531_160 (sequence is synthesized)
ttccccttcctaaaggacctgttcaaccttctgcttatttgctccttgtacccctttcctttgcctcttttctgatcttttgaccttggctctttaattattttctttttgtcctttagc

SEQ ID NO: 498050 - DNA, 120 bp, Artificial Sequence
  ENSG00000163531_161 (sequence is synthesized)
agggtagtttgggccagggggctgctaggtggtagtgttaggctccaggagaaacatccacatgagatagctgaagttcttccctccatctccctcctcaccatctcccccatgaaatca

SEQ ID NO: 498051 - DNA, 120 bp, Artificial Sequence
  ENSG00000163531_162 (sequence is synthesized)
gatgactgcaaagttcctggttcatctccttgttcttgccagtcttcttttatctgctttgcatctgtttcatcctcctccgtttctcctccctccctctttaattgttattttccccat

SEQ ID NO: 498052 - DNA, 120 bp, Artificial Sequence
  ENSG00000163531_163 (sequence is synthesized)
ttttcctcttctcttcctcctgtcctctgttcttccctcttgttctctttatccctgtctttccctccccttggtttggttttcatcattggcctctccccaacactcccaccctcccac

SEQ ID NO: 498053 - DNA, 120 bp, Artificial Sequence
  ENSG00000163531_164 (sequence is synthesized)
ctcttccggatgttccaccctggctttctgtctccttacccctgaacccaacattctcagctcagaagcctgggcctgctgcctggacccagtgatgagaatccttatctgaggataggg

SEQ ID NO: 498054 - DNA, 120 bp, Artificial Sequence
  ENSG00000163531_165 (sequence is synthesized)
aactgcagcctctgtacaaaacagctgtaagtggttctctacctaggaatggctctgcccaatttcgaggtatctttgcagaatcagagcctaacatgtgctgaatccagagtagttgct

SEQ ID NO: 498055 - DNA, 120 bp, Artificial Sequence
  ENSG00000163531_166 (sequence is synthesized)
agaagaaaacctgatttacttcttcctctcttaaatagcagagtctgagctatgtttgtcctcagacctgaaggaaatagcatcctggatggggcaatgggctccggtcgtctcacggtt

SEQ ID NO: 498056 - DNA, 120 bp, Artificial Sequence
  ENSG00000163531_167 (sequence is synthesized)
ctcccaggcttcagtttagcagtgtcgagcatgggggttgtccagaggtcaatgccttcatacttgtgctttgttttttgtgttttcctcatcctccctgccccctccccctcatctccc

SEQ ID NO: 498057 - DNA, 120 bp, Artificial Sequence
  ENSG00000163534_0 (sequence is synthesized)
gatgagctgctgctgctcgactctgaggtgcattctttttttgatgagaggcatctctaggtaccatccctgacctggtcctcatgctgccgaggctgttgctgttgatctgtgctccac

SEQ ID NO: 498058 - DNA, 120 bp, Artificial Sequence
  ENSG00000163534_1 (sequence is synthesized)
tctgtgaacctgccgagctgtttttgatagccagcccctcccatcccacagaggggagcccagtgaccctgacgtgtaagatgccctttctacagagttcagatgcccagttccagttct

SEQ ID NO: 498059 - DNA, 120 bp, Artificial Sequence
  ENSG00000163534_2 (sequence is synthesized)
gctttttcagagacacccgggccttgggcccaggctggagcagctcccccaagctccagatcgctgccatgtggaaagaagacacagggtcatactggtgcgaggcacagacaatggcgt

SEQ ID NO: 498060 - DNA, 120 bp, Artificial Sequence
  ENSG00000163534_3 (sequence is synthesized)
ccaaagtcttgaggagcaggagatcccagataaatgtgcacagggtccctgtcgctgatgtgagcttggagactcagcccccaggaggacaggtgatggagggagacaggctggtcctca

SEQ ID NO: 498061 - DNA, 120 bp, Artificial Sequence
  ENSG00000163534_4 (sequence is synthesized)
tctgctcagttgctatgggcacaggagacatcaccttcctttggtacaaaggggctgtaggtttaaaccttcagtcaaagacccagcgttcactgacagcagagtatgagattccttcag

SEQ ID NO: 498062 - DNA, 120 bp, Artificial Sequence
  ENSG00000163534_5 (sequence is synthesized)
tgagggagagtgatgctgagcaatattactgtgtagctgaaaatggctatggtcccagccccagtgggctggtgagcatcactgtcagaatcccggtgtctcgcccaatcctcatgctca

SEQ ID NO: 498063 - DNA, 120 bp, Artificial Sequence
  ENSG00000163534_6 (sequence is synthesized)
gggctcccagggcccaggctgcagtggaggatgtgctggagcttcactgtgaggccctgagaggctctcctccgatcctgtactggttttatcacgaggatatcaccctggggagcaggt

SEQ ID NO: 498064 - DNA, 120 bp, Artificial Sequence
  ENSG00000163534_7 (sequence is synthesized)
cggccccctctggaggaggagcctccttcaacctttccctgactgaagaacattctggaaactactcctgtgaggccaacaatggcctgggggcccagcgcagtgaggcggtgacactca

SEQ ID NO: 498065 - DNA, 120 bp, Artificial Sequence
  ENSG00000163534_8 (sequence is synthesized)
acttcacagtgcctactggggccagaagcaatcatcttacctcaggagtcattgaggggctgctcagcacccttggtccagccaccgtggccttattattttgctacggcctcaaaagaa

SEQ ID NO: 498066 - DNA, 120 bp, Artificial Sequence
  ENSG00000163534_9 (sequence is synthesized)
aaataggaagacgttcagccagggatccactcaggagccttcccagccctctaccccaagagttcacctacctcaactcacctaccccagggcagctacagcctatatatgaaaatgtga

SEQ ID NO: 498067 - DNA, 120 bp, Artificial Sequence
  ENSG00000163534_10 (sequence is synthesized)
atgttgtaagtggggatgaggtttattcactggcgtactataaccagccggagcaggaatcagtagcagcagaaaccctggggacacatatggaggacaaggtttccttagacatctatt

SEQ ID NO: 498068 - DNA, 120 bp, Artificial Sequence
  ENSG00000163534_11 (sequence is synthesized)
ccaggctgaggaaagcaaacattacagatgtggactatgaagatgctatgtaaggttatggaagattctgctctttgaaaaccatccatgaccccaagcctcaggcctgatatgttcttc

SEQ ID NO: 498069 - DNA, 120 bp, Artificial Sequence
  ENSG00000163534_12 (sequence is synthesized)
atctactgtgaagtgaagttggcgcagccctgaagaaactacctaggagaactaatagacacaggagtgacagggactttgttatcagaaccagattcctgccggctcctttgaaaacag

SEQ ID NO: 498070 - DNA, 120 bp, Artificial Sequence
  ENSG00000163534_13 (sequence is synthesized)
gtcatattgtgctcttctgtttacaagaggaaacaagatggaataaaagaaattgggatcttgggttggagggacagtgaagcttagagcacatgaactcaaggttagtgactctgcagg

SEQ ID NO: 498071 - DNA, 120 bp, Artificial Sequence
  ENSG00000163534_14 (sequence is synthesized)
acttcacagagagagctgtgcccatcattcagtccaagtgctttctctgcccagacagcacagaactccagccccgctacttacatggatcatcgagtttccacctaaaatatgattcta

SEQ ID NO: 498072 - DNA, 120 bp, Artificial Sequence
  ENSG00000163534_15 (sequence is synthesized)
tttattttgagtcactgttaccaaattagaactaaaacaaagttacataaaaagttattgtgactccacttaattttagtgacgtatttttgtatatataggccaacctataccacatcc

SEQ ID NO: 498073 - DNA, 120 bp, Artificial Sequence
  ENSG00000163534_16 (sequence is synthesized)
aaaattatgtatctattacagcccctagaagctttataaatacagtgtgtcttcttttattcacaaaatttttgaaatcgtggtaatatggtttgaaacctgtatcttaattattttttt

SEQ ID NO: 498074 - DNA, 120 bp, Artificial Sequence
  ENSG00000163534_17 (sequence is synthesized)
tttaaattgagacagggtctcactctgtcactcaatctggaatgcagtggcacaatcttgcctcactgcaacgcctgcctctcaggctcaagcaaacctctcacctcagcctgctgagta

SEQ ID NO: 498075 - DNA, 80 bp, Artificial Sequence
  ENSG00000163534_18 (sequence is synthesized)
gctgggactacaggcacatgccaccaaacttggccattttttgtcttacgtagagacaagatttcaccggtattgaattt

SEQ ID NO: 498076 - DNA, 120 bp, Artificial Sequence
  ENSG00000163534_19 (sequence is synthesized)
taaaataaccaggcactcactcttatgaattaataaacatttggaggtatataaagtaaaaagttaaagtctttcctgtaagttaacacaaatgttaactattgttaaaaactttacagg

SEQ ID NO: 498077 - DNA, 120 bp, Artificial Sequence
  ENSG00000163534_20 (sequence is synthesized)
caggtagctctctagatatttttctatttttgtatgtatacttatgcatacatgtaagtatataaacatttagaagtgtacctatctaacaaactattatgaaatactttcaaatctgta

SEQ ID NO: 498078 - DNA, 120 bp, Artificial Sequence
  ENSG00000163534_21 (sequence is synthesized)
aagtctctatagtagtgtgttatatagataaatcataacttttttctttttttattgtagtaaatatgcacaacataaaattgatcattttaaccatttttaagtgtacaattcagtggc

SEQ ID NO: 498079 - DNA, 120 bp, Artificial Sequence
  ENSG00000163534_22 (sequence is synthesized)
taagtgtacaattcagtggcattaagtactatcataatatattttaatccttctcatcactggtggacattaaggagactctcaaaaaattcatattataaaaacaaagttcaaacaaat

SEQ ID NO: 498080 - DNA, 120 bp, Artificial Sequence
  ENSG00000163534_23 (sequence is synthesized)
gtctttgtactagcatattatggcactcctgctggattatctgaaggataaatttgtaaatctagtattgctagattatgcatattaaatattcttgttaaatagtcttcaatgtctctc

SEQ ID NO: 498081 - DNA, 120 bp, Artificial Sequence
  ENSG00000163534_24 (sequence is synthesized)
tcaatgtctctcaggtaaggctgtatcaatttatatcttcaccaacaacgtctgggaaatcagtttgtggggtgtattacttagttttcacattgctaataaagacatatccaagactgg

SEQ ID NO: 498082 - DNA, 120 bp, Artificial Sequence
  ENSG00000163534_25 (sequence is synthesized)
aaccaagagaacaatcagtggctgtgcatggcagacaacagcattcctcagagcagaaggctgtgagcatcactgtgtgtacttaatggctgtccttgggtctggagctaccttgagtag

SEQ ID NO: 498083 - DNA, 120 bp, Artificial Sequence
  ENSG00000163534_26 (sequence is synthesized)
ccctggggcatgctgaggaagttcaatggggctgagcatcggtgggcagggattatgagtttgctgcattgtcagagactgtctcttacagtctactgtctccctcagtcccggtgtctc

SEQ ID NO: 498084 - DNA, 120 bp, Artificial Sequence
  ENSG00000163534_27 (sequence is synthesized)
gcattctttttttgatgagaggcatctctaggtaccatccctgacctggtcctcatgctgccgaggctgttgctgttgatctgtgctccactctgtgaacctgccggtgagttgcacttc

SEQ ID NO: 498085 - DNA, 120 bp, Artificial Sequence
  ENSG00000163534_28 (sequence is synthesized)
cttttcttcttcaaggtctgtgggtattttgttacttaggtcagcacaggaggcctgcagattgctgtcttagcagccccttcctgcccaaaacatatcagggtgacagctgctgaggtg

SEQ ID NO: 498086 - DNA, 120 bp, Artificial Sequence
  ENSG00000163534_29 (sequence is synthesized)
ggggtgaacaggtcttgctctgaccttctcaagaacacagtcttacttccgggaagtcccagcacagggagggagacactgtttgcacaaggaaggcaaagggtgctgaagattcatgct

SEQ ID NO: 498087 - DNA, 120 bp, Artificial Sequence
  ENSG00000163534_30 (sequence is synthesized)
agaagcatctctgtcctcccagcctcaggagctccaattcccagttgtgcttctcagctgggtgtgtcaccatgggtgatgaaggaaatgccaaaatcacacatccacggagaacattag

SEQ ID NO: 498088 - DNA, 120 bp, Artificial Sequence
  ENSG00000163535_0 (sequence is synthesized)
gccgagctcccggagctgggtgggggtgccccacgctgaaagagagtgatggagtgcccagtgatggaaactggctcactttttacctcaggaattaagagacatttgaaagacaaaaga

SEQ ID NO: 498089 - DNA, 120 bp, Artificial Sequence
  ENSG00000163535_1 (sequence is synthesized)
atttcaaagactactaagttgaatgtttctcttgcttcaaaaataaaaacaaaaatactaaataattcttctattttcaaaatatctttaaagcacaacaacagggcattagctcaggct

SEQ ID NO: 498090 - DNA, 120 bp, Artificial Sequence
  ENSG00000163535_2 (sequence is synthesized)
cttagtagagaaaaagagaattctcgaagaattacaactgaaaagatgctattgcaaaaagaagtagagaaactgaattttgagaacacatttcttcgcctaaagctaaataacttgaat

SEQ ID NO: 498091 - DNA, 120 bp, Artificial Sequence
  ENSG00000163535_3 (sequence is synthesized)
aagaagcttatagacatagaagctctcatgaacaataacttgataactgcaattgaaatgagcagtctttctgagttccatcagagttcctttctactgtcagctagcaagaagaaacga

SEQ ID NO: 498092 - DNA, 120 bp, Artificial Sequence
  ENSG00000163535_4 (sequence is synthesized)
attagtaaacagtgcaagttgatgcgtcttccatttgcaagggttccattaacttcaaatgatgatgaagatgaagataaagagaaaatgcagtgtgacaacaatattaaatcaaagaca

SEQ ID NO: 498093 - DNA, 120 bp, Artificial Sequence
  ENSG00000163535_5 (sequence is synthesized)
ttacctgatattccctcttcaggatcaacaacacaacctttatcaactcaggataattcggaagtgttatttcttaaagaaaataatcaaaatgtatatggtttagatgattcagaacat

SEQ ID NO: 498094 - DNA, 120 bp, Artificial Sequence
  ENSG00000163535_6 (sequence is synthesized)
atttcttctatagttgatgtacctcccagagaaagccattcccactcagaccaaagttctaagacttctctaatgagtgagatgagaaacgcccagtctattggccgcagatgggagaaa

SEQ ID NO: 498095 - DNA, 120 bp, Artificial Sequence
  ENSG00000163535_7 (sequence is synthesized)
ccatctcctagtaatgtgactgaaaggaagaagcgtgggtcatcttgggaatcaaataatctttctgcagacactccctgtgcaacagttttagataaacaacacatttcaagtccagaa

SEQ ID NO: 498096 - DNA, 120 bp, Artificial Sequence
  ENSG00000163535_8 (sequence is synthesized)
ttaaattgcaataatgagataaatggtcatactaatgaaacaaatactgaaatgcaaagaaataaacaggatcttcctggcttatcttctgagtctgccagagaacctaatgcagagtgc

SEQ ID NO: 498097 - DNA, 120 bp, Artificial Sequence
  ENSG00000163535_9 (sequence is synthesized)
atgaatcaaattgaggataatgatgactttcaattgcagaaaactgtgtatgatgctgacatggatttaactgctagtgaagtcagcaaaattgtcacagtctcaacaggcattaaaaag

SEQ ID NO: 498098 - DNA, 120 bp, Artificial Sequence
  ENSG00000163535_10 (sequence is synthesized)
aaaagtaataaaaaaacaaatgaacatggaatgaaaactttcagaaaagtgaaagattccagctctgaaaaaaagagagaaagatcaaagagacagtttaaaaatagttcagatgtcgat

SEQ ID NO: 498099 - DNA, 120 bp, Artificial Sequence
  ENSG00000163535_11 (sequence is synthesized)
attggggaaaagattgaaaacaggacagaaagatctgatgtcctggatggcaaaaggggtgcagaagatcccggttttattttcaataatgaacagctggctcagatgaatgaacagctg

SEQ ID NO: 498100 - DNA, 120 bp, Artificial Sequence
  ENSG00000163535_12 (sequence is synthesized)
gctcaggtgaatgaactaaagaaaatgacccttcaaactggctttgaacaaggtgacagagaaaatgtactgtgtaataaaaaggagaaaagaataacaaatgagcaagaggaaacatac

SEQ ID NO: 498101 - DNA, 120 bp, Artificial Sequence
  ENSG00000163535_13 (sequence is synthesized)
tctttatcccaaagttcaggtaaatttcaccaggagagtaaatttgataagggtcagaattccctaacttgtaataaaagtaaagcttctagacagacatttgtgattcacaaattagaa

SEQ ID NO: 498102 - DNA, 120 bp, Artificial Sequence
  ENSG00000163535_14 (sequence is synthesized)
aaagataacttactcccaaaccaaaaggataaagtaaccatttatgaaaacctagacgtcacaaatgaatttcacacagccaatctttccaccaaagataatggaaatttatgtgattat

SEQ ID NO: 498103 - DNA, 120 bp, Artificial Sequence
  ENSG00000163535_15 (sequence is synthesized)
gggacccacaatatattggatttgaaaaagtatgtcactgatattcaaccctcagagcaaaatgaatcaaacattaataagcttagaaagaaagtaaaccggaagacagaaataatttct

SEQ ID NO: 498104 - DNA, 120 bp, Artificial Sequence
  ENSG00000163535_16 (sequence is synthesized)
ggaatgaaccacatgtatgaggataatgataaagatgtggtgcatggcctaaaaaaaggtaatttttttttcaaaacccaagaggataaagaacctatctctgaaaacatagaagtttcc

SEQ ID NO: 498105 - DNA, 120 bp, Artificial Sequence
  ENSG00000163535_17 (sequence is synthesized)
aaagagcttcaaatcccagctctttctactagagataatgaaaatcaatgtgactataggacccagaatgtgttgggtttgcaaaagcagatcaccaatatgtaccccgttcagcaaaat

SEQ ID NO: 498106 - DNA, 120 bp, Artificial Sequence
  ENSG00000163535_18 (sequence is synthesized)
tcggaagacagaaataatttctgaagtgaatcatttagataatgacaaaagtatagaatacacagttaaaagtcactcactctttttaacgcaaaaagataaggaaatcatccctggaaa

SEQ ID NO: 498107 - DNA, 120 bp, Artificial Sequence
  ENSG00000163535_19 (sequence is synthesized)
cctagaagacccaagtgagtttgaaacacctgctctttctaccaaagatagtggaaacctgtatgattctgagattcaaaatgttttgggggtgaaacatggccatgatatgcaacctgc

SEQ ID NO: 498108 - DNA, 120 bp, Artificial Sequence
  ENSG00000163535_20 (sequence is synthesized)
ttgtcaaaatgattcaaaaataggtaagaagcctagactaaatgtatgtcaaaagtcagaaataattcctgaaaccaaccaaatatatgagaatgataacaaaggtgtacatgacctaga

SEQ ID NO: 498109 - DNA, 120 bp, Artificial Sequence
  ENSG00000163535_21 (sequence is synthesized)
aaaagataacttcttctctctaaccccaaaggataaagaaacaatttctgaaaatctacaagtcacaaatgaatttcaaacagttgatcttctcatcaaagataatggaaatttatgtga

SEQ ID NO: 498110 - DNA, 120 bp, Artificial Sequence
  ENSG00000163535_22 (sequence is synthesized)
ttatgacacccagaatatattggagttgaaaaagtatgttactgataggaaatctgctgagcaaaatgaatcaaaaataaataagctcaggaataaagtgaattggaagacagaaataat

SEQ ID NO: 498111 - DNA, 120 bp, Artificial Sequence
  ENSG00000163535_23 (sequence is synthesized)
ttctgaaatgaaccagatatatgaggataatgataaagatgcacatgtccaagaaagctatacaaaagatcttgattttaaagtaaataaatctaaacaaaaacttgaatgccaagacat

SEQ ID NO: 498112 - DNA, 120 bp, Artificial Sequence
  ENSG00000163535_24 (sequence is synthesized)
tatcaataaacactatatggaagtcaacagtaatgaaaaggaaagttgtgatcaaattttagattcctacaaagtagttaaaaaacgtaagaaagaatcatcatgcaaggcaaagaacat

SEQ ID NO: 498113 - DNA, 120 bp, Artificial Sequence
  ENSG00000163535_25 (sequence is synthesized)
tttgacaaaagctaagaacaaacttgcttcacagttaacagaatcttcacagacatctatctccttagaatctgatttaaaacatattactagtgaagcagattctgatccaggaaaccc

SEQ ID NO: 498114 - DNA, 120 bp, Artificial Sequence
  ENSG00000163535_26 (sequence is synthesized)
agttgaactatgtaagactcagaagcaaagcactaccactttgaataaaaaagatctcccttttgtggaagaaataaaagaaggagagtgtcaggttaaaaaggtaaataaaatgacatc

SEQ ID NO: 498115 - DNA, 120 bp, Artificial Sequence
  ENSG00000163535_27 (sequence is synthesized)
taagtcaaagaaaaggaagacctccatagatccttctccagagagccatgaagtaatggaaagaatacttgacagcgttcagggaaagtctactgtatctgaacaagctgataaggaaaa

SEQ ID NO: 498116 - DNA, 120 bp, Artificial Sequence
  ENSG00000163535_28 (sequence is synthesized)
caatttggagaatgagaaaatggtcaaaaataagccagacttttacacaaaggcatttagatctttgtctgagatacattcacctaacatacaagattcttcctttgacagtgttcgtga

SEQ ID NO: 498117 - DNA, 120 bp, Artificial Sequence
  ENSG00000163535_29 (sequence is synthesized)
aggtttagtacctttgagcgtttcttctggtaaaaatgtgataataaaagaaaattttgccttggagtgctccccagcctttcaagtaagtgatgatgagcatgagaagatgaacaagat

SEQ ID NO: 498118 - DNA, 120 bp, Artificial Sequence
  ENSG00000163535_30 (sequence is synthesized)
gaaatttaaagtcaaccggagaacccaaaaatcaggaataggtgatagaccattacaggacttgtcaaataccagttttgtttcaaataacactgctgaatctgaaaataagtcagaaga

SEQ ID NO: 498119 - DNA, 120 bp, Artificial Sequence
  ENSG00000163535_31 (sequence is synthesized)
tctatcttcagaacggacaagcagaagaagaaggtgtactcctttctattttaaagagccaagcctcagagacaagatgagaagatgaagtgaatttatggattctggtttttctgaatt

SEQ ID NO: 498120 - DNA, 120 bp, Artificial Sequence
  ENSG00000163535_32 (sequence is synthesized)
ttcaaagcataaggaatcaaaacagaaatatagtatcaagaagatgaaatgcttaatgaaaaggttttttttttgtttctttggcctttcatggagtgttgatttgtccattcttaatgt

SEQ ID NO: 498121 - DNA, 120 bp, Artificial Sequence
  ENSG00000163535_33 (sequence is synthesized)
ttattaataggtatatgtgcataaaatagctattttgtaacattaaactttttgagtcattttggtcatcatataacttaccttcctgtttatttaagcttctttttacctagtagcctt

SEQ ID NO: 498122 - DNA, 120 bp, Artificial Sequence
  ENSG00000163535_34 (sequence is synthesized)
taaccaaacaataaccttttaaccaaataaaatgtgttaataaatacctttgcattggttatcttgtatactaggctgtcttgttttgctgtctgtttttaacccattcaatatatgtgg

SEQ ID NO: 498123 - DNA, 120 bp, Artificial Sequence
  ENSG00000163535_35 (sequence is synthesized)
acatccaaaagggtttaaaagccacctcctgccctggcccgttttctctcccttcattcttctgttttcagaaatacatgttgaatgtcagcttctgtattatttctattatatgtaatc

SEQ ID NO: 498124 - DNA, 120 bp, Artificial Sequence
  ENSG00000163535_36 (sequence is synthesized)
tgatgacttagaggaggagattaacctttcaggctcttttgaatttggtttttataatttggttttaaagatcacttactcttccagtaataagtagtaataaatcctgttcatatctga

SEQ ID NO: 498125 - DNA, 120 bp, Artificial Sequence
  ENSG00000163535_37 (sequence is synthesized)
tttaaaaattcattttgagtatttgtattagttacattcatcagatgttcttcctgagggcaattatgtataacagttaataagttagctctcttatgttaccgatttgctaacttctgc

SEQ ID NO: 498126 - DNA, 120 bp, Artificial Sequence
  ENSG00000163535_38 (sequence is synthesized)
catttaaaactgctggtgatagatttaattttaaagtaaatatgctgacaaacatcacacccacagtggcctaatactgttactctggaagaaatatttagaaataaatggacctaatga

SEQ ID NO: 498127 - DNA, 120 bp, Artificial Sequence
  ENSG00000163535_39 (sequence is synthesized)
gaccctcggcgcggccgccggacgccgcggggcggacgcggaagtgaacgccttctcagctgctcggcaactcgggagcagagcggccccagcggcgcccccgtgcggcccggctctgag

SEQ ID NO: 498128 - DNA, 120 bp, Artificial Sequence
  ENSG00000163535_40 (sequence is synthesized)
gcggcccggctctgaggcagcggctcagggagggagggaggccacgtcccgggcacgccacgccacgccacgccccgcccccagattcgtctcgccccagtgggccgcctcggagtcggg

SEQ ID NO: 498129 - DNA, 120 bp, Artificial Sequence
  ENSG00000163535_41 (sequence is synthesized)
ctctgtctcaaaaaaacaaacaaacaaaattaacttttgtctttgctcttatcctcctgtgcacaattctcattttttattaatttgattataagttatagaaagcaccctatttcaaat

SEQ ID NO: 498130 - DNA, 120 bp, Artificial Sequence
  ENSG00000163535_42 (sequence is synthesized)
ttataagttatagaaagcaccctatttcaaatctgtcatcttacaagtcagtcagtgatgctcagagaggcaaaatgattgaatgaattgatagcattgaccaaaatcctgttgtctctt

SEQ ID NO: 498131 - DNA, 120 bp, Artificial Sequence
  ENSG00000163535_43 (sequence is synthesized)
ttagaaatgttctttctattatatataacatatagatttaatgcttttacttaagtgcacaagtaaatgcacttatttattgaaatgctatctgtgccatagtaaaaaattctcatattt

SEQ ID NO: 498132 - DNA, 120 bp, Artificial Sequence
  ENSG00000163535_44 (sequence is synthesized)
ggtgtattcccagctgcactctctctggaggctcttcaggagaatctgttccttgctttgtcaattcctgatggctgctggcagtccttggcatgtggctgcatcactcctgtctctgct

SEQ ID NO: 498133 - DNA, 120 bp, Artificial Sequence
  ENSG00000163535_45 (sequence is synthesized)
tcacgttttaacttttccccagaattgttatatatttgctaccttattttatcaagtacagaaaattactaaaatgaccattttgttaactgataactttttaaatttgatccttcctat

SEQ ID NO: 498134 - DNA, 120 bp, Artificial Sequence
  ENSG00000163535_46 (sequence is synthesized)
ctccttcaactcctgttagttgggtggttttgatgatttaccctaagtgtgacacagttgaattttcagcagtgaggctgcagtgacccaagacagctactttctacagcgcagaaaaaa

SEQ ID NO: 498135 - DNA, 120 bp, Artificial Sequence
  ENSG00000163535_47 (sequence is synthesized)
tataacacaattagtgtttgtgtgtattgtacagtgttcaggatcatcaacctgtagttatctactaacgtagaaatgagctggtttgtagtgtcttgctataggttgtttctctaggac

SEQ ID NO: 498136 - DNA, 120 bp, Artificial Sequence
  ENSG00000163535_48 (sequence is synthesized)
tccaaggaaacttacggtcaatcccccaaccaggtttatttgtaatgtcttgctactttatagttcttttttttcttttcatctagttcactcctggccttatattgatttttgctggat

SEQ ID NO: 498137 - DNA, 120 bp, Artificial Sequence
  ENSG00000163536_0 (sequence is synthesized)
agtttcccgggagagacgaaagcaggaacgagagcggagcggagcacagtccgccgagcacaagctccagcatcccgtcaggggttgcaggtgtgtgggaggtaagcgtgggtccttctt

SEQ ID NO: 498138 - DNA, 120 bp, Artificial Sequence
  ENSG00000163536_1 (sequence is synthesized)
cggggcgtctgcactgccctggagaaaacgtcttccaataggaattacatcaagacacagctaaaagagtccgcgttgggttaggaaaccggtgcaaaacctctcgggtgaaagatttac

SEQ ID NO: 498139 - DNA, 120 bp, Artificial Sequence
  ENSG00000163536_2 (sequence is synthesized)
atttttcgactttaagggcaaaaaagcaaaaggaagcttgactctgggtataaagggcgtggttagtgtttttggtttgagttgcaccagtaaaactgttctgggagatctgaagattga

SEQ ID NO: 498140 - DNA, 120 bp, Artificial Sequence
  ENSG00000163536_3 (sequence is synthesized)
gaaaaatcctgctaattgaggacgaggtggatgttatctggtggatgttataggcttgaaactgttacaatatggctttccttggactcttctctttgctggttctgcaaagtatggcta

SEQ ID NO: 498141 - DNA, 120 bp, Artificial Sequence
  ENSG00000163536_4 (sequence is synthesized)
caggggccactttccctgaggaagccattgctgacttgtcagtgaatatgtataatcgtcttagagccactggtgaagatgaaaatattctcttctctccattgagtattgctcttgcaa

SEQ ID NO: 498142 - DNA, 120 bp, Artificial Sequence
  ENSG00000163536_5 (sequence is synthesized)
tgggaatgatggaacttggggcccaaggatctacccagaaagaaatccgccactcaatgggatatgacagcctaaaaaatggtgaagaattttctttcttgaaggagttttcaaacatgg

SEQ ID NO: 498143 - DNA, 120 bp, Artificial Sequence
  ENSG00000163536_6 (sequence is synthesized)
taactgctaaagagagccaatatgtgatgaaaattgccaattccttgtttgtgcaaaatggatttcatgtcaatgaggagtttttgcaaatgatgaaaaaatattttaatgcagcagtaa

SEQ ID NO: 498144 - DNA, 120 bp, Artificial Sequence
  ENSG00000163536_7 (sequence is synthesized)
gatgctgccacttatctggccctcattaatgctgtctatttcaaggggaactggaagtcgcagtttaggcctgaaaatactagaaccttttctttcactaaagatgatgaaagtgaagtc

SEQ ID NO: 498145 - DNA, 120 bp, Artificial Sequence
  ENSG00000163536_8 (sequence is synthesized)
caaattccaatgatgtatcagcaaggagaattttattatggggaatttagtgatggctccaatgaagctggtggtatctaccaagtcctagaaataccatatgaaggagatgaaataagc

SEQ ID NO: 498146 - DNA, 120 bp, Artificial Sequence
  ENSG00000163536_9 (sequence is synthesized)
atgatgctggtgctgtccagacaggaagttcctcttgctactctggagccattagtcaaagcacagctggttgaagaatgggcaaactctgtgaagaagcaaaaagtagaagtatacctg

SEQ ID NO: 498147 - DNA, 120 bp, Artificial Sequence
  ENSG00000163536_10 (sequence is synthesized)
cccaggttcacagtggaacaggaaattgatttaaaagatgttttgaaggctcttggaataactgaaattttcatcaaagatgcaaatttgacaggcctctctgataataaggagattttt

SEQ ID NO: 498148 - DNA, 120 bp, Artificial Sequence
  ENSG00000163536_11 (sequence is synthesized)
ctttccaaagcaattcacaagtccttcctagaggttaatgaagaaggctcagaagctgctgctgtctcaggaatgattgcaattagtaggatggctgtgctgtatcctcaagttattgtc

SEQ ID NO: 498149 - DNA, 120 bp, Artificial Sequence
  ENSG00000163536_12 (sequence is synthesized)
gaccatccatttttctttcttatcagaaacaggagaactggtacaattctattcatgggacgagtcatgcatcctgaaacaatgaacacaagtggacatgatttcgaagaactttaagtt

SEQ ID NO: 498150 - DNA, 120 bp, Artificial Sequence
  ENSG00000163536_13 (sequence is synthesized)
actttatttgaataacaaggaaaacagtaactaagcacattatgtttgcaactggtatatatttaggatttgtgttttacagtatatcttaagataatatttaaaatagttccagataaa

SEQ ID NO: 498151 - DNA, 120 bp, Artificial Sequence
  ENSG00000163536_14 (sequence is synthesized)
aacaatatatgtaaattataagtaacttgtcaaggaatgttatcagtattaagctaatggtcctgttatgtcattgtgtttgtgtgctgttgtttaaaataaaagtacctattgaacatg

SEQ ID NO: 498152 - DNA, 120 bp, Artificial Sequence
  ENSG00000163536_15 (sequence is synthesized)
gaaggataggctgagccggggctcccagcagagacgcctgggtggggcaggaggccgctccaggtgtgagccacagaggaggggagagggacccccacgggagtggaagtggcagagcag

SEQ ID NO: 498153 - DNA, 120 bp, Artificial Sequence
  ENSG00000163536_16 (sequence is synthesized)
ctgcagaagtgcagggagcggaaaggtaccagggcagctgctttccgctgcctccggtccgggcagctgcagaaacagcagggggaggagcaacagctgccaaattcgccaactagagga

SEQ ID NO: 498154 - DNA, 120 bp, Artificial Sequence
  ENSG00000163536_17 (sequence is synthesized)
gggagaggcggagcttgggtccctgtagaagccagaggcgcagtctggactgtagtttcccgggagagacgaaagcaggaacgagagcggagcggagcacagtccgccgagcacaagctc

SEQ ID NO: 498155 - DNA, 120 bp, Artificial Sequence
  ENSG00000163536_18 (sequence is synthesized)
gaggggcctgtggtggggatcctggggctgtcgggctgagtatgccgtgtgggtggagaggaagcctcggggaaatcgcccaggcttgaaactgttacaatatggctttccttggactct

SEQ ID NO: 498156 - DNA, 120 bp, Artificial Sequence
  ENSG00000163536_19 (sequence is synthesized)
tttcccgggagagacgaaagcaggaacgagagcggagcggagcacagtccgccgagcacaagctccagcatcccgtcaggggttgcaggcttgaaactgttacaatatggctttccttgg

SEQ ID NO: 498157 - DNA, 120 bp, Artificial Sequence
  ENSG00000163539_0 (sequence is synthesized)
gggctggggatcggggggcgccgagtttgactagtttgggggcggctgggcgcttggcgttcctcccgccgcccgctgcgccccgcaagccgcgcccctggcgggctaagtgagtcccgc

SEQ ID NO: 498158 - DNA, 120 bp, Artificial Sequence
  ENSG00000163539_1 (sequence is synthesized)
ccgctcccgcggggacccgcactggaggctgggcggctctcggcgaaagttggccgctcacagactggcaggcgggcgggcggccgcagccatggagccccgcagcatggagtacttctg

SEQ ID NO: 498159 - DNA, 120 bp, Artificial Sequence
  ENSG00000163539_2 (sequence is synthesized)
cgcccaggtgcagcagaaggacgtcggcggccggctgcaggtcggccaggagctcctgctctaccttggcgcccccggcgccatctcggacctggaggaggacctgggccgcctaggcaa

SEQ ID NO: 498160 - DNA, 120 bp, Artificial Sequence
  ENSG00000163539_3 (sequence is synthesized)
gacagtcgacgcgctcaccggctgggtgggttcgagcaactaccgggtatcattaatgggattggaaattttaagtgcctttgtggacagattatcaacacgctttaaatcctatgtagc

SEQ ID NO: 498161 - DNA, 120 bp, Artificial Sequence
  ENSG00000163539_4 (sequence is synthesized)
aatggttattgtagctttaatagacagaatgggagatgccaaagacaaggttcgagatgaagctcagactctgatattgaagttaatggatcaagtagcaccacctatgtacatttggga

SEQ ID NO: 498162 - DNA, 120 bp, Artificial Sequence
  ENSG00000163539_5 (sequence is synthesized)
gcagttggcttctggttttaaacacaagaattttcgatctcgagaaggcgtgtgtctgtgtcttattgaaaccttaaacatttttggggctcagccactagtcatcagcaaattgatacc

SEQ ID NO: 498163 - DNA, 120 bp, Artificial Sequence
  ENSG00000163539_6 (sequence is synthesized)
acatttgtgtatcctgtttggagactccaacagtcaggtgagagatgctgcaatattggctatagtggagatttatagacatgtgggagaaaaagtgaggatggatctttataagagagg

SEQ ID NO: 498164 - DNA, 120 bp, Artificial Sequence
  ENSG00000163539_7 (sequence is synthesized)
aattccccctgctagattagaaatgatatttgccaaatttgatgaagtgcaaagttcaggcggtatgattttgagtgtctgcaaagataaaagcttcgatgatgaagaatcagtggatgg

SEQ ID NO: 498165 - DNA, 120 bp, Artificial Sequence
  ENSG00000163539_8 (sequence is synthesized)
aaataggccatcatcagctgcatcagccttcaaggttcctgcacctaaaacatccggaaatcctgccaacagtgcaaggaagcctggttcagcaggtggccctaaggttggagcaggtgc

SEQ ID NO: 498166 - DNA, 120 bp, Artificial Sequence
  ENSG00000163539_9 (sequence is synthesized)
ttctaaggaaggaggtgctggagcagttgatgaagatgattttataaaagcttttacagatgtcccttctattcagatttattctagtcgagaactcgaagaaacattaaataaaatcag

SEQ ID NO: 498167 - DNA, 120 bp, Artificial Sequence
  ENSG00000163539_10 (sequence is synthesized)
ggaaattttgtcagatgataaacatgactgggatcagcgtgccaatgcactgaagaaaattcgatcactgcttgttgctggagctgcacagtatgattgcttttttcaacatttacgatt

SEQ ID NO: 498168 - DNA, 120 bp, Artificial Sequence
  ENSG00000163539_11 (sequence is synthesized)
gttggatggagcacttaaactttcagctaaggatcttagatcccaggtggttagagaagcttgtattactgtagcccacctttcaacagttttgggaaacaagtttgatcatggcgctga

SEQ ID NO: 498169 - DNA, 120 bp, Artificial Sequence
  ENSG00000163539_12 (sequence is synthesized)
agccattgtacctacactttttaatctcgtccccaatagtgcaaaagtcatggcaacttctggatgtgcagcaatcagatttatcattcggcatactcatgtacccagacttataccttt

SEQ ID NO: 498170 - DNA, 120 bp, Artificial Sequence
  ENSG00000163539_13 (sequence is synthesized)
aataacaagcaattgcacatcaaaatcagttcccgtgaggagacgttcatttgaatttttagatttattgttgcaagagtggcagactcattcattggaaagacatgcagccgtcttggt

SEQ ID NO: 498171 - DNA, 120 bp, Artificial Sequence
  ENSG00000163539_14 (sequence is synthesized)
tgaaactattaaaaagggaattcatgatgctgacgctgaggccagagtggaggcaagaaagacatacatgggtcttagaaaccactttcctggtgaagctgaaacattatataattccct

SEQ ID NO: 498172 - DNA, 120 bp, Artificial Sequence
  ENSG00000163539_15 (sequence is synthesized)
tgagccatcttatcagaagagtcttcaaacttacttaaagagttctggcagtgtagcatctcttccacaatcagacaggtcctcatccagctcacaggaaagtctcaatcgccctttttc

SEQ ID NO: 498173 - DNA, 120 bp, Artificial Sequence
  ENSG00000163539_16 (sequence is synthesized)
ttccaaatggtctacagcaaatccatcaactgtggctggaagagtatcagcaggcagcagcaaagccagttcccttccaggaagcctgcagcgttcacgaagtgacattgatgtgaatgc

SEQ ID NO: 498174 - DNA, 120 bp, Artificial Sequence
  ENSG00000163539_17 (sequence is synthesized)
tgctgcaggtgccaaggcacatcatgctgctggacagtctgtgcgaagcgggcgcttaggtgcaggtgccctgaatgcaggttcctatgcgtcactagaggatacttctgacaagctgga

SEQ ID NO: 498175 - DNA, 120 bp, Artificial Sequence
  ENSG00000163539_18 (sequence is synthesized)
tggaacagcatctgaagatggccgggtgagagcaaaactttcagcaccacttgctggcatgggaaatgccaaggcagattctagaggaagaagtcgaacaaaaatggtgtctcaatcaca

SEQ ID NO: 498176 - DNA, 120 bp, Artificial Sequence
  ENSG00000163539_19 (sequence is synthesized)
gcctggtagccggtctgggtctccaggaagagttctgaccacaacagccctgtccactgtgagctctggtgttcaaagagtcctggtcaattcagcctcagcacaaaaaagaagcaagat

SEQ ID NO: 498177 - DNA, 120 bp, Artificial Sequence
  ENSG00000163539_20 (sequence is synthesized)
accacggagccagggctgtagcagagaggctagtccatctaggctttcagtggcccgaagcagtcgtattcctcgaccaagtgtgagtcaaggatgcagccgggaagctagtcgggagag

SEQ ID NO: 498178 - DNA, 120 bp, Artificial Sequence
  ENSG00000163539_21 (sequence is synthesized)
cagcagagacacaagtcctgttcgctcttttcagcccctcggtccaggttatgggatcagccaatcaagtcgactgtcgtcttctgttagtgccatgcgagtcctgaacacaggttctga

SEQ ID NO: 498179 - DNA, 120 bp, Artificial Sequence
  ENSG00000163539_22 (sequence is synthesized)
tgtggaggaggcggtggcagatgccttgctcttaggagacatacggactaagaaaaaaccagctcgaagaagatatgaatcatatggaatgcattcagatgatgacgccaacagcgatgc

SEQ ID NO: 498180 - DNA, 120 bp, Artificial Sequence
  ENSG00000163539_23 (sequence is synthesized)
atctagtgcttgttcagaacgctcctatagttctcgaaatggtagtattcctacatatatgaggcagacggaagatgtggcagaagtcctcaatagatgtgctagttccaattggtcaga

SEQ ID NO: 498181 - DNA, 120 bp, Artificial Sequence
  ENSG00000163539_24 (sequence is synthesized)
aaggaaagaaggcctcctaggtctgcagaacttattaaaaaatcagagaacactaagtcgagttgaactgaaaagattatgtgaaattttcacaagaatgtttgctgaccctcatggcaa

SEQ ID NO: 498182 - DNA, 120 bp, Artificial Sequence
  ENSG00000163539_25 (sequence is synthesized)
gagagtattcagcatgtttttggagactctagtggatttcatacaagtccacaaagatgatcttcaagattggttgtttgtactgctgacacaactactaaaaaaaatgggtgctgattt

SEQ ID NO: 498183 - DNA, 120 bp, Artificial Sequence
  ENSG00000163539_26 (sequence is synthesized)
gcttggatctgttcaggcaaaagttcagaaagcccttgatgttacaagagagtcttttccaaatgatcttcagttcaatattctaatgagatttacagttgatcagacccagacaccaag

SEQ ID NO: 498184 - DNA, 120 bp, Artificial Sequence
  ENSG00000163539_27 (sequence is synthesized)
cttaaaggtgaaggttgctatccttaaatacatagaaactctggccaaacagatggatccaggagattttataaattccagtgaaactcgcctagcagtgtctcgggtcatcacttggac

SEQ ID NO: 498185 - DNA, 120 bp, Artificial Sequence
  ENSG00000163539_28 (sequence is synthesized)
aacagaacccaaaagttctgatgttcggaaggcagcacagtcagtgctgatttcattatttgaactcaataccccagagtttacaatgttattaggagctttaccaaaaacttttcagga

SEQ ID NO: 498186 - DNA, 120 bp, Artificial Sequence
  ENSG00000163539_29 (sequence is synthesized)
atggggagtcctttgacaagaccaacaccacgatcaccagctaactggtccagtcctcttacttctcctaccaatacatcacagaatactttatctccaagtgcatttgattatgacaca

SEQ ID NO: 498187 - DNA, 120 bp, Artificial Sequence
  ENSG00000163539_30 (sequence is synthesized)
gaaaatatgaactctgaagatatttatagctctcttagaggtgtcactgaagcaatccagaatttcagcttccgtagccaagaagatatgaatgagccattgaaaagggattctaaaaaa

SEQ ID NO: 498188 - DNA, 120 bp, Artificial Sequence
  ENSG00000163539_31 (sequence is synthesized)
gatgatggcgattcaatgtgtggtggtcctgggatgtctgacccaagagcaggaggtgatgctactgactcaagtcaaacagctcttgataataaagcttcattgctccattcaatgcct

SEQ ID NO: 498189 - DNA, 120 bp, Artificial Sequence
  ENSG00000163539_32 (sequence is synthesized)
actcactcctctccacgctctcgagactataatccatataactattcagatagcatcagtcccttcaacaagtctgccctcaaggaagccatgtttgatgatgatgctgaccagtttcct

SEQ ID NO: 498190 - DNA, 120 bp, Artificial Sequence
  ENSG00000163539_33 (sequence is synthesized)
gacgatctttccctagatcattctgacctagttgcagagttgttgaaggagctgtctaaccataatgagcgtgtagaagaaagaaaaattgccctctatgaacttatgaaactgacacag

SEQ ID NO: 498191 - DNA, 120 bp, Artificial Sequence
  ENSG00000163539_34 (sequence is synthesized)
gaagaatcttttagtgtttgggatgaacacttcaaaacaatattgcttttattgcttgaaacgcttggagataaagagcctacaatcagggctttggcattaaaggttttaagagaaatc

SEQ ID NO: 498192 - DNA, 120 bp, Artificial Sequence
  ENSG00000163539_35 (sequence is synthesized)
ctaaggcatcaaccagcaagatttaaaaactatgcagaattgactgtcatgaaaacattggaagcacataaagatcctcataaggaggtggtgagatctgctgaggaagcggcatcagtg

SEQ ID NO: 498193 - DNA, 120 bp, Artificial Sequence
  ENSG00000163539_36 (sequence is synthesized)
ttggccacttcaattagtccagagcagtgcatcaaagtgctttgtcctatcattcaaactgcagactacccaattaatctggctgcaatcaaaatgcaaacaaaagtgatagagagagtg

SEQ ID NO: 498194 - DNA, 120 bp, Artificial Sequence
  ENSG00000163539_37 (sequence is synthesized)
tccaaggaaaccctaaacctgcttttgccagagattatgccaggtctaatacagggttatgataattcagagagcagtgttcggaaagcttgtgtcttctgcctggtggctgttcatgcg

SEQ ID NO: 498195 - DNA, 120 bp, Artificial Sequence
  ENSG00000163539_38 (sequence is synthesized)
gtaattggtgatgaactaaaaccacatctcagtcaacttactggcagtaaaatgaagctactgaatctttacatcaaacgtgcacaaacaggttctggaggagctgatcccactactgat

SEQ ID NO: 498196 - DNA, 120 bp, Artificial Sequence
  ENSG00000163539_39 (sequence is synthesized)
gtttctggacaaagttagtgaagctcatcacagcgaaccaggtctctcaaaagaaaggacagatagaccaccctcatcaatgaaaggaagttctcaaacacatcctttggaacttactat

SEQ ID NO: 498197 - DNA, 120 bp, Artificial Sequence
  ENSG00000163539_40 (sequence is synthesized)
tgtttcccagttttagttttttgtttcgtttcgttttgtattttctgtaacagaggactatcctcagtctgcatgtaacttttatgatagttattccaaattcaagaagaagcagtatta

SEQ ID NO: 498198 - DNA, 120 bp, Artificial Sequence
  ENSG00000163539_41 (sequence is synthesized)
acatcaattgatcgacacaaagtaatttttaatttaattcatcatttcacatgtttgtactttgtcttcccattaacctttgccagtgttatgattgtataaatttttttaaatgctggt

SEQ ID NO: 498199 - DNA, 120 bp, Artificial Sequence
  ENSG00000163539_42 (sequence is synthesized)
taaacaggaatgcttaaagctttaaaagtttaacagtctaaaacatttttgcttttattcaactgcagaataatatttttattgctactttgagttttgtttcgtatcatgtcctatgct

SEQ ID NO: 498200 - DNA, 120 bp, Artificial Sequence
  ENSG00000163539_43 (sequence is synthesized)
agaaatatttaaatgatgtgaaacaaagcaggactaatttgaactacagctggactccgtttgtgtgatggtgatacatgtcattagttgcaacttctttggggtgatctatagtttgaa

SEQ ID NO: 498201 - DNA, 120 bp, Artificial Sequence
  ENSG00000163539_44 (sequence is synthesized)
aactaaaacctcaaagacagatgttacagaatcagccagttctgtaaaactgatattgtctattggttattgatcttgccatctttatttaaaaccatgtcccttctatgatcccttaag

SEQ ID NO: 498202 - DNA, 120 bp, Artificial Sequence
  ENSG00000163539_45 (sequence is synthesized)
aaagctgcaccaaatcatctgcctgttttttcttgatacttactgaaatagaaggttttattgcagggtttattttggtttgtttatatctttgttgtgaatgatgcttttttgtattta

SEQ ID NO: 498203 - DNA, 120 bp, Artificial Sequence
  ENSG00000163539_46 (sequence is synthesized)
ttaatatcaaattcacttatgaataaacttgataatggaaacggacaaaaaaaatcaagtgcgtgtgtgtccttgaccgtcttctgtttctcacgtaataaacaaattatcgagacatgg

SEQ ID NO: 498204 - DNA, 120 bp, Artificial Sequence
  ENSG00000163539_47 (sequence is synthesized)
gagtgaccagcaccttttctttaaatggtggaacctggtttccttttaccatgaaattgtcttacttgaaaatattgatcctgatgagagagaagatggtgccaaggctgtctttgtata

SEQ ID NO: 498205 - DNA, 120 bp, Artificial Sequence
  ENSG00000163539_48 (sequence is synthesized)
atgggctcaaattctctacctcttcagggctaatacttttaactgagctgctgcctatagtgtcttttggaaaactacttaaagggtgattttctgttactttttagcaaatttttttaa

SEQ ID NO: 498206 - DNA, 120 bp, Artificial Sequence
  ENSG00000163539_49 (sequence is synthesized)
tcacctcttgctacacccattcttttcatgtgcagccgactcaaaaattaccagttttggtgaaaggctaaattagataatttggaaccaggatactaatgatttctcatctttactttt

SEQ ID NO: 498207 - DNA, 120 bp, Artificial Sequence
  ENSG00000163539_50 (sequence is synthesized)
ttttaatcctaatataaagtgaatttgattgaaaaggcaaatagctattagggaagcagtttgccattgttgcagagttatctgtactttgtttaactgaaaaaaatgtagaaatatatg

SEQ ID NO: 498208 - DNA, 120 bp, Artificial Sequence
  ENSG00000163539_51 (sequence is synthesized)
taaagaatttaagacaagagtactgaatggatgatttgtcataggctttcccctttctttctgttctagcagcaggaaaagtttctctatatcctctccctctacctgtaacaattttgt

SEQ ID NO: 498209 - DNA, 120 bp, Artificial Sequence
  ENSG00000163539_52 (sequence is synthesized)
tttctactgttaattacattgtgtatttatagttctatgcttactgttgtgcatatactggcaataaaactgtacataacattacttgaaaaagttaataatgtatatcagtttttctgt

SEQ ID NO: 498210 - DNA, 120 bp, Artificial Sequence
  ENSG00000163539_53 (sequence is synthesized)
ctcactgtgtaacaagtcactcagttttattttaactttagacggtcttgtatcagtggtggtctcttgaattttgtaagttcatctgaggagaaaagatttttcaggtgtagctaccac

SEQ ID NO: 498211 - DNA, 120 bp, Artificial Sequence
  ENSG00000163539_54 (sequence is synthesized)
aatcaaaggtatatagctacatacgcatgtatatattacagcttatctgtaagaagaaaatgcattttaaacacaactcttctcagtagcattttatgacctttggatatgtttgtaatc

SEQ ID NO: 498212 - DNA, 120 bp, Artificial Sequence
  ENSG00000163539_55 (sequence is synthesized)
atttcgaatcaaaatattgatttaattttgacctctggtttaagatactgctttaactactgttgacaaccaagtagagtgacttaagctgaacagtaactaactggaaaattagataag

SEQ ID NO: 498213 - DNA, 120 bp, Artificial Sequence
  ENSG00000163539_56 (sequence is synthesized)
cacctggcatctaatggcaggcaggcactcaagaaatgaattaactacataatggaaaagtatggtttaatgtgtccaaatgaaagctagtagatgtaaacatggaaaaattgtgtttac

SEQ ID NO: 498214 - DNA, 120 bp, Artificial Sequence
  ENSG00000163539_57 (sequence is synthesized)
aattttataatctcagttgataagactataagaaagctgattatttaaatcactatatacaatacacccttaatttgttcattccagaaacatactgagatgtcagctacttaaaaatgg

SEQ ID NO: 498215 - DNA, 120 bp, Artificial Sequence
  ENSG00000163539_58 (sequence is synthesized)
tcacaaaaagctactgtttatatttttcctcctgctattctctcccaaattaattattaataagtgttgttcatttactgcactgctgagaactaattaaaattatatattccagattgt

SEQ ID NO: 498216 - DNA, 120 bp, Artificial Sequence
  ENSG00000163539_59 (sequence is synthesized)
agaggtcctatcgctcccagcggtttccgcagccacctccaccacctccgcagcaaaacgctagccggactggagggccctcgccggcgtcgtgctgacgtcacgcgcgtgctgacgtcg

SEQ ID NO: 498217 - DNA, 120 bp, Artificial Sequence
  ENSG00000163539_60 (sequence is synthesized)
agcacctagggcagggaagagaaagaaaaatgccggcacaaacctcagtggtggttctgtggttgtttctgtctttttttgatagaatctttgattagtatcgaatttactgtatttggc

SEQ ID NO: 498218 - DNA, 120 bp, Artificial Sequence
  ENSG00000163539_61 (sequence is synthesized)
catgtgaactattgggagcctcctagggtgagggaaattaagagctttcagaggaatgaggcgactgatttgcaaacggatctgtgattataaaagcttcgatgatgaagaatcagtgga

SEQ ID NO: 498219 - DNA, 120 bp, Artificial Sequence
  ENSG00000163539_62 (sequence is synthesized)
gtggccctgctgtccgcgcacagagcagcctttgatgggctgcctttgacgtgatttgtttacggcagccagaaatgcttcctgcataatgagagcagttaatcatggaaactgggctat

SEQ ID NO: 498220 - DNA, 120 bp, Artificial Sequence
  ENSG00000163539_63 (sequence is synthesized)
gggtttcaacttcattctttttcatgtactgaaaatacttttttattttcagtaagaaacttacctaactgcctaccatcccccatgctcagtagccttgatgatggtggcccatatttg

SEQ ID NO: 498221 - DNA, 120 bp, Artificial Sequence
  ENSG00000163539_64 (sequence is synthesized)
atgctcagtagccttgatgatggtggcccatatttgtggtgtagcttgctggtgccaggagggacatggaccttgttctcaaaaaattgtggttatgttttgttgttgttgttgttgttg

SEQ ID NO: 498222 - DNA, 120 bp, Artificial Sequence
  ENSG00000163539_65 (sequence is synthesized)
cctgagaggctggcacagagactagcctttgtttcacctcccatcaggctgaagtggcttcctaagtggagtctattgaaaagatttaaaaacatactacccatagccacctgaggcaag

SEQ ID NO: 498223 - DNA, 120 bp, Artificial Sequence
  ENSG00000163539_66 (sequence is synthesized)
ggagagcagacaagacaagcagcaaacaaaagcctgggaaggaggaagctgatgaagaagataatttgtgaaataagggttttgctgggcccacgtgtactgaggaatccaccaaaagta

SEQ ID NO: 498224 - DNA, 120 bp, Artificial Sequence
  ENSG00000163539_67 (sequence is synthesized)
ctgggcccacgtgtactgaggaatccaccaaaagtatgctcagaaaagactttagagcaggggtccctaacccccaggccatggactggtactgatccatggcctgttaggaactgggcc

SEQ ID NO: 498225 - DNA, 85 bp, Artificial Sequence
  ENSG00000163539_68 (sequence is synthesized)
agctttacagaagtatgaagcctattgtgagttgcacatatgagggatctaggttccatgcttcttatgagaatctaatgcctga

SEQ ID NO: 498226 - DNA, 87 bp, Artificial Sequence
  ENSG00000163539_69 (sequence is synthesized)
gaacagtttcatcctgaaaccatccccccatcacccttccccatccgtggaaaaattgcctggggaccaccgtcttagagggcccta

SEQ ID NO: 498227 - DNA, 120 bp, Artificial Sequence
  ENSG00000163539_70 (sequence is synthesized)
caccgtcttagagggccctaggcttggacctctggatgttctttgggctccatgcaagtaggagttgggctaagacagaattgtaggcagcctagctaattgaatgattacgcagctcag

SEQ ID NO: 498228 - DNA, 120 bp, Artificial Sequence
  ENSG00000163539_71 (sequence is synthesized)
agtcaatctgcaaagactgggagagtttgtcttgttttgttttgaccccaggcatttaaggaaatctctgtcaggtcactggctaactgctgaggtaacaaagagacttcagtgaccaca

SEQ ID NO: 498229 - DNA, 120 bp, Artificial Sequence
  ENSG00000163539_72 (sequence is synthesized)
taccgtaaacaaaatttactcaaacaaatcagtgatctaaatatagctactaaaactacaaaactcatagaagaaaacatagcgataaatctttatgaccttagatttaagttcatcctc

SEQ ID NO: 498230 - DNA, 120 bp, Artificial Sequence
  ENSG00000163539_73 (sequence is synthesized)
tatggcagtggattattagatatgacacctaaagcatcaatgataaataaaaaataggttaattgaacttcatcaaaattaataacttttgttcatctcaggacctaatcaaaaaactga

SEQ ID NO: 498231 - DNA, 120 bp, Artificial Sequence
  ENSG00000163539_74 (sequence is synthesized)
aaagacaacctatagtatgggagaacattcttgcaaattatatatctgataatggtctactatccagagtatatataaagaactcttataactcaacagcaaaaggataaataactttta

SEQ ID NO: 498232 - DNA, 120 bp, Artificial Sequence
  ENSG00000163539_75 (sequence is synthesized)
aatggacaaaggacttgaatagctatttcttcaaagaagatgtacaaatggccagcaagtacgtgaaaagatgcttggtgtcattagtaattacggaaatcaaaaccacaatgagatacc

SEQ ID NO: 498233 - DNA, 120 bp, Artificial Sequence
  ENSG00000163539_76 (sequence is synthesized)
acttcatacccactgggatggttgtgatcaaaagaacaaaaataacaggttttgatgaggatgtacaaaaattggaacccttatacattgcttgcataaatacaaattggtggtacagct

SEQ ID NO: 498234 - DNA, 80 bp, Artificial Sequence
  ENSG00000163539_77 (sequence is synthesized)
ttatacattgcttgcataaatacaaattggtggtacagctgctgtggaatgcagtttggcagttcctcaaaaagttaaca

SEQ ID NO: 498235 - DNA, 68 bp, Artificial Sequence
  ENSG00000163539_78 (sequence is synthesized)
ctttgggagtccgaggcgggtgaatcacttgaggtcaggaattgaagagcagcctggccaacgtgatg

SEQ ID NO: 498236 - DNA, 120 bp, Artificial Sequence
  ENSG00000163539_79 (sequence is synthesized)
gtggaggttgcagtgagctgagatcacatactgcagtccagcctaggcaacggagcaagacgtcatctcaaggaaaaaaaaaaaaaggaaaaagataaagttaacacaaaattgtcatat

SEQ ID NO: 498237 - DNA, 120 bp, Artificial Sequence
  ENSG00000163539_80 (sequence is synthesized)
cacaaaattgtcatataacccacctattctattcccaggtatatacccaaaagaagtcaaagcaaatatttaaatagttatacatgaatgttcatagcagcactattcacagtagccaaa

SEQ ID NO: 498238 - DNA, 120 bp, Artificial Sequence
  ENSG00000163539_81 (sequence is synthesized)
aggtgaaaacaacccaaatatccattaataaatggataaacaacatgatatatcatacaatggaatattatccaatcataaatattacattcctattccactccttgcccataatacctc

SEQ ID NO: 498239 - DNA, 120 bp, Artificial Sequence
  ENSG00000163539_82 (sequence is synthesized)
attctgccatgcgattccctaactgttctgggaagggacagtgcgtgtctttttggacactgaacattatttacctggcctgttcttgtcacataccaggcacttaaatatttaaacatt

SEQ ID NO: 498240 - DNA, 120 bp, Artificial Sequence
  ENSG00000163539_83 (sequence is synthesized)
gaatgccatactctttgcagtgttatttgtaataggaaaaatttagcaggaaggaggttattggggaggaagatgtaaacttacaatactctagaatggttaaattaggaagcatactaa

SEQ ID NO: 498241 - DNA, 120 bp, Artificial Sequence
  ENSG00000163539_84 (sequence is synthesized)
atgtacttcttttagctagatatctattgatattttaatgtttctgcagttgttttagaaagataaaatgattaggattttagtggagatgagctctattttttccctggagtaaaatgt

SEQ ID NO: 498242 - DNA, 120 bp, Artificial Sequence
  ENSG00000163539_85 (sequence is synthesized)
gcatattcattcagataattcattcaaaaatatttcatggataagattgctgtagagtattgaaatagagtaagtagtgtgatcaaaagcgtaagtgggagagatggacagagaaaggga

SEQ ID NO: 498243 - DNA, 120 bp, Artificial Sequence
  ENSG00000163539_86 (sequence is synthesized)
agatgttggtcaaaaggtacaaagtttcagttaaagagtattaggttctagctacgtattacacagcacagtaactagttaataatgtatatttcaaagtagcaattataaaagaaaatg

SEQ ID NO: 498244 - DNA, 120 bp, Artificial Sequence
  ENSG00000163539_87 (sequence is synthesized)
cattttaaatgttaccacaaagaaatgataagtatctgaggtgatggatatgttgattagcctgatttggtcattccacagtgtacatgtattgaaacatcacattataccccataaata

SEQ ID NO: 498245 - DNA, 120 bp, Artificial Sequence
  ENSG00000163539_88 (sequence is synthesized)
taattttttaaataaaattaggttattaaaggcacagtaaaagcataggggaatagtttacatagactagatttattagagaaagtaattgcagggatggaacagatgtaaaacttaatc

SEQ ID NO: 498246 - DNA, 120 bp, Artificial Sequence
  ENSG00000163539_89 (sequence is synthesized)
gggcctggattatgtgactaccttgagctaccaaaccaatgaatttaggttttatcggatagtgaggagtgctgactgccttaaaacctaatgctttaggaaagttagtctggagacttt

SEQ ID NO: 498247 - DNA, 120 bp, Artificial Sequence
  ENSG00000163539_90 (sequence is synthesized)
tttcagggtgaattggcaagtgagcagcctcagagtcagagaagtgcagctttccagactaagtaagaacctgatatagagggctaacagtgagggcgcagtaggggaagtgaagggaga

SEQ ID NO: 498248 - DNA, 120 bp, Artificial Sequence
  ENSG00000163539_91 (sequence is synthesized)
gaagggcattgtctatgcttgaaaaggttaaaaagttaactttgatctgcacttttctctccttagtatgctcgagatttcatctttcagctgcatcttctgaccctgttaaaaagggag

SEQ ID NO: 498249 - DNA, 120 bp, Artificial Sequence
  ENSG00000163539_92 (sequence is synthesized)
attgctactgattacatggatatctttagggaagcagaaaatgattgctgaacacatgccttgtgttttgatgattgcattaaaagtcccccagcgggatggcatttattggctctcaga

SEQ ID NO: 498250 - DNA, 120 bp, Artificial Sequence
  ENSG00000163539_93 (sequence is synthesized)
gcttttcttagattaaatttcaggcagccagtacaaggagaaacatcataacctgtatccaacagcatatgtgcagctaaagagtaatcttaatcaagtccttctaggctgtgctaaata

SEQ ID NO: 498251 - DNA, 120 bp, Artificial Sequence
  ENSG00000163539_94 (sequence is synthesized)
aacgagggttttcagcaagaccccagacttttattttgaagtggagtagcagctgttggctattgcggtgcagagctgcagcgaggcctgggtcacacagtgctccgggtgtctgcaggc

SEQ ID NO: 498252 - DNA, 120 bp, Artificial Sequence
  ENSG00000163539_95 (sequence is synthesized)
tgcaggccgagcccagtggcgcaggcactgagctgtacttatttgctgtgctatttgacctcttggtttcagagagctccctggaccatctaatggctatgggagatgataaaagcttcg

SEQ ID NO: 498253 - DNA, 120 bp, Artificial Sequence
  ENSG00000163539_96 (sequence is synthesized)
ttacagttgatcagacccagacaccaagcttaaagacagtcaagccagcacttcgggaccagcttcactctttttggagctccaaggttttattgtttttgttttcatctgcattatttc

SEQ ID NO: 498254 - DNA, 120 bp, Artificial Sequence
  ENSG00000163539_97 (sequence is synthesized)
ttttcttaactctctgcagtgtttgcatctgtattcaactactaacctttgtaagccttttacgcatgcacacatttgatttcaaatgttatttaaatgcaatgccagactctaagtctt

SEQ ID NO: 498255 - DNA, 120 bp, Artificial Sequence
  ENSG00000163539_98 (sequence is synthesized)
ttggagaaacttaatggtgatacacgtttggaaggcatcacattattgccatctaaccctaagctggtaatgcaaactcactctataaagtcttatctaattttatgtttgtgatttccc

SEQ ID NO: 498256 - DNA, 120 bp, Artificial Sequence
  ENSG00000163539_99 (sequence is synthesized)
acgggtattttaggcaaaatgtcagttttgcctatgtattaactaagcaaaattttttaaatttaatctcagtccctttcttcaattatccttaactgaaatagtaactttctttttttt

SEQ ID NO: 498257 - DNA, 120 bp, Artificial Sequence
  ENSG00000163539_100 (sequence is synthesized)
tctgatgtatgcataacatttggagttataattaactttctcgtttgttatatacacacatttttcagttaatatgaaaactaaatggattccaatttgtgatttaaagtgattattaaa

SEQ ID NO: 498258 - DNA, 120 bp, Artificial Sequence
  ENSG00000163539_101 (sequence is synthesized)
ttttacataaaagaaaaaatgtaaaagaatagctcctgaattctttgctaaaggttttttttttttagtgagttttattaaatgagattaaagtcagggaaataacaagcatatgtgctt

SEQ ID NO: 498259 - DNA, 120 bp, Artificial Sequence
  ENSG00000163539_102 (sequence is synthesized)
atacgagtcctatatttttctgctctatcctgcacgaaatatatttctacaagcgttactgcccaggattgatttttcccttaagtttctgaatgcaattgtgcctcagaatcacaatta

SEQ ID NO: 498260 - DNA, 120 bp, Artificial Sequence
  ENSG00000163539_103 (sequence is synthesized)
agaaatgcttcctgcataatgagagcagttaatcatggaaactgggctattcctgtttatgcacttctagcaatcttctgttgtaaatattaaaagagagctccctggaccatctaatgg

SEQ ID NO: 498261 - DNA, 120 bp, Artificial Sequence
  ENSG00000163539_104 (sequence is synthesized)
catgttgcccaggctggtcttgaactccggagctcaagcagtcctcccgcctcagtctccctggaattatgggcgtgaaccactgcagtcagctgaaatgttttaaaattcaaaagatac

SEQ ID NO: 498262 - DNA, 120 bp, Artificial Sequence
  ENSG00000163539_105 (sequence is synthesized)
tcagctgaaatgttttaaaattcaaaagatacaaaaggatatatatgttatcaccatttaaaaagttcttaaggtcctgtaatattttttgtcattgtttcattatatattcatttatta

SEQ ID NO: 498263 - DNA, 120 bp, Artificial Sequence
  ENSG00000163539_106 (sequence is synthesized)
tttagtatgtaattatgtaccattatcaagtaatcatcctttgataccaggtggtaatagtcattatttgggagatgcttgagcaaggatttactaaaaatattaattcattcatcaagt

SEQ ID NO: 498264 - DNA, 120 bp, Artificial Sequence
  ENSG00000163539_107 (sequence is synthesized)
aaatcctttaaaagtatgtactgttgaaaggtaccatacaatttattgggtaacagaaactgtatgagaatcagttttttaaaagcttaataagtaaccaattgtagggttcttacaatt

SEQ ID NO: 498265 - DNA, 120 bp, Artificial Sequence
  ENSG00000163539_108 (sequence is synthesized)
ttcaaatctgttatgcatgctccatgcccttgatatggccacacatacttggaacttcagaggaatatgtttattcatgactgcagcacgattgcagatctggagtctgttgcaacattc

SEQ ID NO: 498266 - DNA, 120 bp, Artificial Sequence
  ENSG00000163539_109 (sequence is synthesized)
agaagaatacgatgcccttttgaaatgtataaaatattgtatactgctatttcctctaagaatgtatgtgaattagtctcttcttgagggtatttatttttcagatgccattttgaaaaa

SEQ ID NO: 498267 - DNA, 120 bp, Artificial Sequence
  ENSG00000163539_110 (sequence is synthesized)
gatttatggaagttttttggggtttttttgttttttttaagcagagaacaggtttttcagaatttggctactaattttcaagtgcaatagctgttacagaaatgttgaattatgtaatgt

SEQ ID NO: 498268 - DNA, 120 bp, Artificial Sequence
  ENSG00000163539_111 (sequence is synthesized)
catgttctctccctgatctctgtgaagacaagttcatataccttaatcatttctattcattcttgttatttaaggatagtccatatgttttaatataattctatattgcggacacacttc

SEQ ID NO: 498269 - DNA, 120 bp, Artificial Sequence
  ENSG00000163539_112 (sequence is synthesized)
tgaggaatctgagctgccttgtttctccttttcccttgttctcatcatcgtcttgatcaaagaaacaattcttgaatccatgattgcctgtagaattttcataactgcacttctaccaca

SEQ ID NO: 498270 - DNA, 120 bp, Artificial Sequence
  ENSG00000163539_113 (sequence is synthesized)
tctagccactggtttctaagggggtttgggaagggaattggcttgtatctaactttcctgttttctttctcctacttctcttctcttaccaagaatgtgaagccttttggagatctggga

SEQ ID NO: 498271 - DNA, 120 bp, Artificial Sequence
  ENSG00000163539_114 (sequence is synthesized)
gaactgcaaagctctactctgtctaaccaaaccctaaacatatattccaaaactctattcagtttgatttcttcatgtttttatgtctatcaaattaaaaagttgacgttggtttgcgta

SEQ ID NO: 498272 - DNA, 120 bp, Artificial Sequence
  ENSG00000163539_115 (sequence is synthesized)
gtgcccagaaaatacaatattgcttttaaaatgctttgccccattggttttttttccttcccctgtaaaggtcttaaagtttcccaacctgacactgttatatttatgactccttcaaat

SEQ ID NO: 498273 - DNA, 120 bp, Artificial Sequence
  ENSG00000163539_116 (sequence is synthesized)
agagacacaagtcctgttcgctcttttcagcccctcgcctccagacaccattccagatcaactggtgccctctacgcccccgaagtgtatggggcctcaggtccaggttatgggatcagc

SEQ ID NO: 498274 - DNA, 120 bp, Artificial Sequence
  ENSG00000163539_117 (sequence is synthesized)
gcagaatctgggtataaggaataaggcagggcgtgctagaagatacactatgggaggagctggcagaaaatgcagagtagcaaaaacatgaaaaatacttttactacctttagagttaaa

SEQ ID NO: 498275 - DNA, 120 bp, Artificial Sequence
  ENSG00000163539_118 (sequence is synthesized)
atgttttatgttttgacttaatatgtataagtaagaagtatgaaaatactgcattttgattttgaattacagaggattattttatatggtgttagccaatatataaatgcttattcaaag

SEQ ID NO: 498276 - DNA, 120 bp, Artificial Sequence
  ENSG00000163539_119 (sequence is synthesized)
ggaaaccgtcatggttaacttttccattgtctgttaggtcatatttgttatgcttttcatattcccttcttaccttaaaaaaaaaaaaggtaggtcaatattttttttttatccttccag

SEQ ID NO: 498277 - DNA, 120 bp, Artificial Sequence
  ENSG00000163539_120 (sequence is synthesized)
caaaacagtttgaaagcaaataagaatatcttccttttccctgggaaagatggtcaagcttcgtgctattgaacagaaatgtaggggaagaaaacggtcttgtttgagtaacaaaaatat

SEQ ID NO: 498278 - DNA, 120 bp, Artificial Sequence
  ENSG00000163541_0 (sequence is synthesized)
gtcattggcgtatgaccgcaacccttgccgctgccgctgacatcgctaccatggtctccggcagcagcggcctcgccgccgcccgtctcctgtcgcgcagcttcctcctgccgcagaatg

SEQ ID NO: 498279 - DNA, 120 bp, Artificial Sequence
  ENSG00000163541_1 (sequence is synthesized)
gaattcggcattgttcctacacagcttctcggcaacatctctatgttgataaaaatacaaagattatttgccagggtttcactggcaaacagggcacctttcacagccagcaggcattgg

SEQ ID NO: 498280 - DNA, 120 bp, Artificial Sequence
  ENSG00000163541_2 (sequence is synthesized)
aatatggcaccaaactcgttggaggaaccactccagggaaaggaggccagacacatctgggcttacctgtctttaatactgtgaaggaggccaaagaacagacaggagcaacggcttctg

SEQ ID NO: 498281 - DNA, 120 bp, Artificial Sequence
  ENSG00000163541_3 (sequence is synthesized)
tcatttatgttcctccgccttttgctgctgctgccattaatgaagctattgaggcagaaattcccttggttgtgtgtatcactgaaggaattccccagcaggacatggtacgagtcaagc

SEQ ID NO: 498282 - DNA, 120 bp, Artificial Sequence
  ENSG00000163541_4 (sequence is synthesized)
acaaactgctgcgccaggaaaagacaaggctaattgggcccaactgccctggagtcatcaatcctggagaatgtaaaattggcatcatgcctggccatattcacaaaaaaggaaggattg

SEQ ID NO: 498283 - DNA, 120 bp, Artificial Sequence
  ENSG00000163541_5 (sequence is synthesized)
gtctttgtgcgttggcattggaggtgatccttttaatggaacagattttattgactgcctcgaaatctttttgaacgattctgccacagaaggcatcatattgattggtgaaattggtgg

SEQ ID NO: 498284 - DNA, 120 bp, Artificial Sequence
  ENSG00000163541_6 (sequence is synthesized)
taatgcagaagagaatgctgcagaatttttgaagcaacataattcaggtccaaattccaagcctgtagtgtccttcattgctggtttaactgctcctcctgggagaagaatgggtcatgc

SEQ ID NO: 498285 - DNA, 120 bp, Artificial Sequence
  ENSG00000163541_7 (sequence is synthesized)
cggggcaattattgctggaggaaaaggtggagctaaagagaagatctctgcccttcagagtgcaggagttgtggtcagtatgtctcctgcacagctgggaaccacgatctacaaggaatt

SEQ ID NO: 498286 - DNA, 120 bp, Artificial Sequence
  ENSG00000163541_8 (sequence is synthesized)
tgaaaagaggaagatgctatgaaagaaaaaaaaaattcctaaaactgtggaatggatcacgtagacatgtaacccagcagcagtttgcttctgttgtccactgattaatcagcctatgtg

SEQ ID NO: 498287 - DNA, 120 bp, Artificial Sequence
  ENSG00000163541_9 (sequence is synthesized)
cctgacactggtcttgcagtacaactggaagccaaaacaaggtggaagatgtcctgaattaagatgttttcaccacattgtattacagagacagccaataaatctactatttgatttcaa

SEQ ID NO: 498288 - DNA, 120 bp, Artificial Sequence
  ENSG00000163541_10 (sequence is synthesized)
ttgccatcagtacctgccttgacctcaggagcaagaagagttgacaagaaatgagccctcttgttaccggaaggcattgtgtccagatctggcaccctgacttatgaagcagttcaccaa

SEQ ID NO: 498289 - DNA, 120 bp, Artificial Sequence
  ENSG00000163541_11 (sequence is synthesized)
atgattagtacctaccaaatttatactgatactagcttcttcataaagattctcagaagaggtaatttaagtctttcttgcattgtttttatagtcataaaataaccttaactaataata

SEQ ID NO: 498290 - DNA, 120 bp, Artificial Sequence
  ENSG00000163541_12 (sequence is synthesized)
tactttctcctttgtctaaattaaaaaacccccctgcttgaatttaagcctttccttttcatttcatcgtttgaagatactattgattttgatggcaaatcatggaatgaattttatacc

SEQ ID NO: 498291 - DNA, 120 bp, Artificial Sequence
  ENSG00000163541_13 (sequence is synthesized)
tatgttagtcactcgaagtgtttggtaatttagtttaccatgttttagtctaacatagaaacacaatctaatatttttgaattctctttcgttaaggcattgtgtccagatctggcaccc

SEQ ID NO: 498292 - DNA, 120 bp, Artificial Sequence
  ENSG00000163541_14 (sequence is synthesized)
ttattggagtgtggtgtcttcattggatgagtataataataattattgattttattatttgcaaaagattttgatactcttatgaaaaggatgttacgatctcaaatttaatttgcttaa

SEQ ID NO: 498293 - DNA, 120 bp, Artificial Sequence
  ENSG00000163541_15 (sequence is synthesized)
acagaagagggaactgtttgtccaatcagggagcaaagtcacatttgacctcgaatttcagcccttaggatcctcagggaataaacactcatgcacttagtgctagtcaaagactgcatg

SEQ ID NO: 498294 - DNA, 120 bp, Artificial Sequence
  ENSG00000163541_16 (sequence is synthesized)
attatttaactaaaaaaattcacattccaagaagttaactgtcagtaagataggttttggtctttctcatcacatctttcccttcacaggccaccagtgccagttcgaattcccgtcccc

SEQ ID NO: 498295 - DNA, 120 bp, Artificial Sequence
  ENSG00000163541_17 (sequence is synthesized)
aaaagtaaaaattacaaatttttacattttaaaataatttcattatttgttgccaaaagccaaggcaaattcctccttttcatattaataaatattctttcaagttcttagaatacctgt

SEQ ID NO: 498296 - DNA, 120 bp, Artificial Sequence
  ENSG00000163541_18 (sequence is synthesized)
taatgttttagaattatctttacgaaaaagtaacatatagctctggagtgtttttattaagattcaaattcataaattaaatattgaaaacattaattgagcatttgtacatgcaaagca

SEQ ID NO: 498297 - DNA, 120 bp, Artificial Sequence
  ENSG00000163541_19 (sequence is synthesized)
caatataagtggaagatactttttagtgtgacagagaataagaaaaggtttgaaacaggcttaccgattccttcttttccagcttcagttttgaatttgtaagtggaggataataatgcc

SEQ ID NO: 498298 - DNA, 120 bp, Artificial Sequence
  ENSG00000163541_20 (sequence is synthesized)
tatctcacagagaagttgagaaaattaggaaatgacagatctaacgtgtgccaaagcataggacttgacacacggttggcacttaataaatgccggttctcttcttccactccatttttc

SEQ ID NO: 498299 - DNA, 120 bp, Artificial Sequence
  ENSG00000163541_21 (sequence is synthesized)
caacaaaagctctttgagatcgtcaataattcttttaagtataagggatccctagaccaaatgatctgagaactgctggtctaggggaagatgatggtacctaagtgaaagctctcaggt

SEQ ID NO: 498300 - DNA, 120 bp, Artificial Sequence
  ENSG00000163541_22 (sequence is synthesized)
tccacttgtgctcaagttctgccttttcagtcctctctgttttacctggttccttattatctctggacttctgttatgaacatgatattaccattaattatgaaacttaatcatatattc

SEQ ID NO: 498301 - DNA, 89 bp, Artificial Sequence
  ENSG00000163541_23 (sequence is synthesized)
atggtatctcttaatggattgaggtatatacatattttatattatttcttcaactactttgcatgtctagagtacagacatttttatat

SEQ ID NO: 498302 - DNA, 120 bp, Artificial Sequence
  ENSG00000163541_24 (sequence is synthesized)
ttttatattttctttttttttttttttaaacctcagaatctagtatatagagattgtacattagaatggatttttgctgaataaaaccaattctgatcttccctcttagacacagaattc

SEQ ID NO: 498303 - DNA, 120 bp, Artificial Sequence
  ENSG00000163541_25 (sequence is synthesized)
aattctgatcttccctcttagacacagaattccagagtggaaagggcttttgggcatcaatccagtttggccatttcatttcatagatgaggaagcagaagtctggttctcaagaagcct

SEQ ID NO: 498304 - DNA, 120 bp, Artificial Sequence
  ENSG00000163541_26 (sequence is synthesized)
gcacatttattaagggtgaactaataatgaattaaggcataatattaggttgaagtaaagcaacccagtcttgtgtcttaaattattattatcgcaaatcatattttccagtatgctctt

SEQ ID NO: 498305 - DNA, 120 bp, Artificial Sequence
  ENSG00000163541_27 (sequence is synthesized)
ttacttttcaaatgatagcgtcatgtgtatttgtgaagtggaagttttatattgaacagatacggacattggcacagtgttgtattcctgagtttgtatggaaagttaactcaaaggaga

SEQ ID NO: 498306 - DNA, 120 bp, Artificial Sequence
  ENSG00000163541_28 (sequence is synthesized)
atgcagtggtttcaatcatggtttaatatttgtgttggttttcctaagatgaatggtgggctttcccctgcccaagccatttaccatttaccagcagagtcatgaatttgaggtcccgtt

SEQ ID NO: 498307 - DNA, 120 bp, Artificial Sequence
  ENSG00000163541_29 (sequence is synthesized)
gctaccatggtctccggcagcagcggcctcgccgccgcccgtctcctgtcgcgcagcttcctccgcgatttgtggacacatccgttcccgaaaacttagtacccaaggttgctagtcttt

SEQ ID NO: 498308 - DNA, 120 bp, Artificial Sequence
  ENSG00000163545_0 (sequence is synthesized)
gcgcgctctggtactgctgtggctccccgtcctggtgcgggacctgtgccccgcgcttcagccctccccgcacagcctactgattcccctgccgcccttgctcacctcctgctcgccatg

SEQ ID NO: 498309 - DNA, 120 bp, Artificial Sequence
  ENSG00000163545_1 (sequence is synthesized)
gagtcgctggttttcgcgcggcgctccggccccactccctcggccgcagagctagcccggccgctggcggaagggctgatcaagtcgcccaagcccctaatgaagaagcaggcggtgaag

SEQ ID NO: 498310 - DNA, 120 bp, Artificial Sequence
  ENSG00000163545_2 (sequence is synthesized)
cggcaccaccacaagcacaacctgcggcaccgctacgagttcctggagaccctgggcaaaggcacctacgggaaggtgaagaaggcgcgggagagctcggggcgcctggtggccatcaag

SEQ ID NO: 498311 - DNA, 120 bp, Artificial Sequence
  ENSG00000163545_3 (sequence is synthesized)
tcaatccggaaggacaaaatcaaagatgagcaagatctgatgcacatacggagggagattgagatcatgtcatcactcaaccaccctcacatcattgccatccatgaagtgtttgagaac

SEQ ID NO: 498312 - DNA, 120 bp, Artificial Sequence
  ENSG00000163545_4 (sequence is synthesized)
agcagcaagatcgtgatcgtcatggagtatgccagccggggcgacctttatgactacatcagcgagcggcagcagctcagtgagcgcgaagctaggcatttcttccggcagatcgtctct

SEQ ID NO: 498313 - DNA, 120 bp, Artificial Sequence
  ENSG00000163545_5 (sequence is synthesized)
gccgtgcactattgccatcagaacagagttgtccaccgagatctcaagctggagaacatcctcttggatgccaatgggaatatcaagattgctgacttcggtctctccaacctctaccat

SEQ ID NO: 498314 - DNA, 120 bp, Artificial Sequence
  ENSG00000163545_6 (sequence is synthesized)
caaggcaagttcctgcagacattctgtgggagccccctctatgcctcgccagagattgtcaatgggaagccctacacaggcccagaggtggacagctggtccctgggtgttctcctctac

SEQ ID NO: 498315 - DNA, 120 bp, Artificial Sequence
  ENSG00000163545_7 (sequence is synthesized)
atcctggtgcatggcaccatgccctttgatgggcatgaccataagatcctagtgaaacagatcagcaacggggcctaccgggagccacctaaaccctctgatgcctgtggcctgatccgg

SEQ ID NO: 498316 - DNA, 120 bp, Artificial Sequence
  ENSG00000163545_8 (sequence is synthesized)
tggctgttgatggtgaaccccacccgccgggccaccctggaggatgtggccagtcactggtgggtcaactggggctacgccacccgagtgggagagcaggaggctccgcatgagggtggg

SEQ ID NO: 498317 - DNA, 120 bp, Artificial Sequence
  ENSG00000163545_9 (sequence is synthesized)
caccctggcagtgactctgcccgcgcctccatggctgactggctccggcgttcctcccgccccctcctggagaatggggccaaggtgtgcagcttcttcaagcagcatgcacctggtggg

SEQ ID NO: 498318 - DNA, 120 bp, Artificial Sequence
  ENSG00000163545_10 (sequence is synthesized)
ggaagcaccacccctggcctggagcgccagcattcgctcaagaagtcccgcaaggagaatgacatggcccagtctctccacagtgacacggctgatgacactgcccatcgccctggcaag

SEQ ID NO: 498319 - DNA, 120 bp, Artificial Sequence
  ENSG00000163545_11 (sequence is synthesized)
agcaacctcaagctgccaaagggcattctcaagaagaaggtgtcagcctctgcagaaggggtacaggaggaccctccggagctcagcccaatccctgcgagcccagggcaggctgccccc

SEQ ID NO: 498320 - DNA, 120 bp, Artificial Sequence
  ENSG00000163545_12 (sequence is synthesized)
ctgctccccaagaagggcattctcaagaagccccgacagcgcgagtctggctactactcctctcccgagcccagtgaatctggggagctcttggacgcaggcgacgtgtttgtgagtggg

SEQ ID NO: 498321 - DNA, 120 bp, Artificial Sequence
  ENSG00000163545_13 (sequence is synthesized)
gatcccaaggagcagaagcctccgcaagcttcagggctgctcctccatcgcaaaggcatcctcaaactcaatggcaagttctcccagacagccttggagctcgcggcccccaccaccttc

SEQ ID NO: 498322 - DNA, 120 bp, Artificial Sequence
  ENSG00000163545_14 (sequence is synthesized)
ccctggcccgggccagccgaccctcaggggctgtgagcgaggacagcatcctgtcctctgagtcctttgaccagctggacttgcctgaacggctcccagagcccccactgcggggctgtg

SEQ ID NO: 498323 - DNA, 120 bp, Artificial Sequence
  ENSG00000163545_15 (sequence is synthesized)
tgtctgtggacaacctcacggggcttgaggagcccccctcagagggccctggaagctgcctgaggcgctggcggcaggatcctttgggggacagctgcttttccctgacagactgccagg

SEQ ID NO: 498324 - DNA, 120 bp, Artificial Sequence
  ENSG00000163545_16 (sequence is synthesized)
aggtgacagcgacctaccgacaggcactgagggtctgctcaaagctcacctgagtggagtaggcattgccccagcccggtcaggctctcagatgcagctggttgcaccccgaggggagat

SEQ ID NO: 498325 - DNA, 120 bp, Artificial Sequence
  ENSG00000163545_17 (sequence is synthesized)
gccttctcccccacctcccaggacctgcatcccagctcagaaggctgagagggtttgcagtggagccctgagcagggctggatatgggaagtaggcaaatgaaatgcgccaagggttcag

SEQ ID NO: 498326 - DNA, 120 bp, Artificial Sequence
  ENSG00000163545_18 (sequence is synthesized)
tgtctgtcttcagccctgctgaacgaagaggatactaaagagaggggaacgggaatgcccgcgacagagtccacattgcctgtttcttgtgtacatgggggggccacagagacctggaaa

SEQ ID NO: 498327 - DNA, 120 bp, Artificial Sequence
  ENSG00000163545_19 (sequence is synthesized)
gagaactctcccagggcccatctcctgcatcccatgaatactctgtacacatggtgccttctaaggacagctccttccctactcattccctgcccaagtggggccagacctctttacaca

SEQ ID NO: 498328 - DNA, 120 bp, Artificial Sequence
  ENSG00000163545_20 (sequence is synthesized)
cacattcccgttcctaccaaccaccagaactggatggtggcacccctaatgtgcatgaggcatcctgggaatggtctggagtaacgcttcgttatttttatttttatttttatttattta

SEQ ID NO: 498329 - DNA, 120 bp, Artificial Sequence
  ENSG00000163545_21 (sequence is synthesized)
caggcgtgagccaccgcgccccacctaacccttccttatttagcctaggagtaagagaacacaatctctgtttcttcaatggttctcttcccttttccatcctccaaacctggcctgagc

SEQ ID NO: 498330 - DNA, 120 bp, Artificial Sequence
  ENSG00000163545_22 (sequence is synthesized)
ttttccatcctccaaacctggcctgagcctcctgaagttgctgctgtgaatctgaaagacttgaaaagcctccgcctgctgtgtggacttcatctcaaggggcccagcctcctctggact

SEQ ID NO: 498331 - DNA, 120 bp, Artificial Sequence
  ENSG00000163545_23 (sequence is synthesized)
ccaccttggacctcagtgactcagaacttctgcctctaagctgctctaaagtccagactatggatgtgttctctaggccttcaggactctagaatgtccatatttatttttatgttcttg

SEQ ID NO: 498332 - DNA, 120 bp, Artificial Sequence
  ENSG00000163545_24 (sequence is synthesized)
gctttgtgttttaggaaaagtgaatcttgctgttttcaataatgtgaatgctatgttctgggaaaatccactatgacatctaagttttgtgtacagagagatatttttgcaactatttcc

SEQ ID NO: 498333 - DNA, 120 bp, Artificial Sequence
  ENSG00000163545_25 (sequence is synthesized)
acctcctcccacaaccccccacactccactccacactcttgagtctctttacctaatggtctctacctaatggacctccgtggccaaaaagtaccattaaaaccagaaaggtgattggaa

SEQ ID NO: 498334 - DNA, 120 bp, Artificial Sequence
  ENSG00000163554_0 (sequence is synthesized)
atgtcttctaaagataatgtcgattgtgtatggctgatgggattctaggaccaagcaagaggtttttttttttcccccacatacttaacgtttctatatttctatttgaattcgactgga

SEQ ID NO: 498335 - DNA, 120 bp, Artificial Sequence
  ENSG00000163554_1 (sequence is synthesized)
cagttccatttgaattatttctctctctctctctctctgacacattttatcttgccaggttctaaacctttaggaaaaatggagcaatttccaaaggaaaccgttgtggagagcagtggg

SEQ ID NO: 498336 - DNA, 120 bp, Artificial Sequence
  ENSG00000163554_2 (sequence is synthesized)
ccaaaggttttggaaacagcagaagagatccaggagaggcgtcaggaagtgttgactcggtatcaaagtttcaaggagcgggtcgctgagaggggtcagaagcttgaggattcctatcac

SEQ ID NO: 498337 - DNA, 120 bp, Artificial Sequence
  ENSG00000163554_3 (sequence is synthesized)
ttacaagttttcaagcgagatgcagatgatctggggaagtggatcatggagaaagtcaatatcttaaccgataagagctatgaagacccaactaatatacaggggaaatatcagaagcat

SEQ ID NO: 498338 - DNA, 120 bp, Artificial Sequence
  ENSG00000163554_4 (sequence is synthesized)
caatcccttgaagcagaggtgcaaacaaaatcaagactcatgtctgaactggaaaaaacaagggaagaacgatttaccatgggtcattctgcccacgaagaaacgaaggcccatatagag

SEQ ID NO: 498339 - DNA, 120 bp, Artificial Sequence
  ENSG00000163554_5 (sequence is synthesized)
gagctacgccacctgtgggacctgctgttagagctgaccctggagaagggtgaccagttgctgcgggccctgaagttccagcagtatgtacaggagtgtgctgacatcttagagtggatt

SEQ ID NO: 498340 - DNA, 120 bp, Artificial Sequence
  ENSG00000163554_6 (sequence is synthesized)
ggagacaaggaggctatagcgacatcagtggagctaggtgaagactgggagcgcaccgaagttctgcataagaaatttgaagacttccaagtggagctggtagctaaagaagggagagtt

SEQ ID NO: 498341 - DNA, 120 bp, Artificial Sequence
  ENSG00000163554_7 (sequence is synthesized)
gttgaagtgaaccaatatgccaatgagtgtgccgaggaaaaccatcctgacctacccttaattcagtctaagcaaaatgaggtgaatgctgcctgggagcgccttcgtggtttggctctc

SEQ ID NO: 498342 - DNA, 120 bp, Artificial Sequence
  ENSG00000163554_8 (sequence is synthesized)
cagagacagaaagctctgtccaatgctgcaaacttacaacgattcaaaagggatgtgactgaagccatccagtggatcaaggagaaggaacctgtactcacctctgaggactatggcaaa

SEQ ID NO: 498343 - DNA, 120 bp, Artificial Sequence
  ENSG00000163554_9 (sequence is synthesized)
gaccttgttgcctctgaaggactgtttcacagtcacaagggacttgagagaaatcttgctgtcatgagtgacaaggtgaaggagttatgtgctaaagcagagaagctgacactttcccat

SEQ ID NO: 498344 - DNA, 120 bp, Artificial Sequence
  ENSG00000163554_10 (sequence is synthesized)
ccttcagatgcacctcagatccaggagatgaaagaagatctggtctccagctgggagcatattcgtgccctggccaccagcagatatgaaaaactgcaggctacttattggtaccatcga

SEQ ID NO: 498345 - DNA, 120 bp, Artificial Sequence
  ENSG00000163554_11 (sequence is synthesized)
ttttcatctgactttgatgaactctcaggctggatgaacgagaagactgctgcgatcaatgctgatgagctgccaacagatgtggctggtggagaagttctgctggacaggcatcagcag

SEQ ID NO: 498346 - DNA, 120 bp, Artificial Sequence
  ENSG00000163554_12 (sequence is synthesized)
cataagcatgagattgactcttacgatgaccgatttcaatctgctgatgagactggtcaagacctcgtgaatgccaatcatgaagcctctgatgaagttcgggaaaagatggaaatactt

SEQ ID NO: 498347 - DNA, 120 bp, Artificial Sequence
  ENSG00000163554_13 (sequence is synthesized)
gacaacaactggactgccctgctggaactgtgggacgagcgtcatcgtcagtatgagcagtgcttggactttcatctcttctacagagacagtgagcaagtggacagttggatgagtaga

SEQ ID NO: 498348 - DNA, 120 bp, Artificial Sequence
  ENSG00000163554_14 (sequence is synthesized)
caagaggccttcctggaaaacgaggatctgggaaactcactgggcagtgcagaagcccttcttcagaagcatgaagactttgaggaagcctttactgcccaggaagagaagatcataact

SEQ ID NO: 498349 - DNA, 120 bp, Artificial Sequence
  ENSG00000163554_15 (sequence is synthesized)
gtagacaagactgcaaccaaattgattggtgatgaccattatgattcagagaacatcaaggctatccgtgacgggctgttagcccggcgggatgccctacgtgaaaaggctgccactaga

SEQ ID NO: 498350 - DNA, 120 bp, Artificial Sequence
  ENSG00000163554_16 (sequence is synthesized)
cgtagattgctgaaggagtcattgcttctgcaaaaactgtatgaggactcagatgacctaaagaactggatcaacaagaagaaaaagttggcagatgatgaagattacaaggacatacag

SEQ ID NO: 498351 - DNA, 120 bp, Artificial Sequence
  ENSG00000163554_17 (sequence is synthesized)
aacttgaagagcagggttcaaaagcagcaagtctttgaaaaggagttggcagttaataagacccagctggaaaacatacagaaaactggccaagagatgattgagggtggtcactatgcc

SEQ ID NO: 498352 - DNA, 120 bp, Artificial Sequence
  ENSG00000163554_18 (sequence is synthesized)
tctgacaatgtgaccactcgtctgagtgaagttgccagcctctgggaggagttgctggaggctacaaaacagaaagggacccagttgcatgaggccaaccagcagctgcaatttgaaaat

SEQ ID NO: 498353 - DNA, 120 bp, Artificial Sequence
  ENSG00000163554_19 (sequence is synthesized)
aatgcagaagatttgcagcgctggctggaggatgttgagtggcaagtcacctctgaggattatgggaaaggcctggccgaggtacagaatcgactcaggaaacacggcctcctggagtcg

SEQ ID NO: 498354 - DNA, 120 bp, Artificial Sequence
  ENSG00000163554_20 (sequence is synthesized)
gctgtggctgctcgtcaggatcaggtggatatccttacagacctggctgcatattttgaagaaataggccatcctgattctaaggatataagggcaaggcaagagtccttggtatgccga

SEQ ID NO: 498355 - DNA, 120 bp, Artificial Sequence
  ENSG00000163554_21 (sequence is synthesized)
tttgaagctctgaaagagccactggccacccgaaagaagaagctcttagaccttctccatctgcagctgatttgtagagacacagaggatgaggaggcctggatccaagagactgaaccc

SEQ ID NO: 498356 - DNA, 120 bp, Artificial Sequence
  ENSG00000163554_22 (sequence is synthesized)
tcagctacttccacctaccttggaaaggacctgattgcttccaaaaagcttctgaataggcatagagtcatcctggagaacattgccagccatgaaccacgcattcaagagataacagaa

SEQ ID NO: 498357 - DNA, 120 bp, Artificial Sequence
  ENSG00000163554_23 (sequence is synthesized)
aggggaaacaaaatggtagaggaaggacactttgctgcagaagatgtggcctctagggtcaagagtttgaaccagaatatggagtctctccgtgctcgagctgctaggcgacaaaatgat

SEQ ID NO: 498358 - DNA, 120 bp, Artificial Sequence
  ENSG00000163554_24 (sequence is synthesized)
cttgaagccaatgtccagttccagcagtacctggctgacctgcatgaagcagaaacatggatcagagagaaggaacctattgtagataatactaactatggtgctgatgaagaagcagct

SEQ ID NO: 498359 - DNA, 120 bp, Artificial Sequence
  ENSG00000163554_25 (sequence is synthesized)
ggggctcttctaaagaagcatgaggcctttctattagatctcaattcatttggagacagtatgaaagctctgcggaatcaggcaaacgcctgccagcaacaacaggctgcaccagtggag

SEQ ID NO: 498360 - DNA, 120 bp, Artificial Sequence
  ENSG00000163554_26 (sequence is synthesized)
ggagttgctggagaacaaagggtcatggctttatatgacttccaggcccgcagcccccgagaagtcaccatgaagaaaggtgatgtcttaacgctgctcagttccatcaataaggactgg

SEQ ID NO: 498361 - DNA, 120 bp, Artificial Sequence
  ENSG00000163554_27 (sequence is synthesized)
tggaaggtggaagctgctgatcatcagggcattgtcccagctgtctatgtcagaagactggcccacgatgagttcccgatgctcccacagcggcgacgagaagagccaggaaacatcacc

SEQ ID NO: 498362 - DNA, 120 bp, Artificial Sequence
  ENSG00000163554_28 (sequence is synthesized)
cagcgccaggagcagattgagaaccaataccgctccctcttggatcgggcagaagaacgcagacgtcgtctattgcaacgttataatgaatttttattggcctatgaggcaggagacatg

SEQ ID NO: 498363 - DNA, 120 bp, Artificial Sequence
  ENSG00000163554_29 (sequence is synthesized)
ctggaatggattcaagagaaaaaggcagaaaacactggagtggaactagatgatgtttgggagctgcagaaaaagtttgatgagttccaaaaggatttgaataccaatgagcctcggcta

SEQ ID NO: 498364 - DNA, 120 bp, Artificial Sequence
  ENSG00000163554_30 (sequence is synthesized)
agggatatcaacaaggtagctgatgatctactatttgaaggacttctaacaccagaaggagctcaaatccggcaggaattgaattcccgctggggttctttgcagaggcttgcagatgaa

SEQ ID NO: 498365 - DNA, 120 bp, Artificial Sequence
  ENSG00000163554_31 (sequence is synthesized)
cagcggcagctgctgggcagtgcccatgctgttgaagtgtttcacagagaagcagatgacacgaaggagcagattgagaagaaatgccaggccctcagtgctgcagaccctggctcagat

SEQ ID NO: 498366 - DNA, 120 bp, Artificial Sequence
  ENSG00000163554_32 (sequence is synthesized)
ctgttcagtgttcaggctcttcagcgacggcatgagggctttgaaagggacctcgtacccctgggagataaggtgaccatactgggggagacagcagagcggctcagtgagtcccatcca

SEQ ID NO: 498367 - DNA, 120 bp, Artificial Sequence
  ENSG00000163554_33 (sequence is synthesized)
ggcccagaaattctacctgttcctcagcaaggccagggatctgcagaactggatcagtagcattggtggcatggtatcatcacaggagctggccgaagacttaactggcatagagatctt

SEQ ID NO: 498368 - DNA, 120 bp, Artificial Sequence
  ENSG00000163554_34 (sequence is synthesized)
gctggagagacatcaggagcaccgtgctgacatggaggcagaggctcccaccttccaggccttagaggacttcagtgcagaacttatcgacagtgggcaccatgctagccctgaaattga

SEQ ID NO: 498369 - DNA, 120 bp, Artificial Sequence
  ENSG00000163554_35 (sequence is synthesized)
aaaaaagcttcaagctgtcaagctagagagagatgatttggagaaggcttgggaaaaacgcaagaagatcctagaccagtgcctggagttgcagatgttccaggggaactgtgatcaagt

SEQ ID NO: 498370 - DNA, 120 bp, Artificial Sequence
  ENSG00000163554_36 (sequence is synthesized)
tgagagctggatggtggcacgtgagaattccctgaggtcagatgacaaaagttccttagacagtctggaggctttgatgaagaaacgggacgatttggacaaagcaatcactgcccagga

SEQ ID NO: 498371 - DNA, 120 bp, Artificial Sequence
  ENSG00000163554_37 (sequence is synthesized)
agggaagatcactgacctagaacattttgctgagagcctcattgctgatgaacactatgccaaagaagagattgctacgcggctccaacgtgtactagacaggtggaaggctctcaaagc

SEQ ID NO: 498372 - DNA, 120 bp, Artificial Sequence
  ENSG00000163554_38 (sequence is synthesized)
acaactgattgatgagcggacaaagcttggagactatgccaacctaaaacaattctaccgagaccttgaggagctggaagaatggatcagtgagatgctgcccacagcctgtgatgaatc

SEQ ID NO: 498373 - DNA, 120 bp, Artificial Sequence
  ENSG00000163554_39 (sequence is synthesized)
ctacaaagacgccactaacattcagaggaaatacctgaaacaccagacctttgcacatgaagtcgatggccgatctgagcaggtgcatggcgtcatcaacctggggaactccctgattga

SEQ ID NO: 498374 - DNA, 120 bp, Artificial Sequence
  ENSG00000163554_40 (sequence is synthesized)
gtgtagcgcttgtgatggcaatgaagaggccatgaaggagcaactggaacagctgaaggaacattgggatcatctgcttgagagaacaaatgacaaagggaagaagctcaatgaggccag

SEQ ID NO: 498375 - DNA, 120 bp, Artificial Sequence
  ENSG00000163554_41 (sequence is synthesized)
tcgtcaacagaggttcaacacaagcatccgggactttgagttctggctctcagaggcagagacattgctggccatgaaagatcaggccagggacttggcttcagcaggaaacctactcaa

SEQ ID NO: 498376 - DNA, 120 bp, Artificial Sequence
  ENSG00000163554_42 (sequence is synthesized)
gaagcatcagctattggagagagagatgttggctcgagaggatgcactcaaggacctgaatacattggctgaagatttgctctccagcgggactttcaacgttgatcagattgtgaagaa

SEQ ID NO: 498377 - DNA, 120 bp, Artificial Sequence
  ENSG00000163554_43 (sequence is synthesized)
aaaagataatgtcaacaagcgtttcctgaatgtccaagaattggcagctgcacaccacgaaaaattgaaagaggcctatgccttgttccagttcttccaggatctagatgatgaggaatc

SEQ ID NO: 498378 - DNA, 120 bp, Artificial Sequence
  ENSG00000163554_44 (sequence is synthesized)
ctggatagaggagaagttgatacgagtgagctcccaggactatgggagagatcttcagggggttcagaacttgctgaagaagcacaaacgcctagagggggagctggtggcccatgagcc

SEQ ID NO: 498379 - DNA, 120 bp, Artificial Sequence
  ENSG00000163554_45 (sequence is synthesized)
tgccatccagaatgtgctggatatggcagagaagctgaaagacaaggctgctgtggggcaagaggagatccagttgcggctggctcagtttgttgaacactgggagaagctcaaagagtt

SEQ ID NO: 498380 - DNA, 120 bp, Artificial Sequence
  ENSG00000163554_46 (sequence is synthesized)
ggccaaggcccgaggacttaagttggaagaatccctagaatacttgcaattcatgcagaatgctgaggaagaggaagcttggatcaatgaaaagaatgctttggctgtccgaggagattg

SEQ ID NO: 498381 - DNA, 120 bp, Artificial Sequence
  ENSG00000163554_47 (sequence is synthesized)
tggagatacattagctgctactcagagcttgctaatgaagcatgaagctttggaaaatgactttgctgtccatgagacccgagtacaaaatgtgtgtgcacaaggagaagacatcctaaa

SEQ ID NO: 498382 - DNA, 120 bp, Artificial Sequence
  ENSG00000163554_48 (sequence is synthesized)
taaggtgttgcaggaggaaagtcagaacaaagagatttcttccaagatagaggctctgaatgaaaagaccccttctctggctaaggcaatagctgcttggaagttgcaattggaagacga

SEQ ID NO: 498383 - DNA, 120 bp, Artificial Sequence
  ENSG00000163554_49 (sequence is synthesized)
ttatgcctttcaggaattcaactggaaggctgatgtggtagaggcttggatagctgataaggaaacaagcctaaagaccaatggcaatggtgcagaccttggtgacttcctcactcttct

SEQ ID NO: 498384 - DNA, 120 bp, Artificial Sequence
  ENSG00000163554_50 (sequence is synthesized)
ggcaaaacaggacactctggatgccagtctgcagagtttccagcaagagagacttcccgagatcactgacctgaaggacaaactgatttctgctcaacacaaccagtctaaagccattga

SEQ ID NO: 498385 - DNA, 120 bp, Artificial Sequence
  ENSG00000163554_51 (sequence is synthesized)
agagcgttatgccgctctgctgaagcgctgggaacagttgctggaagcctcggcagtccacagacagaaattgctggagaaacagctgcctctacagaaggctgaggacctgttcgtgga

SEQ ID NO: 498386 - DNA, 120 bp, Artificial Sequence
  ENSG00000163554_52 (sequence is synthesized)
atttgcacataaggcttcagctttgaacaactggtgtgaaaagatggaagaaaacttgtcagagcctgtgcactgtgtctccctgaatgaaattcggcagctgcagaaagaccatgagga

SEQ ID NO: 498387 - DNA, 120 bp, Artificial Sequence
  ENSG00000163554_53 (sequence is synthesized)
cttcttggcctccctggctagggctcaagcagactttaaatgtttgctggagctagaccagcagattaaggccttaggtgtgccttccagcccttatacctggttaacagtggaggtgct

SEQ ID NO: 498388 - DNA, 120 bp, Artificial Sequence
  ENSG00000163554_54 (sequence is synthesized)
ggaaaggacctggaagcacctatctgacatcattgaggaacgggagcaggagctgcaaaaggaagaggcaagacaggtcaagaactttgagatgtgtcaggagtttgaacagaatgccag

SEQ ID NO: 498389 - DNA, 120 bp, Artificial Sequence
  ENSG00000163554_55 (sequence is synthesized)
taccttccttcaatggatcctggaaaccagggcttactttctggatggatcattgctcaaagaaacaggaactctggaatctcagctggaagcaaataaaagaaaacagaaggagatcca

SEQ ID NO: 498390 - DNA, 120 bp, Artificial Sequence
  ENSG00000163554_56 (sequence is synthesized)
ggcgatgaagcgtcaactaaccaagattgtggacctgggggacaacttggaagacgctctgatccttgatatcaaatacagcaccattggattggctcagcagtgggaccagctctacca

SEQ ID NO: 498391 - DNA, 120 bp, Artificial Sequence
  ENSG00000163554_57 (sequence is synthesized)
gcttgggttgcggatgcaacacaacctggagcaacagatccaggccaaggacatcaaaggtgtgagtgaagagactctaaaggaatttagcacaatctataaacactttgatgagaattt

SEQ ID NO: 498392 - DNA, 120 bp, Artificial Sequence
  ENSG00000163554_58 (sequence is synthesized)
gacagggcgcctgactcacaaagagttccggtcctgcctgagaggactcaattactacttgcccatggtggaggaggatgaacatgagcccaagtttgagaagttcctggatgctgtgga

SEQ ID NO: 498393 - DNA, 120 bp, Artificial Sequence
  ENSG00000163554_59 (sequence is synthesized)
tccagggaggaagggctatgtctcactggaggactatactgctttcctgattgacaaggagtcagaaaacatcaagtccagtgatgaaatagagaatgccttccaagccctggcagaggg

SEQ ID NO: 498394 - DNA, 120 bp, Artificial Sequence
  ENSG00000163554_60 (sequence is synthesized)
caagtcatatattaccaaagaagacatgaagcaggcccttaccccagagcaagtgtcattctgtgccacacatatgcagcaatatatggacccacggggtcgaagccatctctctggcta

SEQ ID NO: 498395 - DNA, 120 bp, Artificial Sequence
  ENSG00000163554_61 (sequence is synthesized)
tgactacgttggcttcaccaattcctactttggcaactaataagcagctcctcgtggatcgtagaaaatcttagtgtcgtgggaaatttactggggggcaaagagtacaggcaaatgtgg

SEQ ID NO: 498396 - DNA, 120 bp, Artificial Sequence
  ENSG00000163554_62 (sequence is synthesized)
tgtgtgtgtgtgtgtgtgtgcttgtgtttgtgtgcatattacatttattgtaggatcttaaaaaatctcaagggtgggagatagaaaggttaatagagttggaggagtggaagctatttt

SEQ ID NO: 498397 - DNA, 120 bp, Artificial Sequence
  ENSG00000163554_63 (sequence is synthesized)
gttaatagagttggaggagtggaagctattttgtatgcaactagtcactgctgaggggtgtcaaagtttctatttttatttgttctgttttgcacgtctttatcattttgctttattccg

SEQ ID NO: 498398 - DNA, 120 bp, Artificial Sequence
  ENSG00000163554_64 (sequence is synthesized)
attatagaataaagtaattctttttaaaaatattttttggggcaaagttaagtaaaatgttgagcttctatatttctgggaactgtactcatataagagtgggcagctaattttactgta

SEQ ID NO: 498399 - DNA, 120 bp, Artificial Sequence
  ENSG00000163554_65 (sequence is synthesized)
aagaagggccatggtatagtagataaataaaatccaaggcaattttcaaacaatttttttaaactttggaatgtgtttaaatttaaatttgaaaataaagatatttgattttctggggaa

SEQ ID NO: 498400 - DNA, 120 bp, Artificial Sequence
  ENSG00000163554_66 (sequence is synthesized)
tcagttctctgttacctgtatattagccatgaaattcggaaacagatattggaaactcagtttggataatacaaaaaccttttattgcattgaaagatgttgggaagacattcttactga

SEQ ID NO: 498401 - DNA, 120 bp, Artificial Sequence
  ENSG00000163554_67 (sequence is synthesized)
gcaaaaagtagattgaaaagaagctttaaaaattttttttagattgattgattagttgcataactaacttgagatggaagccaggcaaacagtggaagaggtggatggaacaagaggatg

SEQ ID NO: 498402 - DNA, 120 bp, Artificial Sequence
  ENSG00000163554_68 (sequence is synthesized)
atcatataattgaaaactacctttgctacttttggaattttaaaactgaaataattttagaaataattcgacctccctcatttgtaaatgatgaaagacttaaacaatttcacacaatga

SEQ ID NO: 498403 - DNA, 120 bp, Artificial Sequence
  ENSG00000163554_69 (sequence is synthesized)
gaaaatgccagaaccagggctcgtaccgctaactcacatgttcaaccatcaaagtacacagtccctattggttttagttctgcccttttagattggtggccctgcagatatttaaagaca

SEQ ID NO: 498404 - DNA, 120 bp, Artificial Sequence
  ENSG00000163554_70 (sequence is synthesized)
aaactgtacacattaaaggtgcaattctttatcaatcatacctcgacaaagctgttacaaaaagaaaatgatgtggtcttccagacactatctggagccacccacccacacgctaactta

SEQ ID NO: 498405 - DNA, 120 bp, Artificial Sequence
  ENSG00000163554_71 (sequence is synthesized)
gattgtcttcaaccatatgaaaatgtaaaatctactcttggctcatggactgtacaaaagcaggtggcagcctagatttggcccatggactatagtttgccaactcttgaactagatgac

SEQ ID NO: 498406 - DNA, 120 bp, Artificial Sequence
  ENSG00000163554_72 (sequence is synthesized)
tcaaatagcaaattgtccattaaaattcctctctcttccatgtggcttgtgttctgctaacctgtgtttcatatacagggaaaattcatgttttttttttttctttcagggacatcaaag

SEQ ID NO: 498407 - DNA, 120 bp, Artificial Sequence
  ENSG00000163554_73 (sequence is synthesized)
gaaccaatattctgggtctttactgccccacggaatgactatttctctttatactgaaatccatcatgaaataaaagacagtgctctccatccacctgagcctactcatcacccacttgg

SEQ ID NO: 498408 - DNA, 120 bp, Artificial Sequence
  ENSG00000163554_74 (sequence is synthesized)
acaacaactgacttttatacccaatttctcagagttctttcaccatcttatgtgatctcttaggaaaccattccctttcatagaattttatctaaaatgtaatgtctagattaaaagaaa

SEQ ID NO: 498409 - DNA, 120 bp, Artificial Sequence
  ENSG00000163554_75 (sequence is synthesized)
catttaaagtgtggccaaatagagcagaagggcagaaactcattttctagataaattcactatatcaaagcagctctaggtctcaatagcattttggcaacatttttatctagattagga

SEQ ID NO: 498410 - DNA, 120 bp, Artificial Sequence
  ENSG00000163554_76 (sequence is synthesized)
tcgagaggtaagtagtgttggcatccctctcctctgggcagaatagaaatatttctggctcttctccctcccatgttaggagaccatttgaaaacatagccttgcaaaattgttcttagt

SEQ ID NO: 498411 - DNA, 120 bp, Artificial Sequence
  ENSG00000163554_77 (sequence is synthesized)
gttctcaaccagcagtcattttaattaggtaaaattaacgggctgtgaagacattaaaactgtcactgataatcaattatccctaaactatagactttaagattccagaaagtggacctg

SEQ ID NO: 498412 - DNA, 120 bp, Artificial Sequence
  ENSG00000163554_78 (sequence is synthesized)
ggaaactatcttttttatcttttactgatgcatacatataagccaattgtctttaagctatatatttgatctggtatttgaaagaaagtggaagtttactttatagaattacaaacaaaa

SEQ ID NO: 498413 - DNA, 120 bp, Artificial Sequence
  ENSG00000163558_0 (sequence is synthesized)
gacgcaggaggtgtcttgggcccgggcggctgtagaggcggcggcgcctacgggcagtgggaggagccgcgcggttccggctgctccggcgaggcgacccttgggtcggcgctgcgggcg

SEQ ID NO: 498414 - DNA, 120 bp, Artificial Sequence
  ENSG00000163558_1 (sequence is synthesized)
ggacggccgcggttctccggcaagcgcaggcggcggagtcccccacggcgcccgaagcgcccccccgcacccccggcctccagcgttgaggcgggggagtgaggagatgccgacccagag

SEQ ID NO: 498415 - DNA, 120 bp, Artificial Sequence
  ENSG00000163558_2 (sequence is synthesized)
gaggagatgccgacccagagggacagcagcaccatgtcccacacggtcgcaggcggcggcagcggggaccattcccaccaggtccgggtgaaagcctactaccgcggggatatcatgata

SEQ ID NO: 498416 - DNA, 120 bp, Artificial Sequence
  ENSG00000163558_3 (sequence is synthesized)
acacattttgaaccttccatctcctttgagggcctttgcaatgaggttcgagacatgtgttcttttgacaacgaacagctcttcaccatgaaatggatagatgaggaaggagacccgtgt

SEQ ID NO: 498417 - DNA, 120 bp, Artificial Sequence
  ENSG00000163558_4 (sequence is synthesized)
acagtatcatctcagttggagttagaagaagcctttagactttatgagctaaacaaggattctgaactcttgattcatgtgttcccttgtgtaccagaacgtcctgggatgccttgtcca

SEQ ID NO: 498418 - DNA, 120 bp, Artificial Sequence
  ENSG00000163558_5 (sequence is synthesized)
ggagaagataaatccatctaccgtagaggtgcacgccgctggagaaagctttattgtgccaatggccacactttccaagccaagcgtttcaacaggcgtgctcactgtgccatctgcaca

SEQ ID NO: 498419 - DNA, 120 bp, Artificial Sequence
  ENSG00000163558_6 (sequence is synthesized)
gaccgaatatggggacttggacgccaaggatataagtgcatcaactgcaaactcttggttcataagaagtgccataaactcgtcacaattgaatgtgggcggcattctttgccacaggaa

SEQ ID NO: 498420 - DNA, 120 bp, Artificial Sequence
  ENSG00000163558_7 (sequence is synthesized)
ccagtgatgcccatggatcagtcatccatgcattctgaccatgcacagacagtaattccatataatccttcaagtcatgagagtttggatcaagttggtgaagaaaaagaggcaatgaac

SEQ ID NO: 498421 - DNA, 120 bp, Artificial Sequence
  ENSG00000163558_8 (sequence is synthesized)
accagggaaagtggcaaagcttcatccagtctaggtcttcaggattttgatttgctccgggtaataggaagaggaagttatgccaaagtactgttggttcgattaaaaaaaacagatcgt

SEQ ID NO: 498422 - DNA, 120 bp, Artificial Sequence
  ENSG00000163558_9 (sequence is synthesized)
atttatgcaatgaaagttgtgaaaaaagagcttgttaatgatgatgaggatattgattgggtacagacagagaagcatgtgtttgagcaggcatccaatcatcctttccttgttgggctg

SEQ ID NO: 498423 - DNA, 120 bp, Artificial Sequence
  ENSG00000163558_10 (sequence is synthesized)
cattcttgctttcagacagaaagcagattgttctttgttatagagtatgtaaatggaggagacctaatgtttcatatgcagcgacaaagaaaacttcctgaagaacatgccagattttac

SEQ ID NO: 498424 - DNA, 120 bp, Artificial Sequence
  ENSG00000163558_11 (sequence is synthesized)
tctgcagaaatcagtctagcattaaattatcttcatgagcgagggataatttatagagatttgaaactggacaatgtattactggactctgaaggccacattaaactcactgactacggc

SEQ ID NO: 498425 - DNA, 120 bp, Artificial Sequence
  ENSG00000163558_12 (sequence is synthesized)
atgtgtaaggaaggattacggccaggagatacaaccagcactttctgtggtactcctaattacattgctcctgaaattttaagaggagaagattatggtttcagtgttgactggtgggct

SEQ ID NO: 498426 - DNA, 120 bp, Artificial Sequence
  ENSG00000163558_13 (sequence is synthesized)
cttggagtgctcatgtttgagatgatggcaggaaggtctccatttgatattgttgggagctccgataaccctgaccagaacacagaggattatctcttccaagttattttggaaaaacaa

SEQ ID NO: 498427 - DNA, 120 bp, Artificial Sequence
  ENSG00000163558_14 (sequence is synthesized)
attcgcataccacgttctctgtctgtaaaagctgcaagtgttctgaagagttttcttaataaggaccctaaggaacgattgggttgtcatcctcaaacaggatttgctgatattcaggga

SEQ ID NO: 498428 - DNA, 120 bp, Artificial Sequence
  ENSG00000163558_15 (sequence is synthesized)
cacccgttcttccgaaatgttgattgggatatgatggagcaaaaacaggtggtacctccctttaaaccaaatatttctggggaatttggtttggacaactttgattctcagtttactaat

SEQ ID NO: 498429 - DNA, 120 bp, Artificial Sequence
  ENSG00000163558_16 (sequence is synthesized)
gaacctgtccagctcactccagatgacgatgacattgtgaggaagattgatcagtctgaatttgaaggttttgagtatatcaatcctcttttgatgtctgcagaagaatgtgtctgatcc

SEQ ID NO: 498430 - DNA, 120 bp, Artificial Sequence
  ENSG00000163558_17 (sequence is synthesized)
tcatttttcaaccatgtattctactcatgttgccatttaatgcatggataaacttgctgcaagcctggatacaattaaccattttatatttgccacctacaaaaaaacacccaatatctt

SEQ ID NO: 498431 - DNA, 120 bp, Artificial Sequence
  ENSG00000163558_18 (sequence is synthesized)
ctcttgtagactatatgaatcaattattacatctgttttactatgaaaaaaaaattaatactactagcttccagacaatcatgtcaaaatttagttgaactggtttttcagtttttaaaa

SEQ ID NO: 498432 - DNA, 120 bp, Artificial Sequence
  ENSG00000163558_19 (sequence is synthesized)
ggcctacagatgagtaatgaagttatcttttttgtttaaaaaaaaaaaaaacactgcattaaaaaagtatctgttgcattaaggcacatagtgggattacatcataaacctcccataatt

SEQ ID NO: 498433 - DNA, 120 bp, Artificial Sequence
  ENSG00000163558_20 (sequence is synthesized)
agttttggagttctttatgtttaaaaattcaggtgtaaattttattgccttggataaataaattattgatcttttttaaggcagcagttattaaattggtaatagaagatgctgcttgct

SEQ ID NO: 498434 - DNA, 120 bp, Artificial Sequence
  ENSG00000163558_21 (sequence is synthesized)
gcagcagttattaaattggtaatagaagatgctgcttgcttagaattgggaaattcggctgggtgcagtgactcaatgcctgtgatcccagtactttgggaggttgaggcgggcagatca

SEQ ID NO: 498435 - DNA, 120 bp, Artificial Sequence
  ENSG00000163558_22 (sequence is synthesized)
agtgagccaagattagcctgggcaacagtgagtgagactcggtctcaaacaaaaaccaaattgggaaattcttcttgagttaaaaaagacactttttattatgaatcagattccaaatca

SEQ ID NO: 498436 - DNA, 120 bp, Artificial Sequence
  ENSG00000163558_23 (sequence is synthesized)
ttaactatttttgcaaaactggcacaagtggtttttctttttaagtatattaacagggtagctcctgagcctttccctttattggaaactttaactgcagtgttaatatatacactgcaa

SEQ ID NO: 498437 - DNA, 120 bp, Artificial Sequence
  ENSG00000163558_24 (sequence is synthesized)
aagaccaaggatgcagttgaatggaaaattactcagtgtatagaaaggaaaaaaaccagaaatttaaaatagatacagaaaagtacactggtaatatttttatttcctattggagagtga

SEQ ID NO: 498438 - DNA, 120 bp, Artificial Sequence
  ENSG00000163558_25 (sequence is synthesized)
atccccacagttgctttttgtgacttgattcaaatgaggcactcattattgttaccaaacttgtaaaagcattccatgtattcagtggaggcagaatgtataatattttttccttataat

SEQ ID NO: 498439 - DNA, 120 bp, Artificial Sequence
  ENSG00000163558_26 (sequence is synthesized)
ttagcatacaggaaaagtatttattttttaagtagggtatcttaattatgctcatttcttcccctaaaccacattatctatatgattggaccctttagtgaaatcagaaaaataaagtag

SEQ ID NO: 498440 - DNA, 120 bp, Artificial Sequence
  ENSG00000163558_27 (sequence is synthesized)
gcatgaataaatgttcaggacacacacatacactcacacacatcacagtatcagctctttcagtgagtttttattaactagataacacatgtaatacatagtagaatacatttcagaggc

SEQ ID NO: 498441 - DNA, 120 bp, Artificial Sequence
  ENSG00000163558_28 (sequence is synthesized)
agagttcctcggattattttttatggatattagtgttcagcagcttattatttaaaggggtgccaaatatagcatccttctgttgtttattttaaatatatttttaatgaaaagggactt

SEQ ID NO: 498442 - DNA, 120 bp, Artificial Sequence
  ENSG00000163558_29 (sequence is synthesized)
ttacttaaaattttttaatcttagtaaaaattttaggaaagttatctagtttaaatttcaaatgttttaaaatttgtaggcatttaataaattatctttttttggaggggtggatgctgc

SEQ ID NO: 498443 - DNA, 120 bp, Artificial Sequence
  ENSG00000163558_30 (sequence is synthesized)
tttttttggaggggtggatgctgcatttcattggaaatgtcatttttccaaagtttctagctatatactctctttccttcaaataacataagtctgaaagcaatgaaaacgtcaaaggaa

SEQ ID NO: 498444 - DNA, 120 bp, Artificial Sequence
  ENSG00000163558_31 (sequence is synthesized)
aatgtttatatacatccacatgtttatttaatatgtttctcttaacacctgaaacttgttttaaaacaaaaagcagtattcacttcaaatcataaacttagaattctgtatctcatgtca

SEQ ID NO: 498445 - DNA, 120 bp, Artificial Sequence
  ENSG00000163558_32 (sequence is synthesized)
gaaatatgtttatggccttgcttttaagtggtgctgtttcccatagggcattagttctcagattttggaatgtgaaataatcacctaggaagttggtttaaaatgcacactagtgagccc

SEQ ID NO: 498446 - DNA, 120 bp, Artificial Sequence
  ENSG00000163558_33 (sequence is synthesized)
accttagacttcttttggggccttcgacctcactttgagaaataccttcttcaggttattctttatgtttgtcctgtggttaaatattagagtattcatgataaaacattttgagaaggg

SEQ ID NO: 498447 - DNA, 120 bp, Artificial Sequence
  ENSG00000163558_34 (sequence is synthesized)
gtaagcagtgagttattacccacaatttaaagcaaattttgaatgaatctttaagttaggtatctaccttcccaccagccccccaaaaaacctctcagtagtttctttcagtgtacaaaa

SEQ ID NO: 498448 - DNA, 120 bp, Artificial Sequence
  ENSG00000163558_35 (sequence is synthesized)
tgatgagcatttttctatgatgaggttttaaccattattcagggtggtcttttgtttttaaatctttttttaactaataagatttacggtgtgtattttatacagaaatgcattataaat

SEQ ID NO: 498449 - DNA, 120 bp, Artificial Sequence
  ENSG00000163558_36 (sequence is synthesized)
gtttttaattgtgttctgttttttgcagtctttaagtgccatgccaattgttcttatattctatagaagttcgctcaaaatactcaacaggggaataggcagcggacagtcagaatggtt

SEQ ID NO: 498450 - DNA, 120 bp, Artificial Sequence
  ENSG00000163558_37 (sequence is synthesized)
ggaattttggctttctaagaaaaactttattttgcataagcatgtggtcagatcattttgtgcatatgcagcctggattggatgttaagtaaatgcttgttcagtgccggtacatttact

SEQ ID NO: 498451 - DNA, 120 bp, Artificial Sequence
  ENSG00000163558_38 (sequence is synthesized)
taaatctgtttttatttttgtcatgtagaatactactgtggtcatcataatgtaatctatttctgtaccttttttttttttttttactttgaagtctttaaataaaatgtataataccca

SEQ ID NO: 498452 - DNA, 120 bp, Artificial Sequence
  ENSG00000163558_39 (sequence is synthesized)
cagcctgggcgacagagcaagaccctgtcaaaaataataataataataaaggcaattgttctagtgatgttaagtgagcttaatgtatcactgcagatgctgaacttatatgataggtga

SEQ ID NO: 498453 - DNA, 120 bp, Artificial Sequence
  ENSG00000163558_40 (sequence is synthesized)
gcaaatgctaaaattaggatggtaatgagtggctctggattgcaagtggtactactttagaacagaagtagtaggttacaaaattattatcatgctggtttactttctcgtatgttccgt

SEQ ID NO: 498454 - DNA, 120 bp, Artificial Sequence
  ENSG00000163558_41 (sequence is synthesized)
accctagataccctttgtttccaccaaaattttggcatctttttaaaggctaaatagtagagaatgctctctgttgtgatggtttctgaaaatgcaaagttacactaccttattttggat

SEQ ID NO: 498455 - DNA, 120 bp, Artificial Sequence
  ENSG00000163558_42 (sequence is synthesized)
ttcatatttttggtcatattacacagttagaacctttctgccctaattcatgaagttgatatcatggaggatgcaacagtgttaggcttataacttcctgctaataatactgccatcagt

SEQ ID NO: 498456 - DNA, 120 bp, Artificial Sequence
  ENSG00000163558_43 (sequence is synthesized)
gatatcagtttgatattagatcagcattaggaaatgacctactttaggcagaacaggaaatagccatgtcgtaattatggcagtagaaatccaaccttttaaatatccccagtattctag

SEQ ID NO: 498457 - DNA, 120 bp, Artificial Sequence
  ENSG00000163563_0 (sequence is synthesized)
agtgtaagaaggccatctacaatcaagattgagagtggctctaacaagtgccatttttccttgttagctttcatttctcagccctttacaagattaaaatagtctgcagtttaatctctc

SEQ ID NO: 498458 - DNA, 120 bp, Artificial Sequence
  ENSG00000163563_1 (sequence is synthesized)
caaagctttacggacagtgattctgtcctaaacaagacagtgactccaggatttctgaagactattgtggaagaagcatccattaaggccaagctataacatcagaaatggtgaatgaat

SEQ ID NO: 498459 - DNA, 120 bp, Artificial Sequence
  ENSG00000163563_2 (sequence is synthesized)
acaagaaaattcttttgctgaaaggatttgagctcatggatgattatcattttacatcaattaagtccttactggcctatgatttaggactaactacaaaaatgcaagaggaatacaaca

SEQ ID NO: 498460 - DNA, 120 bp, Artificial Sequence
  ENSG00000163563_3 (sequence is synthesized)
gaattaagattacagatttgatggaaaaaaagttccaaggcgttgcctgtctagacaaactaatagaacttgccaaagatatgccatcacttaaaaaccttgttaacaatcttcgaaaag

SEQ ID NO: 498461 - DNA, 120 bp, Artificial Sequence
  ENSG00000163563_4 (sequence is synthesized)
agaagtcaaaagttgctaagaaaattaaaacacaagaaaaagctccagtgaaaaaaataaaccaggaagaagtgggtcttgcggcacctgcacccaccgcaagaaacaaactgacatcgg

SEQ ID NO: 498462 - DNA, 120 bp, Artificial Sequence
  ENSG00000163563_5 (sequence is synthesized)
aagcaagagggaggattcctgtagctcagaaaagaaaaactccaaacaaagaaaagactgaagccaaaaggaataaggtgtcccaagagcagagtaagcccccaggtccctcaggagcca

SEQ ID NO: 498463 - DNA, 120 bp, Artificial Sequence
  ENSG00000163563_6 (sequence is synthesized)
gcacatctgcagctgtggatcatcccccactaccccagacctcatcatcaactccatccaacacttcgtttactccgaatcaggaaacccaggcccaacggcaggtggatgcaagaagaa

SEQ ID NO: 498464 - DNA, 120 bp, Artificial Sequence
  ENSG00000163563_7 (sequence is synthesized)
tgaaagcaacagcgccatttaaatacgagtccccagaaaatgggaaaagcacaatgtttcatgctacagtggccagtaagactcaatatttccatgtgaaagtcttcgacatcaacttga

SEQ ID NO: 498465 - DNA, 120 bp, Artificial Sequence
  ENSG00000163563_8 (sequence is synthesized)
aagagaaatttgtaaggaagaaggtcattaccatatctgattactctgaatgtaaaggagtaatggaaataaaggaagcatcatctgtgtctgactttaatcaaaattttgaggtcccaa

SEQ ID NO: 498466 - DNA, 120 bp, Artificial Sequence
  ENSG00000163563_9 (sequence is synthesized)
acagaattatcgaaatagcaaataaaactcccaagatcagtcaactttacaagcaagcatctggaacaatggtgtatgggttgtttatgttacaaaagaaaagcgtacacaagaagaaca

SEQ ID NO: 498467 - DNA, 120 bp, Artificial Sequence
  ENSG00000163563_10 (sequence is synthesized)
caatttatgaaatacaggataatacaggatccatggatgtagtggggagtggaaaatggcacaatatcaagtgtgagaaaggagataaacttcgactcttctgccttcaactgagaacag

SEQ ID NO: 498468 - DNA, 120 bp, Artificial Sequence
  ENSG00000163563_11 (sequence is synthesized)
ttgaccgcaagctgaaactggtgtgtggaagtcacagcttcatcaaggtcatcaaggccaagaaaaacaaggaaggaccaatgaatgttaattgaaatatgaaagctgaaatgcaacaaa

SEQ ID NO: 498469 - DNA, 120 bp, Artificial Sequence
  ENSG00000163563_12 (sequence is synthesized)
caacttccgcttaaaacaattaagttgttaataactgtgattttgtaaatttcagtaattcatttaaatgatgtttcagtagatatattctagcatattaagagcttttataactgagtt

SEQ ID NO: 498470 - DNA, 120 bp, Artificial Sequence
  ENSG00000163563_13 (sequence is synthesized)
atagattagtttgctttctggaataaaattttcttcttatactcttccttttttttagatattacattttgcttttatgacattcacgaggcaaaaaataaaatatctttttttgaagga

SEQ ID NO: 498471 - DNA, 120 bp, Artificial Sequence
  ENSG00000163563_14 (sequence is synthesized)
accttggtcatagctggtacatcccttttccaatttataactcagcagtcatggggatgttggcacctcagagactgaccagttggcaatttagaacattctgtttcatatgaaagagat

SEQ ID NO: 498472 - DNA, 120 bp, Artificial Sequence
  ENSG00000163563_15 (sequence is synthesized)
tgatatatttagaagaatgtatttgaggtaaggataaaaaaccaaagacagggatttatgagacggtgagtgtttcagtaaatcaaaaatgtcagaaaatgaaaaaaaaagctactttaa

SEQ ID NO: 498473 - DNA, 120 bp, Artificial Sequence
  ENSG00000163564_0 (sequence is synthesized)
agagtatgaggaagccagcactagtcaagtgactctaagaagggccattttcccttgttgtctttgaaaatacttcattttcttagcatttcaggagattataacatcctgtatttcagt

SEQ ID NO: 498474 - DNA, 120 bp, Artificial Sequence
  ENSG00000163564_1 (sequence is synthesized)
ttctgagagctttactgactgatttccctattcaaaacaatcctcatttcctacatttctgaagatctcaagatctggactactgttgaagaaattcccagtaaggctcacttatatctt

SEQ ID NO: 498475 - DNA, 120 bp, Artificial Sequence
  ENSG00000163564_2 (sequence is synthesized)
tagagatggcaaataactacaagaaaattgttctactgaaaggattagaggtcatcaatgattatcattttagaattgttaagtccttactgagtaacgatttaaaacttaatccaaaaa

SEQ ID NO: 498476 - DNA, 120 bp, Artificial Sequence
  ENSG00000163564_3 (sequence is synthesized)
tgaaagaagagtatgacaaaattcagattgctgacttgatggaggaaaagttcccaggtgatgccggtttgggcaaactaatagaattcttcaaagaaataccaacactgggagaccttg

SEQ ID NO: 498477 - DNA, 120 bp, Artificial Sequence
  ENSG00000163564_4 (sequence is synthesized)
ctgaaactcttaaaagagaaaagttaaaagttgcaaataaaattgaatccattccagtcaaaggaataatcccatctaaaaagacgaaacagaaagaagtgtatcctgctacacctgcat

SEQ ID NO: 498478 - DNA, 120 bp, Artificial Sequence
  ENSG00000163564_5 (sequence is synthesized)
gcaccccaagcaaccgtctcacagctaaaggagcagaggagactcttggacctcagaaaagaaaaaaaccatctgaagaagagactggaaccaaaaggagtaagatgtccaaagagcaga

SEQ ID NO: 498479 - DNA, 120 bp, Artificial Sequence
  ENSG00000163564_6 (sequence is synthesized)
ctcggccttcctgctctgcaggagccagcacgtccacagccatgggccgttccccacctccccagacctcatcatcagctccacccaacacttcctcaactgagagcctaaaaccattgg

SEQ ID NO: 498480 - DNA, 120 bp, Artificial Sequence
  ENSG00000163564_7 (sequence is synthesized)
ccaaccgtcacgcaactgccagtaaaaatattttccgagaagacccaataatcgcgatggtactaaatgcaacaaaagtatttaaatatgaatcctcagaaaatgagcaaagaagaatgt

SEQ ID NO: 498481 - DNA, 120 bp, Artificial Sequence
  ENSG00000163564_8 (sequence is synthesized)
taaacatcaacttgaagaggaaattcattaaaaagagaatcatcattatatcaaattattccaaacgtaatagtctcctagaggtgaatgaagcctcttctgtatctgaagctggtcctg

SEQ ID NO: 498482 - DNA, 120 bp, Artificial Sequence
  ENSG00000163564_9 (sequence is synthesized)
accaaacgtttgaggttccaaaggacatcatcagaagagcaaagaaaattccgaagatcaatattcttcacaaacaaacttcaggatatattgtatatggattatttatgctacatacga

SEQ ID NO: 498483 - DNA, 120 bp, Artificial Sequence
  ENSG00000163564_10 (sequence is synthesized)
aaattgtaaataggaagacgacaatctatgaaattcaggataaaacaggaagtatggctgtagtaggaaaaggagaatgccacaatatcccctgtgaaaaaggagataagcttcgactct

SEQ ID NO: 498484 - DNA, 120 bp, Artificial Sequence
  ENSG00000163564_11 (sequence is synthesized)
tctgctttcgactgagaaagagggaaaatatgtcaaaactgatgtcagaaatgcatagtttcatccagatacagaaaaatacaaaccagagaagccatgactccaggagcatggcactac

SEQ ID NO: 498485 - DNA, 120 bp, Artificial Sequence
  ENSG00000163564_12 (sequence is synthesized)
cccaggaacagagtcagcatccaaaaccttcagaggccagcacaaccctacctgaaagccatctcaagactcctcagatgccaccaacaaccccatccagcagttccttcaccaagaagg

SEQ ID NO: 498486 - DNA, 120 bp, Artificial Sequence
  ENSG00000163564_13 (sequence is synthesized)
atgaaacccacccaggagcacagtcatcgcctgcaaactttagaatcacctcaccaactgtggcccctcctctttcttctgacacttccaccaaccgccatccagcagttccttaaataa

SEQ ID NO: 498487 - DNA, 120 bp, Artificial Sequence
  ENSG00000163564_14 (sequence is synthesized)
ggtcaccaaggacaaggatatcaaataactactgttcaatctttactcaagtgtggaaattttgcctgaagtcctccacctaaaaacctgatgccattggtaatgatgtttatgaagata

SEQ ID NO: 498488 - DNA, 80 bp, Artificial Sequence
  ENSG00000163564_15 (sequence is synthesized)
tgatgccattggtaatgatgtttatgaagataagatcaaagcacagaaaataatatatgtatatatatctggttgaaata

SEQ ID NO: 498489 - DNA, 120 bp, Artificial Sequence
  ENSG00000163564_16 (sequence is synthesized)
gagtattaagggtgcattttatttcattagttttacttttatgcattttcttcatatcatattttgcattcagaattttcataatttgaaaaaaaataaacttttttttcttaaagagtg

SEQ ID NO: 498490 - DNA, 120 bp, Artificial Sequence
  ENSG00000163564_17 (sequence is synthesized)
cttgacattatctctgactgcaggaagttttctgtcctgtgctgtttggggaagagacagagaactgcggaatctggaactttcagcaacagactcactgtctactgcccccatctatta

SEQ ID NO: 498491 - DNA, 120 bp, Artificial Sequence
  ENSG00000163564_18 (sequence is synthesized)
tacacccattccctttgctcactaatttgttcaagtttctctgacatacaccatgctcctttttcctttaggattttcacacaccatatttctttcacctttaaactcttacctggccaa

SEQ ID NO: 498492 - DNA, 120 bp, Artificial Sequence
  ENSG00000163564_19 (sequence is synthesized)
ccctatccaccctctggatcccaatattgagatcttatcctcagggaatcctcacttagacccctgtaacaggttaaatcttcatggtgttctgtttcctaggaacttctttcttttcta

SEQ ID NO: 498493 - DNA, 120 bp, Artificial Sequence
  ENSG00000163564_20 (sequence is synthesized)
ctgtttatgacaactgaagttaataagtgtttatctttcccacctactcaaagtagttccaagattagggctagtttgtaattctgtggaccactgtaaacgagggcctagttcagtgtc

SEQ ID NO: 498494 - DNA, 120 bp, Artificial Sequence
  ENSG00000163564_21 (sequence is synthesized)
attctgtggaccactgtaaacgagggcctagttcagtgtctgcctcatgggaagcttccaataaatacctttgctcaacgaaaaaatgaaaacccagtggctcacgcctgtaatcccagc

SEQ ID NO: 498495 - DNA, 120 bp, Artificial Sequence
  ENSG00000163564_22 (sequence is synthesized)
gacacccactgcccttaacagaaaaaatactgctgagcaaagggtttaacaggactctcggtctaccagaagttcagtgcattttccaggattttcaaggcttcgatgctgtcatgttgt

SEQ ID NO: 498496 - DNA, 120 bp, Artificial Sequence
  ENSG00000163564_23 (sequence is synthesized)
ataaaattaaatcacccatgtatttattgaatgcatacagtgagatactaccacatgatagtctttgctatctaaaagatatttatttgtgcaacgattgctgaccacaagagggctagt

SEQ ID NO: 498497 - DNA, 120 bp, Artificial Sequence
  ENSG00000163564_24 (sequence is synthesized)
atcttgtcttgctccacctatgggaggggtaatggccagagaagtagagatgaagacaaagagtgtgttatgacccacattccaatttctttcacaactttcccctttgcttattggtat

SEQ ID NO: 498498 - DNA, 120 bp, Artificial Sequence
  ENSG00000163565_0 (sequence is synthesized)
attgtttcctactccattttctctggggcaatagcagaataggagcaagccagcactagtcagctaactaagtgactcaaccaaggccttttttccttgttatctttgcagatacttcat

SEQ ID NO: 498499 - DNA, 120 bp, Artificial Sequence
  ENSG00000163565_1 (sequence is synthesized)
tttcttagcgtttctggagattacaacatcctgcggttccgtttctgggaactttactgatttatctcccccctcacacaaataagcattgattcctgcatttctgaagatctcaagatc

SEQ ID NO: 498500 - DNA, 120 bp, Artificial Sequence
  ENSG00000163565_2 (sequence is synthesized)
tggactactgttgaaaaaatttccagtgaggctcacttatgtctgtaaagatgggaaaaaaatacaagaacattgttctactaaaaggattagaggtcatcaatgattatcattttagaa

SEQ ID NO: 498501 - DNA, 120 bp, Artificial Sequence
  ENSG00000163565_3 (sequence is synthesized)
tggttaagtccttactgagcaacgatttaaaacttaatttaaaaatgagagaagagtatgacaaaattcagattgctgacttgatggaagaaaagttccgaggtgatgctggtttgggca

SEQ ID NO: 498502 - DNA, 120 bp, Artificial Sequence
  ENSG00000163565_4 (sequence is synthesized)
aactaataaaaattttcgaagatataccaacgcttgaagacctggctgaaactcttaaaaaagaaaagttaaaagtaaaaggaccagccctatcaagaaagaggaagaaggaagtggatg

SEQ ID NO: 498503 - DNA, 120 bp, Artificial Sequence
  ENSG00000163565_5 (sequence is synthesized)
ctacttcacctgcaccctccacaagcagcactgtcaaaactgaaggagcagaggcaactcctggagctcagaaaagaaaaaaatcaaccaaagaaaaggctggacccaaagggagtaagg

SEQ ID NO: 498504 - DNA, 120 bp, Artificial Sequence
  ENSG00000163565_6 (sequence is synthesized)
tgtccgaggaacagactcagcctccctctcctgcaggagccggcatgtccacagccatgggccgttccccatctcccaagacctcattgtcagctccacccaacagttcttcaactgaga

SEQ ID NO: 498505 - DNA, 120 bp, Artificial Sequence
  ENSG00000163565_7 (sequence is synthesized)
acccgaaaacagtggccaaatgtcaggtaactcccagaagaaatgttctccaaaaacgcccagtgatagtgaaggtactgagtacaacaaagccatttgaatatgagaccccagaaatgg

SEQ ID NO: 498506 - DNA, 120 bp, Artificial Sequence
  ENSG00000163565_8 (sequence is synthesized)
agaaaaaaataatgtttcatgctacagtggctacacagacacagttcttccatgtgaaggttttaaacaccagcttgaaggagaaattcaatggaaagaaaatcatcatcatatcagatt

SEQ ID NO: 498507 - DNA, 120 bp, Artificial Sequence
  ENSG00000163565_9 (sequence is synthesized)
atttggaatatgatagtctcctagaggtcaatgaagaatctactgtatctgaagctggtcctaaccaaacgtttgaggttccaaataaaatcatcaacagagcaaaggaaactctgaaga

SEQ ID NO: 498508 - DNA, 120 bp, Artificial Sequence
  ENSG00000163565_10 (sequence is synthesized)
ttgatattcttcacaaacaagcttcaggaaatattgtatatggggtatttatgctacataagaaaacagtaaatcagaagaccacaatctacgaaattcaggatgatagaggaaaaatgg

SEQ ID NO: 498509 - DNA, 120 bp, Artificial Sequence
  ENSG00000163565_11 (sequence is synthesized)
gtcaaaactgatttcagaaatgcatagttttatccagataaagaaaaaaacaaacccgagaaacaatgaccccaagagcatgaagctaccccaggaacagcgtcagcttccatatccttc

SEQ ID NO: 498510 - DNA, 120 bp, Artificial Sequence
  ENSG00000163565_12 (sequence is synthesized)
agaggccagcacaaccttccctgagagccatcttcggactcctcagatgccaccaacaactccatccagcagtttcttcaccaagaaaagtgaagacacaatctccaaaatgaatgactt

SEQ ID NO: 498511 - DNA, 120 bp, Artificial Sequence
  ENSG00000163565_13 (sequence is synthesized)
catgaggatgcagatactgaaggaagggagtcattttccaggaccgttcatgaccagcataggcccagctgagagccatccccacactcctcagatgcctccatcaacaccaagcagcag

SEQ ID NO: 498512 - DNA, 120 bp, Artificial Sequence
  ENSG00000163565_14 (sequence is synthesized)
tttcttaaccacgttgaaaccaagactgaagactgaacctgaagaagtttccatagaagacagtgcccagagtgacctcaaagaagtgatggtgctgaacgcaacagaatcatttgtata

SEQ ID NO: 498513 - DNA, 120 bp, Artificial Sequence
  ENSG00000163565_15 (sequence is synthesized)
tgagcccaaagagcagaagaaaatgtttcatgccacagtggcaactgagaatgaagtcttccgagtgaaggtttttaatattgacctaaaggagaagttcaccccaaagaagatcattgc

SEQ ID NO: 498514 - DNA, 120 bp, Artificial Sequence
  ENSG00000163565_16 (sequence is synthesized)
catagcaaattatgtttgccgcaatgggttcctggaggtatatcctttcacacttgtggctgatgtgaatgctgaccgaaacatggagatcccaaaaggattgattagaagtgccagcgt

SEQ ID NO: 498515 - DNA, 120 bp, Artificial Sequence
  ENSG00000163565_17 (sequence is synthesized)
aactcctaaaatcaatcagctttgctcacaaactaaaggaagttttgtgaatggggtgtttgaggtacataagaaaaatgtaaggggtgaattcacttattatgaaatacaagataatac

SEQ ID NO: 498516 - DNA, 120 bp, Artificial Sequence
  ENSG00000163565_18 (sequence is synthesized)
agggaagatggaagtggtggtgcatggacgactgaccacaatcaactgtgaggaaggagataaactgaaactcacctgctttgaattggcaccgaaaagtgggaataccggggagttgag

SEQ ID NO: 498517 - DNA, 120 bp, Artificial Sequence
  ENSG00000163565_19 (sequence is synthesized)
atctgtaattcatagtcacatcaaggtcatcaagaccaggaaaaacaagaaagacatactcaatcctgattcaagtatggaaacttcaccagactttttcttctaaaatctggatgtcat

SEQ ID NO: 498518 - DNA, 120 bp, Artificial Sequence
  ENSG00000163565_20 (sequence is synthesized)
tgacgataatgtttatggagataaggtctaagtgcctaaaaaaatgtacatatacctggttgaaatacaacactatacatacacaccaccatatatactagctgttaatcctatggaatg

SEQ ID NO: 498519 - DNA, 120 bp, Artificial Sequence
  ENSG00000163565_21 (sequence is synthesized)
gggtattgggagtgcttttttaatttttcatagtttttttttaataaaatggcatattttgcatctacaacttctataatttgaaaaaataaataaacattatcttttttgtgaaaggaa

SEQ ID NO: 498520 - DNA, 120 bp, Artificial Sequence
  ENSG00000163565_22 (sequence is synthesized)
aacctccaatttttaaagtcttaacttgtcaactggagtttggtcaacttactcaacacagaaaatcaaccccttcacccttcccccagcactagagataattgaatagagttcatttca

SEQ ID NO: 498521 - DNA, 120 bp, Artificial Sequence
  ENSG00000163565_23 (sequence is synthesized)
ggatatggggtacgttatattgtaacattcctcttcttaaggtatcatcatgcaagttatttagacagtcactaggaaacttggcattttattagttttgatgatctattcagagccacc

SEQ ID NO: 498522 - DNA, 120 bp, Artificial Sequence
  ENSG00000163565_24 (sequence is synthesized)
cttgtccaggacagtgcagagtttatatcaacacacatatccttaggattttgtttctttgagttcttctccatctgtatcaatgacaacttaatttaattgtgaataaaagagttgctc

SEQ ID NO: 498523 - DNA, 120 bp, Artificial Sequence
  ENSG00000163565_25 (sequence is synthesized)
tcccaagcctgaatcctgattgtgacaaccagagtaagaaataaaatagactactctgctttagaatgcagctatgtctaacagttagctagaattctgatcatttggactccaaagttt

SEQ ID NO: 498524 - DNA, 120 bp, Artificial Sequence
  ENSG00000163565_26 (sequence is synthesized)
cttgcctcttctcattcattaattcatcaggagactgtagagcaactaacttctgcattaaataataagagaaatacgaagcaaaaagactaaaaaagtcacgtagcttaactgctcaat

SEQ ID NO: 498525 - DNA, 120 bp, Artificial Sequence
  ENSG00000163565_27 (sequence is synthesized)
ttataaatggggcaataaaatgcaaaaaaaagaaaaaaagcttggtgaattcttaggcttacagtgtgcctttcagtctctacacatcatgtaaatattatgcttagctgatttaacttc

SEQ ID NO: 498526 - DNA, 120 bp, Artificial Sequence
  ENSG00000163565_28 (sequence is synthesized)
ttgtttgaagtactgtttcatactccattatacatgtcttctagggtggcttacttttaattgtgctgttttctctacactcagtttaaatgactgtacatatatatgtggttgtagagt

SEQ ID NO: 498527 - DNA, 120 bp, Artificial Sequence
  ENSG00000163565_29 (sequence is synthesized)
taatgaataatgagctacaaaccagaacaatgtgactagatagataggatgatctagatttgagatctgggcagattgggaaagagtgactatatggagaagaaagaagtagttacatat

SEQ ID NO: 498528 - DNA, 120 bp, Artificial Sequence
  ENSG00000163565_30 (sequence is synthesized)
tgaaataacagtctacttaatgaggacgtgcaacattctttctcaaacttacaaagtgccataaaaagcctctattctctgctcttgggcaggtgtgaaagaaacctaccaaattaatca

SEQ ID NO: 498529 - DNA, 120 bp, Artificial Sequence
  ENSG00000163565_31 (sequence is synthesized)
gatttttctgtatccaggctccttaaaaaatcccagctgtgctgatgtggaaacaggaagaattaggaaagtaatcaattttttttcctagaaaaaatccagcagacaaagaacttcaac

SEQ ID NO: 498530 - DNA, 120 bp, Artificial Sequence
  ENSG00000163565_32 (sequence is synthesized)
aaaagaggctcaagggaggagttgaaaggcaggattcaaagaccaagtatcttaagctatttggtacctgttattcaggacctacagctctgtttactctatcaaagacaaaagtttcca

SEQ ID NO: 498531 - DNA, 120 bp, Artificial Sequence
  ENSG00000163565_33 (sequence is synthesized)
gaaacaccctgtatttctcatagatttgaaaattattgatccagtttcagaagataagtgttaattttcttttgcagaaaaatgtaaggggtgaattcacttattatgaaatacaagata

SEQ ID NO: 498532 - DNA, 120 bp, Artificial Sequence
  ENSG00000163565_34 (sequence is synthesized)
tttatttgacatcctggggttacagcacgctaaagggcacccactgtccttaacagagaaaaatacactgctgagcagaggattaaacagactcctcacactaccggaagttcagtgcat

SEQ ID NO: 498533 - DNA, 120 bp, Artificial Sequence
  ENSG00000163565_35 (sequence is synthesized)
tttccaggattttcaagtcttcgatgctgtcatgttgagagtccactatccacgtttgtttatccaggaataatgcagaaaatctgagcattcgtgaatctaatcattgagatacttcat

SEQ ID NO: 498534 - DNA, 120 bp, Artificial Sequence
  ENSG00000163565_36 (sequence is synthesized)
agtgcttgttcctgtcttgtgactgctggtctccttaaggccaggctgggctaatgcagtagagctagactaaagcacagctgaaccctcaagcaggaactgagagcaaattgtattgaa

SEQ ID NO: 498535 - DNA, 120 bp, Artificial Sequence
  ENSG00000163565_37 (sequence is synthesized)
actgcttcagctgtcggagatcgtttatatgtcttccttttttctgcattggttgggaataaaattgaatctattccagtaaaaggaccagccctatcaagaaagaggaagaaggaagtg

SEQ ID NO: 498536 - DNA, 120 bp, Artificial Sequence
  ENSG00000163565_38 (sequence is synthesized)
tcatcaacatgcattcccagaaatgccatgaaaggaaagaccaagtcttgactgagaaacggaccgggcagatgagggactcccacatatacctgtttcctgctcttcccgaagacattt

SEQ ID NO: 498537 - DNA, 120 bp, Artificial Sequence
  ENSG00000163565_39 (sequence is synthesized)
tgccacaagcatataattcagcttctgaaaaatacggtcttcctcactgcagacaccatgccagcgttttaaatcaagttggctactcgtgctgtttagagtatgcagtttgcctgtggc

SEQ ID NO: 498538 - DNA, 120 bp, Artificial Sequence
  ENSG00000163565_40 (sequence is synthesized)
aatattaaactcatctggaagaaagcacttaaacctatccagttcctcatcggtgatgttatccaggctggttagcaagagtatctccttatatttactctccatctcacgacttttcag

SEQ ID NO: 498539 - DNA, 120 bp, Artificial Sequence
  ENSG00000163568_0 (sequence is synthesized)
agaagtgtcagagtctttgtagctttgaaagtcacctaggttatttgggcatgctctcctgagtcctctgctagttaagctctctgaaaagaaggtggcagacccggtttgctgatcgcc

SEQ ID NO: 498540 - DNA, 120 bp, Artificial Sequence
  ENSG00000163568_1 (sequence is synthesized)
ccagggatcaggaggctgatcccaaagttgtcagatggagagtaaatacaaggagatactcttgctaacaggcctggataacatcactgatgaggaactggataggtttaagttctttct

SEQ ID NO: 498541 - DNA, 120 bp, Artificial Sequence
  ENSG00000163568_2 (sequence is synthesized)
ttcagacgagtttaatattgccacaggcaaactacatactgcaaacagaatacaagtagctaccttgatgattcaaaatgctggggcggtgtctgcagtgatgaagaccattcgtatttt

SEQ ID NO: 498542 - DNA, 120 bp, Artificial Sequence
  ENSG00000163568_3 (sequence is synthesized)
tcagaagttgaattatatgcttttggcaaaacgtcttcaggaggagaaggagaaagttgataagcaatacaaatcggtaacaaaaccaaagccactaagtcaagctgaaatgagtcctgc

SEQ ID NO: 498543 - DNA, 120 bp, Artificial Sequence
  ENSG00000163568_4 (sequence is synthesized)
tgcatctgcagccatcagaaatgatgtcgcaaagcaacgtgctgcaccaaaagtctctcctcatgttaagcctgaacagaaacagatggtggcccagcaggaatctatcagagaagggtt

SEQ ID NO: 498544 - DNA, 120 bp, Artificial Sequence
  ENSG00000163568_5 (sequence is synthesized)
aggagatgtttcatgctacagtggctacagaaaaggaattcttctttgtaaaagtttttaatacactgctgaaagataaattcattccaaagagaataattataatagcaagatattatc

SEQ ID NO: 498545 - DNA, 120 bp, Artificial Sequence
  ENSG00000163568_6 (sequence is synthesized)
ggcacagtggtttcttagaggtaaatagcgcctcacgtgtgttagatgctgaatctgaccaaaaggttaatgtcccgctgaacattatcagaaaagctggtgaaaccccgaagatcaaca

SEQ ID NO: 498546 - DNA, 120 bp, Artificial Sequence
  ENSG00000163568_7 (sequence is synthesized)
cgcttcaaactcagccccttggaacaattgtgaatggtttgtttgtagtccagaaggtaacagaaaagaagaaaaacatattatttgacctaagtgacaacactgggaaaatggaagtac

SEQ ID NO: 498547 - DNA, 120 bp, Artificial Sequence
  ENSG00000163568_8 (sequence is synthesized)
tgggggttagaaacgaggacacaatgaaatgtaaggaaggagataaggttcgacttacattcttcacactgtcaaaaaatggagaaaaactacagctgacatctggagttcatagcacca

SEQ ID NO: 498548 - DNA, 120 bp, Artificial Sequence
  ENSG00000163568_9 (sequence is synthesized)
taaaggttattaaggccaaaaaaaaaacatagagaagtaaaaaggaccaattcaagccaactggtctaagcagcatttaattgaagaatatgtgatacagcctcttcaatcagattgtaa

SEQ ID NO: 498549 - DNA, 120 bp, Artificial Sequence
  ENSG00000163568_10 (sequence is synthesized)
gttacctgaaagctgcagttcacaggctcctctctccaccaaattaggatagaataattgctggataaacaaattcagaatatcaacagatgatcacaataaacatctgtttctcattca

SEQ ID NO: 498550 - DNA, 120 bp, Artificial Sequence
  ENSG00000163568_11 (sequence is synthesized)
aatataggtgtgttgtagagtcaggcagaacccagaacgtctggagatgaatgtagggaagaaggaaggaccagcaagttcttccaggctggagtacgatggcgcaatctccgctcactg

SEQ ID NO: 498551 - DNA, 75 bp, Artificial Sequence
  ENSG00000163568_12 (sequence is synthesized)
ttaactatcaggaaacatttacagatgaagaaagaagaacatctgaacacagactgagcttactggatattgatg

SEQ ID NO: 498552 - DNA, 120 bp, Artificial Sequence
  ENSG00000163568_13 (sequence is synthesized)
agaacatctgaacacagactgagcttactggatattgatgccagtggcaatattggcaaacaaatcttgaagatagatggccagagaaatgatggaaactgtgtctgagtcactgcttgg

SEQ ID NO: 498553 - DNA, 120 bp, Artificial Sequence
  ENSG00000163568_14 (sequence is synthesized)
tgcacttgcactctaaggaagctgaggtgggggaggcgggaaagtccacagaggagtttaaagcagccatgccaaaagcctgaacagaaacagatggtggcccagcaggaatctatcaga

SEQ ID NO: 498554 - DNA, 120 bp, Artificial Sequence
  ENSG00000163576_0 (sequence is synthesized)
agactccatcttttcctctgtgaactcggctaggtgttaagaggcaggcaggaagcaatggacagggagtccgagtgaggttgtgctctttcctgagagaggggttccgcaagggattgg

SEQ ID NO: 498555 - DNA, 120 bp, Artificial Sequence
  ENSG00000163576_1 (sequence is synthesized)
aggcgtctttgtagccaggtacagctttccccttagagatgagcgctcttggagaaatgagaatggggagaaatcgtccatgaacatggagattggacatccccacgaaggaaaggatga

SEQ ID NO: 498556 - DNA, 120 bp, Artificial Sequence
  ENSG00000163576_2 (sequence is synthesized)
tttaggagacaagagggtcatcatgggaacaaaatttcccatggagttggggatcagagtaggattaggaaaagaagattcccgatgcggggagagccctgtggttagtaataagtgtga

SEQ ID NO: 498557 - DNA, 120 bp, Artificial Sequence
  ENSG00000163576_3 (sequence is synthesized)
gggaaggatggcaccaccagaaacaaaatttccattgagcaaggggcttgaaatgggattagaaagacagaatatttctaggactgtcatgcagaggggtagtttaggagtcgacagtgt

SEQ ID NO: 498558 - DNA, 120 bp, Artificial Sequence
  ENSG00000163576_4 (sequence is synthesized)
ctcagcttcacagggaacaaaaccttctctgttgccaggaagaatggggttagaaaatgagagtcttcttgcaggatatacccatgaacggataatacagcctcctttgggcagggtgtg

SEQ ID NO: 498559 - DNA, 120 bp, Artificial Sequence
  ENSG00000163576_5 (sequence is synthesized)
tggaagttcacaggctgcagggagcaggagagctcctttggctagtggccctgaaggggtagaggaattagtgggaaagcctgctttcgttatggaaccaagacaggaaatggaaaaaga

SEQ ID NO: 498560 - DNA, 120 bp, Artificial Sequence
  ENSG00000163576_6 (sequence is synthesized)
gtctacctgtgttttaatgaaacccaacacagagattaagcttcctgtggaggtggacattggactaacccaagccgaggggccagatgagactaagaatacagagccccaaatgggctt

SEQ ID NO: 498561 - DNA, 120 bp, Artificial Sequence
  ENSG00000163576_7 (sequence is synthesized)
ggtgatagaacctccccaatgccagtttgcccaacaacatgaacagagaaaggaggctggaaacattgaatcaggagtggaacctccagatcgcatcagacccatatactctgggaagtt

SEQ ID NO: 498562 - DNA, 120 bp, Artificial Sequence
  ENSG00000163576_8 (sequence is synthesized)
ttttgatcggaccccttgctggccaagtgcaggaaaagttattccagttggttacagagttgcaacctgcttgactgaaaaacttcccaggctaattactccacctgaagcaaaaaagta

SEQ ID NO: 498563 - DNA, 120 bp, Artificial Sequence
  ENSG00000163576_9 (sequence is synthesized)
tttcaacttcagatatccacctgctggagtagaaagagtattttacggaagagcaaatgatccccagattgcaccttatttgacacatggaattagatctaaaatttcagtactggcaaa

SEQ ID NO: 498564 - DNA, 120 bp, Artificial Sequence
  ENSG00000163576_10 (sequence is synthesized)
cacattgataaacccacagcctattaccacatttcaacagaaaattaaagataaaaaagaatctatatatcttagcaatcgacgagcaccattaggaaaatctcacgatcaagcaccagg

SEQ ID NO: 498565 - DNA, 120 bp, Artificial Sequence
  ENSG00000163576_11 (sequence is synthesized)
gaagtatttaaagaaggaaatgaaggacatgatttgtatgttgtttctcacaatgattattatgcaggagaggcaaagaaccgaaagtataacccatcaagtttccataggtgtagtgtg

SEQ ID NO: 498566 - DNA, 120 bp, Artificial Sequence
  ENSG00000163576_12 (sequence is synthesized)
tatggagtaccaacaccacattttaatgatggacgagccatggcaaaatctctatattggctccatgaactacaaatgaaaagaggagctaagtttgtatccaaaagagcagatgatttc

SEQ ID NO: 498567 - DNA, 120 bp, Artificial Sequence
  ENSG00000163576_13 (sequence is synthesized)
aaagaaaagtttcaacataaacttggaagagttttagatcccattgcagaaacaatgaatgttcccccagactgcacatttggagcttgtctccgtcctgaggaatatggagttggtgat

SEQ ID NO: 498568 - DNA, 120 bp, Artificial Sequence
  ENSG00000163576_14 (sequence is synthesized)
ctcatccataatagacttccggatgaatatcttcgaggcaaggatagacagcgagccctgattgcagcagttcggcatcacctgaagaaagttaattaccaaaagtttgacactttgctg

SEQ ID NO: 498569 - DNA, 120 bp, Artificial Sequence
  ENSG00000163576_15 (sequence is synthesized)
gcagccttcaggcactatgacaagaagggagatgggatgatagataaagacgagctgcaggaagcttgtgaccaggccaacttgagtttagatgacaagctcctggaccagctatttgac

SEQ ID NO: 498570 - DNA, 120 bp, Artificial Sequence
  ENSG00000163576_16 (sequence is synthesized)
tactgtgatgtggataatgatggcttcattaactatctggaattcgcaaattttcttaactggaaagacaaaatgcttcttaaagagtatgaagagagggtcattattaaaggtagaaaa

SEQ ID NO: 498571 - DNA, 120 bp, Artificial Sequence
  ENSG00000163576_17 (sequence is synthesized)
ccagattgtgtaaaccctactgaggctaatgttgaagaacctgaacaaactctcctcataaagccagaagatattgtcttaaaagaagcaggaagcacagaaaagactctccggacactt

SEQ ID NO: 498572 - DNA, 120 bp, Artificial Sequence
  ENSG00000163576_18 (sequence is synthesized)
ctgagaccaagtgataaagtttccaactactataagacaacttcttctgagatcaatgcaattgtaggagccattccttctacttgttaccccatttgtggtgttccaaccattcgatct

SEQ ID NO: 498573 - DNA, 120 bp, Artificial Sequence
  ENSG00000163576_19 (sequence is synthesized)
gacattcctgctccccgaattcgtcgcatcagtgacagaactaattatggtgaagaaggtagtgcatattcactactatatcctaccatttttgcccggaaaggagtgtttgaaagagac

SEQ ID NO: 498574 - DNA, 120 bp, Artificial Sequence
  ENSG00000163576_20 (sequence is synthesized)
ttcttcaagaccagatcaaaagaagagattgcagagatattgtgtaacattggtgtcaaactgtctgatgaagaatttgaaaatgtatggaatcttgcatcaaaaaagcatcacagagga

SEQ ID NO: 498575 - DNA, 120 bp, Artificial Sequence
  ENSG00000163576_21 (sequence is synthesized)
gaagtttgtgttgagaacatcagaaatgttctagatgagctacggcatgcagaccggatcaagtgtaaaacactcatgtgatatttttggacttcattcattcaagcaaaagaattatta

SEQ ID NO: 498576 - DNA, 120 bp, Artificial Sequence
  ENSG00000163576_22 (sequence is synthesized)
actctgtgtttatctaaaatgttgaatccattctggttttagatattatgttagagttcacagtggtaagactcatatgcctgtatgtgttgctaataaattagattttggattttaaaa

SEQ ID NO: 498577 - DNA, 120 bp, Artificial Sequence
  ENSG00000163576_23 (sequence is synthesized)
gttcgcggggcggggcgaggcaggatgtcacgtgaccctgcgagtggctcagatccgaactggccgcctttctccccttcccccaccccagtctgtcgcccaggctggcatgcaatggtg

SEQ ID NO: 498578 - DNA, 120 bp, Artificial Sequence
  ENSG00000163576_24 (sequence is synthesized)
ggctcaagtgatcctcccacttcagcctctcagatagctgagactacagatgtgagccaccacgctgggctaattgaattcttggcgttaagcaattcttctgccttggcttcccgaagt

SEQ ID NO: 498579 - DNA, 120 bp, Artificial Sequence
  ENSG00000163576_25 (sequence is synthesized)
ctccccgcctaggtttgttcgcggggcggggcgaggcaggatgtcacgtgaccctgcgagtggctcagatccgaactggccgcctttctccccttcccccaccccaggtaaagaatttga

SEQ ID NO: 498580 - DNA, 120 bp, Artificial Sequence
  ENSG00000163576_26 (sequence is synthesized)
tgagttgttgaacacaattctggtgaaagacaacccaagatgttcgttaccctccacgggggacctactgaagatgtgctgctttagttgaatcccacaccacattcagtctctggcgag

SEQ ID NO: 498581 - DNA, 120 bp, Artificial Sequence
  ENSG00000163576_27 (sequence is synthesized)
gcttcagccaccaccccctccccagcctccgccaaaaaaattgttttgataatttagtggaagaatattaaattgattttccttcagaataaaggctacttttcagtttgcagtttacaa

SEQ ID NO: 498582 - DNA, 120 bp, Artificial Sequence
  ENSG00000163576_28 (sequence is synthesized)
taatgcatgggcttacagatcccagcagtttggtgtagatcaggggtcagcaaactatagcctgtgggccaaatccagcccactgtttgtttgtgtcagtaaagttttactggaacacaa

SEQ ID NO: 498583 - DNA, 120 bp, Artificial Sequence
  ENSG00000163576_29 (sequence is synthesized)
aggtatgaaccaccgcgcctggccttgatataccttttaatagttaactcaatatgcacaatgtagcattcagtcaccgtaaggagctttttttctgagagggtaataagatgtgggtct

SEQ ID NO: 498584 - DNA, 120 bp, Artificial Sequence
  ENSG00000163576_30 (sequence is synthesized)
agtacagctgtaggttaatttttgattatttaaatcttatattattggatgccacatttaatttaatggaaaaacaaaacacaaacacaacagagcaaataaactatgattttctaaatg

SEQ ID NO: 498585 - DNA, 120 bp, Artificial Sequence
  ENSG00000163577_0 (sequence is synthesized)
ggaactgccgcggccgccaccgccgctgccggcgccgctgctgtaggggaccagcgcgggtgcgcagacgaaaggcgctctttgccagctgaaagttcccacggaaaaactaccatctcc

SEQ ID NO: 498586 - DNA, 120 bp, Artificial Sequence
  ENSG00000163577_1 (sequence is synthesized)
cctgcccaccatggcagacgaaattgatttcactactggagatgccggggcttccagcacttaccctatgcagtgctcggccttgcgcaaaaacggcttcgtggtgctcaaaggacgacc

SEQ ID NO: 498587 - DNA, 120 bp, Artificial Sequence
  ENSG00000163577_2 (sequence is synthesized)
atgcaaaatagtggagatgtcaacttccaaaactggaaagcatggtcatgccaaggttcaccttgttggaattgatattttcacgggcaaaaaatatgaagatatttgtccttctactca

SEQ ID NO: 498588 - DNA, 120 bp, Artificial Sequence
  ENSG00000163577_3 (sequence is synthesized)
caacatggatgttccaaatattaagagaaatgattatcaactgatatgcattcaagatggttacctttccctgctgacagaaactggtgaagttcgtgaggatcttaaactgccagaagg

SEQ ID NO: 498589 - DNA, 120 bp, Artificial Sequence
  ENSG00000163577_4 (sequence is synthesized)
tgaactaggcaaagaaatagagggaaaatacaatgcaggtgaagatgtacaggtgtctgtcatgtgtgcaatgagtgaagaatatgctgtagccataaaaccctgcaaataaacggaaac

SEQ ID NO: 498590 - DNA, 120 bp, Artificial Sequence
  ENSG00000163577_5 (sequence is synthesized)
atcaggcatgaacactgtttatgtctgaatcaactgcagatctaatttggttctaagttgtcaccaaagctatagccttcataagcaacctcatttctttttttaattgttttcagattg

SEQ ID NO: 498591 - DNA, 120 bp, Artificial Sequence
  ENSG00000163577_6 (sequence is synthesized)
tgctgggttagttttgcaagcaattgataatttttaaaaaattatcaatatgtataattttttttgaattttgtagatatgtttcctataatattcctgtggttttcagtatgtcagtcc

SEQ ID NO: 498592 - DNA, 120 bp, Artificial Sequence
  ENSG00000163577_7 (sequence is synthesized)
aagaaacaaacaagatagcttcagcagatgtgatttgtctgagcaaatcattcctgtgttttagttagatgataaaccagggttttaaatcaaacaatgtagcataaagtggtattgaag

SEQ ID NO: 498593 - DNA, 120 bp, Artificial Sequence
  ENSG00000163577_8 (sequence is synthesized)
taccatatttaagttgaactgctctgcattaattacagatttaatataaaatgaactgattatatattggaattgttgcactttcagcctgtgtagggcaaacacaaatccttaaacaaa

SEQ ID NO: 498594 - DNA, 120 bp, Artificial Sequence
  ENSG00000163577_9 (sequence is synthesized)
aatcatgttatcaaaaactgtcagttattttggtggccacatgcaaccatgtgattactttggtcatactatttaccaaattgttggcaaacttgatgtaaccttatatggtggttttag

SEQ ID NO: 498595 - DNA, 120 bp, Artificial Sequence
  ENSG00000163577_10 (sequence is synthesized)
tcccttcttatggttggcagaagggcactgaactgttgggtgaaagttagttagcaagtaagattataaggaagacacaaaagacagtggcaaagagggttgattaaatctataagtttt

SEQ ID NO: 498596 - DNA, 120 bp, Artificial Sequence
  ENSG00000163577_11 (sequence is synthesized)
tatgtgaggactttgtaagtcagcataaaaatgaaaagttgtttctcagttgtttttgcttttaactttgcccccaacgtttaaagggagtgatctgctttacatgatactatgcaatgc

SEQ ID NO: 498597 - DNA, 120 bp, Artificial Sequence
  ENSG00000163577_12 (sequence is synthesized)
atctgctttacatgatactatgcaatgcttgttttccaactatgttgaataaatagtaatatttatcagtaaatactcctttccaacttccttttttttttttttttttttgagactgag

SEQ ID NO: 498598 - DNA, 120 bp, Artificial Sequence
  ENSG00000163577_13 (sequence is synthesized)
cccagcccctttccaaccatttctaagtagattttttgacattaatgtatttattaaacaaaaactgagaattccttaaattgatttggaatttttgttaattttatgtcctttttttcc

SEQ ID NO: 498599 - DNA, 120 bp, Artificial Sequence
  ENSG00000163577_14 (sequence is synthesized)
taaagtgaattaaagtgaatcatggaagcagcattactttatatgaatattattatttaagttaagttattttaagtatatgcattttttctgattgttgtgtgacttaattcagttgct

SEQ ID NO: 498600 - DNA, 120 bp, Artificial Sequence
  ENSG00000163577_15 (sequence is synthesized)
ggtgtgaactataactagcaaataattctataaactgaattattttaaaaggtattttaggtgacaccactgcatttctatttcatcttttgagtcatatgtatattatttccagaattt

SEQ ID NO: 498601 - DNA, 120 bp, Artificial Sequence
  ENSG00000163577_16 (sequence is synthesized)
tagacattattacagggtttgtgaggacctttgactcagtgacaatcatcatattggagcaaaacatagaacaaaatcactatctcagaaataccttaattctctaagactggctcttag

SEQ ID NO: 498602 - DNA, 120 bp, Artificial Sequence
  ENSG00000163577_17 (sequence is synthesized)
acctctcccatcatgccttgacctctaaaaagccctttgttcctatcttctaaaggaaagtatatcatatatgatgatgtaactgatctaatcagtgactggaaatagcattagtaacag

SEQ ID NO: 498603 - DNA, 120 bp, Artificial Sequence
  ENSG00000163577_18 (sequence is synthesized)
aagatcccaagttttagttgcttaatttgtacacacttttaaatattgtcttagcctcggcaaaccaatttggggaagaagcaagatactttaagagaaatacaaaggaaatttctaaag

SEQ ID NO: 498604 - DNA, 120 bp, Artificial Sequence
  ENSG00000163577_19 (sequence is synthesized)
cacaagaaatagtgaggtagtagttagtcgtctttcctacaacattttagcttttgcccatctaaagcacaattaaaattaggctacattctttccagtattctatttaagtacctacta

SEQ ID NO: 498605 - DNA, 120 bp, Artificial Sequence
  ENSG00000163577_20 (sequence is synthesized)
catactgctctagtttcttagtactctgtaatgtgtatcttaattgctactggttggcattgtaactcataggaattccagaaaattattaatccgtgctgcttgcagttcattcatatg

SEQ ID NO: 498606 - DNA, 120 bp, Artificial Sequence
  ENSG00000163577_21 (sequence is synthesized)
tgctggtgttatgattcagtattaactctcaattagcatgcccctgttcttcctaacttgtaaaatttcacataaatatattttcaattgtgtacaaattaagggtgtacaaattataat

SEQ ID NO: 498607 - DNA, 120 bp, Artificial Sequence
  ENSG00000163577_22 (sequence is synthesized)
aatgcatctctatcttcatactttgaatggcaaacgctatttatgcataaatattttcattttaagtaatatatgaagtgtaaatactcgatatataagtatagattttaaagatatggg

SEQ ID NO: 498608 - DNA, 120 bp, Artificial Sequence
  ENSG00000163577_23 (sequence is synthesized)
actttattttcacataagtcaatagatgtttctctagaacaaaatatttagtaaagctttataaattatattaaaaggaagcggggaacatgtattttttaacatagaacagaagtgact

SEQ ID NO: 498609 - DNA, 120 bp, Artificial Sequence
  ENSG00000163577_24 (sequence is synthesized)
tcattctttttagacatcagaaatgttaaagttgattcccaatatttgttgtacttttttgtagcaaatgttaaaaatcacgagttaccatgtatagaatgtggactgtcatgttgatat

SEQ ID NO: 498610 - DNA, 120 bp, Artificial Sequence
  ENSG00000163577_25 (sequence is synthesized)
cattgtacagtgataagccatttttatctgtatacatttcaccaatttattaacaggttgaatatttgtttctttttagaacattttatttatactgtgaagactttgttataccttatt

SEQ ID NO: 498611 - DNA, 120 bp, Artificial Sequence
  ENSG00000163577_26 (sequence is synthesized)
tgctacaacatagatcatatcattgctactttgacttagcatttgcatcataaacataattatgatgtttttttcatgctcccttccaggggctcagtcacttgaagaaactgttgctaa

SEQ ID NO: 498612 - DNA, 120 bp, Artificial Sequence
  ENSG00000163577_27 (sequence is synthesized)
ccaagctcttgactctgtttcccttaatgatacaagtctctgtaccagcgctttatgttaattaccaaaactctcctgcatcagagcatgatatctataataggagatactgcaataaaa

SEQ ID NO: 498613 - DNA, 120 bp, Artificial Sequence
  ENSG00000163577_28 (sequence is synthesized)
tgattaggctgtaaaatttggagacacaatttttcattacaatgcaatttgcatgtgcacatgtgcgcacataactttatatgttagttcttttttccaaactcccaactcttaaaagta

SEQ ID NO: 498614 - DNA, 120 bp, Artificial Sequence
  ENSG00000163577_29 (sequence is synthesized)
ttgtagtctgttggtgcctcaactgttggtaactttttttttttaaatttacaactttccacaacttgtttttgtactttaaggtttctcaattagaatatttctagttgagctgtaatt

SEQ ID NO: 498615 - DNA, 120 bp, Artificial Sequence
  ENSG00000163577_30 (sequence is synthesized)
tgaatgcattgttctcagggctatttgtgctaaaagctgaaatttcattattttaaagctaattgcctgaaaatatattggcagaattttcccaaattgtaataactgtgatacatgcat

SEQ ID NO: 498616 - DNA, 120 bp, Artificial Sequence
  ENSG00000163577_31 (sequence is synthesized)
ataaaaaaatccttaatgtcaacacacttaaactacatgctaaatagtcaagaaaaaaatggaaacagtagcatccatactggaatcttgccatatttttttcattttagaatagatttt

SEQ ID NO: 498617 - DNA, 120 bp, Artificial Sequence
  ENSG00000163577_32 (sequence is synthesized)
ggcagtctcatcttagaatcctatccttaggatacatctgaaagcattcctttggcatggaccccagagatagttttggagccaggcattgatgtagaggttcaccaaacatatttaggg

SEQ ID NO: 498618 - DNA, 120 bp, Artificial Sequence
  ENSG00000163577_33 (sequence is synthesized)
ataatagataaattcataatgcttttttgggtacactgaaatgtttacatactgaattctgtaatatgaactaggaacgcatttactatgagaaaatatggctcttaagcagtgtaagag

SEQ ID NO: 498619 - DNA, 120 bp, Artificial Sequence
  ENSG00000163577_34 (sequence is synthesized)
tgaaaatataagcatatttccattaacagtatattgtactgatcagcagctctcattttaacatcagttaggcataatatttcatagttttcaagccttttttttctgctaacattcaga

SEQ ID NO: 498620 - DNA, 120 bp, Artificial Sequence
  ENSG00000163577_35 (sequence is synthesized)
caagtaacaggcaacaaagatttaagaaaaatttatggtggaaaaccttaaaaattgagacaattcaatctatttaatctattaaattttttctctgaattgggtatatggcatcattat

SEQ ID NO: 498621 - DNA, 120 bp, Artificial Sequence
  ENSG00000163577_36 (sequence is synthesized)
ttgattttagcagggaacatttggatttagcttatgaaacacagatgttctatgggaacatggcttgaagccaatatgtaatttaatgtttttccattaaacaaacatctgaacaccaac

SEQ ID NO: 498622 - DNA, 120 bp, Artificial Sequence
  ENSG00000163577_37 (sequence is synthesized)
ttagctaccaagtgaggtcaagtgcctgaaaagtactgtatacatctaataagcatgttttccttatgtaaaagatgcactttatggcaatgcataccaggctttcacctgctagaaaca

SEQ ID NO: 498623 - DNA, 120 bp, Artificial Sequence
  ENSG00000163577_38 (sequence is synthesized)
aatgcataccaggctttcacctgctagaaacatacttgttgccaactttgccatctaccactattctcctccttagaacaggtagaaacctattttacaaaaaaaaaaaaaaaaaaaaaa

SEQ ID NO: 498624 - DNA, 120 bp, Artificial Sequence
  ENSG00000163577_39 (sequence is synthesized)
aaactgtttcttggtattgatagacttaagtttatcttagttcaagattgcactttttaaaaaactctggactattttcagcaatgaccgaacagcttgtcacacatcatagttgtgatc

SEQ ID NO: 498625 - DNA, 120 bp, Artificial Sequence
  ENSG00000163577_40 (sequence is synthesized)
ttttttgaggagttatttattgtggttaatatctactataaataagcattcttgtgcttgttacaaagcataatgcaaattactagttctatactagtataatgaaaatgactagttcta

SEQ ID NO: 498626 - DNA, 120 bp, Artificial Sequence
  ENSG00000163577_41 (sequence is synthesized)
tactgttatgtacttttgtcttcctccccaaaaaggaaacagtttagcattgtctaaattcagtggcacttttttagtaatacatttttttttcttagatacaggagaactattgctttt

SEQ ID NO: 498627 - DNA, 120 bp, Artificial Sequence
  ENSG00000163577_42 (sequence is synthesized)
acctgcagaaactcaaatgttttcgctaaaactttaaaattctaaaatacgtagtatgggtattactaattgtacattttacatttcaaaaatagttaaaattcaaatgttaagtctttg

SEQ ID NO: 498628 - DNA, 120 bp, Artificial Sequence
  ENSG00000163577_43 (sequence is synthesized)
gtctcttggaactgccgcggccgccaccgccgctgccggcgccgctgctgtaggggaccagcgcgggtgcgcagacgaaaggcgctctttgccagctgaaagctgatatgcattcaagat

SEQ ID NO: 498629 - DNA, 120 bp, Artificial Sequence
  ENSG00000163581_0 (sequence is synthesized)
gtgccacactcacacaagacctggaattgacaggactcccaactagtacaatgacagaagataaggtcactgggaccctggttttcactgtcatcactgctgtgctgggttccttccagt

SEQ ID NO: 498630 - DNA, 120 bp, Artificial Sequence
  ENSG00000163581_1 (sequence is synthesized)
ttggatatgacattggtgtgatcaatgcacctcaacaggtaataatatctcactatagacatgttttgggtgttccactggatgaccgaaaagctatcaacaactatgttatcaacagta

SEQ ID NO: 498631 - DNA, 120 bp, Artificial Sequence
  ENSG00000163581_2 (sequence is synthesized)
cagatgaactgcccacaatctcatactcaatgaacccaaaaccaaccccttgggctgaggaagagactgtggcagctgctcaactaatcaccatgctctggtccctgtctgtatccagct

SEQ ID NO: 498632 - DNA, 120 bp, Artificial Sequence
  ENSG00000163581_3 (sequence is synthesized)
ttgcagttggtggaatgactgcatcattctttggtgggtggcttggggacacacttggaagaatcaaagccatgttagtagcaaacattctgtcattagttggagctctcttgatggggt

SEQ ID NO: 498633 - DNA, 120 bp, Artificial Sequence
  ENSG00000163581_4 (sequence is synthesized)
tttcaaaattgggaccatctcatatacttataattgctggaagaagcatatcaggactatattgtgggctaatttcaggcctggttcctatgtatatcggtgaaattgctccaaccgctc

SEQ ID NO: 498634 - DNA, 120 bp, Artificial Sequence
  ENSG00000163581_5 (sequence is synthesized)
tcaggggagcacttggcacttttcatcagctggccatcgtcacgggcattcttattagtcagattattggtcttgaatttatcttgggcaattatgatctgtggcacatcctgcttggcc

SEQ ID NO: 498635 - DNA, 120 bp, Artificial Sequence
  ENSG00000163581_6 (sequence is synthesized)
tgtctggtgtgcgagccatccttcagtctctgctactctttttctgtccagaaagccccagatacctttacatcaagttagatgaggaagtcaaagcaaaacaaagcttgaaaagactca

SEQ ID NO: 498636 - DNA, 120 bp, Artificial Sequence
  ENSG00000163581_7 (sequence is synthesized)
gaggatatgatgatgtcaccaaagatattaatgaaatgagaaaagaaagagaagaagcatcgagtgagcagaaagtctctataattcagctcttcaccaattccagctaccgacagccta

SEQ ID NO: 498637 - DNA, 120 bp, Artificial Sequence
  ENSG00000163581_8 (sequence is synthesized)
ttctagtggcactgatgctgcatgtggctcagcaattttccggaatcaatggcattttttactactcaaccagcatttttcagacggctggtatcagcaaacctgtttatgcaaccattg

SEQ ID NO: 498638 - DNA, 120 bp, Artificial Sequence
  ENSG00000163581_9 (sequence is synthesized)
gagttggcgctgtaaacatggttttcactgctgtctctgtattccttgtggagaaggcagggcgacgttctctctttctaattggaatgagtgggatgtttgtttgtgccatcttcatgt

SEQ ID NO: 498639 - DNA, 120 bp, Artificial Sequence
  ENSG00000163581_10 (sequence is synthesized)
cagtgggacttgtgctgctgaataagttctcttggatgagttatgtgagcatgatagccatcttcctctttgtcagcttctttgaaattgggccaggcccgatcccctggttcatggtgg

SEQ ID NO: 498640 - DNA, 120 bp, Artificial Sequence
  ENSG00000163581_11 (sequence is synthesized)
ctgagtttttcagtcaaggaccacgtcctgctgctttagcaatagctgcattcagcaattggacctgcaatttcattgtagctctgtgtttccagtacattgcggacttctgtggacctt

SEQ ID NO: 498641 - DNA, 120 bp, Artificial Sequence
  ENSG00000163581_12 (sequence is synthesized)
atgtgtttttcctctttgctggagtgctcctggcctttaccctgttcacattttttaaagttccagaaaccaaaggaaagtcttttgaggaaattgctgcagaattccaaaagaagagtg

SEQ ID NO: 498642 - DNA, 120 bp, Artificial Sequence
  ENSG00000163581_13 (sequence is synthesized)
gtaaaaaaaaaaccctgctttttgacatgaacagaaacaataagggaaccgtctgtttttaaatgatgattccttgagcattttatatccacatctttaagtattgttttatttttatgt

SEQ ID NO: 498643 - DNA, 120 bp, Artificial Sequence
  ENSG00000163581_14 (sequence is synthesized)
gctctcatcagaaatgtcatcaaatattaccaaaaaagtatttttttaagttagagaatatatttttgatggtaagactgtaattaagtaaaccaaaaaggctagtttattttgttacac

SEQ ID NO: 498644 - DNA, 120 bp, Artificial Sequence
  ENSG00000163581_15 (sequence is synthesized)
taaagggcaggtggttctaatatttttagctctgttctttataacaaggttcttctaaaattgaagagatttcaacatatcatttttttaacacataactagaaacctgaggatgcaaca

SEQ ID NO: 498645 - DNA, 120 bp, Artificial Sequence
  ENSG00000163581_16 (sequence is synthesized)
aatatttatatatttgaatatcattaaattggaattttcttacccatatatcttatgttaaaggagatatggctagtggcaataagttccatgttaaaatagacaactcttccatttatt

SEQ ID NO: 498646 - DNA, 120 bp, Artificial Sequence
  ENSG00000163581_17 (sequence is synthesized)
gcactcagcttttttcttgagtactagaatttgtattttgcttaaaattttacttttgttctgtattttcatgtggaatggattatagagtatactaaaaaatgtctatagagaaaaact

SEQ ID NO: 498647 - DNA, 120 bp, Artificial Sequence
  ENSG00000163581_18 (sequence is synthesized)
ttcatttttggtaggcttatcaaaatctttcagcactcagaaaagaaaaccattttagttcctttatttaatggccaaatggtttttgcaagatttaacactaaaaaggtttcacctgat

SEQ ID NO: 498648 - DNA, 120 bp, Artificial Sequence
  ENSG00000163581_19 (sequence is synthesized)
catatagcgtgggttatcagttaacattaacatctattataaaaccatgttgattcccttctggtacaatcctttgagttatagtttgctttgctttttaattgaggacagcctggtttt

SEQ ID NO: 498649 - DNA, 120 bp, Artificial Sequence
  ENSG00000163581_20 (sequence is synthesized)
cacatacactcaaacaatcatgagtcagacatttggtatattacctcaaattcctaataagtttgatcaaatctaatgtaagaaaatttgaagtaaaggattgatcactttgttaaaaat

SEQ ID NO: 498650 - DNA, 120 bp, Artificial Sequence
  ENSG00000163581_21 (sequence is synthesized)
attttctgaattattatgtctcaaaataagttgaaaaggtagggtttgaggattcctgagtgtgggcttctgaaacttcataaatgttcagcttcagacttttatcaaaatccctattta

SEQ ID NO: 498651 - DNA, 120 bp, Artificial Sequence
  ENSG00000163581_22 (sequence is synthesized)
attttcctggaaagactgattgttttatggtgtgttcctaacataaaataatcgtctcctttgacatttccttctttgtcttagctgtatacagattctagccaaactattctatggcca

SEQ ID NO: 498652 - DNA, 120 bp, Artificial Sequence
  ENSG00000163581_23 (sequence is synthesized)
ttactaacacgcattgtacactatctatctgcctttacctacataggcaaattggaaatacacagatgattaaacagactttagcttacagtcaattttacaattatggaaatatagttc

SEQ ID NO: 498653 - DNA, 120 bp, Artificial Sequence
  ENSG00000163581_24 (sequence is synthesized)
tgatgggtcccaaaagcttagcagggtgctaacgtatctctaggctgttttctccaccaactggagcactgatcaatccttcttatgtttgctttaatgtgtattgaagaaaagcacttt

SEQ ID NO: 498654 - DNA, 120 bp, Artificial Sequence
  ENSG00000163581_25 (sequence is synthesized)
ttaaaaagtactctttaagagtgaaataattaaaaaccactgaacatttgctttgttttctaaagttgttcacatatatgtaatttagcagtccaaagaacaagaaattgtttcttttca

SEQ ID NO: 498655 - DNA, 120 bp, Artificial Sequence
  ENSG00000163581_26 (sequence is synthesized)
ctattcatgtttccaactacaactgcatatgaggtcatatcaaatatctcctgcacaaactatgtctatacctaggaacaagggttcatccttccagtgaattcagggaggggctttcat

SEQ ID NO: 498656 - DNA, 120 bp, Artificial Sequence
  ENSG00000163581_27 (sequence is synthesized)
aaaccaaattgttattattgagatagtcctggttgcactttaacatttatgtttatgtttcatgcagggctaatttcaggcctggttcctatgtatatcggtgaaattgctccaaccgct

SEQ ID NO: 498657 - DNA, 120 bp, Artificial Sequence
  ENSG00000163581_28 (sequence is synthesized)
ctcaggggagcacttggcacttttcatcagctggccatcgtcacgggcattcttattagtcaggcttgaaaagactcagaggatatgatgatgtcaccaaagatattaatgaaatgagaa

SEQ ID NO: 498658 - DNA, 120 bp, Artificial Sequence
  ENSG00000163581_29 (sequence is synthesized)
gtcactgggaccctggttttcactgtcatcactgctgtgctgggttccttccagtttggatatgacattggtgtgatcaatgcacctcaacagggctaatttcaggcctggttcctatgt

SEQ ID NO: 498659 - DNA, 120 bp, Artificial Sequence
  ENSG00000163584_0 (sequence is synthesized)
ctctctgctctcgcggccgactcgcaagatggcgccgcagaaagacaggaagcccaagaggtcaacctggaggtttaatttggaccttactcatccagtagaagatggaatttttgattc

SEQ ID NO: 498660 - DNA, 120 bp, Artificial Sequence
  ENSG00000163584_1 (sequence is synthesized)
tggaaattttgagcaatttctacgggagaaggttaaagtcaatggcaaaactggaaatctcgggaatgttgttcacattgaacgcttcaagaataaaatcacagttgtttctgagaaaca

SEQ ID NO: 498661 - DNA, 120 bp, Artificial Sequence
  ENSG00000163584_2 (sequence is synthesized)
gttctctaaaaggtatttgaaataccttaccaagaaataccttaagaagaacaatcttcgtgattggcttcgagtggttgcatctgacaaggagacctacgaacttcgttacttccagat

SEQ ID NO: 498662 - DNA, 120 bp, Artificial Sequence
  ENSG00000163584_3 (sequence is synthesized)
tagtcaagatgaagatgaatcagagtcggaggactaggcaaaggctccccttacagggctttgcttattaataaaataaatgaagtatacatgagaaataccaagaaattggcttttagt

SEQ ID NO: 498663 - DNA, 120 bp, Artificial Sequence
  ENSG00000163584_4 (sequence is synthesized)
ttatcagtgaataaaaaatattatactcttgaacttttgtctcatttttttgagtatgctgtttatatgattttgatttccctctgataactatcaacagtatttaaatagcttatagct

SEQ ID NO: 498664 - DNA, 120 bp, Artificial Sequence
  ENSG00000163584_5 (sequence is synthesized)
ttatagctggtataattttttcccacgatttccaaaatcttttatgtactcaggtaaaagtagcgttatataggaaatcttttttttagacactctcgttctgtcacccaggctggagtg

SEQ ID NO: 498665 - DNA, 62 bp, Artificial Sequence
  ENSG00000163584_6 (sequence is synthesized)
ctgtcacccaggctggagtgcagtgactcagcttcctaaatatagggtttggccatgttggc

SEQ ID NO: 498666 - DNA, 120 bp, Artificial Sequence
  ENSG00000163584_7 (sequence is synthesized)
aaaatgtatatgattgtcttgacagtctcaaatactgtttttaatagcttgtaaatgtaatctcaagtgcttagaacagttcttacatataagttgctctgtagtttgctcttatagtta

SEQ ID NO: 498667 - DNA, 120 bp, Artificial Sequence
  ENSG00000163584_8 (sequence is synthesized)
gcccaaagactctgggtgtgaggcctgctgtaaaccaatgttaaactgcttattagaaagccctaaccacctgctttgtaggcaccagaaactcaaaaccaaatctcaactcagctacag

SEQ ID NO: 498668 - DNA, 120 bp, Artificial Sequence
  ENSG00000163584_9 (sequence is synthesized)
aatctactgtggtccttgtctgaaaaaattagttcactcggttggaatcttgtctcagagcatcctcatctctttctcaaaagcccctaccccaacaccggcgtgttggttgtctattga

SEQ ID NO: 498669 - DNA, 120 bp, Artificial Sequence
  ENSG00000163584_10 (sequence is synthesized)
aacttacaagtggatggaccctttctcccgaataaactggcctttgaaagctctaatcgaaatggtttggcaaaatccatactgcaggagattagggaggacaagaatgatgtgcctttt

SEQ ID NO: 498670 - DNA, 120 bp, Artificial Sequence
  ENSG00000163584_11 (sequence is synthesized)
tgtactgctgagcctgatggtggtgccactacttcaggtacttagatgagtcttgatgctaatagaattgtgtcgccaaacatatctggacagttacaacctaatctatgcattaattgg

SEQ ID NO: 498671 - DNA, 120 bp, Artificial Sequence
  ENSG00000163584_12 (sequence is synthesized)
tttgggaattgcttgaaattattgtttaattcaatgttttaattcgttttcctaaaaatttaagtgcccccatcatcgtgcaatacctcagtgcagcaactccttgattcttggatgact

SEQ ID NO: 498672 - DNA, 120 bp, Artificial Sequence
  ENSG00000163584_13 (sequence is synthesized)
gaacttcctaacttggctctgccccattgttcccatttttcatgtttttcacaaatagttaaccaggtacctactactgtgcaccgctgcagagcattgaggatgtatgtgatgagtaaa

SEQ ID NO: 498673 - DNA, 120 bp, Artificial Sequence
  ENSG00000163584_14 (sequence is synthesized)
aacacccagcctgctctgctgtgttagtattatgacggaaactgatcaaatcacatgtgaacaaatttactgctacaaaagggagggcttaataaaaggaatttcatctgggaaggcaaa

SEQ ID NO: 498674 - DNA, 120 bp, Artificial Sequence
  ENSG00000163586_0 (sequence is synthesized)
ggcagagccgcaggtcagtcgtgaagagggagctctattgccaccatgagtttctccggcaagtaccaactgcagagccaggaaaactttgaagccttcatgaaggcaatcggtctgccg

SEQ ID NO: 498675 - DNA, 120 bp, Artificial Sequence
  ENSG00000163586_1 (sequence is synthesized)
gaagagctcatccagaaggggaaggatatcaagggggtgtcggaaatcgtgcagaatgggaagcacttcaagttcaccatcaccgctgggtccaaagtgatccaaaacgaattcacggtg

SEQ ID NO: 498676 - DNA, 120 bp, Artificial Sequence
  ENSG00000163586_2 (sequence is synthesized)
acaatgacaggggagaaagtcaagacagtggttcagttggaaggtgacaataaactggtgacaactttcaaaaacatcaagtctgtgaccgaactcaacggcgacataatcaccaatacc

SEQ ID NO: 498677 - DNA, 120 bp, Artificial Sequence
  ENSG00000163586_3 (sequence is synthesized)
atgacattgggtgacattgtcttcaagagaatcagcaagagaatttaaacaagtctgcatttcatattattttagtgtgtaaaattaatgtaataaagtgaactttgttttaaaaaaaaa

SEQ ID NO: 498678 - DNA, 120 bp, Artificial Sequence
  ENSG00000163586_4 (sequence is synthesized)
cagaactttccttggaacctggccctgggacctcattcctcaaggctcaaacctcacaattccacccacagataccatctctgaacccacctcccatgtgggagaagcagagagacaaag

SEQ ID NO: 498679 - DNA, 120 bp, Artificial Sequence
  ENSG00000163586_5 (sequence is synthesized)
gcagctcttagggaagaatcttatagagaagctgctctcctcttcccagggactgtctggggggtgttccagcccctaaagtctgagctctcccatatggaggatatgggagaaccaggc

SEQ ID NO: 498680 - DNA, 120 bp, Artificial Sequence
  ENSG00000163586_6 (sequence is synthesized)
tgaagagggagctctattgccaccatgagtttctccggcaagtaccaactgcagagccaggaaaactttgaagccttcatgaaggcaatcggagggacctagcttggaagatcaactctc

SEQ ID NO: 498681 - DNA, 120 bp, Artificial Sequence
  ENSG00000163586_7 (sequence is synthesized)
tggtcaccaggggtatggggaatgaaatgctcacactccaagagcaaagtcatcaaaggaggagggaatgaggaaggagagtgagcaagaaccagggtgcttacaagaggaacggttctt

SEQ ID NO: 498682 - DNA, 120 bp, Artificial Sequence
  ENSG00000163586_8 (sequence is synthesized)
caggccagaagagtgtcctttttataaattgactggcaagatagcagcaggccaggccaggtcactgtcccttcctttctgaggccacagccgatgctgctgacaagcccccagtctgcc

SEQ ID NO: 498683 - DNA, 120 bp, Artificial Sequence
  ENSG00000163586_9 (sequence is synthesized)
cctccaacccccaaacttctttcctgtggtcagtatctgccagcacttactgaggatccatcatgtcccaggcagtttacacacattatcactaatcctttctgctcagcgcaaccaacc

SEQ ID NO: 498684 - DNA, 120 bp, Artificial Sequence
  ENSG00000163586_10 (sequence is synthesized)
agccacagaggcctccacctgccctgcatgcccagggtgcttcataaatgcctttgcccatttagcgtttataaagagaatcccattcatggtcatattatggcagcttacaagcctggc

SEQ ID NO: 498685 - DNA, 120 bp, Artificial Sequence
  ENSG00000163586_11 (sequence is synthesized)
catcctgtaccctatttgggggtgaatggtgcagtgtttctcctgcaggtatgtccccctgactcttctttgcccccagaatatgctttagggagtcacagacaacagaacactgcctca

SEQ ID NO: 498686 - DNA, 120 bp, Artificial Sequence
  ENSG00000163586_12 (sequence is synthesized)
gggcgctgtcatcactctattcaaatggaaaaattcttaaactagagagagtgtgagcatcaaccacccaatgtgcagtttccacctccgccccagcacattcccaggagagcaggggag

SEQ ID NO: 498687 - DNA, 120 bp, Artificial Sequence
  ENSG00000163586_13 (sequence is synthesized)
caggagatgagctatcctgcagtaagtcctggccaacgccctttgataggttccatctcacctaatcctcctgtctccttcgagggaggctggatgagggattcaatagacaggttgacc

SEQ ID NO: 498688 - DNA, 120 bp, Artificial Sequence
  ENSG00000163586_14 (sequence is synthesized)
tgtccaagtcatcagctaataaatgttaaatccagggctcaaacccatcaagcagcaactattgcattgctgctgaaactgaggggctccttttcaccctgatgacatggtatgtcattc

SEQ ID NO: 498689 - DNA, 120 bp, Artificial Sequence
  ENSG00000163586_15 (sequence is synthesized)
cagcagtcttattcaagagaactggcaggggtggaggaaacatccttaaaaactcaaaagctgatgcatccactgtttttatatgcttcacagctataggaggacaattatgcactaccc

SEQ ID NO: 498690 - DNA, 120 bp, Artificial Sequence
  ENSG00000163586_16 (sequence is synthesized)
actgccttccaggctgtgtgcctagttgtgtccatgtacatgtatccttggtgctcaacatgtatttggtgcatagtaggtactcaatgaaattttgagaaattagattgggctggtttg

SEQ ID NO: 498691 - DNA, 120 bp, Artificial Sequence
  ENSG00000163586_17 (sequence is synthesized)
gatggtcttgctataacagtcattgatgtagaaaagaattcagtcaaaggcaggaggactttccaggtgaggaggagaagtgacaaagacttggcataggattttggaaaacattgccaa

SEQ ID NO: 498692 - DNA, 120 bp, Artificial Sequence
  ENSG00000163586_18 (sequence is synthesized)
cctttcctccggtcctacaggaaaccagacgaatttttgaattgtttcatatgccaacatatttggtgctgttttttaagcttaattttgttttttatgcttaattttgttttttacaat

SEQ ID NO: 498693 - DNA, 120 bp, Artificial Sequence
  ENSG00000163586_19 (sequence is synthesized)
acaacatcagatgaacacttcataatttcttttctggctttcagaccatgacattgggtgacattgtcttcaagagaatcagcaagagaatttaaacaagtctgcatttcatattatttt

SEQ ID NO: 498694 - DNA, 120 bp, Artificial Sequence
  ENSG00000163590_0 (sequence is synthesized)
gtccccgcagtgctcccggacccggcgagccttcggggcgcgcgtcgctggtggtggttgaggctctagcgataataaatgatagaggatacaatgactttgctgtctctgctgggtcgc

SEQ ID NO: 498695 - DNA, 120 bp, Artificial Sequence
  ENSG00000163590_1 (sequence is synthesized)
atcatgcgctacttcttgctgagacccgagacgcttttcctgctgtgcatcagcttggctctatggagttacttcttccacaccgacgaggtgaagaccatcgtgaagtccagccgggac

SEQ ID NO: 498696 - DNA, 120 bp, Artificial Sequence
  ENSG00000163590_2 (sequence is synthesized)
gccgtgaagatggtgaagggcaaggtagccgagatcatgcagaacgatcgactcggggggcttgatgtgctcgaggccgagttttccaagacctgggagttcaagaaccacaacgtggcg

SEQ ID NO: 498697 - DNA, 120 bp, Artificial Sequence
  ENSG00000163590_3 (sequence is synthesized)
gtgtactccatccagggccggagagaccacatggaggaccgcttcgaagttctcacggatctggccaacaagacgcacccgtccatcttcgggatcttcgacgggcacgggggagagact

SEQ ID NO: 498698 - DNA, 120 bp, Artificial Sequence
  ENSG00000163590_4 (sequence is synthesized)
gcagctgaatatgtaaaatctcgactcccagaggcccttaaacagcatcttcaggactacgagaaagacaaagaaaatagtgtattatcttaccagaccatccttgaacagcagattttg

SEQ ID NO: 498699 - DNA, 120 bp, Artificial Sequence
  ENSG00000163590_5 (sequence is synthesized)
tcaattgaccgagaaatgctagaaaaattgactgtatcctatgatgaagcaggcacaacgtgtttgattgctctgctatcagataaagacctcactgtggccaacgtgggtgactcgcgc

SEQ ID NO: 498700 - DNA, 120 bp, Artificial Sequence
  ENSG00000163590_6 (sequence is synthesized)
ggggtcctgtgtgacaaagatgggaacgctattcctttgtctcatgatcacaagccttaccagttgaaggaaagaaagaggataaagagagcaggtggtttcatcagtttcaatggctcc

SEQ ID NO: 498701 - DNA, 120 bp, Artificial Sequence
  ENSG00000163590_7 (sequence is synthesized)
tggagggtccagggaatcctggccatgtctcggtccctgggggattatccgctgaaaaatctcaacgtggtcatcccagacccagacatcctgacctttgacctggacaagcttcagcct

SEQ ID NO: 498702 - DNA, 120 bp, Artificial Sequence
  ENSG00000163590_8 (sequence is synthesized)
gagttcatgatcttggcatcagatggtctctgggatgctttcagcaatgaagaagcagttcgattcatcaaggagcgcttggatgaacctcactttggggccaagagcatagttttacag

SEQ ID NO: 498703 - DNA, 120 bp, Artificial Sequence
  ENSG00000163590_9 (sequence is synthesized)
tcattttacagaggctgccctgacaatataacagtcatggtggtgaagttcagaaatagcagcaaaacagaagagcagtgaacccttcaggggtctcagctgccttagactaaaggactt

SEQ ID NO: 498704 - DNA, 120 bp, Artificial Sequence
  ENSG00000163590_10 (sequence is synthesized)
tcaacacactggtctcttttaatttagtgaaaagtgtgggagttgtaattaggatcatccaccccagacatggaatcccccctccctggtggtcttaggtctataatcagtgacgaacag

SEQ ID NO: 498705 - DNA, 120 bp, Artificial Sequence
  ENSG00000163590_11 (sequence is synthesized)
agggtgcccttggccaatgtagttaagaaactggaaaatggtttcttcatgttttcccaactctttcatccagtgtccaaaatatataagtaaatagctgtagagtcacatatatgaagt

SEQ ID NO: 498706 - DNA, 120 bp, Artificial Sequence
  ENSG00000163590_12 (sequence is synthesized)
gaatagcatatgtgtcatttagtctccctgaagattcttttcaagatcctgttcagggtcctccaggcatcagctgttgtgtcctctctttgtaacagtggacaggacagaccacccagt

SEQ ID NO: 498707 - DNA, 120 bp, Artificial Sequence
  ENSG00000163590_13 (sequence is synthesized)
gctgcaggagacaggccactgcgtcacctgtgagtggtcaggggctgatgtggcaacaccctctgccaagagacagagctgtcctgagaatgctttgtccttctgagcccatgttttctg

SEQ ID NO: 498708 - DNA, 120 bp, Artificial Sequence
  ENSG00000163590_14 (sequence is synthesized)
ctcagtagcagcttggaagcagatttggaatggtttactattttggctgctcttggggactgcgagaagcagagagaatgagagaccagtggcaactgcctgcacagcagagataaccct

SEQ ID NO: 498709 - DNA, 120 bp, Artificial Sequence
  ENSG00000163590_15 (sequence is synthesized)
cttcccttgcttcctttaatagttaaatagactttgtataccacctgaccagcctttgtgcatttatcctaatcatgcatgaccgttaaccttttgcttagtccttaccatatgtaatag

SEQ ID NO: 498710 - DNA, 120 bp, Artificial Sequence
  ENSG00000163590_16 (sequence is synthesized)
gcagctgttaaattcaccaacagataccctgatttttcatcttacgtgaccaagaaaccacgttaggggaaatgaaaaaagcaagccacaataccatgattccttccattttcaacagta

SEQ ID NO: 498711 - DNA, 120 bp, Artificial Sequence
  ENSG00000163590_17 (sequence is synthesized)
gatgaaggaaatgatactgaatgagtcacagtgttccctggcaagtaagctgtttgcattgagaaaggagtgagctggtgaggttaccaccctgaattgagctccagctgccagtttttg

SEQ ID NO: 498712 - DNA, 120 bp, Artificial Sequence
  ENSG00000163590_18 (sequence is synthesized)
tgtttttccttgcccctttccaagtggttttcaagtgtcaggcagtgttctgagaagcagcagcctataactgtatgtgtgttccttgaagccaggtgcagagttcccagctactgcagc

SEQ ID NO: 498713 - DNA, 120 bp, Artificial Sequence
  ENSG00000163590_19 (sequence is synthesized)
ttgggatttggtgggaaactactgggataagcttctccttgacaatggaaaggcagcagtcttcaacatttggttgcaaatctccatccacatcagggagctttccccaggcaaatacaa

SEQ ID NO: 498714 - DNA, 120 bp, Artificial Sequence
  ENSG00000163590_20 (sequence is synthesized)
accgccccgtggcctgcaggcctgcaggggaggcagcaaagggacctggcagttgcaacacagtaagtcaggaattcaagcgtgaacccatattgataagtgggccagaattatttaggg

SEQ ID NO: 498715 - DNA, 120 bp, Artificial Sequence
  ENSG00000163590_21 (sequence is synthesized)
gcctggcttgctgctctccatttcctgtatcgctaatttatcatttttccaaccttggtattttatattatttagagaaaatgctgggtcactctctttgcctaaggtgactcaaacagc

SEQ ID NO: 498716 - DNA, 120 bp, Artificial Sequence
  ENSG00000163590_22 (sequence is synthesized)
caaacgaaacttccgttgcctcccagccctctgtatccacctggttttgttctttccctgtgagcatttgtggttatagcttcccatatgccacattcaccggccacctcctcgccgtgg

SEQ ID NO: 498717 - DNA, 120 bp, Artificial Sequence
  ENSG00000163590_23 (sequence is synthesized)
aaccctgccctctcccctcctgctgctgtagagttttcccaaagcagtgtccaggagagaatttgagagagtgaagaaattgccttgtagatgtggagggctgcaatctgtcttgatttc

SEQ ID NO: 498718 - DNA, 120 bp, Artificial Sequence
  ENSG00000163590_24 (sequence is synthesized)
tccaagcacttaactttctttgactgcactgagaattgctaatgatttcccatgagatttgcttacttttgtatactgtattttccagcattacagaaccttggttattgttttttagcc

SEQ ID NO: 498719 - DNA, 120 bp, Artificial Sequence
  ENSG00000163590_25 (sequence is synthesized)
atagaatcttctagtaaaaaatatctgccaccattttagatttaagcatttgcctatggggagacactgaatatgtggatgtgtgtattaatatttggggtggggacagggaagggaatg

SEQ ID NO: 498720 - DNA, 120 bp, Artificial Sequence
  ENSG00000163590_26 (sequence is synthesized)
tggaaaacaaatgctggctgtgagcagtgctgagatggccaggccaggcggctgagtttgcttggaaattcaggacattctgactcctaagagttgcccccacccaccatcaaactgaaa

SEQ ID NO: 498721 - DNA, 120 bp, Artificial Sequence
  ENSG00000163590_27 (sequence is synthesized)
tcagcaccaatggtgtcagcactttacagcccatagccaactttctttatttttaacgtagcacaaaaatgtataatagcaaggaaaagacatttttaaattccggttatttttattgtc

SEQ ID NO: 498722 - DNA, 120 bp, Artificial Sequence
  ENSG00000163590_28 (sequence is synthesized)
taaaatgaaagcaacagtgttttgataaagatgaaaaagaaaagctactaaattagtaaatcagtggttacgtgccctgcagaatttcttaacagatggtgctgagtgcacgagttacat

SEQ ID NO: 498723 - DNA, 120 bp, Artificial Sequence
  ENSG00000163590_29 (sequence is synthesized)
aactttctctctaattgaggttcacaaggcgtcttctaaattttgctttgtacaattaattcatttctgatgttaaccaaatagagtgtatatatcctactcccattactgcctctttcc

SEQ ID NO: 498724 - DNA, 120 bp, Artificial Sequence
  ENSG00000163590_30 (sequence is synthesized)
cccctactatggcttgtagattttcaaaagatagaagttctaggcaaaactgtagcagtttcattaatagttgttaggatagttatatctaaaatcagagtattttgttcccttccttct

SEQ ID NO: 498725 - DNA, 120 bp, Artificial Sequence
  ENSG00000163590_31 (sequence is synthesized)
ggagctctctctccctagcccttttccagctgttggggatgtgcagacatcactcctgggggtgccctatggtacactggctgctccccagggacctgggaatgctgaatctagccatta

SEQ ID NO: 498726 - DNA, 120 bp, Artificial Sequence
  ENSG00000163590_32 (sequence is synthesized)
gggaaattgatttgagatgtttgcatgtgaagcttccctaagcagcactgccaaagctttggaattgtcacccaaggcttcctagactccctagctagctcgagttcgaattgccaatag

SEQ ID NO: 498727 - DNA, 120 bp, Artificial Sequence
  ENSG00000163590_33 (sequence is synthesized)
tccccatggtgccaaattttgggatggttttacagtcttttagaaatgaagacaggaatggccatgtgcttctgagaccccagcacgatgccaggcccaggtctccattaatgcagtgct

SEQ ID NO: 498728 - DNA, 120 bp, Artificial Sequence
  ENSG00000163590_34 (sequence is synthesized)
ctgctgctgctccactggcaatttgtactcttaacataggttgggggagggacagctagggaaattttttttaattaattgtatctaaaattctttcatcataggaataaacaacacata

SEQ ID NO: 498729 - DNA, 120 bp, Artificial Sequence
  ENSG00000163590_35 (sequence is synthesized)
tagaaagctccaaagctgttcccaagacctgtattatttattttatatgaccaacttgccccaaggcaattaactctgaattgctgttctaatgtgacatatctgtgtacatatgtacat

SEQ ID NO: 498730 - DNA, 120 bp, Artificial Sequence
  ENSG00000163590_36 (sequence is synthesized)
agtactggtaaccagtggctgcattttattccttgctgtggactgaggtattggcttcttgaatcttgtatatgtcataagaatattatacagagagtgttatagtgaaggatgtaagct

SEQ ID NO: 498731 - DNA, 120 bp, Artificial Sequence
  ENSG00000163590_37 (sequence is synthesized)
ggataatttaaaacagaccttatttcatacaagtgtaattattacatcattttgggtaaatggcaaacaggattgcatgagagtgatggcatcatcatttcaattgaatctgaagtgatt

SEQ ID NO: 498732 - DNA, 120 bp, Artificial Sequence
  ENSG00000163590_38 (sequence is synthesized)
ctaggaaattgattccactgttggattctaggaaattgagtccactgttttcctttgcgtttaatttcctttgtgtttaatttgaccacagaaacttttttgagtagcacctagtaacat

SEQ ID NO: 498733 - DNA, 120 bp, Artificial Sequence
  ENSG00000163590_39 (sequence is synthesized)
tgcaaggaacttgtgtatcaaggtgtatcttgattatcctgattttttttgttctctaagttgttgccagatctctcttgcaactgtgtcaatgaaaggtctgtgtttagaaaaggcagc

SEQ ID NO: 498734 - DNA, 120 bp, Artificial Sequence
  ENSG00000163590_40 (sequence is synthesized)
atatcattgtatatttgaaactataggaatatatactttgtataaaacttttccaatgatttcagaaattcttttttcctccttttgacccacaactagactgttcataccctaatagtt

SEQ ID NO: 498735 - DNA, 120 bp, Artificial Sequence
  ENSG00000163590_41 (sequence is synthesized)
ccccaaaattgccttagcatgtcacaccagcatttgtcatccagctctggagaaatgacatgactgttagatactatgcctgtttaattgcctctggattaagtcattgatagctagact

SEQ ID NO: 498736 - DNA, 120 bp, Artificial Sequence
  ENSG00000163590_42 (sequence is synthesized)
tttgagctagttagctgtagaaataatagaatccagtgtttcccaaagtgtgttccaaagaacacaagttccaaagatgctcttctaaatataggattctaggatgaaataagtttggaa

SEQ ID NO: 498737 - DNA, 120 bp, Artificial Sequence
  ENSG00000163590_43 (sequence is synthesized)
aacacataccatcttagaaagttagtgaacatgagcacatcaaaggctctaatttaaatgtcctgtgaggagagaaaaacacaacaaatatctactgtcagttagcccagtgttttccag

SEQ ID NO: 498738 - DNA, 120 bp, Artificial Sequence
  ENSG00000163590_44 (sequence is synthesized)
attaatttgaccacagaaacttttttgagtggcacctagtaacactgcaaggaacttgtgttctaaagaacaccctttgggaaattctggtatattgaaatattgctgtgttttcattca

SEQ ID NO: 498739 - DNA, 120 bp, Artificial Sequence
  ENSG00000163590_45 (sequence is synthesized)
gtatgacttaatatgaccaacagcagcctcatattgatagcagaacaatcctacttaaagctctaaacatcatccccccctttttttttttaacggaatctcgctctgtcacccaggctg

SEQ ID NO: 498740 - DNA, 120 bp, Artificial Sequence
  ENSG00000163590_46 (sequence is synthesized)
ccctttcttttatatgaataatgagcaagagccctgccatagctaaatatgtctcaaattcattccaagatctttccattgcttttttgcagttacctttgctttttgggttgaatcaaa

SEQ ID NO: 498741 - DNA, 120 bp, Artificial Sequence
  ENSG00000163590_47 (sequence is synthesized)
ctttgctttttgggttgaatcaaaatgaatatttttatatttcattactatatgatatttaaaaatatacagaaaatcacagaaaaggaaaaacagaaatttgattttaattcacttttg

SEQ ID NO: 498742 - DNA, 120 bp, Artificial Sequence
  ENSG00000163590_48 (sequence is synthesized)
atgatctgttatataataactgaaatgtaaactattaacagttatttactttctttcctttattgtcctctctggattcagtgaaataatttgaaatcaattagagctcataccttctaa

SEQ ID NO: 498743 - DNA, 120 bp, Artificial Sequence
  ENSG00000163590_49 (sequence is synthesized)
aactcctgtcccatatcatcccacctttcatgttttatgtacatagttaagtttggcatgttatctcttgcctaaaatgtgaggccttcctgtagttccacagtagttactcttggctgc

SEQ ID NO: 498744 - DNA, 120 bp, Artificial Sequence
  ENSG00000163590_50 (sequence is synthesized)
agaaataggtttgggaagctatgagagattaccccaaagtcatggatgaaacaaatctagtcgaaaacatggtacagagtgaattaaggcaaaagtcattaacttaaaattacatccaat

SEQ ID NO: 498745 - DNA, 120 bp, Artificial Sequence
  ENSG00000163590_51 (sequence is synthesized)
atttaggaatagctcatcctctgcacattatccaaaatattttaaaaaactaaaagtaagatctcttaggctaggtggcggattgcaaagggcagggggcagttgataccatgaagcttc

SEQ ID NO: 498746 - DNA, 120 bp, Artificial Sequence
  ENSG00000163590_52 (sequence is synthesized)
caatagatgcatttctaaacattttttctaatatgtaaatttgctgatccttagtaatgttaatgctttgtctatttgttatttttaccactgttgaacagcaaactgttgaggctaggg

SEQ ID NO: 498747 - DNA, 120 bp, Artificial Sequence
  ENSG00000163590_53 (sequence is synthesized)
ttgattattgataatttttatgtgtttagtaataaccacagcatcatacgtacaactgctttaataaatccaagttaaggactttgaggagagcatgtagcaagtattcattttaacaaa

SEQ ID NO: 498748 - DNA, 120 bp, Artificial Sequence
  ENSG00000163590_54 (sequence is synthesized)
tcatcacagacagtttccctgttcaaagctccaccaaaaagcaagcatgcagcaaaggcatagactgtatttagagatgtggtttcatttattcttgaagtcctataaccttgcattatt

SEQ ID NO: 498749 - DNA, 120 bp, Artificial Sequence
  ENSG00000163590_55 (sequence is synthesized)
taaacacaaaatcccacctaacatttgccaaatccaagttaatctcaaaaacctccgaggacattgagcacaagcagattactgtaagggcactggtggcagattgtggtggagagaggg

SEQ ID NO: 498750 - DNA, 120 bp, Artificial Sequence
  ENSG00000163590_56 (sequence is synthesized)
ctgagtgacccagagcaaagcctgcccgggttactcgctgccacttcaggagagggattgtatcagctctcattaccttttgtcatgaggcagttcataaattaaatatgatatcatgca

SEQ ID NO: 498751 - DNA, 120 bp, Artificial Sequence
  ENSG00000163590_57 (sequence is synthesized)
ttatctcaaaatatttctatattaattagataattcacgatgtaaaacgtgttcatgcagaagcaaaggcggatgtaatagtcaagtatcagggaaaaacccctttaggatacccagaca

SEQ ID NO: 498752 - DNA, 120 bp, Artificial Sequence
  ENSG00000163590_58 (sequence is synthesized)
ttaaaaatgtaaaaagtagcttataagaaatgtggattatcagatttttactatatataggttgtgtttaatagtaatttctgacacctgcacatagatgaagaaaaggcagttgttacc

SEQ ID NO: 498753 - DNA, 120 bp, Artificial Sequence
  ENSG00000163590_59 (sequence is synthesized)
acttttcaccattcaaaaaatgggcttgtctcttagagtattggttaatgctttgcttatttgttaatgaagacagcattttaattttaaagcttccttttgtaggactgatggcacggg

SEQ ID NO: 498754 - DNA, 120 bp, Artificial Sequence
  ENSG00000163590_60 (sequence is synthesized)
cagaatcacatttaagaaaaatggtttggaacactttttaataaaaaattgtaaaatcagtttccagtgtggtcaaaattagaatgtaaaggaaagcatttttaagaaaatacagaagcc

SEQ ID NO: 498755 - DNA, 120 bp, Artificial Sequence
  ENSG00000163590_61 (sequence is synthesized)
caaatcaagggagagtaatataaaaggaaatattttaaattaagaaaaggaggtgttatagtttattacatcatgaattatgctttctgtacttacgctcttagtgaaggagataacatt

SEQ ID NO: 498756 - DNA, 120 bp, Artificial Sequence
  ENSG00000163590_62 (sequence is synthesized)
gaagtgagaaaatgaacattctcagttatttgcgaagttagtaaaattgcagtccctattccatttttttctgatgaaaatggatacatgagatctcatttattgctctcctcaacacct

SEQ ID NO: 498757 - DNA, 120 bp, Artificial Sequence
  ENSG00000163590_63 (sequence is synthesized)
ttactgtcccagattccattcacgttccaaatcgtggacagtaaaactgaagtcagataaacacagtcacaggtacaactgggagcgagttttaacatagtggtaattttgcaaatgcca

SEQ ID NO: 498758 - DNA, 120 bp, Artificial Sequence
  ENSG00000163590_64 (sequence is synthesized)
acatgaatactagtgagtactcaatttacgacagacaatttcacaaaaaccaaccacagagtgatttgatattcttgcttcttagagagttttctaatccatataatgcaatgggtcagg

SEQ ID NO: 498759 - DNA, 120 bp, Artificial Sequence
  ENSG00000163590_65 (sequence is synthesized)
ttgctcatatgattaaaaaaattaatcctgtagaaatgatgtattagacatctctaacccaagaaaaagatgtcttttgtataacttttaaattcccatttgtctatcttaggacaaatg

SEQ ID NO: 498760 - DNA, 120 bp, Artificial Sequence
  ENSG00000163590_66 (sequence is synthesized)
atgacttcttcgtgtagtaatgaaaacgtctaaatcctgctctgtggagaaaagctagaaccatgggacattaagcaagaatactcctctgatttaggctcccagactacaactaacagt

SEQ ID NO: 498761 - DNA, 120 bp, Artificial Sequence
  ENSG00000163590_67 (sequence is synthesized)
ctttatgtatttatcatcttggttattgttttatctcaagcatatacagtgtgcagaaagtagaataatgaataaaatatgaccatggagaaaacccataacttttgcttctattataga

SEQ ID NO: 498762 - DNA, 120 bp, Artificial Sequence
  ENSG00000163590_68 (sequence is synthesized)
aagcagtgtttgttctttttaatttattacatgttcacattgaaacattaacatctacaatattgtctttcagtttactcttcaattactaaagcaaatgattttgatttatagcactta

SEQ ID NO: 498763 - DNA, 120 bp, Artificial Sequence
  ENSG00000163590_69 (sequence is synthesized)
cacaactgcagttcaggtcacagaattgaaatctatttgataatgtctcagcattctcatgggcagccaggaaaaaaaaaaagagagagaaagacaaatagaaattttagtgggttcaga

SEQ ID NO: 498764 - DNA, 120 bp, Artificial Sequence
  ENSG00000163590_70 (sequence is synthesized)
taaatgattattctgacaaacctggaaaatagtaattaaacagttcattccaaaagaccccaatgtaaactctgctcacatacataatttgtataaggaaaatgtatgagtttttttctt

SEQ ID NO: 498765 - DNA, 120 bp, Artificial Sequence
  ENSG00000163590_71 (sequence is synthesized)
aaaaataaatagaagcatcattgcatttataacagattgatcaatcttatgaacagattacattgggaaagtcactattattgctgtgtgtttgtatattttattctttccttttttgtg

SEQ ID NO: 498766 - DNA, 120 bp, Artificial Sequence
  ENSG00000163590_72 (sequence is synthesized)
tgagcatctactatgtgccaggcagtgactgtgtctgagtgaatgtatccatggtgagcactcaggcgccatcactgccttcttggggcttacaccctattggggtgtcagagatattat

SEQ ID NO: 498767 - DNA, 120 bp, Artificial Sequence
  ENSG00000163590_73 (sequence is synthesized)
aacactcaatattgacccaatgggatgaaaattgttatcttcatgatttcttccaatgggcttagatttgttgggacagggcagaattagaataattatttctcacatataagagtaagt

SEQ ID NO: 498768 - DNA, 120 bp, Artificial Sequence
  ENSG00000163590_74 (sequence is synthesized)
gatatgagattgggaatttcttgccaacactcaagcaaactgcagaagataattactccattttactagctcacctagtttctgaaggatggggtggggagtgagacatggagcctctgg

SEQ ID NO: 498769 - DNA, 120 bp, Artificial Sequence
  ENSG00000163590_75 (sequence is synthesized)
ggacaaggataggggggtgggactgtcccagtggagggtgccactggaagcctccacccaagtgggccagcagctgtgcaagggtgcagcagtaggctggtgaaagccaggttgtccaga

SEQ ID NO: 498770 - DNA, 120 bp, Artificial Sequence
  ENSG00000163590_76 (sequence is synthesized)
tctttctaggggaagagaaggattatagaaaaggagaaaagggaggagcaagaacatctctccatggcctatttttatttttgttcccaagagactagtgtaataaccttatgcccccaa

SEQ ID NO: 498771 - DNA, 120 bp, Artificial Sequence
  ENSG00000163590_77 (sequence is synthesized)
agacagcccagaactgagtatcttcagtgttcctgagtgtaaatcagtgaatctgttatatagaaagttaacatttcaggagcacaattatttcctgatttcaaatatgaacagaagact

SEQ ID NO: 498772 - DNA, 120 bp, Artificial Sequence
  ENSG00000163590_78 (sequence is synthesized)
aaatgtcatttttttaaatcataaatttggtatccatagttactttacacattccagagtctaagcatggaatttaagttttgtattttgaacaaaaatagcaacatctgttttctgtat

SEQ ID NO: 498773 - DNA, 120 bp, Artificial Sequence
  ENSG00000163590_79 (sequence is synthesized)
ggcaaagaaaaactaaatcccagacttttatttttaaccacagaaaccatcacttctttctaaattatttgcttgcctgctcatttcccctaaacatctctgtttatgccaatggctttt

SEQ ID NO: 498774 - DNA, 120 bp, Artificial Sequence
  ENSG00000163590_80 (sequence is synthesized)
taaatccaaataatactagttattgccaaattgcattagaatcctattgaattagaataattcatatacttcatatactaggcagtaaatggttagagacggtaaagatctgattgtgat

SEQ ID NO: 498775 - DNA, 120 bp, Artificial Sequence
  ENSG00000163590_81 (sequence is synthesized)
caaaagtagggtttttgttttgtttttaatcatgagcacatataaaaggaaattcaaatgaaaccaagccaatttctgatttagtaagattaaaaccatagatggagctcagttattaag

SEQ ID NO: 498776 - DNA, 120 bp, Artificial Sequence
  ENSG00000163590_82 (sequence is synthesized)
gatggaaaggaggaaagcacagagtgaggagagaaaaaggggaaggaaaaaaagtagtgtttttttggggaacagtataatgtctcagaagttcttctctcttatcctgctgatgttgag

SEQ ID NO: 498777 - DNA, 120 bp, Artificial Sequence
  ENSG00000163590_83 (sequence is synthesized)
acagtggctttgtataagcttttatttatacctatttcaacatcatgaaaatttttccatcagcattttcttgcaactttaaaaatcacaagggattatttgtttataaagagatacagg

SEQ ID NO: 498778 - DNA, 120 bp, Artificial Sequence
  ENSG00000163590_84 (sequence is synthesized)
atctataatttattggcaatactttattttaggaatcttcaaattgtacttaataaataaatcacaggtcaaaatgactgtaaaatcaatcaggctttctcgtaagttatttcctgaaaa

SEQ ID NO: 498779 - DNA, 120 bp, Artificial Sequence
  ENSG00000163590_85 (sequence is synthesized)
ccatccatgataaatacaacaaggcttggcgaaacctcattactcttggaagtcttcagaggttattatacctactgatctgtatttgtctctaagagacatttgaaacacagttacaat

SEQ ID NO: 498780 - DNA, 120 bp, Artificial Sequence
  ENSG00000163590_86 (sequence is synthesized)
gtcaatttggtgtaacattacctgtagtagagctcagagtatatggcagtgcacggtcactcaagatgcatggcgtgtcatttgggtcgctttgatgggtgctcgggtagaattagcctt

SEQ ID NO: 498781 - DNA, 120 bp, Artificial Sequence
  ENSG00000163590_87 (sequence is synthesized)
gtagagactaatgtgttcatgctatctctgatcctgtggtgttgtataaaaatgaacagctaaaaatttacccatgacaagattaaagcaaaaataaacacaaagttgttagactttaaa

SEQ ID NO: 498782 - DNA, 120 bp, Artificial Sequence
  ENSG00000163590_88 (sequence is synthesized)
atgcaggtggaagagggtaggagggatgctggtgccattagcagagagggctagaccagaacatgcctgctttttcaacacatgtaagaagtgcctttcatctcctgccatgattctgag

SEQ ID NO: 498783 - DNA, 120 bp, Artificial Sequence
  ENSG00000163590_89 (sequence is synthesized)
cggcaattcatgaatgtgacacttctcggtcatttctgtgttttggcagagcagacatcatcctagaggacaggaaatatctgatttctggattatctagaacctttcccaggccatctc

SEQ ID NO: 498784 - DNA, 120 bp, Artificial Sequence
  ENSG00000163590_90 (sequence is synthesized)
aagctgatttcaacatttggtgattgtctccagttaatgagctatacatatgatgtccgcttttattttcatcatcataaaccacagaaaaaaggggaaacagtataccagcaagtcagc

SEQ ID NO: 498785 - DNA, 120 bp, Artificial Sequence
  ENSG00000163590_91 (sequence is synthesized)
aagtccaaatcaagccatgactcagatttcctaagaaagaaaagatcagactctgctttgacatattctatcttaaattttgaaattactttggggacaacattaattatccaggcacaa

SEQ ID NO: 498786 - DNA, 120 bp, Artificial Sequence
  ENSG00000163590_92 (sequence is synthesized)
ccgggaggtgcctgggagaggcaggcagagcccagccggccgcctgcggctcagtaccgaccgtgccgcgtcgccgggctctgcgtacccctgtctctgcccaggctcccgcaaaacttt

SEQ ID NO: 498787 - DNA, 120 bp, Artificial Sequence
  ENSG00000163590_93 (sequence is synthesized)
tattctctggggcccccggggtgtgtgaaggaattggaaccttccgccatctccgcgctccccttcggcggcgaccgaggggacctgcgtccctcgtccgccgggctctggagccctgcg

SEQ ID NO: 498788 - DNA, 120 bp, Artificial Sequence
  ENSG00000163590_94 (sequence is synthesized)
cctcacctgctgatcgctctccggagtctcgagggggcacccccggagggaccgcgcgggcgccggcgcccctgaactctcccgctcaccgcggcagacccgcccagcgcaactttaact

SEQ ID NO: 498789 - DNA, 120 bp, Artificial Sequence
  ENSG00000163590_95 (sequence is synthesized)
tgattcttcttgcccaaccggggcaccagcggctgctgctgcggcggctgctgctaccgccgccgccgcggtctcacaaaggggctcagggaagggaggcggcgcgggcggcagggacgg

SEQ ID NO: 498790 - DNA, 120 bp, Artificial Sequence
  ENSG00000163590_96 (sequence is synthesized)
gcctccgggccgccgaggcggggagacaaaagggaagctgcctctgctcgcgctgcctgctcggagccgcttgctcggctgcctctggctgggctccgcgatcctctcccccaccctcgg

SEQ ID NO: 498791 - DNA, 120 bp, Artificial Sequence
  ENSG00000163590_97 (sequence is synthesized)
tcaattgaccgagaaatgctagaaaaattgactgtatcctatgatgaagcagttactttttgaatgactgcttggagactgcaagtaacaccttagcttcaaaatatctagttcatatta

SEQ ID NO: 498792 - DNA, 120 bp, Artificial Sequence
  ENSG00000163590_98 (sequence is synthesized)
attctaaactaatttcgattttaaacaaagactttgctttaatataccactattccctccccattctctgtgctgttgtcaaccaaattatatgcttatacattataatgtcatcaataa

SEQ ID NO: 498793 - DNA, 120 bp, Artificial Sequence
  ENSG00000163596_0 (sequence is synthesized)
aatgttctgaccggtttggtgtttgtcatttcactttattaagtaaagaggaaatcgggaaaggaggaatagagagggtccccgagttcattcaagagcagaccgagagatgctccgatc

SEQ ID NO: 498794 - DNA, 120 bp, Artificial Sequence
  ENSG00000163596_1 (sequence is synthesized)
ccgagtcgggccggtggcggggtcaggccggcgcccgaggggggcgaacgcggacgccaggtcgcgcggtttaaatctcccgcctcccgcagcgggagcctgacacctccacgcactggt

SEQ ID NO: 498795 - DNA, 120 bp, Artificial Sequence
  ENSG00000163596_2 (sequence is synthesized)
gcggaggggcactggctgccggagggccgggagtcggcgcggggctcgcgggcggtggccggaacgggtgccgggacggatcaccgtacggccgaacgcgacccgaggaggcggaagagc

SEQ ID NO: 498796 - DNA, 120 bp, Artificial Sequence
  ENSG00000163596_3 (sequence is synthesized)
ggcgccgtcactccatggattcctttgggcaacccagaccagaagataatcagtcagtagtcagaagaatgcaaaagaaatactggaaaactaaacaggtctttatcaaagcaacaggaa

SEQ ID NO: 498797 - DNA, 120 bp, Artificial Sequence
  ENSG00000163596_4 (sequence is synthesized)
aaaaagaggatgagcacttggtggcgtctgatgctgaactggatgctaaacttgaggtttttcactctgttcaagagacatgcactgaacttctgaagataatcgagaaataccagctaa

SEQ ID NO: 498798 - DNA, 120 bp, Artificial Sequence
  ENSG00000163596_5 (sequence is synthesized)
gactcaatgttatatcagaggaagaaaatgagctagggctctttttaaaatttcaagcagaacgggatgcaactcaagctggcaaaatgatggatgccactggcaaggcactttgttctt

SEQ ID NO: 498799 - DNA, 120 bp, Artificial Sequence
  ENSG00000163596_6 (sequence is synthesized)
cagccaagcaaagattggccctgtgtactcctctgtctcgtctgaagcaagaagtagcaacattcagtcaaagggcagtatctgataccttgatgacaattaatcggatggagcaggcac

SEQ ID NO: 498800 - DNA, 120 bp, Artificial Sequence
  ENSG00000163596_7 (sequence is synthesized)
gcacagaatacagaggagctctactgtggatgaaagatgtatcccaagagctggacccagacaccttaaagcaaatggaaaagtttagaaaagtacagatgcaagtgagaaatagcaaag

SEQ ID NO: 498801 - DNA, 120 bp, Artificial Sequence
  ENSG00000163596_8 (sequence is synthesized)
cttcttttgacaagttaaagatggatgtttgtcagaaagtggatttacttggagctagtcgctgcaatatgctatctcattcgctcactacctaccagagaacactgcttggattctgga

SEQ ID NO: 498802 - DNA, 120 bp, Artificial Sequence
  ENSG00000163596_9 (sequence is synthesized)
agaaaacagctcgaatgatgtcccaaattcatgaagcctgtattggctttcatccgtatgattttgtagctctcaagcaactacaagacacgccaagcaagattagtgaagacaataaag

SEQ ID NO: 498803 - DNA, 120 bp, Artificial Sequence
  ENSG00000163596_10 (sequence is synthesized)
atgaacaaataggcggttttcttactgaacagctcaataagctagttttgtctgatgaggaagcaagctttgagagtgaacaagcaaacaaagatcacaatgaaaaacattctcaaatga

SEQ ID NO: 498804 - DNA, 120 bp, Artificial Sequence
  ENSG00000163596_11 (sequence is synthesized)
gagaatttggagcacctcagttttctaactctgaaaatgttgcaaaagatctacctgtagattcattggaaggagaagattttgagaaggaattctcatttctgaacaacctcctaagtt

SEQ ID NO: 498805 - DNA, 120 bp, Artificial Sequence
  ENSG00000163596_12 (sequence is synthesized)
ctggttcttcaagtactagtgaatttacccaagaatgccagactgcctttgggagccccagtgccagtctcacatcccaggagccttccatggggtctgagcccctcgctcattcttctc

SEQ ID NO: 498806 - DNA, 120 bp, Artificial Sequence
  ENSG00000163596_13 (sequence is synthesized)
gattccttccttcacaactctttgaccttggctttcatgtggctggagcgttcaacaactgggtctcccaagaggaatcagaactttgtctttcacacactgataaccagccagtgcctt

SEQ ID NO: 498807 - DNA, 120 bp, Artificial Sequence
  ENSG00000163596_14 (sequence is synthesized)
cccagatgctattggacactcagatgatgaacttcttaatgcttgactgaagttataatgtcacttcagtggccttgagacatcaattttgcaacgtatttccttcgtggaaaggattta

SEQ ID NO: 498808 - DNA, 120 bp, Artificial Sequence
  ENSG00000163596_15 (sequence is synthesized)
gattgtaacccgcacacaaaagcacggtgtttgtgaatataacacctgtcagccaactttagacagatggtaaagaccacatttgaataagtacacatctttcatatcttggatttgcag

SEQ ID NO: 498809 - DNA, 120 bp, Artificial Sequence
  ENSG00000163596_16 (sequence is synthesized)
ctgttggtactatgtggaaaatattagaaacttctatgtggaaaatattagaaactacagagtttgcgatatttagatactgaaatttatgtcaaaataacggctaggaataattctgtc

SEQ ID NO: 498810 - DNA, 120 bp, Artificial Sequence
  ENSG00000163596_17 (sequence is synthesized)
aatatggagttgagcttatttctttggaaacccttttaagttgccttgctggctgtgagaattttatatgtggataacaaagatagatagatagcatgtaaattgggttgtggtttgggg

SEQ ID NO: 498811 - DNA, 120 bp, Artificial Sequence
  ENSG00000163596_18 (sequence is synthesized)
tcagtttttaaatgaaatagtagcgaggaggattttctgttttggaaaacaccattagaaccagaccagctttgttttgggttagagagagtaagatttgagaactcagtttgctttaat

SEQ ID NO: 498812 - DNA, 120 bp, Artificial Sequence
  ENSG00000163596_19 (sequence is synthesized)
gaaatcacagagaaacttggtacttgtttttcttcatttggaggctaaaatgtaatgttttttcattcatacaaaataatggacactccctaattccattattaaatcttgaaggggaag

SEQ ID NO: 498813 - DNA, 120 bp, Artificial Sequence
  ENSG00000163596_20 (sequence is synthesized)
tagcaggataattaatttgctaagcccatcctctgcagaaacagaaaaatctatcttcccatctcctaaaactcagaatgcacagtaatacttaaggcttgtacaagtgtcttcagaccc

SEQ ID NO: 498814 - DNA, 120 bp, Artificial Sequence
  ENSG00000163596_21 (sequence is synthesized)
actttttcatacacttgctatatagtagtatgcagtatttatattattcctgaaaataaaatgaggggagaatattccctaagcaactggcaatagtattcctgaaatacctagaaattt

SEQ ID NO: 498815 - DNA, 120 bp, Artificial Sequence
  ENSG00000163596_22 (sequence is synthesized)
ctatctgaatgagggagacacttatgaacaccttatccttacatatatttgcatacttatctcatattttgtgacataattatttaacccagaatactttctggcagacatacagaaagc

SEQ ID NO: 498816 - DNA, 120 bp, Artificial Sequence
  ENSG00000163596_23 (sequence is synthesized)
tctgtgtgatcaataagggagtgtctcatttttctacttccctctttctgtgggtgacatgatctgaggttctatttgattactaagcaaaatctgttacccctacagggtttagaacct

SEQ ID NO: 498817 - DNA, 120 bp, Artificial Sequence
  ENSG00000163596_24 (sequence is synthesized)
aagtattagagaggaaggctatttaatggaagttagtgtaagctgataaaaacgtagctaccgtacacacacatcaatcactcaatttcctgtccttttaaattgcccaccctttaattt

SEQ ID NO: 498818 - DNA, 120 bp, Artificial Sequence
  ENSG00000163596_25 (sequence is synthesized)
gcccaccctttaattttgaagcaatttcccaagtgtgtgtttgttttatatttgtcatccagtccattgcatttccataagaagacattttgactggctgggtgcggtggctcacgcttg

SEQ ID NO: 498819 - DNA, 120 bp, Artificial Sequence
  ENSG00000163596_26 (sequence is synthesized)
cgaggaggcggaagagcggcgccggcgacgtactgtaagacgatattactttaatcatcttcacatcagtatttatggaatagccacaggtgcctcatcctttagtaggagttaattata

SEQ ID NO: 498820 - DNA, 120 bp, Artificial Sequence
  ENSG00000163596_27 (sequence is synthesized)
aaaaaaaaaagacattttaactaagttattcacagtagcttccatgtgctcttagttctattctaaacaggcttatttagaaaaggattgcttgtaatgtttgtcatggtacatagaaaa

SEQ ID NO: 498821 - DNA, 120 bp, Artificial Sequence
  ENSG00000163596_28 (sequence is synthesized)
cattggaccagagtaggtaaaatgcagtccatgtcccatccatagccatctacaatagtaactgcccacaggctctccagaaaactactacaatggccaagtacagtataggctggaaag

SEQ ID NO: 498822 - DNA, 120 bp, Artificial Sequence
  ENSG00000163596_29 (sequence is synthesized)
accttatctgaaggtcagaaacattgactcagaaaaaaggtatgaagtctttccataaaatcttttcacaatattactcctatttcttttagattttaatgagccattacttatctcttc

SEQ ID NO: 498823 - DNA, 120 bp, Artificial Sequence
  ENSG00000163596_30 (sequence is synthesized)
agaagacttaagtcttcctttatactcagtgaaatttcccagaatgtaatactgtcactgttctgccaagttccaatcaccaagatcatgattacgaatcccaatctgaattctataccc

SEQ ID NO: 498824 - DNA, 90 bp, Artificial Sequence
  ENSG00000163596_31 (sequence is synthesized)
caagatcatgattacgaatcccaatctgaattctatacccatggtgactctgatgctctcaacttttgagtgcctcaaaaaatgctaaaa

SEQ ID NO: 498825 - DNA, 120 bp, Artificial Sequence
  ENSG00000163596_32 (sequence is synthesized)
aagctaactttatgtcttgagagtttgtaccatttttctttgtagtggtcaccttgctaatgcattagttctgagatatttatctccctcacatgtgtgcaaggaagtccctgttatcga

SEQ ID NO: 498826 - DNA, 120 bp, Artificial Sequence
  ENSG00000163596_33 (sequence is synthesized)
atacagatactttaacaagcagacaaagcagaaacccaaagtccatactaggaacaccctaaattttccaaaagcaaaagttctcccgaaatggagacatacaagggacttttattattc

SEQ ID NO: 498827 - DNA, 120 bp, Artificial Sequence
  ENSG00000163596_34 (sequence is synthesized)
tgttactagtttctataacatttcttctttcaacagagtatatgtttcccatttaacccagagcaacattaacttccttagcaagtccagttctaacttccaacaagtccaaccactgtt

SEQ ID NO: 498828 - DNA, 120 bp, Artificial Sequence
  ENSG00000163596_35 (sequence is synthesized)
tttgaagagcatatcagtaactatattaagatgaaggtaaccacattcgtattttctcaagattagttatttgaagctcagcagtttttgtggtcagaaagaaattttgctctattaaac

SEQ ID NO: 498829 - DNA, 120 bp, Artificial Sequence
  ENSG00000163596_36 (sequence is synthesized)
caatactgctaatataaaaaaccaccacactgaagaaacgagggaaaggacgggataagcacagaacagagaatgactggttgctttttgtctcaatctagataatccattcaataagaa

SEQ ID NO: 498830 - DNA, 120 bp, Artificial Sequence
  ENSG00000163596_37 (sequence is synthesized)
gtaaattaattatccttaaccaatggtaggctgagaacaaccctcaaaatagatattttttatgttaaatggggagaaatatctatactttatgttatactggataaaaatgtgttttaa

SEQ ID NO: 498831 - DNA, 120 bp, Artificial Sequence
  ENSG00000163596_38 (sequence is synthesized)
gtctaaaaaaaaccagacgagctaaactttgcctagtgtgtctacaaccattttttaggagacgcaggaataccagggcataataagatcagattggtgtaattttgtatgtttttgaaa

SEQ ID NO: 498832 - DNA, 120 bp, Artificial Sequence
  ENSG00000163596_39 (sequence is synthesized)
tccttcattaattgtagaaccttgatatgattagaaacaaactgtatttcaacaaacaggtttcagtatttgcacactgaaaaagtgttttgtattttaactataaatatttcacgtatc

SEQ ID NO: 498833 - DNA, 120 bp, Artificial Sequence
  ENSG00000163596_40 (sequence is synthesized)
tgtatagaccatctagaaatgtagaggtcttacagcattagaacgaaggaagtttacatgtgctctatctatttttctgagcctcttttaataaagattgcaagaaggcataaaacaaga

SEQ ID NO: 498834 - DNA, 120 bp, Artificial Sequence
  ENSG00000163596_41 (sequence is synthesized)
ggggccttgctggcctcctcggttctctgggggaccccggccgctgcctgcggccttcttccaggcgaggccctgctcggggttcttccggcctccccccaggcaaaacccgcaaggagc

SEQ ID NO: 498835 - DNA, 120 bp, Artificial Sequence
  ENSG00000163596_42 (sequence is synthesized)
ggtttctggcgtggctgggtcccctgcggcggaagggcgcctcccggccacgctcgctgtagtgaaggagcgcggcagcctggggctcgtttgggtgatttccctcggcggtggaggtcg

SEQ ID NO: 498836 - DNA, 120 bp, Artificial Sequence
  ENSG00000163596_43 (sequence is synthesized)
ttacctcaagatcatagtattaggaaagtacattgagttgatacggacatgggagaacgaaaataaaaccagggcaattaatatccttgtaaggccaggcgcggtagctcacgcctatat

SEQ ID NO: 498837 - DNA, 120 bp, Artificial Sequence
  ENSG00000163596_44 (sequence is synthesized)
agactccgtctcaaaagaaaatccttgtgagatgaattcgttcttatttcatatacaaggggactatgtaagatatgggaaataatataatgtacgttatttatgtaaatactttcagta

SEQ ID NO: 498838 - DNA, 120 bp, Artificial Sequence
  ENSG00000163596_45 (sequence is synthesized)
acaaaaactaacaaatatcaaaaatctgagcctagacacaaacaattaaatataagccatagtatgtaacctgacttattgaaggcaggaataaaaagaagagagccagaattgattcag

SEQ ID NO: 498839 - DNA, 120 bp, Artificial Sequence
  ENSG00000163596_46 (sequence is synthesized)
ttatttttgtcttccatagtgttggcagggccctgcatttctctaccttgagcaatgaagcagtcccagaattttggaatatagaaattaggaaggaaaaacgaactttaaaatattaat

SEQ ID NO: 498840 - DNA, 120 bp, Artificial Sequence
  ENSG00000163596_47 (sequence is synthesized)
ttagtagaactgaaagtaatgcatttcatgcaacagtaaagtgcttaaacatggcaaagaaaactaagggacaagataagaaaaatggttggtaaagatgggtcacatccagaagcccaa

SEQ ID NO: 498841 - DNA, 120 bp, Artificial Sequence
  ENSG00000163596_48 (sequence is synthesized)
cataagctatttttccatctttttctgtaccatttaaaagactactaaagagttcaaaacaaactgtccttggcatttaaagtcaaaacatggttcttcactcagtggtgtaaattaact

SEQ ID NO: 498842 - DNA, 120 bp, Artificial Sequence
  ENSG00000163596_49 (sequence is synthesized)
actcattggccaaagagtaaatacaaaaaggagatgaagttctgactggtgttgtgggtgagattttgcagtgtatgtttttacatttgtagtgtacgttttaaacttccggttttcttg

SEQ ID NO: 498843 - DNA, 120 bp, Artificial Sequence
  ENSG00000163596_50 (sequence is synthesized)
ctgcctcaacatctccacaaacaggctgtgagcacctggcccagtgtgatatgggtggcccctgccacaagtttcccttgctaccttgcccatgacctagtaacatttaaatgcaccagt

SEQ ID NO: 498844 - DNA, 120 bp, Artificial Sequence
  ENSG00000163596_51 (sequence is synthesized)
gaaattctctttttcttgtgtgcttctccctgacccaaaggctcctgcccatgtcttaggcctctccgctccccacctgcttggctgagccccctcccatgtgaccccctctcagcatgc

SEQ ID NO: 498845 - DNA, 120 bp, Artificial Sequence
  ENSG00000163596_52 (sequence is synthesized)
agtgactggtctctctaggacctgtgagtatattacaactttttttcctgtgtctctcctgtgatatctcttgtggctaaacctcactgaccataacctaaaaaaacacatacaaaaaac

SEQ ID NO: 498846 - DNA, 120 bp, Artificial Sequence
  ENSG00000163596_53 (sequence is synthesized)
atgaaagaaaaagttgtttcttgagctggcctggacgaacggggagccaggggctcgaccctggctgttggaggcgcagtgaggcctggtctccggctgccagaccacgctgagcggagc

SEQ ID NO: 498847 - DNA, 120 bp, Artificial Sequence
  ENSG00000163596_54 (sequence is synthesized)
gcgcggcaggctcgcctcagcgctgcggggaacgcgcgcgccgccgtccgcggtcgcccgtaggtgcctgcacgcgtcggggtcacggcctttggccgacaggagcgagaagactcagga

SEQ ID NO: 498848 - DNA, 120 bp, Artificial Sequence
  ENSG00000163596_55 (sequence is synthesized)
gccgccccgcgccttcgatccggcgctgctggagttcctggtgtgcccgctctccaagaagccgctcagatatgaagcatcaacaaatgaattgattaatgaagagttgagaatagctta

SEQ ID NO: 498849 - DNA, 120 bp, Artificial Sequence
  ENSG00000163596_56 (sequence is synthesized)
tccaatcattgatgggattcctaatattatcatattaggcagctaggatgacacatcaaagaagcaagaagtggagcagcgctagttcataatttaaaaaaataaaacagccaactcttc

SEQ ID NO: 498850 - DNA, 120 bp, Artificial Sequence
  ENSG00000163596_57 (sequence is synthesized)
ttagtaccatataccttttaaaacacagtggcaagtaataagcggaagagaagaatctttctgtctctttctacgttgactgttcttattccactggtttatttagcaggactgttccac

SEQ ID NO: 498851 - DNA, 120 bp, Artificial Sequence
  ENSG00000163596_58 (sequence is synthesized)
tcagcctctgtagaagaaaacttcccacagggctgcacttgcacagctagcctttgcttttacagcctgctcttgcctattaccataccggtgtatgtattcttccacctttggacctgg

SEQ ID NO: 498852 - DNA, 120 bp, Artificial Sequence
  ENSG00000163596_59 (sequence is synthesized)
atggttattaaactcttcatgcataactgatgcaactagagtcaatatgctgtatatattaatgatagctcttgggcatctatctctgaaagctcaaatggatggaatttagtttgtggg

SEQ ID NO: 498853 - DNA, 120 bp, Artificial Sequence
  ENSG00000163596_60 (sequence is synthesized)
aaagaggctttgctttgagcatatcaggcttaggactgtggacggcttaagttgcagacgcttcttttattgtactcttgttctgcccgtgttttttgaaggctctgacataactgcttt

SEQ ID NO: 498854 - DNA, 120 bp, Artificial Sequence
  ENSG00000163596_61 (sequence is synthesized)
atcagaagaaacattttgacagtgtcttgttggagataaacatccctaattgacatgtgatgactacttcttattccattcatctaagagtcattgaaattttgttttctttgtttgttt

SEQ ID NO: 498855 - DNA, 120 bp, Artificial Sequence
  ENSG00000163596_62 (sequence is synthesized)
agcttcaaggtctttggtagtcacatgttagggatgactgaaataattccaaaggagtgatgttggaatagtccctctaagggaaagaaatgcatttgaacgaatgtgatataaaaccac

SEQ ID NO: 498856 - DNA, 120 bp, Artificial Sequence
  ENSG00000163596_63 (sequence is synthesized)
ataatcaaatagaaatttcatgtacttacaaaaatttagtttgtaaaattaccttcatttctttgacattaaatgcttatattagcaataaagatgttgacactttctcataaaaaattt

SEQ ID NO: 498857 - DNA, 120 bp, Artificial Sequence
  ENSG00000163596_64 (sequence is synthesized)
gtcactaaaaatcagtccttctcaaagcgaggtccatggattcactgtgtcgaaaccatctggagtgctgataagaagccagattccctagacctatggaaagtagagtctctggaaatg

SEQ ID NO: 498858 - DNA, 120 bp, Artificial Sequence
  ENSG00000163596_65 (sequence is synthesized)
gagcccaggaattgcatttaaaaaataagtctctcttcttcttcccctaagtaaatcttgtatagagagttattgctgtgagatttttagttgtgtgtatgttttaaacaaatgatgaaa

SEQ ID NO: 498859 - DNA, 120 bp, Artificial Sequence
  ENSG00000163596_66 (sequence is synthesized)
agatacctgatgctctaaggaagacggagaggggaaagcggggagtccatcctggcagctcacccgcgatgctggggcgttgccagtagagggggtggaatcatttttcgtgtaatagat

SEQ ID NO: 498860 - DNA, 120 bp, Artificial Sequence
  ENSG00000163596_67 (sequence is synthesized)
gatcttgatgcacacagcataaaagctgttataaactatgggtctctgtaaaatagattgttgggaaggtaacatttttccatggttttgatttttcccaaaagtatttatgtattgatt

SEQ ID NO: 498861 - DNA, 120 bp, Artificial Sequence
  ENSG00000163596_68 (sequence is synthesized)
atagttatctatctgataatccccatttaaaataaatattagcattttttaaaatgaaagatttaatgtaaaaacaattttgtgaatagcttcttatggcaaaatatgaatatttacagt

SEQ ID NO: 498862 - DNA, 120 bp, Artificial Sequence
  ENSG00000163596_69 (sequence is synthesized)
tacctgttctcaaaggccccagtattctctcttctttcctcagttaatcaaatcctctgacccagatttattttttgctgatattttttttctttgagacagggtctttctctgtcactc

SEQ ID NO: 498863 - DNA, 120 bp, Artificial Sequence
  ENSG00000163596_70 (sequence is synthesized)
gacccgaggaggcggaagagcggcgccgggaagcctctggtgattcagttacctctgactggcttgttgaatttaattttagtgctcggttatgaagattatttggctctcacaattttt

SEQ ID NO: 498864 - DNA, 88 bp, Artificial Sequence
  ENSG00000163596_71 (sequence is synthesized)
agtgctcggttatgaagattatttggctctcacaattttttgagatggggtctcactgtgtccctctggctgtagtgcagtggcacat

SEQ ID NO: 498865 - DNA, 120 bp, Artificial Sequence
  ENSG00000163596_72 (sequence is synthesized)
tgaataattttttacttgtagattcatcttgttagcaaatatgctttttcattggtttaaacctttgttttgttttacttatgatgtgttcaaccctctgatttttacctctctgccatt

SEQ ID NO: 498866 - DNA, 120 bp, Artificial Sequence
  ENSG00000163596_73 (sequence is synthesized)
aatagaggcggcggcggatcacccgaacagccttcaggtgcttccctgctgacctctttttaacgtggtgcttatttttatttcgctattattttgtaatgggaatgtcttccttagaaa

SEQ ID NO: 498867 - DNA, 120 bp, Artificial Sequence
  ENSG00000163596_74 (sequence is synthesized)
aggggctccgcgcacagatcctgctccttaggccggcaacccgaccccacggcacagatatggctcctggaaacgcgcgtcagctggtcaggtgcccaggcgacgtactgtaagacgata

SEQ ID NO: 498868 - DNA, 120 bp, Artificial Sequence
  ENSG00000163596_75 (sequence is synthesized)
tagataaggaaataaaacatttccaataaagctgaagtctcatcccacccatccgttatcaggctggagtgcagtggcatgatcgtagtttactgtaaccttgaactcctgggctcaagc

SEQ ID NO: 498869 - DNA, 120 bp, Artificial Sequence
  ENSG00000163596_76 (sequence is synthesized)
agaatgcacgggcccgcgaggggctccgcgcacagatcctgctccttaggccggcaacccgaccccacggcacagatatggctcctggaaacgcgcgtcagctggtcaggtgcccagtca

SEQ ID NO: 498870 - DNA, 120 bp, Artificial Sequence
  ENSG00000163596_77 (sequence is synthesized)
actggctgccggagggccgggagtcggcgcggggctcgcgggcggtggccggaacgggtgccgggacggatcaccgtacggccgaacgcgacccgaggaggcggaagagcggcgccgtat

SEQ ID NO: 498871 - DNA, 120 bp, Artificial Sequence
  ENSG00000163599_0 (sequence is synthesized)
gctttctattcaagtgccttctgtgtgtgcacatgtgtaatacatatctgggatcaaagctatctatataaagtccttgattctgtgtgggttcaaacacatttcaaagcttcaggatcc

SEQ ID NO: 498872 - DNA, 120 bp, Artificial Sequence
  ENSG00000163599_1 (sequence is synthesized)
tgaaaggttttgctctacttcctgaagacctgaacaccgctcccataaagccatggcttgccttggatttcagcggcacaaggctcagctgaacctggctaccaggacctggccctgcac

SEQ ID NO: 498873 - DNA, 120 bp, Artificial Sequence
  ENSG00000163599_2 (sequence is synthesized)
tctcctgttttttcttctcttcatccctgtcttctgcaaagcaatgcacgtggcccagcctgctgtggtactggccagcagccgaggcatcgccagctttgtgtgtgagtatgcatctcc

SEQ ID NO: 498874 - DNA, 120 bp, Artificial Sequence
  ENSG00000163599_3 (sequence is synthesized)
aggcaaagccactgaggtccgggtgacagtgcttcggcaggctgacagccaggtgactgaagtctgtgcggcaacctacatgatggggaatgagttgaccttcctagatgattccatctg

SEQ ID NO: 498875 - DNA, 120 bp, Artificial Sequence
  ENSG00000163599_4 (sequence is synthesized)
cacgggcacctccagtggaaatcaagtgaacctcactatccaaggactgagggccatggacacgggactctacatctgcaaggtggagctcatgtacccaccgccatactacctgggcat

SEQ ID NO: 498876 - DNA, 120 bp, Artificial Sequence
  ENSG00000163599_5 (sequence is synthesized)
aggcaacggaacccagatttatgtaattgatccagaaccgtgcccagattctgacttcctcctctggatccttgcagcagttagttcggggttgtttttttatagctttctcctcacagc

SEQ ID NO: 498877 - DNA, 120 bp, Artificial Sequence
  ENSG00000163599_6 (sequence is synthesized)
tgtttctttgagcaaaatgctaaagaaaagaagccctcttacaacaggggtctatgtgaaaatgcccccaacagagccagaatgtgaaaagcaatttcagccttattttattcccatcaa

SEQ ID NO: 498878 - DNA, 120 bp, Artificial Sequence
  ENSG00000163599_7 (sequence is synthesized)
ttgagaaaccattatgaagaagagagtccatatttcaatttccaagagctgaggcaattctaacttttttgctatccagctatttttatttgtttgtgcatttggggggaattcatctct

SEQ ID NO: 498879 - DNA, 120 bp, Artificial Sequence
  ENSG00000163599_8 (sequence is synthesized)
ggatgtttctgtcacatcagctccactttcagtgaaagcatcacttgggattaatatggggatgcagcattatgatgtgggtcaaggaattaagttagggaatggcacagcccaaagaag

SEQ ID NO: 498880 - DNA, 120 bp, Artificial Sequence
  ENSG00000163599_9 (sequence is synthesized)
gaaaaggcagggagcgagggagaagactatattgtacacaccttatatttacgtatgagacgtttatagccgaaatgatcttttcaagttaaattttatgccttttatttcttaaacaaa

SEQ ID NO: 498881 - DNA, 120 bp, Artificial Sequence
  ENSG00000163599_10 (sequence is synthesized)
ccttttatttcttaaacaaatgtatgattacatcaaggcttcaaaaatactcacatggctatgttttagccagtgatgctaaaggttgtattgcatatatacatatatatatatatatat

SEQ ID NO: 498882 - DNA, 120 bp, Artificial Sequence
  ENSG00000163599_11 (sequence is synthesized)
atatatatatatatatattttaatttgatagtattgtgcatagagccacgtatgtttttgtgtatttgttaatggtttgaatataaacactatatggcagtgtctttccaccttgggtcc

SEQ ID NO: 498883 - DNA, 120 bp, Artificial Sequence
  ENSG00000163599_12 (sequence is synthesized)
cagggaagttttgtggaggagctcaggacactaatacaccaggtagaacacaaggtcatttgctaactagcttggaaactggatgaggtcatagcagtgcttgattgcgtggaattgtgc

SEQ ID NO: 498884 - DNA, 120 bp, Artificial Sequence
  ENSG00000163599_13 (sequence is synthesized)
tgagttggtgttgacatgtgctttggggcttttacaccagttcctttcaatggtttgcaaggaagccacagctggtggtatctgagttgacttgacagaacactgtcttgaagacaatgg

SEQ ID NO: 498885 - DNA, 120 bp, Artificial Sequence
  ENSG00000163599_14 (sequence is synthesized)
cttactccaggagacccacaggtatgaccttctaggaagctccagttcgatgggcccaattcttacaaacatgtggttaatgccatggacagaagaaggcagcaggtggcagaatggggt

SEQ ID NO: 498886 - DNA, 120 bp, Artificial Sequence
  ENSG00000163599_15 (sequence is synthesized)
gcatgaaggtttctgaaaattaacactgcttgtgtttttaactcaatattttccatgaaaatgcaacaacatgtataatatttttaattaaataaaaatctgtggtggtcgttttccgga

SEQ ID NO: 498887 - DNA, 120 bp, Artificial Sequence
  ENSG00000163599_16 (sequence is synthesized)
ctgtcttctgcaaagctaaagaaaagaagccctcttacaacaggggtctatgtgaaaatgcccccaacagagccagaatgtgaaaagcaatttcagccttattttattcccatcaattga

SEQ ID NO: 498888 - DNA, 120 bp, Artificial Sequence
  ENSG00000163599_17 (sequence is synthesized)
tcgccagctttgtgtctaaagaaaagaagccctcttacaacaggggtctatgtgaaaatgcccccaacagagccagaatgtgaaaagcaatttcagccttattttattcccatcaattga

SEQ ID NO: 498889 - DNA, 120 bp, Artificial Sequence
  ENSG00000163599_18 (sequence is synthesized)
tctcttactatatgtgaaaaaaatgaaggacatgggggaagtgtgacttgccccaaatcacatatttcatggtagagccaggtcttctgtttgtcatatcagtgttcttcctgccacaac

SEQ ID NO: 498890 - DNA, 120 bp, Artificial Sequence
  ENSG00000163600_0 (sequence is synthesized)
cgagagcctgaattcactgtcagctttgaacactgaacgcgaggactgttaactgtttctggcaaacatgaagtcaggcctctggtatttctttctcttctgcttgcgcattaaagtttt

SEQ ID NO: 498891 - DNA, 120 bp, Artificial Sequence
  ENSG00000163600_1 (sequence is synthesized)
aacaggagaaatcaatggttctgccaattatgagatgtttatatttcacaacggaggtgtacaaattttatgcaaatatcctgacattgtccagcaatttaaaatgcagttgctgaaagg

SEQ ID NO: 498892 - DNA, 120 bp, Artificial Sequence
  ENSG00000163600_2 (sequence is synthesized)
ggggcaaatactctgcgatctcactaagacaaaaggaagtggaaacacagtgtccattaagagtctgaaattctgccattctcagttatccaacaacagtgtctctttttttctatacaa

SEQ ID NO: 498893 - DNA, 120 bp, Artificial Sequence
  ENSG00000163600_3 (sequence is synthesized)
cttggaccattctcatgccaactattacttctgcaacctatcaatttttgatcctcctccttttaaagtaactcttacaggaggatatttgcatatttatgaatcacaactttgttgcca

SEQ ID NO: 498894 - DNA, 120 bp, Artificial Sequence
  ENSG00000163600_4 (sequence is synthesized)
gctgaagttctggttacccataggatgtgcagcctttgttgtagtctgcattttgggatgcatacttatttgttggcttacaaaaaagaagtattcatccagtgtgcacgaccctaacgg

SEQ ID NO: 498895 - DNA, 120 bp, Artificial Sequence
  ENSG00000163600_5 (sequence is synthesized)
tgaatacatgttcatgagagcagtgaacacagccaaaaaatctagactcacagatgtgaccctataatatggaactctggcacccaggcatgaagcacgttggccagttttcctcaactt

SEQ ID NO: 498896 - DNA, 120 bp, Artificial Sequence
  ENSG00000163600_6 (sequence is synthesized)
gaagtgcaagattctcttatttccgggaccacggagagtctgacttaactacatacatcttctgctggtgttttgttcaatctggaagaatgactgtatcagtcaatggggattttaaca

SEQ ID NO: 498897 - DNA, 120 bp, Artificial Sequence
  ENSG00000163600_7 (sequence is synthesized)
gactgccttggtactgccgagtcctctcaaaacaaacaccctcttgcaaccagctttggagaaagcccagctcctgtgtgctcactgggagtggaatccctgtctccacatctgctccta

SEQ ID NO: 498898 - DNA, 120 bp, Artificial Sequence
  ENSG00000163600_8 (sequence is synthesized)
gcagtgcatcagccagtaaaacaaacacatttacaagaaaaatgttttaaagatgccaggggtactgaatctgcaaagcaaatgagcagccaaggaccagcatctgtccgcatttcacta

SEQ ID NO: 498899 - DNA, 120 bp, Artificial Sequence
  ENSG00000163600_9 (sequence is synthesized)
tcatactacctcttctttctgtagggatgagaattcctcttttaatcagtcaagggagatgcttcaaagctggagctattttatttctgagatgttgatgtgaactgtacattagtacat

SEQ ID NO: 498900 - DNA, 120 bp, Artificial Sequence
  ENSG00000163600_10 (sequence is synthesized)
actcagtactctccttcaattgctgaaccccagttgaccattttaccaagactttagatgctttcttgtgccctcaattttctttttaaaaatacttctacatgactgcttgacagccca

SEQ ID NO: 498901 - DNA, 120 bp, Artificial Sequence
  ENSG00000163600_11 (sequence is synthesized)
cactctcaatagagagctatgtcttacattctttcctctgctgctcaatagttttatatatctatgcatacatatatacacacatatgtatataaaattcataatgaatatatttgccta

SEQ ID NO: 498902 - DNA, 120 bp, Artificial Sequence
  ENSG00000163600_12 (sequence is synthesized)
tattctccctacaagaatatttttgctccagaaagacatgttcttttctcaaattcagttaaaatggtttactttgttcaagttagtggtaggaaacattgcccggaattgaaagcaaat

SEQ ID NO: 498903 - DNA, 120 bp, Artificial Sequence
  ENSG00000163600_13 (sequence is synthesized)
ttattttattatcctattttctaccattatctatgttttcatggtgctattaattacaagtttagttctttttgtagatcatattaaaattgcaaacaaaatcatctttaatgggccagc

SEQ ID NO: 498904 - DNA, 120 bp, Artificial Sequence
  ENSG00000163600_14 (sequence is synthesized)
attctcatggggtagagcagaatattcatttagcctgaaagctgcagttactataggttgctgtcagactatacccatggtgcctctgggcttgacaggtcaaaatggtccccatcagcc

SEQ ID NO: 498905 - DNA, 120 bp, Artificial Sequence
  ENSG00000163600_15 (sequence is synthesized)
tggagcagccctccagacctgggtggaattccagggttgagagactcccctgagccagaggccactaggtattcttgctcccagaggctgaagtcaccctgggaatcacagtggtctacc

SEQ ID NO: 498906 - DNA, 120 bp, Artificial Sequence
  ENSG00000163600_16 (sequence is synthesized)
tgcattcataattccaggatctgtgaagagcacatatgtgtcagggcacaattccctctcataaaaaccacacagcctggaaattggccctggcccttcaagatagccttctttagaata

SEQ ID NO: 498907 - DNA, 120 bp, Artificial Sequence
  ENSG00000163600_17 (sequence is synthesized)
tgatttggctagaaagattcttaaatatgtggaatatgattattcttagctggaatattttctctacttcctgtctgcatgcccaaggcttctgaagcagccaatgtcgatgcaacaaca

SEQ ID NO: 498908 - DNA, 120 bp, Artificial Sequence
  ENSG00000163600_18 (sequence is synthesized)
tttgtaactttaggtaaactgggattatgttgtagtttaacattttgtaactgtgtgcttatagtttacaagtgagacccgatatgtcattatgcatacttatattatcttaagcatgtg

SEQ ID NO: 498909 - DNA, 120 bp, Artificial Sequence
  ENSG00000163600_19 (sequence is synthesized)
taatgctggatgtgtacagtacagtactgaacttgtaatttgaatctagtatggtgttctgttttcagctgacttggacaacctgactggctttgcacaggtgttccctgagttgtttgc

SEQ ID NO: 498910 - DNA, 120 bp, Artificial Sequence
  ENSG00000163600_20 (sequence is synthesized)
aggtttctgtgtgtggggtggggtatggggaggagaaccttcatggtggcccacctggcctggttgtccaagctgtgcctcgacacatcctcatccccagcatgggacacctcaagatga

SEQ ID NO: 498911 - DNA, 120 bp, Artificial Sequence
  ENSG00000163600_21 (sequence is synthesized)
ataataattcacaaaatttctgtgaaatcaaatccagttttaagaggagccacttatcaaagagattttaacagtagtaagaaggcaaagaataaacatttgatattcagcaactgaaaa

SEQ ID NO: 498912 - DNA, 120 bp, Artificial Sequence
  ENSG00000163602_0 (sequence is synthesized)
gccaaaaagacaagcgaaacctgccgcagacgaagggttttgggattgtagcgtctgcaccttcagaaacagtgctgaagcctttaaatgcagcatctgcgatgtgaggaaaggcacctc

SEQ ID NO: 498913 - DNA, 120 bp, Artificial Sequence
  ENSG00000163602_1 (sequence is synthesized)
caccagaaaacctcggatcaattctcagctggtggcacaacaagtggcacaacagtatgccaccccaccaccccctaaaaaggagaagaaggagaaagttgaaaagcaggacaaagagaa

SEQ ID NO: 498914 - DNA, 120 bp, Artificial Sequence
  ENSG00000163602_2 (sequence is synthesized)
acctgagaaagacaaggaaattagtcctagtgttaccaagaaaaataccaacaagaaaaccaaaccaaagtctgacattctgaaagatcctcctagtgaagcaaacagcatacagtctgc

SEQ ID NO: 498915 - DNA, 120 bp, Artificial Sequence
  ENSG00000163602_3 (sequence is synthesized)
aaatgctacaacaaagaccagcgaaacaaatcacacctcaaggccccggctgaaaaacgtggacaggagcactgcacagcagttggcagtaactgtgggcaacgtcaccgtcattatcac

SEQ ID NO: 498916 - DNA, 120 bp, Artificial Sequence
  ENSG00000163602_4 (sequence is synthesized)
agactttaaggaaaagactcgctcctcatcgacatcctcatccacagtgacctccagtgcagggtcagaacagcagaaccagagcagctcggggtcagagagcacagacaagggctcctc

SEQ ID NO: 498917 - DNA, 120 bp, Artificial Sequence
  ENSG00000163602_5 (sequence is synthesized)
ccgttcctccacgccaaagggcgacatgtcagcagtcaatgatgaatctttctgaaattgcacatggaattgtgaaaactatgaatcagggtatgaaattcaaaacctccacctgcccat

SEQ ID NO: 498918 - DNA, 120 bp, Artificial Sequence
  ENSG00000163602_6 (sequence is synthesized)
gctgcttgcatccctggagaatcttctgtggacatcgacctcttagtgatgctgccaggataatttctgcttgccatgggcatctggccaccaaggaatttcgcaccctgacgattactc

SEQ ID NO: 498919 - DNA, 120 bp, Artificial Sequence
  ENSG00000163602_7 (sequence is synthesized)
ttgacacttttatgtattccattgttttatatgattttcctaacaatcatttataattggatgtgctcctgaatctactttttataaaaaaaaaaaaatctgctgtgcacaattttccat

SEQ ID NO: 498920 - DNA, 120 bp, Artificial Sequence
  ENSG00000163602_8 (sequence is synthesized)
gtacattacaactggttttttgtttttgttttgttgccggtggggagggctgggagggggagggaacttttatttattgtgttcacaaactccatcctttcagcatatccttttaagttt

SEQ ID NO: 498921 - DNA, 120 bp, Artificial Sequence
  ENSG00000163602_9 (sequence is synthesized)
agttctttcttccagttatactatgtactatcagttttgatataactatatatatataaatataaaattatatataaagggttatttgaaaccaatccatggcaacgctggtgcttgata

SEQ ID NO: 498922 - DNA, 120 bp, Artificial Sequence
  ENSG00000163602_10 (sequence is synthesized)
cactgtgaagtgaatacaacattgaacagttacagatctgggacagtcccttctatgaaagtgctgaaatttaattaaaatcagtcttatatgaagtatgttccaatccatgtgggaact

SEQ ID NO: 498923 - DNA, 120 bp, Artificial Sequence
  ENSG00000163602_11 (sequence is synthesized)
tgactctctcatctgtctaaagagtactggacgatataaaaatatatattttttaaacaatgtgatctcaaatttaaagactgctccagatagcctgcatttgcaatggaataactgaca

SEQ ID NO: 498924 - DNA, 120 bp, Artificial Sequence
  ENSG00000163602_12 (sequence is synthesized)
aatcacaagtggtttagttgggcagggctttgatcattcaaaagtaactaaagtagctccagaatgccaagtattcgtgtaaattacggttacatgttatcatttgctgttcttacataa

SEQ ID NO: 498925 - DNA, 120 bp, Artificial Sequence
  ENSG00000163602_13 (sequence is synthesized)
gcactcatgaaaatatggtattctgtaacttgaattccatccattttccagacctctactcatgtctgaggtaaatctagaaattgtcttagttttaggattgaaacagtctataaactg

SEQ ID NO: 498926 - DNA, 120 bp, Artificial Sequence
  ENSG00000163602_14 (sequence is synthesized)
tatttttggtccatccaggaagctagtcccttgtttctcctttctacatgacattgcagtggtggtttctgtaattaaaatttgtttgcctcatgtccctttgtctgataaaccttcact

SEQ ID NO: 498927 - DNA, 120 bp, Artificial Sequence
  ENSG00000163602_15 (sequence is synthesized)
ctaccgattcagttgtgagcattctttttttccttctcaaaacctactatgatttgttttactgaacaaaggttatcaaccacacatccagtcctgacatggagcttttcagtgtttgga

SEQ ID NO: 498928 - DNA, 120 bp, Artificial Sequence
  ENSG00000163602_16 (sequence is synthesized)
gacatttctcaatcccctgctgtggtaggaactccagtggtgaacggcttgcgcgcctgcagccagagttgcagggaaagctcgtacttactgcgagcagcatgtaatcttttttcttcc

SEQ ID NO: 498929 - DNA, 120 bp, Artificial Sequence
  ENSG00000163602_17 (sequence is synthesized)
gcgagcagcatgtaatcttttttcttcctggacataaagatagcttgagtaaactgttctatttcattctcttcactctttttactgtcttgcaaaaaaaaaaaaaaaaaaaataatcaa

SEQ ID NO: 498930 - DNA, 120 bp, Artificial Sequence
  ENSG00000163602_18 (sequence is synthesized)
tattaaaataattttttaaaattttgttttgcttttgtttggatgtggggtctctcttctatttgacttttacatttagatacagagtttgtagtacttcagagacatttcaagcatgag

SEQ ID NO: 498931 - DNA, 120 bp, Artificial Sequence
  ENSG00000163602_19 (sequence is synthesized)
aatttgaggttacctctctttatttgacctttagggactcacgggagggcagcctgatttgtaatgaagcaccacattttggtgttaaaaacctggtttgcttaataatagcagtaattt

SEQ ID NO: 498932 - DNA, 120 bp, Artificial Sequence
  ENSG00000163602_20 (sequence is synthesized)
ctgtctgtggaggcaacaaataaaaaaattaacagcttgaattgagtagccaacaggaaaggttcctttcacatttacattaaaactattctgtagtcactaatgtaccataatttaaat

SEQ ID NO: 498933 - DNA, 120 bp, Artificial Sequence
  ENSG00000163602_21 (sequence is synthesized)
tcttttctcaaaggtatagattataaagcagtgccatttgttgctgtggtcctattctcaaatgcatggacaatgttcccccctttttaaaataatgcttgtgtctgggatgcaagcttt

SEQ ID NO: 498934 - DNA, 120 bp, Artificial Sequence
  ENSG00000163602_22 (sequence is synthesized)
gcttatctttttaaatacatttttaaagtatttattaatgaaccaaaggaaatcagatgctttctataagcatcagaatatataatacatagtgatttgactatgaattttaaatccaca

SEQ ID NO: 498935 - DNA, 120 bp, Artificial Sequence
  ENSG00000163602_23 (sequence is synthesized)
ttttaatattggtgggatattgcaaagacattccttctaaagttttaatattccttttattaagggtctcagggagggtaaattagtcagccatatttattttccagaggtttaagaaat

SEQ ID NO: 498936 - DNA, 120 bp, Artificial Sequence
  ENSG00000163602_24 (sequence is synthesized)
tgctgtttttaactttttgaaaaaacttaaatgccaccaaactcatgtaggttgcactgcttattgaaccaataactgttggtatgcactttgttcagacacactgtgtactttttcaaa

SEQ ID NO: 498937 - DNA, 120 bp, Artificial Sequence
  ENSG00000163602_25 (sequence is synthesized)
aactagtttcatgtaaagtgattggaccccatagattagtggaaaaagctgattaaccagctactcataggctgctaattcattcatgccaatgttttggtttttcagttttgcctccgt

SEQ ID NO: 498938 - DNA, 120 bp, Artificial Sequence
  ENSG00000163602_26 (sequence is synthesized)
gataaattaaagaatggggaggggtgaaggaaggggaagaagattgctttagaacaagtggcatgaaattaccatctttgtagaaaccgcagctaacagtgggagttatctaagcaatca

SEQ ID NO: 498939 - DNA, 120 bp, Artificial Sequence
  ENSG00000163602_27 (sequence is synthesized)
gatgttacagggccagccctttagctgctgtggtgtattctgttgggtagtgaggtagtaggtactttatagacttttaattttggaaattgatgacatccctcaggcatgtattctgga

SEQ ID NO: 498940 - DNA, 120 bp, Artificial Sequence
  ENSG00000163602_28 (sequence is synthesized)
aatggaattcctgtaacttcctgtgtctgcagtatgccctacaattagtaggcagcgtgtaaaaacactagtgtagattataaagatatacattaaaagaggaccagaaatacttggtat

SEQ ID NO: 498941 - DNA, 120 bp, Artificial Sequence
  ENSG00000163602_29 (sequence is synthesized)
tcagtggcacagaaagcaggttaaacaaacaaaaagcacagtgttacgcttgcaagtttccatttgttttaataccacgcaatctttcacactcgtgcgtgtgcgcgcacacagagctta

SEQ ID NO: 498942 - DNA, 120 bp, Artificial Sequence
  ENSG00000163602_30 (sequence is synthesized)
ttgagtcatgcagttacaaaaaaaaagacatcttgacacccacacaatattctaatcaaaacctttcagtttcaatctggatatttaaaaacattggcagaagcttctgtgagtttagtt

SEQ ID NO: 498943 - DNA, 120 bp, Artificial Sequence
  ENSG00000163602_31 (sequence is synthesized)
ccactaagatgtttcacctgccttatcaagaccattctcagtctacttttttaagctaccgtatcttaaattattgaaaatttattaattgctgaatatataataacctttgcttgtatg

SEQ ID NO: 498944 - DNA, 120 bp, Artificial Sequence
  ENSG00000163602_32 (sequence is synthesized)
taaccgaaaatggtttaagagccaacatttagagtatgacaatggagctgaacagtttttaatgcgcaagcagttctgttcttgtgtatgacttgtaaccttaatttactgtgtaaagat

SEQ ID NO: 498945 - DNA, 120 bp, Artificial Sequence
  ENSG00000163602_33 (sequence is synthesized)
ggttacattatttccttagctttgtttgttggagacaaatagagaatgcttgttaagtatgtcaaaacaatcttatcttgtgaatttttgttaatgtattatacgagctatatttttcat

SEQ ID NO: 498946 - DNA, 120 bp, Artificial Sequence
  ENSG00000163602_34 (sequence is synthesized)
ttgcccagaaagacagcttgtataacgcttttggaagtttctgctctgtaatgtctttagagctgacagtctgttaggtttgtttttttcttcatgctaaagtgtcagttggtggttttg

SEQ ID NO: 498947 - DNA, 120 bp, Artificial Sequence
  ENSG00000163602_35 (sequence is synthesized)
tgaactggtcaaaaattcacaggtcttaaatgttttgggggaaatttatattggacactgctctttgtctagcaaataaaagatgttaatatattcctgttactggcatgtgcacgacta

SEQ ID NO: 498948 - DNA, 120 bp, Artificial Sequence
  ENSG00000163602_36 (sequence is synthesized)
tgttattagaagccactttatcattttcctgctttaaatagaaatgtctatttatgaattctgcttgtagttttttcacaaataaaatagtaaaatttacattggaaatctttatttttg

SEQ ID NO: 498949 - DNA, 120 bp, Artificial Sequence
  ENSG00000163602_37 (sequence is synthesized)
tgtgtatagattttagcctttagaataatagttaatttttaatctgtggaatatttccaatgtgaataggaagctcactttgtattttagaacttgtttatcagaagctgaaatagctgg

SEQ ID NO: 498950 - DNA, 120 bp, Artificial Sequence
  ENSG00000163602_38 (sequence is synthesized)
gtatcttaagtacatacctcaaagatgcaaaaggagacataatggggcaaaagaatcaccaaaatttgaaagaaaatgaactgtctcctaagtgtaacctttgagatagattgcaatgat

SEQ ID NO: 498951 - DNA, 120 bp, Artificial Sequence
  ENSG00000163602_39 (sequence is synthesized)
gtaaaggaaggaaatgggatttaaggaaagaaaatggagatgatgctaaaatatgctaattgaggactgaaaatcctcaaaagacaacccctgtttctggccaactggatttaggtcaac

SEQ ID NO: 498952 - DNA, 120 bp, Artificial Sequence
  ENSG00000163602_40 (sequence is synthesized)
tatgtctcagagatgtgaataaagtgtgttactaacctaaaagccacacaagctcacttattgccccatgcgagggagactcctgcctgctgctgcaggtgctgaggcataccagtctat

SEQ ID NO: 498953 - DNA, 120 bp, Artificial Sequence
  ENSG00000163602_41 (sequence is synthesized)
aaccttccaaagaattaagaaaccacttaaaacatgtcaagatccatccccgattattttgtcctgggtctgcacctgaactagcactggaaggaagagagtgtaaatagcgcaggatgt

SEQ ID NO: 498954 - DNA, 120 bp, Artificial Sequence
  ENSG00000163602_42 (sequence is synthesized)
tgagttgaaaatgggtctgttctgataaaacagcaagttccattcttcgtcctcattttttagtactgaacgtgacccaagtttggcccctcagaagtcttggaaaggatctggaagggt

SEQ ID NO: 498955 - DNA, 120 bp, Artificial Sequence
  ENSG00000163602_43 (sequence is synthesized)
tgaaggacagggattggatggggtctctcatgtttcccacaggccattttggatacagacgtgcgatctgctaaccccatgcccctctgcttgcttttgtgcctgaggagttcactgtga

SEQ ID NO: 498956 - DNA, 120 bp, Artificial Sequence
  ENSG00000163602_44 (sequence is synthesized)
gggcccccactgctggtggcactggtaccatcctttggaggaggatgggaattgtctcccataccaggtgtggaccaaagcaagcacttggtctttacaggggaggcacaaggaagagtc

SEQ ID NO: 498957 - DNA, 120 bp, Artificial Sequence
  ENSG00000163602_45 (sequence is synthesized)
gtttctttccagttgtgtggacggaaagggaggcaaaaaggttttctctaatcctcagccaaactctagtgttaacaccaagtgtccagatccccattgagaaatcccatggctagagtg

SEQ ID NO: 498958 - DNA, 120 bp, Artificial Sequence
  ENSG00000163602_46 (sequence is synthesized)
tgacaggatcatggaagcagctcttgctcaattattcttgatcaagggtggaatgacgacttcagccagcaagggcccaggcttgtgctctctgatttcatagccctacggcgtggaaat

SEQ ID NO: 498959 - DNA, 120 bp, Artificial Sequence
  ENSG00000163602_47 (sequence is synthesized)
ggaaaccagccagactccaccttgggcagtgaagagaacataagggacgtccaggaggcccttggtctagcacgcccctgacctcccagcggttctggaaggccactcctaacccttcaa

SEQ ID NO: 498960 - DNA, 120 bp, Artificial Sequence
  ENSG00000163602_48 (sequence is synthesized)
accatagcaaggaaggttagagctatctttgtgttaggatcaaaactcgagaaggttctgtttgctaaccactgaaggaagcccacggcctgtctttagggcttctgtcaggagaggaca

SEQ ID NO: 498961 - DNA, 120 bp, Artificial Sequence
  ENSG00000163602_49 (sequence is synthesized)
atggacatagacaactagatactgcaggagggctctggttttctcagacaggatcctaggatgtgtctggaagcctgcggagtgaaggtagacatgcaggtgtgatgttctgcctgatag

SEQ ID NO: 498962 - DNA, 120 bp, Artificial Sequence
  ENSG00000163602_50 (sequence is synthesized)
tgcctctctccaggcattaactacaaggctgggtgggggcttactgtaaggcatcgagtccctaagcatttatacagtcccaattgtgcatcagtgcagtgctggttataacagggaaga

SEQ ID NO: 498963 - DNA, 120 bp, Artificial Sequence
  ENSG00000163602_51 (sequence is synthesized)
atttgtggaggggagggcacaggctgaaattggcccattcctacacatgctcttgacctagacctagagtaagtgacattgaccccaaccgtccccctacccacctccagcttgtgccag

SEQ ID NO: 498964 - DNA, 120 bp, Artificial Sequence
  ENSG00000163602_52 (sequence is synthesized)
acatcactaatcagtcacagcgcttctttccagctgaatccagactcagaatcctcattagagctcattgttagcacgtcttcctgaagtgcaacccatttgccattccttccctggacg

SEQ ID NO: 498965 - DNA, 120 bp, Artificial Sequence
  ENSG00000163602_53 (sequence is synthesized)
aaacccaccccaaataactgggaaacccttcaaggcagtttttaatcaacacttcaattgtggaactgcatgaatccaagaaggccagctgagaagctcggaggagtcaggaaggaagaa

SEQ ID NO: 498966 - DNA, 120 bp, Artificial Sequence
  ENSG00000163602_54 (sequence is synthesized)
aactaaatatccaacacccaactcttcaaagagttcaacttcctgttcaaaacagggtcagaccaggggattcttagtgaggccagtgatgagcactgtaactttaaatgcagccctgaa

SEQ ID NO: 498967 - DNA, 120 bp, Artificial Sequence
  ENSG00000163602_55 (sequence is synthesized)
ccccagacctgaaggcctgccagtgtcttaccctacaggccagaccgggacctacttgcccaagctgtcctactggttctgtcaaccgggggctctcaaataacagagtagaacaccaca

SEQ ID NO: 498968 - DNA, 120 bp, Artificial Sequence
  ENSG00000163602_56 (sequence is synthesized)
tggatatgattcctggaaaccacagaactaggtgagactcctacctctgactgcctgggtgtccttgggcaagtcagctgaccgggccatttccctcagttgtcaagtagggattagagg

SEQ ID NO: 498969 - DNA, 120 bp, Artificial Sequence
  ENSG00000163602_57 (sequence is synthesized)
tgtatgtgctcctactgtgttctctgctccaaggaatcatggcgcagtgctcccagaggtgggttgtgtgttaccatgtttttaacaacgggaagcaaaaactttatttgaactttcatt

SEQ ID NO: 498970 - DNA, 120 bp, Artificial Sequence
  ENSG00000163602_58 (sequence is synthesized)
ctgatgcttcactgatgacaccggaaatgaagataatttgttttgtgattgttttattgtgttttcaagttttaattcatgaattttcctgtactaaaacaaagagcaaagttggttaaa

SEQ ID NO: 498971 - DNA, 120 bp, Artificial Sequence
  ENSG00000163602_59 (sequence is synthesized)
gcctgcatgtaaataaagtccagtgggatttttgacacctgcttgacgtttctatgtctacaaacagtgttgtaatgaatacggcctttcatcattaaacattcgattttttaaaaatga

SEQ ID NO: 498972 - DNA, 120 bp, Artificial Sequence
  ENSG00000163605_0 (sequence is synthesized)
gggcgccatgttggagggttggtggtagcggcttggggaggtgctcgctctgtcggtcttgctctctcgcacgcttcccccggctcccttcgtttcccccccccggtcgcctgcgtgccg

SEQ ID NO: 498973 - DNA, 120 bp, Artificial Sequence
  ENSG00000163605_1 (sequence is synthesized)
gagtgtgtgcgagggagggggagggcgtcgggggggtggggggaggcgttccggtccccaagagacccgcggagggaggcggaggctgtgagggactccgggaagccatggacgtcgaga

SEQ ID NO: 498974 - DNA, 120 bp, Artificial Sequence
  ENSG00000163605_2 (sequence is synthesized)
ggctccaggaggcgctgaaagattttgagaagagggggaaaaaggaagtttgtcctgtcctggatcagtttctttgtcatgtagccaagactggagaaacaatgattcagtggtcccaat

SEQ ID NO: 498975 - DNA, 120 bp, Artificial Sequence
  ENSG00000163605_3 (sequence is synthesized)
ttaaaggctattttattttcaaactggagaaagtgatggatgatttcagaacttcagctcctgagccaagaggtcctcccaaccctaatgtcgaatatattccctttgatgaaatgaagg

SEQ ID NO: 498976 - DNA, 120 bp, Artificial Sequence
  ENSG00000163605_4 (sequence is synthesized)
aaagaatactgaaaattgtcactggatttaatggtatcccttttactattcagcgactatgtgaattgttaacagatccaaggagaaactatacaggaacagacaaatttctcagaggag

SEQ ID NO: 498977 - DNA, 120 bp, Artificial Sequence
  ENSG00000163605_5 (sequence is synthesized)
tagaaaagaatgtgatggttgttagctgtgtttatccttcttcagagaaaaacaattccaatagtttaaatcgaatgaatggtgttatgtttcctggaaattcaccaagctatactgaga

SEQ ID NO: 498978 - DNA, 120 bp, Artificial Sequence
  ENSG00000163605_6 (sequence is synthesized)
ggtctaatataaatgggcctgggacacccaggccacttaatcgaccaaaggtttctttgtcagcccccatgacaacaaatgggttgcctgagagcacagacagcaaagaggcaaatttgc

SEQ ID NO: 498979 - DNA, 120 bp, Artificial Sequence
  ENSG00000163605_7 (sequence is synthesized)
agcaaaatgaggagaaaaatcacagtgactcttcgacctctgaatcagaagtttcctcagtgagccctttgaaaaataaacatccagatgaagatgctgtggaagctgaggggcatgagg

SEQ ID NO: 498980 - DNA, 120 bp, Artificial Sequence
  ENSG00000163605_8 (sequence is synthesized)
taaaaagactcaggtttgacaaagaaggtgaagtcagagaaacagccagtcaaacgacttccagcgaaatttcttcagttatggtaggagaaacagaagcatcatcttcatctcaggata

SEQ ID NO: 498981 - DNA, 120 bp, Artificial Sequence
  ENSG00000163605_9 (sequence is synthesized)
aagacaaagatagccgttgtacccggcagcactgtacagaagaggatgaagaagaggatgaagaggaagaagaagagtcttttatgacatcaagagaaatgatcccagaaagaaaaaatc

SEQ ID NO: 498982 - DNA, 120 bp, Artificial Sequence
  ENSG00000163605_10 (sequence is synthesized)
aagaaaaagaatctgatgatgccttaactgtgaatgaagagacttctgaggaaaataatcaaatggaggaatctgatgtgtctcaagctgagaaagatttgctacattctgaaggtagtg

SEQ ID NO: 498983 - DNA, 120 bp, Artificial Sequence
  ENSG00000163605_11 (sequence is synthesized)
aaaacgaaggccctgtaagtagtagttcttctgactgccgtgaaacagaagaattagtaggatccaattccagtaaaactggagagattctttcagaatcatccatggaaaatgatgacg

SEQ ID NO: 498984 - DNA, 120 bp, Artificial Sequence
  ENSG00000163605_12 (sequence is synthesized)
aagccacagaagtcaccgatgaaccaatggaacaagactaactatttagaaacatttagatgcagtattttacatacagttctggttttaacactgtataaaacttttgtgtaataaaat

SEQ ID NO: 498985 - DNA, 120 bp, Artificial Sequence
  ENSG00000163605_13 (sequence is synthesized)
ggacctttagttttacaagagaagcaggttgtaaaataaagtactttatggataattcctgaaagagttgtacatgtaagaactgtgaatatcagctcctctgggtcctgcttaccttac

SEQ ID NO: 498986 - DNA, 120 bp, Artificial Sequence
  ENSG00000163605_14 (sequence is synthesized)
cgctgacttttctttctttctttttttggtctgggcaaatcagtggtttgtgtatagatttttttttttttttaatttaggattgaagtttttaaactggaaagtaattacaattttgaa

SEQ ID NO: 498987 - DNA, 120 bp, Artificial Sequence
  ENSG00000163605_15 (sequence is synthesized)
aagttttttgagattatcacatttagtttatacatatgcaagaagctttttgtcttgtctctttctgatagctctagcagttttcatattttggtcatagtttcaacattttaacatgtg

SEQ ID NO: 498988 - DNA, 120 bp, Artificial Sequence
  ENSG00000163605_16 (sequence is synthesized)
atagtttcaacattttaacatgtgaattatagggtttcatgctggtttccagattttattgtttggctacgtacaatggaactttaagtcatatatacatacatatatatatatatatat

SEQ ID NO: 498989 - DNA, 120 bp, Artificial Sequence
  ENSG00000163605_17 (sequence is synthesized)
tatatttttctgtttctataagagatgaatacagtggatactttttctattggtaatgattgagttcacctctttcagaagacattttctttctcttctgagtaattgaaataaaatctg

SEQ ID NO: 498990 - DNA, 120 bp, Artificial Sequence
  ENSG00000163605_18 (sequence is synthesized)
gcccttgtgaaaccctggaaatcttaagtctgttgaaataccaggttaaacacattccaagagatctgttcaaactcaaattcttttgtatacttctgaggtgcctgagaaaaagacttc

SEQ ID NO: 498991 - DNA, 120 bp, Artificial Sequence
  ENSG00000163605_19 (sequence is synthesized)
attatttatgagaaaatatgctttatcttggaaattgtgttcaaatgttagcttactattttgtagaatgaatgtttatgaagctgatatgagaccatctcagaagaaccaagtaggttc

SEQ ID NO: 498992 - DNA, 120 bp, Artificial Sequence
  ENSG00000163605_20 (sequence is synthesized)
ttacacatgtctttctaaattattctagggtatgcaaatgtcaatggtatgaaacaccactgtactggaagaattaatatattactttagtatgtacctgagctaaatgactgaagcttt

SEQ ID NO: 498993 - DNA, 120 bp, Artificial Sequence
  ENSG00000163605_21 (sequence is synthesized)
aggggtgcatagaaaccaccataatttgtatgacattttgaagtgaattaaatatttttgaacatgcttcttcgacagccagtgttatatttttcagatcaacacaaagcacaatgatta

SEQ ID NO: 498994 - DNA, 120 bp, Artificial Sequence
  ENSG00000163605_22 (sequence is synthesized)
ctcgaaattcagtattttcaaatttacatatttaaagtcatgcaagctgtaacttccctgtcaaaattactggctgccaaatttatacctgtttcttcagctgtaccttttgatatttaa

SEQ ID NO: 498995 - DNA, 120 bp, Artificial Sequence
  ENSG00000163605_23 (sequence is synthesized)
agtttttaaatttctgtaaagtagattttgtagaatgtaatgtgttcactgcctttgtgaagcggtatataattgtataatttctgtgtgtaaactgaatgcttgggctttcaatacagt

SEQ ID NO: 498996 - DNA, 120 bp, Artificial Sequence
  ENSG00000163605_24 (sequence is synthesized)
attcatataaagcaataaatattaatgttatgaaatatttgactacatttttatcaaaatatgaaagaatccccccttttttagtttcagatacctgaactacacagatgagcttctaaa

SEQ ID NO: 498997 - DNA, 120 bp, Artificial Sequence
  ENSG00000163605_25 (sequence is synthesized)
actgatgcaaacagtttctgacactgtataatatgcttttgggtgatttggggggcaaccacaagttttgcgttttgactacttaaatcatcatggctataaataccaaaacgatttgga

SEQ ID NO: 498998 - DNA, 120 bp, Artificial Sequence
  ENSG00000163605_26 (sequence is synthesized)
tccatttatgtttgtaggataatatactactgactgacttgactgtcaggttcacaacagctagatgatatatttatgactatgtctaatagttgaaataaaatctgaatattgatttac

SEQ ID NO: 498999 - DNA, 120 bp, Artificial Sequence
  ENSG00000163605_27 (sequence is synthesized)
tatacccaagaggggagaaaaattaaccattgtaaatttttaaaaaatttttcaaaaatgttaaaatgaggcaaatttaagtttacaaattttgaaattttcttttgaatatttatgaaa

SEQ ID NO: 499000 - DNA, 120 bp, Artificial Sequence
  ENSG00000163605_28 (sequence is synthesized)
ttgtcagtaaacttacctaagatcctgtgaccttttgatattttttattttaattgtagtgccatggaccatttgtaaacaaattgatttacttttgttggttgtaagttgaagatttag

SEQ ID NO: 499001 - DNA, 120 bp, Artificial Sequence
  ENSG00000163605_29 (sequence is synthesized)
cattatgactttgaggtctgtggttttatttgtaaacttgcaattgctatatttgcaagggcaaatgtatttctttattaaataaagtacaataatggtgaatgtaccaaaatgacatca

SEQ ID NO: 499002 - DNA, 120 bp, Artificial Sequence
  ENSG00000163605_30 (sequence is synthesized)
atcacttaactctatgagagatctgcattttaatctatagtttaatagttttaatatttattagatattcatatgttgatcatagatcaaacttgttgctgtttatacagataattgtag

SEQ ID NO: 499003 - DNA, 120 bp, Artificial Sequence
  ENSG00000163605_31 (sequence is synthesized)
ctcatggaatatctttagggtaggtggaatacttctgtagttaaattgggaaaccttgttcagctggttttagatattgatggccatttggaagtaaatttccgcaggtattcataggtg

SEQ ID NO: 499004 - DNA, 120 bp, Artificial Sequence
  ENSG00000163605_32 (sequence is synthesized)
cacttaacacagactttgcttaatgaaaatgtcagttctaatagtaactgattcacttctgaacagaagtgattttaggcatatttcttaacatatatcaagcaaagtcctgttaaaaga

SEQ ID NO: 499005 - DNA, 120 bp, Artificial Sequence
  ENSG00000163605_33 (sequence is synthesized)
tctaaatgaagaatggagacctcagtgattaaagatattttgtttctgaccttgagcagattgcttacctgttctctagactataacccaacatgtaaaaaaaatttgaagatggtgatg

SEQ ID NO: 499006 - DNA, 120 bp, Artificial Sequence
  ENSG00000163605_34 (sequence is synthesized)
aggaaagtgagatatatatatatatatgtattatgtttctagcacttttcccttttaaaaagtgaaaatatccttgtacatttttgaaaaatatattttcagttctgaaaaatgtagcag

SEQ ID NO: 499007 - DNA, 120 bp, Artificial Sequence
  ENSG00000163605_35 (sequence is synthesized)
aagtagtgaaaatgtcatattttaaatgttgattattagataaatttaacctgcttagggtttattgtaactacacctttcagacgtgtgttttggagtagtggaattgccagccaggcc

SEQ ID NO: 499008 - DNA, 120 bp, Artificial Sequence
  ENSG00000163605_36 (sequence is synthesized)
ctgtggcttggaaaggcatcccagaaatcctcggccagaaggtgtggcttgttaaagcattgagattcagagtattttgttttgccggtgtagataggcatgtatttatgcatttttgca

SEQ ID NO: 499009 - DNA, 120 bp, Artificial Sequence
  ENSG00000163605_37 (sequence is synthesized)
tttgtaaaatcaacttttcaaataatgtaaatgtaatatactagtttacttaaaggtacttgggcagaatctaaagctgctacaatgtttgattatgaaaaaaatgtaacatggtaagga

SEQ ID NO: 499010 - DNA, 120 bp, Artificial Sequence
  ENSG00000163605_38 (sequence is synthesized)
tgaaaatgcaacttacaaaaccaaaggaattaaaaattttcggtagtgtttcaaattgtcttctgaacaggaatttaacattggttttgatgaaggtgagggtcagttctcaagatttgt

SEQ ID NO: 499011 - DNA, 120 bp, Artificial Sequence
  ENSG00000163605_39 (sequence is synthesized)
gctaatcataaaatgaatgaatgcaaaacaccttgtaatttcatatggaattataaaaattaggtttgctgggttttggcctaataagagtgctagtatgtattggttagactacatctt

SEQ ID NO: 499012 - DNA, 120 bp, Artificial Sequence
  ENSG00000163605_40 (sequence is synthesized)
actatttcacattttaaaaatcagtacactcttcaggattttcttttatttcaacttggagcctagattactttgccaaatgtattattttcataatgcaataaaatataaattagaata

SEQ ID NO: 499013 - DNA, 120 bp, Artificial Sequence
  ENSG00000163605_41 (sequence is synthesized)
agtaaggagatcctcaaattcttgtacttcatttttttcgtgaaagaattttacgtaatggaactccttataatgctgatgttgggcttttctcccacctgtatgtagttgctgctgaat

SEQ ID NO: 499014 - DNA, 120 bp, Artificial Sequence
  ENSG00000163605_42 (sequence is synthesized)
tactatatttaatcattttattgcttctaatatattattcttaaaatagactgaatttatttaatatgtaattaagtgtgataacatacttgtgaacctaccattcagtccccaaagtag

SEQ ID NO: 499015 - DNA, 120 bp, Artificial Sequence
  ENSG00000163605_43 (sequence is synthesized)
aatattactaataacattatctatatgttttttccattaaagagatttggattaaagagattggtgatttactgtaattttaatattgttggatttacatactgtggtggcactcattgc

SEQ ID NO: 499016 - DNA, 120 bp, Artificial Sequence
  ENSG00000163605_44 (sequence is synthesized)
cctgagatgccattctagatgcctttccagggtgtctctagggcataattcccatgtttggaataactacttgatggcttttctctttatgatggaaaatatttccagttgtcaagattt

SEQ ID NO: 499017 - DNA, 120 bp, Artificial Sequence
  ENSG00000163606_0 (sequence is synthesized)
atacaggaaatctattgctgtgtcaagttccagagaaaagcttctgttcgtccaagttactaaccaggctaaaccacatagacgtgaaggaaggggctagaaggaagggagtgccccact

SEQ ID NO: 499018 - DNA, 120 bp, Artificial Sequence
  ENSG00000163606_1 (sequence is synthesized)
gttgatggggtaagaggatcctgtactgagaagttgaccagagagggtctcaccatgcgcacagttccttctgtacctgtgtggaggaaaagtactgagtgaagggcagaaaaagagaaa

SEQ ID NO: 499019 - DNA, 120 bp, Artificial Sequence
  ENSG00000163606_2 (sequence is synthesized)
acagaaatgctctgcccttggagaactgctaacctagggctactgttgattttgactatcttcttagtggccgaagcggagggtgctgctcaaccaaacaactcattaatgctgcaaact

SEQ ID NO: 499020 - DNA, 120 bp, Artificial Sequence
  ENSG00000163606_3 (sequence is synthesized)
agcaaggagaatcatgctttagcttcaagcagtttatgtatggatgaaaaacagattacacagaactactcgaaagtactcgcagaagttaacacttcatggcctgtaaagatggctaca

SEQ ID NO: 499021 - DNA, 120 bp, Artificial Sequence
  ENSG00000163606_4 (sequence is synthesized)
aatgctgtgctttgttgccctcctatcgcattaagaaatttgatcataataacatgggaaataatcctgagaggccagccttcctgcacaaaagcctacaagaaagaaacaaatgagacc

SEQ ID NO: 499022 - DNA, 120 bp, Artificial Sequence
  ENSG00000163606_5 (sequence is synthesized)
aaggaaaccaactgtactgatgagagaataacctgggtctccagacctgatcagaattcggaccttcagattcgtaccgtggccatcactcatgacgggtattacagatgcataatggta

SEQ ID NO: 499023 - DNA, 120 bp, Artificial Sequence
  ENSG00000163606_6 (sequence is synthesized)
acacctgatgggaatttccatcgtggatatcacctccaagtgttagttacacctgaagtgaccctgtttcaaaacaggaatagaactgcagtatgcaaggcagttgcagggaagccagct

SEQ ID NO: 499024 - DNA, 120 bp, Artificial Sequence
  ENSG00000163606_7 (sequence is synthesized)
gcgcatatctcctggatcccagagggcgattgtgccactaagcaagaatactggagcaatggcacagtgactgttaagagtacatgccactgggaggtccacaatgtgtctaccgtgacc

SEQ ID NO: 499025 - DNA, 120 bp, Artificial Sequence
  ENSG00000163606_8 (sequence is synthesized)
tgccacgtctcccatttgactggcaacaagagtctgtacatagagctacttcctgttccaggtgccaaaaaatcagcaaaattatatattccatatatcatccttactattattattttg

SEQ ID NO: 499026 - DNA, 120 bp, Artificial Sequence
  ENSG00000163606_9 (sequence is synthesized)
accatcgtgggattcatttggttgttgaaagtcaatggctgcagaaaatataaattgaataaaacagaatctactccagttgttgaggaggatgaaatgcagccctatgccagctacaca

SEQ ID NO: 499027 - DNA, 120 bp, Artificial Sequence
  ENSG00000163606_10 (sequence is synthesized)
gagaagaacaatcctctctatgatactacaaacaaggtgaaggcatctgaggcattacaaagtgaagttgacacagacctccatactttataagttgttggactctagtaccaagaaaca

SEQ ID NO: 499028 - DNA, 120 bp, Artificial Sequence
  ENSG00000163606_11 (sequence is synthesized)
acaacaaacgagatacattataattactgtctgattttcttacagttctagaatgaagacttatattgaaattaggttttccaaggttcttagaagacattttaatggattctcattcat

SEQ ID NO: 499029 - DNA, 120 bp, Artificial Sequence
  ENSG00000163606_12 (sequence is synthesized)
acccttgtataattggaatttttgattcttagctgctaccagctagttctctgaagaactgatgttattacaaagaaaatacatgcccatgaccaaatattcaaattgtgcaggacagta

SEQ ID NO: 499030 - DNA, 120 bp, Artificial Sequence
  ENSG00000163606_13 (sequence is synthesized)
aataatgaaaaccaaatttcctcaagaaataactgaagaaggagcaagtgtgaacagtttcttgtgtatcctttcagaatattttaatgtacatatgacatgtgtatatgcctatggtat

SEQ ID NO: 499031 - DNA, 120 bp, Artificial Sequence
  ENSG00000163606_14 (sequence is synthesized)
atgtgtcaatttatgtgtccccttacatatacatgcacatatctttgtcaaggcaccagtgggaacaatacactgcattactgttctatacatatgaaaacctaataatataagtcttag

SEQ ID NO: 499032 - DNA, 120 bp, Artificial Sequence
  ENSG00000163606_15 (sequence is synthesized)
aattccattgtatagttatatcattatttaattaaaaacaaccctaatgatggatatttagattcttttaagttttgtttatttcttttaagttttgtttgtggtataaacaataccaca

SEQ ID NO: 499033 - DNA, 120 bp, Artificial Sequence
  ENSG00000163606_16 (sequence is synthesized)
aacaataccacatagaatgtttcttgtgcatatatctctttgtttttgagtatatctgtaggataactttcttgagtggaattgtcaggtcaaagggtttgtgcattttactattgatat

SEQ ID NO: 499034 - DNA, 120 bp, Artificial Sequence
  ENSG00000163606_17 (sequence is synthesized)
atatgttaaattgtgtcaaatatatatgtcaaattccctccaacattgtttaaatgtgcctttccctaaatttctattttaataactgtactattcctgcttctacagttgccactttct

SEQ ID NO: 499035 - DNA, 120 bp, Artificial Sequence
  ENSG00000163606_18 (sequence is synthesized)
ctttttaatcaaccagattaaatatgatgtgagattataataagaattatactatttaataaaaatggatttatatttttggtcatgtttgtaagagagtgaatgcacgtgtgagaacat

SEQ ID NO: 499036 - DNA, 120 bp, Artificial Sequence
  ENSG00000163606_19 (sequence is synthesized)
tagcttcttctgaactcattatatctccacagaggtgttgatacttgatgcctaacagttttgcagatgtgctacattggaattgtgtatttttatggtgtacattctattgtgatatat

SEQ ID NO: 499037 - DNA, 120 bp, Artificial Sequence
  ENSG00000163606_20 (sequence is synthesized)
ttattgaataattaatgtctattgaccatataagtggcgaaaaatgcaccatagaggacatggggtatttatttacaaactatgagctacataataagcaagtggccatgggatggcatg

SEQ ID NO: 499038 - DNA, 120 bp, Artificial Sequence
  ENSG00000163606_21 (sequence is synthesized)
accctcccctccatatttttgtggagcaaaatattggcaatgtttatgtaaatcattgttaatatcatgaaattatttttaattaaaaacataagtctatttgctccatagcagaaaaaa

SEQ ID NO: 499039 - DNA, 120 bp, Artificial Sequence
  ENSG00000163606_22 (sequence is synthesized)
catgagaagttttttcatcatgatagaaattgaaacaaaatatattcattcttcaatcataccatctgagatttttaagacagctattttgtcttataagtatatttttctccctctaga

SEQ ID NO: 499040 - DNA, 120 bp, Artificial Sequence
  ENSG00000163606_23 (sequence is synthesized)
catttcagttactatggattttgtcctcaaagggacttttagtctattttggatgtaaagctaatctaatgacacttggcacatgatattttgatcaagccattttgacttgaccaaaaa

SEQ ID NO: 499041 - DNA, 120 bp, Artificial Sequence
  ENSG00000163606_24 (sequence is synthesized)
gcagtgtccattaggtttctgcatataaatattaccaagcaatgttcacaatagacatcattacactgtccttgaaatttattaattcttcatccaaccctggttgagctgaggctcata

SEQ ID NO: 499042 - DNA, 120 bp, Artificial Sequence
  ENSG00000163606_25 (sequence is synthesized)
gttaggttcaagactatctgtttaaatattactgaaaaacaaagtaagacagtactatgcttacctcttaacttgataatgtcaaaacaggcatgttaaatgacatcatagaaaagactt

SEQ ID NO: 499043 - DNA, 120 bp, Artificial Sequence
  ENSG00000163606_26 (sequence is synthesized)
caagataatttatagaagttaaattatattgtacagaaaataattgtatgaaaatctctactatggggctggaacatggttgaacattagaatgatataaaaaattatatatattctcca

SEQ ID NO: 499044 - DNA, 120 bp, Artificial Sequence
  ENSG00000163606_27 (sequence is synthesized)
aatccacgctagacctgtcaaattagagaatctagagattagacctggcgtgtcagcaaggtcatccaggaagcagaggctgagacggagttaggtgtgattacttacatagtcgattac

SEQ ID NO: 499045 - DNA, 120 bp, Artificial Sequence
  ENSG00000163606_28 (sequence is synthesized)
attttacaaataacattttatatgtctcatttactgtgctttctccccatcccattttgtatcttttcctttgctttgctagatttgtcaattttctctctctttctctgtctctctctc

SEQ ID NO: 499046 - DNA, 120 bp, Artificial Sequence
  ENSG00000163606_29 (sequence is synthesized)
tttcaatatctctaataatttgaaagtaattcatcataactaaatatctattggggttatgcttcacttacaaacttctgaaaacggctttactgagatataattgatatatttaagtgt

SEQ ID NO: 499047 - DNA, 120 bp, Artificial Sequence
  ENSG00000163606_30 (sequence is synthesized)
acagtttgttaaattttgcacatatttaaaatgtggactttggtaaatgttgacatagttttacatctgtgaaaccatcagcataatcaagataataaacttgtccatcaccccccaaaa

SEQ ID NO: 499048 - DNA, 120 bp, Artificial Sequence
  ENSG00000163606_31 (sequence is synthesized)
tcaccagatttgtgacggaaacaaatgtctctctgaattccatatgctttatgtgaaaaccgaagcatttttttccctctttcctctctgcagttacacctgaagtgaccctgtttcaaa

SEQ ID NO: 499049 - DNA, 120 bp, Artificial Sequence
  ENSG00000163607_0 (sequence is synthesized)
cttctgggaagggagaatggcggcgcccgggctgcggctgggagcgggaagactctttgaaatgcctgcggtgctagagcgactgagccgctataatagcacgtcccaagcttttgctga

SEQ ID NO: 499050 - DNA, 120 bp, Artificial Sequence
  ENSG00000163607_1 (sequence is synthesized)
ggtgctgcggctgccgaagcagcagctgaggaagctgctgtacccgctgcaggaagtagagcggttcctcgccccctacgggaggcaagaccttcacctgcgtatctttgacccaagccc

SEQ ID NO: 499051 - DNA, 120 bp, Artificial Sequence
  ENSG00000163607_2 (sequence is synthesized)
ggaggacatagccagggcggacaacatcttcacggccactgaacggaaccgcatcgactacgtcagctccgccgtccgtatcgaccacgccccggaccttccgcggccagaggtgtgttt

SEQ ID NO: 499052 - DNA, 120 bp, Artificial Sequence
  ENSG00000163607_3 (sequence is synthesized)
tataggcagaagcaatgttggaaaatcatctctaatcaaggctttattttcactggcccctgaggttgaagtcagagtctccaaaaaaccaggacacacaaagaaaatgaattttttcaa

SEQ ID NO: 499053 - DNA, 120 bp, Artificial Sequence
  ENSG00000163607_4 (sequence is synthesized)
agttggaaaacattttacagtggtggacatgccaggttatggctttagagcacctgaagattttgttgacatggtagagacctatctaaaagaacgaaggaacttgaagagaacattttt

SEQ ID NO: 499054 - DNA, 120 bp, Artificial Sequence
  ENSG00000163607_5 (sequence is synthesized)
attagtggatagcgttgttggaattcaaaaaacagacaatattgccatagaaatgtgtgaagaatttgcattaccttatgtgattgtattaacaaaaattgacaaatcttccaagggaca

SEQ ID NO: 499055 - DNA, 120 bp, Artificial Sequence
  ENSG00000163607_6 (sequence is synthesized)
tcttttaaaacaagtgcttcagatccagaaatttgttaacatgaaaactcaaggatgttttcctcagttgtttcctgtaagtgctgtgaccttttctggaatccacctgttgagatgctt

SEQ ID NO: 499056 - DNA, 120 bp, Artificial Sequence
  ENSG00000163607_7 (sequence is synthesized)
cattgttttaaatgttgtgcatctgtaacttcaggaggatcacttgagctttaaaacctgtgccttctcgaaacaagaatttgtgcctgaggtgaaaaaagtttgtaagttattgaatta

SEQ ID NO: 499057 - DNA, 120 bp, Artificial Sequence
  ENSG00000163607_8 (sequence is synthesized)
tggtgttcattagaacagctactagctgattcccctattttaacaaactgacaagagcacatccataaaatgaaaacctgttacaactatgtacagaagggtttgacgttttattgggct

SEQ ID NO: 499058 - DNA, 120 bp, Artificial Sequence
  ENSG00000163607_9 (sequence is synthesized)
tttgtcttttaaagaatatgtctactatgggtattttttttttaaatgttaaaatgggctaggtaaaagggggctgcttttctgttaagcatcgataggtaagttgatggataaaagtta

SEQ ID NO: 499059 - DNA, 120 bp, Artificial Sequence
  ENSG00000163607_10 (sequence is synthesized)
ctatgtaagcctatttttttgagtccttatttgaatattgaaaacattcttgataaaatgtgttagtccatgttggaaacaaccgaaagaacagaattcaagttctagttctgatgttta

SEQ ID NO: 499060 - DNA, 120 bp, Artificial Sequence
  ENSG00000163607_11 (sequence is synthesized)
ttatatatgttggatcttgggcaacttacttgatttctcggaaattcatttgttactgtaaacgtgaaagctattaagattcaaatgaatggttttacagcaggtaacatgtgagaagac

SEQ ID NO: 499061 - DNA, 120 bp, Artificial Sequence
  ENSG00000163607_12 (sequence is synthesized)
agctacatatttgtaaagccaaaccaacaaagaaatatagcaaaattcacaggtagatttattacaagaaatgtcctttcatgggggaagtaacattttcactagtgaaaaagcaaaaaa

SEQ ID NO: 499062 - DNA, 120 bp, Artificial Sequence
  ENSG00000163607_13 (sequence is synthesized)
caaaaatagctttaagtgagaaaactaatttgtaaagggcaagagaaaaaagctgatgggacagtttagactgctacatttaagattcagaatggaaaaataaagcctttgaactaaagt

SEQ ID NO: 499063 - DNA, 120 bp, Artificial Sequence
  ENSG00000163607_14 (sequence is synthesized)
taatagagaagatttttgtgaaggtgccactaacctattcatgtaagtggcttaggttttcaaagtgaagcttaatattaaaaggttatagctgtattgctggataacaaattaaagcta

SEQ ID NO: 499064 - DNA, 120 bp, Artificial Sequence
  ENSG00000163607_15 (sequence is synthesized)
tttgcggttgtattttctagctttatgttggcgcatatattattttaactcaataggcatatgtcgatgctccctgtacgtggggatacccgagaaacccattgttaagtacaaaatgca

SEQ ID NO: 499065 - DNA, 120 bp, Artificial Sequence
  ENSG00000163607_16 (sequence is synthesized)
attaactactaaatttcaacagtctataaagtaccacagagatgaggaaaacgattggctttaatcactgaacaaatatattctttgattagatgaagcttgttcttatgttcctctgca

SEQ ID NO: 499066 - DNA, 120 bp, Artificial Sequence
  ENSG00000163607_17 (sequence is synthesized)
tcttctctctttctcccttctctctcttgggttttttttctcttttgaaccgcagttcacttactatgttttccaagtgctttaccatctgggtttgtcaatacctccctcaaaggatgg

SEQ ID NO: 499067 - DNA, 120 bp, Artificial Sequence
  ENSG00000163607_18 (sequence is synthesized)
tgtccagacttgaaaactgaaaaagataggagctgaccctaaagaatttaaggattgttccctccattattcttgaaaaccgctgttaaaacagaatccataaccttggttcaatttcta

SEQ ID NO: 499068 - DNA, 120 bp, Artificial Sequence
  ENSG00000163607_19 (sequence is synthesized)
ctgcgcgccggcgtcacagcgctaaccttccctggccgtccggctcgcggtgtgttttataggcagagcaatgttggaaaatcatctctaatcaagctttattttcactggcccctgagg

SEQ ID NO: 499069 - DNA, 120 bp, Artificial Sequence
  ENSG00000163607_20 (sequence is synthesized)
aaaaatcgttaagtcgacccactgtaagcagagactgcctgtatacagcttaaattattttggaatgaatatagaagacttcaaaatgctttaaaagcttttcaaacccaaattaagcat

SEQ ID NO: 499070 - DNA, 120 bp, Artificial Sequence
  ENSG00000163607_21 (sequence is synthesized)
tcaaaaaattaactctccttttttcttctatttaacttaagtagggaaaacatgccagacaaattagacagaatttagacagtgaagaataggaaacgaataatagtttcacaaatgaga

SEQ ID NO: 499071 - DNA, 120 bp, Artificial Sequence
  ENSG00000163607_22 (sequence is synthesized)
tggtccttatcaataagtaactttcgcctaatctaaatttcctatcgtgcaaaaataataatctctagatggcaataatgtggaaaaatttttataacaacgtttattagtgaaatttca

SEQ ID NO: 499072 - DNA, 120 bp, Artificial Sequence
  ENSG00000163607_23 (sequence is synthesized)
tgagtgagcattcttgcatgtcctacaatttattgatattctgttctaagtctgctaaaaggcatctcaactctccatatgtatttacactaagtgcaccattgcccagagatatttcgt

SEQ ID NO: 499073 - DNA, 120 bp, Artificial Sequence
  ENSG00000163607_24 (sequence is synthesized)
ctaaatatatgtggaactatagtcaggattcaaagagtacctcaattatttaatgattttgagacagccattgcttttttatttaagcttctaaattactggacttttttgtaattcgtt

SEQ ID NO: 499074 - DNA, 120 bp, Artificial Sequence
  ENSG00000163607_25 (sequence is synthesized)
tttaaaattcagttttatctacatattagcattagatttgctctggcagagcatttaaaatttttgcaggactcagatcaattaattttgaagaactgaccagaattttccaggatagga

SEQ ID NO: 499075 - DNA, 120 bp, Artificial Sequence
  ENSG00000163607_26 (sequence is synthesized)
caaggggcagtacggccgtcatttagaacaactgattggcattgtaccccctcccccaataccatgttcaaaagcagagccatgtgtattaatggttattatcgagaatattctgttgtt

SEQ ID NO: 499076 - DNA, 120 bp, Artificial Sequence
  ENSG00000163608_0 (sequence is synthesized)
ctttcgtaagtccccccgcctcgcatgatggctgcggtgccgccgggcctggagccgtggaaccgtgtgagaatccctaaggcggggaaccgcagcgcagtgacagtgcagaaccccggc

SEQ ID NO: 499077 - DNA, 120 bp, Artificial Sequence
  ENSG00000163608_1 (sequence is synthesized)
gcggcccttgacctttgcattgcagctgtaattaaagaatgccatctcgtcatactgtcgctgaagagccaaaccttagatgcagaaacagatgtgttatgtgcagtcctttacagcaat

SEQ ID NO: 499078 - DNA, 120 bp, Artificial Sequence
  ENSG00000163608_2 (sequence is synthesized)
cacaacagaatgggccgccacaaaccccatttggccctcaaacaggttgagcaatgtttaaagcgtttgaaaaacatgaatttggagggctcaattcaagacctgtttgagttgttttct

SEQ ID NO: 499079 - DNA, 120 bp, Artificial Sequence
  ENSG00000163608_3 (sequence is synthesized)
tccaatgaaaatcagcccttaactaccaaagtatgtgttgtccccagtcagccagtggtggagttggtgttgatgaaggttttgggagcctgcaagttgttgctccgcttgttggactgc

SEQ ID NO: 499080 - DNA, 120 bp, Artificial Sequence
  ENSG00000163608_4 (sequence is synthesized)
tgctgcaaaacttttcttttgactgtgaaacatctaggtttgcaagagttcattattttaaaccttgtgatggttgggctggtgagcaggttatgggttctctataaaggtgtcttaaaa

SEQ ID NO: 499081 - DNA, 120 bp, Artificial Sequence
  ENSG00000163608_5 (sequence is synthesized)
aggttgattttgttatatgagcctttgtttggattgcttcaagaggtcgctaggattcaaccaatgccttacttcaaagattttacctttccttctgatatcactgaatttttaggacag

SEQ ID NO: 499082 - DNA, 120 bp, Artificial Sequence
  ENSG00000163608_6 (sequence is synthesized)
ccatattttgaagcctttaagaaaaaaatgcctatagcttttgcagctaaaggaataaataaattgctaaataaactgtttttaataaatgagcagtcaccaagagccagtgaagaaacc

SEQ ID NO: 499083 - DNA, 120 bp, Artificial Sequence
  ENSG00000163608_7 (sequence is synthesized)
ttgcttggaatttcaaaaaaagctaaacaaatgaagatcaatgtacagaataatgtggatcttggacagccagtaaagaataagagagtcttcaaagaagagtcatcagaatttgatgtg

SEQ ID NO: 499084 - DNA, 120 bp, Artificial Sequence
  ENSG00000163608_8 (sequence is synthesized)
agggctttctgcaaccagctgaaacacaaagctactcaggagaccagttttgattttaaatgttctcaatccagactaaagacaaccaagtattcttctcagaaagtgataggaactcct

SEQ ID NO: 499085 - DNA, 120 bp, Artificial Sequence
  ENSG00000163608_9 (sequence is synthesized)
catgccaaaagttttgtgcaaagattccgagaggctgagtccttcacacaactttctgaagaaatccagatggcagttgtatggtgcaggagcaaaaaactcaaggctcaggccattttt

SEQ ID NO: 499086 - DNA, 120 bp, Artificial Sequence
  ENSG00000163608_10 (sequence is synthesized)
ctgggtaacaaacttcttaaaagcaaccggcttaaacatctggaagctcaaggtactagtttgccaaagaaactagagtgcataaaaacgtctatttgcaaccaccttcttcgtggctca

SEQ ID NO: 499087 - DNA, 120 bp, Artificial Sequence
  ENSG00000163608_11 (sequence is synthesized)
ggtatcaaaacttcaaagcatcatctgagacagagaagatcacagaataaatttttacggagacaaaggaaaccacagagaaagttgcagtcgactcttttaagggaaattcagcagttc

SEQ ID NO: 499088 - DNA, 120 bp, Artificial Sequence
  ENSG00000163608_12 (sequence is synthesized)
tctcaagggactcggaagagtgctacagataccagtgctaagtggagactctcacactgtactgtgcatagaactgatctctaccctaacagtaagcagctcttgaatagtggagtttca

SEQ ID NO: 499089 - DNA, 120 bp, Artificial Sequence
  ENSG00000163608_13 (sequence is synthesized)
atgcctgtcatacaaactaaggagaaaatgattcatgaaaatcttagaggcatccatgaaaatgaaactgattcgtggacggtgatgcaaataaataaaaacagtacatcaggaaccatt

SEQ ID NO: 499090 - DNA, 120 bp, Artificial Sequence
  ENSG00000163608_14 (sequence is synthesized)
aaggagacagatgacattgatgatatttttgctttaatgggagtttagatgttcgttcatatgtgagacttttaagtgattaacaaggctagttcagtgttctaagtagaactgctaaga

SEQ ID NO: 499091 - DNA, 120 bp, Artificial Sequence
  ENSG00000163608_15 (sequence is synthesized)
tctggaagtaccacctggactcacagaggagctgctttagtgcagcattgcacaggagttcatttcagttcagtctacatttaaagtagcattgtgtcatttcatcaacaagtatttctt

SEQ ID NO: 499092 - DNA, 120 bp, Artificial Sequence
  ENSG00000163608_16 (sequence is synthesized)
ttttggcttcaactacatgtcaggtgttaatatgaaaaatctgccacagcctacccttgagaagcagatgtaattccttgagtgaggctagtaagtctctgaaaaactgaataattttat

SEQ ID NO: 499093 - DNA, 120 bp, Artificial Sequence
  ENSG00000163608_17 (sequence is synthesized)
gacttactaggcaatttaataatcgtttgcaaaaaccattgtgtcttgaggtaaatgaggagcgggggtgggagatagcaaggaaacacctgaaaggtcaatttggtcttattggctcca

SEQ ID NO: 499094 - DNA, 120 bp, Artificial Sequence
  ENSG00000163608_18 (sequence is synthesized)
ttatacataggtccgcctctgaatactaaagtttgtagctcctgacatttatgttttcttgtttatatgttggaattgatcaacaaggtttgccactgcttgtattaccagggactggtt

SEQ ID NO: 499095 - DNA, 120 bp, Artificial Sequence
  ENSG00000163608_19 (sequence is synthesized)
acaaccattatttctcttcatttgcttggcttatctcatattaaagtgagtttggagttctccaaaacgttttaattttatttatttgggtaccagtgattgattccaaataaacctttt

SEQ ID NO: 499096 - DNA, 120 bp, Artificial Sequence
  ENSG00000163608_20 (sequence is synthesized)
gtttatggttacatatgaaatataataggataacaggtagatgagaaagtaaaatgaaaaaatgaggttaggagatacaaagtagacccaggaatgaggctagaacatttataatttggt

SEQ ID NO: 499097 - DNA, 120 bp, Artificial Sequence
  ENSG00000163608_21 (sequence is synthesized)
gttgatgctgtcatctgataggggatgttgctcgtactgttgctctgaggggagtacatcttgagtattttcaaataatgatgtgaagtttgaggtaggtatctttccaatgttctaact

SEQ ID NO: 499098 - DNA, 120 bp, Artificial Sequence
  ENSG00000163608_22 (sequence is synthesized)
ttactagaattaggttattaagcttctctagtgcccttaacttttgttacatagagatttaaagaaaaagaaagtagtaccttagtatgtaccgcatccttcttttcctcagccacccta

SEQ ID NO: 499099 - DNA, 120 bp, Artificial Sequence
  ENSG00000163608_23 (sequence is synthesized)
tcataacagaagttatttcccttccattctttatttggctttgttctttccctgtctgccttctccattttctcagttatctctaccagtggttctcaaactttagactttttgagaatc

SEQ ID NO: 499100 - DNA, 120 bp, Artificial Sequence
  ENSG00000163608_24 (sequence is synthesized)
acctggtgggttgctaaaagatgcagattagccctttcccagagactgataaacaggggccagaaacctgcatttttaacatggagcccaagtgattttgatccaggtggcccccaaatc

SEQ ID NO: 499101 - DNA, 120 bp, Artificial Sequence
  ENSG00000163608_25 (sequence is synthesized)
cagttatataaacactactttagcttctctcctgaagccttaagtaaactggtttaattcttaatctgtagtcagttttcatattccttttggctttctaccaagtggtagtatccattt

SEQ ID NO: 499102 - DNA, 120 bp, Artificial Sequence
  ENSG00000163608_26 (sequence is synthesized)
agtgccttaaaatacagacaataccaaggagatttcattctagacaagtctagaaatggccattaacttctaagtgtccttgtgttcaatgaatatcctttacctattgggaaatagaag

SEQ ID NO: 499103 - DNA, 120 bp, Artificial Sequence
  ENSG00000163608_27 (sequence is synthesized)
gtaaattagtaagagaactggtgtatagctttgtggaccatagggcttatttgctgagagttgtctatattcatgcacccagtcccctaagtagcctcttttaatacttcatttagctga

SEQ ID NO: 499104 - DNA, 120 bp, Artificial Sequence
  ENSG00000163608_28 (sequence is synthesized)
ttcagaaaaaaactccctgggaattaggagatttaaggttcagtcttgcttctcctacttgtggcttcactgagctagtcagtttcctcaggcttaggtttctggatttgaagtggaatt

SEQ ID NO: 499105 - DNA, 120 bp, Artificial Sequence
  ENSG00000163608_29 (sequence is synthesized)
ttttcaagaatgaaacttttatagctgaaataaactttggagcttatctttcattggaaaaaccagggtggttcagtgagttaaggacaatatagcatggactgggctgccagtctagca

SEQ ID NO: 499106 - DNA, 120 bp, Artificial Sequence
  ENSG00000163608_30 (sequence is synthesized)
tttgtttccaaattcattcatgttcttttggagtatcttcatctcctctcattttcccatcttctgccctttactattctgggaaaatggcaaaaaagcttcacatgtgtccacaaaatg

SEQ ID NO: 499107 - DNA, 120 bp, Artificial Sequence
  ENSG00000163608_31 (sequence is synthesized)
acaatttgtatgtttataaggaattcagtattctgtatcagttactttttccaaataaatccaaatatttaacatttaaaaaaatgcaatctaaagtataccaaactgtaacttacctag

SEQ ID NO: 499108 - DNA, 84 bp, Artificial Sequence
  ENSG00000163608_32 (sequence is synthesized)
tgctgttgcccaggctggagcacagtggtatgatctcagttcactgcaccctccacctcctgggctcaagctattctcccacct

SEQ ID NO: 499109 - DNA, 120 bp, Artificial Sequence
  ENSG00000163608_33 (sequence is synthesized)
tgcaccctccacctcctgggctcaagctattctcccacctcagccgcctgagtagctgacactataggcaccaccatgccctggctaattttttaaaaactttgtgtagagatagggttt

SEQ ID NO: 499110 - DNA, 120 bp, Artificial Sequence
  ENSG00000163608_34 (sequence is synthesized)
caccatgttgcttaggctggtctcaaactcctggactcaagggatccacccactttggtctcccaaagtgctgggattacccacatcctagtaccaactttatcacttctgatggcatta

SEQ ID NO: 499111 - DNA, 120 bp, Artificial Sequence
  ENSG00000163608_35 (sequence is synthesized)
ggacacacaggccatttataagagcagtgtttgagacctcctgtgtgtcacttccaatcctcttggccttcatactaaagtcactgctgtggcaaccagtttcaagcagggctgaacctt

SEQ ID NO: 499112 - DNA, 120 bp, Artificial Sequence
  ENSG00000163608_36 (sequence is synthesized)
gcctcttgctctggggatgtctcacttcctgcccctgggcttctcaccagctacaggaactgcctagcacttgggtatgtacaacctggaagaggtgtggggccaccccatcccctcctc

SEQ ID NO: 499113 - DNA, 120 bp, Artificial Sequence
  ENSG00000163608_37 (sequence is synthesized)
aaagaaattcacaggcacagtatgaggctaaagtaacttccatcttggatgctaatctaccatgttgacttctgataaccagttcctggaatgccctctaagatttctacttttatctat

SEQ ID NO: 499114 - DNA, 120 bp, Artificial Sequence
  ENSG00000163608_38 (sequence is synthesized)
taaaagaacacacacacacacacacactgtaaatcctggccttaagcaagttataggctaagttgtaaacagcattcttgcctttccctgaggaggtgacttcagtgtctcacatgttcc

SEQ ID NO: 499115 - DNA, 120 bp, Artificial Sequence
  ENSG00000163608_39 (sequence is synthesized)
ttcatgtacccccttttctctatggcatataagccctgggtcggggggtaactgtggggatcactgcctgagacatggcttctgtgcataagtccctattaaatgtttctttctgacaaa

SEQ ID NO: 499116 - DNA, 120 bp, Artificial Sequence
  ENSG00000163608_40 (sequence is synthesized)
gatgggacctgtcctggtacagagggggaacaaaacaacttgtatttggagcagtggagaaaaattcagtttttaaagacataaggaaagcttagtgagcaaaaaaatttccttacagac

SEQ ID NO: 499117 - DNA, 120 bp, Artificial Sequence
  ENSG00000163608_41 (sequence is synthesized)
tgattttttttttttaatttttaggttttgtgggtacgtagcaggtatatatatttatggggtacgtattttgttataagcatatagtgcataataaccacagggtaaatggggtatcca

SEQ ID NO: 499118 - DNA, 120 bp, Artificial Sequence
  ENSG00000163608_42 (sequence is synthesized)
tcacttcaagcatttagggactgataattctaatttttaaattttgattgtgagctagctttccttgttgtcatataattacaagtcagtaacatgtccaatatatttttctcatctttc

SEQ ID NO: 499119 - DNA, 120 bp, Artificial Sequence
  ENSG00000163608_43 (sequence is synthesized)
tatagtgttttttatctgtactggaggaccttgatagccatttattttcagctttcaatcttgcagtttattatgtaatctgcaaattgtaattactggctaattaatgagctcctattt

SEQ ID NO: 499120 - DNA, 120 bp, Artificial Sequence
  ENSG00000163608_44 (sequence is synthesized)
atttagcttatgatttctgctaatttgtagaggatgcttcttaccaagggcagagattgaatcttttcattttatccccagctctaagcttagtgccttcttagttgtcagtgtgtgctt

SEQ ID NO: 499121 - DNA, 120 bp, Artificial Sequence
  ENSG00000163608_45 (sequence is synthesized)
caaagctactcagtccccagaacagtttttcaactgtatctcaagaactatggtgctttgtgaaccttgaaacttctgcagcctgtgcacctgtttgtaggagaccagttttgattttaa

SEQ ID NO: 499122 - DNA, 120 bp, Artificial Sequence
  ENSG00000163608_46 (sequence is synthesized)
gtgttggtaaccaatatacagatgactgggtccttcccagtcccacgcgtttactcgatgaaggcagcctcccgccgggctcctggccccgcccgagccccaccccctgctcccttccgg

SEQ ID NO: 499123 - DNA, 120 bp, Artificial Sequence
  ENSG00000163608_47 (sequence is synthesized)
ttggttgagcaatgtttaaagcgtttgaaaaacatgaatttggagggctcaattcaagacctgtttgagttgttttcttccaatcagccagtggtggagttggtgttgatgaaggttttg

SEQ ID NO: 499124 - DNA, 120 bp, Artificial Sequence
  ENSG00000163608_48 (sequence is synthesized)
atctcctttcagcctaggtttcttattagtagttttcaaacttattttcttatggggttatggaaggtgcaggtattctctttcttggtttgatcagagttttttgagggtagattggga

SEQ ID NO: 499125 - DNA, 120 bp, Artificial Sequence
  ENSG00000163608_49 (sequence is synthesized)
tttgtttgaaagctaacactccataggagttacaacctacaggaattcttaaacttttgcttcttggcctccttttctcaggaattgcctgatgcagccattgccagagactgcctgtca

SEQ ID NO: 499126 - DNA, 120 bp, Artificial Sequence
  ENSG00000163608_50 (sequence is synthesized)
ctgttcagcacgtattatcctaagagcattgatagctagaaattcttaatcttagaaactaaactttaagaactaaatttaataatgggaactctagcagagtgtttataaccatatttt

SEQ ID NO: 499127 - DNA, 120 bp, Artificial Sequence
  ENSG00000163608_51 (sequence is synthesized)
aaagttttaaattcttaaatagaatgtgttttaaggctttaatacctttaagaaaattctctttacttccaatatatttcttcattcatgattgtaacttacaaaacccacattactttg

SEQ ID NO: 499128 - DNA, 120 bp, Artificial Sequence
  ENSG00000163611_0 (sequence is synthesized)
aacctgtggcgcgctccgcggttccggcgcctgaagttttagctgcggtggcggcggcagtcgggaccgactgcaaggcaggttgagatgatggatctgaggcttgcagctcgcagtccc

SEQ ID NO: 499129 - DNA, 120 bp, Artificial Sequence
  ENSG00000163611_1 (sequence is synthesized)
aacgagccttagggaccagggctaccaaaagggtggggagaacggtggtggcatctgtctgttgcctgggatccaggcgcccggttggggaatccttacttcaggaagcgcagccgcggc

SEQ ID NO: 499130 - DNA, 120 bp, Artificial Sequence
  ENSG00000163611_2 (sequence is synthesized)
tctgtgttttgagagtgcaaatgtcatttgtcagagtgaaccgctgtggtccccgagttggtgtaagaaagacaccgaaagtaaagaagaagaaaacttcagtgaaacaagaatgggata

SEQ ID NO: 499131 - DNA, 120 bp, Artificial Sequence
  ENSG00000163611_3 (sequence is synthesized)
ataccgtgactgatctaaccgttcatcgggcaactcccgaagatctggtacgccgtcatgaaatacacaaatcgaagaatagagcattagtacactgggaactccaagaaaaagctttga

SEQ ID NO: 499132 - DNA, 120 bp, Artificial Sequence
  ENSG00000163611_4 (sequence is synthesized)
agagaaaatggaggaagcagaaaccagaaactttaaatcttgagaaaagaagattgtctatcatgaaggagattctttctgatcaataccagatgcaagatgtgttggagaaatctgatc

SEQ ID NO: 499133 - DNA, 120 bp, Artificial Sequence
  ENSG00000163611_5 (sequence is synthesized)
atctaatagctgcagcaaaagagctgtttcctcgtaggcgcacagggtttccaaatgtaacagtggctcctgattcctctcagggtcccattgtggtaaatcaagaccctatcacccaat

SEQ ID NO: 499134 - DNA, 120 bp, Artificial Sequence
  ENSG00000163611_6 (sequence is synthesized)
ctatctttaatgagtctgtcatagaacctcaggctcttaatgatgtagatggtgaagaagaaggaactgttaatagccagtcaggagaaagtgagaatgagaatgagttggataactctc

SEQ ID NO: 499135 - DNA, 120 bp, Artificial Sequence
  ENSG00000163611_7 (sequence is synthesized)
taaactctcagtctaacacgaatacagacaggtttctccaacaactaacagaagagaattttgagttaattagtaagttgtggactgacattcagcagaaaatagcaacccagtcacaaa

SEQ ID NO: 499136 - DNA, 120 bp, Artificial Sequence
  ENSG00000163611_8 (sequence is synthesized)
taactcctccaggaacgccatcatctgctctttcatcaggggagcaaagagctgctctgaatgctaccaatgctgtcaagagactccaaaccaggcttcagcctgaagaatctactgaga

SEQ ID NO: 499137 - DNA, 120 bp, Artificial Sequence
  ENSG00000163611_9 (sequence is synthesized)
ctctagactcaagctacgttgtgggacacgtgctgaactcaaggaagcaaaaacagctgttaaataaagtgaaaaggaaaccgaatttgcatgctctttccaagccgaagaaaaacatat

SEQ ID NO: 499138 - DNA, 120 bp, Artificial Sequence
  ENSG00000163611_10 (sequence is synthesized)
catcaggtagcacaacctctgcagacttaccaaataggactaattccaacctggatgtcctcaaacacatgatacatgaagtggaacatgaaatggaagaatatgagcggtggacaggtc

SEQ ID NO: 499139 - DNA, 120 bp, Artificial Sequence
  ENSG00000163611_11 (sequence is synthesized)
gcgaggtcaagggtctgcagagcagtcagggtcttacaggcttcactttgtcgctggtgagctccctctgtcgcctggttcggtaccttaaagagagtgagatccagctacgtaaagaag

SEQ ID NO: 499140 - DNA, 120 bp, Artificial Sequence
  ENSG00000163611_12 (sequence is synthesized)
tagagacaaggcaacaactggaacaagtattaggtgatcatcgagagctcattgatgctctgacagctgaaattcttcgtcttagagaagaaaacgctgctacacaggcaagacttcagc

SEQ ID NO: 499141 - DNA, 120 bp, Artificial Sequence
  ENSG00000163611_13 (sequence is synthesized)
agtacatggtcacaacagatgagcaactgatatcactcacacatgctattaagaactgtcctgtgataaataacagacaagaaattcaggcatcagaaagcggagccacaggtagaagag

SEQ ID NO: 499142 - DNA, 120 bp, Artificial Sequence
  ENSG00000163611_14 (sequence is synthesized)
ttatggacagtccagagcgtccagttgtaaatgccaatgtctcagtgccattgatgttcagagaggaagtggctgaattcccacaggaagagttgcccgttaaactgtctcaggtgccag

SEQ ID NO: 499143 - DNA, 120 bp, Artificial Sequence
  ENSG00000163611_15 (sequence is synthesized)
accctccagataacatgaatctggccaagaattttccagcacatatttttgagccagctgtgttgttaacaccacccaggcagaagagcaacttaaaattctctcctcttcaggacgtat

SEQ ID NO: 499144 - DNA, 120 bp, Artificial Sequence
  ENSG00000163611_16 (sequence is synthesized)
tgagaaggactgttcaaactcgtcctgctccacgacttcctccaactgtggaaataattgagaaggaacaaaattgggaagagaagaccttacctattgatacagacattcagaattcaa

SEQ ID NO: 499145 - DNA, 120 bp, Artificial Sequence
  ENSG00000163611_17 (sequence is synthesized)
gtgaagagaatcgtctcttcactcagagatggagagtctctcacatgggagaagatttggagaacaaaactcaggctccttttgttaacctctcacagcccctctgcaattcccattcca

SEQ ID NO: 499146 - DNA, 120 bp, Artificial Sequence
  ENSG00000163611_18 (sequence is synthesized)
acactcaacagtcaagaagccccacattctcagaagagctcccagtactgggagatgggcagcagctgagaacaaatgagtcattaatacaaagaaaggacataatgacacgaattgctg

SEQ ID NO: 499147 - DNA, 120 bp, Artificial Sequence
  ENSG00000163611_19 (sequence is synthesized)
atttgacattgcagaattcagctatcaaggcacatatgaataatattattgagcccagaggagagcaaggggatggactccgggagttgaacaaacaagaaagtgcaagtgacatgactt

SEQ ID NO: 499148 - DNA, 120 bp, Artificial Sequence
  ENSG00000163611_20 (sequence is synthesized)
ctacttttccagtagcacagtctctaacaccaggtagtatggaggaacggattgcagaattgaatcgacaaagtatggaggctcgtggaaaactactgcagttgatagagcagcagaaac

SEQ ID NO: 499149 - DNA, 120 bp, Artificial Sequence
  ENSG00000163611_21 (sequence is synthesized)
ttgttggtttgaatctttctccaccaatgtcacctgttcagttacctctcagagcatggactgaaggagcaaagaggacaattgaggtatctattccaggagcagaagccccagaaagct

SEQ ID NO: 499150 - DNA, 120 bp, Artificial Sequence
  ENSG00000163611_22 (sequence is synthesized)
tctcccgtcagcgggataaatacaagaagatcttccggggctactggtaattcttgttctccactaaatgccacctcaggaagtgggagattcacacctcttaatccaagagcaaagatt

SEQ ID NO: 499151 - DNA, 120 bp, Artificial Sequence
  ENSG00000163611_23 (sequence is synthesized)
gagaaacagaatgaagaaggctggtttgctctttctacccatgtatcataagtgaagtcaagtctcactgagtttgttcttaataatttattacttccctttccctgctctgacttttaa

SEQ ID NO: 499152 - DNA, 120 bp, Artificial Sequence
  ENSG00000163611_24 (sequence is synthesized)
gtttttatatccttctttcagataaaacctacaaagatcctgtgaattagtactaatgaaacagagaaataaagcaattattttttgactttctcaaataagttttcaacaaccaactga

SEQ ID NO: 499153 - DNA, 120 bp, Artificial Sequence
  ENSG00000163611_25 (sequence is synthesized)
cctacagctccctgtgaatgaaactttgactgtagagaagttaaagttttgtattttaatactttcttaagtattttaagggttttttttattaatacatttttacctttatctttattc

SEQ ID NO: 499154 - DNA, 120 bp, Artificial Sequence
  ENSG00000163611_26 (sequence is synthesized)
agggttttttgaggtttagtatatcttagttgatccatttatttatttattttcctgaagaactaatttgctttgcatgtaacttacaataaaattcctctgtgtgattagagtctggct

SEQ ID NO: 499155 - DNA, 120 bp, Artificial Sequence
  ENSG00000163611_27 (sequence is synthesized)
ttcaggaatatgtaacacccacttttctttcttttttcttgggaagtcattgctgttcatcactttttccatcaagtgaaatatacagccttaaaaacaataggcctgggagtgtttgtt

SEQ ID NO: 499156 - DNA, 120 bp, Artificial Sequence
  ENSG00000163611_28 (sequence is synthesized)
tatatttgcttaagcaggtaagagtggttgcatttattataaaatcttatgtagtttttaaatgtgaaaatgtcatcaataatggtaatgcaaatcaaataaatatgattctagagctca

SEQ ID NO: 499157 - DNA, 120 bp, Artificial Sequence
  ENSG00000163611_29 (sequence is synthesized)
aatgcctaaatgtggtaacattgatttaatggtatatttaatgcttcaaacaattaaatagaaaaagttgctattaattttcccagccctgaatttaagcagatctttcagggtagattt

SEQ ID NO: 499158 - DNA, 120 bp, Artificial Sequence
  ENSG00000163611_30 (sequence is synthesized)
tttttttttttgagacagagtcttgctttattgcccaggctggagtgcagttgtataatctggttcactgccacctcagtctcctgggttcaagcaatcctcttacctcagcctcctgag

SEQ ID NO: 499159 - DNA, 120 bp, Artificial Sequence
  ENSG00000163611_31 (sequence is synthesized)
ttacaggtgtgagccactgcacccggctcaggatagatttttcagggtacccttttggttctgagatgtttatttctattttaaacttgttttttgaatgatctctgctccctggctcta

SEQ ID NO: 499160 - DNA, 120 bp, Artificial Sequence
  ENSG00000163611_32 (sequence is synthesized)
gttttttgaatgatctctgctccctggctctatgataggaattctcaacctgagtgaacaattcaaactgagattacttgtgtttagactcatatattttgataacatatgacttctcca

SEQ ID NO: 499161 - DNA, 120 bp, Artificial Sequence
  ENSG00000163611_33 (sequence is synthesized)
gtatgccccagaaagctgctaataacttgctcaacctgaaatttacagttttccaaattacaggttggcagagatactggattgataacaacatccacagttatcatataatcattctta

SEQ ID NO: 499162 - DNA, 120 bp, Artificial Sequence
  ENSG00000163611_34 (sequence is synthesized)
tgctgtaaacaaaattattttggttagcagaatttaataattaactgttaactacatactaggcaatattgtagccactttatgtgcttcatgacaccttatgggataggtactattatc

SEQ ID NO: 499163 - DNA, 120 bp, Artificial Sequence
  ENSG00000163611_35 (sequence is synthesized)
ctcattttgcagatgaggaaactgaggtacaaggaggtattttctcaaggtcacacaactagggagtggtggcattagaatgggaacataggcagtctttctccaaagcctatgctgtgc

SEQ ID NO: 499164 - DNA, 120 bp, Artificial Sequence
  ENSG00000163611_36 (sequence is synthesized)
tgcctcttgttggagagtaaacctgttttacagtgtgtgtagtatggaagcagcataataataagaatagctgttccttattgagccattactgtggcagacaccgtactataagctgtg

SEQ ID NO: 499165 - DNA, 120 bp, Artificial Sequence
  ENSG00000163611_37 (sequence is synthesized)
gtatcaccattatctcatttgaatctcatagtagacctatcagttagaggtatgtaaatgcttcctcctctcccagcacctttacagatgaggatgctgagccctagaggtgaagaaagt

SEQ ID NO: 499166 - DNA, 120 bp, Artificial Sequence
  ENSG00000163611_38 (sequence is synthesized)
tgtctaatgacagagtgcttgtaagaggtaaagccaagacttgaagctctttcttgcagttactggatttctcctaatttacgggaactaatacagtacagtagctaaggatgcaagtac

SEQ ID NO: 499167 - DNA, 120 bp, Artificial Sequence
  ENSG00000163611_39 (sequence is synthesized)
tgaaaccagaaatcttgcctcaaatgccatttctgccacttgagctgtgtactttggacaaattaatctaatctttcccatttgaaagtcagacataatgtcttccctagaggcttgtga

SEQ ID NO: 499168 - DNA, 120 bp, Artificial Sequence
  ENSG00000163611_40 (sequence is synthesized)
ggattaagtgaggcaagtgtatgtaaatgggctgagatcagagcttggctcacaacactcagtaatgatcactgccaattttttttggtatataaataaataaatacactatttccccca

SEQ ID NO: 499169 - DNA, 120 bp, Artificial Sequence
  ENSG00000163611_41 (sequence is synthesized)
tgtttccaatttttaagacattgtatagtgaatttattgtatctttctcagattaacaattgcacacagtgcttgaaatttagaggtatttcacctgaaaagatgtctagagattgaaag

SEQ ID NO: 499170 - DNA, 120 bp, Artificial Sequence
  ENSG00000163611_42 (sequence is synthesized)
aaaacatgctgggcatatgatttgaaaatataaataacatgctatttaaaaataagtttaccctatgttttctatcttttctggcacctagatataccatttaataagtaatagcaagga

SEQ ID NO: 499171 - DNA, 120 bp, Artificial Sequence
  ENSG00000163611_43 (sequence is synthesized)
taatcatttttttaagccctggaaaatcttgattaaagaggacatttcagtattgcaaataaatgcatggtatttgtgtaacattgtggaaactaataaacacaaattgtattatagcaa

SEQ ID NO: 499172 - DNA, 120 bp, Artificial Sequence
  ENSG00000163611_44 (sequence is synthesized)
gagtatgcgcgtgcgcaccgctttcgggagcttttgcacagagctggtaattgggggtgctcgattgtagcgttgggggagttcaccgtgtagcaggagagaggcaaactatccagggtg

SEQ ID NO: 499173 - DNA, 120 bp, Artificial Sequence
  ENSG00000163611_45 (sequence is synthesized)
tagaaagaaaaaaaggagataaatagggttctttgtttttcttcaatttgattcacgttggagagactctagtaatcactgcattcttattcaataatctacatgtggacttcaaaaaaa

SEQ ID NO: 499174 - DNA, 120 bp, Artificial Sequence
  ENSG00000163611_46 (sequence is synthesized)
gcaacagagtggtgactggagtctggtttggtggtttgaattcctgttctactacttaccagctgtgtgaccctaagtaaattatttaacttttcagcctgaattttctcatatttaaaa

SEQ ID NO: 499175 - DNA, 120 bp, Artificial Sequence
  ENSG00000163611_47 (sequence is synthesized)
ttattatttgcttgtattgctatgagatttcagtgatataatacttacaaagtgaatagcacaatctttgcttattcctctttttgtatataagctgctataataatttttctcagtaaa

SEQ ID NO: 499176 - DNA, 120 bp, Artificial Sequence
  ENSG00000163611_48 (sequence is synthesized)
gtgattagcacaatcttttcttattcctctttttatatataagctgctataattatttttctcagtttaacagcagtgctgttaggttactttgaaaaaaaaatgatgttgtatgcttgt

SEQ ID NO: 499177 - DNA, 120 bp, Artificial Sequence
  ENSG00000163611_49 (sequence is synthesized)
aggcaacagcccggaagccgctggctgggttaacctgtggcgcgctccgcggttccggcgcctgaagttttagctgcggtggcggcggcagtcgggaccgactgcaagatgtcatttgtc

SEQ ID NO: 499178 - DNA, 120 bp, Artificial Sequence
  ENSG00000163611_50 (sequence is synthesized)
tgcaagtttatattaagccaaaagaagtatcagagcatatattttggtgccttcaattttgcacagaaagaaatagccctaactcacaggataagtgacagaaatgggattagaaggcag

SEQ ID NO: 499179 - DNA, 120 bp, Artificial Sequence
  ENSG00000163611_51 (sequence is synthesized)
atctcctgattatttctatcctatgatgcctatagttaatctttggtgtctgagttcctaaattatcgtacatctaaatgggattcattatagtgtacggttcacttaggtcatatgctg

SEQ ID NO: 499180 - DNA, 120 bp, Artificial Sequence
  ENSG00000163611_52 (sequence is synthesized)
caactaagcatgaaatatctgaatgttcatttagaatttcatcagcaatgaattacaagttattattctgtaaaacacttaaaacattttcactcaattaaattttttgttacatttagg

SEQ ID NO: 499181 - DNA, 120 bp, Artificial Sequence
  ENSG00000163611_53 (sequence is synthesized)
aatgtgaaaagctagaggggattctgaataataaaatagtaactgaaaaaattgtcatagtattcacattcaaaaagatactgatgaaacgaagtatgtatcaagttgctttttatcaga

SEQ ID NO: 499182 - DNA, 120 bp, Artificial Sequence
  ENSG00000163611_54 (sequence is synthesized)
aattgcattattaaggccctcaagggacagctacatgaagagtactgagagattgattttggcccagtaaaagagaaggctctaattgtcaggaatagaaaaagctccatgtaccagtaa

SEQ ID NO: 499183 - DNA, 120 bp, Artificial Sequence
  ENSG00000163611_55 (sequence is synthesized)
ttgatgtgttctctgagatgttcaaacattggtgtttgaaggggactcatatgtcttatttctggttgaagtaggttacctttaagataccttccaataagacttttcccctcagaaatt

SEQ ID NO: 499184 - DNA, 120 bp, Artificial Sequence
  ENSG00000163611_56 (sequence is synthesized)
atttcctttttgaaatacagacccagaaagcagactcttttggaaattgctggaaaaagatggtaatgcatttccccagggctctctgtttattctaggcttcctcaaatgacagttttg

SEQ ID NO: 499185 - DNA, 120 bp, Artificial Sequence
  ENSG00000163611_57 (sequence is synthesized)
tctactgttcttcatagttatgaagcctagagacaacttctgattagaataaataaatcaattaactatatatgaacatgtactatgtgcgaacatgtactatgtgcgaacatgtactat

SEQ ID NO: 499186 - DNA, 120 bp, Artificial Sequence
  ENSG00000163611_58 (sequence is synthesized)
gtgcgaacatgtactatgtgcctgccatgtgtgggcttgaatactctagcatttgagtaggggagcaggcaacaaacaaatcaatatttgggataatatcagttagtgctaagtgcaagg

SEQ ID NO: 499187 - DNA, 120 bp, Artificial Sequence
  ENSG00000163611_59 (sequence is synthesized)
aagaaaaataaagcagatcagccttaagaataattttgtgtttaaatatacatcttccatttcagtatttgtgtatggttaaaatatgcttttatttatgttatgtaatttagtcctcaa

SEQ ID NO: 499188 - DNA, 120 bp, Artificial Sequence
  ENSG00000163611_60 (sequence is synthesized)
catactttaagaggagacagggctaatattatacctatttgatgaataagtaaactgaggtacaaagaggttatgtgatttatcaagttacaaagcaagttgtggatttgcaactgcgtt

SEQ ID NO: 499189 - DNA, 120 bp, Artificial Sequence
  ENSG00000163611_61 (sequence is synthesized)
ctttcctgtccagtgatttatctctaaagtattctttttataagtaaaattcttatatttgtttaaaaaaaagctgctgtggactataatgataaaaataaaaataaaccatatatcatg

SEQ ID NO: 499190 - DNA, 120 bp, Artificial Sequence
  ENSG00000163611_62 (sequence is synthesized)
gcagagggaaaagaatggttgcaactgtgtgtgaggcgagagcttggttttaggatttgcgggagatgtgagagaacactggaaagaaaagtcagccgggccatatgggggagagggtct

SEQ ID NO: 499191 - DNA, 120 bp, Artificial Sequence
  ENSG00000163611_63 (sequence is synthesized)
gaatgccaagctgagttggattgcttttgacagtggggagccatccgaatctagaggaagtagatgtcatttgtcagagtgaaccgctgtggtccccgagttggtgtaagaaagacaccg

SEQ ID NO: 499192 - DNA, 120 bp, Artificial Sequence
  ENSG00000163617_0 (sequence is synthesized)
agcccgggcagaagggcggttgctgcagctttggccgaggttcgggctcgaacttggaaaatgctcctggcgcctcagggaaggtccttctcaaagaaaaggatggggctgaatcgctgg

SEQ ID NO: 499193 - DNA, 120 bp, Artificial Sequence
  ENSG00000163617_1 (sequence is synthesized)
aaacggttcacaaggaagccgagtcccaagcctacttttggtcctgacagtgtggaacactggataaagagagtggagaaagcctcagagtttgcagtgtcaaatgcattttttactaga

SEQ ID NO: 499194 - DNA, 120 bp, Artificial Sequence
  ENSG00000163617_2 (sequence is synthesized)
aattcagatttacctagaagtccctggggccaaatcacagatttgaaaacatctgagcaaatagaggatcatgatgaaatctatgcagaagctcaggagctggtcaatgactggttagac

SEQ ID NO: 499195 - DNA, 120 bp, Artificial Sequence
  ENSG00000163617_3 (sequence is synthesized)
accaaacttaagcaagaattagcaagtgaggaagaaggtgatgctaaaaacactgtgtcaagtgtcactattatgccggaagccaatggccatttgaaatatgacaagtttgatgattta

SEQ ID NO: 499196 - DNA, 120 bp, Artificial Sequence
  ENSG00000163617_4 (sequence is synthesized)
tgtggctatttggaggaagaagaggaaagtaccaccgttcaaaaatttatagaccatctgctccataaaaatgtggtagattctgcaatgatggaagatcttggaaggaaggaaaaccaa

SEQ ID NO: 499197 - DNA, 120 bp, Artificial Sequence
  ENSG00000163617_5 (sequence is synthesized)
gacaagaagcagcagaaggatcctcgtcttaccatggagatgagacataagcaggtaaaagaaaatcgcttaagacgtgagaaagaactggagtaccagagaatagaaaagaccctgaaa

SEQ ID NO: 499198 - DNA, 120 bp, Artificial Sequence
  ENSG00000163617_6 (sequence is synthesized)
aaatcggccttcttggaggctcagtgtctggtgcaagaagagaagaaaaggaaggctctggaggccaagaaagaggaagaggagattcaaagggagatggtgaagctgcggagggagata

SEQ ID NO: 499199 - DNA, 120 bp, Artificial Sequence
  ENSG00000163617_7 (sequence is synthesized)
attgagaggagacgcactgtgaaagcagcatggaaaatagagaagaaaaggcaagaagagaattctcaaaatagttcagaaaaagtcatgtttcaaagtactcacattcttccagatgag

SEQ ID NO: 499200 - DNA, 120 bp, Artificial Sequence
  ENSG00000163617_8 (sequence is synthesized)
gaaaaaatggtgaaggaaagaaaaaggaaattgaaagaagtattaatccaaactttcaaagaaaatcaacagtgtcaaaaacggtatttcgctgcctggcacaagctgattcttgatcat

SEQ ID NO: 499201 - DNA, 120 bp, Artificial Sequence
  ENSG00000163617_9 (sequence is synthesized)
aggattaagctggggaaagctgggaccctgtctgactggaagattcagctgaaggtcctgcgggcctggagagactacacaagattccagaagttggagcgggagactcaagccttggaa

SEQ ID NO: 499202 - DNA, 120 bp, Artificial Sequence
  ENSG00000163617_10 (sequence is synthesized)
aatgatcttagggaagaaaacagaaaacaacaactggccactgagtataaccggaaacaagttctccgacactgctttacagaatggcagcattggcatggcgccgagctcctgaagaga

SEQ ID NO: 499203 - DNA, 120 bp, Artificial Sequence
  ENSG00000163617_11 (sequence is synthesized)
gagctggctctcacaaaagaggaaactaggaagaagatggatgcactgctgcaggcagcatcactggggaaactcagtgccaatgggttatcaggcatcagtctacctgaggaggcaaca

SEQ ID NO: 499204 - DNA, 120 bp, Artificial Sequence
  ENSG00000163617_12 (sequence is synthesized)
gccatggtgggtccaccagtaaaaaatggacaggagactgctgtgccccctttgtgggaaaagcctcccttgggaagcagtggttgtatgctcagtcctcccctgggaagaacaacaaca

SEQ ID NO: 499205 - DNA, 120 bp, Artificial Sequence
  ENSG00000163617_13 (sequence is synthesized)
ggcaacttgcagggttcccttcagaatgtctctctgagtgcacctggcaataagcagcacaagaccctgggtgctgaaccctctcaacagcctggcagcaacgagacactcagaactacc

SEQ ID NO: 499206 - DNA, 120 bp, Artificial Sequence
  ENSG00000163617_14 (sequence is synthesized)
agccagaaagcagaaccgctttgcttgggtcatttccacaaccgccatgtcttccagcaacagctgattgagaagcaaaagaagaaacttcaggaacagcagaaaacaattctcgagctg

SEQ ID NO: 499207 - DNA, 120 bp, Artificial Sequence
  ENSG00000163617_15 (sequence is synthesized)
aagaaaaacctgcagctggcagaggctcagtgggcagcagagcatgccttagcagtcacagaagcacagagccacctgctgtcaaagcccagagaagaggaaccaagaacctgccagatg

SEQ ID NO: 499208 - DNA, 120 bp, Artificial Sequence
  ENSG00000163617_16 (sequence is synthesized)
cccgaaattctctttctggactcagaaggaaaccaaagcaattgatgacaccgcatcccatactaaaagctatggaagagagagcaattcaacgagctgaatgtaggcggatcttggcag

SEQ ID NO: 499209 - DNA, 120 bp, Artificial Sequence
  ENSG00000163617_17 (sequence is synthesized)
agaagaagaaaaaacaagaagaagaaaaattggcccagttaaaggcccaagaggaggaacgtcagaaaagggaggcagaagaaaaggaggcacagcttgaaagaaaacgagaagagaaga

SEQ ID NO: 499210 - DNA, 120 bp, Artificial Sequence
  ENSG00000163617_18 (sequence is synthesized)
gactgaagaaaatgaaagaacttgagaagcagaagagaattaagaggaaccagcagctggaagcaatagccaaagaacattatgaaagggtcttgctaaggaaaaaaggtctagagcctt

SEQ ID NO: 499211 - DNA, 120 bp, Artificial Sequence
  ENSG00000163617_19 (sequence is synthesized)
ggaagagattgagaatgcaaagcaaacaaaacatccaggtggcagaagaacattactctttgttcctgcagaggaaatacatgctgacgtggttccagcgtagtcaggaaagtctggcta

SEQ ID NO: 499212 - DNA, 120 bp, Artificial Sequence
  ENSG00000163617_20 (sequence is synthesized)
gaaagatggcccaggctgatcaattttattcccaaatactgcttaagagagtcatccagagctggctacagtacgtgattgatctgcaggaagaagtaagaaaattttgtgtacattttc

SEQ ID NO: 499213 - DNA, 120 bp, Artificial Sequence
  ENSG00000163617_21 (sequence is synthesized)
ttcaaaagaagattttcagggcctggtttaacatggtcagggaggtgaagatcgattctcagggcaagcatgagattgcagcggagcacagtgacaggaggatcctctggatcacccttc

SEQ ID NO: 499214 - DNA, 120 bp, Artificial Sequence
  ENSG00000163617_22 (sequence is synthesized)
ggacatggaagaagtttgtaaaatttatgaaagaggaaagagtaaaagaagaaaggcgacagcaacttcgtaggaaggtagttgaaattcttccagacttccaggtacctggaaggtacc

SEQ ID NO: 499215 - DNA, 120 bp, Artificial Sequence
  ENSG00000163617_23 (sequence is synthesized)
acgagctatatcagcaatcagatacttggtccttgagtaagacaagtctggtgaacgaatgagccagattagtgtaatatttaggacaggaagctcgactagtctgtatgtgtgttatct

SEQ ID NO: 499216 - DNA, 120 bp, Artificial Sequence
  ENSG00000163617_24 (sequence is synthesized)
ccacccacccacacacatacatacatacacctggtttattctctacgagctacttcttagatcaaaggaattattttgagaatttttattcccttctttgacttttcctggattgctagt

SEQ ID NO: 499217 - DNA, 120 bp, Artificial Sequence
  ENSG00000163617_25 (sequence is synthesized)
cattcactatagcatttatcacagtgggatcatccaaaggaacattctagagatcgtctgttcaaatatatcctatatatttttagcatagtaaactttaaaaaggacaagtgtttgcct

SEQ ID NO: 499218 - DNA, 120 bp, Artificial Sequence
  ENSG00000163617_26 (sequence is synthesized)
gactgagcctgtgaagaaaatgtgtccgtatagcacgacaggagttgctgatgtgaccttaatgaaacagaaataaacaggggtgagtgctcggaaaggaagggcgggccaaggcactca

SEQ ID NO: 499219 - DNA, 120 bp, Artificial Sequence
  ENSG00000163617_27 (sequence is synthesized)
gccttctagtgcagtagcatcagtgacacgcaccccaccagacctcgtccactttcaccacccctgaaggcagaccatgtatgaaaaggttctctacacagctgctgcagaggacagcag

SEQ ID NO: 499220 - DNA, 120 bp, Artificial Sequence
  ENSG00000163617_28 (sequence is synthesized)
cttatcctgatttcagagaaactgaggcaccagagatgcttctcttccgtgcaccttgataagcatgaaggacattccaaaaggtaatagctctatcatgacagtccagcaattcattaa

SEQ ID NO: 499221 - DNA, 120 bp, Artificial Sequence
  ENSG00000163617_29 (sequence is synthesized)
attatctgttcatgctcccacctgcaactgctgaataatacactcagtttgtcttctagtactcagctcagtttgatctagatattgagatacctatcttgaattcaaagaatgttttca

SEQ ID NO: 499222 - DNA, 120 bp, Artificial Sequence
  ENSG00000163617_30 (sequence is synthesized)
tctttaagatgctataaagactgataaaatgctctcttctatgaattgtgttagagaattacctgctagaaaaataatttttcattataaaatacacatttattatataacaaattcaag

SEQ ID NO: 499223 - DNA, 120 bp, Artificial Sequence
  ENSG00000163617_31 (sequence is synthesized)
tagtccataaatgcatatggtaaaatgagaaagtcctgtgcagtcctgagatgattactcttatttggtgtgctgaaaatttgagttgacaaaataaaattctgtggttttttaagtgaa

SEQ ID NO: 499224 - DNA, 120 bp, Artificial Sequence
  ENSG00000163617_32 (sequence is synthesized)
ccaaagcaattgatgacaccgcatcccatactaaaaggcagggctgtctcggtggtggccttggtggttgttatcttctctcctagagtagaatgtgtacactgggactgaattctggca

SEQ ID NO: 499225 - DNA, 120 bp, Artificial Sequence
  ENSG00000163617_33 (sequence is synthesized)
actcttgaggttttgagacttggcagaacctgacatcaaaaatctcagaatggtagacatgtgaggagtggagtacaccagagagccccactacttttttcctgccccttttgccaacct

SEQ ID NO: 499226 - DNA, 120 bp, Artificial Sequence
  ENSG00000163617_34 (sequence is synthesized)
ttttggcattcccagccaacacacacacaaaaaaacatagctgaaaggtatatcatttttctgtaatttgagatttggattgtgaaaaaaaaaggaataattacacaaatgagaaaactc

SEQ ID NO: 499227 - DNA, 120 bp, Artificial Sequence
  ENSG00000163617_35 (sequence is synthesized)
tgagtaactgccaaggacaaacactgataaaggacacctgtcattgtactttgttaatgttcaaatttgatcagtttacagtaatccaagataagttattattttataatattataactt

SEQ ID NO: 499228 - DNA, 120 bp, Artificial Sequence
  ENSG00000163617_36 (sequence is synthesized)
gttgataggattttagtaataaaacctacaaaccagatatgttaatttgataacatttttgatgcatctagaaacatttatttatttggtacaggcagggtcttcctgtgttgcccaggc

SEQ ID NO: 499229 - DNA, 120 bp, Artificial Sequence
  ENSG00000163617_37 (sequence is synthesized)
aggacatagggaagggtaccttaaatacatctcattgctcaattctatttaagaaaactaaatgaaatccagaatgtccagggtcattatgttttttcaagaacaaaagagtagtcaatc

SEQ ID NO: 499230 - DNA, 120 bp, Artificial Sequence
  ENSG00000163617_38 (sequence is synthesized)
ccattcactgctttgaaataaatgtgaaaatggtaaatcagtgttttattagtgtaaaatcctaagcctgtgtttgtttcacggagtgtgtataaactgtaagttatcattccatcagct

SEQ ID NO: 499231 - DNA, 120 bp, Artificial Sequence
  ENSG00000163617_39 (sequence is synthesized)
tttgtttttatagtcatttcttgtttcttgtctcacagtgctcaagtgatttagaaacttaccccttcaatcttataactgtttctattcatgtgttctcttaccatttttaggatacat

SEQ ID NO: 499232 - DNA, 120 bp, Artificial Sequence
  ENSG00000163617_40 (sequence is synthesized)
ggttcgggctcgaacttggaaaatgctcctggcgcctcagggaaggtccttctcaaagaaaaggatggggctgaatcgctggaaacggttcacaaggaagccgagtcccaagattaatac

SEQ ID NO: 499233 - DNA, 120 bp, Artificial Sequence
  ENSG00000163618_0 (sequence is synthesized)
ctcctcccttcgcgcttctgggtctgagcccagctcgcgaccgccgggcagaggatcagtcgcggcggccgaggctgagcagcagcgctctcgctccctgacctggggagaagcgcccac

SEQ ID NO: 499234 - DNA, 120 bp, Artificial Sequence
  ENSG00000163618_1 (sequence is synthesized)
ccgggagagctgatccccggctgcctccagcgccccccaccttttgcactccaagccgggggctccagagaccccgctccccaggcgccactatgctggacccttcgtccagcgaagaag

SEQ ID NO: 499235 - DNA, 120 bp, Artificial Sequence
  ENSG00000163618_2 (sequence is synthesized)
aatcggatgagatcgtggaggaggagagcggcaaggaggtgctcggctcggccccgtccggcgcgcgcctgtctcccagccgtaccagcgagggctcggccggcagcgccgggctggggg

SEQ ID NO: 499236 - DNA, 80 bp, Artificial Sequence
  ENSG00000163618_3 (sequence is synthesized)
gggccggggggctgcaacccagcagccgcgctggcggcggccggccctccagccccagcccgtcggtggtgagcgagaag

SEQ ID NO: 499237 - DNA, 120 bp, Artificial Sequence
  ENSG00000163618_4 (sequence is synthesized)
ccagccccagcccgtcggtggtgagcgagaaggagaaggaagagttggagcggctgcagaaagaggaggaggagaggaagaagaggctgcagctgtatgtgttcgtgatgcgctgcatcg

SEQ ID NO: 499238 - DNA, 120 bp, Artificial Sequence
  ENSG00000163618_5 (sequence is synthesized)
cctacccctttaatgccaagcagcccaccgacatggctcgccggcagcagaagatcagcaaacagcagctgcagacagtcaaggaccggtttcaggctttcctcaatggggaaacccaga

SEQ ID NO: 499239 - DNA, 120 bp, Artificial Sequence
  ENSG00000163618_6 (sequence is synthesized)
tcatggctgacgaagccttcatgaacgctgtgcagagttactatgaggtgttcctgaagagcgaccgtgtggcccgcatggttcagagtggaggctgttccgccaacgactcccgggagg

SEQ ID NO: 499240 - DNA, 120 bp, Artificial Sequence
  ENSG00000163618_7 (sequence is synthesized)
tcttcaagaagcacattgagaagagagtgcgcagcctgcctgagattgacggcctcagcaaggagactgtgctgagctcctggatggccaaatttgatgccatctaccgtggagaagagg

SEQ ID NO: 499241 - DNA, 120 bp, Artificial Sequence
  ENSG00000163618_8 (sequence is synthesized)
acccgcggaagcagcaggcccggatgacagccagcgcagcctccgagctgattctgagcaaggagcaactctatgagatgttccagaacattcttgggatcaagaagttcgaacatcagc

SEQ ID NO: 499242 - DNA, 120 bp, Artificial Sequence
  ENSG00000163618_9 (sequence is synthesized)
tcctttacaatgcctgccagctggacaatccagatgagcaagcagcccagatcagacgagagctggatggacgtctacaaatggcagaccaaatagccagggaacgcaaatttcccaagt

SEQ ID NO: 499243 - DNA, 120 bp, Artificial Sequence
  ENSG00000163618_10 (sequence is synthesized)
ttgtatccaaagaaatggaaaacatgtacattgaggagctgaagtcatctgtcaacctgctcatggccaacttggagagcatgccggtatccaaaggcggggagttcaagctccagaaac

SEQ ID NO: 499244 - DNA, 120 bp, Artificial Sequence
  ENSG00000163618_11 (sequence is synthesized)
tcaaacgcagccacaatgcttccatcatcgacatgggcgaggagagtgagaaccagctctccaagtcagatgtcgtgctgtctttctcattggaggtggtaattatggaagtccaaggcc

SEQ ID NO: 499245 - DNA, 120 bp, Artificial Sequence
  ENSG00000163618_12 (sequence is synthesized)
tcaaatctttggctccaaatcgcatcgtatattgcacaatggaggtggaaggaggagagaaactacagactgatcaggccgaggcttctaaaccaacctggggcacccagggtgacttct

SEQ ID NO: 499246 - DNA, 120 bp, Artificial Sequence
  ENSG00000163618_13 (sequence is synthesized)
ccacaacccatgcactgccagctgtgaaggtgaagctgttcacagagagcacaggcgtcctggcgttggaggacaaggagcttgggcgggttattctccatcccaccccgaacagcccca

SEQ ID NO: 499247 - DNA, 120 bp, Artificial Sequence
  ENSG00000163618_14 (sequence is synthesized)
aacagtcagagtggcacaaaatgacagtctccaaaaactgccccgaccaagatctcaaaatcaaacttgctgtccgaatggataagcctcaaaacatgaagcattctgggtatttatggg

SEQ ID NO: 499248 - DNA, 120 bp, Artificial Sequence
  ENSG00000163618_15 (sequence is synthesized)
ccatcggtaagaatgtctggaagagatggaagaaaaggttttttgtattggtgcaggtcagtcagtacacgtttgccatgtgcagttatcgggagaagaaagcggagcctcaggaacttc

SEQ ID NO: 499249 - DNA, 120 bp, Artificial Sequence
  ENSG00000163618_16 (sequence is synthesized)
tacaattggatggctacactgtggattacaccgacccccagccaggtttggagggtggccgagccttcttcaatgctgtcaaggagggagacaccgtgatatttgccagtgacgatgaac

SEQ ID NO: 499250 - DNA, 120 bp, Artificial Sequence
  ENSG00000163618_17 (sequence is synthesized)
aagaccgcatcctgtgggtccaggccatgtatcgggccacggggcagtcacacaagcctgtgcccccgacccaagtccagaaactcaacgccaagggaggaaatgtacctcagctggatg

SEQ ID NO: 499251 - DNA, 120 bp, Artificial Sequence
  ENSG00000163618_18 (sequence is synthesized)
cccctatctctcaattttacgcagatagagctcaaaaacatggcatggatgaatttatctcttccaacccctgtaactttgaccacgcttccctctttgagatggtacaacgccttactt

SEQ ID NO: 499252 - DNA, 120 bp, Artificial Sequence
  ENSG00000163618_19 (sequence is synthesized)
cctgggctggttcagtcctggccaggtgtttgtactagacgagtattgcgcccgaaatggagtccgggggtgtcaccgacatctctgctacctcagagacttgcttgaacgggcagaaaa

SEQ ID NO: 499253 - DNA, 120 bp, Artificial Sequence
  ENSG00000163618_20 (sequence is synthesized)
tggcgccatgatcgaccccacccttcttcactacagctttgccttctgtgcatcccatgtccatgggaacaggcctgatggaattggaactgtgactgttgaagaaaaggaacgttttga

SEQ ID NO: 499254 - DNA, 120 bp, Artificial Sequence
  ENSG00000163618_21 (sequence is synthesized)
agaaatcaaagagaggctccgagttctgctagaaaatcagattacacattttaggtattgctttccatttggtcgacctgaaggtgctttgaaagctactctctcactcttggaaagggt

SEQ ID NO: 499255 - DNA, 120 bp, Artificial Sequence
  ENSG00000163618_22 (sequence is synthesized)
tttgatgaaagatattgttaccccagtgccacaagaggaggtaaaaacagttatccgtaaatgtctggaacaggctgcgttagtcaactattctcggctctcagagtatgccaaaatcga

SEQ ID NO: 499256 - DNA, 120 bp, Artificial Sequence
  ENSG00000163618_23 (sequence is synthesized)
agggaaaaagagagaaatgtatgagcatcctgtcttctgcttggcctcccaagtgatggatttaaccattcaaaatgtaggccggttaatcactcctgccaaaaagcttgaagatacaat

SEQ ID NO: 499257 - DNA, 120 bp, Artificial Sequence
  ENSG00000163618_24 (sequence is synthesized)
acgtcttgctgaactagtcattgaagttcttcagcaaaatgaggagcaccacgcagaggcctttgcgtggtggtcagatttaatggtggagcatgcggagacgttcctgtcactctttgc

SEQ ID NO: 499258 - DNA, 120 bp, Artificial Sequence
  ENSG00000163618_25 (sequence is synthesized)
agtagacatggatgcagccttagaggtgcaacctccagacacatgggacagttttccactatttcagctgctgaatgattttctccgtactgactataatttgtgcaatggaaaatttca

SEQ ID NO: 499259 - DNA, 120 bp, Artificial Sequence
  ENSG00000163618_26 (sequence is synthesized)
caaacacctgcaagacctgtttgccccacttgttgttagatatgtggatctgatggagtcctcaattgcacaatccattcacaggggctttgagcgggagtcatgggaaccagtcaataa

SEQ ID NO: 499260 - DNA, 120 bp, Artificial Sequence
  ENSG00000163618_27 (sequence is synthesized)
tgggtcaggcacctcagaagatctgttttggaaacttgacgcccttcagaccttcattcgggacctgcactggcctgaagaagagtttggaaagcacctggaacaacggctgaagttgat

SEQ ID NO: 499261 - DNA, 120 bp, Artificial Sequence
  ENSG00000163618_28 (sequence is synthesized)
ggcaagtgacatgatcgaatcttgtgtcaaaagaaccaggattgcatttgaagttaagctgcaaaaaaccagtcgatcaacagattttcgagtcccacagtcaatatgcaccatgtttaa

SEQ ID NO: 499262 - DNA, 120 bp, Artificial Sequence
  ENSG00000163618_29 (sequence is synthesized)
tgttatggttgatgccaaagctcaatcaacaaaactttgcagcatggaaatgggccaagagcatcaataccattcaaaaatagacgaactaattgaagaaactgttaaagaaatgataac

SEQ ID NO: 499263 - DNA, 120 bp, Artificial Sequence
  ENSG00000163618_30 (sequence is synthesized)
actcttggttgcaaagttcgttactatcttggaaggagtgctggcaaaattatccagatatgacgaagggactttgttttcttcttttctgtcatttaccgtgaaggcagcttccaaata

SEQ ID NO: 499264 - DNA, 120 bp, Artificial Sequence
  ENSG00000163618_31 (sequence is synthesized)
tgtggatgtacctaaacccgggatggacgtggccgacgcctacgtgactttcgtccgccattctcaggatgtcctgcgtgataaggtcaatgaggagatgtacatagaaaggttatttga

SEQ ID NO: 499265 - DNA, 120 bp, Artificial Sequence
  ENSG00000163618_32 (sequence is synthesized)
tcaatggtacaacagctccatgaacgtgatctgcacctggttgacggaccggatggacttacagcttcatatttatcagttgaaaacactaattaggatggtaaagaaaacctacagaga

SEQ ID NO: 499266 - DNA, 120 bp, Artificial Sequence
  ENSG00000163618_33 (sequence is synthesized)
tttccgattgcaaggggtcctggactccaccttaaacagcaagacctatgaaacgatccggaaccgtctcactgtggaggaagccacagcatcagtgagtgaaggtgggggactgcaggg

SEQ ID NO: 499267 - DNA, 120 bp, Artificial Sequence
  ENSG00000163618_34 (sequence is synthesized)
catcagcatgaaggacagcgatgaggaagacgaagaagacgattagaccatttggtcctagagtctgctgggacagagtcctgtaatcagtgcatgtccttagtctgttagttaaaccca

SEQ ID NO: 499268 - DNA, 120 bp, Artificial Sequence
  ENSG00000163618_35 (sequence is synthesized)
ttaggaattttctgtcaactaccatgcccatgagatgtttatcaatacaactgccattttagctatgtggtaccaagattagcaaatgaccttcatatccactgatttcctgatgtccat

SEQ ID NO: 499269 - DNA, 120 bp, Artificial Sequence
  ENSG00000163618_36 (sequence is synthesized)
gtctatatgtttacaagcaatatggagcaccattctttaaatactgttcatggagaatacatagtctaaccactaggcgtgtccctgttatcagcaaagatcaatgatgcttcattcatg

SEQ ID NO: 499270 - DNA, 120 bp, Artificial Sequence
  ENSG00000163618_37 (sequence is synthesized)
tactatgtatgcattggtggtaaatggatgtgagggcaagtacatcaagtacattcactctgtttcacgtatgtggatgccagttaattaaatgagtacgtaaataaattaattaaaaca

SEQ ID NO: 499271 - DNA, 120 bp, Artificial Sequence
  ENSG00000163618_38 (sequence is synthesized)
atttttattttttgaaaaacaaaaggcaagtctccaacaattaacttttgatgctttctgttcccctaaaaccaaaaaatgaaccccttgtgtcgttgttaacccatcctttcatttact

SEQ ID NO: 499272 - DNA, 120 bp, Artificial Sequence
  ENSG00000163618_39 (sequence is synthesized)
catataattagccaaaaaaaaaaggatggctacataccaatggattgattctcttaattgccacggcaagggggcgatcctatcatgacttaacatcaagcgcgcagttcaaaactactg

SEQ ID NO: 499273 - DNA, 120 bp, Artificial Sequence
  ENSG00000163618_40 (sequence is synthesized)
tcttctgtcaaagttttctcctcttaaatgttattttgcttttacgtctcaactgtgtatgtaaaaaaaatgaatatttaaattacaaccctagactaaaaatgtgtttataataagatg

SEQ ID NO: 499274 - DNA, 120 bp, Artificial Sequence
  ENSG00000163618_41 (sequence is synthesized)
tggatatttccttcagtagattgtaaccataatttaaattattttgttccacactgttttttatatctgtcatgtacattgcattttgatctgtaactgcacaaccctggggtttgctgc

SEQ ID NO: 499275 - DNA, 120 bp, Artificial Sequence
  ENSG00000163618_42 (sequence is synthesized)
agagctatttctttccatgtaaagtagtggatccatcttgcttttgccttatataaagcctacagttatggaagtgtggaaaactgtggcttctcaataaatattcagatgtcctaagaa

SEQ ID NO: 499276 - DNA, 120 bp, Artificial Sequence
  ENSG00000163618_43 (sequence is synthesized)
aatcggcaagatgcctcttcggctcttggctgcatcgacagcttgcaacactcggcatcttttctggaggcgcctccttcagcagccgcagatggcatccggctgcgggctcggggctcg

SEQ ID NO: 499277 - DNA, 120 bp, Artificial Sequence
  ENSG00000163618_44 (sequence is synthesized)
aaatgtaggccggttaatcactcctgccaaaaagcttgaagatacaatacgtcttgctgaactagtcattgaagttcttcagcaaaatgaggagcaccacgcagagccacatgttgataa

SEQ ID NO: 499278 - DNA, 120 bp, Artificial Sequence
  ENSG00000163618_45 (sequence is synthesized)
accctgaagggagcaaaactccctccccacctgaaccagaagctaaaaaagataccaaaaaggaatccaaaaaaagaaaagattccaaaacccaggcaaatcaagagctgaaaaggcctg

SEQ ID NO: 499279 - DNA, 120 bp, Artificial Sequence
  ENSG00000163618_46 (sequence is synthesized)
tttgtaaaagtgtttaagtgtctacacacattagaagcatcgaaagccttgagtaaggaacaatgaacttggtaatatttttaagagcttcagatctctctctatcaaagaactggagtc

SEQ ID NO: 499280 - DNA, 120 bp, Artificial Sequence
  ENSG00000163618_47 (sequence is synthesized)
attaagttgtctaaaaattactgacggatgcagtgccatcacctcccaaacatgctaatatttgtctttctgtgttcttagcatcaataccattcaaaaatagacgaactaattgaagaa

SEQ ID NO: 499281 - DNA, 120 bp, Artificial Sequence
  ENSG00000163618_48 (sequence is synthesized)
tggacaggttctgcacaccctccccaccatacacagactcagggaagggtagatggctgctctttcaattggctgtagtttgaaactaattggagaaggggattgcttgtcaaagtcagc

SEQ ID NO: 499282 - DNA, 120 bp, Artificial Sequence
  ENSG00000163618_49 (sequence is synthesized)
tggagtagtggctgtcaacgtctaacttccattcacctgccctccatctgtcccaaacccaaaataatctggctgccaattttttcatggttgttggctttaagaggaaaagatccctgt

SEQ ID NO: 499283 - DNA, 120 bp, Artificial Sequence
  ENSG00000163618_50 (sequence is synthesized)
acaactgcctcacagtgccatttgatgtcccgtctttgtgccatgtcaaatcatctccaggggtacaagatttgtgcttgaagagtcacagtacccaatctctgtttactgaataatttc

SEQ ID NO: 499284 - DNA, 120 bp, Artificial Sequence
  ENSG00000163618_51 (sequence is synthesized)
actatagtctgtgtatttccctggtttacactcatccttttgggtgtttttcctagagcattccatggtttcttttctgtttagtaaatccgtgccagcttgcaaagtgacgtgaatgag

SEQ ID NO: 499285 - DNA, 120 bp, Artificial Sequence
  ENSG00000163618_52 (sequence is synthesized)
aaagatggaattagtaatgttgttgaatgtgaacactcaagacaaaagaaagaaaacattttcccccttagctggctttgtcttctcaatgaccggaatgaaatgtcaagtgaacgtgtt

SEQ ID NO: 499286 - DNA, 120 bp, Artificial Sequence
  ENSG00000163618_53 (sequence is synthesized)
aattcttaatggggataccaatgaaagcttcaggggaagagaacatttaacagaggctctcacttttctctgaattttatttggatagacattagcattttattacagccttggaaaaga

SEQ ID NO: 499287 - DNA, 120 bp, Artificial Sequence
  ENSG00000163618_54 (sequence is synthesized)
tgagatgacaattattgacaaggttcccaggacacaaataaataaaatgaataaattgtttatttgataaatttcaattatctacaaggtgtaaaacactatagatgcgaatgattaaaa

SEQ ID NO: 499288 - DNA, 120 bp, Artificial Sequence
  ENSG00000163618_55 (sequence is synthesized)
aataaagagcaaagaccctgttttcaggatgcagcatacttacagggaaataaatcatgtacatttagtagtgaatataaaaaagtaaagattccattctggggaaaactgcagattgct

SEQ ID NO: 499289 - DNA, 120 bp, Artificial Sequence
  ENSG00000163618_56 (sequence is synthesized)
tctgttgagaaaaccaaagaatggtcctggagaagatggctcttgaaaatggcccttgaatttggctagaaagcatttgcaagtacagaaagggtggcaagggcattccagcaaaacgaa

SEQ ID NO: 499290 - DNA, 120 bp, Artificial Sequence
  ENSG00000163618_57 (sequence is synthesized)
gtggtatccgccaacacctatagtctcagaagtgctgtactgtgtagggaacgtaggttctaaaaaggaggtataaaaggaggaagagaaaagaaagaaatctataaatataggctgagt

SEQ ID NO: 499291 - DNA, 120 bp, Artificial Sequence
  ENSG00000163618_58 (sequence is synthesized)
caaggtataaaagagctttgcggacgaaactaagaggaagagagcttaaagaaacaagtacatttagcagggataggataaacactggggacagagagctcctgaaccagtgtgacccgg

SEQ ID NO: 499292 - DNA, 120 bp, Artificial Sequence
  ENSG00000163618_59 (sequence is synthesized)
aacactggggacagagagctcctgaaccagtgtgacccggctccagtggtgtcctgtttctgtgcctctccattcatgtgaacatgtgtgtgcatgtgtgtgcgtgtgtgtgtgtgtgtg

SEQ ID NO: 499293 - DNA, 120 bp, Artificial Sequence
  ENSG00000163618_60 (sequence is synthesized)
gttagtcatacattttgacattgaattttacaatgtttatgcatctaagcttgcagccgttatacttggataatctatgtctttgtttctgctataaaaccatgttttctcttggtgtgg

SEQ ID NO: 499294 - DNA, 120 bp, Artificial Sequence
  ENSG00000163618_61 (sequence is synthesized)
ttatgtcagaagctcttttctccattacagaatccctttaacaattataaatgtgttcccgatttcctgggttgagatagttttacttaccaaagaaacaagactgagcgggaggaagtt

SEQ ID NO: 499295 - DNA, 120 bp, Artificial Sequence
  ENSG00000163618_62 (sequence is synthesized)
atcagtagaaacagatccaattccccagcctccctatcttagcttcccccttttcagctgctacatgagaaatattcccaagagggtaatcgagtttggcacctgcttgtggagaacttg

SEQ ID NO: 499296 - DNA, 120 bp, Artificial Sequence
  ENSG00000163618_63 (sequence is synthesized)
taaaaattgcctcagtagcttagagtttaagatgcccttccctccccatcccagatctggtaatcctatctcattacatgaatgtattctctttgtgtattttcttaaaggttaaaatga

SEQ ID NO: 499297 - DNA, 120 bp, Artificial Sequence
  ENSG00000163618_64 (sequence is synthesized)
acctacccaatgtgaacctacccaatgtgaaccttcccaaagtaccaaatctaccagttaacatccctctaggcatcccacaaatgcctactttttcggcaccgtcatggatggctgcta

SEQ ID NO: 499298 - DNA, 120 bp, Artificial Sequence
  ENSG00000163618_65 (sequence is synthesized)
tactaaatgatgtttatttcactatatcccatgtgctctgactctgagacttcaaggtttgaagggggctaaacatgaaatacaagttcccctggaattcagactggttgaatccaagca

SEQ ID NO: 499299 - DNA, 120 bp, Artificial Sequence
  ENSG00000163618_66 (sequence is synthesized)
cccctggaattcagactggttgaatccaagcagtttcactggccaagaaaacctttatgttttggccgggcacagtggttcacgcctgtaatgccagcactttggaaggctgaggcgggc

SEQ ID NO: 499300 - DNA, 78 bp, Artificial Sequence
  ENSG00000163618_67 (sequence is synthesized)
aggcgggcggatctcctgaggtaaggagtttgagaccatcctggccagcggcgtggtggcgggtgcctgtaatcccag

SEQ ID NO: 499301 - DNA, 90 bp, Artificial Sequence
  ENSG00000163618_68 (sequence is synthesized)
tccagcctgggcaacagaataaatgagactccgtctccgaaaacctcctttatgttttaaatattactgttttcccaaaggaaaaaagtt

SEQ ID NO: 499302 - DNA, 120 bp, Artificial Sequence
  ENSG00000163618_69 (sequence is synthesized)
tatgttttaaatattactgttttcccaaaggaaaaaagtttgtaatttttggaacataatgacattgtcaaactcatgaactcagctctaaaaagaaggcaacataagccagggttcaga

SEQ ID NO: 499303 - DNA, 120 bp, Artificial Sequence
  ENSG00000163618_70 (sequence is synthesized)
ttcttcttgagctgggtaaaaatacaacactttcagtttaagagaaactaaaaacaaagaaaacaattaagtacattgtttcagtttaactgataaaatttcaattgtaacaaccagtag

SEQ ID NO: 499304 - DNA, 120 bp, Artificial Sequence
  ENSG00000163618_71 (sequence is synthesized)
cacaaactatcacaacccattcaataatctactcctaacacccttttaagaattattattcctgactaatggcccaggcatatccaatttttcttttctatctcctccctggacaacttg

SEQ ID NO: 499305 - DNA, 120 bp, Artificial Sequence
  ENSG00000163618_72 (sequence is synthesized)
aagcagacatttgaatctgcattttcaaaatgagcgttccaacatacgcgagcctgcaatgaaaaattacgctgtagcatttaataactaatctaaaaaacaaatgtaacagcaatcaat

SEQ ID NO: 499306 - DNA, 120 bp, Artificial Sequence
  ENSG00000163618_73 (sequence is synthesized)
tctgttaatcttcccacttcaggtagcataattacaatctagagagtggtatagtacatttatgctgtctttaaagaacatgtgtacaaaatgtcactaaatttgatatgggctgtcata

SEQ ID NO: 499307 - DNA, 120 bp, Artificial Sequence
  ENSG00000163618_74 (sequence is synthesized)
gacttaatatagcttcatatgcaaatttgaagctggagcactgcttttttctaatatatattataataatggtgataataataaaatggctttatggtttgctcactactaattacatgg

SEQ ID NO: 499308 - DNA, 120 bp, Artificial Sequence
  ENSG00000163618_75 (sequence is synthesized)
cacttaacatttgcatgaattttttttaaaaaactgataactattctcaatttcttatccactagttctaatggccataaaagtagcctgccactttcgctgaattttaacacaaactct

SEQ ID NO: 499309 - DNA, 120 bp, Artificial Sequence
  ENSG00000163618_76 (sequence is synthesized)
aatttaatagtatcagctgtctggtcaagtatattttccagctataactaagggttagcttgtttgtgaacagtttttcttttaattgttttgattggaaatctacttgaaatgcattac

SEQ ID NO: 499310 - DNA, 120 bp, Artificial Sequence
  ENSG00000163618_77 (sequence is synthesized)
acaaccttcttgcctttttaaacagggtactgactataatcttttctcaatgactcaggatcaccattgtgaccatgtctttccccagtggctgcatagtgacccactcccctccagggc

SEQ ID NO: 499311 - DNA, 120 bp, Artificial Sequence
  ENSG00000163618_78 (sequence is synthesized)
ctcccaagatataggggaggcttgcccctgccctcgatagtcccaaaccccagcggttggtgagtctgcatgtctggtgttgcagttgggcagcctcctccctcaccgtcaggcataagg

SEQ ID NO: 499312 - DNA, 120 bp, Artificial Sequence
  ENSG00000163618_79 (sequence is synthesized)
aaaaatgatagctctctcttatctgcacagttttttcaaacaatccccctcttccctatttctgctccatcaagggatggaaaccaaacttgttggaattggttgggagtgggagcttga

SEQ ID NO: 499313 - DNA, 120 bp, Artificial Sequence
  ENSG00000163618_80 (sequence is synthesized)
ggactccattatgagaaaactacacatgttttgtgctgaggctttatcatttttattttgacgttggctcctctgaggcccccttttcttcttggttctagagtagattctaaaggtagg

SEQ ID NO: 499314 - DNA, 120 bp, Artificial Sequence
  ENSG00000163618_81 (sequence is synthesized)
taaggctgtggaatggtataatattatgggggggggggggaatcatagtaattcatgtttgtattacaatatatggctttcaaaacatttttacatacattattctagctgatgaccata

SEQ ID NO: 499315 - DNA, 120 bp, Artificial Sequence
  ENSG00000163618_82 (sequence is synthesized)
acagtccgtggaggtaagtaggggagctgttagtaatcccattttatagatagcataactaaggcccagagaagtttttttttaactcttcttttacagaaaagtttaagtgatattcac

SEQ ID NO: 499316 - DNA, 120 bp, Artificial Sequence
  ENSG00000163618_83 (sequence is synthesized)
aaattccaatttgtgggagatccagtaaaaatccatgcagtgtgactgaagagcttgaaaaaggaggagatggagaaaggatttgctcattcattcttgaatttgtccattcagcaaata

SEQ ID NO: 499317 - DNA, 120 bp, Artificial Sequence
  ENSG00000163618_84 (sequence is synthesized)
tttactgggcccctactatatgctaggtaccattttgtatgctggggatgcaatagaaaacaggccaaacaaagttcctgggttcatggagcttatgttctagtgggataagagagaaaa

SEQ ID NO: 499318 - DNA, 120 bp, Artificial Sequence
  ENSG00000163618_85 (sequence is synthesized)
caaatagtgtataatacaacatcagctattggtaagtgctattggaaaaagaagagtcaaaagggagcaaatcatggagtttcttaactacatgggtaagatgaaccacactgatttttt

SEQ ID NO: 499319 - DNA, 120 bp, Artificial Sequence
  ENSG00000163618_86 (sequence is synthesized)
aaaataccagagtttttaaaacttgaatgaagtgcccctttgaagacagtgaaacttcgtgaaaagagaaggagtggtgcaaatacgcatcattgtagattactgtttcttctaacattt

SEQ ID NO: 499320 - DNA, 120 bp, Artificial Sequence
  ENSG00000163618_87 (sequence is synthesized)
tgggttactgatagatctgccgcacttgactttgtaccttagctctaagatggttgcatgcgcccaggaaaaggccatattgccacaagcatcaccaggggagaaatagaaacaataata

SEQ ID NO: 499321 - DNA, 120 bp, Artificial Sequence
  ENSG00000163618_88 (sequence is synthesized)
agtttctcaagtcccccaggtagagatccccatccctactgagaatgccctttgatgcacagttgccaaacggagagaaggagagaggtgcctgcttagaactgatagctatcacttaca

SEQ ID NO: 499322 - DNA, 120 bp, Artificial Sequence
  ENSG00000163618_89 (sequence is synthesized)
tctcattggagaacctctattgttttgtatcataaaactgcaacaattataggaccatcatggaacctgctcaatccattcgctgaaaattgtttgaaagtgtaacacttgactactgtg

SEQ ID NO: 499323 - DNA, 120 bp, Artificial Sequence
  ENSG00000163618_90 (sequence is synthesized)
gctttgggttgtcctcattgtttttcaaattaataccttgtcattgtttcagcaggtgttaagaaatgttactagcatcccaggggccaagcattggccctttgcatgataattgtttgc

SEQ ID NO: 499324 - DNA, 120 bp, Artificial Sequence
  ENSG00000163618_91 (sequence is synthesized)
tttgtatcaggaaaaaaaaatacagtcctactgtttctaaaccttcctcattttcaccctggaaattacacagaagtgttaactaacttcaatttacagtgcctgacagtcacgtctagt

SEQ ID NO: 499325 - DNA, 120 bp, Artificial Sequence
  ENSG00000163618_92 (sequence is synthesized)
agagaaatgatactttgtgatctaaggtaaatcacagtaatgaaaactaatctttttagttattagcagacatatatatctactgtggaaatttgaggggtttgtggccactctcctaat

SEQ ID NO: 499326 - DNA, 120 bp, Artificial Sequence
  ENSG00000163618_93 (sequence is synthesized)
gacctatattacagtgttttaataggtttctttggagataactttgattgtgacatctcaagcagagtgctttctgagtttctttttttttttacttccctacaataagtcatttcctaa

SEQ ID NO: 499327 - DNA, 120 bp, Artificial Sequence
  ENSG00000163618_94 (sequence is synthesized)
aatcaaatcctctcctccttcccctgccttttgtttcttctcttcttcttcttctttttaatccttggactttaaggctgcactggaagcaaagacaaatggtttagtgtctcctctgag

SEQ ID NO: 499328 - DNA, 80 bp, Artificial Sequence
  ENSG00000163618_95 (sequence is synthesized)
cactggaagcaaagacaaatggtttagtgtctcctctgagtgaactaattaattagcaaatactatatccactcaggtta

SEQ ID NO: 499329 - DNA, 120 bp, Artificial Sequence
  ENSG00000163618_96 (sequence is synthesized)
aaacacaattttttttacttagtactttctcaatattttaaaagaggaaaaaggaatgggaagttccatcacccgtctgataatatattaaggacagtggaaaacagtatgtttggatat

SEQ ID NO: 499330 - DNA, 120 bp, Artificial Sequence
  ENSG00000163618_97 (sequence is synthesized)
tctttaatgcaggtttcaatccaaggcaaagtcagagaacatctatgggttatgcagtaaagatttatccattagataaatttgccaggaaaaaatttatcatagaaaaactatttataa

SEQ ID NO: 499331 - DNA, 120 bp, Artificial Sequence
  ENSG00000163618_98 (sequence is synthesized)
aatcctacaatctcaatgcccttcttagccaggcttgatttctggaaagaggaagcagttctaatatcaattcctaccagcccaggctgtggacagcaatcccatgcctacaaagctgat

SEQ ID NO: 499332 - DNA, 120 bp, Artificial Sequence
  ENSG00000163618_99 (sequence is synthesized)
ccagcagaagcatctcagggtgtgtgagggcaagtagagggtacaagtgaatggtaaacaaggaagagtggctgtctgaaaattcgttttcatgttttcctgtttctttacagaaacccg

SEQ ID NO: 499333 - DNA, 120 bp, Artificial Sequence
  ENSG00000163618_100 (sequence is synthesized)
aatacactctaacatttgtggattaagccatggatgagtgttcagtatctgtttgtcaagtagatttctaaggcatgtgctgatgagaatgtcagtcacttggaagtgattcttggctgg

SEQ ID NO: 499334 - DNA, 120 bp, Artificial Sequence
  ENSG00000163618_101 (sequence is synthesized)
agttggggtggccatatagttctctaagctaaatgaagtttgacgaccttatttattaggctggtgtctcgaacagatctgtgtttgccagaatgaaagtcattttcacatttgaagtgc

SEQ ID NO: 499335 - DNA, 120 bp, Artificial Sequence
  ENSG00000163618_102 (sequence is synthesized)
attttatcactttgaacatctggacagcaagagaggcctttcttgcatcaaacaacttccaggatgtataatgttagatcaccctgctacccaatccccagccagcaggttctgaatttc

SEQ ID NO: 499336 - DNA, 120 bp, Artificial Sequence
  ENSG00000163618_103 (sequence is synthesized)
ggtttttttcccaagccatcttagagagatctttcgtgacatttttccttagtataattgaatctgagacacttaaatgaccagctgtgggaaatgaggcttctttgaatgccaagtggc

SEQ ID NO: 499337 - DNA, 82 bp, Artificial Sequence
  ENSG00000163618_104 (sequence is synthesized)
gggaaaacctgtccatgcctgaagcagcttgaccccagcaaacaccctgcctccatggagtgaactgctcctacccctcctg

SEQ ID NO: 499338 - DNA, 120 bp, Artificial Sequence
  ENSG00000163618_105 (sequence is synthesized)
ctccctggggagggacagaaggttcctaaaactgacagtttcgcctccatgatctttaaaagagcagaagctggctgtgaggctgcagtgctgcctcgattggggtagtgtggtctctgt

SEQ ID NO: 499339 - DNA, 120 bp, Artificial Sequence
  ENSG00000163618_106 (sequence is synthesized)
tgcggctgggctccaaggagagccacaattggctctgatgaggaaggagcctagaaatgaaagattgcaaagagggcttctgtacgccatggctgagactgtgtcgtttcttgcaaggtg

SEQ ID NO: 499340 - DNA, 120 bp, Artificial Sequence
  ENSG00000163618_107 (sequence is synthesized)
aaacttggcagttctaccttgcaagtaaaaacctaaattaatttttttaaaagaaattaagtcagaaacaaggcttcggaaaaactgtgagtgttaggcataaactgattttggatgatc

SEQ ID NO: 499341 - DNA, 120 bp, Artificial Sequence
  ENSG00000163618_108 (sequence is synthesized)
tttaggtgagaaagggtggagttaccatcagaaacatgtttttatttatgcttttcgaatccccactggtgtgcgatgtgtgtgtgcgcgcgcgtgcatgtgcgtgtgtattggttagcg

SEQ ID NO: 499342 - DNA, 120 bp, Artificial Sequence
  ENSG00000163618_109 (sequence is synthesized)
tgagagtatgcatcatctcaattctctaaccatttctttcttttttgcatcttttctgtgcacagttcatatagatcccctataaataaatatataggtccatccacaccttttcatttt

SEQ ID NO: 499343 - DNA, 120 bp, Artificial Sequence
  ENSG00000163618_110 (sequence is synthesized)
atttgtaaattgtttggtataagcggcagagcgtaatgaaacctggtgaagtttaaaagattagatttttttttatactgacacttcataacactgttcatatgtctccgagtgagattt

SEQ ID NO: 499344 - DNA, 120 bp, Artificial Sequence
  ENSG00000163618_111 (sequence is synthesized)
atgaatatatgagcagtactgcaaaattatactgcaccagagacttcctgcaccacaggggtggcagtctaaagtgacacagcttcaagcatttttcacagacaagaagcaaaatttaac

SEQ ID NO: 499345 - DNA, 120 bp, Artificial Sequence
  ENSG00000163618_112 (sequence is synthesized)
ccccttaaggggaagtatgatttcaacagcttgaaatgagctcatttgtagatggtttttttttctctcatcttccataattttttggtgttaagattaaaacagattgcacagccaata

SEQ ID NO: 499346 - DNA, 120 bp, Artificial Sequence
  ENSG00000163618_113 (sequence is synthesized)
taagggcacataagctgcccagagtacagtttggcccttaaagagaaattttcattcattgtctttatcagcactcctcaatcaggtaaatgaagataaacttgcccctaaattcctaag

SEQ ID NO: 499347 - DNA, 120 bp, Artificial Sequence
  ENSG00000163618_114 (sequence is synthesized)
gctctcagcccaatttccagtattgtacttagcagacagggtgtggaattttcaaacggtaagtggcaaggaacatcaattaatccagtggagaagccctcatctctctggcaccaaaga

SEQ ID NO: 499348 - DNA, 120 bp, Artificial Sequence
  ENSG00000163618_115 (sequence is synthesized)
cagtgacattaggaaataattaatgtattgaatataaatggtgtaaaattaaccaataaaaaagagaatcagaagagcaaaagatggtctgtatgaattgaaacataggaaatgtctgtc

SEQ ID NO: 499349 - DNA, 120 bp, Artificial Sequence
  ENSG00000163618_116 (sequence is synthesized)
tgtcttagattgtctgtcttggattggtccagtacccagtaccttgcaattttgtataaactaactaacgttcattaaactctatgctctcaaattctctttaaccattttgtttcctcc

SEQ ID NO: 499350 - DNA, 120 bp, Artificial Sequence
  ENSG00000163623_0 (sequence is synthesized)
ggcgagctgccgcctcccgcgtggagggtttggacatctctgctgcgcagctaggcgagcaactcccggcagcggcatttttggttcagttggcagctcgcctccgggcgcgccgagtgc

SEQ ID NO: 499351 - DNA, 120 bp, Artificial Sequence
  ENSG00000163623_1 (sequence is synthesized)
ctctccgctcgcgccctcggcgcttccggctcctctgagccccgcggggggcaccagccagcgccctcgctgcaaggctacggtctccggcgtggccgtgggatgttagcggtgggggca

SEQ ID NO: 499352 - DNA, 120 bp, Artificial Sequence
  ENSG00000163623_2 (sequence is synthesized)
atggagggcacccggcagagcgcattcctgctcagcagccctcccctggccgccctgcacagcatggccgagatgaagaccccgctgtaccctgccgcgtatcccccgctgcctgccggc

SEQ ID NO: 499353 - DNA, 120 bp, Artificial Sequence
  ENSG00000163623_3 (sequence is synthesized)
cccccctcctcctcgtcctcgtcgtcgtcctcctcgtcgccctccccgcctctgggcacccacaacccaggcggcctgaagcccccggccacgggggggctctcatccctcggcagcccc

SEQ ID NO: 499354 - DNA, 120 bp, Artificial Sequence
  ENSG00000163623_4 (sequence is synthesized)
ccgcagcagctctcggccgccaccccacacggcatcaacgatatcctgagccggccctccatgcccgtggcctcgggggccgccctgccctccgcctcgccctccggttcctcctcctcc

SEQ ID NO: 499355 - DNA, 120 bp, Artificial Sequence
  ENSG00000163623_5 (sequence is synthesized)
tcttcctcgtccgcctctgcctcctccgcctctgccgccgccgcggctgctgccgcggccgcagccgccgcctcatccccggcggggctgctggccggactgccacgctttagcagcctg

SEQ ID NO: 499356 - DNA, 120 bp, Artificial Sequence
  ENSG00000163623_6 (sequence is synthesized)
gccgccgccgcccgggctctacttcagccccagcgccgcggccgtggccgccgtgggccggtaccccaagccgctggctgagctgcctggccggacgcccatcttctggcccggagtgat

SEQ ID NO: 499357 - DNA, 120 bp, Artificial Sequence
  ENSG00000163623_7 (sequence is synthesized)
ggagtgatgcagagcccgccctggagggacgcacgcctggcctgtacccctcatcaaggatccattttgttggacaaagacgggaagagaaaacacacgagacccactttttccggacag

SEQ ID NO: 499358 - DNA, 120 bp, Artificial Sequence
  ENSG00000163623_8 (sequence is synthesized)
cagatcttcgccctggagaagactttcgaacaaacaaaatacttggcggggcccgagagggctcgtttggcctattcgttggggatgacagagagtcaggtcaaggtctggttccagaac

SEQ ID NO: 499359 - DNA, 120 bp, Artificial Sequence
  ENSG00000163623_9 (sequence is synthesized)
cgccggaccaagtggaggaagaagcacgctgccgagatggccacggccaagaagaagcaggactcggagacagagcgcctcaagggggcctcggagaacgaggaagaggacgacgactac

SEQ ID NO: 499360 - DNA, 120 bp, Artificial Sequence
  ENSG00000163623_10 (sequence is synthesized)
tcctactgcacgcgtccgagccggagagctcatcctgaacgccgccgcccgccgcaccttcccggctccggcctccacctctggggccgcgaggggcgcggggaccgcgtgcacgccgcg

SEQ ID NO: 499361 - DNA, 120 bp, Artificial Sequence
  ENSG00000163623_11 (sequence is synthesized)
cggaggacccggccctgcctgcggggaccctttgctatttttgagatgtacatatctatttttttaaccttgaagttgtgggaggggatgtaggggagagagactccggggttgataagg

SEQ ID NO: 499362 - DNA, 120 bp, Artificial Sequence
  ENSG00000163623_12 (sequence is synthesized)
caagaaagaccaccaaatgcactgcgtaaatgtcgctactgaaacccgcagccgggccacggtcccagccgcgtccccataggcgggcagcggcctcagcgcccgggtccccctcgcccc

SEQ ID NO: 499363 - DNA, 120 bp, Artificial Sequence
  ENSG00000163623_13 (sequence is synthesized)
cagattttgcccccgcgggcggcggggtagggggcgccgagaggtgctgtggaagggttcacgctcaccgcatgggggacctcggagcgaagcgggcgggcgctgccacagatgggaaga

SEQ ID NO: 499364 - DNA, 120 bp, Artificial Sequence
  ENSG00000163623_14 (sequence is synthesized)
gggacgtttccccccccacacactgctgtgcaactaaagtaacctgttgaaggctctttgtaaataaatcgtgagttacactgactagaagttactttattgtgaatatttaaaatgtaa

SEQ ID NO: 499365 - DNA, 120 bp, Artificial Sequence
  ENSG00000163623_15 (sequence is synthesized)
aatgcttttttgaatttcgtataaaaagatggactttcttccttctcctcctcccctttgaagagcgactcaagccacaccttcccttttattttgaacttaatttgagaagcgtagaat

SEQ ID NO: 499366 - DNA, 120 bp, Artificial Sequence
  ENSG00000163623_16 (sequence is synthesized)
agaatgtccccaccttctccgtcccctcctctcgttcctctttcccgtttggatttgcagaatctcacctttgcccttcatctcttctcgccctgccctgccctgcccaccccctggatc

SEQ ID NO: 499367 - DNA, 120 bp, Artificial Sequence
  ENSG00000163623_17 (sequence is synthesized)
tacactgcgctcccgccccccggacttgaagtggaagacgtgggaaccagggagggcctctcacctgcctccctgttcctctctgaaattgcacagtcgtttgttgctatttattagtga

SEQ ID NO: 499368 - DNA, 120 bp, Artificial Sequence
  ENSG00000163623_18 (sequence is synthesized)
tttaaagaaaatattggggagggaggggctacaatagcttgtatttaactcctttctgataaaaatgcgtgttaaagtaggtggtgggaattgttacaaccgctctgggtctgaaacata

SEQ ID NO: 499369 - DNA, 120 bp, Artificial Sequence
  ENSG00000163623_19 (sequence is synthesized)
aaaattcatttagttactgtaattgaatttgaagtgttttgtatcataagaatactatagaatatgtaaattgttttctttttacagctaataatggtgatatattagcatctttaacct

SEQ ID NO: 499370 - DNA, 120 bp, Artificial Sequence
  ENSG00000163623_20 (sequence is synthesized)
ttattaatttatataaggaattcggtttgtaaagagaagaaaaccccctttgcaagaccagttaaatgtaatgcactttctgtttcaaaggataaatcaaattaaaaaaaacagtttgaa

SEQ ID NO: 499371 - DNA, 120 bp, Artificial Sequence
  ENSG00000163623_21 (sequence is synthesized)
cattgaagacagtccagcgtccccagggcagggcgagcgcttccagccgctcaccagcgctgggcccgcgctttcccacctgcctccactctgggggctggcacacgctgcgtccgggca

SEQ ID NO: 499372 - DNA, 120 bp, Artificial Sequence
  ENSG00000163623_22 (sequence is synthesized)
catttggggacatcgtggagctcaacaccctaacacaagagcgagccaggagaagagtgagatgaagggacacggcctggggaaaatgtaccatcccgcaaagaccttgcttgaggcaaa

SEQ ID NO: 499373 - DNA, 120 bp, Artificial Sequence
  ENSG00000163623_23 (sequence is synthesized)
ctgagttgccccaagatcacgctagtcttcggggtagtaggccgcagcgccgcggaggctcccagccttccaggtggacttcagggcccagcctggggtccttttctcgctcagttcttc

SEQ ID NO: 499374 - DNA, 120 bp, Artificial Sequence
  ENSG00000163623_24 (sequence is synthesized)
gcctttcagcgagtctccgaagtttcttccaagtctccggacctccttagtgcggctgagcggcagtaactgcgggaagttgcgaaagccaagtggagatcaaggatccattttgttgga

SEQ ID NO: 499375 - DNA, 120 bp, Artificial Sequence
  ENSG00000163624_0 (sequence is synthesized)
gccttctctgctcgcgcctggcgcccggagcctgcccgggacctccgccggagccgcgctcgctgcaggcggcctcgagcgctctctcgttgatgccgttttggaggtgaccggcgcggc

SEQ ID NO: 499376 - DNA, 120 bp, Artificial Sequence
  ENSG00000163624_1 (sequence is synthesized)
ggccgctctatggtggggccgcgttagtggctgcggctccgcgggactccagggcgcggctgcgaggtggcggggcgccccgcctgcagaaccctgcttgcagctcaggtttcggggtgc

SEQ ID NO: 499377 - DNA, 120 bp, Artificial Sequence
  ENSG00000163624_2 (sequence is synthesized)
ttgaggaggccgccacggcagcgcgggagcggaagatgttggagctgaggcaccggggaagctgccccggccccagggaagcggtgtcgccgccacaccgcgagggagaggcggccggcg

SEQ ID NO: 499378 - DNA, 120 bp, Artificial Sequence
  ENSG00000163624_3 (sequence is synthesized)
gcgaccacgaaaccgagagcaccagcgacaaagaaacagatattgatgacagatatggagatttggattccagaacagattctgatattccggaaattccaccatcctcagatagaaccc

SEQ ID NO: 499379 - DNA, 120 bp, Artificial Sequence
  ENSG00000163624_4 (sequence is synthesized)
ctgagattctcaaaaaagctctatctggtttatcttcaaggtggaaaaactggtggatacgtggaattctcactctaactatgatctcgttgtttttcctgatcatctatatgggatcct

SEQ ID NO: 499380 - DNA, 120 bp, Artificial Sequence
  ENSG00000163624_5 (sequence is synthesized)
tcatgctgatgcttcttgttctgggcatccaagtgaaatgcttccatgaaattatcactataggttatagagtctatcattcttatgatctaccatggtttagaacactaagttggtact

SEQ ID NO: 499381 - DNA, 120 bp, Artificial Sequence
  ENSG00000163624_6 (sequence is synthesized)
ttctattgtgtgtaaactactttttctatggagagactgtagctgattattttgctacatttgttcaaagagaagaacaacttcagttcctcattcgctaccatagatttatatcatttg

SEQ ID NO: 499382 - DNA, 120 bp, Artificial Sequence
  ENSG00000163624_7 (sequence is synthesized)
ccctctatctggcaggtttctgcatgtttgtactgagtttggtgaagaaacattatcgtctgcagttttatatgttcgcatggactcatgtcactttactgataactgtcactcagtcac

SEQ ID NO: 499383 - DNA, 120 bp, Artificial Sequence
  ENSG00000163624_8 (sequence is synthesized)
accttgtcatccaaaatctgtttgaaggcatgatatggttccttgttccaatatcaagtgttatctgcaatgacataactgcttacctttttggatttttttttgggagaactccattaa

SEQ ID NO: 499384 - DNA, 120 bp, Artificial Sequence
  ENSG00000163624_9 (sequence is synthesized)
ttaagttgtctcctaaaaagacttgggaaggattcattggtggtttcttttccacagttgtgtttggattcattgctgcctatgtgttatccaaataccagtactttgtctgcccagtgg

SEQ ID NO: 499385 - DNA, 120 bp, Artificial Sequence
  ENSG00000163624_10 (sequence is synthesized)
aataccgaagtgatgtaaactccttcgtgacagaatgtgagccctcagaacttttccagcttcagacttactcacttccaccctttctaaaggcagtcttgagacaggaaagagtgagct

SEQ ID NO: 499386 - DNA, 120 bp, Artificial Sequence
  ENSG00000163624_11 (sequence is synthesized)
tgtaccctttccagatccacagcattgcactgtcaacctttgcatctttaattggcccatttggaggcttctttgctagtggattcaaaagagccttcaaaatcaaggattttgcaaata

SEQ ID NO: 499387 - DNA, 120 bp, Artificial Sequence
  ENSG00000163624_12 (sequence is synthesized)
ccattcctggacatggtgggataatggacagatttgattgtcagtatttgatggcaacttttgtacatgtgtacatcacaagttttataaggggcccaaatcccagcaaagtgctacagc

SEQ ID NO: 499388 - DNA, 120 bp, Artificial Sequence
  ENSG00000163624_13 (sequence is synthesized)
agttgttggtgcttcaacctgaacagcagttaaatatatataaaaccctgaagactcatctcattgagaaaggaatcctacaacccaccttgaaggtataactggatccagagagggaag

SEQ ID NO: 499389 - DNA, 120 bp, Artificial Sequence
  ENSG00000163624_14 (sequence is synthesized)
gactgacaagaaggaattattcagaaaaacactgacagatgttttataaattgtacagaaaaatagttaaaaatgcaataggttgaagttttggagatatgtttctctctgaaattactg

SEQ ID NO: 499390 - DNA, 120 bp, Artificial Sequence
  ENSG00000163624_15 (sequence is synthesized)
tgaatatttaacaaacacttacttgatctatgttatgaaataagtagcaaattgccagcaaaatgtcttgtaccttttctaaagtgtattttctgatgtgaacttccttccccttacttg

SEQ ID NO: 499391 - DNA, 120 bp, Artificial Sequence
  ENSG00000163624_16 (sequence is synthesized)
ctaggtttcataatttaaaagactggtatttaaaagagtcaaacactataaaatgagtaagttgacgatgttttaagattgcacctggcagtgtgcctttttgcacaaatatttactttt

SEQ ID NO: 499392 - DNA, 120 bp, Artificial Sequence
  ENSG00000163624_17 (sequence is synthesized)
ttagttggatttaaaaaaaaaaaaaaaagattgtctacttttcaaagaagtaaccatttgccaggggaaaacattctgcttttaggtagtttcaaaattcaggggagggagcctgaaatt

SEQ ID NO: 499393 - DNA, 120 bp, Artificial Sequence
  ENSG00000163624_18 (sequence is synthesized)
tttgccatgattggtttgttagaaagagcaggcatcagactacttctgataaaattgtttggaaggtcacgacctcgcaaaaacttttcaagagcaacaaggaagaattctgctgtgaag

SEQ ID NO: 499394 - DNA, 120 bp, Artificial Sequence
  ENSG00000163624_19 (sequence is synthesized)
aacacagtgtacggatcctccgcatattatctcaacagaggacagtagctcaggaggcagcttcaaacggtgacctgtggcctgggccatctcttcgtcatgtgcttcacttttccctgt

SEQ ID NO: 499395 - DNA, 120 bp, Artificial Sequence
  ENSG00000163624_20 (sequence is synthesized)
ttccctgtgaactggcttccatggttctgtagggtagtgagtcggggttgtggctgcagcagagcaggagatgcttgcccgagtgggagcaacccacccccgtgtccccaatgcctcact

SEQ ID NO: 499396 - DNA, 120 bp, Artificial Sequence
  ENSG00000163624_21 (sequence is synthesized)
cctggcttctagtgcagccctttgtagactcacctcgcaagaaggaagatctgcctggagacctgatcccagtccagctttttgaccataggtcatctttgtccccttgctcctttgcat

SEQ ID NO: 499397 - DNA, 120 bp, Artificial Sequence
  ENSG00000163624_22 (sequence is synthesized)
catgtcataaaatttgaggatatcagctgattattttttcttccaagaatgaaaatcaagcagaattgattcctacacgaaaaaaaagcacacgaatgccaaacctttcctttggtggac

SEQ ID NO: 499398 - DNA, 120 bp, Artificial Sequence
  ENSG00000163624_23 (sequence is synthesized)
tggacactaaccagatgagagtaaatttcttatccgtggacgtatgtaagctactgctgctgtgtgctctccacagccatatttattgtattaaacaatcagcactaaaccttcaaaaat

SEQ ID NO: 499399 - DNA, 120 bp, Artificial Sequence
  ENSG00000163624_24 (sequence is synthesized)
tgcccagtgttcctagttaaatgttcagaggggagaaatagatatattttaaataatgttttgctaatgaaaagagtaaatatttttgtttaaatcagcaaaaactttccattattttat

SEQ ID NO: 499400 - DNA, 120 bp, Artificial Sequence
  ENSG00000163624_25 (sequence is synthesized)
atttccgtctactatacctaaaacaaaagattgccgttatacctgggttccactgatgcagtcagccagcacctcctcacatgcacacatgattagacataggtgcactcggtaccaaga

SEQ ID NO: 499401 - DNA, 120 bp, Artificial Sequence
  ENSG00000163624_26 (sequence is synthesized)
gtccattttatggtccagcatatactccattgattcatcatcactgcatgtgttcagccagtgtatctcacactatccatacaaatctaaaattgatactggaaatgttattataggagg

SEQ ID NO: 499402 - DNA, 120 bp, Artificial Sequence
  ENSG00000163624_27 (sequence is synthesized)
cagtgatcgcatttaaaatcaggccacctacaagtttaattttcaacatctcatgtttttatttgtcccattacagcctcaaatgttggtcataaaaaaaatttaggctaccaaagttta

SEQ ID NO: 499403 - DNA, 120 bp, Artificial Sequence
  ENSG00000163624_28 (sequence is synthesized)
aagaataaaatgaaaattttataagaacttacattaaaaactcagtagtttgcatgagtaagaactccttgagatacacagatccccccacatttgtatttaaaataattggtgaggcat

SEQ ID NO: 499404 - DNA, 120 bp, Artificial Sequence
  ENSG00000163624_29 (sequence is synthesized)
tgaaatccagaattataagaaagcattactgaatatgtgtgttataaaatcaatattattataaacaaaataggaagctagaaatatttgggatcacagtaatagcttttctcaaatata

SEQ ID NO: 499405 - DNA, 120 bp, Artificial Sequence
  ENSG00000163624_30 (sequence is synthesized)
cttttagaattgaatgtacattatcctatatgtaaaaaagcaaattattaattttaatggagctctcgattgacctttttagcatacttttatagcatgtatattaaaatagaatatatt

SEQ ID NO: 499406 - DNA, 120 bp, Artificial Sequence
  ENSG00000163624_31 (sequence is synthesized)
ttagcaaaagattgccataaaaccctgacttggctcattttgatatttgcactgtgaagagggcttaaattccaatgtagcaatgtggtggcagacaaatgaaaaactaggaagttcttt

SEQ ID NO: 499407 - DNA, 120 bp, Artificial Sequence
  ENSG00000163624_32 (sequence is synthesized)
cacagtaatgcctagttgttccaaatttgctatatttggaggtgctctactggtacttcctgcttgactctctgacctgtgggatgcacattcttcctcagcgctttttccttgttgtgg

SEQ ID NO: 499408 - DNA, 120 bp, Artificial Sequence
  ENSG00000163624_33 (sequence is synthesized)
tgacgtacattcactatctgagagtgaaagaccacacacacccctctttttaaaattattgtatctcttccttttcactttggtttgaacaaagatagtgtcaccttgttccgtgaaaaa

SEQ ID NO: 499409 - DNA, 120 bp, Artificial Sequence
  ENSG00000163624_34 (sequence is synthesized)
gaaaaagcataaacagtgtatatttagggtatatgggtgatagcttatgatgtgtgtcaatcagttctctgaatcttttactgaaactgagacaggaaaataaaactgaaacaaatcata

SEQ ID NO: 499410 - DNA, 80 bp, Artificial Sequence
  ENSG00000163625_0 (sequence is synthesized)
gacgtcgcgccggtcgccccttccccgtagcccgtgcgccctcggcgcggagccccggcccgccgcggtcccgtctcctg

SEQ ID NO: 499411 - DNA, 120 bp, Artificial Sequence
  ENSG00000163625_1 (sequence is synthesized)
ccccggcccgccgcggtcccgtctcctgggcctgtcccgcccgcgccctccgccggccctcaggtataatacttctccacgtctgcttcaggaagaaagtgcctgccattcttatcattt

SEQ ID NO: 499412 - DNA, 120 bp, Artificial Sequence
  ENSG00000163625_2 (sequence is synthesized)
ctaagcaggttcatgccagcccagaacagagaatcagctggagcccagatttcaagttttgagtaaaataccttcaagcgaatgggccctattgtgctcacacattcagaacctgttacc

SEQ ID NO: 499413 - DNA, 120 bp, Artificial Sequence
  ENSG00000163625_3 (sequence is synthesized)
caaggaattccctaaagaattagaagtgcgtctcaccaaccagccaagatgaacatggtgaagaggatcatggggcggccgaggcaggaggagtgcagcccacaagacaacgccttagga

SEQ ID NO: 499414 - DNA, 120 bp, Artificial Sequence
  ENSG00000163625_4 (sequence is synthesized)
ctgatgcacctccgccggctcttcacggagttgtgccatcctccccggcacatgactcagaaggaacaagaagagaaactgtatatgatgctgccagtgtttaacagggtttttggaaat

SEQ ID NO: 499415 - DNA, 120 bp, Artificial Sequence
  ENSG00000163625_5 (sequence is synthesized)
gctccgccgaatacaatgacagaaaaattttctgatcttctgcagttcacaacacaagtctcacgactaatggtgacagaaattcgaaggagagcatcaaacaaatccacagaggctgca

SEQ ID NO: 499416 - DNA, 120 bp, Artificial Sequence
  ENSG00000163625_6 (sequence is synthesized)
agtcgggccatagttcagttcctagagattaatcagagtgaagaagccagtagaggctggatgcttctaacgacaattaatttgttagcttcctctggtcagaaaaccgtggactgcatg

SEQ ID NO: 499417 - DNA, 120 bp, Artificial Sequence
  ENSG00000163625_7 (sequence is synthesized)
acaacaatgtcagtgccttccaccctggttaaatgtttatatctgttttttgaccttccacatgtgcctgaggcagttggaggtgcacagaatgagctacctctagcagaacgtcgagga

SEQ ID NO: 499418 - DNA, 120 bp, Artificial Sequence
  ENSG00000163625_8 (sequence is synthesized)
ctactccagaaagtttttgtacagatcttagtgaaactgtgcagttttgtttcccctgcggaggagctggctcagaaagatgatctccagcttctattcagtgcaataacctcttggtgc

SEQ ID NO: 499419 - DNA, 120 bp, Artificial Sequence
  ENSG00000163625_9 (sequence is synthesized)
cctccctataacctgccttggagaaagagtgctggagaagtcctcatgaccatatctcgtcatggtcttagtgtcaatgtagtgaagtatattcatgagaaagagtgtttatctacatgt

SEQ ID NO: 499420 - DNA, 120 bp, Artificial Sequence
  ENSG00000163625_10 (sequence is synthesized)
gttcagaatatgcagcaatcagatgacctgtctcccctagaaattgtcgaaatgtttgctgggctttcttgtttcctcaaagattccagcgatgtttcccaaacacttctggatgatttt

SEQ ID NO: 499421 - DNA, 120 bp, Artificial Sequence
  ENSG00000163625_11 (sequence is synthesized)
cggatatggcaaggatataattttctttgtgatctcttgcttagattggaacaagcaaaagaggcagaatccaaagatgccttgaaagatctggttaatctgataacttccctaacaaca

SEQ ID NO: 499422 - DNA, 120 bp, Artificial Sequence
  ENSG00000163625_12 (sequence is synthesized)
tatggtgtcagtgaactaaaaccagctggtattaccacaggggcaccctttttattgcctggatttgcagtacctcagcctgcaggcaaaggtcacagtgtgagaaacgtccaggccttt

SEQ ID NO: 499423 - DNA, 120 bp, Artificial Sequence
  ENSG00000163625_13 (sequence is synthesized)
gcagttcttcagaatgcatttttaaaagcaaaaaccagcttccttgcccaaatcatccttgatgctatcacaaatatttacatggctgacaatgccaattacttcatcctagagtcacag

SEQ ID NO: 499424 - DNA, 120 bp, Artificial Sequence
  ENSG00000163625_14 (sequence is synthesized)
cacacattgtcacagtttgcagagaagatttctaaactcccagaagtacaaaacaaatactttgagatgctggagtttgttgtttttagcttaaattatataccttgtaaagaacttatt

SEQ ID NO: 499425 - DNA, 120 bp, Artificial Sequence
  ENSG00000163625_15 (sequence is synthesized)
agtgtcagtatcctcttaaaatctagctcttcttatcactgtagcattattgcaatgaaaacacttcttaagtttacaagacatgactacatatttaaagacgtgttcagggaggttggc

SEQ ID NO: 499426 - DNA, 120 bp, Artificial Sequence
  ENSG00000163625_16 (sequence is synthesized)
cttttggaggtcatggtaaaccttttgcataaatatgctgccctgttgaaggatccaactcaggcactaaatgaacaaggggactcaagaaataatagttcagttgaagaccaaaaacac

SEQ ID NO: 499427 - DNA, 120 bp, Artificial Sequence
  ENSG00000163625_17 (sequence is synthesized)
ctggctttattggttatggagaccttgacagtgcttcttcaaggatcaaacacaaatgcaggaatttttcgagaatttggaggtgcaagatgtgcacataatatagtaaagtaccctcaa

SEQ ID NO: 499428 - DNA, 120 bp, Artificial Sequence
  ENSG00000163625_18 (sequence is synthesized)
tgccggcagcatgccttgatgactatccaacagctggtgctctccccaaatggggacgatgacatgggcactctcctggggctaatgcattcagccccaccgacggaattgcagttgaag

SEQ ID NO: 499429 - DNA, 120 bp, Artificial Sequence
  ENSG00000163625_19 (sequence is synthesized)
actgatattttaagggccctcctgtcggtccttcgagaaagccatcgttcaagaacagtttttaggaaagttggaggatttgtgtacattacatccttgctcgttgctatggaaagatct

SEQ ID NO: 499430 - DNA, 120 bp, Artificial Sequence
  ENSG00000163625_20 (sequence is synthesized)
ttgagctgtccacccaagaatggctgggagaaagtgaaccagaatcaagtgtttgaacttcttcacactgtgttctgcacgttgactgcagcaatgcgctatgagccagccaactctcat

SEQ ID NO: 499431 - DNA, 120 bp, Artificial Sequence
  ENSG00000163625_21 (sequence is synthesized)
ttcttcaaaacagagattcagtatgagaagttggcagatgctgttcgatttcttggctgcttctcagacctaagaaaaataagcgccatgaatgtcttcccctcaaatacacagccattt

SEQ ID NO: 499432 - DNA, 120 bp, Artificial Sequence
  ENSG00000163625_22 (sequence is synthesized)
caaagacttttagaggaagatgtaatctcaatagaatcagtgtcacccacgttacggcactgcagtaaactttttatttatctttacaaagtagccacagattcttttgacagtcgtgca

SEQ ID NO: 499433 - DNA, 120 bp, Artificial Sequence
  ENSG00000163625_23 (sequence is synthesized)
gaacagatccctccttgcctgacaagtgagtcttctctcccctctccttggggtacaccagctttgtccaggaaaaggcatgcatatcattctgtttcaactccccctgtttaccctcct

SEQ ID NO: 499434 - DNA, 120 bp, Artificial Sequence
  ENSG00000163625_24 (sequence is synthesized)
aaaaatgttgccgacctgaaactacatgtgacaacttcatctctgcagagttctgatgcagtcatcattcatcctggagccatgcttgccatgctggacctactggcctctgttgggtca

SEQ ID NO: 499435 - DNA, 120 bp, Artificial Sequence
  ENSG00000163625_25 (sequence is synthesized)
gtgacacagccagaacatgctttggatcttcaacttgccgtggcaaatattttacaatccctggtgcacacagaaaggaaccagcaagtcatgtgtgaagctggtcttcatgcacgactg

SEQ ID NO: 499436 - DNA, 120 bp, Artificial Sequence
  ENSG00000163625_26 (sequence is synthesized)
ctgcagaggtgcagtgctgcattggctgatgaggaccactcactgcacccgcccctgcagcggatgtttgaacgattagcctctcaggctctggaacccatggtgttgagggagttttta

SEQ ID NO: 499437 - DNA, 120 bp, Artificial Sequence
  ENSG00000163625_27 (sequence is synthesized)
cgtttggcaagtcctttaaattgtggtgcctgggacaaaaaactgctaaaacaatatagggtccacaaaccaagttcactgagttatgaaccagaaatgagaagtagtatgatcacatct

SEQ ID NO: 499438 - DNA, 120 bp, Artificial Sequence
  ENSG00000163625_28 (sequence is synthesized)
ctggaaggtctgggtactgataatgtttttagcttacatgaagataaccattaccggataagcaagagcctggtaaaatctgcggaaggaagtactgtacccctgaccagggtgaagtgt

SEQ ID NO: 499439 - DNA, 120 bp, Artificial Sequence
  ENSG00000163625_29 (sequence is synthesized)
ctggtctccatgacaaccccacatgacatcagacttcatgggtcatcagttactccagcttttgttgaatttgacacatcacttgaagggtttggatgtctttttttgcccagtttggcc

SEQ ID NO: 499440 - DNA, 120 bp, Artificial Sequence
  ENSG00000163625_30 (sequence is synthesized)
cctcataatgctcctacaaataataccgtcacaacaggtcttattgatggggctgtggtcagtggcattggttctggtgaaagattcttccctcctccctccggcttaagttactctagc

SEQ ID NO: 499441 - DNA, 120 bp, Artificial Sequence
  ENSG00000163625_31 (sequence is synthesized)
tggttttgtattgaacattttagttctcctccaaataaccaccctgtcagacttcttactgttgtgcgccgagcaaattcttctgagcaacattacgtgtgccttgcaatagttctatca

SEQ ID NO: 499442 - DNA, 120 bp, Artificial Sequence
  ENSG00000163625_32 (sequence is synthesized)
gcaaaagaccgatctctgattgtttccaccaaagaggaactcctccaaaattatgttgatgattttagtgaagagtcctcattttatgaaattctcccatgctgtgctcgctttcgatgt

SEQ ID NO: 499443 - DNA, 120 bp, Artificial Sequence
  ENSG00000163625_33 (sequence is synthesized)
ggagagcttatcattgagggacagtggcatcatttggtcctggtaatgagcaaaggcatgttgaaaaacagtactgcagccctttatattgatggacagcttgttaacactgtaaagctt

SEQ ID NO: 499444 - DNA, 120 bp, Artificial Sequence
  ENSG00000163625_34 (sequence is synthesized)
cattatgtccacagtactccagggggttcaggttcggcaaatccaccagtggtgagcacggtctatgcctacattggtactccacctgcccaacgccaaattgcctcattggtttggcgc

SEQ ID NO: 499445 - DNA, 120 bp, Artificial Sequence
  ENSG00000163625_35 (sequence is synthesized)
ctgggacccacacattttctagaagaagttttaccttcttcaaatgttactaccatttatgaacttggaccaaattatgttggaagctttcaggctgtatgtatgccatgtaaagatgca

SEQ ID NO: 499446 - DNA, 120 bp, Artificial Sequence
  ENSG00000163625_36 (sequence is synthesized)
aaatccgaaggggtggtgccatcccctgtgtcattagtaccagaggagaaagtgtcatttggcctctatgcactctctgtgtcgtctctaacagtggcaagaatccggaaagtgtataac

SEQ ID NO: 499447 - DNA, 120 bp, Artificial Sequence
  ENSG00000163625_37 (sequence is synthesized)
aaattggatagcaaagccattgctaagcagttaggcatttcctcacatgagaatgccactcctgtgaagttgatacacaattcagcaggacatcttaatggatctgcacggacaattggg

SEQ ID NO: 499448 - DNA, 120 bp, Artificial Sequence
  ENSG00000163625_38 (sequence is synthesized)
gccgctctgattggatacttgggagtaagaacatttgtccctaagcctgttgccactactttgcagtacgttggtggagctgcagccatcctgggcctggtggccatggcctctgatgtg

SEQ ID NO: 499449 - DNA, 120 bp, Artificial Sequence
  ENSG00000163625_39 (sequence is synthesized)
gaagggttatatgcagcagtcaaggccctggtttgtgtggtcaagagtaacccactagccagcaaagaaatggaaagaatcaagggctaccagttgctggcaatgttgcttaagaagaaa

SEQ ID NO: 499450 - DNA, 120 bp, Artificial Sequence
  ENSG00000163625_40 (sequence is synthesized)
cgttcccttcttaacagccacatcctccatctaactttttctttggtgggaactgttgatagtggacatgagacctccattattccaaattcaactgctttccaggacctcctctgtgat

SEQ ID NO: 499451 - DNA, 120 bp, Artificial Sequence
  ENSG00000163625_41 (sequence is synthesized)
tttgaagtctggctccatgcaccatatgaacttcatctttccttatttgaacactttattgaactgctcacagagtccagtgaagcctcaaagaatgccaaattaatgagagaattccag

SEQ ID NO: 499452 - DNA, 120 bp, Artificial Sequence
  ENSG00000163625_42 (sequence is synthesized)
ttaatcccaaagctgctcctgactcttcgagatatgtctttatcccagcctactattgctgctattagtaatgtcctgagcttcttactgcaaggttttcctagcagcaatgatctgctc

SEQ ID NO: 499453 - DNA, 120 bp, Artificial Sequence
  ENSG00000163625_43 (sequence is synthesized)
agatttgggcagtttatttcttctactttgccaacctttgcggtttgtgagaaatttgtagtaatggaaataaataatgaagagaagcttgacactggaactgaagaggagtttggaggt

SEQ ID NO: 499454 - DNA, 120 bp, Artificial Sequence
  ENSG00000163625_44 (sequence is synthesized)
cttgtatcagctaatcttatacttttgaggaacagacttctggatatcttgctaaaactaatttatacatctaaagaaaagacaagcattaatttgcaagcttgtgaagaactggtgaag

SEQ ID NO: 499455 - DNA, 120 bp, Artificial Sequence
  ENSG00000163625_45 (sequence is synthesized)
acactgggttttgactggatcatgatgtttatggaggaacacttacattccaccacagttacagcagccatgaggattcttgttgtcctactaagtaatcagtctattctcatcaagttt

SEQ ID NO: 499456 - DNA, 120 bp, Artificial Sequence
  ENSG00000163625_46 (sequence is synthesized)
aaagaaggactcagtggtggaggatggcttgaacagacagattctgtcttaactaataagattggaactgtattaggattcaacgtgggcagaagtgctggtgggagatcgacggtcagg

SEQ ID NO: 499457 - DNA, 120 bp, Artificial Sequence
  ENSG00000163625_47 (sequence is synthesized)
gagattaaccgagatgcttgtcattttcctggttttccagtccttcagtcattccttcctaaacacactaatgtccctgccctctattttctcctcatggccttgtttctgcagcagcca

SEQ ID NO: 499458 - DNA, 120 bp, Artificial Sequence
  ENSG00000163625_48 (sequence is synthesized)
gttagtgagctgcctgagaacctgcaggtcagtgtgcctgtcatcagctgccggagtaagcagggttgccagtttgatttggattccatttggacattcatctttggagttcctgcctcc

SEQ ID NO: 499459 - DNA, 120 bp, Artificial Sequence
  ENSG00000163625_49 (sequence is synthesized)
agcggaactgtggtctcttctatccataacgtatgcacagaagctgtttttttattattgggaatgctccgcagcatgctgacttcaccttggcaatcagaagaagagggatcttggctc

SEQ ID NO: 499460 - DNA, 120 bp, Artificial Sequence
  ENSG00000163625_50 (sequence is synthesized)
cgagaatatcctgtgaccctgatgcagttcttcagatatttgtatcacaacgtgccagaccttgcctccatgtggatgagccctgacttcctgtgtgcattagcagccaccgtcttcccc

SEQ ID NO: 499461 - DNA, 120 bp, Artificial Sequence
  ENSG00000163625_51 (sequence is synthesized)
ttcaatattcgcccttactcagagatggtgactgaccttgatgatgaagttggatctccagcagaagagtttaaagcgtttgcagcagacacagggatgaacaggagccaatcagagtac

SEQ ID NO: 499462 - DNA, 120 bp, Artificial Sequence
  ENSG00000163625_52 (sequence is synthesized)
tgcaatgtgggcaccaagacatatctgaccaatcacccggctaaaaagttcgtttttgacttcatgcgggtcttaatcatagacaacctctgtctcactcctgccagcaagcaaactcca

SEQ ID NO: 499463 - DNA, 120 bp, Artificial Sequence
  ENSG00000163625_53 (sequence is synthesized)
ctaattgatcttttgttggaggcttcccctgaaaggtctacaagaactcagcaaaaagaatttcaaacttacattttggatagcgtgatggaccatttgcttgcagctgatgtgttatta

SEQ ID NO: 499464 - DNA, 120 bp, Artificial Sequence
  ENSG00000163625_54 (sequence is synthesized)
ggggaagatgcatctctgcctattaccagtggaggaagctaccaggtattggtgaacaatgtgttttatttcacacagcgtgtggtggacaagctttggcaaggcatgttcaacaaagaa

SEQ ID NO: 499465 - DNA, 120 bp, Artificial Sequence
  ENSG00000163625_55 (sequence is synthesized)
tctaaacttcttatagattttataattcaactaattgcacagtcaaagagaagatcacagggattgtcactggatgcagtgtatcattgcctcaataggaccatcttgtaccagttctca

SEQ ID NO: 499466 - DNA, 120 bp, Artificial Sequence
  ENSG00000163625_56 (sequence is synthesized)
cgggcacacaaaaccgttcctcagcaagtagctctgcttgattcactcagggtcctcactgtaaacagaaacttgatcctgggacctgggaaccatgaccaagaattcattagctgtctg

SEQ ID NO: 499467 - DNA, 120 bp, Artificial Sequence
  ENSG00000163625_57 (sequence is synthesized)
gcccactgcttgataaatctacatgttggaagcaacgtggatggatttggactggaagcagaagcccgcatgaccacatggcacattatgatcccctcggacattgaaccagatggtagt

SEQ ID NO: 499468 - DNA, 120 bp, Artificial Sequence
  ENSG00000163625_58 (sequence is synthesized)
tacagccaagatattagtgaagggcgtcagcttctcataaaagctgtcaacagagtttggactgaactgatacatagtaagaaacaagtcttagaggaacttttcaaagtaactctacct

SEQ ID NO: 499469 - DNA, 120 bp, Artificial Sequence
  ENSG00000163625_59 (sequence is synthesized)
catgaaaagaaatgcataagtcgaggagaagctttagcgcccaccacacagtccaaattatcccgtgtcagcagtggctttggtctttccaagttaacaggatcaagaaggaatcgaaaa

SEQ ID NO: 499470 - DNA, 120 bp, Artificial Sequence
  ENSG00000163625_60 (sequence is synthesized)
gaaagtggtcttaataaacacagtctttccacccaggagatttcgcagtggatgtttactcacattgctgttgttcgtgacttagtagatacacaatataaagaatatcaggagcgtcag

SEQ ID NO: 499471 - DNA, 120 bp, Artificial Sequence
  ENSG00000163625_61 (sequence is synthesized)
cagaatgccctgaagtacgtgacagaagagtggtgtcagatcgagtgcgagctgttgagggagcgggggctgtggggccctcccatcggctcccacctcgacaagtggatgctggagatg

SEQ ID NO: 499472 - DNA, 120 bp, Artificial Sequence
  ENSG00000163625_62 (sequence is synthesized)
acagaagggccctgcaggatgaggaaaaagatggtgcgaaatgatatgttttataaccattacccttacgtgccagaaactgagcaagagacaaatgtggcgtctgagatcccaagtaaa

SEQ ID NO: 499473 - DNA, 120 bp, Artificial Sequence
  ENSG00000163625_63 (sequence is synthesized)
cagcctgagacacccgatgatattcctcaaaagaaacctgctcgatatagaagagccgtaagttatgacagtaaagagtactacatgcgactggcctctggcaatcccgccattgtccaa

SEQ ID NO: 499474 - DNA, 120 bp, Artificial Sequence
  ENSG00000163625_64 (sequence is synthesized)
gacgccattgtggagagttcagaaggtgaagctgctcagcaagaaccagagcatggggaagacactattgctaaagtcaaaggtttggtcaagcctcctctaaaacgctcccgatctgca

SEQ ID NO: 499475 - DNA, 120 bp, Artificial Sequence
  ENSG00000163625_65 (sequence is synthesized)
cctgatggaggagatgaggagaaccaggagcagctacaagaccagattgctgagggcagctccatagaagaggaggagaaaacagataatgctaccttactgcgcctgttagaggaagga

SEQ ID NO: 499476 - DNA, 120 bp, Artificial Sequence
  ENSG00000163625_66 (sequence is synthesized)
gaaaagatccaacacatgtaccgctgtgctcgagtccagggcctagataccagtgaggggctccttctttttggtaaagagcatttttatgtgattgatggatttaccatgacagcaacc

SEQ ID NO: 499477 - DNA, 120 bp, Artificial Sequence
  ENSG00000163625_67 (sequence is synthesized)
agggaaataagagatattgaaaccttacctccaaatatgcatgagcctattattcctagaggagccaggcaaggccctagtcaactcaagagaacatgcagcatttttgcatatgaagat

SEQ ID NO: 499478 - DNA, 120 bp, Artificial Sequence
  ENSG00000163625_68 (sequence is synthesized)
atcaaggaagttcataaaaggagatatctcctgcagcctattgctgtggaagttttctctggagatggacggaattacctccttgcttttcagaaaggaatcagaaacaaagtctatcaa

SEQ ID NO: 499479 - DNA, 120 bp, Artificial Sequence
  ENSG00000163625_69 (sequence is synthesized)
aggtttttggctgtagtgccatctctaacggacagttcagaatctgtatctgggcaacgaccaaacacgagtgtggagcagggatctgggttacttagcactttggttggagagaagtct

SEQ ID NO: 499480 - DNA, 120 bp, Artificial Sequence
  ENSG00000163625_70 (sequence is synthesized)
gtgactcagagatgggagagaggtgaaatcagcaacttccaatatttgatgcatttgaacactttggctggcagatcatataatgatctcatgcagtatcctgtcttcccctggatcctt

SEQ ID NO: 499481 - DNA, 120 bp, Artificial Sequence
  ENSG00000163625_71 (sequence is synthesized)
gcagattatgactcagaggaggtggatcttactaatcccaagacgtttagaaacctggctaagccaatgggagcacaaacagatgaacgattagctcagtataagaagcggtataaagac

SEQ ID NO: 499482 - DNA, 120 bp, Artificial Sequence
  ENSG00000163625_72 (sequence is synthesized)
tgggaggatcctaatggagaaactcctgcataccactatgggacccactattcatctgcaatgattgtggcctcataccttgtaaggatggagcctttcacacagatattcttaaggcta

SEQ ID NO: 499483 - DNA, 120 bp, Artificial Sequence
  ENSG00000163625_73 (sequence is synthesized)
cagggtggccactttgacctggctgaccggatgtttcacagtgtgcgcgaggcctggtattcagcgtcaaagcacaatatggcagatgtaaaagaacttatcccagagttcttttattta

SEQ ID NO: 499484 - DNA, 120 bp, Artificial Sequence
  ENSG00000163625_74 (sequence is synthesized)
ccagaattcctgttcaattccaacaactttgatctaggctgtaaacaaaatggcaccaagcttggagatgttatccttccaccctgggcaaaaggggacccacgagaattcatcagagtc

SEQ ID NO: 499485 - DNA, 120 bp, Artificial Sequence
  ENSG00000163625_75 (sequence is synthesized)
catcgtgaggctttggagtgtgattacgtgagtgcccatctacatgagtggattgacttaatcttcggttataaacagcaaggccctgctgcagtagaagctgtaaatgtcttccatcat

SEQ ID NO: 499486 - DNA, 120 bp, Artificial Sequence
  ENSG00000163625_76 (sequence is synthesized)
cttttttatgagggtcaagtggatatctacaacatcaatgacccactaaaggagacagccacaattgggttcattaataacttcggtcagatccctaaacagttatttaaaaaacctcat

SEQ ID NO: 499487 - DNA, 120 bp, Artificial Sequence
  ENSG00000163625_77 (sequence is synthesized)
ccaccaaagcgagtgagaagtcgactcaatggagacaatgcaggaatctctgtcctaccaggatctacaagtgacaagatcttttttcatcatctagacaacttgaggccttctctaaca

SEQ ID NO: 499488 - DNA, 120 bp, Artificial Sequence
  ENSG00000163625_78 (sequence is synthesized)
cctgtaaaagaactcaaagaacctgtaggacaaatcgtatgtacagataaaggtattcttgcggtggaacagaataaggttcttatcccaccaacctggaataaaacttttgcttggggc

SEQ ID NO: 499489 - DNA, 120 bp, Artificial Sequence
  ENSG00000163625_79 (sequence is synthesized)
tatgcagacctcagttgcagactgggaacctatgagtcagacaaggccatgactgtttatgaatgcttgtctgagtggggccagattctctgtgcaatctgccccaaccccaagctggtc

SEQ ID NO: 499490 - DNA, 120 bp, Artificial Sequence
  ENSG00000163625_80 (sequence is synthesized)
atcacgggtggaacaagcacggttgtgtgtgtgtgggagatgggcacctccaaagaaaaggccaagaccgtcaccctcaaacaggccttactgggccacactgataccgtcacctgcgcc

SEQ ID NO: 499491 - DNA, 120 bp, Artificial Sequence
  ENSG00000163625_81 (sequence is synthesized)
acagcatcattagcctatcacataattgtcagtgggtcccgtgatcgaacctgtatcatttgggatttgaacaaactgtcatttctaacccagcttcgagggcatcgagctccagtttct

SEQ ID NO: 499492 - DNA, 120 bp, Artificial Sequence
  ENSG00000163625_82 (sequence is synthesized)
gctctttgtatcaatgaattaacaggggacattgtgtcctgcgctggcacatatatccatgtgtggagcatcaatgggaaccctatcgtgagtgtcaacacgttcacaggtaggagccag

SEQ ID NO: 499493 - DNA, 120 bp, Artificial Sequence
  ENSG00000163625_83 (sequence is synthesized)
cagatcatctgctgctgcatgtcggagatgaacgaatgggacacgcagaacgtcatagtgacaggacactcagatggagtggttcggttttggagaatggaatttttgcaagttcctgaa

SEQ ID NO: 499494 - DNA, 120 bp, Artificial Sequence
  ENSG00000163625_84 (sequence is synthesized)
acaccagctcctgagcctgctgaagtcctagaaatgcaggaagactgtccagaagcacaaatagggcaggaagcccaagacgaggacagcagtgattcagaagcagatgagcagagcatc

SEQ ID NO: 499495 - DNA, 120 bp, Artificial Sequence
  ENSG00000163625_85 (sequence is synthesized)
agccaggaccctaaggacactccaagccaacccagcagcaccagccacaggccccgggcagcctcctgccgcgcaacagccgcctggtgtactgacagtggctctgacgactccagacgc

SEQ ID NO: 499496 - DNA, 120 bp, Artificial Sequence
  ENSG00000163625_86 (sequence is synthesized)
tggtccgaccagctcagtctagatgagaaagacggcttcatatttgtgaactattcagagggccagaccagagcccatctgcagggcccccttagccacccccaccccaatcccattgag

SEQ ID NO: 499497 - DNA, 120 bp, Artificial Sequence
  ENSG00000163625_87 (sequence is synthesized)
gtgcggaattacagcagattgaaacctgggtaccgatgggaacggcagctggtgttcaggagtaagctgactatgcacacagcctttgatcgaaaggacaatgcacacccagctgaggtc

SEQ ID NO: 499498 - DNA, 120 bp, Artificial Sequence
  ENSG00000163625_88 (sequence is synthesized)
actgccttgggcatctccaaggatcacagtaggatcctcgttggtgacagtcgaggccgagttttcagctggtctgtgagtgaccagccaggccgttctgctgctgatcactgggtgaag

SEQ ID NO: 499499 - DNA, 120 bp, Artificial Sequence
  ENSG00000163625_89 (sequence is synthesized)
gatgaaggtggtgacagctgctcaggctgctcggtgaggttttcactcacagaaagacgacaccattgcaggaactgtggtcagctcttctgccagaagtgcagtcgctttcaatctgaa

SEQ ID NO: 499500 - DNA, 120 bp, Artificial Sequence
  ENSG00000163625_90 (sequence is synthesized)
atcaaacgcttgaaaatctcatccccggtgcgtgtttgtcagaactgttattataacttacagcatgagagaggttcagaagatgggcctcgaaattgttgaagattcaacaagctgagt

SEQ ID NO: 499501 - DNA, 120 bp, Artificial Sequence
  ENSG00000163625_91 (sequence is synthesized)
ggagaccatggtctgtagaccccttcccgattctcctgtcccagcttggaaggcattgaaaacagtctccgtttacacatctcttcataccacgtgtttgaagtgttaaaattcaaaggg

SEQ ID NO: 499502 - DNA, 120 bp, Artificial Sequence
  ENSG00000163625_92 (sequence is synthesized)
atcattgaataaaacgggtgtagagtacaggaatggggcagacgcgattcaggtgaacagcacaagaagaatatgaggtggttcctaggagcaacactttcgacctccagttctccctga

SEQ ID NO: 499503 - DNA, 120 bp, Artificial Sequence
  ENSG00000163625_93 (sequence is synthesized)
tgacagtagctgtctccaagagaaaaatcctcacttattaactctcttttcttgcatctcatttttatagagctactcatccttatttggaaaaaccaacaacaaaaaaggcttttagaa

SEQ ID NO: 499504 - DNA, 120 bp, Artificial Sequence
  ENSG00000163625_94 (sequence is synthesized)
aatggttgtaaatctgacttctttgcaagtaactatgtatattgtaaatagatataaaaggccttttttctaaataaggacttaactgcctgtaacatgaaacttcaaactaaaccacta

SEQ ID NO: 499505 - DNA, 120 bp, Artificial Sequence
  ENSG00000163625_95 (sequence is synthesized)
actcaatgaactacttatggtttgtctgacatccctcacttaccaattaattataaatatgtttttttaaatccccaaagacattatctgtggtctttttttcctttcaagctcagcctg

SEQ ID NO: 499506 - DNA, 120 bp, Artificial Sequence
  ENSG00000163625_96 (sequence is synthesized)
tgtgcctgatgtcatttctttcaagttgcccacagtatctccacttaaactaggctagtaaccaaaataatgtggaccttctttaggaaacagtgtgggagaataggagtccagccgtaa

SEQ ID NO: 499507 - DNA, 120 bp, Artificial Sequence
  ENSG00000163625_97 (sequence is synthesized)
gataaactggaaatatttgggcgtcttgtacctggctacgcaccacctcagtgttgttcctacataaacagggccccttttaaacttgtatgtggactgctgtttggtcaaagaatacct

SEQ ID NO: 499508 - DNA, 120 bp, Artificial Sequence
  ENSG00000163625_98 (sequence is synthesized)
tcttagcattgcagaaaggtggtcagatgaccagtgtagtgcaggaaacagccctgtctcaactaatggaaatatatttgcatgtaacccaaaattagcttatcttgcatagaacataat

SEQ ID NO: 499509 - DNA, 120 bp, Artificial Sequence
  ENSG00000163625_99 (sequence is synthesized)
aagtatgtgtctttggtgacactaatgttctactatagcttattttcaaacaaggggtaaaaaaaggaaagaaagaagtgtacagaattaacatataaactttgttgtaaaactgaatca

SEQ ID NO: 499510 - DNA, 120 bp, Artificial Sequence
  ENSG00000163625_100 (sequence is synthesized)
tgtcagaactgcttaaaattaacctttaccatttaatgtcatctacctgaaaacagtgagatttatactgtatcaatgtctatttttttgtttttgctatgaatataattacagtatttt

SEQ ID NO: 499511 - DNA, 120 bp, Artificial Sequence
  ENSG00000163625_101 (sequence is synthesized)
aatatttagttatttaatttgttctactagttggatacagaacacacaaatccagggggattaaagctggaaggggctaagagattagtttacagagaaaaggcttggtggtgggatttt

SEQ ID NO: 499512 - DNA, 120 bp, Artificial Sequence
  ENSG00000163625_102 (sequence is synthesized)
aatatatattaaaaatgaaacaattaatctagattttaacattttcagaaacttagtgataacattatgaacaattctaaaagccctgtgatttgaaaaatatagaatcattaatggccc

SEQ ID NO: 499513 - DNA, 120 bp, Artificial Sequence
  ENSG00000163625_103 (sequence is synthesized)
cctgtgatttgaaaaatatagaatcattaatggcccaagataggccttcacaccttcacaggtgcgaaaggaaaggccttcacaccctcacagaggcatcatgcaaaggacagcggcttt

SEQ ID NO: 499514 - DNA, 120 bp, Artificial Sequence
  ENSG00000163625_104 (sequence is synthesized)
ggcttttccaattttccatctttaggccctggtgagaggcacacttatgcactaaaatgcacatatatgcacatgcattcaaaaataggcatttggtacaatggtgatcttgtacctgat

SEQ ID NO: 499515 - DNA, 120 bp, Artificial Sequence
  ENSG00000163625_105 (sequence is synthesized)
gggctgaaaccagcttaagaacaaatttgttcttcctgatatgataactaggtctccaagagaaaatagaaaggctgctttagtgccttacgcttactaaatttaaatctttatttacct

SEQ ID NO: 499516 - DNA, 120 bp, Artificial Sequence
  ENSG00000163625_106 (sequence is synthesized)
gggtttgagcctacagtctatttatgattacatatcaaaattgattaaaacacttccatttctaaaagttcaaatatacttgttaataaaaggattatcggcattaatactttaatttaa

SEQ ID NO: 499517 - DNA, 120 bp, Artificial Sequence
  ENSG00000163625_107 (sequence is synthesized)
agaaaagttgtgttctgttttcctttctgtgtcttactccccccacactctccctcccccatcaccatcttcaattctaataaataatgctgatgttcaacagttgcagaaattgtgcta

SEQ ID NO: 499518 - DNA, 120 bp, Artificial Sequence
  ENSG00000163625_108 (sequence is synthesized)
ttatgtaactgtgggccttgcccctgtctggccctctagatgatttgtagcagtgttattctacactttttaaaagaagcgtcctccttttgtccatgaatcatgtttaccccataccca

SEQ ID NO: 499519 - DNA, 120 bp, Artificial Sequence
  ENSG00000163625_109 (sequence is synthesized)
gtggcagaggtgttctttaaagacttgaatatatgaatgtgtgtgtgtagttacttaaaggttattcctctttgtaataggaaactatatgggatgaacacttttaaactttccgacaca

SEQ ID NO: 499520 - DNA, 120 bp, Artificial Sequence
  ENSG00000163625_110 (sequence is synthesized)
acttccattactaactttctaacagaacttccataactagaaggtggaaaccaaaaccctcatggtagtatttcctctggcagctggtgctgtgggcaactgttttgttcaatcgggttt

SEQ ID NO: 499521 - DNA, 120 bp, Artificial Sequence
  ENSG00000163625_111 (sequence is synthesized)
cttttctttttgcctctaatgcagaaatcaacagaatcactcacacatacaagtacactcacatacataaactaattatttctctggatatctttctgtgttccatgtaaatttatttac

SEQ ID NO: 499522 - DNA, 120 bp, Artificial Sequence
  ENSG00000163625_112 (sequence is synthesized)
caacatctattgtcaacatgtacatctaccttagtatggtctgcattctttttctgagagtacctcatagggctcctgcctgatctttgtagtttgttcattcatccatccacctgttca

SEQ ID NO: 499523 - DNA, 120 bp, Artificial Sequence
  ENSG00000163625_113 (sequence is synthesized)
tttgttcatccatgtattctaacatttctatgtagtgtgcaactctaatgtcatgcttttgaagaagagaatagctgcccatagcagccatccgtctggataatagcaaaacactctaga

SEQ ID NO: 499524 - DNA, 120 bp, Artificial Sequence
  ENSG00000163625_114 (sequence is synthesized)
taagttattttgcactttcttatgtataaagttggtagaaacttatttttgctttgtatcatttaaatacattttgttttggtaaatgaactgtgtataaaatatttatgccgttaaaac

SEQ ID NO: 499525 - DNA, 120 bp, Artificial Sequence
  ENSG00000163625_115 (sequence is synthesized)
tgtttttagaaagtatttttaatttcagcaagtttggttacttgttgcatgactcttaacacagctgactttttgtgtcagtgcaatgtatattttttgtcctgttattaacttgtaagc

SEQ ID NO: 499526 - DNA, 120 bp, Artificial Sequence
  ENSG00000163625_116 (sequence is synthesized)
cctagtaatggccaattatttgtacagcaacagaagtaaattgaagatactggctaagactggattgattgtggacttttatactatattgcagaaaccaatatctgtttcttggtggtt

SEQ ID NO: 499527 - DNA, 120 bp, Artificial Sequence
  ENSG00000163625_117 (sequence is synthesized)
atgtaaaagacctgaagaattactatctagtgtgcagtctgtgatatctgaatgttcattgtatatttgtctctgatgcaaaaaggtagagtaacacaattacaatacatgattaaatgc

SEQ ID NO: 499528 - DNA, 120 bp, Artificial Sequence
  ENSG00000163625_118 (sequence is synthesized)
atgctccgccgaatacaatgacagaaaaattttctgatcttctgcagttcacaacacaagtctcacgactaatggtgacagaaattcgaaggagagcatcaaacaaatccacagaaaaac

SEQ ID NO: 499529 - DNA, 120 bp, Artificial Sequence
  ENSG00000163625_119 (sequence is synthesized)
agtgtgccctgctgtcccccaaggatttcaaagccacaacaccttcagaggctgcaagtcgggccatagttcagttcctagagattaatcagagtgaagaagccagtagaggctggatgc

SEQ ID NO: 499530 - DNA, 120 bp, Artificial Sequence
  ENSG00000163625_120 (sequence is synthesized)
tggcctgaaccatgtttttaaactaatatgactataatctttttccctgtactttgaaacagccattgtgtgcaggcagcccgctgccacatcttccaagatacgggaaatctaactgta

SEQ ID NO: 499531 - DNA, 120 bp, Artificial Sequence
  ENSG00000163625_121 (sequence is synthesized)
taacatgatggaaattaagttatctgttaaccctgacagtctctcttcattgagtaatgtaaattggttccttaatctgtttcttaactttttaatttttgtacttatttaaatttagtt

SEQ ID NO: 499532 - DNA, 120 bp, Artificial Sequence
  ENSG00000163625_122 (sequence is synthesized)
catagtgaatataagctgctgaaagtagagctagtcgtggctggaacagagagaaattcagaattagaagtgcgtctcaccaaccagccaagatgaacatggtgaagaggatcatggggc

SEQ ID NO: 499533 - DNA, 120 bp, Artificial Sequence
  ENSG00000163625_123 (sequence is synthesized)
attgatgagaagaaatgtgtacattcaggacatggctgggctttctaattcatagaaactttttctgtaaattgctttcaagtttttaaaagttgcaatgaatattttcagtgataatga

SEQ ID NO: 499534 - DNA, 120 bp, Artificial Sequence
  ENSG00000163625_124 (sequence is synthesized)
ggatagatgcagaagatgaaagtagttccaaataagctaaaggaaaactcccacaatgccaaatatatttattcttggatagcttagactctgagacaaccctgactcagctgacccagt

SEQ ID NO: 499535 - DNA, 120 bp, Artificial Sequence
  ENSG00000163625_125 (sequence is synthesized)
ctatagatcagtctaattacatttagtcaggtggatttatttgatcacctcttaaaaatggcatcttcctggcaaactagaattctgttctgtgcatctgctgagtagacattcagtgtc

SEQ ID NO: 499536 - DNA, 120 bp, Artificial Sequence
  ENSG00000163625_126 (sequence is synthesized)
tggaggtaaagaaaaagaaacgcatttacatctcttttgcattactttttaaattagaacattagtaaccaaacaagttctataacaaggatttctaattcctcttgtttatgtgtaggc

SEQ ID NO: 499537 - DNA, 120 bp, Artificial Sequence
  ENSG00000163625_127 (sequence is synthesized)
agaacatgttataggctgtggaaagttcttaatcccacatgtgctttaaaccctatcagtttgttcttttccttccctcaaggatgtctctaattcagtcctttatcatcctttctctaa

SEQ ID NO: 499538 - DNA, 120 bp, Artificial Sequence
  ENSG00000163625_128 (sequence is synthesized)
ttcatttacccattccctttccctttcttagagtcacattcttttcctggtttcagcatcttcaactctccagtagttctgctcaaggctactctgcctggaccactaccacttccaccc

SEQ ID NO: 499539 - DNA, 120 bp, Artificial Sequence
  ENSG00000163625_129 (sequence is synthesized)
gacttgaattatgagttaatccaaaagaatatgaaaacagatgactcttctcctatttgtttgaagtgtatcactttatttttgaatattactcttgctctggtattgtttttttttttt

SEQ ID NO: 499540 - DNA, 120 bp, Artificial Sequence
  ENSG00000163625_130 (sequence is synthesized)
tttagcatggaagcctgtgtactatttgtaaattcaggttcaattagttctcattgcagttattggaacagtttctatgaagtttcctttaatgatagtgtttactgttgttttttttct

SEQ ID NO: 499541 - DNA, 120 bp, Artificial Sequence
  ENSG00000163625_131 (sequence is synthesized)
ttttagcctcaaaaggtgcatctggacttattgatatgtgttatcaatagaacatcattatgattattcttatttccagacacgtactccatcattctccacatatcatactcctcaaaa

SEQ ID NO: 499542 - DNA, 120 bp, Artificial Sequence
  ENSG00000163625_132 (sequence is synthesized)
aatgatatagttcccaaagagaggtgtcagtgtcttgaaccgtcaagttcaagaggccatcagactcaatatttactcattccttcatgaaataagtacttaacaaaaagctgctgcatg

SEQ ID NO: 499543 - DNA, 120 bp, Artificial Sequence
  ENSG00000163625_133 (sequence is synthesized)
ccaagtcactgtgctaggcattgaggattcagctctacacagggctgtcttggtccttgctatcttttagctaaaatgtagacacataaataaacaattacatatagtgtgacacattct

SEQ ID NO: 499544 - DNA, 120 bp, Artificial Sequence
  ENSG00000163625_134 (sequence is synthesized)
acagtgggggaatccagggttctcaggcagattgtaggagagccacttcatctagatcacttattttcagtgcttcaactgtgttttcaatgaagatgtcactttgaaaataatacttct

SEQ ID NO: 499545 - DNA, 120 bp, Artificial Sequence
  ENSG00000163625_135 (sequence is synthesized)
aatttatgccccaagtgttattgcttttaacttaccatagttttactacataaaataaatgaactgccctcatcaatagaccatgtaactacattggatagagcttgtaataggttttgt

SEQ ID NO: 499546 - DNA, 120 bp, Artificial Sequence
  ENSG00000163625_136 (sequence is synthesized)
gtccttttctgtggaatatctgctttgaagtatcaactgagatatttcctgcttcttaacaagatttcttagtcctcagtatttacatttaaaaatccaaacagctttgacaacaattgt

SEQ ID NO: 499547 - DNA, 120 bp, Artificial Sequence
  ENSG00000163626_0 (sequence is synthesized)
gttgctggcgcgtgcgcgtatcagccttggctggccggtgtatgtccgctggattgtgaggcccgggatctgggctccgccgtggtgcagaaatgctgtgccggctcggcggtcggtggc

SEQ ID NO: 499548 - DNA, 120 bp, Artificial Sequence
  ENSG00000163626_1 (sequence is synthesized)
tgcggccgctccctgccctgcagctttgggctagggacctgccgcttgcgccggttcctacgagcggcgccaagcgccccactctcccagtgtgggcagtggcaccagtctctgcagtac

SEQ ID NO: 499549 - DNA, 120 bp, Artificial Sequence
  ENSG00000163626_2 (sequence is synthesized)
atgcgaacggctggtacgaggccctggccgcgtcttcgccggtgcgggttgcggaggaagtactgctcggcgtgcacgccgccacgggcctgccctggtggggcagcattctgctctcca

SEQ ID NO: 499550 - DNA, 120 bp, Artificial Sequence
  ENSG00000163626_3 (sequence is synthesized)
ccgtggccttacggggtgctgtcacgctgcctttggcagcctaccagcactacatcctggccaaggtggaaaatttgcagccagaaataaaaactattgccaggcatcttaaccaagaag

SEQ ID NO: 499551 - DNA, 120 bp, Artificial Sequence
  ENSG00000163626_4 (sequence is synthesized)
ttgcagttcgtgcaaatcagttggggtggtccaaaagagatgccaggctcacttatctaaagaatatgaggaggctaatttcagagctatatgtgcgagataactgccaccctttcaaag

SEQ ID NO: 499552 - DNA, 120 bp, Artificial Sequence
  ENSG00000163626_5 (sequence is synthesized)
ccactgtgttggtttggattcagcttccaatgtggatcttcatgtcttttgctctccggaatttaagcacgggggcagcacattcagaaggtttttctgttcaggaacagttagctactg

SEQ ID NO: 499553 - DNA, 120 bp, Artificial Sequence
  ENSG00000163626_6 (sequence is synthesized)
gtggaattctgtggtttcctgacctcactgcacccgactccacttggattctgcctatctctgttggcgtcatcaatttgttaatagtggagatttgtgctctacaaaaaattggaatgt

SEQ ID NO: 499554 - DNA, 120 bp, Artificial Sequence
  ENSG00000163626_7 (sequence is synthesized)
ctcgttttcagacgtatattacgtactttgtccgtgcaatgtcggtgttgatgataccaattgctgcaacggtaccctcatcaattgttctctactggttatgctccagcttcgtgggcc

SEQ ID NO: 499555 - DNA, 120 bp, Artificial Sequence
  ENSG00000163626_8 (sequence is synthesized)
tttcacagaatttgctgctgcgttctcctggatttcgccaactttgccgaataccatcgaccaagtcagattcagaaactccttataaagacatatttgctgcctttaataccaagttca

SEQ ID NO: 499556 - DNA, 120 bp, Artificial Sequence
  ENSG00000163626_9 (sequence is synthesized)
tttcaagaaaatgacatattttccaataattttgaaacagttgcaggagtcactatcatctaaatgtatttagacttagaaattcagatgttacttgatttccttttatttaaaatcatt

SEQ ID NO: 499557 - DNA, 85 bp, Artificial Sequence
  ENSG00000163626_10 (sequence is synthesized)
atcaccgctatcaaagaaaaaaaaaagatgtaatccagatatatttgacagtaattaaaatcttttaaatgttataaatgcagta

SEQ ID NO: 499558 - DNA, 120 bp, Artificial Sequence
  ENSG00000163626_11 (sequence is synthesized)
attaaaatcttttaaatgttataaatgcagtatgtttgtgaaagtattagaatagaaccaaagtgcctgtctctgtttataaagttacagtttgttagagctaccagaactttggagaat

SEQ ID NO: 499559 - DNA, 120 bp, Artificial Sequence
  ENSG00000163626_12 (sequence is synthesized)
gaatagggttagctactgaatgatggcaagttaaactaaacaatactgcatattactgttttgtaaaataagaggatcagtgagatgattcatgttttttttttttgagatggagtctca

SEQ ID NO: 499560 - DNA, 73 bp, Artificial Sequence
  ENSG00000163626_13 (sequence is synthesized)
attccagtgattttcctgcctcagcctccaagtatctgggattgcaggtgcacaccaccacgcccagctaatt

SEQ ID NO: 499561 - DNA, 68 bp, Artificial Sequence
  ENSG00000163626_14 (sequence is synthesized)
tttcaccatgttggacaggctggtctggaactgctgacctcaactaatccacccatttttttttttta

SEQ ID NO: 499562 - DNA, 62 bp, Artificial Sequence
  ENSG00000163626_15 (sequence is synthesized)
tctgcctcccgtgttcaagcaattctcctacctcagcctactgggtagctgggactacaggg

SEQ ID NO: 499563 - DNA, 68 bp, Artificial Sequence
  ENSG00000163626_16 (sequence is synthesized)
atgtttcttattattttggaggtggagaggattttagacctctttgagcatctgaaaaaaggctatat

SEQ ID NO: 499564 - DNA, 120 bp, Artificial Sequence
  ENSG00000163626_17 (sequence is synthesized)
ggattttagacctctttgagcatctgaaaaaaggctatatatgtatggttttctcttcagaaaaatcttaagactcacaatacggggacttccttgttaccaggaagattttctggcaat

SEQ ID NO: 499565 - DNA, 120 bp, Artificial Sequence
  ENSG00000163626_18 (sequence is synthesized)
tcctagttaataaatcttattctaatggaacatacattgatcttgagttaatgcgtggttgaaaaaaaaagcgggggcaacttgaaatatatgcagtaaagtagtccatgcatacaagtc

SEQ ID NO: 499566 - DNA, 120 bp, Artificial Sequence
  ENSG00000163626_19 (sequence is synthesized)
cctaacatggtagatgatgttgcctcccggccctgctcagaaagaatacaaaaagtgtacattcctttttctataatttaagaagtctggaatacagagtgtaacactgtgtactgctag

SEQ ID NO: 499567 - DNA, 120 bp, Artificial Sequence
  ENSG00000163626_20 (sequence is synthesized)
cacccaaagtggaaaatcttaagcattcagattgtttagtcaaagaagaaaaccagaagggcagttgcctattgaggtgattttaaacctgtttatttgtaaggattaagtaccctaata

SEQ ID NO: 499568 - DNA, 120 bp, Artificial Sequence
  ENSG00000163626_21 (sequence is synthesized)
ggcttaaactatgatagaggtttaatacagaaaaaattgacaggtattataaattgtggatccagttacttgcttatttaatttgtaaagaggtaaaattagctctggttgagatatcaa

SEQ ID NO: 499569 - DNA, 120 bp, Artificial Sequence
  ENSG00000163626_22 (sequence is synthesized)
gtatggcaggtatttgagaaggctataaatcataattttcatttagttaaaatatggacctgattctgggaaaccctatcattccatctcaatgttttacaataaaataaaaactaaagt

SEQ ID NO: 499570 - DNA, 120 bp, Artificial Sequence
  ENSG00000163626_23 (sequence is synthesized)
gaaattcattagtcatttctttgattgatgtctcttaaattttagttcacctgcttaatgaagttatgacattttttaatagaaaaaatgtacagcatacagaggtaagaattctgcttc

SEQ ID NO: 499571 - DNA, 120 bp, Artificial Sequence
  ENSG00000163626_24 (sequence is synthesized)
cctgagaatttattttagacatagatggtggcaattaagactaggttcttttttcatacaagttcctagtcctggtttctgactgtcctattggggcaattgtgctttccaaccacattg

SEQ ID NO: 499572 - DNA, 120 bp, Artificial Sequence
  ENSG00000163626_25 (sequence is synthesized)
ttgaaatatcctcattatttgtggattttatatttgtaaatttgcctccttgctcaaatctatccataaccccagaaccagtacttgcacaagtgcttttgagccatttgtaggcaaaaa

SEQ ID NO: 499573 - DNA, 120 bp, Artificial Sequence
  ENSG00000163626_26 (sequence is synthesized)
tgtgagtcacctcccaacagaagtgaaacaaatggtactctgccttctagtttcagctctcataccgtaaacatgtatcctttttgagtctacttagtcccatctcttcctaatttctgt

SEQ ID NO: 499574 - DNA, 120 bp, Artificial Sequence
  ENSG00000163626_27 (sequence is synthesized)
tctttttgttggtgattttactgtttaaaatggcctccaaatgccctgctggagtgctttctgatgttcctaagctcaggaaggcttaggagaaaataagtatattagataagcttcatt

SEQ ID NO: 499575 - DNA, 120 bp, Artificial Sequence
  ENSG00000163626_28 (sequence is synthesized)
catgcacaagttataatgctgttggcagagagttcagtgttactgaatcaacaatatgttgcattgttctgttgacaaaaacaaagcttgcagaaacctaaccctgtatgttttctagga

SEQ ID NO: 499576 - DNA, 120 bp, Artificial Sequence
  ENSG00000163626_29 (sequence is synthesized)
gcagtgatttggtattcactacttcagtgtttgtggactttatggaacataagtaccacaaataatgcaaattgactatatttgcagcgtgtacaatcaaggatgcagaggcagaaatgt

SEQ ID NO: 499577 - DNA, 120 bp, Artificial Sequence
  ENSG00000163626_30 (sequence is synthesized)
gtgtgcagcttaggtcatagtaaaaagaggaaagaatttgaggaaaattttgccagttacatattacctctggaataactttgcctttgccgtgtgtgttactgtgtacactcagatatt

SEQ ID NO: 499578 - DNA, 120 bp, Artificial Sequence
  ENSG00000163626_31 (sequence is synthesized)
tttctcataatggcctttgccgtgtgtgttactgagtgagtacactcagatatttttctcataatggcatgagggaaatcagtctccttttcccattgtgtttgtcacttttgctgagac

SEQ ID NO: 499579 - DNA, 120 bp, Artificial Sequence
  ENSG00000163626_32 (sequence is synthesized)
gcaaaaaataacgtgctatgatattgtgaaatatgtatttggtctttatccccaatccctgacatccagcggaatctgcagagttaagtgtcttttgtatgctcatgtgatgactggtgg

SEQ ID NO: 499580 - DNA, 120 bp, Artificial Sequence
  ENSG00000163626_33 (sequence is synthesized)
tgtcttttgtatgctcatgtgatgactggtggctgggggcccctagaaagtttcaggatagggcagatccttgtggccaggagttccagatcagcctgggcaacatagtgagaccttgtc

SEQ ID NO: 499581 - DNA, 120 bp, Artificial Sequence
  ENSG00000163626_34 (sequence is synthesized)
tggtttttcctatctccagatacttccttttcaaataaatgaatcttctttcatgtgcataatttaccttgtttactgtgagtccccttgatttcaaaatgtatatttgtatctttacaa

SEQ ID NO: 499582 - DNA, 120 bp, Artificial Sequence
  ENSG00000163626_35 (sequence is synthesized)
atgtatattgtgcttagtttcctgttgctctcccattgtcaaactttcaaacttgaaatttcttttcaaatatatacaggaagtttgagaatacaaggcccttcctccaagatctcaaaa

SEQ ID NO: 499583 - DNA, 120 bp, Artificial Sequence
  ENSG00000163626_36 (sequence is synthesized)
taatttctcacaagtgggggttgctgggatcttgggataaacccatgtataaagaaaactggtgtattatgaactgaagtgaatcagttacctgaacttacctgacttcaggatggtaaa

SEQ ID NO: 499584 - DNA, 120 bp, Artificial Sequence
  ENSG00000163626_37 (sequence is synthesized)
tactcttgatttttttcttcaggcagattttttttagtaaagagcaaaaaatctgtattgtatttcagaaaattgcaagtctgtggtcttatttctaacagtttgtcatagcctggagca

SEQ ID NO: 499585 - DNA, 120 bp, Artificial Sequence
  ENSG00000163626_38 (sequence is synthesized)
gttccagaacctgaatgaagtcagggctacagaacagggaatatgcatgctcttaagaccccttgatgtcttgctgtctggcttgcctatatcccctcagttgctgaggctctgcgctgg

SEQ ID NO: 499586 - DNA, 120 bp, Artificial Sequence
  ENSG00000163626_39 (sequence is synthesized)
gccctgcagagttcaggaaggtttttgtctccttagatgaggactgtaatgtttgtgttacccttccccacaggggtgttacccacccttctcgtccttacaggagatctgtttttcctg

SEQ ID NO: 499587 - DNA, 120 bp, Artificial Sequence
  ENSG00000163626_40 (sequence is synthesized)
tgggtctcatttttgtctctaggccagattcactgtcttaatgaatgcttctcatttcaagagtcaggaagggagactcactcctggatcaatttatagtatttataccattaggatacc

SEQ ID NO: 499588 - DNA, 120 bp, Artificial Sequence
  ENSG00000163626_41 (sequence is synthesized)
tgagttcaaaagtatattaatagatagaattggcgtatctgaaatgatcccaaattacttttccctgggaccgttagaagagaaaactgaacaaatcccatcctagtcagatgtcctaag

SEQ ID NO: 499589 - DNA, 120 bp, Artificial Sequence
  ENSG00000163626_42 (sequence is synthesized)
tgggaagatgaggcttacaaaggaaaaccaaaattcttaattgccaccctgacagataacccaggagaaggtgcaaagcctcattaagaacctcgagggaaaagccaaacttggggagaa

SEQ ID NO: 499590 - DNA, 120 bp, Artificial Sequence
  ENSG00000163626_43 (sequence is synthesized)
gacttttcaggtacctttaacagcacttaagagctaaagaccatatcttcatctaagaaccacccatttacccgtccaaaccgaaagaacagacttggagacctgaagaacagtggaagc

SEQ ID NO: 499591 - DNA, 120 bp, Artificial Sequence
  ENSG00000163626_44 (sequence is synthesized)
aagacttttaatggcagtcttgcaagattgggtgtctggtgggcaggcacacctggggcagttacagcaggtaatttatctcctagcacacaagtccttcccccagtttctgattggtta

SEQ ID NO: 499592 - DNA, 120 bp, Artificial Sequence
  ENSG00000163626_45 (sequence is synthesized)
agtactatgggattacagtcttcccagacatcgcgtaagtttcattatcccccttgtaaggttatataccccattcccttccccccttaagttttgatttcccaataacgaaactttctt

SEQ ID NO: 499593 - DNA, 120 bp, Artificial Sequence
  ENSG00000163626_46 (sequence is synthesized)
cccttttatgggctgactcctcctctacattctgttcgtttattgtgaccttctaggtgcatgagcagtgcggtttgttacataccaaggctggctgccagtgcttagatttatcatgcc

SEQ ID NO: 499594 - DNA, 120 bp, Artificial Sequence
  ENSG00000163626_47 (sequence is synthesized)
ttgaaaatggaccatttaaaatgttttcccacagttcacatctcagaggaggtacagaggtcctcctagatgacattgggaaaattgtagttagtgtgaaaaaatgagtgcccaaaaaaa

SEQ ID NO: 499595 - DNA, 120 bp, Artificial Sequence
  ENSG00000163626_48 (sequence is synthesized)
ccttggtaccttctgtgttttgttcctattttttttttattggacgcataatctgcttatattttgcacctattcttaaatcacacttataccttcatattttattcttctaagaatccc

SEQ ID NO: 499596 - DNA, 120 bp, Artificial Sequence
  ENSG00000163626_49 (sequence is synthesized)
aggaatcaccttttttttttttttaggagtcacctttaaaattgcctatatgtcagatttaagtcccagaagcagtaggaatgcagaccctagaaaaaaaattaaagaatgtagtttatt

SEQ ID NO: 499597 - DNA, 120 bp, Artificial Sequence
  ENSG00000163626_50 (sequence is synthesized)
ttttcctctggggtgttaactgcagctactacagaatgcagactttggaatttcaggcataacatctgaaaccatgcaagaatttagatttctgtattaaagctaaatcttcatgtaaat

SEQ ID NO: 499598 - DNA, 120 bp, Artificial Sequence
  ENSG00000163626_51 (sequence is synthesized)
atggtgtaaaacaatgcattatcattataaacactgtgccttacgagctggttcaagcagaacccagataattggaaattatatgaatttatagattttccatttgaaccttattagtgt

SEQ ID NO: 499599 - DNA, 120 bp, Artificial Sequence
  ENSG00000163626_52 (sequence is synthesized)
tgtttaaacttgtaataatggatattttctagttatctgttttctttttttcatacactgtgatggtattttatgaaatcatttggttttgggaagttggaatttcctaaagccacagca

SEQ ID NO: 499600 - DNA, 120 bp, Artificial Sequence
  ENSG00000163626_53 (sequence is synthesized)
ttaaagtcagataattttatttacccaaaagtttctggaacgctgtggttctgtactgtgtatacaactaaaataagaatataaatttatataaaaataaaaatacaactatataagtaa

SEQ ID NO: 499601 - DNA, 120 bp, Artificial Sequence
  ENSG00000163626_54 (sequence is synthesized)
tcctggccaaggttgtgagcatggggaaaaaaaaccggaaacaaaacaggaacggaatcagcagcaacattaaggcagtgagccattttacaggaagaatgagcacagggcaggaataaa

SEQ ID NO: 499602 - DNA, 120 bp, Artificial Sequence
  ENSG00000163629_0 (sequence is synthesized)
gagtagctccagcggccacgctgaggcgagggtgacacaccatgctcacggcccctggagaccgtcgtgctggcgagccgtgctccgtagctccccggtccgcctcggcagcggtcagag

SEQ ID NO: 499603 - DNA, 120 bp, Artificial Sequence
  ENSG00000163629_1 (sequence is synthesized)
tcgcctacaggagttgagccgcccgcgccagaaggttttggcgaagctcttggagaggcgtcgagcacagtagggcggcgggggtgcgttgagcgctcgggggtcaggcagtcggccggg

SEQ ID NO: 499604 - DNA, 120 bp, Artificial Sequence
  ENSG00000163629_2 (sequence is synthesized)
atcgccgctggggagcgtttccgaggcgaggaggaggaggaggagatgctgctcctcttctccccctccccaggctccttctacagctccttcagcccacgcccgcagccgcttgtggga

SEQ ID NO: 499605 - DNA, 120 bp, Artificial Sequence
  ENSG00000163629_3 (sequence is synthesized)
gaagtggtggtggctctcggcgcccgcggcggctgccggcggcccgccccgacgccgcgtccctgcagccctcgcccggcgctccagtagcaggacccggtctcgggaccagccggtaat

SEQ ID NO: 499606 - DNA, 120 bp, Artificial Sequence
  ENSG00000163629_4 (sequence is synthesized)
atgcacgtgtcactagctgaggccctggaggttcggggtggaccacttcaggaggaagaaatatgggctgtattaaatcaaagtgctgaaagtctccaagaattattcagaaaagtaagc

SEQ ID NO: 499607 - DNA, 120 bp, Artificial Sequence
  ENSG00000163629_5 (sequence is synthesized)
ctagctgatcctgctgcccttggcttcatcatttctccatggtctctgctgttgctgccatctggtagtgtgtcatttacagatgaaaatatttccaatcaggatcttcgagcattcact

SEQ ID NO: 499608 - DNA, 120 bp, Artificial Sequence
  ENSG00000163629_6 (sequence is synthesized)
gcaccagaggttcttcaaaatcagtcactaacttctctctcagatgttgaaaagatccacatttattctcttggaatgacactgtattggggggctgattatgaagtgcctcagagccaa

SEQ ID NO: 499609 - DNA, 120 bp, Artificial Sequence
  ENSG00000163629_7 (sequence is synthesized)
cctattaagcttggagatcatctcaacagcatactgcttggaatgtgtgaggatgttatttacgctcgagtttctgttcggactgtgctggatgcttgcagtgcccacattaggaatagc

SEQ ID NO: 499610 - DNA, 120 bp, Artificial Sequence
  ENSG00000163629_8 (sequence is synthesized)
aattgtgcaccctcattttcctacgtgaaacacttggtaaaactggttctgggaaatctttctgggacagatcagctttcctgtaacagtgaacaaaagcctgatcgaagccaggctatt

SEQ ID NO: 499611 - DNA, 120 bp, Artificial Sequence
  ENSG00000163629_9 (sequence is synthesized)
cgagatcgattgcgaggaaaaggattaccaacaggaagaagctctacttctgatgtactagacatacaaaagcctccactctctcatcagacctttcttaacaaagggcttagtaaatct

SEQ ID NO: 499612 - DNA, 120 bp, Artificial Sequence
  ENSG00000163629_10 (sequence is synthesized)
atgggatttctgtccatcaaagatacacaagatgagaattatttcaaggacattttatcagataattctggacgtgaagattctgaaaatacattctccccttaccagttcaaaactagt

SEQ ID NO: 499613 - DNA, 120 bp, Artificial Sequence
  ENSG00000163629_11 (sequence is synthesized)
ggcccagaaaaaaaacccatccctggcattgatgtgctttctaagaagaagatctgggcttcatccatggacttgctttgtacagctgacagagacttctcttcaggagagactgccaca

SEQ ID NO: 499614 - DNA, 120 bp, Artificial Sequence
  ENSG00000163629_12 (sequence is synthesized)
tatcgtcgttgtcaccctgaggcagtaacagtgcggacttcaactactcctagaaaaaaggaggcaagatactcagatggaagtatagccttggatatctttggccctcagaaaatggat

SEQ ID NO: 499615 - DNA, 120 bp, Artificial Sequence
  ENSG00000163629_13 (sequence is synthesized)
ccaatatatcacactcgagaattgcccacctcctcagcaatatcaagtgctttggaccgaatccgagagagacaaaagaaacttcaggttctgagggaagccatgaatgtagaagaacca

SEQ ID NO: 499616 - DNA, 120 bp, Artificial Sequence
  ENSG00000163629_14 (sequence is synthesized)
gttcgaagatacaaaacttatcatggtgatgtctttagtacctccagtgaaagtccatctattatttcctctgaatcagatttcagacaagtgagaagaagtgaagcctcaaagaggttt

SEQ ID NO: 499617 - DNA, 120 bp, Artificial Sequence
  ENSG00000163629_15 (sequence is synthesized)
gaatccagcagtggtctcccaggggtagatgaaaccttaagtcaaggccagtcacagagaccgagcagacaatatgaaacaccctttgaaggcaacttaattaatcaagagatcatgcta

SEQ ID NO: 499618 - DNA, 120 bp, Artificial Sequence
  ENSG00000163629_16 (sequence is synthesized)
aaacggcaagaggaagaactgatgcagctacaagccaaaatggcccttagacagtctcggttgagcctatatccaggagacacaatcaaagcgtccatgcttgacatcaccagggatccg

SEQ ID NO: 499619 - DNA, 120 bp, Artificial Sequence
  ENSG00000163629_17 (sequence is synthesized)
ttaagagaaattgccctagaaacagccatgactcaaagaaaactgaggaatttctttggccctgagtttgtgaaaatgacaattgaaccatttatatctttggatttgccacggtctatt

SEQ ID NO: 499620 - DNA, 120 bp, Artificial Sequence
  ENSG00000163629_18 (sequence is synthesized)
cttactaagaaagggaagaatgaggataaccgaaggaaagtaaacataatgcttctgaacgggcaaagactggaactgacctgtgataccaaaactatatgtaaagatgtgtttgatatg

SEQ ID NO: 499621 - DNA, 120 bp, Artificial Sequence
  ENSG00000163629_19 (sequence is synthesized)
gttgtggcacatattggcttagtagagcatcatttgtttgctttagctaccctcaaagataatgaatatttctttgttgatcctgacttaaaattaaccaaagtggccccagagggatgg

SEQ ID NO: 499622 - DNA, 120 bp, Artificial Sequence
  ENSG00000163629_20 (sequence is synthesized)
aaagaagaaccaaagaaaaagaccaaagccactgttaattttactttgtttttcagaattaaattttttatggatgatgttagtctaatacaacatactctgacgtgtcatcagtattac

SEQ ID NO: 499623 - DNA, 120 bp, Artificial Sequence
  ENSG00000163629_21 (sequence is synthesized)
cttcagcttcgaaaagatattttggaggaaaggatgcactgtgatgatgagacttccttattgctggcatccttggctctccaggctgagtatggagattatcaaccagaggttcatggt

SEQ ID NO: 499624 - DNA, 120 bp, Artificial Sequence
  ENSG00000163629_22 (sequence is synthesized)
gtgtcttactttagaatggagcactatttgcccgccagagtgatggagaaacttgatttatcctatatcaaagaagagttacccaaattgcataatacctatgtgggagcttctgaaaaa

SEQ ID NO: 499625 - DNA, 120 bp, Artificial Sequence
  ENSG00000163629_23 (sequence is synthesized)
gagacagagttagaatttttaaaggtctgccaaagactgacagaatatggagttcattttcaccgagtgcaccctgagaagaagtcacaaacaggaatattgcttggagtctgttctaaa

SEQ ID NO: 499626 - DNA, 120 bp, Artificial Sequence
  ENSG00000163629_24 (sequence is synthesized)
ggtgtccttgtgtttgaagttcacaatggagtgcgcacattggtccttcgctttccatggagggaaaccaagaaaatatctttttctaaaaagaaaatcacattgcaaaatacatcagat

SEQ ID NO: 499627 - DNA, 120 bp, Artificial Sequence
  ENSG00000163629_25 (sequence is synthesized)
ggaataaaacatggcttccagacagacaacagtaagatatgccagtacctgctgcacctctgctcttaccagcataagttccagctacagatgagagcaagacagagcaaccaagatgcc

SEQ ID NO: 499628 - DNA, 120 bp, Artificial Sequence
  ENSG00000163629_26 (sequence is synthesized)
caagatattgagagagcttcgtttaggagcctgaatctccaagcagagtctgttagaggatttaatatgggacgagcaatcagcactggcagtctggccagcagcaccctcaacaaactt

SEQ ID NO: 499629 - DNA, 120 bp, Artificial Sequence
  ENSG00000163629_27 (sequence is synthesized)
gctgttcgacctttatcagttcaagctgagattctgaagaggctatcctgctcagagctgtcgctttaccagccattgcaaaacagttcaaaagagaagaatgacaaagcttcatgggag

SEQ ID NO: 499630 - DNA, 120 bp, Artificial Sequence
  ENSG00000163629_28 (sequence is synthesized)
gaaaagcctagagagatgagtaaatcataccatgatctcagtcaggcctctctctatccacatcggaaaaatgtcattgttaacatggaacccccaccacaaaccgttgcagagttggtg

SEQ ID NO: 499631 - DNA, 120 bp, Artificial Sequence
  ENSG00000163629_29 (sequence is synthesized)
ggaaaaccttctcaccagatgtcaagatctgatgcagaatctttggcaggagtgacaaaacttaataattcaaagtctgttgcgagtttaaatagaagtcctgaaaggaggaaacatgaa

SEQ ID NO: 499632 - DNA, 120 bp, Artificial Sequence
  ENSG00000163629_30 (sequence is synthesized)
tcagactcctcatccattgaagaccctgggcaagcatatgttctaggaatgactatgcatagttctggaaactcttcatcccaagtacccttaaaagaaaatgatgtgctacacaaaaga

SEQ ID NO: 499633 - DNA, 120 bp, Artificial Sequence
  ENSG00000163629_31 (sequence is synthesized)
tggagcatagtatcttcaccagaaagggagatcaccttagtgaacctgaaaaaagatgcaaagtatggcttgggatttcaaattattggtggggagaagatgggaagactggacctaggc

SEQ ID NO: 499634 - DNA, 120 bp, Artificial Sequence
  ENSG00000163629_32 (sequence is synthesized)
atatttatcagttcagttgcccctggaggaccagctgacttggatggatgcttgaagccaggagaccgtttgatatctgtgaatagtgtgagtctggagggagtcagccaccatgctgca

SEQ ID NO: 499635 - DNA, 120 bp, Artificial Sequence
  ENSG00000163629_33 (sequence is synthesized)
attgaaattttgcaaaatgcacctgaagatgtgacacttgttatctctcagccaaaagaaaagatatccaaagtgccttctactcctgtgcatctcaccaatgagatgaaaaactacatg

SEQ ID NO: 499636 - DNA, 120 bp, Artificial Sequence
  ENSG00000163629_34 (sequence is synthesized)
aagaaatcttcctacatgcaagacagtgctatagattcttcttccaaggatcaccactggtcacgtggtaccctgaggcacatctcggagaactcctttgggccatctgggggcctgcgg

SEQ ID NO: 499637 - DNA, 120 bp, Artificial Sequence
  ENSG00000163629_35 (sequence is synthesized)
aagccaggtcaatggtttctttgccagccatttaggtgaccaaacctggcaggaatcacagcatggcagcccttccccatctgtaatatccaaagccaccgagaaagagactttcactga

SEQ ID NO: 499638 - DNA, 120 bp, Artificial Sequence
  ENSG00000163629_36 (sequence is synthesized)
tagtaaccaaagcaaaactaaaaagccaggcatttctgatgtaactgattactcagaccgtggagattcagacatggatgaagccacttactccagcagtcaggatcatcaaacaccaaa

SEQ ID NO: 499639 - DNA, 120 bp, Artificial Sequence
  ENSG00000163629_37 (sequence is synthesized)
acaggaatcttcctcttcagtgaatacatccaacaagatgaattttaaaactttttcttcatcacctcctaagcctggagatatctttgaggttgaactggctaaaaatgataacagctt

SEQ ID NO: 499640 - DNA, 120 bp, Artificial Sequence
  ENSG00000163629_38 (sequence is synthesized)
ggggataagtgtcacggtactgtttgacaagggaggtgtgaatacgagtgtcagacatggtggcatttatgtgaaagctgttattccccagggagcagcagagtctgatggtagaattca

SEQ ID NO: 499641 - DNA, 120 bp, Artificial Sequence
  ENSG00000163629_39 (sequence is synthesized)
caaaggtgatcgcgtcctagctgtcaatggagttagtctagaaggagccacccataagcaagctgtggaaacactgagaaatacaggacaggtggttcatctgttattagaaaagggaca

SEQ ID NO: 499642 - DNA, 120 bp, Artificial Sequence
  ENSG00000163629_40 (sequence is synthesized)
atctccaacatctaaagaacatgtcccggtaaccccacagtgtaccctttcagatcagaatgcccaaggtcaaggcccagaaaaagtgaagaaaacaactcaggtcaaagactacagctt

SEQ ID NO: 499643 - DNA, 120 bp, Artificial Sequence
  ENSG00000163629_41 (sequence is synthesized)
tgtcactgaagaaaatacatttgaggtaaaattatttaaaaatagctcaggtctaggattcagtttttctcgagaagataatcttataccggagcaaattaatgccagcatagtaagggt

SEQ ID NO: 499644 - DNA, 120 bp, Artificial Sequence
  ENSG00000163629_42 (sequence is synthesized)
taaaaagctctttcctggacagccagcagcagaaagtggaaaaattgatgtaggagatgttatcttgaaagtgaatggagcctctttgaaaggactatctcagcaggaagtcatatctgc

SEQ ID NO: 499645 - DNA, 120 bp, Artificial Sequence
  ENSG00000163629_43 (sequence is synthesized)
tctcaggggaactgctccagaagtattcttgcttctctgcagacctccacctggtgtgctaccggaaattgatactgcgcttttgaccccacttcagtctccagcacaagtacttccaaa

SEQ ID NO: 499646 - DNA, 120 bp, Artificial Sequence
  ENSG00000163629_44 (sequence is synthesized)
cagcagtaaagactcttctcagccatcatgtgtggagcaaagcaccagctcagatgaaaatgaaatgtcagacaaaagcaaaaaacagtgcaagtccccatccagaagagacagttacag

SEQ ID NO: 499647 - DNA, 120 bp, Artificial Sequence
  ENSG00000163629_45 (sequence is synthesized)
tgacagcagtgggagtggagaagatgacttagtgacagctccagcaaacatatcaaattcgacctggagttcagctttgcatcagactctaagcaacatggtatcacaggcacagagtca

SEQ ID NO: 499648 - DNA, 120 bp, Artificial Sequence
  ENSG00000163629_46 (sequence is synthesized)
tcatgaagcacccaagagtcaagaagataccatttgtaccatgttttactatcctcagaaaattcccaataaaccagagtttgaggacagtaatccttcccctctaccaccggatatggc

SEQ ID NO: 499649 - DNA, 120 bp, Artificial Sequence
  ENSG00000163629_47 (sequence is synthesized)
tcctgggcagagttatcaaccccaatcagaatctgcttcctctagttcgatggataagtatcatatacatcacatttctgaaccaactagacaagaaaactggacacctttgaaaaatga

SEQ ID NO: 499650 - DNA, 120 bp, Artificial Sequence
  ENSG00000163629_48 (sequence is synthesized)
cttggaaaatcaccttgaagactttgaactggaagtagaactcctcattaccctaattaaatcagaaaaaggaagcctgggttttacagtaaccaaaggcaatcagagaattggttgtta

SEQ ID NO: 499651 - DNA, 120 bp, Artificial Sequence
  ENSG00000163629_49 (sequence is synthesized)
tgttcatgatgtcatacaggatccagccaaaagtgatggaaggctaaaacctggggaccggctcataaaggttaatgatacagatgttactaatatgactcatacagatgcagttaatct

SEQ ID NO: 499652 - DNA, 120 bp, Artificial Sequence
  ENSG00000163629_50 (sequence is synthesized)
gctccgggctgcatccaaaacagtcagattagttattggacgagttctagaattacccagaataccaatgttgcctcatttgctaccggacataacactaacgtgcaacaaagaggagtt

SEQ ID NO: 499653 - DNA, 120 bp, Artificial Sequence
  ENSG00000163629_51 (sequence is synthesized)
gggtttttccttatgtggaggtcatgacagcctttatcaagtggtatatattagtgatattaatccaaggtccgtcgcagccattgagggtaatctccagctattagatgtcatccatta

SEQ ID NO: 499654 - DNA, 120 bp, Artificial Sequence
  ENSG00000163629_52 (sequence is synthesized)
tgtgaacggagtcagcacacaaggaatgaccttggaggaagttaacagagcattagacatgtcacttccttcattggtattgaaagcaacaagaaatgatcttccagtggtccccagctc

SEQ ID NO: 499655 - DNA, 120 bp, Artificial Sequence
  ENSG00000163629_53 (sequence is synthesized)
aaagaggtctgctgtttcagctccaaagtcaaccaaaggcaatggttcctacagtgtggggtcttgcagccagcctgccctcactcctaatgattcattctccacggttgctggggaaga

SEQ ID NO: 499656 - DNA, 120 bp, Artificial Sequence
  ENSG00000163629_54 (sequence is synthesized)
aataaatgaaatatcgtaccccaaaggaaaatgttctacttatcagataaagggatcaccaaacttgactctgcccaaagaatcttatatacaagaagatgacatttatgatgattccca

SEQ ID NO: 499657 - DNA, 120 bp, Artificial Sequence
  ENSG00000163629_55 (sequence is synthesized)
agaagctgaagttatccagtctctgctggatgttgtggatgaggaagcccagaatcttttaaacgaaaataatgcagcaggatactcctgtggtccaggtacattaaagatgaatgggaa

SEQ ID NO: 499658 - DNA, 120 bp, Artificial Sequence
  ENSG00000163629_56 (sequence is synthesized)
gttatcagaagagagaacagaagatacagactgcgatggttcacctttacctgagtattttactgaggccaccaaaatgaatggctgtgaagaatattgtgaagaaaaagtaaaaagtga

SEQ ID NO: 499659 - DNA, 120 bp, Artificial Sequence
  ENSG00000163629_57 (sequence is synthesized)
aagcttaattcagaagccacaagaaaagaagactgatgatgatgaaataacatggggaaatgatgagttgccaatagagagaacaaaccatgaagattctgataaagatcattcctttct

SEQ ID NO: 499660 - DNA, 120 bp, Artificial Sequence
  ENSG00000163629_58 (sequence is synthesized)
gacaaacgatgagctcgctgtactccctgtcgtcaaagtgcttccctctggtaaatacacgggtgccaacttaaaatcagtcattcgagtcctgcggggtttgctagatcaaggaattcc

SEQ ID NO: 499661 - DNA, 120 bp, Artificial Sequence
  ENSG00000163629_59 (sequence is synthesized)
ttctaaggagctggagaatcttcaagaattaaaacctttggatcagtgtctaattgggcaaactaaggaaaacagaaggaagaacagatataaaaatatacttccctatgatgctacaag

SEQ ID NO: 499662 - DNA, 120 bp, Artificial Sequence
  ENSG00000163629_60 (sequence is synthesized)
agtgcctcttggagatgaaggtggctatatcaatgccagcttcattaagataccagttgggaaagaagagttcgtttacattgcctgccaaggaccactgcctacaactgttggagactt

SEQ ID NO: 499663 - DNA, 120 bp, Artificial Sequence
  ENSG00000163629_61 (sequence is synthesized)
ctggcagatgatttgggagcaaaaatccacagtgatagccatgatgactcaagaagtagaaggagaaaaaatcaaatgccagcgctattggcccaacatcctaggcaaaacaacaatggt

SEQ ID NO: 499664 - DNA, 120 bp, Artificial Sequence
  ENSG00000163629_62 (sequence is synthesized)
cagcaacagacttcgactggctcttgtgagaatgcagcagctgaagggctttgtggtgagggcaatgacccttgaagatattcagaccagagaggtgcgccatatttctcatctgaattt

SEQ ID NO: 499665 - DNA, 120 bp, Artificial Sequence
  ENSG00000163629_63 (sequence is synthesized)
cactgcctggccagaccatgatacaccttctcaaccagatgatctgcttacttttatctcctacatgagacacatccacagatcaggcccaatcattacgcactgcagtgctggcattgg

SEQ ID NO: 499666 - DNA, 120 bp, Artificial Sequence
  ENSG00000163629_64 (sequence is synthesized)
acgttcagggaccctgatttgcatagatgtggttctgggattaatcagtcaggatcttgattttgacatctctgatttggtgcgctgcatgagactacaaagacacggaatggttcagac

SEQ ID NO: 499667 - DNA, 120 bp, Artificial Sequence
  ENSG00000163629_65 (sequence is synthesized)
agaggatcaatatattttctgctatcaagtcatcctttatgtcctgacacgtcttcaagcagaagaagagcaaaaacagcagcctcagcttctgaagtgacatgaaaagagcctctggat

SEQ ID NO: 499668 - DNA, 120 bp, Artificial Sequence
  ENSG00000163629_66 (sequence is synthesized)
gcatttccatttctctccttaacctccagcagactcctgctctctatccaaaataaagatcacagagcagcaagttcatacaacatgcatgttctcctctatcttagaggggtattcttc

SEQ ID NO: 499669 - DNA, 120 bp, Artificial Sequence
  ENSG00000163629_67 (sequence is synthesized)
ttgaaaataaaaaatattgaaatgctgtatttttacagctactttaacctatgataattatttacaaaattttaacactaaccaaacaatgcagatcttagggatgattaaaggcagcat

SEQ ID NO: 499670 - DNA, 120 bp, Artificial Sequence
  ENSG00000163629_68 (sequence is synthesized)
ttgatgatagcagacattgttacaaggacatggtgagtctatttttaatgcaccaatcttgtttatagcaaaaatgttttccaatattttaataaagtagttattttataggggatactt

SEQ ID NO: 499671 - DNA, 120 bp, Artificial Sequence
  ENSG00000163629_69 (sequence is synthesized)
gaaaccagtatttaagctttaaatgacagtaatattggcatagaaaaaagtagcaaatgtttactgtatcaatttctaatgtttactatatagaatttcctgtaatatatttatatactt

SEQ ID NO: 499672 - DNA, 120 bp, Artificial Sequence
  ENSG00000163629_70 (sequence is synthesized)
tttcatgaaaatggagttatcagttatctgtttgttactgcatcatctgtttgtaatcattatctcactttgtaaataaaaacacaccttaaaacatgaacaagccaaaactgtgtgcag

SEQ ID NO: 499673 - DNA, 120 bp, Artificial Sequence
  ENSG00000163629_71 (sequence is synthesized)
cacttggtaaaactggttctgggaaatctttctggggtatttcccaaaccttctccactttcccttcttctcggaacactgctacctagtgtatccagggaatccatgcttgtatccctg

SEQ ID NO: 499674 - DNA, 120 bp, Artificial Sequence
  ENSG00000163629_72 (sequence is synthesized)
ccagatttccccaagacctggactcttctagtttttctcttgttttggatatgaagaatcccaagaataaccaatgctatatattacctgaaagtcccacctctgttctgcatttctaag

SEQ ID NO: 499675 - DNA, 120 bp, Artificial Sequence
  ENSG00000163629_73 (sequence is synthesized)
gctgtattttatcttgtttgccctatctgatctggatctatactttatctgctcttatccttagggttgtagtcctggagtgttggtccctcttccttgcacaggttacaaatttaccac

SEQ ID NO: 499676 - DNA, 120 bp, Artificial Sequence
  ENSG00000163629_74 (sequence is synthesized)
tgccacacagtgttcttgttgacttcctcagaattcctcatcggtaggggtttagttcccatcttaaccaggatgtcagatggctgccaggaatgtattcaaattctgcacagtttttca

SEQ ID NO: 499677 - DNA, 120 bp, Artificial Sequence
  ENSG00000163629_75 (sequence is synthesized)
gttgataacaaacaggcccacagatcttctagacaaatggtttgtaaactctccctcaagaaacctttgcggttctatagtgaagggaaatgtaggaagtagaggccgaataaatggagt

SEQ ID NO: 499678 - DNA, 120 bp, Artificial Sequence
  ENSG00000163629_76 (sequence is synthesized)
tcttggttgcccattttccctctttaactagagcagctccagttttatttgatctgtttatatttctgcgtgtgatttttttgaacaaaggtaaagctattaaaaaatctttgaaaacca

SEQ ID NO: 499679 - DNA, 120 bp, Artificial Sequence
  ENSG00000163629_77 (sequence is synthesized)
ccaaccttttacagtaccttagaagagcaaaacaatgtgtgaataacatcagttctcattgagatctctaaatttgtcagctaatcaagaaaccaagcctgatatatataaccatctggg

SEQ ID NO: 499680 - DNA, 120 bp, Artificial Sequence
  ENSG00000163630_0 (sequence is synthesized)
acccctcgctgactcgcttcgcttccccgacgcgctgggttcccggagcgcagagcccagcgttagcgggtgggctccccgaggccccctgccctcgccgggctgctccagggtgtcgct

SEQ ID NO: 499681 - DNA, 120 bp, Artificial Sequence
  ENSG00000163630_1 (sequence is synthesized)
cctctggctgctcccgaaggggcttctggccctgaggacggtggtgccaagcgaacttcatttttaaaaagaactggtggatgagaagagcgagcgagggcgagctatggaccctgtgag

SEQ ID NO: 499682 - DNA, 120 bp, Artificial Sequence
  ENSG00000163630_2 (sequence is synthesized)
tcagctggcctctgcgggcaccttccgggtgctgaaggagccccttgccttcctgcgagccctggaattgctttttgcaatctttgcatttgcaacatgcggtggctattctggaggcct

SEQ ID NO: 499683 - DNA, 120 bp, Artificial Sequence
  ENSG00000163630_3 (sequence is synthesized)
gcggctgagtgtggactgcgtcaacaagacagaaagtaacctcagcatcgacatagcgtttgcctacccattcaggttgcaccaggtgacgtttgaggtgcccacctgcgagggaaagga

SEQ ID NO: 499684 - DNA, 120 bp, Artificial Sequence
  ENSG00000163630_4 (sequence is synthesized)
acggcagaagctggcattgattggtgactcctcgtcttcagcagagttcttcgtcactgttgctgtcttcgccttcctctactctttggctgccactgtcgtttacattttcttccagaa

SEQ ID NO: 499685 - DNA, 120 bp, Artificial Sequence
  ENSG00000163630_5 (sequence is synthesized)
caaataccgggaaaacaaccggggcccactcattgacttcattgtcactgtagtcttttcgttcttgtggttggtgggttcatcagcttgggcaaaaggactgtctgacgtcaaagttgc

SEQ ID NO: 499686 - DNA, 120 bp, Artificial Sequence
  ENSG00000163630_6 (sequence is synthesized)
aacggatcccaaggaagtattgctactaatgtcagcttgcaaacagccatccaacaaatgcatggctatccacagccctgttatgtcaagcttaaacacttctgtggtctttggattctt

SEQ ID NO: 499687 - DNA, 120 bp, Artificial Sequence
  ENSG00000163630_7 (sequence is synthesized)
gaactttattctctgggctggaaacatatggtttgttttcaaggagaccggctggcattcttcgggacagagatatctttcagatccaatggagaagcactccagcagctataatcaagg

SEQ ID NO: 499688 - DNA, 120 bp, Artificial Sequence
  ENSG00000163630_8 (sequence is synthesized)
tggttacaaccaagacagctatggatcaagcagtgggtacagtcagcaggcgagtttggggccaacctcagatgagtttggccaacagcctactggccccacttcctttaccaatcagat

SEQ ID NO: 499689 - DNA, 120 bp, Artificial Sequence
  ENSG00000163630_9 (sequence is synthesized)
ttaacagagtagcatttgcattcttctgcagtcgcctcaccatcttccatttcagtggcagaagaattttttaagggtttcaatcaattattaatgcagagagtattgaatgtaaatcag

SEQ ID NO: 499690 - DNA, 120 bp, Artificial Sequence
  ENSG00000163630_10 (sequence is synthesized)
tagtcttcattaaggcagcaagtcctgggttgtgaaaaatgatacttagagatgaggcgacatgaggagatatattattcatcatagatggctaattggagagtaccttgttatatatac

SEQ ID NO: 499691 - DNA, 120 bp, Artificial Sequence
  ENSG00000163630_11 (sequence is synthesized)
agatactttcatggtcattttgtatgtatgttaaagtagtagaagtattttgtagcttaaagtctctagtatgtaatatgcataaagtaaatcaaatagcgttgagttttcttatgcatt

SEQ ID NO: 499692 - DNA, 120 bp, Artificial Sequence
  ENSG00000163630_12 (sequence is synthesized)
ttgatgtgaaagatgttataataatttctagaagacaatttggtgtatcacaacatgcatgtcttatttttttttagttttaagtcctataggactatgagtctctaagttatttgtttc

SEQ ID NO: 499693 - DNA, 120 bp, Artificial Sequence
  ENSG00000163630_13 (sequence is synthesized)
agaaaattattctttttttatgtgataaatcatatgatttaagtgcatgaataagcattttcccacacaatgaacatttgaactgtgtttatgaaaattttctggtttgcaccatgaatt

SEQ ID NO: 499694 - DNA, 120 bp, Artificial Sequence
  ENSG00000163630_14 (sequence is synthesized)
tgtcaaatggatatttataggaatatattcactactttgtatactttgcaaatttgtctctctggctttacccaagttctgaatgcattgtaattaaaatttaagtttttcttttccccc

SEQ ID NO: 499695 - DNA, 120 bp, Artificial Sequence
  ENSG00000163630_15 (sequence is synthesized)
attagtaaacatttagtgctacatatgataactgcccaatatttattctatttacttagctaaatatttgcattcttgtaaccttctatggtgttttgtggctcttatcttgtggaccat

SEQ ID NO: 499696 - DNA, 120 bp, Artificial Sequence
  ENSG00000163630_16 (sequence is synthesized)
aaataacacggcccaataactctttgtgtttatggagtgttgttttcttagaataatggagatgcagatatagataccatagtcaaggtaccgccttgctgaagtatttatttataaaga

SEQ ID NO: 499697 - DNA, 120 bp, Artificial Sequence
  ENSG00000163630_17 (sequence is synthesized)
atattctgtagaacctctactaccagctatatttttaaatcctgtttatttgtaaagctaatatgctcctcaatgtaattattaaaaattctcaagtcacagctaaacttactaattctg

SEQ ID NO: 499698 - DNA, 120 bp, Artificial Sequence
  ENSG00000163630_18 (sequence is synthesized)
attttagtgtagcccctaaattaaaaatggcttccatatgccactctgtaccccaaagagagttctcatgaaatattctccagaatgtattcattatcaagaaaatgtcaatcgtcactt

SEQ ID NO: 499699 - DNA, 120 bp, Artificial Sequence
  ENSG00000163630_19 (sequence is synthesized)
cctcgttttaactcagctgaaacaccaggacccaatagagagggcaagctgagcatctgtatttccagataaaagttgttattgatgtataaactcgttgcgtgattagtgatgttggaa

SEQ ID NO: 499700 - DNA, 120 bp, Artificial Sequence
  ENSG00000163630_20 (sequence is synthesized)
gcattttagcacaaaacagccttgtgtcttagatgatatctgtaaccagtttctgaatcccgttggataaaactgtattgtgatatctatttgatgttaataaagttattgcatacagtg

SEQ ID NO: 499701 - DNA, 120 bp, Artificial Sequence
  ENSG00000163630_21 (sequence is synthesized)
aaagcagtcctgcacttccagttgtgagccaagagccaagtgtgggagctcaccatggtggcagccacctccccaccaagcaggcagcgttcaccagaggggagtatcaggttcctgtac

SEQ ID NO: 499702 - DNA, 120 bp, Artificial Sequence
  ENSG00000163630_22 (sequence is synthesized)
tcagctgtgggttgtcactgtctaataatatgaccgttttgccatctctctgcaaatgaggctgaagctgctatctgattggtataacatctcactttccctctgcattgattttcttct

SEQ ID NO: 499703 - DNA, 120 bp, Artificial Sequence
  ENSG00000163630_23 (sequence is synthesized)
tctcctcctttgcttcataaaaagagggacaagtggctggtgctgtggacagagaagctttatttttagtatgagacaacctctattttctttcaggagagggaagttggattatcaatt

SEQ ID NO: 499704 - DNA, 120 bp, Artificial Sequence
  ENSG00000163630_24 (sequence is synthesized)
ccggggcccactcattgcagaaggttcagagtgtgggttgaaatccagagctcaattcataatcaccatgcaagaggcccaagatcctgatagccaatgtgctacagaagttagagaggt

SEQ ID NO: 499705 - DNA, 120 bp, Artificial Sequence
  ENSG00000163630_25 (sequence is synthesized)
aaacagattcagtggccttggagaaggaagctagtctaaatgatcatgtcattcttactcaggcagttacaaagagtgttacactgcgcctttaaggaaaactttccttcatcattcctg

SEQ ID NO: 499706 - DNA, 120 bp, Artificial Sequence
  ENSG00000163630_26 (sequence is synthesized)
taagcgtggacatgcaacttctctcaccacaaaggttctgccttaaagggctttcctggagtgtcaataggacctcaaaagaagagaacctgaggggacttccagctgcagaaggagtaa

SEQ ID NO: 499707 - DNA, 120 bp, Artificial Sequence
  ENSG00000163630_27 (sequence is synthesized)
cgtttccaagaagcaaagattcttggttctttgttgctttaagaaaatttaggccaggttttccttagacaaggaaattgaaattaaaacagtagctctttttagtttttcaggcaatag

SEQ ID NO: 499708 - DNA, 120 bp, Artificial Sequence
  ENSG00000163630_28 (sequence is synthesized)
ctctctctcgcctcattcccccaaagctggcctctgcgggcaccttccgggtgctgaaggagccccttgccttcctgcgagccctggaattggctcacctgtgcctggtgtcaagaagct

SEQ ID NO: 499709 - DNA, 120 bp, Artificial Sequence
  ENSG00000163630_29 (sequence is synthesized)
cagtgactctttctggactcagaagtgcctctcagccctcaggagccttttctccagcaaatgtaccctatggaaaagtagtccttgatccaatcagttatttgttgactggactgggtc

SEQ ID NO: 499710 - DNA, 120 bp, Artificial Sequence
  ENSG00000163630_30 (sequence is synthesized)
ttcccccaaagctggcctctgcgggcaccttccgggtgctgaaggagccccttgccttcctgcgagccctggaattggctgtagaagaaacctggtgtcactatccacttctggtgaagg

SEQ ID NO: 499711 - DNA, 120 bp, Artificial Sequence
  ENSG00000163630_31 (sequence is synthesized)
cctcaggctgcttccactcatggcagaaggcagagaggagctggtgtgtgcagagatcacatggtgagaaaggaagcaaaagctttttgcaatctttgcatttgcaacatgcggtggcta

SEQ ID NO: 499712 - DNA, 120 bp, Artificial Sequence
  ENSG00000163631_0 (sequence is synthesized)
ctagcttttctcttctgtcaaccccacacgcctttggcacaatgaagtgggtaacctttatttcccttctttttctctttagctcggcttattccaggggtgtgtttcgtcgagatgcac

SEQ ID NO: 499713 - DNA, 120 bp, Artificial Sequence
  ENSG00000163631_1 (sequence is synthesized)
acaagagtgaggttgctcatcggtttaaagatttgggagaagaaaatttcaaagccttggtgttgattgcctttgctcagtatcttcagcagtgtccatttgaagatcatgtaaaattag

SEQ ID NO: 499714 - DNA, 120 bp, Artificial Sequence
  ENSG00000163631_2 (sequence is synthesized)
tgaatgaagtaactgaatttgcaaaaacatgtgttgctgatgagtcagctgaaaattgtgacaaatcacttcataccctttttggagacaaattatgcacagttgcaactcttcgtgaaa

SEQ ID NO: 499715 - DNA, 120 bp, Artificial Sequence
  ENSG00000163631_3 (sequence is synthesized)
cctatggtgaaatggctgactgctgtgcaaaacaagaacctgagagaaatgaatgcttcttgcaacacaaagatgacaacccaaacctcccccgattggtgagaccagaggttgatgtga

SEQ ID NO: 499716 - DNA, 120 bp, Artificial Sequence
  ENSG00000163631_4 (sequence is synthesized)
tgtgcactgcttttcatgacaatgaagagacatttttgaaaaaatacttatatgaaattgccagaagacatccttacttttatgccccggaactccttttctttgctaaaaggtataaag

SEQ ID NO: 499717 - DNA, 120 bp, Artificial Sequence
  ENSG00000163631_5 (sequence is synthesized)
ctgcttttacagaatgttgccaagctgctgataaagctgcctgcctgttgccaaagctcgatgaacttcgggatgaagggaaggcttcgtctgccaaacagagactcaagtgtgccagtc

SEQ ID NO: 499718 - DNA, 120 bp, Artificial Sequence
  ENSG00000163631_6 (sequence is synthesized)
tccaaaaatttggagaaagagctttcaaagcatgggcagtagctcgcctgagccagagatttcccaaagctgagtttgcagaagtttccaagttagtgacagatcttaccaaagtccaca

SEQ ID NO: 499719 - DNA, 120 bp, Artificial Sequence
  ENSG00000163631_7 (sequence is synthesized)
cggaatgctgccatggagatctgcttgaatgtgctgatgacagggcggaccttgccaagtatatctgtgaaaatcaagattcgatctccagtaaactgaaggaatgctgtgaaaaacctc

SEQ ID NO: 499720 - DNA, 120 bp, Artificial Sequence
  ENSG00000163631_8 (sequence is synthesized)
tgttggaaaaatcccactgcattgccgaagtggaaaatgatgagatgcctgctgacttgccttcattagctgctgattttgttgaaagtaaggatgtttgcaaaaactatgctgaggcaa

SEQ ID NO: 499721 - DNA, 120 bp, Artificial Sequence
  ENSG00000163631_9 (sequence is synthesized)
gtcttcctgggcatgtttttgtatgaatatgcaagaaggcatcctgattactctgtcgtgctgctgctgagacttgccaagacatatgaaaccactctagagaagtgctgtgccgctgca

SEQ ID NO: 499722 - DNA, 120 bp, Artificial Sequence
  ENSG00000163631_10 (sequence is synthesized)
gatcctcatgaatgctatgccaaagtgttcgatgaatttaaacctcttgtggaagagcctcagaatttaatcaaacaaaattgtgagctttttgagcagcttggagagtacaaattccag

SEQ ID NO: 499723 - DNA, 120 bp, Artificial Sequence
  ENSG00000163631_11 (sequence is synthesized)
aatgcgctattagttcgttacaccaagaaagtaccccaagtgtcaactccaactcttgtagaggtctcaagaaacctaggaaaagtgggcagcaaatgttgtaaacatcctgaagcaaaa

SEQ ID NO: 499724 - DNA, 120 bp, Artificial Sequence
  ENSG00000163631_12 (sequence is synthesized)
agaatgccctgtgcagaagactatctatccgtggtcctgaaccagttatgtgtgttgcatgagaaaacgccagtaagtgacagagtcaccaaatgctgcacagaatccttggtgaacagg

SEQ ID NO: 499725 - DNA, 120 bp, Artificial Sequence
  ENSG00000163631_13 (sequence is synthesized)
cgaccatgcttttcagctctggaagtcgatgaaacatacgttcccaaagagtttaatgctgaaacattcaccttccatgcagatatatgcacactttctgagaaggagagacaaatcaag

SEQ ID NO: 499726 - DNA, 120 bp, Artificial Sequence
  ENSG00000163631_14 (sequence is synthesized)
aaacaaactgcacttgttgagctcgtgaaacacaagcccaaggcaacaaaagagcaactgaaagctgttatggatgatttcgcagcttttgtagagaagtgctgcaaggctgacgataag

SEQ ID NO: 499727 - DNA, 120 bp, Artificial Sequence
  ENSG00000163631_15 (sequence is synthesized)
gagacctgctttgccgaggagggtaaaaaacttgttgctgcaagtcaagctgccttaggcttataacatcacatttaaaagcatctcagcctaccatgagaataagagaaagaaaatgaa

SEQ ID NO: 499728 - DNA, 120 bp, Artificial Sequence
  ENSG00000163631_16 (sequence is synthesized)
gatcaaaagcttattcatctgtttttctttttcgttggtgtaaagccaacaccctgtctaaaaaacataaatttctttaatcattttgcctcttttctctgtgcttcaattaataaaaaa

SEQ ID NO: 499729 - DNA, 120 bp, Artificial Sequence
  ENSG00000163631_17 (sequence is synthesized)
tggaaagaatctaatagagtggtacagcactgttatttttcaaagatgtgttgctatcctgaaaattctgtaggttctgtggaagttccagtgttctctcttattccacttcggtagagg

SEQ ID NO: 499730 - DNA, 120 bp, Artificial Sequence
  ENSG00000163631_18 (sequence is synthesized)
atttctagtttcttgtgggctaattaaataaatcattaatactcttctaagttatggattataaacattcaaaataatattttgacattatgataattctgaataaaagaacaaaaacca

SEQ ID NO: 499731 - DNA, 120 bp, Artificial Sequence
  ENSG00000163631_19 (sequence is synthesized)
acctgctttgccgaggagcctaccatgagaataagagaaagaaaatgaagatcaaaagcttattcatctgtttttctttttcgttggtgtaaagccaacaccctgtctaaaaaacataaa

SEQ ID NO: 499732 - DNA, 120 bp, Artificial Sequence
  ENSG00000163631_20 (sequence is synthesized)
ctgtcaaccccacacgcctttggcacaatgaagtgggtaacctttatttcccttctttttctctttagctcggcttattccaggggtgtgtttcgtcgagatgcacatacttatatgaaa

SEQ ID NO: 499733 - DNA, 120 bp, Artificial Sequence
  ENSG00000163631_21 (sequence is synthesized)
atctacatctccaggtttaggagcaaacagagtatgttcatagaaggaatatgtgtatggtcttagaatacaatgaatatgttctgccaacttaataaaggtctgaggagaaagtgtagc

SEQ ID NO: 499734 - DNA, 120 bp, Artificial Sequence
  ENSG00000163631_22 (sequence is synthesized)
ctgtcaaccccacacgcctttggcacaatgaagtgggtaacctttatttcccttctttttctctttagctcggcttattccaggggtgtgtttcgtcgagatgcacggtgttgattgcct

SEQ ID NO: 499735 - DNA, 120 bp, Artificial Sequence
  ENSG00000163631_23 (sequence is synthesized)
ttggtcttcccaccaactccatgaaagtggattttattatcctcatcatgcagatgagaatattgagacttatagcggtatgcctgagccccaaagtactcagagttgcctggctccaag

SEQ ID NO: 499736 - DNA, 120 bp, Artificial Sequence
  ENSG00000163631_24 (sequence is synthesized)
ttcaaaattaaaaagcatggagtaactccataggccaacactctataaaaattaccataacaaaaatattttcaacattaagacttggaagttttgttatgatgattttttaaagaagta

SEQ ID NO: 499737 - DNA, 120 bp, Artificial Sequence
  ENSG00000163631_25 (sequence is synthesized)
gaatgtgctgatgacagggtaaagagtcgtcgatatgctttttggtagcttgcatgctcaagttggtagaatggatgcgtttggtatcattggtgatagctgacagtgggttgagattgt

SEQ ID NO: 499738 - DNA, 120 bp, Artificial Sequence
  ENSG00000163631_26 (sequence is synthesized)
tatgccaaagtggtaggtttattgttggaaaaaaatgtagttctttgactgatgattccaataatgagaaagaaaaataatgcaagaatgtaaaatgatatacagtgcaatttagatctt

SEQ ID NO: 499739 - DNA, 120 bp, Artificial Sequence
  ENSG00000163631_27 (sequence is synthesized)
ttcttgagatggtttcaattctggaatcttaaacatgaaagaaaaagtagccttagaatgattaacaaaatttagactagttagaatagaaagatctgaatagagcaatctctaaaaaat

SEQ ID NO: 499740 - DNA, 120 bp, Artificial Sequence
  ENSG00000163631_28 (sequence is synthesized)
gctattacatttccaatttgtcaacatgctgagctttaataggacttatcttcttatgacaacatttattggtgtgtccccttgcctagcccaacagaagaattcagcagcccctaccat

SEQ ID NO: 499741 - DNA, 120 bp, Artificial Sequence
  ENSG00000163632_0 (sequence is synthesized)
ctctaacacctggaagggaataagggaaagactctaaaaatttcctacatattttattccgaatagcccacaccttgacagtacattcagtcactggatgattttgtattgaagtctgta

SEQ ID NO: 499742 - DNA, 120 bp, Artificial Sequence
  ENSG00000163632_1 (sequence is synthesized)
agttcaagaactaaaacaatccaaaacggctactacaggtgaagttgagagcaatggcccaacctcagctgtatctaccagaaccctttaagattgcctacagaaaagttggacagtgcc

SEQ ID NO: 499743 - DNA, 120 bp, Artificial Sequence
  ENSG00000163632_2 (sequence is synthesized)
gaagattccagcaactcaagaagaaaaatggctcattcaaaaggaaggggatagaaagatggcatagagctgtgtctaccaacttactaaaacaaaatgtattggtccctaaagaggaat

SEQ ID NO: 499744 - DNA, 120 bp, Artificial Sequence
  ENSG00000163632_3 (sequence is synthesized)
catccagtgatagtgacatgggatttcatgaaagccagcaaaatcagaaaagtaatttgaagacgaaagtgaagactgcttttgggaggatgctgtcctacaagtatagaagcaagccag

SEQ ID NO: 499745 - DNA, 120 bp, Artificial Sequence
  ENSG00000163632_4 (sequence is synthesized)
catgtgccagccaagagggctccactgaccataaagaagccctcctgtcaaacacgcagagccttctccctaggattgtcaaggagttttcatctcccaagttatttacagcaaaaatga

SEQ ID NO: 499746 - DNA, 120 bp, Artificial Sequence
  ENSG00000163632_5 (sequence is synthesized)
gttgtagaggcagagacagaggagataacccagggaaacacactccttcgggccaggagaaccaccaagcggttatctgtgacatctcttccttcaggactgcaaaaggggccatattca

SEQ ID NO: 499747 - DNA, 120 bp, Artificial Sequence
  ENSG00000163632_6 (sequence is synthesized)
ccaaaaaagagaccacactttccagcacttaaaaaaaagaagcgtggcatggaaaacatccttcgaaaatcagatttgacagtaggaaagcttcaaatgcaggtggatgacctcatagaa

SEQ ID NO: 499748 - DNA, 120 bp, Artificial Sequence
  ENSG00000163632_7 (sequence is synthesized)
acagtgactgataaatccatgaagctactggcccaaagacatgctgagcttcaacagtgtgagtttctgggggatgaaattcttcagtcttctaaacagttccagaggatatccaagaga

SEQ ID NO: 499749 - DNA, 120 bp, Artificial Sequence
  ENSG00000163632_8 (sequence is synthesized)
accatgaggaagtataaattaaaaaatatgaccacaaaaggacctggagacagctgacctgagactccttgaggaacacaggaaaaggtcttcagacaataacttaaccaattaccaatc

SEQ ID NO: 499750 - DNA, 120 bp, Artificial Sequence
  ENSG00000163632_9 (sequence is synthesized)
agaaaatcgactccacctatgagctggaagtccttcccaccccccaccttcaagctgtcctgcttttctgtactgaaccaatatacatcttacgtgtattcattgatgtctgcctgtaac

SEQ ID NO: 499751 - DNA, 120 bp, Artificial Sequence
  ENSG00000163632_10 (sequence is synthesized)
ttctgtccccctaaaatgcataaaatcagctgtaattcaaccaccttcggcacatctcaggacctcctgatgctgtggcatgtctttaaccttggcaaaataaactcctaaattgattaa

SEQ ID NO: 499752 - DNA, 120 bp, Artificial Sequence
  ENSG00000163632_11 (sequence is synthesized)
aagtataaattaaaaaatgtgtgtttcccatgtacctgctgctgcttctgactttgttcctgattctttaaaagttatcttccctaggctggccgtggtggctcacgcctgtaatctcag

SEQ ID NO: 499753 - DNA, 120 bp, Artificial Sequence
  ENSG00000163633_0 (sequence is synthesized)
agactcggcgcccgcggcgagcgggaaggaggcgtgtgcctgcggcgcggccccgaggcgtgtgcgcggccatgtgcgcttagcgcagcgcgctcttacctcagtaccccggccgcgacc

SEQ ID NO: 499754 - DNA, 120 bp, Artificial Sequence
  ENSG00000163633_1 (sequence is synthesized)
ctccgagcccctggagcccgggtaaccaggccgccggcgccggctcgcggggacccgccaccctggaagccccgcgcacacagcgcattcctggcgagtcggaggcagggtggggcccag

SEQ ID NO: 499755 - DNA, 120 bp, Artificial Sequence
  ENSG00000163633_2 (sequence is synthesized)
gtaaagtgaacagagttatctgtgacattccatcaggcacctatgtaacgaaatcataccgtaataactcaccatggcgtatggagtgccaagaaagaacacagtgaaaaccattttgcg

SEQ ID NO: 499756 - DNA, 120 bp, Artificial Sequence
  ENSG00000163633_3 (sequence is synthesized)
tagccaatatcaagttgcctttcttggaagaaatttcatttggtggttctgtgcagctcacaaaatgtaccaccattaaagatggactgctcccttctgcagaatctatcaaactcgaaa

SEQ ID NO: 499757 - DNA, 120 bp, Artificial Sequence
  ENSG00000163633_4 (sequence is synthesized)
gggagtatgaagtgaagcgtctttgtaaactgaagtgtcaagaaaatacatctaaggaaattcagcttctcctgagggaaaggccagccggtttgagaagacctcttccatctaaatgac

SEQ ID NO: 499758 - DNA, 120 bp, Artificial Sequence
  ENSG00000163633_5 (sequence is synthesized)
acctgaagcgcggattgtagatgaagaaactcagcagcgccggcgggaactgcttctcctgggccgcccaggacccgctcccggccccggccgtcgctgcgctgcagccatcctggcccg

SEQ ID NO: 499759 - DNA, 120 bp, Artificial Sequence
  ENSG00000163633_6 (sequence is synthesized)
gcccccacctcaggaagcctcccacggcccgcccagagaccgagaaaatctcttaatttcagtggaactcagtttgtttctctttttaaacattgccagttataaatgtattttatttta

SEQ ID NO: 499760 - DNA, 120 bp, Artificial Sequence
  ENSG00000163633_7 (sequence is synthesized)
gcccacagctgtgggttagtacccagttctgacagatcttctgagtccctgacatactcttgttccttgtgtcacaaacgacagcactgtaagtagatgaaaatgcatttggagttgagt

SEQ ID NO: 499761 - DNA, 120 bp, Artificial Sequence
  ENSG00000163633_8 (sequence is synthesized)
cgtttgtgctattcattttaatttttgtaaaattgcactaaaagaagaggaaatttcttcagctgcattgttttcaaaagacatcttaaatatgcatctttgagatcccaaggagggacc

SEQ ID NO: 499762 - DNA, 120 bp, Artificial Sequence
  ENSG00000163633_9 (sequence is synthesized)
aaaagaaggcaagagagaaattctcttaaaaatgataaactgaaacatttcatttggttaagaaaaataatagacttcatttttagtacctccctagtttccaattttcttttttttaaa

SEQ ID NO: 499763 - DNA, 120 bp, Artificial Sequence
  ENSG00000163633_10 (sequence is synthesized)
aaagaacacagtgaaaaccattttgcggggcagttgttataatgtggtctcacactgtcacgcaggctggaatgttgtgcacctcctgggcttgagtgatcctcccatctcagcctcctg

SEQ ID NO: 499764 - DNA, 120 bp, Artificial Sequence
  ENSG00000163633_11 (sequence is synthesized)
tgtgcccggaaccttgggatattgcattgcttgcaaagacctggtccacaaacctagccaatatcaagttgcctttcttggaagaaatttcatttggtggttctgtgcagctcacaaaat

SEQ ID NO: 499765 - DNA, 120 bp, Artificial Sequence
  ENSG00000163634_0 (sequence is synthesized)
gccgccgcgcacgccatgggagccgtgactgacgacgaagttatacggaagcgtctcctcattgatggagatggtgctggagatgatcggagaattaatctgctagtgaagagtttcatt

SEQ ID NO: 499766 - DNA, 120 bp, Artificial Sequence
  ENSG00000163634_1 (sequence is synthesized)
aaatggtgcaactctgggtcccaggaagagggatatagccagtaccaacgtatgctgagcacgctgtctcaatgtgaattttcaatgggcaaaactttactagtatatgatatgaatctc

SEQ ID NO: 499767 - DNA, 120 bp, Artificial Sequence
  ENSG00000163634_2 (sequence is synthesized)
agagaaatggaaaattatgaaaaaatttacaaggaaatagaatgtagcatagctggagcacatgaaaaaattgctgagtgcaaaaagcaaattcttcaagcaaaacgaatacgaaaaaat

SEQ ID NO: 499768 - DNA, 120 bp, Artificial Sequence
  ENSG00000163634_3 (sequence is synthesized)
atgagacattaaaggaactagaggctctgggaaaagaattagagcatctttcacacattaaagaaagtgttgaagataagctggaattgagacggaaacagtttcatgttcttcttagta

SEQ ID NO: 499769 - DNA, 120 bp, Artificial Sequence
  ENSG00000163634_4 (sequence is synthesized)
ccatccatgaacttcagcaaacattggaaaatgatgaaaaactctcagaggtagaagaagctcaggaagcaagcatggaaacagatcctaagccatagacaggctaattgcccaccactc

SEQ ID NO: 499770 - DNA, 120 bp, Artificial Sequence
  ENSG00000163634_5 (sequence is synthesized)
ccaggaatattgaaatagctacatgaccataatgtgtttaaaatgtggtatgctcttgagatatttaaagttttggcagtaaaatactctgtttttaagtatgaatgtatttcattcata

SEQ ID NO: 499771 - DNA, 120 bp, Artificial Sequence
  ENSG00000163634_6 (sequence is synthesized)
tttcctctcacaaaggaaaatgacttcagtatagatttgtttttattaaaatgcattttttattcttaagtggtaggaagcaacatccaaaaatgcttaataaaatgcttttaagctgca

SEQ ID NO: 499772 - DNA, 120 bp, Artificial Sequence
  ENSG00000163634_7 (sequence is synthesized)
cacgcgcccgctgcacggcccgctgggcctcccctgagacccctggcctcccggcccgcttccgggaacccctcggcctccccggcctcttcgccagagcgcttcggccttcccgacctc

SEQ ID NO: 499773 - DNA, 120 bp, Artificial Sequence
  ENSG00000163634_8 (sequence is synthesized)
gcctcttcgccagagcgcttcggccttcccgacctctccccggagccccgggcctccccggctgcttccctgagtccttcctcctctcgccagagcccgagcgcccctcggagaccctcg

SEQ ID NO: 499774 - DNA, 120 bp, Artificial Sequence
  ENSG00000163634_9 (sequence is synthesized)
acgaagttatacggaagcgtctcctcattgatggagatggtgctggagatgatcggagaattaatctgctagtgaagagtttcattaaatgatatagccagtaccaacgtatgctgagca

SEQ ID NO: 499775 - DNA, 120 bp, Artificial Sequence
  ENSG00000163634_10 (sequence is synthesized)
gtgggagtttgacctccgccgccgccaaccgccgcctcagcttgcgccgccgccgccgccgccgccgccgcgcacgccatgggagccgtgactgacgatatagccagtaccaacgtatgc

SEQ ID NO: 499776 - DNA, 120 bp, Artificial Sequence
  ENSG00000163634_11 (sequence is synthesized)
ttattttttatggtctaaaggaaacaatacctgctaacaattttctttggtggtaaaagaataataacaattactgtattaatggaaagaatacagtaaatgttagctataaaaaatgtg

SEQ ID NO: 499777 - DNA, 120 bp, Artificial Sequence
  ENSG00000163634_12 (sequence is synthesized)
tattctaagatgatatagtactttgggttacagctattttttaaaaatactagtgtctattttgttaccaatagaggttaatttataaatgcgttttaaaattaaaaatggattattgat

SEQ ID NO: 499778 - DNA, 120 bp, Artificial Sequence
  ENSG00000163634_13 (sequence is synthesized)
gccaccgcgcccggccctccttttcttgactcagattcacactccacagtctttccaggagctagatggatggtattatccagccattgtcctacaagcctaaagccaggtggaaaacca

SEQ ID NO: 499779 - DNA, 120 bp, Artificial Sequence
  ENSG00000163634_14 (sequence is synthesized)
gcgcacgccatgggagccgtgactgacgggaagaaaggcaattcagacaaagcagactgaatatttagtagtagattgtaaatattcaggcaaagaaagagagagagaggcagtaggagt

SEQ ID NO: 499780 - DNA, 120 bp, Artificial Sequence
  ENSG00000163635_0 (sequence is synthesized)
ctgccctggggccggccggccggctcctccataggtggctgcatttccgacttcgccctggctccagtccgggggcttgacgtgcaaacttcgccggagcgagctgagagggagggaccg

SEQ ID NO: 499781 - DNA, 120 bp, Artificial Sequence
  ENSG00000163635_1 (sequence is synthesized)
gcaagtgggaggaggcggcgggaggcgtctccgcttaagggagccggccgggtgccgccgctcggacggacgcgcggacggaaggaaggagcggggcagccgggccgggcccggggatgc

SEQ ID NO: 499782 - DNA, 120 bp, Artificial Sequence
  ENSG00000163635_2 (sequence is synthesized)
gaaggaaggagcggggcagccgggccgggcccggggatgcaagcggccgaagggagcggaaagaatgtcggagcgggccgcggatgacgtcaggggggagccgcgccgcgcggcggcggc

SEQ ID NO: 499783 - DNA, 80 bp, Artificial Sequence
  ENSG00000163635_3 (sequence is synthesized)
cagcagcagcagcagcagcagccgccgcctccgcagccccagcggcagcagcacccgccaccgccgccacggcgcacacg

SEQ ID NO: 499784 - DNA, 120 bp, Artificial Sequence
  ENSG00000163635_4 (sequence is synthesized)
gccgcaatggcgacggtcggggagcgcaggcctctgcccagtcctgaagtgatgctgggacagtcgtggaatctgtgggttgaggcttccaaacttcctgggaaggacgggacagaattg

SEQ ID NO: 499785 - DNA, 120 bp, Artificial Sequence
  ENSG00000163635_5 (sequence is synthesized)
gacgaaagtttcaaggagtttgggaaaaaccgcgaagtcatggggctctgtcgggaagacatgccaatatttggtttctgtccagcccatgatgatttctacttggtggtgtgtaacgac

SEQ ID NO: 499786 - DNA, 120 bp, Artificial Sequence
  ENSG00000163635_6 (sequence is synthesized)
tgtaatcaggttgtcaaaccgcaggcatttcaatcacattatgaaagaagacatagctcatccagcaagccgcctttggccgttcctcccacttcagtattttccttcttcccttctctg

SEQ ID NO: 499787 - DNA, 120 bp, Artificial Sequence
  ENSG00000163635_7 (sequence is synthesized)
tccaaaagcaaaggaggcagtgcaagtggaagcaaccgttcttccagtggaggtgttcttagcgcatcctcatcaagttccaagttgttgaaatcacccaaagagaaactgcagctcagg

SEQ ID NO: 499788 - DNA, 120 bp, Artificial Sequence
  ENSG00000163635_8 (sequence is synthesized)
gggaacaccaggccaatgcatcccattcagcaaagtagagttccccatggtagaatcatgacaccctctgtgaaagtggaaaagattcatccgaaaatggatggcacactactgaaatct

SEQ ID NO: 499789 - DNA, 120 bp, Artificial Sequence
  ENSG00000163635_9 (sequence is synthesized)
gcggtggggccaacctgtcctgctactgtgagttccttagtcaagcctggccttaactgcccctcaataccaaagccaaccttgccttcacctggacagattctgaatggcaaagggctt

SEQ ID NO: 499790 - DNA, 120 bp, Artificial Sequence
  ENSG00000163635_10 (sequence is synthesized)
cctgcaccgcccactctggaaaagaaacctgaagacaattccaataataggaaatttttaaataagagattatcagaaagagagtttgatcctgacatccactgtggggttattgatctc

SEQ ID NO: 499791 - DNA, 120 bp, Artificial Sequence
  ENSG00000163635_11 (sequence is synthesized)
gacaccaagaagccctgcacccggtctttgacatgcaagacacattccttaacccagcgcagggctgtccagggtagaagaaaacgatttgatgtgttattagccgagcacaaaaacaaa

SEQ ID NO: 499792 - DNA, 120 bp, Artificial Sequence
  ENSG00000163635_12 (sequence is synthesized)
accagggaaaaggaattgattcgccatccggactctcagcaaccaccgcagcctctcagggacccgcatcccgcccctcctagaacgtcacaggagccgcaccaaaaccctcacggagtg

SEQ ID NO: 499793 - DNA, 120 bp, Artificial Sequence
  ENSG00000163635_13 (sequence is synthesized)
attccttccgaatcaaagccttttgtagctagtaaacctaaacctcacacccccagtcttccaaggcctccaggctgccctgctcagcaaggtgggagtgcccccattgaccctcctcca

SEQ ID NO: 499794 - DNA, 120 bp, Artificial Sequence
  ENSG00000163635_14 (sequence is synthesized)
gtccatgaatctccacaccctcccctgcctgccactgagccagcttctcggttatccagtgaggagggcgaaggcgatgacaaagaagagtctgttgaaaaactggactgtcattattca

SEQ ID NO: 499795 - DNA, 120 bp, Artificial Sequence
  ENSG00000163635_15 (sequence is synthesized)
gaatcgacttcgctgcgccctcaacctcatggtggagaagcatctgaatgcacagctatggaagaaaatcccaccagtgcccagtaccacctcacccatctccacacgtattcctcaccg

SEQ ID NO: 499796 - DNA, 120 bp, Artificial Sequence
  ENSG00000163635_16 (sequence is synthesized)
gacaaactctgtgccgacatcacaatgtggagtcagctatctggcagcagccaccgtctctacatccccagtcctgctctcatctacctgcatctccccaaatagcaaatcggtaccagc

SEQ ID NO: 499797 - DNA, 120 bp, Artificial Sequence
  ENSG00000163635_17 (sequence is synthesized)
tcatggaaccacactaaatgcacagcctgctgcttcaggggcgatggatcctgtgtgcagtatgcaatccagacaagtgtcctcttcatcctcatccccttccacgccctctggcctttc

SEQ ID NO: 499798 - DNA, 120 bp, Artificial Sequence
  ENSG00000163635_18 (sequence is synthesized)
ctcggttccttcctcccccatgtccaggaaacctcagaaattgaaatccagcaaatctttgaggcccaaggagtcttctggtaacagcactaactgtcaaaatgccagtagcagtaccag

SEQ ID NO: 499799 - DNA, 89 bp, Artificial Sequence
  ENSG00000163635_19 (sequence is synthesized)
gtaacagcactaactgtcaaaatgccagtagcagtaccagtggcggctcaggaaagaaacgcaaaaacagttccccactgttggttcac

SEQ ID NO: 499800 - DNA, 120 bp, Artificial Sequence
  ENSG00000163635_20 (sequence is synthesized)
tcactctgggcctccctacccctcaacggtaacatcttcccatagcatcggcctcaactgtgtgacgaataaagcaaatgcggtgaacgtccggcatgaccagtcagggaggggcccccc

SEQ ID NO: 499801 - DNA, 120 bp, Artificial Sequence
  ENSG00000163635_21 (sequence is synthesized)
caccgggagccctgctgaatccatcaagaggatgagtgtgatggtgaacagcagtgattctactctttctcttgggccattcattcaccagtccaatgaactgcctgtcaactcccacgg

SEQ ID NO: 499802 - DNA, 120 bp, Artificial Sequence
  ENSG00000163635_22 (sequence is synthesized)
cagtttttcccactcacacactcctctagacaaactcataggaaagaaaagaaagtgctcacccagctcgagcagcatcaacaacagcagcagcaaacccacaaaggttgccaaagtgcc

SEQ ID NO: 499803 - DNA, 120 bp, Artificial Sequence
  ENSG00000163635_23 (sequence is synthesized)
agccgtgaacaatgtccacatgaaacacacaggcaccatcccaggggcacaaggactgatgaacagttccctccttcatcagccaaaggcacgtccctgacagctgaaaatagcacgggg

SEQ ID NO: 499804 - DNA, 120 bp, Artificial Sequence
  ENSG00000163635_24 (sequence is synthesized)
aggaataatgcggacacttttgaggacaagttacacctccactcagcactctggactccacgatgcctttgagtctgttttcccaacctcctgtgggcctcaagggtagaaacctgccgg

SEQ ID NO: 499805 - DNA, 120 bp, Artificial Sequence
  ENSG00000163635_25 (sequence is synthesized)
gctgttgttttaacgaggatttccctgaagctatgtctctagcagtgagtactcataaaggacactggatcaagttcagccaccgaattgcttttatcagtgttaaagtggtctgaactg

SEQ ID NO: 499806 - DNA, 120 bp, Artificial Sequence
  ENSG00000163635_26 (sequence is synthesized)
cttgctaccaatctgtgagaagtttttgtttttgttttgttttttaacttgcagtatatcacagagccactcttcaagtagattggctgggcaaaagaatgttttggcaagagcgttact

SEQ ID NO: 499807 - DNA, 120 bp, Artificial Sequence
  ENSG00000163635_27 (sequence is synthesized)
gtagacctttctccctccttccttttactaccatttttttttaacactgtcatctgtaggtcactctccagcagttaggcaccttaactggagaccagaaaccttccagagaacacaggg

SEQ ID NO: 499808 - DNA, 120 bp, Artificial Sequence
  ENSG00000163635_28 (sequence is synthesized)
ctgcatcccgagcaaccctctgaagaagggaattaggctttagattttgatagcaatgttccaggaatgaaatatagatgttagcccaagacaccatgacaaaatagcccagccttttga

SEQ ID NO: 499809 - DNA, 120 bp, Artificial Sequence
  ENSG00000163635_29 (sequence is synthesized)
gagtaatttgggaaaagaagctgtcagaagtttctaacttacaaactggtttgaaatttttgatgcccagacagcaagtataaatcattttggaggcttacttttcatgatacaaaagca

SEQ ID NO: 499810 - DNA, 120 bp, Artificial Sequence
  ENSG00000163635_30 (sequence is synthesized)
tgtgatttttttttttaagaagaaagaaaatgcaagctagttttgagaaaggaaggccaaattgggtcgggggagggtgggagtgaggaagttaaaatcactatagggagaaaaaacttt

SEQ ID NO: 499811 - DNA, 120 bp, Artificial Sequence
  ENSG00000163635_31 (sequence is synthesized)
tttcaagatttccaaagagatgaaattttcttaatccttttaagttttcatagtaaacagtatggcagattgggttggttgtcctacctggtctatttttaaaagtcaccttttaaagtg

SEQ ID NO: 499812 - DNA, 120 bp, Artificial Sequence
  ENSG00000163635_32 (sequence is synthesized)
acattattagatacacttaaatgtttccaaggcactctctacattacccttgtttttctctttggatactgtcctgggactaagtgtagatttctgcttcaagcacttctggcattgtgt

SEQ ID NO: 499813 - DNA, 120 bp, Artificial Sequence
  ENSG00000163635_33 (sequence is synthesized)
gtttttgtatgcactccccttcatgccacttcagatgtttatttggatgtggttggggacgagagcagacaccaaggaaagggagttggagagaatgtaagtcctgacctgaaggtcttt

SEQ ID NO: 499814 - DNA, 120 bp, Artificial Sequence
  ENSG00000163635_34 (sequence is synthesized)
tgtgatgcatgtataggattgccctgacacacaccctcctttcttgggattataccagccatcttcctgagagttttggagccctctaggatattttttctagtaccccaccccccaccc

SEQ ID NO: 499815 - DNA, 120 bp, Artificial Sequence
  ENSG00000163635_35 (sequence is synthesized)
ctaaagaaagaccttaatatgttaaaacagcattgcttggagaaggtgtcattgaattccgggacgagccggagcctttaaatgggtgcttccaccactacaggctcctgacacgagtaa

SEQ ID NO: 499816 - DNA, 120 bp, Artificial Sequence
  ENSG00000163635_36 (sequence is synthesized)
caggcactgttgcttagaagaacacacgaagttgccgaacacagggtaaaatttccaaggcgctgatcgttgccctggccagggcctgatgagagccagtcagtacattctttttttcct

SEQ ID NO: 499817 - DNA, 120 bp, Artificial Sequence
  ENSG00000163635_37 (sequence is synthesized)
acagttcttgggtttcaaacttcagtttcagggaatttcaagtcaacaacaggtagaatgaataaacttggttaccagcctaataatgtgaattgctacagaattattcttattatgtaa

SEQ ID NO: 499818 - DNA, 120 bp, Artificial Sequence
  ENSG00000163635_38 (sequence is synthesized)
gaaaacaaaaactttatgcagatactttagctataaattgatgtaaaatactgatttttttaaaggaaggagagaacagtatcttgttcaattattatgcaatcaatcagtaaatgtttt

SEQ ID NO: 499819 - DNA, 120 bp, Artificial Sequence
  ENSG00000163635_39 (sequence is synthesized)
taaaatgatactacaggagagcttagtaaggagagggcatggatgggccagtttggcatagttgggagaaatcagtctggtttccatcccagtcggggaagagagaggtgagagggaatc

SEQ ID NO: 499820 - DNA, 120 bp, Artificial Sequence
  ENSG00000163635_40 (sequence is synthesized)
agaacgtacctagttgattccttggtgacaagtgcaatggggtatgggtagaatttattttcagagccaagaggacttgatggttataaataaagttgcctttagcaatggaatttacag

SEQ ID NO: 499821 - DNA, 120 bp, Artificial Sequence
  ENSG00000163635_41 (sequence is synthesized)
atcgatcatgttgttccgaaagatgtgaataggatccacaataacaagttgattcagactaatgtagatatttagattagcaagtattgaacatttgatttcttagactgaggttttaaa

SEQ ID NO: 499822 - DNA, 120 bp, Artificial Sequence
  ENSG00000163635_42 (sequence is synthesized)
tgaatttcattatttctcccggtaatacacagagcatcgggattaggaaattagccattttggattctgtctgccacaaacagacctattctaaacagtgctattaaattttagactgtt

SEQ ID NO: 499823 - DNA, 120 bp, Artificial Sequence
  ENSG00000163635_43 (sequence is synthesized)
gttcaaatattttattttctcctaaactactttttatggtgatgaataattaagaccatttaaaacacgggagtacaagtatttttttgaattaaattaacttgcaaaaaccaaatttgc

SEQ ID NO: 499824 - DNA, 120 bp, Artificial Sequence
  ENSG00000163635_44 (sequence is synthesized)
agtggttgggttgtttctagacagactttggtatcaatttaaaaccaagataatttttatattctttccaatagaatttcatgacaactcctgcagttttcttaacctacaaaaaaaaaa

SEQ ID NO: 499825 - DNA, 120 bp, Artificial Sequence
  ENSG00000163635_45 (sequence is synthesized)
aaaaagtgctgcaatgatgaacaaagaattatacaaaacctacttttgtatctttattttggaatttcttgttctattataaatatggaagtatccctatttcagaagacatattttgtt

SEQ ID NO: 499826 - DNA, 120 bp, Artificial Sequence
  ENSG00000163635_46 (sequence is synthesized)
aaaaatgaattgtacatatttaaatatgtatttttgcacaggtctttttttctgatatcctgttttggtacaattgagatcatctagtatttatttattaattaataaaagtaaatacct

SEQ ID NO: 499827 - DNA, 120 bp, Artificial Sequence
  ENSG00000163635_47 (sequence is synthesized)
ttttataatttgaagtggttcactgccaagccaatagttctagaacctgcctcctttacagttttaagggatgcctctgttctgtgaaaagtctttgtcccttttagtgtctcgggagtg

SEQ ID NO: 499828 - DNA, 120 bp, Artificial Sequence
  ENSG00000163635_48 (sequence is synthesized)
gattcatacagatgaagtgggcattgcttcttcctggttgcctggtttcccgatagactacatgtaactaagtgacacactgcttttcttttgttagtattttatgtgtgggagtatgtg

SEQ ID NO: 499829 - DNA, 120 bp, Artificial Sequence
  ENSG00000163635_49 (sequence is synthesized)
actgcgtgtgtgtgtgcctgtgcgtgtgtgtgtatactcagcacatgtatgttactatgtgatgtggtttaaaactaatggaaaaaactgaaagtgcctgaaactagttttaagcttaga

SEQ ID NO: 499830 - DNA, 120 bp, Artificial Sequence
  ENSG00000163635_50 (sequence is synthesized)
cagaatctctttaaaaagacttgaatgttcagttgaacttttggagtttgctttttccacctaaatattgtttctaaaattttaggggcggagttgaaaaccaccaatgctggtaatttt

SEQ ID NO: 499831 - DNA, 120 bp, Artificial Sequence
  ENSG00000163635_51 (sequence is synthesized)
ataaggtattttaaaattaagacctcttggttcatagtaattcaattggtgatggattgcctggtggcaccaagggttacagatctttttgtcagccagcaacttacacgatgtgtccgt

SEQ ID NO: 499832 - DNA, 120 bp, Artificial Sequence
  ENSG00000163635_52 (sequence is synthesized)
gtgtccgttttgttattcactcatgaaatacaatttaaaatatttaaaatattttgtattccaaaaatataatacaaagaagtacctctgagaacattgaaaaaaatgtataatttgaaa

SEQ ID NO: 499833 - DNA, 120 bp, Artificial Sequence
  ENSG00000163635_53 (sequence is synthesized)
ttataagggcagctgtcttcctgcaagagttctgttgccaaggaatttcttaatgtcgctcattctgtccagggggtttggggcgattgggctttgaaaaaatattcttaaaagtttgtt

SEQ ID NO: 499834 - DNA, 120 bp, Artificial Sequence
  ENSG00000163635_54 (sequence is synthesized)
tagcagaaaataatcacttttacattttgtgcaaaacattttacattttcagataatttaaatgagcactacatactgtcagtgtgaatgtagggccttgaaagcattttgctttttttt

SEQ ID NO: 499835 - DNA, 120 bp, Artificial Sequence
  ENSG00000163635_55 (sequence is synthesized)
ttttttttttttttttgagcttggttataaaagcaatctcctgtgttaaaaacgtgtgaatagtttgataatttgtacacataatcaagagcatctcagctggactttgtgttggctgct

SEQ ID NO: 499836 - DNA, 120 bp, Artificial Sequence
  ENSG00000163635_56 (sequence is synthesized)
tgctgtatagaacatgaacaaatgtcaagggatagaaaattactttggatatttaaaagagaagaaatatatagtctatttgttttgtaacaagtttctgtaaataaaataatttatact

SEQ ID NO: 499837 - DNA, 120 bp, Artificial Sequence
  ENSG00000163635_57 (sequence is synthesized)
gctttcataagaatctcaaagggactcgtgaccccaaaatgctttaaagaatgctgctgttacaaaagtagggacctctacttgctgttccttgtggagctgccattaaaacaaaaataa

SEQ ID NO: 499838 - DNA, 120 bp, Artificial Sequence
  ENSG00000163635_58 (sequence is synthesized)
ctgggctagttgaagttttctaaacaaggggatgaagagtgggacatgctgggaagcctaggagatgatggggttgggtaggcacccccaagagtctgttcatggcctgtgccaccaaag

SEQ ID NO: 499839 - DNA, 120 bp, Artificial Sequence
  ENSG00000163635_59 (sequence is synthesized)
atgtaaaagcccactgtgaatgccagagtttcctcctccccagcatgggcactgccttgagtgcgaactgtcacacctgtgtgtgctagcccttgaccttgttcccttctcagttaacaa

SEQ ID NO: 499840 - DNA, 120 bp, Artificial Sequence
  ENSG00000163635_60 (sequence is synthesized)
cctggaataccttcaaggacacaaaagcactggaataccttcaaggacacaaaatcagtaaataaaaccaaaaggcaaacataagagccttttctctaagttagaaacccaggcctgcaa

SEQ ID NO: 499841 - DNA, 120 bp, Artificial Sequence
  ENSG00000163635_61 (sequence is synthesized)
ctcttctagccagttggctagaagtgaatctttgcaatgattgtgcccagtagtagtgaaggcatttgaaagctaagaacaaaatctatagctgactgttcctggtgtcactcagtcaat

SEQ ID NO: 499842 - DNA, 120 bp, Artificial Sequence
  ENSG00000163635_62 (sequence is synthesized)
ggagactttagtagcgtgcagcctttggaatattcttgtttagaatcaatagagtgcagtgtacaaacgcttacttaccatttcattatttccccaccccctcttttttgaaagccaaag

SEQ ID NO: 499843 - DNA, 120 bp, Artificial Sequence
  ENSG00000163635_63 (sequence is synthesized)
tctttctcccaccttcagagatgagacttgcagatactgtaaaatttcagtatggtcatgctgttgagaaacatatctcaggctcactgtggagatagttttttaaggagttttactatg

SEQ ID NO: 499844 - DNA, 120 bp, Artificial Sequence
  ENSG00000163635_64 (sequence is synthesized)
gcctgttgttcttgggagaggagctgactttacacagtgctgcattgtcttttatttcctgtgagactgatgttatgaagatatgcttatctaaacaaaactggcctttggccctgagaa

SEQ ID NO: 499845 - DNA, 120 bp, Artificial Sequence
  ENSG00000163635_65 (sequence is synthesized)
atctcaaaacagagagagtattggttacatctctctctaaaaatggaggaacgttgtaacacgctttaactgtttgttttttatcttacttgtgaaagaagacatagctcatccagcaag

SEQ ID NO: 499846 - DNA, 120 bp, Artificial Sequence
  ENSG00000163635_66 (sequence is synthesized)
gttttctgttgatctgccaggacctttgtaattcaagtgctttttacagtagtagcaaatgttacataagcccaaacatggagcatatttggagttggtgggcagacccaaatcatgatg

SEQ ID NO: 499847 - DNA, 120 bp, Artificial Sequence
  ENSG00000163635_67 (sequence is synthesized)
caagcctgcagtagcaagtgtgcaatgaagcacaaccaaattctgtgaatggaaggtagcaagacgcctctccaaagcagcccttctgcgcaggagctgaaagctccactggaaagaaga

SEQ ID NO: 499848 - DNA, 120 bp, Artificial Sequence
  ENSG00000163635_68 (sequence is synthesized)
gtgccccagaggcagcacacactctgtacgggggacatctcgtgcttttttccctttctcttccatgacgctcagggctaggcattgtcactctcatgcttcacagcctccggtactcag

SEQ ID NO: 499849 - DNA, 120 bp, Artificial Sequence
  ENSG00000163635_69 (sequence is synthesized)
aggcagttctgtctttcctgattagctcctttcctgaaggatctagaaccctgactgggcatgccagtgtgggagtcagcaagcacgcggctatgttttctcttgcagttttgcacattt

SEQ ID NO: 499850 - DNA, 120 bp, Artificial Sequence
  ENSG00000163635_70 (sequence is synthesized)
gggtttttaaagcttacctgctggaaatgaaactgtgtacactagtggcatgtgagagtgcctgtgagtaatataaaagagagtctacttggggaagaattcaaatgtatgttgtattgt

SEQ ID NO: 499851 - DNA, 120 bp, Artificial Sequence
  ENSG00000163635_71 (sequence is synthesized)
ttcttgatgtttccctgtcatgtcataggaaacttttcagagtagtaatagcagtgataataaggttactaacatttattgatccattcttgtgtgctagctactgaaacctaactctat

SEQ ID NO: 499852 - DNA, 120 bp, Artificial Sequence
  ENSG00000163635_72 (sequence is synthesized)
gtgtgtactatgtcacttatcacaacaaccctatggaataggtactgttactatcctcgttttccagatgaggagaaggaagcttcgtgaggtgggggagttttgtccaaaaaggcctca

SEQ ID NO: 499853 - DNA, 120 bp, Artificial Sequence
  ENSG00000163635_73 (sequence is synthesized)
agtcacataggcctggatttgtgtcccatttctgtcacttcttagctgtaggggtttgggcaaggcactgtttctgtctaagaataacagccactatgctgggttattgagaatatttta

SEQ ID NO: 499854 - DNA, 120 bp, Artificial Sequence
  ENSG00000163636_0 (sequence is synthesized)
agcagaggacgctgccggcggagacgggaccggaagccgggccgcaggcggccgggcgtattcgccgactcctcccgcttccgctgccgcagccggtcgtaaccaagttgtgtcctgtca

SEQ ID NO: 499855 - DNA, 120 bp, Artificial Sequence
  ENSG00000163636_1 (sequence is synthesized)
gccgctgtccccttcgccgcgatgccgctggagaacctggaggaggagggtctgcccaagaaccccgacttgcgtatcgcgcagctgcgcttcctgctcagcctgcccgagcaccgcgga

SEQ ID NO: 499856 - DNA, 120 bp, Artificial Sequence
  ENSG00000163636_2 (sequence is synthesized)
gacgctgccgtgcgcgacgagctgatggcggccgtccgcgataacaacatggctccttactatgaagccttgtgcaaatccctcgactggcagatagacgtggacctactcaataaaatg

SEQ ID NO: 499857 - DNA, 120 bp, Artificial Sequence
  ENSG00000163636_3 (sequence is synthesized)
aagaaggcaaatgaagatgagttgaagcgtttggatgaggagctggaagatgcagagaagaatctaggagagagcgaaattcgcgatgcaatgatggcaaaggccgagtacctctgccgg

SEQ ID NO: 499858 - DNA, 120 bp, Artificial Sequence
  ENSG00000163636_4 (sequence is synthesized)
ataggtgacaaagagggagctctgacagcctttcgcaagacatatgacaaaactgtggccctgggtcaccgattggatattgtattctatctccttaggattggcttattttatatggat

SEQ ID NO: 499859 - DNA, 120 bp, Artificial Sequence
  ENSG00000163636_5 (sequence is synthesized)
tattcgtgatttcaaacaggcagctgaactcttccttgacactgtttcaacatttacatcctatgaactcatggattataaaacatttgtgacttatactgtctatgtcagtatgattgc

SEQ ID NO: 499860 - DNA, 120 bp, Artificial Sequence
  ENSG00000163636_6 (sequence is synthesized)
cttagaaagaccagatctcagggaaaaggtcattaaaggagcagagattcttgaagtgttgcacagtcttccagcagttcggcagtatctgttttcactctatgaatgccgttactctgt

SEQ ID NO: 499861 - DNA, 120 bp, Artificial Sequence
  ENSG00000163636_7 (sequence is synthesized)
tttcttccaatcattagcggttgtggaacaggaaatgaaaaaggactggctttttgcccctcattatcgatactatgtaagagaaatgagaattcatgcatacagtcagctgctggaatc

SEQ ID NO: 499862 - DNA, 120 bp, Artificial Sequence
  ENSG00000163636_8 (sequence is synthesized)
atataggtcattaacccttggctatatggcagaagcgtttggtgttggtgtggaattcattgatcaggaactgtccaggtttattgctgccgggagactacactgcaaaatagataaagt

SEQ ID NO: 499863 - DNA, 120 bp, Artificial Sequence
  ENSG00000163636_9 (sequence is synthesized)
gaatgaaatagtagaaaccaacagacctgatagcaagaactggcagtaccaagaaactatcaagaaaggagatctgctactaaacagagttcaaaaactttccagagtaattaatatgta

SEQ ID NO: 499864 - DNA, 120 bp, Artificial Sequence
  ENSG00000163636_10 (sequence is synthesized)
aagccatgtaactaacaaaggatttgctttagagataattatttggaatttttatagcttacttcacaatgtgcccaggtcagctgtataaaataaatactgcattgttgtttctttcca

SEQ ID NO: 499865 - DNA, 120 bp, Artificial Sequence
  ENSG00000163636_11 (sequence is synthesized)
cctgggccgtccccgcgttccggagcctgcggggactttttttgatggagctccagacccctctgacggggtctcagagaccaggcctggcttctccggcccttagggttttgctttggt

SEQ ID NO: 499866 - DNA, 120 bp, Artificial Sequence
  ENSG00000163636_12 (sequence is synthesized)
ctgcatctctctgtgccgccttcccctgtaagggcagcttgggggagaatcgtgaggcattaatatttacccctgtgctaggcacagagtaaaggccccgtgactttctgtcagtgggga

SEQ ID NO: 499867 - DNA, 120 bp, Artificial Sequence
  ENSG00000163636_13 (sequence is synthesized)
ctgctcccgggcgcggggtattcctgtgggagagttcagcttgcctgtggaagggaaatttgggttcggttctttctggcccttctgtagtgaatgtgtatgtttgaacatatgtatgtg

SEQ ID NO: 499868 - DNA, 120 bp, Artificial Sequence
  ENSG00000163636_14 (sequence is synthesized)
agtatgtgtgtataaaaagtctttccctgtttgaagacttttggaacagaatccggcaagagcaaaccgaggattgccctccctccagccctagtagaggttggcattgccaggattggc

SEQ ID NO: 499869 - DNA, 120 bp, Artificial Sequence
  ENSG00000163636_15 (sequence is synthesized)
cgtcacgcaaacctcccaccagcatacgtttatgttttgccaagccgattattaagcgccatcgcatgccttcctgttagtggggaagagactggtggatgacttgtggcggggcggggg

SEQ ID NO: 499870 - DNA, 120 bp, Artificial Sequence
  ENSG00000163636_16 (sequence is synthesized)
gtgaaatacgtgggcagactttgacttgagggcacaagtgtccccactcacacatccctctttttgcatgttagacatggctccttactatgaagccttgtgcaaatccctcgactggca

SEQ ID NO: 499871 - DNA, 120 bp, Artificial Sequence
  ENSG00000163636_17 (sequence is synthesized)
tatcctgttgcctctgccttcctcatgtcatgtctgccccttgcattaacagatgggaagatgagttgtagtgaggctaagtgatttgttaaaggtcattagaccagttgttatcaaaag

SEQ ID NO: 499872 - DNA, 120 bp, Artificial Sequence
  ENSG00000163636_18 (sequence is synthesized)
ttgtcttctgttacttctttgtagaccacactgcagctacggtaatgactcttagatctgatatttacagttggtcatattccctctgataattccttccagtttttaggttgctgctgc

SEQ ID NO: 499873 - DNA, 120 bp, Artificial Sequence
  ENSG00000163636_19 (sequence is synthesized)
aattctggtcagattggttgttaaatgtgggacttttagtacttgcatcagtgattaaacaaataaatacttaatgagccattcattactatatgtttggtattgttttacagctccctt

SEQ ID NO: 499874 - DNA, 120 bp, Artificial Sequence
  ENSG00000163636_20 (sequence is synthesized)
ttcacactttcattgtagtagtagggaagagatggcaaggaagcaaataaatataaaacgtaatttcacatatagaaatgaacctatggagatgagaaaatgctatccttacgtacggca

SEQ ID NO: 499875 - DNA, 120 bp, Artificial Sequence
  ENSG00000163636_21 (sequence is synthesized)
tgcttaaggaggtgaggtttgctctgagatttgaattgagaggagtcagccatatggagtccttctgcgtgcagaaaagggaatagaaaaggctaaggctttgagccaggaataagcttg

SEQ ID NO: 499876 - DNA, 120 bp, Artificial Sequence
  ENSG00000163636_22 (sequence is synthesized)
gatgttgtaggaacagaaaatgtcagggtggctccagcatagttggagtggtaggagattttgaggataatatatggagagttaggtaggtaatgatttgtgtagggccttgtaggtcat

SEQ ID NO: 499877 - DNA, 120 bp, Artificial Sequence
  ENSG00000163636_23 (sequence is synthesized)
gggatggagcttgagttttaagtaagtttgatagggagccattggaagatttagagcccaagttacatggtcctatgcagtgtctttatataagaaatagagtaaggtggcagagaggac

SEQ ID NO: 499878 - DNA, 120 bp, Artificial Sequence
  ENSG00000163636_24 (sequence is synthesized)
cagttgtgctgtttagtagctcttagaggagatgttaccgtggcgtggacgagggtggtgagagtagagttgggtaggagacatactcaatatgggatgtccagatggcatctagatcag

SEQ ID NO: 499879 - DNA, 120 bp, Artificial Sequence
  ENSG00000163636_25 (sequence is synthesized)
tggctcccacatgtaggtgtttttaaatgttgatgatggtgttttcaatggtctgcagtggaaactttaaatgaagatgcatttcttttaaataagaccattctctttctagtatttttt

SEQ ID NO: 499880 - DNA, 120 bp, Artificial Sequence
  ENSG00000163636_26 (sequence is synthesized)
aaatttcgaacatccataaaattgtaaagaaagaattgtacagtacattttaacatatttgcttgttacaatctatacattttatgttttttaaccacttcaaagtaagtttcagacacc

SEQ ID NO: 499881 - DNA, 120 bp, Artificial Sequence
  ENSG00000163636_27 (sequence is synthesized)
gaaattgaagtctgatgaccactcttaagagggctgttcattagggtgcgggctgggcattatgagtgtgtttttcatgagtcagtggaaggaggggcttgttgtgagcagtgcatgaga

SEQ ID NO: 499882 - DNA, 120 bp, Artificial Sequence
  ENSG00000163636_28 (sequence is synthesized)
aaaacggcttggctttgcttctttttccagctctgtggccttggtcaggttacgtctcttcagtatcgtaactgtaatgtggagataaagccttcattagttaggggcacacaccgcagt

SEQ ID NO: 499883 - DNA, 120 bp, Artificial Sequence
  ENSG00000163636_29 (sequence is synthesized)
attccttaagtcatcttgatgacaagtgaatgcaaggcagctggtacctttcaggtagtagttgaattcaggtagtatttgttcagttttttttttttcccttcatgttctaagaccagc

SEQ ID NO: 499884 - DNA, 120 bp, Artificial Sequence
  ENSG00000163636_30 (sequence is synthesized)
ttgagaggcaaaggttgtaccactgagctctagttgttgttacctaaaaaggccttgttttaaatttctgtgatacctaagaatttcaaatctgggttgtcatggattctttattctttt

SEQ ID NO: 499885 - DNA, 120 bp, Artificial Sequence
  ENSG00000163636_31 (sequence is synthesized)
tttctcccttaaaaagttacattttagatgaaatccccttttttaaaatgggcaaagcaataattctacatcatttctccccttcccttccacttgtttagactaagatatgttagagag

SEQ ID NO: 499886 - DNA, 120 bp, Artificial Sequence
  ENSG00000163636_32 (sequence is synthesized)
ggaaagggtcgttgttttagtaaatactattgctgttgacatgttaatactattgctgttgacatgtttactgatgggctgtgttccataattttgttttaggtcttttgtttgaaacag

SEQ ID NO: 499887 - DNA, 120 bp, Artificial Sequence
  ENSG00000163636_33 (sequence is synthesized)
tttactgtttttatcagttttggtccctaatttttcctaacctacagtttttctctgagtacatatggtttcattgtttgatctactttctatctatctgaatatgaacttctaggatca

SEQ ID NO: 499888 - DNA, 120 bp, Artificial Sequence
  ENSG00000163636_34 (sequence is synthesized)
tgtttattctagtagatgatgacttaaagcctgcagtataggagggacaacgtcaactactgcatgtgcaataacaagcttgaagggaagctaaatgtttgttacaaatttaagacagta

SEQ ID NO: 499889 - DNA, 120 bp, Artificial Sequence
  ENSG00000163636_35 (sequence is synthesized)
ttttaatgccgtttgcatttttctaagaattttctataaagctaattctgttattttttgtctctaaattagggaactgtccaggtttattgctgccgggagactacactgcaaaataga

SEQ ID NO: 499890 - DNA, 120 bp, Artificial Sequence
  ENSG00000163636_36 (sequence is synthesized)
cgcagaaagaatgtggattttagagttctagataggggttttcatttaggccttgcgacatggctgttacatgaccttggttggtctgtttccctaacctctttgtgcctcatttgtctt

SEQ ID NO: 499891 - DNA, 120 bp, Artificial Sequence
  ENSG00000163636_37 (sequence is synthesized)
acctactaaataggctaatagtactacctcgcagcatgaagatgattttaataagatgaatgagagtaacgactcgacaaactatgacatggctccttactatgaagccttgtgcaaatc

SEQ ID NO: 499892 - DNA, 120 bp, Artificial Sequence
  ENSG00000163636_38 (sequence is synthesized)
tcttactcctgatcctatgtgcaaataacctaagacgatttttcacctatctgagaaatgtagtgtgtaggtagctgcatgtctttgatcagtattcctaatgtgcccagttttgtttag

SEQ ID NO: 499893 - DNA, 120 bp, Artificial Sequence
  ENSG00000163636_39 (sequence is synthesized)
aagaagggtcatcagattgtggcctgctgtatggcccaggaggtaagaatgatttttacatttttaaagtgttgtttaaaaaaggaggatgtgacggagagctatgtagcttgcaaagcc

SEQ ID NO: 499894 - DNA, 120 bp, Artificial Sequence
  ENSG00000163636_40 (sequence is synthesized)
ggcccagtgtttttggatgctttctccatgcatataaattgggctgctttatgagaattcatagtatttacctcaggtaatgtaggaacaggtttcccgagcatgatgagtaactcactt

SEQ ID NO: 499895 - DNA, 120 bp, Artificial Sequence
  ENSG00000163636_41 (sequence is synthesized)
ggccttatcttctcatacatacacacacagttatgttgcttttgcatataaggttatattgtagaattgctcttttcccttttttatgcttgaggtctcctggtcatcactcaactcaaa

SEQ ID NO: 499896 - DNA, 120 bp, Artificial Sequence
  ENSG00000163636_42 (sequence is synthesized)
tatggagcccttccctgcttccctcagtcagaacaaatcttacttctctgcattcctgggattcttattgtatgctccctccttcaaaaaaattgagggagcccttccttgcttccctca

SEQ ID NO: 499897 - DNA, 120 bp, Artificial Sequence
  ENSG00000163636_43 (sequence is synthesized)
gtcagaacaaatctcttacttctctgcattcctggggttattgtatgccccctcctttaaaaaaactgaggtataaatcacacaccataaaattacctcaagtgtacaattcagtgcttt

SEQ ID NO: 499898 - DNA, 120 bp, Artificial Sequence
  ENSG00000163636_44 (sequence is synthesized)
ttcatatattggcaaggttttgcaaatattaataattccagaacatcttgatcaccccaaaaggaaaccgacacccattagcagtcactccctattactcctttcccccagcccctggca

SEQ ID NO: 499899 - DNA, 120 bp, Artificial Sequence
  ENSG00000163636_45 (sequence is synthesized)
accactgatctactttatgtctgtacgaatttgcctattctggacatatcatctaaatgcagtcataaaatacgtggctttttgtgcctggcttctttcactttataatgttcccacatt

SEQ ID NO: 499900 - DNA, 120 bp, Artificial Sequence
  ENSG00000163636_46 (sequence is synthesized)
catccatgttgtagcatgtatcagtatttcattttgttttatagccaaatgatagtctgttgtatgtatatactacattttatttatccattcattagttcatagatttttgtgttgatt

SEQ ID NO: 499901 - DNA, 120 bp, Artificial Sequence
  ENSG00000163636_47 (sequence is synthesized)
gcactttttggctactatcaataatgctataatgaagatttgtgtacagctttttctgtggacatatggagtggaatggctgcatcttaatggcaaccctctgataaactttttgaggaa

SEQ ID NO: 499902 - DNA, 120 bp, Artificial Sequence
  ENSG00000163636_48 (sequence is synthesized)
ctgccagttttctaaagcaggcgcccgcaccatttgacattcccatcagctgtgtgagggttccagtgttcccacatccagtacttactattttctgtctttttgattataggtatcttt

SEQ ID NO: 499903 - DNA, 120 bp, Artificial Sequence
  ENSG00000163636_49 (sequence is synthesized)
gtgggtgtgaaatgatatctcattgtaattttgatttgtttctaatgactagtttcattgagcatcttttcatatacttaactggccatgtgccccaattgctaaaacttagcactctgt

SEQ ID NO: 499904 - DNA, 120 bp, Artificial Sequence
  ENSG00000163636_50 (sequence is synthesized)
tttgtgataatttcctagtttgcctcctttgctaactagaatttctgggagcagaacttatgcttttttttttttaatcttcatgaccctgacagcaggacagcacttggtactaatgtg

SEQ ID NO: 499905 - DNA, 120 bp, Artificial Sequence
  ENSG00000163636_51 (sequence is synthesized)
ctctaaaataattcaattggaaaaggaagtagtatccttttctaggtagtacctgactatatttagaaatcaaaaataaattgagaaagtgaaaggttttgtatctcacctcacccccaa

SEQ ID NO: 499906 - DNA, 120 bp, Artificial Sequence
  ENSG00000163636_52 (sequence is synthesized)
ctcacctcacccccaaatccatacacacattcactcacatataaaatttttcctgagacggtgattttaatattgttttatatccttgtagaccttttatttatttatttatttatttat

SEQ ID NO: 499907 - DNA, 120 bp, Artificial Sequence
  ENSG00000163636_53 (sequence is synthesized)
acagggtttcactgtgttagccaggatcgtcttgatctcctgacctcacgatccgcccgcctcagcctctcaaagtgcaggattatagacgtgagccaccgcgcccggccttttactcgt

SEQ ID NO: 499908 - DNA, 120 bp, Artificial Sequence
  ENSG00000163636_54 (sequence is synthesized)
atagacgtgagccaccgcgcccggccttttactcgtttattatatgcactttaaaaaagaaaaaacatttaaaaaccgaagttatatgtacacatggaacagttgtaaacagtatcatat

SEQ ID NO: 499909 - DNA, 120 bp, Artificial Sequence
  ENSG00000163636_55 (sequence is synthesized)
aaagaagaaaaaggctttctttaatatctgatcaccagtgtcctttctctagaggcaactgctgttaatcaggttttccagtgtgtccttcaggggcactgttatccagagataagagca

SEQ ID NO: 499910 - DNA, 120 bp, Artificial Sequence
  ENSG00000163636_56 (sequence is synthesized)
tgtaacacttttgtgtattgtggatgtattttatatgctgttttgtaagtacctttttttctcttcacaagtaacgtgtatatcttttcatgtcactatacatatagttggtcatttagt

SEQ ID NO: 499911 - DNA, 120 bp, Artificial Sequence
  ENSG00000163636_57 (sequence is synthesized)
cagtaagtgtttttgagtggctatcgtgtactaacattgagaatagcagcaaattgaacaggtagtgttcctaggagcttcaggttatcctttcttaaggacttcctagtatttcaatgt

SEQ ID NO: 499912 - DNA, 120 bp, Artificial Sequence
  ENSG00000163636_58 (sequence is synthesized)
tctactgatagaaaacgaggtcgtttccagttttgccctattataagcaaccctgttttgaacactccaacaatttatctttcccacttgttatttccttggggaaaaagtctaaaaaat

SEQ ID NO: 499913 - DNA, 120 bp, Artificial Sequence
  ENSG00000163636_59 (sequence is synthesized)
tgaactttccaaaggttaaatatattgtgtcttgaccactgttgccctccagagatatgtcagtttacatttacacaatttatacttctctcaatctatagcatttgagagaacctgtcc

SEQ ID NO: 499914 - DNA, 120 bp, Artificial Sequence
  ENSG00000163636_60 (sequence is synthesized)
caccctctccatactctttgccagtctgagaggacagaaataattttattgatgttttatgcatttctcttattagtgagaatacgcaccatctcatggttagtggccattgatctccat

SEQ ID NO: 499915 - DNA, 120 bp, Artificial Sequence
  ENSG00000163636_61 (sequence is synthesized)
gttgctaaatcatgtgttcccttgcttatctttatctgccttgatgttgaccatcctttgcttctcaccacagctttctcttggttctgcagtaacgtgctcttgttttctctggaccta

SEQ ID NO: 499916 - DNA, 120 bp, Artificial Sequence
  ENSG00000163636_62 (sequence is synthesized)
cctcctcatccactgttagacctctcagtgtctgactgccttagactgggttattgcccttgtttcttatcttcactttgtgccatcagatacatttggatggcagtgatggacaaattc

SEQ ID NO: 499917 - DNA, 120 bp, Artificial Sequence
  ENSG00000163636_63 (sequence is synthesized)
atgtcgccagccccaaactggagcaccagactcatgcctcaatgcctccttagtgtcctcacttggctgtttaataggcatatccacttgaacactgccaaagtatgcttgaatcccacc

SEQ ID NO: 499918 - DNA, 120 bp, Artificial Sequence
  ENSG00000163636_64 (sequence is synthesized)
ctcacccccaacactaaaaacaaatattctccttctccagggatttccatcttgttgaaaccacaaacataagtatactctagagtctcttttcttgctcaccttctatatacctgttgc

SEQ ID NO: 499919 - DNA, 120 bp, Artificial Sequence
  ENSG00000163636_65 (sequence is synthesized)
tgtcttcctgcttgcattctgagtctggcatcctttctgttcctgggcttaaccatgcttttcctgccttcagacttttgtatcatttacattgctctgtgcttagccagcccctgagag

SEQ ID NO: 499920 - DNA, 120 bp, Artificial Sequence
  ENSG00000163636_66 (sequence is synthesized)
aggtattccctgtccaccccaatccagtggagggcttcctagtcactctatcatgttacttttattttcttcacaggatttatcttgtatatttgttcatctgtctctgccctttgaaaa

SEQ ID NO: 499921 - DNA, 120 bp, Artificial Sequence
  ENSG00000163636_67 (sequence is synthesized)
tttagtttttgtggcagcaagggtcttgtcttctggttcactgccatataactatctagagtagtgatatacaggagttattcagtaaaataatttatatttgtgtggattgctcattaa

SEQ ID NO: 499922 - DNA, 120 bp, Artificial Sequence
  ENSG00000163636_68 (sequence is synthesized)
tactctacgtacattttactgtcttctaaggatctcttctggattaaggccattaactcatcgttataaattttctagtttatcatttgtcttcaaaccttgttcatagtgttttcttac

SEQ ID NO: 499923 - DNA, 120 bp, Artificial Sequence
  ENSG00000163636_69 (sequence is synthesized)
gtagactatttacgtgaacaaataaacaggcaataggagtcatcagtctttgctttcttctgagttttgttgctttttgaaaatgtctgatttataccttttttctggtctgtataaatc

SEQ ID NO: 499924 - DNA, 120 bp, Artificial Sequence
  ENSG00000163636_70 (sequence is synthesized)
gtttttcactgtacctgctgtttctctgttagaattgtttaaaaaatgatttttactttattttacttaaggcataagaagttctccgtggttaaaatattagtacgtgaactttgtcat

SEQ ID NO: 499925 - DNA, 120 bp, Artificial Sequence
  ENSG00000163636_71 (sequence is synthesized)
ctatgaacaagttcctttagaagctgagctctgatagtgatgtcaaatagccacctgttacttgaagacgatgtttgcatacctggcccctcctttatcactgctgttgctgccattgtt

SEQ ID NO: 499926 - DNA, 120 bp, Artificial Sequence
  ENSG00000163636_72 (sequence is synthesized)
gatgacatgatgtggaagggcagtgagaaatttgatacttgttcatctatctgttggactcaactagtagtgttgctttagtttttaatctttttatctgaaacggagagtctattataa

SEQ ID NO: 499927 - DNA, 120 bp, Artificial Sequence
  ENSG00000163637_0 (sequence is synthesized)
gagcttggagctcctctccccaggacctgagcgattttcctggatccggagctgcgcacagagcagctgccgccccaggaatgttacctgccttgtgcggagcccctgcagggccccctt

SEQ ID NO: 499928 - DNA, 120 bp, Artificial Sequence
  ENSG00000163637_1 (sequence is synthesized)
cggctccgggcagttggctgccgacgccccgctgggttccttagctgcggccgctacccctgcccctgggtctccaaccccctttccccggctcccccgcagtttcccgggccggcagag

SEQ ID NO: 499929 - DNA, 120 bp, Artificial Sequence
  ENSG00000163637_2 (sequence is synthesized)
gcgccgcagcgtcggagcaatgcaaggctaagccgggaagatctgcctgcactgcaagtgtccccaggaggagcacatggtgacagtgatgccgctggagatggagaagaccatcagcaa

SEQ ID NO: 499930 - DNA, 120 bp, Artificial Sequence
  ENSG00000163637_3 (sequence is synthesized)
actcatgtttgactttcagaggaactcgacctcagatgatgactcaggctgtgctttggaagagtatgcctgggtcccgccgggtctgaagcctgaacaggtacaccagtactatagctg

SEQ ID NO: 499931 - DNA, 120 bp, Artificial Sequence
  ENSG00000163637_4 (sequence is synthesized)
tctcccagaagagaaagtcccttatgtcaacagtcctggagagaaactgcgaatcaagcagctactacaccagctgccgccacatgacaatgaggttcgatattgcaactccctggatga

SEQ ID NO: 499932 - DNA, 120 bp, Artificial Sequence
  ENSG00000163637_5 (sequence is synthesized)
ggaagagaagagggagctgaagcttttcagcagccagaggaaacgcgaaaacttgggccgcgggaatgtcaggcctttcccagtcaccatgacaggagctatttgtgaacagtgcggagg

SEQ ID NO: 499933 - DNA, 120 bp, Artificial Sequence
  ENSG00000163637_6 (sequence is synthesized)
ccagatcaatggtggagacatcgctgtgtttgcgtcacgcgctggccacggcgtttgctggcacccgccgtgcttcgtatgcactgtctgcaatgagctcctggtggatctgatctactt

SEQ ID NO: 499934 - DNA, 120 bp, Artificial Sequence
  ENSG00000163637_7 (sequence is synthesized)
ttaccaagatgggaagatatactgtggcaggcaccatgctgagtgcctgaagccgcgctgtgctgcctgcgatgagatcatctttgcagatgaatgcacagaagctgaggggcgacactg

SEQ ID NO: 499935 - DNA, 120 bp, Artificial Sequence
  ENSG00000163637_8 (sequence is synthesized)
gcacatgaaacacttttgctgcttcgagtgtgagacagtgctgggcggccagcgctacatcatgaaggagggaagaccctactgttgccactgcttcgagtccttgtatgcagaatattg

SEQ ID NO: 499936 - DNA, 120 bp, Artificial Sequence
  ENSG00000163637_9 (sequence is synthesized)
tgacacctgtgcccaacatataggtatcgaccaaggtcaaatgacctatgatggccaacactggcatgccactgagacctgtttctgctgtgctcactgcaagaaatccctcctggggcg

SEQ ID NO: 499937 - DNA, 120 bp, Artificial Sequence
  ENSG00000163637_10 (sequence is synthesized)
gccattcctcccgaagcagggccagatattctgctcacgggcctgcagtgctggggaagaccccaatggttctgactcctctgattccgccttccagaacgccagggccaaggagtcccg

SEQ ID NO: 499938 - DNA, 120 bp, Artificial Sequence
  ENSG00000163637_11 (sequence is synthesized)
gcgcagtgccaaaattggcaagaacaagggcaagacggaggagcccatgctgaaccagcacagccagctgcaagtgagttctaaccggctgtcagccgacgtagaccccctgtcactgca

SEQ ID NO: 499939 - DNA, 120 bp, Artificial Sequence
  ENSG00000163637_12 (sequence is synthesized)
gatggacatgctcagcctgtccagccagacacccagcctcaaccgggaccccatctggaggagccgggaagagccctaccattatgggaacaagatggagcagaaccagacccagagccc

SEQ ID NO: 499940 - DNA, 120 bp, Artificial Sequence
  ENSG00000163637_13 (sequence is synthesized)
tctgcagctcctcagccagtgcaacatcagaacttcctacagtccaggagggcaaggggctggggcccagcccgaaatgtggggcaagcacttcagcaaccccaaaaggagctcgtcact

SEQ ID NO: 499941 - DNA, 120 bp, Artificial Sequence
  ENSG00000163637_14 (sequence is synthesized)
ggccatgacaggacatgctggcagcttcatcaaggaatgccgagaagactattacccggggaggctgagatctcaggagagctacagtgatatgtctagtcagagtttcagtgagacccg

SEQ ID NO: 499942 - DNA, 120 bp, Artificial Sequence
  ENSG00000163637_15 (sequence is synthesized)
aggcagcatccaagtccccaaatatgaggaggaagaggaagaggaagggggcttgtccactcagcagtgtcggacccgtcatcccatcagttccctgaaatacacagaggacatgacgcc

SEQ ID NO: 499943 - DNA, 120 bp, Artificial Sequence
  ENSG00000163637_16 (sequence is synthesized)
cacagagcagacccctcggggctccatggaatccctggccctgtctaatgcaacaggcctctctgctgatggtggtgccaagcgccaggagcacctatcccgattttccatgcctgacct

SEQ ID NO: 499944 - DNA, 120 bp, Artificial Sequence
  ENSG00000163637_17 (sequence is synthesized)
cagcaaagactctggaatgaatgtgtctgagaagctgagcaacatgggcactcttaactcgtccatgcagttccggagcgcagagtcagttcgcagcctgctctctgcccagcagtacca

SEQ ID NO: 499945 - DNA, 120 bp, Artificial Sequence
  ENSG00000163637_18 (sequence is synthesized)
ggagatggagggaaacctccaccagctcagcaaccccattggctacagagacctgcagtcccacggaaggatgcatcagagctttgattttgatggagggatggcgggcagcaagctgcc

SEQ ID NO: 499946 - DNA, 120 bp, Artificial Sequence
  ENSG00000163637_19 (sequence is synthesized)
agggcaggagggcgtgaggatccagcccatgagtgaacgcacccggagaagagctacttcacgcgacgacaaccgccgtttccgacctcacaggtccaggcgttcccgacgctctcgctc

SEQ ID NO: 499947 - DNA, 120 bp, Artificial Sequence
  ENSG00000163637_20 (sequence is synthesized)
cgacaacgccctccacctggccagcgaacgcgaggccatctcccggttaaaagataggccccctctgagagccagggaggactatgaccaatttatgcgccagcggagcttccaggagag

SEQ ID NO: 499948 - DNA, 120 bp, Artificial Sequence
  ENSG00000163637_21 (sequence is synthesized)
catggggcatgggtcccggagggacctgtacggccagtgccctaggactgtgtcggacctggctttgcagaatgcctttggggaccgctggggaccctacttcgccgagtatgattggtg

SEQ ID NO: 499949 - DNA, 120 bp, Artificial Sequence
  ENSG00000163637_22 (sequence is synthesized)
ttccacctgctcctcctcttcagagtctgacaacgagggctatttcctaggagaacccatcccccagccagcgcgcctgcgatacgtcacaagcgatgagctgctgcacaaatacagctc

SEQ ID NO: 499950 - DNA, 120 bp, Artificial Sequence
  ENSG00000163637_23 (sequence is synthesized)
ctacggcctccccaaatcttccacattaggtggcagaggacagttgcacagcaggaaaagacagaagagcaaaaactgtatcatttcttaatatgattgggatcagggaatgggagaaga

SEQ ID NO: 499951 - DNA, 120 bp, Artificial Sequence
  ENSG00000163637_24 (sequence is synthesized)
tgggagctaagaatgtaaagtcagaaacttgcactgttttaaatgttaaagcgcttttgggggtggcttatgggggagaaaagggaaaatgctgtcagtagatggaggcaaggttacagg

SEQ ID NO: 499952 - DNA, 120 bp, Artificial Sequence
  ENSG00000163637_25 (sequence is synthesized)
ttgactcaataggtagtcacagttcttggcatgttgaatattatttgcacatttcactttggaaacacagtagactctatcgaggccaggcttggtcacttccttcccatcagttctgtg

SEQ ID NO: 499953 - DNA, 120 bp, Artificial Sequence
  ENSG00000163637_26 (sequence is synthesized)
ttgagttgccatctctcaagatggtaaattgtttcctgctcgcttttatcctctctggttctcttacttttaggacccttttttcagtaagtaatttgtttattagccaggacccaagac

SEQ ID NO: 499954 - DNA, 120 bp, Artificial Sequence
  ENSG00000163637_27 (sequence is synthesized)
taagttatttacatgtccattgtaaatgcaatgtaaatgagagttctgataaaatatttttgtattttgtaatatcaaaggaatttctatatcgtaggactcagtggggacttgcatgca

SEQ ID NO: 499955 - DNA, 120 bp, Artificial Sequence
  ENSG00000163637_28 (sequence is synthesized)
catccaccattgtctctgagtagtattgaaatgtggcccggtaccaccttttttttttttttttttttttctatacaaatttgttacatgtcagtgagacctttttcaaaggaacatatt

SEQ ID NO: 499956 - DNA, 120 bp, Artificial Sequence
  ENSG00000163637_29 (sequence is synthesized)
caatttggctttttgtggctgaaaaaacataactgttagacccaaagcattttatgctccgttccatcttaaggagccatccttaagtctgctcccaccctcagtagaatttattttcta

SEQ ID NO: 499957 - DNA, 120 bp, Artificial Sequence
  ENSG00000163637_30 (sequence is synthesized)
caaagtggtagtaatttttttttaaattgcaaatgtaatttttgccaattagagaaaccaaccggtgtcagtaaaattctgtgagaaatgccatccctgctgggaatgttgaagttactt

SEQ ID NO: 499958 - DNA, 120 bp, Artificial Sequence
  ENSG00000163637_31 (sequence is synthesized)
aatgttgatctatcccttggggaaagtaaaagtgactgtgagtggtgccattgtgtgatgtcagcatgacgttgttttgaatgtggcattatgttctggtgctcatgtttcctggattgt

SEQ ID NO: 499959 - DNA, 120 bp, Artificial Sequence
  ENSG00000163637_32 (sequence is synthesized)
attatctgctttcctttaccaaggcagacagaactgctgccttagcctgacaaccggttgtcctcaaagcaaatgaacttaagcatttgggattgagggacagaaggattctgagggggc

SEQ ID NO: 499960 - DNA, 120 bp, Artificial Sequence
  ENSG00000163637_33 (sequence is synthesized)
aaaagaagaactggaaatgaaacagaggacaggtgacaaccacctcgaagagctcccagagattgtagaaagagtccagtgtaaccagcttagtaaccagagtatctggattacccagga

SEQ ID NO: 499961 - DNA, 120 bp, Artificial Sequence
  ENSG00000163637_34 (sequence is synthesized)
aggttgagctgctgagatttcagtggtgcaatgtctttaaaaaaacaggctttgttgggagggtatttccattttgaactttgaggactgttggtcagaaaatgggctcaaaagtgagtt

SEQ ID NO: 499962 - DNA, 120 bp, Artificial Sequence
  ENSG00000163637_35 (sequence is synthesized)
tgcttaatgaagacatttaacggttgtgctgtttatagtaaaataaaactccctaccttgcttcagttaaaaatgaagcacttggtttcttccatcctcctcctccccttaatggattgt

SEQ ID NO: 499963 - DNA, 120 bp, Artificial Sequence
  ENSG00000163637_36 (sequence is synthesized)
ggcagttgaaataatccatcggatgacccacctgtagtgagatgtactgtcgatgtagtgcccggtgtatctcagtggccatctgccatggtgaggtgagcgtgatctcttttcagtata

SEQ ID NO: 499964 - DNA, 120 bp, Artificial Sequence
  ENSG00000163637_37 (sequence is synthesized)
gtagttaacattttctagtattttttatggagagaatgtcaaaagtggcatttcagaccccgtcccagatgggtctgaggaaaggaaggctgtaaaggacatggtaatggcactccattc

SEQ ID NO: 499965 - DNA, 120 bp, Artificial Sequence
  ENSG00000163637_38 (sequence is synthesized)
gggatgtattaaaataatttgcttttcaggtattaatatgacatttgtcattgtcactgatttttttaaaaaagcaatgcacatgttggttgtggctgttttccgcatgctatcttcata

SEQ ID NO: 499966 - DNA, 120 bp, Artificial Sequence
  ENSG00000163637_39 (sequence is synthesized)
tctaaatgcttcattaattatccgagcctccggagaattaactctattacgtttgtatagtaagtttgtaaactgcttggcaaactgattaagaaataatttgcaataccgtgctactaa

SEQ ID NO: 499967 - DNA, 120 bp, Artificial Sequence
  ENSG00000163637_40 (sequence is synthesized)
agtggcaggtttctggtagaaattgtgcgagtccaatttggagttttaagttccttgattgatgaaactaaaaaggcaattttggaaaaagagagggggaaaagtagatcacttatctta

SEQ ID NO: 499968 - DNA, 120 bp, Artificial Sequence
  ENSG00000163637_41 (sequence is synthesized)
gcaaacggttgaaaatatgtctgtcctctgtggccccaaatccagtgaaagaaattctcccagtaaaagttgcttcctaactctgtttttctcagaatacctcttacctttctcaaagaa

SEQ ID NO: 499969 - DNA, 120 bp, Artificial Sequence
  ENSG00000163637_42 (sequence is synthesized)
agcttcaaccaccatcatcagaaagaaggtggcctaaaaactgacacatggccagtgcccggaggggtctggaggcataagtctagatgcccagagagcatccaggcactgaactgctca

SEQ ID NO: 499970 - DNA, 120 bp, Artificial Sequence
  ENSG00000163637_43 (sequence is synthesized)
gagcttgagatgaaatgacatacaagcttcagggtaaaactgtctactagcaagattacctccctcaattctaccattgcagatttcttctgaccccaaatgcaaccttacagagaatgc

SEQ ID NO: 499971 - DNA, 120 bp, Artificial Sequence
  ENSG00000163637_44 (sequence is synthesized)
tgaatgaggaaggccaattccttacaatgatggcagaacccccaagcgaatgccctattgaggagaaggacatcactgtatttggaattctgcctgctagtgatagctcacacatcacat

SEQ ID NO: 499972 - DNA, 120 bp, Artificial Sequence
  ENSG00000163637_45 (sequence is synthesized)
cccagaatcccactcccaatgcattatttcctgaggcaagaacttaaggtcctcacctaattcctccatcacaaccattaactcttattggacaagctcctcctgtgagtagggcctgta

SEQ ID NO: 499973 - DNA, 120 bp, Artificial Sequence
  ENSG00000163637_46 (sequence is synthesized)
ctcacttcctcttagatcataattccatcttcaagagactgatttccagaatagtaatctttttccagcgttctctcttctccaatgccctggttgttatttttcccacctctcctaata

SEQ ID NO: 499974 - DNA, 120 bp, Artificial Sequence
  ENSG00000163637_47 (sequence is synthesized)
ttgatcttcttgtcttttggttagaactgcaacttcggagttgagttcatttcctattgctgctcaattcagtagcaacatagctggcttgttcccagacccaggaagtataagtcattg

SEQ ID NO: 499975 - DNA, 120 bp, Artificial Sequence
  ENSG00000163637_48 (sequence is synthesized)
acagtttcctgagtggctctgccaatccataccacccttggtactgtgaaaaggcttcttggcagccaggtggcattgaggatggtattcagggcgctttccttctgtcatatagttgtg

SEQ ID NO: 499976 - DNA, 120 bp, Artificial Sequence
  ENSG00000163637_49 (sequence is synthesized)
ggatctctaccaagtgtgaaggtgaatgaggtaagggagatcagaaccatgcttcctggtttttcatacatccaaggaagaagtcctggtgtgggttgtttgacaccttctttccacttt

SEQ ID NO: 499977 - DNA, 120 bp, Artificial Sequence
  ENSG00000163637_50 (sequence is synthesized)
caccttttattttttattccttcctttctacccccaaccagtcgagcaaatgagcaattttgtgtttctaatacaggatctggaagtagtgctttctaatcctcatttcctgtaggatgt

SEQ ID NO: 499978 - DNA, 120 bp, Artificial Sequence
  ENSG00000163637_51 (sequence is synthesized)
tcctgcactataacaagattatgttttcttccttctgcagcagctttctgcttcttgggtactactagctattgttcaattcaggtgaggcctgtgatgacatatatgtagcatgtgctc

SEQ ID NO: 499979 - DNA, 120 bp, Artificial Sequence
  ENSG00000163637_52 (sequence is synthesized)
tgcgctccctgcaagctgagcagatacaaccaatgcatcactgtatactcttgctgagaatgtggatgcagcctcacagatctttgcaacactccaaccagccaggaccagttgatcaga

SEQ ID NO: 499980 - DNA, 120 bp, Artificial Sequence
  ENSG00000163637_53 (sequence is synthesized)
actgatcttattggtctgataaccaatcttatttgtgaactgattcatatctgtctttccactcttggttctcttgccgtagaacaaaaacagtttaggaagcataattacgaacattta

SEQ ID NO: 499981 - DNA, 120 bp, Artificial Sequence
  ENSG00000163637_54 (sequence is synthesized)
ggaaccaatatgtataagtaattcggagactccaattcacctgcccctcccccatcccaggttgtggaggctcgaggaagctgacttcttaggctaaaggacaaaaaaatctctttacct

SEQ ID NO: 499982 - DNA, 120 bp, Artificial Sequence
  ENSG00000163637_55 (sequence is synthesized)
ccttggccattttcatgttctctgccaattactataggcagtcttcattttgcagaggtgaggtaagacttcatcttattcttcatgtaatcccaccttctaacaaaaaataaataaata

SEQ ID NO: 499983 - DNA, 120 bp, Artificial Sequence
  ENSG00000163637_56 (sequence is synthesized)
tttaaattccaaggagaagtgttctttgtgtatttctagcagaaaacagatgcttaagcctaagaaggaagatccgtccatgacaaaggaaagtggaaaactgaaccagttatctgaata

SEQ ID NO: 499984 - DNA, 120 bp, Artificial Sequence
  ENSG00000163637_57 (sequence is synthesized)
cttcatgccaggacagttgctattagcaactgttttgcaccttcagggctttaaaatgggctctgcagacagcatttgcatatgcaagactcagtagccaagcctccactgccaattgtt

SEQ ID NO: 499985 - DNA, 120 bp, Artificial Sequence
  ENSG00000163637_58 (sequence is synthesized)
gaaggcagtttcagatcgccaccttttgaggtacatttctttaagcacaagagaagtagaaatggcctttgccttgtctccagtggtttgtccctctggtgcctcagcagataccagagc

SEQ ID NO: 499986 - DNA, 120 bp, Artificial Sequence
  ENSG00000163637_59 (sequence is synthesized)
ttattcttatgaccatttggaagtagtcctcaaagtaaagatcaagaaaaaattggattctttttccattttctcataatagtagcctagtcaacacaagactcccataaaatatgactc

SEQ ID NO: 499987 - DNA, 120 bp, Artificial Sequence
  ENSG00000163637_60 (sequence is synthesized)
actattgggagccatactattttataagcttacttcctgctgacaaaactagctttcctcaaggaaatataaaggaggggaaagtcacatagtgttaggaaaacattcctgtgttttgaa

SEQ ID NO: 499988 - DNA, 120 bp, Artificial Sequence
  ENSG00000163637_61 (sequence is synthesized)
tacgatgaatccataggatagagaaaaatctgcttgttctattctgagagttctctgagatatcccttcactctgcttggcatttggccattgatattcaacaggtcactgaccaagctt

SEQ ID NO: 499989 - DNA, 120 bp, Artificial Sequence
  ENSG00000163637_62 (sequence is synthesized)
ttctaaatttttcagagagagttacttaccagtaaggtctgttcttaaacctacctagttgattttcatatctttccataaagtgtcatgattctgtcatagaccctgacttaacattgt

SEQ ID NO: 499990 - DNA, 120 bp, Artificial Sequence
  ENSG00000163637_63 (sequence is synthesized)
aaggactatgagtcctccattttttaattaatttttttttagcaaattaggacttcggcaggttttcctctcctaaactcattctttcctccacaggattgctttgtccatctcctgctt

SEQ ID NO: 499991 - DNA, 120 bp, Artificial Sequence
  ENSG00000163637_64 (sequence is synthesized)
tcatttcaagtgcataaacaaaacctcaaagggcctgggaaggtgaggcaggccagagtctgtgttctgtgttgagtgtcaagctatttgttaagaaggtctgcaacaggcctttggtgt

SEQ ID NO: 499992 - DNA, 120 bp, Artificial Sequence
  ENSG00000163637_65 (sequence is synthesized)
gggctctgccagagactgttctgaacactttgcttgagatccgtgccctgtaaaatggatatgatgttttactgatgtctgtaatacatttgtaaacttccaataaaatttgaataaaag

SEQ ID NO: 499993 - DNA, 120 bp, Artificial Sequence
  ENSG00000163637_66 (sequence is synthesized)
actgcaacagcgacttctcaggcaccaccagcagcgccaccgagagttattattattttttgaccaagcagcacatttcctggttcagtggcttgagctctgtgagcagctgactagtca

SEQ ID NO: 499994 - DNA, 120 bp, Artificial Sequence
  ENSG00000163637_67 (sequence is synthesized)
ccccgggtctggctcaggatcagctggtgacgctgggctggagtctatgacttcttccttcagattgtcatgaagaaggggagttaagaggaaactgggggtcctccggaaggcgatctg

SEQ ID NO: 499995 - DNA, 120 bp, Artificial Sequence
  ENSG00000163637_68 (sequence is synthesized)
agcactcaggctgatctagaggaagagtagaagtcatactttttttctcttgcttggtgaattccccagcagagtctggatccagcagtgctgttttccctgagggaatgtggagcagct

SEQ ID NO: 499996 - DNA, 120 bp, Artificial Sequence
  ENSG00000163637_69 (sequence is synthesized)
cggcttgagtctgttgccagcttcaggaagggttcagactgaaaagggggtttgaggagaagatgctttggctgcctgaggtcctgcttgcgttcttagaagtcagatccagggagaaag

SEQ ID NO: 499997 - DNA, 120 bp, Artificial Sequence
  ENSG00000163637_70 (sequence is synthesized)
caaagaaaagaaaggacacaggtatggagggatgagttttactatgaaatattaacctgattgtttaaatcagggtttctaagcctcagcaatattgacgtcttgtgctagttaattctc

SEQ ID NO: 499998 - DNA, 120 bp, Artificial Sequence
  ENSG00000163637_71 (sequence is synthesized)
ggttgcagagggctgtcctgtgcattgtaggatgtttagcaacatcgctgacttctactcactagatgccagtagcagcccccagaaactgtgacaactaaaaatgtctcccatcacaac

SEQ ID NO: 499999 - DNA, 120 bp, Artificial Sequence
  ENSG00000163637_72 (sequence is synthesized)
cattaggatggcagttattaaaaataacaacaaatgtgggtgaggatgtggagcaattggaacacttgtacactgttggtgggaatgtaaaatgatgtagtgctgtggaaaacagtatgg

SEQ ID NO: 500000 - DNA, 120 bp, Artificial Sequence
  ENSG00000163637_73 (sequence is synthesized)
cagttcctcaaaaaaaattaaaaatagaattactaccatatgctacttctgggctatacccaaaagaattgacagcagggtctccaaagagatacttgtacacccatattcataaaagca

SEQ ID NO: 500001 - DNA, 120 bp, Artificial Sequence
  ENSG00000163637_74 (sequence is synthesized)
gcattcacaatatccaaaaagtgggagcaacccaaatgtccactgatggatgaatgtgtaaacaaggtgtggtgtatacatacaatggaatattattcagccttaaaacggaaggaaatt

SEQ ID NO: 500002 - DNA, 120 bp, Artificial Sequence
  ENSG00000163637_75 (sequence is synthesized)
acaacatggatgaaccttgaggacattttgctaagtgagataagccagtcacaaaaagacaagtgtatgattccatttatctgaggcacctagagtcaaattcatagagacagaatgtag

SEQ ID NO: 500003 - DNA, 120 bp, Artificial Sequence
  ENSG00000163637_76 (sequence is synthesized)
gacagaatgtagaagagtggttggttgtcagggactgaagggaggagggaatggggagttactatttaatgggtatagagtttcattatggcaagatgaaaagagttctggagacgggtt

SEQ ID NO: 500004 - DNA, 120 bp, Artificial Sequence
  ENSG00000163637_77 (sequence is synthesized)
gcagaacaatgcagatgaacttaatactactgaactgtacacttaaaagtggttaagatggtaaattttatattatgtttatttaaccacaattaaaaatgtctccacacattgtcaatg

SEQ ID NO: 500005 - DNA, 120 bp, Artificial Sequence
  ENSG00000163637_78 (sequence is synthesized)
tctccctgttgagaaccactggtttcaatgcattgccttcttagtgtctttgttccttgagaattcttgaaactgattcctacccaggccacacagttaattttcagttattagcaagaa

SEQ ID NO: 500006 - DNA, 120 bp, Artificial Sequence
  ENSG00000163637_79 (sequence is synthesized)
ttgaaagcagcagatgacccaaaaatatttgtgtttgcttttaagcaaataataagtggtctgtctggagaattacatccatgtctgtgttctggttagggcagcattaacactgactgg

SEQ ID NO: 500007 - DNA, 120 bp, Artificial Sequence
  ENSG00000163637_80 (sequence is synthesized)
gagccaggaccaaggcagcatgtaaattcaatttccccgtgtctgatccacaacattagggacttgctggatgctataatatcatctattcattcattcaacaaatatttatcaaaaggc

SEQ ID NO: 500008 - DNA, 120 bp, Artificial Sequence
  ENSG00000163637_81 (sequence is synthesized)
tttctctagccaggaaccgttctaggtgcttggaatacaataatgtgcaaaacaaacaaaaatccctaccttaaaggagtttacaaactttactttcaactaggcaagacattcggaata

SEQ ID NO: 500009 - DNA, 120 bp, Artificial Sequence
  ENSG00000163637_82 (sequence is synthesized)
gtaagtagtcttacccaccctagctaatcacaaggacttgggagtggcagacaacaagagttgtttcattgtaagacattctaagagcttttgaataaaaacttgaactggaaatggcaa

SEQ ID NO: 500010 - DNA, 120 bp, Artificial Sequence
  ENSG00000163637_83 (sequence is synthesized)
cgacggacggcgctgcgagcaggaggcgtccggccatgttcagccggagctcccggaaaagactctccagccgctcgttgaccggactggggcggatagagcgaggccagccatgtaacg

SEQ ID NO: 500011 - DNA, 120 bp, Artificial Sequence
  ENSG00000163637_84 (sequence is synthesized)
ataccttctgtattagccagttttttctctctagttttgcatgtggctgaatggtggaatgtctgttttcttttctcaggcaaaattagctgcttggtgctttccccagttgttagggtt

SEQ ID NO: 500012 - DNA, 120 bp, Artificial Sequence
  ENSG00000163637_85 (sequence is synthesized)
gaatgagcctcataaagtacaagaatatgtcctaacagtcgtaaacaggaatgttgtgggatgtgcaaaaatcctcatgttagtgacaatttttaattacatgctctgcatcccagattt

SEQ ID NO: 500013 - DNA, 120 bp, Artificial Sequence
  ENSG00000163637_86 (sequence is synthesized)
agtgagtctatttctgatggatgtcagctgctgcctgccttacaaaagtctcgaaacctggagggctttaaatgtaggtggaggctgaggtacctaggggtttgccgagtgccaaagact

SEQ ID NO: 500014 - DNA, 120 bp, Artificial Sequence
  ENSG00000163637_87 (sequence is synthesized)
ggctttaactccattgccgaggcaggtgctgacatatccctttggctagggaggcacgtcatatgctggagactaacagagaaaatggtaaagccagctctcaggggagtctgccgagaa

SEQ ID NO: 500015 - DNA, 120 bp, Artificial Sequence
  ENSG00000163637_88 (sequence is synthesized)
agccctaccctctggttcaccagcatgtctgctgaattctctgtttctaggaaaatttactagctttatttttccctcacagagagagggaaaaatcccagatatggatgatttgcctga

SEQ ID NO: 500016 - DNA, 120 bp, Artificial Sequence
  ENSG00000163637_89 (sequence is synthesized)
ctcttgctttaaggatgaatttctctgcttaccataggaaactcatctgctgttgactttcataaagagtcaggactgcagaagtcagttacatcctgctgggggaatcatcttcccagt

SEQ ID NO: 500017 - DNA, 79 bp, Artificial Sequence
  ENSG00000163637_90 (sequence is synthesized)
tgaggctcatctcaaacttctggcctcatgtgatccacacacctcagcctctcaaagcactgggattacaggtgtgagc

SEQ ID NO: 500018 - DNA, 120 bp, Artificial Sequence
  ENSG00000163637_91 (sequence is synthesized)
ctgggattacaggtgtgagccactgtacttggcctatttttctcattattgagttgtaagagtgatttgtatatattctgtatactagtccatcatcagatagatgattggcaaatattt

SEQ ID NO: 500019 - DNA, 120 bp, Artificial Sequence
  ENSG00000163637_92 (sequence is synthesized)
tgattggcaaatattttctcccattctatagctgtgttttcacttactcgatgatgtcctttgaagcataaagtttttaattttgatgaagtctacgttattttttgttgtttatgcttt

SEQ ID NO: 500020 - DNA, 120 bp, Artificial Sequence
  ENSG00000163637_93 (sequence is synthesized)
tagcatcatatctaagaaaccattgcctagttcaagatcataaagatttacacctgtgttttcttctaagcgttttattgtttttttgcccctagctctttaaacccatttgaattaatt

SEQ ID NO: 500021 - DNA, 66 bp, Artificial Sequence
  ENSG00000163637_94 (sequence is synthesized)
tttttttgcccctagctctttaaacccatttgaattaatttttttttcttcgagatggagtttcac

SEQ ID NO: 500022 - DNA, 120 bp, Artificial Sequence
  ENSG00000163637_95 (sequence is synthesized)
tataggtgtgagccaccgcacccagccttgagttaatttttatgtatgatgtaaggtaggggtttgaattcattattttacatgaggctctcctgttgtcccagctctgtttgttgagaa

SEQ ID NO: 500023 - DNA, 120 bp, Artificial Sequence
  ENSG00000163637_96 (sequence is synthesized)
tctcctgttgtcccagctctgtttgttgagaaaactattcttttccccatggaatggtcttggcctccttttcaacaattaattgaccatgtatgtatgagtttaaatctggatacctat

SEQ ID NO: 500024 - DNA, 120 bp, Artificial Sequence
  ENSG00000163637_97 (sequence is synthesized)
tcatctatatgcccagccttatgccagtgccatgctggcttgattactgtagctttatagtaaattttgaaatctgtgctttgaaattttaaaaactctatattgggggaaaatgcaaac

SEQ ID NO: 500025 - DNA, 120 bp, Artificial Sequence
  ENSG00000163637_98 (sequence is synthesized)
acttgtgagggcctggcaggtgctgtaaatgaaggtgacttattttaaggcaatagggaagggtgaagaatatgacaaactggagaacttgccactcattggaaagcagcagcctctctt

SEQ ID NO: 500026 - DNA, 120 bp, Artificial Sequence
  ENSG00000163637_99 (sequence is synthesized)
cttagctctagtttattactgccatgtaggaatgtgcactgagcattgcaaatgttgtgttttcaaaagataaaccaggattacaagtgttaatatgatattttccatttaaaaaaataa

SEQ ID NO: 500027 - DNA, 120 bp, Artificial Sequence
  ENSG00000163637_100 (sequence is synthesized)
tatggccaggccaaatgaagcagatatgtatgtccaatgtgcctgtgagctgtcagtttttgatcctgccttatattctccagggtagaacattctttctcttattaaatgtggttaagt

SEQ ID NO: 500028 - DNA, 120 bp, Artificial Sequence
  ENSG00000163637_101 (sequence is synthesized)
taattactggctaggccagaaatcatgtttaattatgctttaggtaaatccatgtataggaactgatatacatacagaataaacatatccatatggatttttgtttaattatttgtgagt

SEQ ID NO: 500029 - DNA, 120 bp, Artificial Sequence
  ENSG00000163637_102 (sequence is synthesized)
aggatctgctttcttacccttctagttcaaggaccccatagctttcttcctttaaaatatgttctggatgggttttacacactgaccatttggcttccccatctccagatcatctttgca

SEQ ID NO: 500030 - DNA, 120 bp, Artificial Sequence
  ENSG00000163637_103 (sequence is synthesized)
tggccctgtctaatgcaacaggtaggttctgttcaccttgaaaacagatagaaagggggtagtctctgggtgactggatgctggtccccaggaattttttttttttttgaaatggagtct

SEQ ID NO: 500031 - DNA, 64 bp, Artificial Sequence
  ENSG00000163637_104 (sequence is synthesized)
gcctcacgagtagtcacgtgtttcaccgtgttagccgggatgttctcgatctcctgacctcgtg

SEQ ID NO: 500032 - DNA, 120 bp, Artificial Sequence
  ENSG00000163637_105 (sequence is synthesized)
caggcgtgagccaccgtgcccagcctggtcctccggattttaatgttgtttctgccacgtgccctcttctaataggctgctgaggaaggtaaacccaagtttgagatggcttctatcttt

SEQ ID NO: 500033 - DNA, 120 bp, Artificial Sequence
  ENSG00000163637_106 (sequence is synthesized)
gatgggcttccctgtaaacaaagcctgagacaggtccagatgcctgtgatgtactgagggagtgctctcaggagaaggggagtgagagaaagaggacagagcatggggaggagccaagtg

SEQ ID NO: 500034 - DNA, 120 bp, Artificial Sequence
  ENSG00000163637_107 (sequence is synthesized)
aggaatggtgtcttcactggggtctggcttctgcctgatcccacaggggactctgatggatgagttgcactatagaatcaattgcttcttgtgacgaaggggctgatgttttgtaccatc

SEQ ID NO: 500035 - DNA, 120 bp, Artificial Sequence
  ENSG00000163637_108 (sequence is synthesized)
gtgttagttggtcatcagctttgggctgctgaggagtgacaaagggatgagatagtggatgtgggcttggggcaaggcagctcctgttggccaaaggcagcattaaagaaagaaaatact

SEQ ID NO: 500036 - DNA, 120 bp, Artificial Sequence
  ENSG00000163637_109 (sequence is synthesized)
atggtctgaatgttttccccaaaattcttaaattaagatcctaaatcccaaggtgatggcattaggagaaggggccttttgggaggtgattaagtcatgagagtggagacctcatgaatg

SEQ ID NO: 500037 - DNA, 120 bp, Artificial Sequence
  ENSG00000163637_110 (sequence is synthesized)
ggattaatgcccttataaaagaggtccaagggaacttgtttgccccttgtaccatatgaaggtggagaaggtgtagctgtgagctgatggcagtactcacagcacctggagcccagttgc

SEQ ID NO: 500038 - DNA, 120 bp, Artificial Sequence
  ENSG00000163637_111 (sequence is synthesized)
cccagcgtggtgctgcctggggcaccaaagcatccatgacagcttctgagactgttctgaacctgtttctcaccagggaactggcttcaaagtgcagataaagacataagaaatgtttgg

SEQ ID NO: 500039 - DNA, 120 bp, Artificial Sequence
  ENSG00000163637_112 (sequence is synthesized)
ctagacaaggagaagacaggcaggctgaaaagaacagaagtagagagagagagataatggcatgcttctctctccagtgaagttgtccagctggttttgtgtgcgtgggaagactgatgt

SEQ ID NO: 500040 - DNA, 120 bp, Artificial Sequence
  ENSG00000163637_113 (sequence is synthesized)
atgagcctttggaggaactagtaactggtaaaatacatctctggaagcattttaagtaagtgccccctctaggtagatagtgacctactgtggagtggagagaaccccctcacaggcaca

SEQ ID NO: 500041 - DNA, 120 bp, Artificial Sequence
  ENSG00000163637_114 (sequence is synthesized)
tgtgccccctgagagggcctttgtgcagtacacaacttcacaacggtatataatgaccctagatagatgaccagcagtgacagtgatacccattgctgcacatctgtattaatctctgtg

SEQ ID NO: 500042 - DNA, 120 bp, Artificial Sequence
  ENSG00000163637_115 (sequence is synthesized)
ggccgccgagggtgcccgcccaggctacccgccctcccggccgcggcgcggacggaccgacggacggcgctgcgagcaggaggcgtccggccatgttcagccggagctcccggaaaagac

SEQ ID NO: 500043 - DNA, 120 bp, Artificial Sequence
  ENSG00000163637_116 (sequence is synthesized)
gaaaagactctccagccgctcggtgagtgtcccccgctcgagcggggccgatcgccgggcacctccagccggccgcgagcgcccgcgcgcagccccactgcgccccgcggctgcgcacct

SEQ ID NO: 500044 - DNA, 120 bp, Artificial Sequence
  ENSG00000163638_0 (sequence is synthesized)
acagggcgcccggcgcgcctcggagcgcaagttcctcgccttctcctgcccgctcgctgggcattatgcggccaagcagccgagccccagtcctcctcctcctcctgctcctccggctcc

SEQ ID NO: 500045 - DNA, 120 bp, Artificial Sequence
  ENSG00000163638_1 (sequence is synthesized)
tcctgcggcccgagcggctcagctctcggcaggcggcggcgttgctcagccgagcgcagacgggaccctcgcagcgagacctcagcgactcctaaagtcaaaagttggcggcgggcgccg

SEQ ID NO: 500046 - DNA, 120 bp, Artificial Sequence
  ENSG00000163638_2 (sequence is synthesized)
ggctccgcgcgctctccacggccgctgcctcgcgtcgccgccgcagccaaggagggcaggagggaggggggtgggggcagcggagggaggggtgggaagcaccatgcagtttgtatcctg

SEQ ID NO: 500047 - DNA, 120 bp, Artificial Sequence
  ENSG00000163638_3 (sequence is synthesized)
ggccacactgctaacgctcctggtgcgggacctggccgagatggggagcccagacgccgcggcggccgtgcgcaaggacaggctgcacccgaggcaagtgaaattattagagaccctgag

SEQ ID NO: 500048 - DNA, 120 bp, Artificial Sequence
  ENSG00000163638_4 (sequence is synthesized)
cgaatacgaaatcgtgtctcccatccgagtgaacgctctcggagaaccctttcccacgaacgtccacttcaaaagaacgcgacggagcattaactctgccactgacccctggcctgcctt

SEQ ID NO: 500049 - DNA, 120 bp, Artificial Sequence
  ENSG00000163638_5 (sequence is synthesized)
cgcctcctcctcttcctcctctacctcctcccaggcgcattaccgcctctctgccttcggccagcagtttctatttaatctcaccgccaatgccggatttatcgctccactgttcactgt

SEQ ID NO: 500050 - DNA, 120 bp, Artificial Sequence
  ENSG00000163638_6 (sequence is synthesized)
caccctcctcgggacgcccggggtgaatcagaccaagttttattccgaagaggaagcggaactcaagcactgtttctacaaaggctatgtcaataccaactccgagcacacggccgtcat

SEQ ID NO: 500051 - DNA, 120 bp, Artificial Sequence
  ENSG00000163638_7 (sequence is synthesized)
cagcctctgctcaggaatgctgggcacattccggtctcatgatggggattattttattgaaccactacagtctatggatgaacaagaagatgaagaggaacaaaacaaaccccacatcat

SEQ ID NO: 500052 - DNA, 120 bp, Artificial Sequence
  ENSG00000163638_8 (sequence is synthesized)
ttataggcgcagcgccccccagagagagccctcaacaggaaggcatgcatgtgacacctcagaacacaaaaataggcacagtaaagacaagaagaaaaccagagcaagaaaatggggaga

SEQ ID NO: 500053 - DNA, 120 bp, Artificial Sequence
  ENSG00000163638_9 (sequence is synthesized)
aaggattaacctggctggtgacgtagcagcattaaacagcggcttagcaacagaggcattttctgcttatggtaataagacggacaacacaagagaaaagaggacccacagaaggacaaa

SEQ ID NO: 500054 - DNA, 120 bp, Artificial Sequence
  ENSG00000163638_10 (sequence is synthesized)
acgttttttatcctatccacggtttgtagaagtcttggtggtggcagacaacagaatggtttcataccatggagaaaaccttcaacactatattttaactttaatgtcaattgtagcctc

SEQ ID NO: 500055 - DNA, 120 bp, Artificial Sequence
  ENSG00000163638_11 (sequence is synthesized)
tatctataaagacccaagtattggaaatttaattaatattgttattgtgaacttaattgtgattcataatgaacaggatgggccttccatatcttttaatgctcagacaacattaaaaaa

SEQ ID NO: 500056 - DNA, 120 bp, Artificial Sequence
  ENSG00000163638_12 (sequence is synthesized)
cttttgccagtggcagcattcgaagaacagtccaggtggaatccatcatgatactgctgttctcttaacaagacaggatatctgcagagctcacgacaaatgtgataccttaggcctggc

SEQ ID NO: 500057 - DNA, 120 bp, Artificial Sequence
  ENSG00000163638_13 (sequence is synthesized)
tgaactgggaaccatttgtgatccctatagaagctgttctattagtgaagatagtggattgagtacagcttttacgatcgcccatgagctgggccatgtgtttaacatgcctcatgatga

SEQ ID NO: 500058 - DNA, 120 bp, Artificial Sequence
  ENSG00000163638_14 (sequence is synthesized)
caacaacaaatgtaaagaagaaggagttaagagtccccagcatgtcatggctccaacactgaacttctacaccaacccctggatgtggtcaaagtgtagtcgaaaatatatcactgagtt

SEQ ID NO: 500059 - DNA, 120 bp, Artificial Sequence
  ENSG00000163638_15 (sequence is synthesized)
tttagacactggttatggcgagtgtttgcttaacgaacctgaatccagaccctaccctttgcctgtccaactgccaggcatcctttacaacgtgaataaacaatgtgaattgatttttgg

SEQ ID NO: 500060 - DNA, 120 bp, Artificial Sequence
  ENSG00000163638_16 (sequence is synthesized)
accaggttctcaggtgtgcccatatatgatgcagtgcagacggctctggtgcaataacgtcaatggagtacacaaaggctgccggactcagcacacaccctgggccgatgggacggagtg

SEQ ID NO: 500061 - DNA, 120 bp, Artificial Sequence
  ENSG00000163638_17 (sequence is synthesized)
cgagcctggaaagcactgcaagtatggattttgtgttcccaaagaaatggatgtccccgtgacagatggatcctggggaagttggagtccctttggaacctgctccagaacatgtggagg

SEQ ID NO: 500062 - DNA, 120 bp, Artificial Sequence
  ENSG00000163638_18 (sequence is synthesized)
gggcatcaaaacagccattcgagagtgcaacagaccagaaccaaaaaatggtggaaaatactgtgtaggacgtagaatgaaatttaagtcctgcaacacggagccatgtctcaagcagaa

SEQ ID NO: 500063 - DNA, 120 bp, Artificial Sequence
  ENSG00000163638_19 (sequence is synthesized)
gcgagacttccgagatgaacagtgtgctcactttgacgggaagcattttaacatcaacggtctgcttcccaatgtgcgctgggtccctaaatacagtggaattctgatgaaggaccggtg

SEQ ID NO: 500064 - DNA, 120 bp, Artificial Sequence
  ENSG00000163638_20 (sequence is synthesized)
caagttgttctgcagagtggcagggaacacagcctactatcagcttcgagacagagtgatagatggaactccttgtggccaggacacaaatgatatctgtgtccagggcctttgccggca

SEQ ID NO: 500065 - DNA, 120 bp, Artificial Sequence
  ENSG00000163638_21 (sequence is synthesized)
agctggatgcgatcatgttttaaactcaaaagcccggagagataaatgtggggtttgtggtggcgataattcttcatgcaaaacagtggcaggaacatttaatacagtacattatggtta

SEQ ID NO: 500066 - DNA, 120 bp, Artificial Sequence
  ENSG00000163638_22 (sequence is synthesized)
caatactgtggtccgaattccagctggtgctaccaatattgatgtgcggcagcacagtttctcaggggaaacagacgatgacaactacttagctttatcaagcagtaaaggtgaattctt

SEQ ID NO: 500067 - DNA, 120 bp, Artificial Sequence
  ENSG00000163638_23 (sequence is synthesized)
gctaaatggaaactttgttgtcacaatggccaaaagggaaattcgcattgggaatgctgtggtagagtacagtgggtccgagactgccgtagaaagaattaactcaacagatcgcattga

SEQ ID NO: 500068 - DNA, 120 bp, Artificial Sequence
  ENSG00000163638_24 (sequence is synthesized)
gcaagaacttttgcttcaggttttgtcggtgggaaagttgtacaaccccgatgtacgctattctttcaatattccaattgaagataaacctcagcagttttactggaacagtcatgggcc

SEQ ID NO: 500069 - DNA, 120 bp, Artificial Sequence
  ENSG00000163638_25 (sequence is synthesized)
atggcaagcatgcagtaaaccctgccaaggggaacggaaacgaaaacttgtttgcaccagggaatctgatcagcttactgtttctgatcaaagatgcgatcggctgccccagcctggaca

SEQ ID NO: 500070 - DNA, 120 bp, Artificial Sequence
  ENSG00000163638_26 (sequence is synthesized)
cattactgaaccctgtggtacagactgtgacctgaggtggcatgttgccagcaggagtgaatgtagtgcccagtgtggcttgggttaccgcacattggacatctactgtgccaaatatag

SEQ ID NO: 500071 - DNA, 120 bp, Artificial Sequence
  ENSG00000163638_27 (sequence is synthesized)
caggctggatgggaagactgagaaggttgatgatggtttttgcagcagccatcccaaaccaagcaaccgtgaaaaatgctcaggggaatgtaacacgggtggctggcgctattctgcctg

SEQ ID NO: 500072 - DNA, 120 bp, Artificial Sequence
  ENSG00000163638_28 (sequence is synthesized)
gactgaatgttcaaaaagctgtgacggtgggacccagaggagaagggctatttgtgtcaatacccgaaatgatgtactggatgacagcaaatgcacacatcaagagaaagttaccattca

SEQ ID NO: 500073 - DNA, 120 bp, Artificial Sequence
  ENSG00000163638_29 (sequence is synthesized)
gaggtgcagtgagttcccttgtccacagtggaaatctggagactggtcagagtgcttggtcacctgtggaaaagggcataagcaccgccaggtctggtgtcagtttggtgaagatcgatt

SEQ ID NO: 500074 - DNA, 120 bp, Artificial Sequence
  ENSG00000163638_30 (sequence is synthesized)
aaatgatagaatgtgtgaccctgagaccaagccaacatctatgcagacttgtcagcagccggaatgtgcatcctggcaggcgggtccctggggacagtgcagtgtcacttgtggacaggg

SEQ ID NO: 500075 - DNA, 120 bp, Artificial Sequence
  ENSG00000163638_31 (sequence is synthesized)
tgtaatgcagcaactagaccaactgatacccaggactgtgaattaccatcatgtcatcctcccccagctgccccggaaacgaggagaagcacatacagtgcaccaagaacccagtggcga

SEQ ID NO: 500076 - DNA, 120 bp, Artificial Sequence
  ENSG00000163638_32 (sequence is synthesized)
tttgggtcttggaccccatgctcagccacttgtgggaaaggtacccggatgagatacgtcagctgccgagatgagaatggctctgtggctgacgagagtgcctgtgctaccctgcctaga

SEQ ID NO: 500077 - DNA, 120 bp, Artificial Sequence
  ENSG00000163638_33 (sequence is synthesized)
ccagtggcaaaggaagaatgttctgtgacaccctgtgggcaatggaaggccttggactggagctcttgctctgtgacctgtgggcaaggtagggcaacccggcaagtgatgtgtgtcaac

SEQ ID NO: 500078 - DNA, 120 bp, Artificial Sequence
  ENSG00000163638_34 (sequence is synthesized)
tacagtgaccacgtgatcgatcggagtgagtgtgaccaggattatatcccagaaactgaccaggactgttccatgtcaccatgccctcaaaggaccccagacagtggcttagctcagcac

SEQ ID NO: 500079 - DNA, 120 bp, Artificial Sequence
  ENSG00000163638_35 (sequence is synthesized)
cccttccaaaatgaggactatcgtccccggagcgccagccccagccgcacccatgtgctcggtggaaaccagtggagaactggcccctggggagcatgttccagtacctgtgctggcgga

SEQ ID NO: 500080 - DNA, 120 bp, Artificial Sequence
  ENSG00000163638_36 (sequence is synthesized)
tcccagcggcgtgttgttgtatgtcaggatgaaaatggatacaccgcaaacgactgtgtggagagaataaaacctgatgagcaaagagcctgtgaatccggcccttgtcctcagtgggct

SEQ ID NO: 500081 - DNA, 120 bp, Artificial Sequence
  ENSG00000163638_37 (sequence is synthesized)
tatggcaactggggagagtgcactaagctgtgtggtggaggcataagaacaagactggtggtctgtcagcggtccaacggtgaacggtttccagatttgagctgtgaaattcttgataaa

SEQ ID NO: 500082 - DNA, 120 bp, Artificial Sequence
  ENSG00000163638_38 (sequence is synthesized)
cctcccgatcgtgagcagtgtaacacacatgcttgtccacacgacgctgcatggagtactggcccttggagctcgtgttctgtctcttgtggtcgagggcataaacaacgaaatgtttac

SEQ ID NO: 500083 - DNA, 120 bp, Artificial Sequence
  ENSG00000163638_39 (sequence is synthesized)
tgcatggcaaaagatggaagccatttagaaagtgattactgtaagcacctggctaagccacatgggcacagaaagtgccgaggaggaagatgccccaaatggaaagctggcgcttggagt

SEQ ID NO: 500084 - DNA, 120 bp, Artificial Sequence
  ENSG00000163638_40 (sequence is synthesized)
cagtgctctgtgtcctgtggccgaggcgtacagcagaggcatgtgggctgtcagatcggaacacacaaaatagccagagagaccgagtgcaacccatacaccagaccggagtcggaacgc

SEQ ID NO: 500085 - DNA, 120 bp, Artificial Sequence
  ENSG00000163638_41 (sequence is synthesized)
gactgccaaggcccacggtgtcccctctacacttggagggcagaggaatggcaagaatgcaccaagacctgcggcgaaggctccaggtaccgcaaggtggtgtgtgtggatgacaacaaa

SEQ ID NO: 500086 - DNA, 120 bp, Artificial Sequence
  ENSG00000163638_42 (sequence is synthesized)
aacgaggtgcatggggcacgctgtgacgtgagcaagcggccggtggaccgtgaaagctgtagtttgcaaccctgcgagtatgtctggatcacaggagaatggtcagagtgctcagtgacc

SEQ ID NO: 500087 - DNA, 120 bp, Artificial Sequence
  ENSG00000163638_43 (sequence is synthesized)
tgtggaaaaggctacaaacaaaggcttgtctcgtgcagcgagatttacaccgggaaggagaattatgaatacagctaccaaaccaccatcaactgcccaggcacgcagccccccagtgtt

SEQ ID NO: 500088 - DNA, 120 bp, Artificial Sequence
  ENSG00000163638_44 (sequence is synthesized)
cacccctgttacctgagggactgccctgtctcggccacctggagagttggcaactgggggagctgctcagtgtcttgtggtgttggagtgatgcagagatctgtgcaatgtttaaccaat

SEQ ID NO: 500089 - DNA, 120 bp, Artificial Sequence
  ENSG00000163638_45 (sequence is synthesized)
gaggaccaacccagccacttatgccacactgatctgaagccagaagaacgaaaaacctgccgtaatgtctataactgtgagttaccccagaattgcaaggaggtaaaaagacttaaaggt

SEQ ID NO: 500090 - DNA, 120 bp, Artificial Sequence
  ENSG00000163638_46 (sequence is synthesized)
gccagtgaagatggtgaatatttcctgatgattagaggaaagcttctgaagatattctgtgcggggatgcactctgaccaccccaaagagtacgtgacactggtgcatggagactctgag

SEQ ID NO: 500091 - DNA, 120 bp, Artificial Sequence
  ENSG00000163638_47 (sequence is synthesized)
aatttctccgaggtttatgggcacaggttacacaacccaacagaatgtccctataacgggagccggcgcgatgactgccaatgtcggaaggattacacggccgctgggttttccagtttt

SEQ ID NO: 500092 - DNA, 120 bp, Artificial Sequence
  ENSG00000163638_48 (sequence is synthesized)
cagaaaatcagaatagacctgaccagcatgcagataatcaccactgacttacagtttgcaaggacaagcgaaggacatcccgtcccttttgccacagccggggattgctacagcgctgcc

SEQ ID NO: 500093 - DNA, 120 bp, Artificial Sequence
  ENSG00000163638_49 (sequence is synthesized)
aagtgcccacagggtcgttttagcatcaacctttatggaaccggcttgtctttaactgaatctgccagatggatatcacaagggaattatgctgtctctgacatcaagaagtcgccggat

SEQ ID NO: 500094 - DNA, 120 bp, Artificial Sequence
  ENSG00000163638_50 (sequence is synthesized)
ggtacccgagtcgtagggaaatgcggtggttactgtggaaaatgcactccatcctctggtactggcctggaggtgcgagttttatagctaaggtgctttgaagaggaagccattatggat

SEQ ID NO: 500095 - DNA, 120 bp, Artificial Sequence
  ENSG00000163638_51 (sequence is synthesized)
ggatgaaggatagtaatgcaatacctccaccttaatttgggtgcatgtgtatgtgtgtgtgtgtttgtgtgtgacttgtatgcttgtgtgtgtaaatgtgtgtacatatacatatataca

SEQ ID NO: 500096 - DNA, 120 bp, Artificial Sequence
  ENSG00000163638_52 (sequence is synthesized)
tatatgtgtgtatgtagatatgtagactatcctaatgatgtaaagtttaatatttatgtttgaaattatttattgtgatgtaatatttttgtacgtaaaatgattctattatgactgcct

SEQ ID NO: 500097 - DNA, 120 bp, Artificial Sequence
  ENSG00000163638_53 (sequence is synthesized)
aaaatgattctattatgactgcctttgcatgtagtaatatgacaaagtgatccttcattatcacggtacactattgtttacttttcatctgtaaatgttttattgttacttttttaaaat

SEQ ID NO: 500098 - DNA, 120 bp, Artificial Sequence
  ENSG00000163638_54 (sequence is synthesized)
gaatttttttaaaacaatctagccatcatcaaggtgctataagagttgtataaaagatatttttggcatttctaggcaagtatcagccaataagtatgttagtgatatcacagattgtac

SEQ ID NO: 500099 - DNA, 120 bp, Artificial Sequence
  ENSG00000163638_55 (sequence is synthesized)
caactattaactatgttaaataagtattcagtttcatgtgatctctgggaaaaaaatatgctgccttggtgctaatattgtatgtatttaaatgatcatccgactcagaaatataaacac

SEQ ID NO: 500100 - DNA, 120 bp, Artificial Sequence
  ENSG00000163638_56 (sequence is synthesized)
ttttaatgaaagggaggaacggaaggacaatttccagtgcacagaatcacttggatgaaataagaccagctctttacccttatttttggatatgccttttttggaagagacttagacttt

SEQ ID NO: 500101 - DNA, 120 bp, Artificial Sequence
  ENSG00000163638_57 (sequence is synthesized)
atccttattgttgttagtgttgttaatattcgttgcttcagcccacggtgccttggtctctccacaatcaaatggaggatcccccaagcagcttcattacagagtgatattgggaaagtg

SEQ ID NO: 500102 - DNA, 120 bp, Artificial Sequence
  ENSG00000163638_58 (sequence is synthesized)
agatcctctcaccattttgccaagatactctaaaatgacatccaagtttaccagtagaaagacacaggatgcacagaatgggcatgaccttcagctcacgagcacacctggagaaattca

SEQ ID NO: 500103 - DNA, 120 bp, Artificial Sequence
  ENSG00000163638_59 (sequence is synthesized)
gaaccaggttctgaatcatcacgattgccttttgcatgaaaacatcggctggtgatgtgacttctcttcaggccatgagcctaacaccctgccggttttcatgcccgctgcagtaatgga

SEQ ID NO: 500104 - DNA, 120 bp, Artificial Sequence
  ENSG00000163638_60 (sequence is synthesized)
cgtttgtgtgaagaaatgaactgtggagtacaaaatgctttgagtctttccgattgctcattaattcacttttttgttacttctttccaaaatggaagtgctgaagccatggtctttctg

SEQ ID NO: 500105 - DNA, 120 bp, Artificial Sequence
  ENSG00000163638_61 (sequence is synthesized)
cccctccaagctgatgaagggaagcctttgccaatggcccatggaagacacttggtttgagaaaccctgcccacttccaaagaccaaagagattaggaaaagcctggcagtattctccaa

SEQ ID NO: 500106 - DNA, 120 bp, Artificial Sequence
  ENSG00000163638_62 (sequence is synthesized)
ctccaaacaagctctagagtgctccaggaaaagttatattcagtatatgaataagtgttattctccattattaatgtgttctgaaaatatattatgaataaatacatcaccacacccaaa

SEQ ID NO: 500107 - DNA, 120 bp, Artificial Sequence
  ENSG00000163638_63 (sequence is synthesized)
ctggagactggtcagaggtaagatgggagggctgttatttcccctaggtcatctcttacattctagttctggtgctctctatctgtttaagacaaacccttgtgcacctttctcccacct

SEQ ID NO: 500108 - DNA, 120 bp, Artificial Sequence
  ENSG00000163638_64 (sequence is synthesized)
ctccctttctcccttgtctcccttgagaaaacaactccagttctctgcctgcaccatgactgtcgtactggatgtaactagtctaccagtgacctcagggcactttgggcttggctagat

SEQ ID NO: 500109 - DNA, 120 bp, Artificial Sequence
  ENSG00000163638_65 (sequence is synthesized)
cactcactgttgtagcttctgttgtgattttgaagttgcagtccatcaccttccctcctctttgagccctagctaagtcactgaaaggaaatcatggatttattaatcataaagctatac

SEQ ID NO: 500110 - DNA, 120 bp, Artificial Sequence
  ENSG00000163638_66 (sequence is synthesized)
tagctcacatctgaagtcaacatgaagtttcctacttccttgtctttgaaataagagaattagaccccagggagtgacctctctgacttacccatccaactgcaagaaaaaaaaataaaa

SEQ ID NO: 500111 - DNA, 120 bp, Artificial Sequence
  ENSG00000163638_67 (sequence is synthesized)
ttagagtaagacttgaacattcttttagcacaaacttctagtgcctggcctacatgtagtgaactaattgtgggaaagacaatatgaagtcaaacattccttttgagttatttttgttga

SEQ ID NO: 500112 - DNA, 120 bp, Artificial Sequence
  ENSG00000163638_68 (sequence is synthesized)
attattttttatggctgcatagtatttcatcatgtatacagaccacatttttaaaatccagtccaccattaatcggtacctaggttgattccacgtttgctattgtgaatagtgctgcaa

SEQ ID NO: 500113 - DNA, 120 bp, Artificial Sequence
  ENSG00000163638_69 (sequence is synthesized)
tttctcaattatttaaaaatataaaaatcatccttagcttgcaagccatacagaaacaggtggtgggctggatttggctcacaggctgaagtttgccagcccctgctttagaccatggtg

SEQ ID NO: 500114 - DNA, 120 bp, Artificial Sequence
  ENSG00000163638_70 (sequence is synthesized)
agtatgttgggcttcacatcagttcagaaggcctgtttactgtgtgtataagaacgttttcccaaaaagccagtgcaggccctgaaagcattaaccaagcaggcaggctaacatgatgca

SEQ ID NO: 500115 - DNA, 120 bp, Artificial Sequence
  ENSG00000163638_71 (sequence is synthesized)
atcgtcagctcagccatggcctgagagtggcagagggatgagtggagggatgagtgcaggaatgtgggagacttgaggctacccgcccgatttgccactgtgaactgtgtgttttctgac

SEQ ID NO: 500116 - DNA, 120 bp, Artificial Sequence
  ENSG00000163638_72 (sequence is synthesized)
aagtcctcagctttcccaagctagaattccttgtatgcaaagcgggagagatgtaagagatggtctctaagtcccttcaggtctacattctgtgattcaccttgatgtcctattggcata

SEQ ID NO: 500117 - DNA, 120 bp, Artificial Sequence
  ENSG00000163638_73 (sequence is synthesized)
aagaagaaattattacaggggctgcaaactcataggatgctgtgaggtgcctgaagacagttaagtataagaaaatactgtagtgccagggatacaacaaggagagatggcaactgtgac

SEQ ID NO: 500118 - DNA, 120 bp, Artificial Sequence
  ENSG00000163638_74 (sequence is synthesized)
aaactagcacatgctgtgtgaagggagcagaatctctttcactccagctgtggccatgcagaaatgtggtctagcgttaccagacctgatttttcaagagaggctaaaaatctggactag

SEQ ID NO: 500119 - DNA, 120 bp, Artificial Sequence
  ENSG00000163638_75 (sequence is synthesized)
tatgtgagatttcctaacttgaaaatgggggctgaaatttttggttttaaaacattgtaaggggcaaacaaacccctttcatgaaccagatgtgttgtgcctgtttaacaaacagcttca

SEQ ID NO: 500120 - DNA, 120 bp, Artificial Sequence
  ENSG00000163638_76 (sequence is synthesized)
gaggaagaaaataattttctataatatccgaagtatctcaagtaccattttttcatatatcttcctgtgcacagtgcttatctagaccctttttaatggtaataaaccagtagtaatcat

SEQ ID NO: 500121 - DNA, 120 bp, Artificial Sequence
  ENSG00000163638_77 (sequence is synthesized)
cattccttggagaaggcaaaaaaaaaaaaaaaaagctctctgacatctgtgtagttcatatccttgacagagtttagaagattacagactgagctaaagaaaaggttggagtcttaaaga

SEQ ID NO: 500122 - DNA, 120 bp, Artificial Sequence
  ENSG00000163638_78 (sequence is synthesized)
ggatgtggaaatgttgcttcattttgggtaaagttttgagatttgttcagacattgggagagggactatgaatgtgatttcttaatgaaggccacaggtatttatgcacttctaatttag

SEQ ID NO: 500123 - DNA, 120 bp, Artificial Sequence
  ENSG00000163638_79 (sequence is synthesized)
taatttgggcctgaaaaggggtggggtagtgagatgatcccaaagcagattccgtggatgagtggaaattacagcagctcccacattgttgagttgaggacattctctctctgcgtcact

SEQ ID NO: 500124 - DNA, 120 bp, Artificial Sequence
  ENSG00000163638_80 (sequence is synthesized)
cttcctctccccctcttccctctcccttttctcttttttcccatttcctttcttttcttgttttgttttttaagcttcctgctaggctgctcaaagatccaattacattatacaatgccc

SEQ ID NO: 500125 - DNA, 120 bp, Artificial Sequence
  ENSG00000163638_81 (sequence is synthesized)
ctgtgtcacagatttattgctcttctcgctcagaagtatgaaaggttaagtgattgtcccagagtcactgggtgtatatttctgcaaccacggggaagaggaggctttatcaatcagaac

SEQ ID NO: 500126 - DNA, 120 bp, Artificial Sequence
  ENSG00000163638_82 (sequence is synthesized)
tcaacgggtgtgaattttccgggagaggtgtttgctgaaaacggaaagaaccagagggttgctgttgttctttttaaccagatggtgtaaggtgttttctttctatgagtcattgattcg

SEQ ID NO: 500127 - DNA, 120 bp, Artificial Sequence
  ENSG00000163638_83 (sequence is synthesized)
ctcacgcatcccttcagcaaacatttactaatcacctgttgtcatggacagggccctgtgctttgatgaaaaagacactatctttgcccttagaaagcttacagtctattgggaaagata

SEQ ID NO: 500128 - DNA, 120 bp, Artificial Sequence
  ENSG00000163638_84 (sequence is synthesized)
gtcaaacataaacagataattgctgtgaagtgtgatcaacgttgtaacaggtgtatatttcctactggctatgttgtattcattgcatgtggttctacaaagtaaacagcaaaaatgtaa

SEQ ID NO: 500129 - DNA, 120 bp, Artificial Sequence
  ENSG00000163638_85 (sequence is synthesized)
atgaagagactttacaaaaagtgttgttgagtgaatgaaaaattcacaaccacaaaatgcatatgttgcaagaaacgtaaaaaagaggtggagcccaacgtaagacgtgacttgcttatt

SEQ ID NO: 500130 - DNA, 120 bp, Artificial Sequence
  ENSG00000163638_86 (sequence is synthesized)
gcttacacggagttcacaattaactttgaaaaatttatctcggttgcaggtagcctctatctataaagacccaagtattggaaatttaattaatattgttattgtgaacttaattgtgat

SEQ ID NO: 500131 - DNA, 120 bp, Artificial Sequence
  ENSG00000163644_0 (sequence is synthesized)
gagaatttccagcaggcaaggcagtggccgctttgactgcttgcttcggagatccgagacgacggagaaggcactcttatttaccgaccaagaaagctcctcccccgtcctccgttagct

SEQ ID NO: 500132 - DNA, 120 bp, Artificial Sequence
  ENSG00000163644_1 (sequence is synthesized)
aattaaaacatttttcagggacgtagccatccagagacattccattattgttccattgacctttccctcatcactgagtcctttggagctgagttatgtcaacagctgccttaattactt

SEQ ID NO: 500133 - DNA, 120 bp, Artificial Sequence
  ENSG00000163644_2 (sequence is synthesized)
tggtcagaagtggtgggaaccaggtgagaaggagagtgctgctaagctcccgcctgctgcaggacgacaggcgggtgacacccacgtgccacagctccacttcagagcctaggtgttctc

SEQ ID NO: 500134 - DNA, 120 bp, Artificial Sequence
  ENSG00000163644_3 (sequence is synthesized)
ggtttgacccagatggtagtgggagtccagctacctgggacaattttgggatctgggataaccgcattgatgagccaattctgctgccacccagcattaagtatggcaagccaattccca

SEQ ID NO: 500135 - DNA, 120 bp, Artificial Sequence
  ENSG00000163644_4 (sequence is synthesized)
aaatcagcttggaaaatgtggggtgcgcctcacagattggcaaacggaaagagaatgaagatcggtttgacttcgctcagctgacagatgaggtcctgtactttgcagtgtatgatggac

SEQ ID NO: 500136 - DNA, 120 bp, Artificial Sequence
  ENSG00000163644_5 (sequence is synthesized)
acggtggacctgcagcagctgatttctgtcatacccacatggagaaatgtattatggatttgcttcctaaggagaagaacttggaaactctgttgaccttggcttttctagaaatagata

SEQ ID NO: 500137 - DNA, 120 bp, Artificial Sequence
  ENSG00000163644_6 (sequence is synthesized)
aagccttttcgagtcatgcccgcctgtctgctgatgcaactcttctgacctctgggactactgcaacagtagccctattgcgagatggtattgaactggttgtagccagtgttggggaca

SEQ ID NO: 500138 - DNA, 120 bp, Artificial Sequence
  ENSG00000163644_7 (sequence is synthesized)
gccgggctattttgtgtagaaaaggaaaacccatgaagctgaccattgaccatactccagaaagaaaagatgaaaaagaaaggatcaagaaatgtggtggttttgtagcttggaatagtt

SEQ ID NO: 500139 - DNA, 120 bp, Artificial Sequence
  ENSG00000163644_8 (sequence is synthesized)
tggggcagcctcacgtaaatggcaggcttgcaatgacaagaagtattggagatttggaccttaagaccagtggtgtcatagcagaacctgaaactaagaggattaagttacatcatgctg

SEQ ID NO: 500140 - DNA, 120 bp, Artificial Sequence
  ENSG00000163644_9 (sequence is synthesized)
atgacagcttcctggtcctcaccacagatggaattaacttcatggtgaatagtcaagagatttgtgactttgtcaatcagtgccatgatcccaacgaagcagcccatgcggtgactgaac

SEQ ID NO: 500141 - DNA, 120 bp, Artificial Sequence
  ENSG00000163644_10 (sequence is synthesized)
aggcaatacagtacggtactgaggataacagtactgcagtagtagtgccttttggtgcctggggaaaatataagaactctgaaatcaacttctcattcagcagaagctttgcctccagtg

SEQ ID NO: 500142 - DNA, 120 bp, Artificial Sequence
  ENSG00000163644_11 (sequence is synthesized)
gacgatgggcctgattaccagctgggacttagagtttctgtgcaacagtttttcactgagcatgtcaagaaactgataagatcaaaaaggtctcctaactcactagatcagcgcacaagt

SEQ ID NO: 500143 - DNA, 120 bp, Artificial Sequence
  ENSG00000163644_12 (sequence is synthesized)
cagtgtaaaccacttagatagtagttttttcataaatgctcatcatatttatgttccgctgtacatgttcagtataaatatatgtgtagtgaagctactgtgagtctttaaatggaaaga

SEQ ID NO: 500144 - DNA, 120 bp, Artificial Sequence
  ENSG00000163644_13 (sequence is synthesized)
gcaaatgagaagtggtttggatacacttgatgagagatgagagtgtcacattaataatttttaagactcttaggcagctatgggtttcttttgatcatttttgttctttattcatttgaa

SEQ ID NO: 500145 - DNA, 120 bp, Artificial Sequence
  ENSG00000163644_14 (sequence is synthesized)
cacgtttttgaagttcttcaaaactagtcagtttgaattttgacagctattcaatatgtgatctccaagtttaaaaaaatttttttccagacttccctaatcctaaaatgcgagttttta

SEQ ID NO: 500146 - DNA, 120 bp, Artificial Sequence
  ENSG00000163644_15 (sequence is synthesized)
tttttaataactgtaccaaggaataagtatgaaaacagttctctgttaccatattttgtattctggaccacttactggtgaaagcaaccatgcaaaagaaattaatttggccaggcacag

SEQ ID NO: 500147 - DNA, 66 bp, Artificial Sequence
  ENSG00000163644_16 (sequence is synthesized)
aaaaaaaattagaggaatcacttgaacccaggagatgggggttgcagtgagctgagatcatgccat

SEQ ID NO: 500148 - DNA, 73 bp, Artificial Sequence
  ENSG00000163644_17 (sequence is synthesized)
gcgattcagatgatgtgacattactaaattgtatacatatttataaatgtgtatttcagctgtctcatcagcc

SEQ ID NO: 500149 - DNA, 120 bp, Artificial Sequence
  ENSG00000163644_18 (sequence is synthesized)
tacatatttataaatgtgtatttcagctgtctcatcagccctcccctccatttattcctatttttctgtagttaagaatactgtaaaaatgtgactattccttaatatcagaaaagaatg

SEQ ID NO: 500150 - DNA, 120 bp, Artificial Sequence
  ENSG00000163644_19 (sequence is synthesized)
cacaggctgagtcttccggtcaaaagttaaatactgatggaatcaagtattttgtatgaagttctcatttgttatctctaacgctattttgtgttttgcatatagtattatagtatgtgt

SEQ ID NO: 500151 - DNA, 120 bp, Artificial Sequence
  ENSG00000163644_20 (sequence is synthesized)
atatcactttttgtatagagtaagcaattgaataatttgttaataaaaataataccacattgactgatactgctatagacatagcttgagttttatgtctcctttttgctcattttctaa

SEQ ID NO: 500152 - DNA, 120 bp, Artificial Sequence
  ENSG00000163644_21 (sequence is synthesized)
gacttaggagaaagaataaatctaaaatgaccattaaaacattctccatttcagcttgctgtgtaacttaggaagtataaaactatacttctctttatctgcatgtaagtttgctgttaa

SEQ ID NO: 500153 - DNA, 120 bp, Artificial Sequence
  ENSG00000163644_22 (sequence is synthesized)
aatgtgaatttctaaatgtgtatttggaattatttccgtagtttatttctgcaaactatgtaaatttgttatatgtgtgagtatgtgtacatatgtatattttagagtaatataaaatta

SEQ ID NO: 500154 - DNA, 120 bp, Artificial Sequence
  ENSG00000163644_23 (sequence is synthesized)
aagggaacaatcttgcatagctctttcaccagttttaaattattgatacgttatttttaaggactcttgacaaactaggggcaattttcttatagtggagacccagtgattatcagcaga

SEQ ID NO: 500155 - DNA, 120 bp, Artificial Sequence
  ENSG00000163644_24 (sequence is synthesized)
tgaggaaataggttaaaaattgctatatggcaatttgtatataaagtaataggatgtgagaaaaatactgaatcttaagaatgacatggaattctgtggcagaaacaaaagaaaaagttg

SEQ ID NO: 500156 - DNA, 120 bp, Artificial Sequence
  ENSG00000163644_25 (sequence is synthesized)
gtatgaggagggagagggcccaatataaatatttacatcttcttacctttttggaaatggaagaagataaatcttgagtttttctgcctatattaatcaggaattgccctttgaaaaaag

SEQ ID NO: 500157 - DNA, 120 bp, Artificial Sequence
  ENSG00000163644_26 (sequence is synthesized)
tgctaaataaatattttgattttttttttcaagggaagttaggtgaaagaaggaaaaacatcacaggaaagactgttaacattctgtttgttgtctgagaggtgaggaaccaaagggagg

SEQ ID NO: 500158 - DNA, 120 bp, Artificial Sequence
  ENSG00000163644_27 (sequence is synthesized)
caactaaagcgggaaaccatcttgctttttctaatcagttcttggaacagaaatgtggaagctacctttaggaacatggagaatttccaaaccaacaggcaaaggaaaactaacgcacaa

SEQ ID NO: 500159 - DNA, 68 bp, Artificial Sequence
  ENSG00000163644_28 (sequence is synthesized)
gaatttccaaaccaacaggcaaaggaaaactaacgcacaaaaatgacattctgaagatgcaggtttca

SEQ ID NO: 500160 - DNA, 120 bp, Artificial Sequence
  ENSG00000163644_29 (sequence is synthesized)
cgcgccattgcactccagcctggacagcagagcaaaaactccatctcagataaataaataaacaaatatgcaggtttcatttttgttttgaatgctttacattactattcctatctttta

SEQ ID NO: 500161 - DNA, 120 bp, Artificial Sequence
  ENSG00000163644_30 (sequence is synthesized)
ttacattactattcctatcttttactttaaaaactaagatgaggagtgatgttgtcaagttcaaaggcatgagggtgattgatggattgaggtagatagccaagtttgtctgtttttgtt

SEQ ID NO: 500162 - DNA, 120 bp, Artificial Sequence
  ENSG00000163644_31 (sequence is synthesized)
gtgcagtggtgcaatcatagctcactgagattgccaggttcgacaaagaggaatttataggatggggatatagggtagacttgactctgctttatccgggaaagcttttaaaactctgag

SEQ ID NO: 500163 - DNA, 120 bp, Artificial Sequence
  ENSG00000163644_32 (sequence is synthesized)
ttgactctgctttatccgggaaagcttttaaaactctgagccagttaactttgagtaagcataaaacatactgtattggtgtttgtatttttcatgccacaatattaaaatggaatttta

SEQ ID NO: 500164 - DNA, 120 bp, Artificial Sequence
  ENSG00000163644_33 (sequence is synthesized)
aatgtagattattataatctataaaagataagtatgcatgtattaggatactggaaaatatgcaaatcatagtaaaaaaaaagggactgctctagtttttcagttataactgaatttgcc

SEQ ID NO: 500165 - DNA, 120 bp, Artificial Sequence
  ENSG00000163644_34 (sequence is synthesized)
atgtgggtataggcatagtgtaaattacattaatgtagtaaaacatcaattgtggttcggtttgtctttcatttatgtgtagtatagaaatcacctttctaatatgtgttgccaaactat

SEQ ID NO: 500166 - DNA, 120 bp, Artificial Sequence
  ENSG00000163644_35 (sequence is synthesized)
ttgccaccatctatttggtgaaatattcattgtcattgtgattttccacaagtataagttcttaagtactttatagattcagaagtaaatgctgtcctgttctccatcagctgttcgttt

SEQ ID NO: 500167 - DNA, 66 bp, Artificial Sequence
  ENSG00000163644_36 (sequence is synthesized)
agaagtaaatgctgtcctgttctccatcagctgttcgtttgttacagattttgtaacagtggtgcg

SEQ ID NO: 500168 - DNA, 120 bp, Artificial Sequence
  ENSG00000163644_37 (sequence is synthesized)
agccaccgcacctggccagatctttgtatgtcttaagtgtttcaaagttataagcatttttctggggggatgtccattttggagggatccattttgatcctttgtactctataatgtgaa

SEQ ID NO: 500169 - DNA, 120 bp, Artificial Sequence
  ENSG00000163644_38 (sequence is synthesized)
ggatccattttgatcctttgtactctataatgtgaactttcccctgttccaacacttaaaagagaattattagcacataatctaaaagatggaattttttttttttcttgagacagagtc

SEQ ID NO: 500170 - DNA, 120 bp, Artificial Sequence
  ENSG00000163644_39 (sequence is synthesized)
agtgaaattttatttttattttttttaggattttggtagagaatgagtaggcctactcatcaatatcaaacaggacatttagtttctttccttagaacagacataaatttaatttcatgg

SEQ ID NO: 500171 - DNA, 120 bp, Artificial Sequence
  ENSG00000163644_40 (sequence is synthesized)
taatatgataataagaaaatgcttctatttttctttagcacctccatggttctcatatacccatgtctgtaaaaagtgacatgagaattttgttgggttacattttattgtatttattag

SEQ ID NO: 500172 - DNA, 120 bp, Artificial Sequence
  ENSG00000163644_41 (sequence is synthesized)
attcgcttatatagatgacttaggcagaaataaagtcatgtctttagaaggtgaacaagccaacttgtgatggcctgccttttgcttttggcagttgggatgagaacaattgactctccc

SEQ ID NO: 500173 - DNA, 120 bp, Artificial Sequence
  ENSG00000163644_42 (sequence is synthesized)
attggttgttagatagttgaaatggtgcgttggtggtcatacttagtgttctaggctgtgaaatcatggagttcttccacttccaagaatgactcatttgctgttggattctagtacaga

SEQ ID NO: 500174 - DNA, 120 bp, Artificial Sequence
  ENSG00000163644_43 (sequence is synthesized)
atttagcagcctgatgtgtccccaaactgatttaatttctactgaagtgcccttgtgtacatttgttttgtaatttaccaaagtactacctgagtgtataatgactcctgcagtgagtta

SEQ ID NO: 500175 - DNA, 120 bp, Artificial Sequence
  ENSG00000163644_44 (sequence is synthesized)
atgtaattgctgctttgaccattgttttaaatctgtgtactagagtaactgtgagcagaatgaaatcacattatctcagtgttcaaaatatcattctaataaagtacatgcattaaacaa

SEQ ID NO: 500176 - DNA, 120 bp, Artificial Sequence
  ENSG00000163644_45 (sequence is synthesized)
catttcttgacttcctgtgtataccgcattccacgaaagaactcacaatgggaaggaactctcgacctctcagggttgtggtagtgaggatcaattcttcaaggacaaggacttggactt

SEQ ID NO: 500177 - DNA, 120 bp, Artificial Sequence
  ENSG00000163644_46 (sequence is synthesized)
tcattgttgtgcccttaaaagcttatcacagtgcctgatactttgtggattctcaataggtattccttagccagtaggtcttcagcatttgacaggaaaatcctgaggcccgttgtgtgg

SEQ ID NO: 500178 - DNA, 120 bp, Artificial Sequence
  ENSG00000163644_47 (sequence is synthesized)
agctatttgcgaggcttcgcaggcaggcgggcgtgtgttcttcccaccgtgtgtcaccctgaccacccgcctgtcagggccagcgagccgaggccaggatcctgagctgtacccagacat

SEQ ID NO: 500179 - DNA, 120 bp, Artificial Sequence
  ENSG00000163644_48 (sequence is synthesized)
agtcatgcccgcctgtctgctgatgagaactgtgcctggtcagcagctctagacctggagcccgtggacactatatgcggggcttcagtggaaagagagatctgcttaattttgtcccag

SEQ ID NO: 500180 - DNA, 120 bp, Artificial Sequence
  ENSG00000163644_49 (sequence is synthesized)
gtgaaggagtccagcggttcctatcctggactacgggaaggttcccacatctctttgtcccattagttgagatgacttgcagtagaaattgtccacaactcttctgacctctgggactac

SEQ ID NO: 500181 - DNA, 120 bp, Artificial Sequence
  ENSG00000163644_50 (sequence is synthesized)
gagtcggcgcttggccggcggcctctcggagttctcagagcgtcgctttcttccctttggaggtcgtgagcagctcgtcggggtgaggcggggcccagctgggctgcctgcgccccgggc

SEQ ID NO: 500182 - DNA, 120 bp, Artificial Sequence
  ENSG00000163644_51 (sequence is synthesized)
ggcgggtttccagcccagactgcgctcggccttgaatgtggccgcaggctggagggccagcgcggcgcgaggcgggcagggtgggtgggctgggactggagacccttgcccgaggccccg

SEQ ID NO: 500183 - DNA, 120 bp, Artificial Sequence
  ENSG00000163644_52 (sequence is synthesized)
gctctacctgcagtggggtaggagttcccctgggtaacaccctgtaatgccaagagaggttttaggattgagtttcagggtggagtccagaaatgggggtgtaaagtaatcgtttcaaag

SEQ ID NO: 500184 - DNA, 120 bp, Artificial Sequence
  ENSG00000163644_53 (sequence is synthesized)
aagtgtagtctcaagtgtcgttgggttgttagggttggggaaaggagagctgcagctgtgaatgtaaatatatagatcactcgttcagaaatcagggctgcttgtcacaaatgcagtgct

SEQ ID NO: 500185 - DNA, 120 bp, Artificial Sequence
  ENSG00000163644_54 (sequence is synthesized)
gccaggttcctgagatcatacccacataccctcctagtgagagagtctgctaggatggggagcatcaaaactggcttatctttgtgcctctggggtgtttgcacaccaatttatatttac

SEQ ID NO: 500186 - DNA, 120 bp, Artificial Sequence
  ENSG00000163644_55 (sequence is synthesized)
catagtaatatagtatgtaaagcttagtaggttaagaaatgttaaaataaaacttagatttatcctagattatgtttttgttaaaacttggccattctttggaaacagaactattttaag

SEQ ID NO: 500187 - DNA, 120 bp, Artificial Sequence
  ENSG00000163644_56 (sequence is synthesized)
tattctattagcctgttattttttcctgaagagactttgttgctattgttaatatttatccctaccttttctttaaagcaatagagttaatgaagggaagtatatttatttatacctgta

SEQ ID NO: 500188 - DNA, 120 bp, Artificial Sequence
  ENSG00000163644_57 (sequence is synthesized)
ttctgtgttcttgctactagaagtgtaacttggggaccagcagcttctgtatcaccagggtgttggttagaaatgcagagtgactccaccccatagccactgggtcagaacatgcatttt

SEQ ID NO: 500189 - DNA, 120 bp, Artificial Sequence
  ENSG00000163644_58 (sequence is synthesized)
aacaagtgattgcaggttcaagtttaagagatacatgttctgtgtatgtgcacactgttaaatttttatagaatttaaatgctgtgaatgcggtaggaaaatcgattcatttttgatcca

SEQ ID NO: 500190 - DNA, 120 bp, Artificial Sequence
  ENSG00000163644_59 (sequence is synthesized)
ctgttcttagaagcaggctactggatgcctacccaatatataacataaatatatgtattttctgtcaaatcctttatgagcttcatttttggtaatatttgatgacatatcagttatatt

SEQ ID NO: 500191 - DNA, 120 bp, Artificial Sequence
  ENSG00000163644_60 (sequence is synthesized)
caaaatttctgatggtctctctctctctgtctctctccctctcctcctctgcccctctctccctctgtcccctgtgacttgcatcatttttcttgaagacattccattattgttccattg

SEQ ID NO: 500192 - DNA, 120 bp, Artificial Sequence
  ENSG00000163644_61 (sequence is synthesized)
tgtacaatgactttcactcctgactttgcagttcctatacttcctacttaaactttcaccctttggctgaggcttccagcgtaaacatagttacttgagtggttgcatgctgctgcttca

SEQ ID NO: 500193 - DNA, 120 bp, Artificial Sequence
  ENSG00000163644_62 (sequence is synthesized)
cgaatgagcagtagtttaagtgtgccatttattacttatggttatcacaatttcagaaatgcatgttttaacaactcccctggggaaagcattaaccaaaatctatagcacttaatttgt

SEQ ID NO: 500194 - DNA, 120 bp, Artificial Sequence
  ENSG00000163644_63 (sequence is synthesized)
gatcattttaagtgaagtggcataatgtacatgagataacctatgagaagcatttactcccatcagtgtaggacagataagtgcttcagtaaatggtaattactctttcaagtggtgtga

SEQ ID NO: 500195 - DNA, 120 bp, Artificial Sequence
  ENSG00000163644_64 (sequence is synthesized)
atagctttgaatacctgacttgttgaaaatagctttggatgattggcattagtgtggaaaaatgcatttaatgcaggcattttggagctcttccgtttatttacttcaactagtattaat

SEQ ID NO: 500196 - DNA, 120 bp, Artificial Sequence
  ENSG00000163644_65 (sequence is synthesized)
actgctagctagagtaacagtgaggagaaaaacctattgtaaaatgattgtttaaggctctttttttcctccccacaaagggatttgcttcctaaggagaagaacttggaaactctgttg

SEQ ID NO: 500197 - DNA, 120 bp, Artificial Sequence
  ENSG00000163644_66 (sequence is synthesized)
aaaaggaaacactttaagtcctttgggggaggggattttaatggacaattgtttgtaaggatttatgtagaaatgagtttatatgaagaatcacattaaatgctgttgggaactccaatt

SEQ ID NO: 500198 - DNA, 120 bp, Artificial Sequence
  ENSG00000163644_67 (sequence is synthesized)
aatgttaatacctcacttttaaatgaaatatattggagaatttttcagaaagagaagccccgaaacagttctgatgttgtactttagtttttaaaagattttaaaaatgtttaatctgtt

SEQ ID NO: 500199 - DNA, 120 bp, Artificial Sequence
  ENSG00000163644_68 (sequence is synthesized)
tgcttattttatggacaaaatgtccatactatgagttttgttttgggtttttggttttttttttagatggatctggtgaccaagtgctgaaatacactacagggtaatcacatctagcga

SEQ ID NO: 500200 - DNA, 120 bp, Artificial Sequence
  ENSG00000163644_69 (sequence is synthesized)
ggacagtcattgtccaacaagaaaaaaattgcaaataggtcctaaatagaaaaagacaatggttaatatgcactaatttgtataactagaaggaaaatatttttctgtcacttcttaaaa

SEQ ID NO: 500201 - DNA, 120 bp, Artificial Sequence
  ENSG00000163644_70 (sequence is synthesized)
agctcaatcttgcagcttttctctggtaactagtgatattttcagcataaggtcatgctagctgaatttaaaattttgtgtactgtatgtccttaaattttgaaagtgaaatgtttctgg

SEQ ID NO: 500202 - DNA, 120 bp, Artificial Sequence
  ENSG00000163644_71 (sequence is synthesized)
ttttgactaaatttatcaaaaccatttcacgaaaattcagcaaacgttttctagttagctagtcccaaatcttttgctgttaaagttaaccctgaaaatttctgtaccagccaaatgaat

SEQ ID NO: 500203 - DNA, 120 bp, Artificial Sequence
  ENSG00000163644_72 (sequence is synthesized)
gtgtgcatgtaaccttgtaaatgatttgaaaatgaatcatgcaataatcttgatctgtatttggttcatccttttcttaaaaaaaagaaagaaaccaagtgcaccacagaaatgtcattt

SEQ ID NO: 500204 - DNA, 120 bp, Artificial Sequence
  ENSG00000163644_73 (sequence is synthesized)
gcacagtcttcagttggaatacataaggatagagattgtttgcatttcacagcgaaggaactgaagattagagtggtaaaggtcagttcagagttagggctgggattttcctgaccacca

SEQ ID NO: 500205 - DNA, 120 bp, Artificial Sequence
  ENSG00000163644_74 (sequence is synthesized)
gcattatctctcttctctcatgaggagaggagaaggtaactctgcgatggctctatttaccatcttgagattttttcctgagctttttttgagaaccttactatcacactcctcaggaaa

SEQ ID NO: 500206 - DNA, 120 bp, Artificial Sequence
  ENSG00000163644_75 (sequence is synthesized)
gcattacagtccactctcttcagggatatgttttccagtttgtagatcatttaggcccattttcttttctttcattcctttggaatttttctttttcctttcaactggacccttaccttt

SEQ ID NO: 500207 - DNA, 120 bp, Artificial Sequence
  ENSG00000163644_76 (sequence is synthesized)
aagaagacagaagctgaaagaggtaaactttatgcataagacttagctcttgttccaaatagttaaaacacatgaaggaaaagaggaaatgaaatattttcttatggttttatttttatt

SEQ ID NO: 500208 - DNA, 120 bp, Artificial Sequence
  ENSG00000163644_77 (sequence is synthesized)
acttcctgaattttggtatgctcttatttcatagtaactgagttggctgtgcatctggctatgtctcacaccacaatgtttgttgactgtagtgtcggtggtgtgccccagctgttctgt

SEQ ID NO: 500209 - DNA, 120 bp, Artificial Sequence
  ENSG00000163644_78 (sequence is synthesized)
aaatagctgcagcttactgggcaaggtttttggatgagaatgtccaaatttatcccaggcatgtgaccaccaaccaaaaacattggccttctcaatgccatcagcctcttttaaaagtat

SEQ ID NO: 500210 - DNA, 120 bp, Artificial Sequence
  ENSG00000163644_79 (sequence is synthesized)
ctagtcaatgtagatgcttaaaccaatcggtgattgacttgatgtaaaatatgacaggactccttttattattgaatgaagtataactcaacagaattttgaacttaaagaatttaatta

SEQ ID NO: 500211 - DNA, 120 bp, Artificial Sequence
  ENSG00000163644_80 (sequence is synthesized)
acttgcctatcttaaaagaaactttctaaagatacctttgtcacaaaaacattaaacagttgtataaagaaattaatcacaaaaatgtaattcatatgctaacttcagcagcacatacac

SEQ ID NO: 500212 - DNA, 120 bp, Artificial Sequence
  ENSG00000163644_81 (sequence is synthesized)
taaaattggaatgatacagagatcagcatggtccttgtgcaaggatggcacacaaatgcatgaagagttccatattttttattcttactaaaatcaattcatttgtaataaagaaattaa

SEQ ID NO: 500213 - DNA, 120 bp, Artificial Sequence
  ENSG00000163644_82 (sequence is synthesized)
aatgcattatttaatttaattcctctatcatatgctttgaagtaatgatcccagaacattcttaagatattttaaaatgtatttttcatataatggtaatttgtttgaaagtataatgga

SEQ ID NO: 500214 - DNA, 120 bp, Artificial Sequence
  ENSG00000163644_83 (sequence is synthesized)
tggagcaagacaagatgatgctcttagtgtgtactaaaagaaaaggtctattataatattgttattaaatcttattttgttattaaatttgttatttgttattaaaatcttattttgtat

SEQ ID NO: 500215 - DNA, 120 bp, Artificial Sequence
  ENSG00000163644_84 (sequence is synthesized)
cgtcgctccgccgcgcagctggaagcctgcgaagtcaaatagcagccgcggggaggctcgttcccatcggcatctgtgactggctgcgatcgagggcccgggcggccggccagccgtctc

SEQ ID NO: 500216 - DNA, 120 bp, Artificial Sequence
  ENSG00000163645_0 (sequence is synthesized)
gtaatcccgcctcccgccagccatggcccacttgcgctcgcctagcggcttcggagacccggggaagaaggaccagaaggagtcagaggaggagttagaggaggaggaggaggaggaaga

SEQ ID NO: 500217 - DNA, 120 bp, Artificial Sequence
  ENSG00000163645_1 (sequence is synthesized)
ggtggaggaggaggaggaagaggtggaggaggaggaggaagaggtggaggaggaggaggaggaggtggtggaggaggagttggtgggggaagagcaggagttggaggcccctgagacgtt

SEQ ID NO: 500218 - DNA, 120 bp, Artificial Sequence
  ENSG00000163645_2 (sequence is synthesized)
cagcgaagagtacctctggaaggtcacggacatcggtgactacgacgacgacttcccagacgtgcgcccccgcttagccagcatcgtcagccctagcctgacctctacgttcgtgcccag

SEQ ID NO: 500219 - DNA, 120 bp, Artificial Sequence
  ENSG00000163645_3 (sequence is synthesized)
ccagagcgcgaccagcactgaaacgccgagcgcaagcccaccctccagcacctcctcgcataaaagtttccctaaaatatttcagacatttaggaaagacatgtctgaaatgagtataga

SEQ ID NO: 500220 - DNA, 120 bp, Artificial Sequence
  ENSG00000163645_4 (sequence is synthesized)
tagaaatattcatcgcaatttgtctccaggaattccagtatcagtacaaacagaagaaagttggctccaagatttgtctgataaagtgcaatcgaggaagaaagcctctaaagagaaagc

SEQ ID NO: 500221 - DNA, 120 bp, Artificial Sequence
  ENSG00000163645_5 (sequence is synthesized)
tgaacctgaatgtctggcatctaagttaagagaaaaatgggtaattaatccagaagagtcgaaactaaatattttatatgagctggagtttaaggaagacttcataacactgttcgagcc

SEQ ID NO: 500222 - DNA, 120 bp, Artificial Sequence
  ENSG00000163645_6 (sequence is synthesized)
ttctctaagaacgttacccagcatcggaccaccatccattctggcatacaaagaagagagctccaatttaggcattaacttcaaggatgaagaggaggagacatcacccaaatgtgaatt

SEQ ID NO: 500223 - DNA, 120 bp, Artificial Sequence
  ENSG00000163645_7 (sequence is synthesized)
ttgtggcagcgatctaagagcatttttttctaatgtggatgtttcctctgaaccaaaagggcatgcctcctgttgtattgctttccaaaatctgattgactatatctatgaggagcaaat

SEQ ID NO: 500224 - DNA, 120 bp, Artificial Sequence
  ENSG00000163645_8 (sequence is synthesized)
ggaaacaggagcaacgaatggccagacattttgcaataatatcaagggaacagactcatttctctgaagatgattcaaagcgcttaaaaacaatttcttatcaactttctgtggatattc

SEQ ID NO: 500225 - DNA, 120 bp, Artificial Sequence
  ENSG00000163645_9 (sequence is synthesized)
cagaaaaacagataattgatgacattgtatttgattttcaactaagaaacagtaacatgtctatcatttgttgtgattctcggatagcatgtggaaaggttgtcaggaatgagctcttag

SEQ ID NO: 500226 - DNA, 120 bp, Artificial Sequence
  ENSG00000163645_10 (sequence is synthesized)
agaagcactacaaacatgggagcaagtttctgacttcatttccagatgggacaacacaaatattctatccatctggaaacctagccatcattcgagtgcccaacaaggtaaatggtttta

SEQ ID NO: 500227 - DNA, 120 bp, Artificial Sequence
  ENSG00000163645_11 (sequence is synthesized)
cttgtatagtccaagaagatatgcccactaaccctgctatcctagcagtgctggattcctctggcagaagttcctgctatcatcccaatggaaatgtctgggtatacatcaatatcttgg

SEQ ID NO: 500228 - DNA, 120 bp, Artificial Sequence
  ENSG00000163645_12 (sequence is synthesized)
gaggtcaatattcagatcaagccggcaacagaataagggcttggaattggtcaaattccatcacttcctcaccctttgtttcatttaaacctgtctttctggctttgaaccgttatattg

SEQ ID NO: 500229 - DNA, 120 bp, Artificial Sequence
  ENSG00000163645_13 (sequence is synthesized)
gagtccgcatcttagaacaagacaagatttctataacttttctagcaatgggccaacaggcaagaatcagtgttggaaccaaagtgaagctaccaaaccctgaggagattccaatcctcc

SEQ ID NO: 500230 - DNA, 120 bp, Artificial Sequence
  ENSG00000163645_14 (sequence is synthesized)
gatacgtaagtggagatgaccttcttctgctggccagtttaataaagatccgtcgcctgtttcataaacttgaaggatgtgtgaattttccctcaagccaggtttgggaaaaattaaagc

SEQ ID NO: 500231 - DNA, 120 bp, Artificial Sequence
  ENSG00000163645_15 (sequence is synthesized)
aaccttcctacctttcttcactttctctaaaactaattgccctttgtcacagttctggtataaagcaagatataatgaagacaataagaaatataataaatgaagaaatttaactaagaa

SEQ ID NO: 500232 - DNA, 120 bp, Artificial Sequence
  ENSG00000163646_0 (sequence is synthesized)
aggagatacttgaaggcagtttgaaagacttgttttacagattcttagtccaaagatttccaattagggagaagaagcagcagaaaaggagaaaagccaagtatgagtgatgatgaggcc

SEQ ID NO: 500233 - DNA, 120 bp, Artificial Sequence
  ENSG00000163646_1 (sequence is synthesized)
ttcatctactgacatttaacctggcgagaaccgtcgatggtgaagttgccttttcagctgggagctgtccgttcagcttccgtaataaatgcagtcaaagaggcagtcccttcccattgc

SEQ ID NO: 500234 - DNA, 120 bp, Artificial Sequence
  ENSG00000163646_2 (sequence is synthesized)
tcacaaaggtcttgtttttgaacctcgccctcacagaagccgtttctcatcatgccaagccaacagaagaaaatcattttttgcatggccggagtgttcagttttgcatgtgccctcgga

SEQ ID NO: 500235 - DNA, 120 bp, Artificial Sequence
  ENSG00000163646_3 (sequence is synthesized)
gttgtgacagccttggggacaccgttgtggatcaaagccactgtcctctgcaaaacgggagctctgctcgtcaatgcctcagggcaggagctggacaagtttatgggtgaaatgcagtac

SEQ ID NO: 500236 - DNA, 120 bp, Artificial Sequence
  ENSG00000163646_4 (sequence is synthesized)
gggcttttccacggagagggtgtgaggcagtgtgggttgggagcaaggccctttcggttctcattttttccagatttgctcaaagcaatcccagtgagcatccacgtcaatgtcattctc

SEQ ID NO: 500237 - DNA, 120 bp, Artificial Sequence
  ENSG00000163646_5 (sequence is synthesized)
ttctctgccatccttattgtgttaaccatggtggggacagccttcttcatgtacaatgcttttggaaaaccttttgaaactctgcatggtcccctagggctgtaccttttgagcttcatt

SEQ ID NO: 500238 - DNA, 120 bp, Artificial Sequence
  ENSG00000163646_6 (sequence is synthesized)
tcaggctcctgtggctgtcttgtcatgatattgtttgcctctgaagtgaaaatccatcacctctcagaaaaaattgcaaattataaagaagggacttatgtctacaaaacgcaaagtgaa

SEQ ID NO: 500239 - DNA, 120 bp, Artificial Sequence
  ENSG00000163646_7 (sequence is synthesized)
aaatataccacctcattctgggtcattttcttttgcttttttgttcattttctgaatgggctcctaatacgacttgctggatttcagttcccttttgcaaaatctaaagacgcagaaaca

SEQ ID NO: 500240 - DNA, 120 bp, Artificial Sequence
  ENSG00000163646_8 (sequence is synthesized)
actaatgtagctgcagatctaatgtactgaaaggcaaacctttctataattttacaagggagtagacttgctttggtcacttttagatgtggttaattttgcatatccttttagtctgca

SEQ ID NO: 500241 - DNA, 120 bp, Artificial Sequence
  ENSG00000163646_9 (sequence is synthesized)
agaaggaaggctttgaaaagttgttttatctggtgggaaattgcttgacccaggtagtcaaaggcagttgactagaatcgacaaattgttactccatatatatatatgtgtgtgtgtgtg

SEQ ID NO: 500242 - DNA, 120 bp, Artificial Sequence
  ENSG00000163646_10 (sequence is synthesized)
tgtgtgtgtgtgtgtaagatgtcttcctatcaaaaagatatcaaaggcacatggaatatattttaataaaaacaaataatatctctaatatatccacacatttgttgccagatttcagaa

SEQ ID NO: 500243 - DNA, 120 bp, Artificial Sequence
  ENSG00000163646_11 (sequence is synthesized)
aactgagctgcaatcgctttcctaaaacagtagtgtattaaatgaacatctataaaatgtatcaacacacattttaaaaaatttgtttaaagtatactcttaggccaggcgtggtgactc

SEQ ID NO: 500244 - DNA, 120 bp, Artificial Sequence
  ENSG00000163646_12 (sequence is synthesized)
acacctgtaattccagcacttcaggaggccaaggtgggaagatcatttgagttcaggagttcgagttacagcctgggcaataaagtgagaccctgtcactaacaaaattaaaaaataaaa

SEQ ID NO: 500245 - DNA, 120 bp, Artificial Sequence
  ENSG00000163646_13 (sequence is synthesized)
taaatataaaatataggctttaaaaaagcatagtcttattaaccatgtctgttggtcaaaatctgcaaactctaaaagaagaaaagaagaaaaaaccaagcttagggtatttttcctccc

SEQ ID NO: 500246 - DNA, 120 bp, Artificial Sequence
  ENSG00000163646_14 (sequence is synthesized)
gtgcctgagtcccaattacattcacgacagtactttcaatgaacataattgttaggaccactgaggaatcatgaaaaatgatctctgcttagtacatttgatgcaaaatgacttattagg

SEQ ID NO: 500247 - DNA, 120 bp, Artificial Sequence
  ENSG00000163646_15 (sequence is synthesized)
ggctgtttttctagctatagtgtctcgagtactaatatgcaattatgaaaattatattaaatctgggattatgacggtatcactgtatcatcttggtcttgttctggctgtcaccaagca

SEQ ID NO: 500248 - DNA, 120 bp, Artificial Sequence
  ENSG00000163646_16 (sequence is synthesized)
tgacccaggtcaactttttttttcccctgaattacccatcaaattgatctgcagctgactaaaggccacagctgagcctggaactgacccttccttcatcctcaacctgctgtcctccag

SEQ ID NO: 500249 - DNA, 120 bp, Artificial Sequence
  ENSG00000163646_17 (sequence is synthesized)
aaagcaccaaggaaaaagcagagaatgacagcaaacagatcactaggcctctgaccacaggtgctgagtactcagcagccctcatataataggtttgaaagtactccttaaaataaaaca

SEQ ID NO: 500250 - DNA, 120 bp, Artificial Sequence
  ENSG00000163646_18 (sequence is synthesized)
ctgtttccctttggaactatttacaaggatgaaacaaccgtatacctgagaaataacttgctctggtgtcaattcgctattcgccagcagacatcagaacacaccgagtttccagatgct

SEQ ID NO: 500251 - DNA, 120 bp, Artificial Sequence
  ENSG00000163646_19 (sequence is synthesized)
tgcctccccaccattcaccaggctccactgcactggctcattcctgcctcagttgtgcttcttttccctggaaagttctttctgtagatctttaaagggtgatttccttctcaacattca

SEQ ID NO: 500252 - DNA, 120 bp, Artificial Sequence
  ENSG00000163646_20 (sequence is synthesized)
ggtgtcagctcgtttcactttcctgaccatgcccatccactcagagatcactcaaaatcccattaccctattttatttctccatcatatgtatcactatctgaaactatcttgttgttga

SEQ ID NO: 500253 - DNA, 120 bp, Artificial Sequence
  ENSG00000163646_21 (sequence is synthesized)
gagtgcaggaaccagctggctgctttagtgctgtgaggagtaaactccatgcaggccctgcagcagcaaccaggttataagctctgtgagacaacaggaatcttgtccatcttgttttat

SEQ ID NO: 500254 - DNA, 120 bp, Artificial Sequence
  ENSG00000163646_22 (sequence is synthesized)
aagactacaattcagtctagccacaaaggggattttttttttttggtaacaggctagagcccggttctgtaagtctttagctgaaatggtccagtacaaaagcactggaaatgagtgggc

SEQ ID NO: 500255 - DNA, 120 bp, Artificial Sequence
  ENSG00000163646_23 (sequence is synthesized)
taggaggacaaggaccgtctcctgcgtgaggagttggttggaggtccccaaggccaggtaccccctgcactcttattggattcctctctgtcttcttggagttttgaaaaactccttcga

SEQ ID NO: 500256 - DNA, 120 bp, Artificial Sequence
  ENSG00000163646_24 (sequence is synthesized)
acaccaggcttttttctttagaaaacaagtctccaatcgttctctgttccgtagaaagagaaagaaaacctggagcagctgctgaaaaatctaatgaggaactaagaggcaaacccacca

SEQ ID NO: 500257 - DNA, 120 bp, Artificial Sequence
  ENSG00000163646_25 (sequence is synthesized)
ctggacaagtttatgggtgaaatgcagtacgggcttttccacggagagggtgtgaggcagtgtgggttgggagcaaggccctttcggttctcatataaaggaaatgtagtacaactaaac

SEQ ID NO: 500258 - DNA, 120 bp, Artificial Sequence
  ENSG00000163646_26 (sequence is synthesized)
tcaaaaagaccgtctacctaaatataaagttataatcttaacatatatacatggatgcacactgtagtattatacataataacaaaaagtgtggaaataccacacttgctcaacagtagg

SEQ ID NO: 500259 - DNA, 120 bp, Artificial Sequence
  ENSG00000163655_0 (sequence is synthesized)
agcgtgcgcgctgctggtcttctctcccgcggcgctggggcccgcgctccgctgctgttgctccattcggcgcttttctggcggctggctcctctccgctgccggctgctcctcgaccag

SEQ ID NO: 500260 - DNA, 120 bp, Artificial Sequence
  ENSG00000163655_1 (sequence is synthesized)
gcctccttctcaacctcagcccgcggcgccgacccttccggcaccctcccgccccgtctcgtactgtcgccgtcaccgccgcggctccggccctggccccgatggctctgtgcaacggag

SEQ ID NO: 500261 - DNA, 120 bp, Artificial Sequence
  ENSG00000163655_2 (sequence is synthesized)
actccaagctggagaatgctggaggagaccttaaggatggccaccaccactatgaaggagctgttgtcattctggatgctggtgctcagtacgggaaagtcatagaccgaagagtgaggg

SEQ ID NO: 500262 - DNA, 120 bp, Artificial Sequence
  ENSG00000163655_3 (sequence is synthesized)
aactgttcgtgcagtctgaaattttccccttggaaacaccagcatttgctataaaggaacaaggattccgtgctattatcatctctggaggacctaattctgtgtatgctgaagatgctc

SEQ ID NO: 500263 - DNA, 120 bp, Artificial Sequence
  ENSG00000163655_4 (sequence is synthesized)
cctggtttgatccagcaatattcactattggcaagcctgttcttggaatttgctatggtatgcagatgatgaataaggtatttggaggtactgtgcacaaaaaaagtgtcagagaagatg

SEQ ID NO: 500264 - DNA, 120 bp, Artificial Sequence
  ENSG00000163655_5 (sequence is synthesized)
gagttttcaacattagtgtggataatacatgttcattattcaggggccttcagaaggaagaagttgttttgcttacacatggagatagtgtagacaaagtagctgatggattcaaggttg

SEQ ID NO: 500265 - DNA, 120 bp, Artificial Sequence
  ENSG00000163655_6 (sequence is synthesized)
tggcacgttctggaaacatagtagcaggcatagcaaatgaatctaaaaagttatatggagcacagttccaccctgaagttggccttacagaaaatggaaaagtaatactgaagaatttcc

SEQ ID NO: 500266 - DNA, 120 bp, Artificial Sequence
  ENSG00000163655_7 (sequence is synthesized)
tttatgatatagctggatgcagtggaaccttcaccgtgcagaacagagaacttgagtgtattcgagagatcaaagagagagtaggcacgtcaaaagttttggttttactcagtggtggag

SEQ ID NO: 500267 - DNA, 120 bp, Artificial Sequence
  ENSG00000163655_8 (sequence is synthesized)
tagactcaacagtttgtacagctttgctaaatcgtgctttgaaccaagaacaagtcattgctgtgcacattgataatggctttatgagaaaacgagaaagccagtctgttgaagaggccc

SEQ ID NO: 500268 - DNA, 120 bp, Artificial Sequence
  ENSG00000163655_9 (sequence is synthesized)
tcaaaaagcttggaattcaggtcaaagtgataaatgctgctcattctttctacaatggaacaacaaccctaccaatatcagatgaagatagaaccccacggaaaagaattagcaaaacgt

SEQ ID NO: 500269 - DNA, 120 bp, Artificial Sequence
  ENSG00000163655_10 (sequence is synthesized)
taaatatgaccacaagtcctgaagagaaaagaaaaatcattggggatacttttgttaagattgccaatgaagtaattggagaaatgaacttgaaaccagaggaggttttccttgcccaag

SEQ ID NO: 500270 - DNA, 120 bp, Artificial Sequence
  ENSG00000163655_11 (sequence is synthesized)
gtactttacggcctgatctaattgaaagtgcatcccttgttgcaagtggcaaagctgaactcatcaaaacccatcacaatgacacagagctcatcagaaagttgagagaggagggaaaag

SEQ ID NO: 500271 - DNA, 120 bp, Artificial Sequence
  ENSG00000163655_12 (sequence is synthesized)
taatagaacctctgaaagattttcataaagatgaagtgagaattttgggcagagaacttggacttccagaagagttagtttccaggcatccatttccaggtcctggcctggcaatcagag

SEQ ID NO: 500272 - DNA, 120 bp, Artificial Sequence
  ENSG00000163655_13 (sequence is synthesized)
taatatgtgctgaagaaccttatatttgtaaggactttcctgaaaccaacaatattttgaaaatagtagctgatttttctgcaagtgttaaaaagccacataccctattacagagagtca

SEQ ID NO: 500273 - DNA, 120 bp, Artificial Sequence
  ENSG00000163655_14 (sequence is synthesized)
aagcctgcacaacagaagaggatcaggagaagctgatgcaaattaccagtctgcattcactgaatgccttcttgctgccaattaaaactgtaggtgtgcagggtgactgtcgttcctaca

SEQ ID NO: 500274 - DNA, 120 bp, Artificial Sequence
  ENSG00000163655_15 (sequence is synthesized)
gttacgtgtgtggaatctccagtaaagatgaacctgactgggaatcacttatttttctggctaggcttatacctcgcatgtgtcacaacgttaacagagttgtttatatatttggcccac

SEQ ID NO: 500275 - DNA, 120 bp, Artificial Sequence
  ENSG00000163655_16 (sequence is synthesized)
cagttaaagaacctcctacagatgttactcccactttcttgacaacaggggtgctcagtactttacgccaagctgattttgaggcccataacattctcagggagtctgggtatgctggga

SEQ ID NO: 500276 - DNA, 120 bp, Artificial Sequence
  ENSG00000163655_17 (sequence is synthesized)
aaatcagccagatgccggtgattttgacaccattacattttgatcgggacccacttcaaaagcagccttcatgccagagatctgtggttattcgaacctttattactagtgacttcatga

SEQ ID NO: 500277 - DNA, 120 bp, Artificial Sequence
  ENSG00000163655_18 (sequence is synthesized)
ctggtatacctgcaacacctggcaatgagatccctgtagaggtggtattaaagatggtcactgagattaagaagattcctggtatttctcgaattatgtatgacttaacatcaaagcccc

SEQ ID NO: 500278 - DNA, 120 bp, Artificial Sequence
  ENSG00000163655_19 (sequence is synthesized)
caggaactactgagtgggagtaataaacttcttgttctattaaagtaccgtgtgcagtttaaattgattagaaatcattcccattattgacatgcagtactgtgaaaagagttactggag

SEQ ID NO: 500279 - DNA, 120 bp, Artificial Sequence
  ENSG00000163655_20 (sequence is synthesized)
cagctacatcacatctgagttctccacagcaaaaatctacggcttaagagctgagttggggataaccaaaagggactgaagagtttgtacgggtaaataatcaaagcaccattgcctaca

SEQ ID NO: 500280 - DNA, 120 bp, Artificial Sequence
  ENSG00000163655_21 (sequence is synthesized)
ctcagacagattgatactgcttttgcctttgcctcacttattctttatgtataaattcactgttgatgtctctgtgaatatgtatgaaggtgggtgaatttgggggtaattatgggcttc

SEQ ID NO: 500281 - DNA, 120 bp, Artificial Sequence
  ENSG00000163655_22 (sequence is synthesized)
tgtctccttaccagtttctaagaactgttagaaacgcccattatttaccagtgttacttactacttatatatactttttggagaatcagttttcttataagtaatcttatttctccaaag

SEQ ID NO: 500282 - DNA, 120 bp, Artificial Sequence
  ENSG00000163655_23 (sequence is synthesized)
ggtgaaaaagagatgaacatatcagataaaggtataggtgggctattccagccacttttgaaggacactgagggtataaaatgtaagctaccataagatggaaaagcaccaggaatttgt

SEQ ID NO: 500283 - DNA, 120 bp, Artificial Sequence
  ENSG00000163655_24 (sequence is synthesized)
tgatgtacttttgaattttatttcacagccttgggaggaagaaactatgagtggtctcagatgtctatgaatggtcttaaaatgttttcaaaccatgttccacatagatgccatgttatt

SEQ ID NO: 500284 - DNA, 120 bp, Artificial Sequence
  ENSG00000163655_25 (sequence is synthesized)
caatgtcagcttgtttattagtaaggagctttatcctcctagccttatattaccagccccccacagccttgcatagaaagtttctgttatctccttagaagaaactggctcaatgacgtt

SEQ ID NO: 500285 - DNA, 120 bp, Artificial Sequence
  ENSG00000163655_26 (sequence is synthesized)
tctggtgtagtgcagatagaggtcaagaggagcattttcatctcttcttttgctggtcagagaaacggttctgagatcacagaagctatgatgcatacctacagcttacaaaagggagag

SEQ ID NO: 500286 - DNA, 120 bp, Artificial Sequence
  ENSG00000163655_27 (sequence is synthesized)
gaaaaatgtttatatcatctagtaaacagttgtaaaatgagcttttaaatctaatctatagacatattattcattgctcagacacctgtgaacagtcttgatacatgcaagatgtttgcc

SEQ ID NO: 500287 - DNA, 120 bp, Artificial Sequence
  ENSG00000163655_28 (sequence is synthesized)
aaactttgtaatcctttctactagctataagagaggatttaagaactggtgtaggacttgttgccatcaccaccagtttctaacagatcttttataacattcacataagtactgtagaca

SEQ ID NO: 500288 - DNA, 120 bp, Artificial Sequence
  ENSG00000163655_29 (sequence is synthesized)
gtagtagacttaaactctccgtttctctcagtattttagctaagaatgttaccatatttttctcttaacaattccatctcaggttgctgctgcttgtctagtttaaaaggtcagatctat

SEQ ID NO: 500289 - DNA, 120 bp, Artificial Sequence
  ENSG00000163655_30 (sequence is synthesized)
taatcaggaatgaaattttatttgggattcagtgttagacaaacaacaaaatgatgcgtggcagaagtcatctttttattctggctggtccagggaacaagaaaactgctgctggaccag

SEQ ID NO: 500290 - DNA, 120 bp, Artificial Sequence
  ENSG00000163655_31 (sequence is synthesized)
caagggaagagtttctgtctgtcttaacagaaatctgtccccaagacaaaggggtacttgactcctacaaaacttaaagggtacattctctatctgatgaggaggtactcattatggcct

SEQ ID NO: 500291 - DNA, 120 bp, Artificial Sequence
  ENSG00000163655_32 (sequence is synthesized)
tctggaaagaggctatgttagtgatctggtctttacagatttagagtcatgttatttgaaagctagaatagacaacctataaaatgcttaccaacatgtgtcagtacacgtttatgttta

SEQ ID NO: 500292 - DNA, 120 bp, Artificial Sequence
  ENSG00000163655_33 (sequence is synthesized)
tatgaaaaaaaatttctagccacagtgtcttatgattttgtattgaagcaaacagtaggaattttggaaaaatagagagtaagaatgtgtgttctatggaacactgctccactgagaagg

SEQ ID NO: 500293 - DNA, 120 bp, Artificial Sequence
  ENSG00000163655_34 (sequence is synthesized)
tccatgtaaaaaggattaggtggtcatataagtttggggaacataagctcacttgtcctttcctggagattcatggtatataatattcaaagctctgagaaattctgaagttaaaaacaa

SEQ ID NO: 500294 - DNA, 120 bp, Artificial Sequence
  ENSG00000163655_35 (sequence is synthesized)
ttgttactccaaagcacatcttgacatgacatagtttcttaaaaatccaaattttctggaactcagaaatttcctaatatttagcacactgtcttcttttgcacagcactttttgctttg

SEQ ID NO: 500295 - DNA, 120 bp, Artificial Sequence
  ENSG00000163655_36 (sequence is synthesized)
tgccatatagcattactctgtaccttcacagtatttcatctgagccactgaggaaagttaaaggttgcacttccattttacagttaagaaaacaagctcaccttaggcatggttacttaa

SEQ ID NO: 500296 - DNA, 120 bp, Artificial Sequence
  ENSG00000163655_37 (sequence is synthesized)
ttaatttcagaattaaatttcaggtttccttagtccagattgtcctgatgtgtattctgacacctaaaattatataaacatttatgggatgcttattttactaagactagaatggtggct

SEQ ID NO: 500297 - DNA, 120 bp, Artificial Sequence
  ENSG00000163655_38 (sequence is synthesized)
acctggctaataacattcatcattggttattctgggcatatcatgactttattcccgttgcttaccatctacctgggacacatctctctttgattaaatatattctttttctttgtactt

SEQ ID NO: 500298 - DNA, 120 bp, Artificial Sequence
  ENSG00000163655_39 (sequence is synthesized)
tttaggtagacagagaatgtagatcattgaaagcattatttattcctaagattggcaggcacagaatcatttttaagaaccaaatacccagtcctgccttaaaggccacatctatgatca

SEQ ID NO: 500299 - DNA, 120 bp, Artificial Sequence
  ENSG00000163655_40 (sequence is synthesized)
tcagctctgttagaaataacagcctggcataattcctaaatacaagtctgtagatatatccaggagatagggttacactgttttctaaccttttttaaatcccttaatcttgaggtaaac

SEQ ID NO: 500300 - DNA, 120 bp, Artificial Sequence
  ENSG00000163655_41 (sequence is synthesized)
tgcatgcatttagtcaaacaagcatcataaaatttgtttcctcactgtttgggcttaacctcctgatagcctgttttactgaataacttgaccctaacctgtagagaataagagcattca

SEQ ID NO: 500301 - DNA, 120 bp, Artificial Sequence
  ENSG00000163655_42 (sequence is synthesized)
aattaggaaggcaggactatccatctttagtgcttttcctgccgttaaacaacaatgtgaacttggtcaagtcatttctgttctttatctgtgacatgaggtaactgtattaaattttca

SEQ ID NO: 500302 - DNA, 120 bp, Artificial Sequence
  ENSG00000163655_43 (sequence is synthesized)
gcatcaaatccagctataaatttgtattttgtaaacaagagaaagtaaagcaggagacagaatggagaagctggatagtgttttttttttttttttttaaggttcttttatcatcagata

SEQ ID NO: 500303 - DNA, 120 bp, Artificial Sequence
  ENSG00000163655_44 (sequence is synthesized)
tgacacaaagggaaacatcaaaatgcaccgtaaagttaaatcctagttacctttttttgaagctgttggcaaggtttgaccacttggggcatcttctgctgtgagatgacacttgaaaaa

SEQ ID NO: 500304 - DNA, 120 bp, Artificial Sequence
  ENSG00000163655_45 (sequence is synthesized)
cacccatcaaagttttcctggtaggaatctctctttactgcgtgtttttttgaaaagctgacagagaatatgctttggctttgacactaatgaagtcacccatcatcaattacatacagc

SEQ ID NO: 500305 - DNA, 120 bp, Artificial Sequence
  ENSG00000163655_46 (sequence is synthesized)
taattgttgggagctagagctagaatccaagctttctgattctctgcatggaagaggaaatgctctagggcccttcagggcaaatcttaaaaggaagttcttggccgggcgcggtggctc

SEQ ID NO: 500306 - DNA, 120 bp, Artificial Sequence
  ENSG00000163655_47 (sequence is synthesized)
actcagtctcaaaaaaaaaaaaaaaaggaagttcttagtgtgtaattgaccatcagggataaatgggcttcaaaagtgttaattgtctccttacttacagtgagtttctagagatagccc

SEQ ID NO: 500307 - DNA, 120 bp, Artificial Sequence
  ENSG00000163655_48 (sequence is synthesized)
tagagatagccctgtctttcagaaattctctgacatctgcttgcgcaatgttataaccactttcccacactactcccctccagaaatctcattgatatgtggcgaggacacgccttagct

SEQ ID NO: 500308 - DNA, 120 bp, Artificial Sequence
  ENSG00000163655_49 (sequence is synthesized)
atcaccccaatggatgcttctttcattgacccaaatccagaatgtaatggggaactgaatacaagttggatgtctccacccttggaaagcacatcttttgttcttactgaagtagtttaa

SEQ ID NO: 500309 - DNA, 120 bp, Artificial Sequence
  ENSG00000163655_50 (sequence is synthesized)
caccaccagatgatcaagggatcagggtatctttctggtatctttttaatcactgaaggactttgacagcagtaatggtggcattgttgactcttaaatttctgaacgtttcacttaatg

SEQ ID NO: 500310 - DNA, 120 bp, Artificial Sequence
  ENSG00000163655_51 (sequence is synthesized)
gcaagtgaagagatatagaatcccccaaagagtgtcaagatgctaacttccaaccctatttttatgtactgaagaggcctcagtgtctcactgaactctaacctttttgtcagtgttcct

SEQ ID NO: 500311 - DNA, 120 bp, Artificial Sequence
  ENSG00000163655_52 (sequence is synthesized)
caacactggatgcgtattattacataacctgaggagttaaaaaatacaataaccagatgtccaattaaataaaattagaatctggaggaggtagaactcaagcatttacagttttgtttt

SEQ ID NO: 500312 - DNA, 120 bp, Artificial Sequence
  ENSG00000163655_53 (sequence is synthesized)
tacaggcgtgagccaccacgcccggcaagcatttacagttttaaatctcccagtcagaataaattcttattgagggccatacctagcctgtcttcatcaaactcataggtgaatctttgt

SEQ ID NO: 500313 - DNA, 120 bp, Artificial Sequence
  ENSG00000163655_54 (sequence is synthesized)
actcataggtgaatctttgtcaaacctataggagagagatgcaggccatagagatggtcttgctgaaggtcttatagctaaattagttcagatccaggaaccagattctggaactgattg

SEQ ID NO: 500314 - DNA, 120 bp, Artificial Sequence
  ENSG00000163655_55 (sequence is synthesized)
cacctatattatgttgtgtgtcagacactcccaggacctgtttggtaataattaggacagctgacatacttgttgctaattttgagatctgggcaacaactgtgtaggctgttctttcaa

SEQ ID NO: 500315 - DNA, 120 bp, Artificial Sequence
  ENSG00000163655_56 (sequence is synthesized)
cctctttcttcttacttctttacttttccttcagagaggagaaagccacccctgtgctatagccaccgctccaattctgactctagctaggtcatgaaacagactgagctattattgcat

SEQ ID NO: 500316 - DNA, 120 bp, Artificial Sequence
  ENSG00000163655_57 (sequence is synthesized)
caacacataaatcctgtcatttgggtattattctttagagaactagagattacctagctgcaacctaagtttcctgaattagaatcatttgagcagcaccatcttaattggctcattaac

SEQ ID NO: 500317 - DNA, 60 bp, Artificial Sequence
  ENSG00000163655_58 (sequence is synthesized)
agaatcatttgagcagcaccatcttaattggctcattaacatatttgtgaccttgaggtc

SEQ ID NO: 500318 - DNA, 75 bp, Artificial Sequence
  ENSG00000163655_59 (sequence is synthesized)
aaaaatgtaaaaattagctgggcttgagaatcacttaaacccgggagatggaggttgcagtgagcagagattgcg

SEQ ID NO: 500319 - DNA, 120 bp, Artificial Sequence
  ENSG00000163655_60 (sequence is synthesized)
tgcgccactgcactccagcctaggtgacaagaatgagactccgtcttaaaacaaaaacaacatatttgttcacttttgaaccctgtggtgtcttttaactttgttaagggcccttggtta

SEQ ID NO: 500320 - DNA, 120 bp, Artificial Sequence
  ENSG00000163655_61 (sequence is synthesized)
gttagcaaaattatgaaagtttaggaaatttggctattgagtatattaagtacaactacaaaatcctctgagttctccaggaagcctaaaccttgagcagtatcttattcaagtggagta

SEQ ID NO: 500321 - DNA, 120 bp, Artificial Sequence
  ENSG00000163655_62 (sequence is synthesized)
tatatcttcaagaatacagatttttaaggtaagtagtttttcgtctttgcatctcctaagaccattgttaacaaccttgatattaaacgaagaagtgaatgtaaacctccttttgaacat

SEQ ID NO: 500322 - DNA, 120 bp, Artificial Sequence
  ENSG00000163655_63 (sequence is synthesized)
attttttataaagaaatattttgttaattggagtaagtagtattgttatgaaatcactgtgtaattgttaattgtaaactgcaatgtctattttgtgttgtaacaatgttgccataaaat

SEQ ID NO: 500323 - DNA, 120 bp, Artificial Sequence
  ENSG00000163655_64 (sequence is synthesized)
agctttgctaaatgtgaaatgactttaatcccttttgtcttcaatatacttcataaaggaggaaatgatgatttacacaatttgtcatgaagcttccgtgtttatgagaaattccaagaa

SEQ ID NO: 500324 - DNA, 120 bp, Artificial Sequence
  ENSG00000163655_65 (sequence is synthesized)
gtaagagccaagaggacagatattatcagaatatgggacataagaaattgcatatagtgtcaagggtttctatataacaacttaatttatttcccttgcatatatagtaggggttaacat

SEQ ID NO: 500325 - DNA, 120 bp, Artificial Sequence
  ENSG00000163655_66 (sequence is synthesized)
tttgctcaatgttaacgggggacataatggacataaaacattggatagctttttatttaaatgagctaaaggtgtgcgtatacacatgcacttataaaattaaagtcatatatgtatata

SEQ ID NO: 500326 - DNA, 80 bp, Artificial Sequence
  ENSG00000163655_67 (sequence is synthesized)
ccggagtagctgggattacaggcatgtgctgccatgcctggttaatttttttatttttaggagagatggctaagtgctat

SEQ ID NO: 500327 - DNA, 120 bp, Artificial Sequence
  ENSG00000163659_0 (sequence is synthesized)
agagatcgaggtgacaggcgagctggctggactcggagcgcggtcgaggctttctgcgttcgcggcggcggaatggcccgtgcgcggctcgccgcgtcgcggctctgtggtccctagacg

SEQ ID NO: 500328 - DNA, 120 bp, Artificial Sequence
  ENSG00000163659_1 (sequence is synthesized)
tcggctcccgccctcggcgctgatctccggcgcgggcactgctttccactcggctcctgtcgtccgttctctcaggctcccgttcaggatttttagactctgaggagcagttggagctaa

SEQ ID NO: 500329 - DNA, 120 bp, Artificial Sequence
  ENSG00000163659_2 (sequence is synthesized)
tccacattatggaaatggaaaccaccgaacctgagccagactgtgtagtgcagcctccctctcctcctgatgacttttcatgccaaatgagactctctgagaagatcactccattgaaga

SEQ ID NO: 500330 - DNA, 120 bp, Artificial Sequence
  ENSG00000163659_3 (sequence is synthesized)
cttgttttaagaaaaaggatcagaaaagattgggaactggaaccctgaggtctttgaggccaatattaaacactcttctagaatctggctcacttgatggggtttttagatctaggaacc

SEQ ID NO: 500331 - DNA, 120 bp, Artificial Sequence
  ENSG00000163659_4 (sequence is synthesized)
agagtacagatgagaacagcttacatgaacctatgatgaagaaagccatggaaatcaattcatcatgcccaccagcagaaaataatatgtctgttctgattcctgataggacaaatgttg

SEQ ID NO: 500332 - DNA, 120 bp, Artificial Sequence
  ENSG00000163659_5 (sequence is synthesized)
gggaccagataccggaagcccatccttccactgaagctccagaacgagtggttccaatccaagatcacagctttccatcagaaaccctcagtgggacggtggcagattccacaccagctc

SEQ ID NO: 500333 - DNA, 120 bp, Artificial Sequence
  ENSG00000163659_6 (sequence is synthesized)
acttccagactgatcttttgcacccagtttcaagtgatgttcctactagtcctgactgcttagacaaagtcatagattatgttccaggcattttccaagaaaacagttttacaatccaat

SEQ ID NO: 500334 - DNA, 120 bp, Artificial Sequence
  ENSG00000163659_7 (sequence is synthesized)
acattctggacaccagtgataagctgagtactgagctctttcaggacaaaagtgaagaggcttcccttgacctcgtgtttgagctggtgaaccagttgcagtaccacactcaccaagaga

SEQ ID NO: 500335 - DNA, 120 bp, Artificial Sequence
  ENSG00000163659_8 (sequence is synthesized)
acggaattgaaatttgcatggactttctgcaaggcacttgtatttatggcagggattgtttgaagcaccacactgtcttgccatatcattggcagatcaaaaggacaactactcaaaagt

SEQ ID NO: 500336 - DNA, 120 bp, Artificial Sequence
  ENSG00000163659_9 (sequence is synthesized)
ggcagagtgtattcaatgattctcaggagcacttggaaagattttactgtaacccagaaaatgatagaatgagaatgaagtatggaggacaagaattttgggcagatttgaatgccatga

SEQ ID NO: 500337 - DNA, 120 bp, Artificial Sequence
  ENSG00000163659_10 (sequence is synthesized)
acgtgtatgaaacaactgaatttgaccaactacgaaggctgtccacaccaccctctagcaatgtcaactctatttaccacacagtctggaaattcttctgtagggaccactttggatgga

SEQ ID NO: 500338 - DNA, 120 bp, Artificial Sequence
  ENSG00000163659_11 (sequence is synthesized)
gagagtatcccgagtctgtcattcgattgattgaagaagccaactctcggggtctgaaagaggttcgatttatgatgtggaataaccactacatcctccacaattcattcttcaggagag

SEQ ID NO: 500339 - DNA, 120 bp, Artificial Sequence
  ENSG00000163659_12 (sequence is synthesized)
agataaaaaggagacccctcttccgctcctgttttatactgcttccatatttacagacacttggtggggttcccacacaagctcctccacctcttgaagcaacttcatcatcacaaatta

SEQ ID NO: 500340 - DNA, 120 bp, Artificial Sequence
  ENSG00000163659_13 (sequence is synthesized)
tctgcccagatggggtcacttcagcaaacttttaccctgaaacttgggtttatatgcatccatctcaggacttcatccaagtccctgtttctgcagaggataaaagttatcggatcattt

SEQ ID NO: 500341 - DNA, 120 bp, Artificial Sequence
  ENSG00000163659_14 (sequence is synthesized)
acaatctttttcataagactgtgcctgagtttaaatacagaattttgcagatattgagagtccaaaaccagtttctttgggagaaatataaaaggaaaaaggaatatatgaacaggaaaa

SEQ ID NO: 500342 - DNA, 120 bp, Artificial Sequence
  ENSG00000163659_15 (sequence is synthesized)
tgtttggccgtgacaggataataaatgagagacatttatttcatggaacatcccaggatgtggtagatggaatctgcaaacacaactttgaccctcgagtctgtggaaagcatgctacaa

SEQ ID NO: 500343 - DNA, 120 bp, Artificial Sequence
  ENSG00000163659_16 (sequence is synthesized)
ttgcaaagaaggcaagctactctcataacttttctaagaagtcctccaaaggagtccacttcatgtttctggccaaagtgctgacgggcagatacacaatgggcagtcatggcatgagaa

SEQ ID NO: 500344 - DNA, 120 bp, Artificial Sequence
  ENSG00000163659_17 (sequence is synthesized)
ggcccccgccagtcaatcctggcagtgtcaccagtgacctttatgactcttgtgtggataatttctttgagcctcagatttttgtcatttttaatgatgaccagagttacccttattttg

SEQ ID NO: 500345 - DNA, 120 bp, Artificial Sequence
  ENSG00000163659_18 (sequence is synthesized)
ttatccaatatgaagaagtcagtaacactgtttccatttgaaaaatcttggtactgctaaattatttgatatgaactcaatccagcatttgtagcaggttttgaatgggtgggactgggt

SEQ ID NO: 500346 - DNA, 120 bp, Artificial Sequence
  ENSG00000163659_19 (sequence is synthesized)
ggggaacagcattggacattaatagggcacttttcagacccattttttaaagtgctagaaaatgctttttttaaaaaaaaaatacaagttttaaaatgaccacttactctttaattattt

SEQ ID NO: 500347 - DNA, 120 bp, Artificial Sequence
  ENSG00000163659_20 (sequence is synthesized)
actaattgctagtgtactcagtgtggaaaagactacagattacacactcttttcattcacacttgtacatatagacagcaatgttattaggagcattaaattaaaaaactgaacagccta

SEQ ID NO: 500348 - DNA, 120 bp, Artificial Sequence
  ENSG00000163659_21 (sequence is synthesized)
atttaaatgtggcttgggcctggtagaagtttgaccaaatggaatggaggctgtgagcaatgtgaggattctatttatttatttacgtttgataaaacttactggaactagtactaccat

SEQ ID NO: 500349 - DNA, 120 bp, Artificial Sequence
  ENSG00000163659_22 (sequence is synthesized)
gcgtattccctgtccaaagcatcactgctttggtatagtataagttcatgaaattctggtgggtagaaagaaatttttatttctatcagcagtactaaaatgtatcagccaaccagagaa

SEQ ID NO: 500350 - DNA, 120 bp, Artificial Sequence
  ENSG00000163659_23 (sequence is synthesized)
catcagtgactttaacttctgcagagtttgccccagaattcagagttctatttagaggaagttaaaacaacaacaaaaaacaaccatttgaaaaatttttgtcaccagcaaaacttttca

SEQ ID NO: 500351 - DNA, 120 bp, Artificial Sequence
  ENSG00000163659_24 (sequence is synthesized)
ctaattagtgatatgaaatgtgatttttgtgttgttaaacttcagctttggaaaactcagtctctttcattatcatccattccaatttgaaggagttgggcagctaatttggttaaaggc

SEQ ID NO: 500352 - DNA, 120 bp, Artificial Sequence
  ENSG00000163659_25 (sequence is synthesized)
agtcttgagggttagaagtattacttccttttcgggttccagacctagcttgtgactgaaagttttagaaaaaggaagtacatctatagccaaattgataaggttattactgtgttttgc

SEQ ID NO: 500353 - DNA, 120 bp, Artificial Sequence
  ENSG00000163659_26 (sequence is synthesized)
acaaagtatattagcaaaagtatttgctggaattattggtagatggcagtcccactcctacacctgctttgtcagatacagctgggttccctggctgactctgtaccttacttacactac

SEQ ID NO: 500354 - DNA, 120 bp, Artificial Sequence
  ENSG00000163659_27 (sequence is synthesized)
ttacttaatagaaacacaaacttggaaattgtgccagtggtccagctggagcacaacgtttggtgaatatgctgtttcctcagttcagagaggtagcaactaggtaaactccttataaaa

SEQ ID NO: 500355 - DNA, 120 bp, Artificial Sequence
  ENSG00000163659_28 (sequence is synthesized)
agcaaatacctggatttacaaaagtgaaagtagttgttcacaaaagaattcgccatggaattctttcagttaccaagctctcctggtaatgtttgtggttatatcatttacacaaaactt

SEQ ID NO: 500356 - DNA, 120 bp, Artificial Sequence
  ENSG00000163659_29 (sequence is synthesized)
ttcaggaacttctgtgttgtttaagcaagatgtatctgtactgatgtctcagtgaatcagtctgtttattaagcacttatcagggcttccacacacttatttattttgccctagttaatc

SEQ ID NO: 500357 - DNA, 120 bp, Artificial Sequence
  ENSG00000163659_30 (sequence is synthesized)
ctgttgtttgctgccattggcatgaaatggccaactgtggctgttacagttctttcattcaattataacttgtaaaccagtgactcctaatctttttcaagttaagacaccttaccattg

SEQ ID NO: 500358 - DNA, 120 bp, Artificial Sequence
  ENSG00000163659_31 (sequence is synthesized)
cttatttggttttatgagacttgttcctttttttctccctaaggaaaaagaaagctttatgacatatttatttttttaataaaactaagcaaaaataaaacttatggtaattctttaaaa

SEQ ID NO: 500359 - DNA, 120 bp, Artificial Sequence
  ENSG00000163659_32 (sequence is synthesized)
agtgcgagcgccggcctcgcggctccggccccggccccggccccgcgccggcagtgtgcggggctctcgcggatcggggtgattgattttgagactgccctttgtaccgaattcactcgg

SEQ ID NO: 500360 - DNA, 120 bp, Artificial Sequence
  ENSG00000163659_33 (sequence is synthesized)
gtcccgtcagcatgaagatggaattggtttacacttcttaggcacttagagcctgtggcaggtgtatacatcagaccgaggcgccgaaggatttagttggggtcgcaggcgcctgcccct

SEQ ID NO: 500361 - DNA, 120 bp, Artificial Sequence
  ENSG00000163659_34 (sequence is synthesized)
tccccgttcgtcagggtgggggcgcgtctatgcggcctcccccgcgggccgaccccgggtgctctgaggcgcctaggagcccttcccagaccccgggggggagggcacggcagctacggg

SEQ ID NO: 500362 - DNA, 120 bp, Artificial Sequence
  ENSG00000163659_35 (sequence is synthesized)
agccttccggctaccccgcgtttcgggctgcagcccagaagtttggaagatgttttcacattaactttgagagcgcacaagtcttcgtcttcctccccgccgccgcgggaagcgctcgcc

SEQ ID NO: 500363 - DNA, 120 bp, Artificial Sequence
  ENSG00000163659_36 (sequence is synthesized)
aaaagcataaagaatgtataacaacctaattgttacaagggagtggaattaataatctacaagaaggcacaaaaggacagaaaagaaacagaacaaatgagaaaaatagaaagccaacag

SEQ ID NO: 500364 - DNA, 120 bp, Artificial Sequence
  ENSG00000163659_37 (sequence is synthesized)
agagccgggcggcgcctcagctgcactgcgcggagttggcgcggcccgggaccaggagctgagcaaaccgccgcggccaacaggaggcgtcactcggacccgggctcggcgccggggtgt

SEQ ID NO: 500365 - DNA, 120 bp, Artificial Sequence
  ENSG00000163659_38 (sequence is synthesized)
cgcgcggcggcgggcgggcaggctttggagcggcagttttttcggaaagtgcttttggccgggagtgccgcagaaccccagcgtcacgaggatttttagactctgaggagcagttggagc

SEQ ID NO: 500366 - DNA, 120 bp, Artificial Sequence
  ENSG00000163660_0 (sequence is synthesized)
acgcggcgtgaagcggcccagaacccggcggtcacgggaatatccgtcgcgccgagaacgctggttagtcttgtttcgggttccggctgcgttgggcttgcgtgcggctcgctaagacta

SEQ ID NO: 500367 - DNA, 120 bp, Artificial Sequence
  ENSG00000163660_1 (sequence is synthesized)
tggcgtccgggcctcattcgacagctactgctgccgcagccgcctcatcggccgccccaagcgcgggcggctccagctccgggacgacgaccacgacgacgaccacgacgggagggatcc

SEQ ID NO: 500368 - DNA, 120 bp, Artificial Sequence
  ENSG00000163660_2 (sequence is synthesized)
tgatcggcgatcgcctgtactcggaagtttcacttaccatcgaccactctctgattccggaggagaggctctcgcccaccccatccatgcaggatgggctcgacctgcccagtgagacgg

SEQ ID NO: 500369 - DNA, 120 bp, Artificial Sequence
  ENSG00000163660_3 (sequence is synthesized)
acttacgcatcctgggctgcgagctcatccaggccgccggcattctcctccggctgccgcaggtggcgatggcaacggggcaggtgttgtttcatcgttttttctactccaaatctttcg

SEQ ID NO: 500370 - DNA, 120 bp, Artificial Sequence
  ENSG00000163660_4 (sequence is synthesized)
tcaaacacagtttcgagattgttgctatggcttgtattaatcttgcatcaaaaatcgaagaagcacctagaagaataagagatgtgattaatgtattccaccacctccgccagttaagag

SEQ ID NO: 500371 - DNA, 120 bp, Artificial Sequence
  ENSG00000163660_5 (sequence is synthesized)
gaaaaaggactccaagccccctgatccttgatcagaactacattaacaccaaaaatcaagttatcaaagcagagaggagggtgctaaaggagttgggattttgtgttcatgtcaagcatc

SEQ ID NO: 500372 - DNA, 120 bp, Artificial Sequence
  ENSG00000163660_6 (sequence is synthesized)
ctcataagatcattgttatgtatttacaagtcttagaatgtgaacgtaatcaaaccctggttcaaactgcctggaattacatgaatgacagtcttcgaaccaatgtgtttgttcgatttc

SEQ ID NO: 500373 - DNA, 120 bp, Artificial Sequence
  ENSG00000163660_7 (sequence is synthesized)
aaccagagactatagcatgtgcttgcatctaccttgcagctagagcacttcagattccgttgccaactcgtccccattggtttcttctttttggtactacagaagaggaaatccaggaaa

SEQ ID NO: 500374 - DNA, 120 bp, Artificial Sequence
  ENSG00000163660_8 (sequence is synthesized)
tctgcatagaaacacttaggctttataccagaaaaaagccaaactatgaattactggaaaaagaagtagaaaaaagaaaagtagccttacaagaagccaaattaaaagcaaagggattga

SEQ ID NO: 500375 - DNA, 120 bp, Artificial Sequence
  ENSG00000163660_9 (sequence is synthesized)
atgtgaagacagtcaaaaaagaacctgaggatagacaacaggcttccaaaagcccttacaatggtgtaagaaaagacagcaagagaagtagaaatagcagaagtgcaagtcgatcgaggt

SEQ ID NO: 500376 - DNA, 120 bp, Artificial Sequence
  ENSG00000163660_10 (sequence is synthesized)
caagaacacgatcacgttctagatcacatactccaagaagacactataataataggcggagtcgatctggaacatacagctcgagatcaagaagcaggtcccgcagtcacagtgaaagcc

SEQ ID NO: 500377 - DNA, 120 bp, Artificial Sequence
  ENSG00000163660_11 (sequence is synthesized)
ctcgaagacatcataatcatggttctcctcaccttaaggccaagcataccagagatgatttaaaaagttcaaacagacatggtcataaaaggaaaaaatctcgttctcgatctcagagca

SEQ ID NO: 500378 - DNA, 120 bp, Artificial Sequence
  ENSG00000163660_12 (sequence is synthesized)
agtctcgggatcactcagatgcagccaagaaacacaggcatgaaaggggacatcatagggacaggcgtgaacgatctcgctcctttgagaggtcccataaaagcaagcaccatggtggca

SEQ ID NO: 500379 - DNA, 120 bp, Artificial Sequence
  ENSG00000163660_13 (sequence is synthesized)
gtcgctcaggacatggcaggcacaggcgctgactttctcttcctttgagcctgcatcagttcttggttttgcctatctacagtgtgatgtatggactcaatcaaaaacattaaacgcaaa

SEQ ID NO: 500380 - DNA, 120 bp, Artificial Sequence
  ENSG00000163660_14 (sequence is synthesized)
ctgattaggatttgatttcttgaaaccctctaggtctctagaacactgaggacagtttcttttgaaaagaactatgttaatttttttgcacattaaaatgccctagcagtatctaattaa

SEQ ID NO: 500381 - DNA, 120 bp, Artificial Sequence
  ENSG00000163660_15 (sequence is synthesized)
aaaccatggtcaggttcaattgtactttattatagttgtgtattgtttattgctataagaactggagcgtgaattctgtaaaaatgtatcttatttttatacagataaaattgcagacac

SEQ ID NO: 500382 - DNA, 120 bp, Artificial Sequence
  ENSG00000163660_16 (sequence is synthesized)
tgttctatttaagtggttatttgtttaaatgatggtgaatactttcttaacactggtttgtctgcatgtgtaaagatttttacaaggaaataaaatacaaatcttgttttttctaaactg

SEQ ID NO: 500383 - DNA, 120 bp, Artificial Sequence
  ENSG00000163660_17 (sequence is synthesized)
cttcaaataccttatttaaataaattattaaaaaggaaaattttaatagcaaaatggctgtactggttttctgacaaacttattctttcctccattagatggtagtttgagattattaaa

SEQ ID NO: 500384 - DNA, 120 bp, Artificial Sequence
  ENSG00000163660_18 (sequence is synthesized)
atgcaattcttaactgcattgtgagctattgtaagtcttcactgtatatatggaaaaagtaaatgggagtcgcccaacaatgtgacattaaatgttatattttagcactaaaccaaaaaa

SEQ ID NO: 500385 - DNA, 120 bp, Artificial Sequence
  ENSG00000163660_19 (sequence is synthesized)
tttagaattaaaatgacttgggggcactgaaagtgtgtctttattagagagcttttacatttgaaagttgcatagagaaaaatgatgttaggaaactgctgctatgttctctcatggcag

SEQ ID NO: 500386 - DNA, 120 bp, Artificial Sequence
  ENSG00000163660_20 (sequence is synthesized)
tcaaccaacatggaagcggaagcatggtactttgagttacatttagaaacaacttttggccctctgttaaatccagtagttaacatgttgttattatatcttttaaaagcatcaccaaga

SEQ ID NO: 500387 - DNA, 120 bp, Artificial Sequence
  ENSG00000163660_21 (sequence is synthesized)
atgcctccgccctacttccccatactggcaaaaacacgctccccggggagctttcatttgggaaccgatagggtccacagccctgtgttcttcaaatactgtaaagcagccctctccaga

SEQ ID NO: 500388 - DNA, 120 bp, Artificial Sequence
  ENSG00000163660_22 (sequence is synthesized)
ttccttgagggtcactttatattacacattcgtccacacaggacaacaaagtcaccacttccacccgccaaagcgcgctcaggtcggccgccacttcccttggtacacgcggaacgcaag

SEQ ID NO: 500389 - DNA, 120 bp, Artificial Sequence
  ENSG00000163660_23 (sequence is synthesized)
ccgcgccgaggctaaaggaagaggccggaatgcagggcgaaggggcgcagagatgctagccaatgctgccacctctattttgggtataagggatcttgtaaagctccgttattcgtgtgg

SEQ ID NO: 500390 - DNA, 120 bp, Artificial Sequence
  ENSG00000163660_24 (sequence is synthesized)
ctatcacaaacaaggtggtttcgaccggccttggctagagaaggcctcctcagcctctgaggatcccaaggtctgtcgcagcacccaacactcccctcgcaggcccagatgccgagggcg

SEQ ID NO: 500391 - DNA, 120 bp, Artificial Sequence
  ENSG00000163660_25 (sequence is synthesized)
tgcaagtcgatcgaggtcaagaacacgatcacgttctagatcacatactccaagaagacaagacgaggtcttgctacgttgcccaggtcggtcacgaactcctggcctcaagtgatcctc

SEQ ID NO: 500392 - DNA, 120 bp, Artificial Sequence
  ENSG00000163660_26 (sequence is synthesized)
gcccatgacctcaggatggcctgattggctaccctgctctccagccaatccagtgcaagctctcatccgagattcactgaagtggtccatatccatctggcagcatcttctagttctgtc

SEQ ID NO: 500393 - DNA, 120 bp, Artificial Sequence
  ENSG00000163660_27 (sequence is synthesized)
gtcaaaaggatttgtatatttgcttctagaagtaactatttgacatgcctatgtatttaatgtatacttgtaactatcaaaatgaatagttcatttttgatagatttgttgtgcagccat

SEQ ID NO: 500394 - DNA, 120 bp, Artificial Sequence
  ENSG00000163660_28 (sequence is synthesized)
tatgaattaaatggtttattaggagtttgactaaatttttatttttagtgtgtatagcatgaatactaccaaaggagacgacaaacttgcagcttaaaatgggcaccagttcccacactg

SEQ ID NO: 500395 - DNA, 120 bp, Artificial Sequence
  ENSG00000163660_29 (sequence is synthesized)
gcttaatttatataactgcttggctgtattgcgggtaataatattagaagcaagaagcacttcatttttaaaagagatgttactataatattgcttaaatgctttagcacttggacttct

SEQ ID NO: 500396 - DNA, 120 bp, Artificial Sequence
  ENSG00000163660_30 (sequence is synthesized)
aatagcagtgggagattgtataccaactttagtgacactgatattagtaagttctgataacccactaccatcggaccagcctggagcacattactttggccagtggaaagtctcttggag

SEQ ID NO: 500397 - DNA, 120 bp, Artificial Sequence
  ENSG00000163660_31 (sequence is synthesized)
atcaaaccctggttcaaactgcctggtaagtcacttttttagatttctttcctagccaggaaaacagaagcagaaataaagtaagtttcgttttccctttccaaaataatgagataagtt

SEQ ID NO: 500398 - DNA, 120 bp, Artificial Sequence
  ENSG00000163660_32 (sequence is synthesized)
cggaggcgggtaaaagggatttcttcatccggaaatgggcagagtaggggtagtgtcagcagccagcttttccagaaagggagtggtttagtttaggcctttgtacctacttctcactcg

SEQ ID NO: 500399 - DNA, 120 bp, Artificial Sequence
  ENSG00000163660_33 (sequence is synthesized)
ccaggaagtggaaacctttagaatgtggttcaaaatcgatcacgagcctaagtgccctcttaacgaaaagtacagttttcaaccaaatgcagaactcctgtaagattgagtttgactctg

SEQ ID NO: 500400 - DNA, 120 bp, Artificial Sequence
  ENSG00000163660_34 (sequence is synthesized)
gaaccaaaattaagatgagttaaacaacaaaaagtatagtactagcatagctggtagacttacggcatagagatgtcttctctaattttactaaaggttgtcccaattgtgttctaaatt

SEQ ID NO: 500401 - DNA, 120 bp, Artificial Sequence
  ENSG00000163660_35 (sequence is synthesized)
tgatgtggagtggtacatagagatgaagctgtcgtcatggcaacagtgagtgaagtatcgaaaatccccaaggagaagccagtgctctgagaataggtcactggaatcggggactaacag

SEQ ID NO: 500402 - DNA, 120 bp, Artificial Sequence
  ENSG00000163660_36 (sequence is synthesized)
gaacaaattattaaaaacataataccccattggaggggaatctggattaactacccactgttcccaccccccccaacttttgaaaaattttggccatatagaatgcatgaaaaatcagta

SEQ ID NO: 500403 - DNA, 120 bp, Artificial Sequence
  ENSG00000163660_37 (sequence is synthesized)
agttaaatacatatatatacacacctagaatataagcagaatggaaaagttggcagggatgaattcaagaacattagagtgaatttttttcattacagaattgttagttcctttaggaac

SEQ ID NO: 500404 - DNA, 120 bp, Artificial Sequence
  ENSG00000163660_38 (sequence is synthesized)
ttagtctcgtagatgtatatatttaattagcataacttggacagcacaagattaatgctttaacttgtttgcaggagtttaaaaagctggtttctgttgccaatagttggttggaaggga

SEQ ID NO: 500405 - DNA, 120 bp, Artificial Sequence
  ENSG00000163660_39 (sequence is synthesized)
ctaaaaattttattttatatgaatttatgtttctatctgagtgttaaccttggttttaaaaagcattcttttaaaggttcaggcttcatcgaaaaacattcttttggatgttgagattta

SEQ ID NO: 500406 - DNA, 120 bp, Artificial Sequence
  ENSG00000163660_40 (sequence is synthesized)
tcagtaaaatgacagtcaaaaatgtaggttcaaatcttaaatcttaattgtgtgctcatagagaagttatttttgtttctgtggttaaagtcccagtttttccacctagaaaacagagat

SEQ ID NO: 500407 - DNA, 120 bp, Artificial Sequence
  ENSG00000163660_41 (sequence is synthesized)
gtaaagttcctcattccaaggaataaatgtgtagctacaaaagtatctggcacacttatcatcatagtagaatgttctaagtgtgttggctgctcactgttaccattattggaaatttgt

SEQ ID NO: 500408 - DNA, 120 bp, Artificial Sequence
  ENSG00000163660_42 (sequence is synthesized)
ttctcccaacatctcttagctttcattatcaatataagccatagagtgagttacccgggtcaggactacctgggttagaaatgtaccttgggaaattaggtgaaataatctagcacggtg

SEQ ID NO: 500409 - DNA, 120 bp, Artificial Sequence
  ENSG00000163660_43 (sequence is synthesized)
cccatcacatagtaaagtgccaatgaaaaatattcttttaattgccttttttcctgtacaattttgaaatatgcttctaaacataatttatataaaatctagtcatgtagcagttcacat

SEQ ID NO: 500410 - DNA, 120 bp, Artificial Sequence
  ENSG00000163660_44 (sequence is synthesized)
tagaatcttatgtacatttaaattggtctgtattatcgatgcacaattagaacttgagtctaacattttcaattacttttttcattgaactctactccgaaagaactaccagtatactga

SEQ ID NO: 500411 - DNA, 120 bp, Artificial Sequence
  ENSG00000163660_45 (sequence is synthesized)
taatgcttatttctgcttcctgttttcttggcttgactaattacttttaatggagaactcaatttaactttgttcttttttctactctttaattaaagggtagtccatgatggtaagtca

SEQ ID NO: 500412 - DNA, 120 bp, Artificial Sequence
  ENSG00000163660_46 (sequence is synthesized)
ctattgatgtgaaggacttagtgaagtaatttttatattctgggcttcccagcaagatgtcctttttatgactgccatgcttcttttggactcagtaaatatttgtaatgttagaaaagt

SEQ ID NO: 500413 - DNA, 120 bp, Artificial Sequence
  ENSG00000163660_47 (sequence is synthesized)
ctcattatttttataaaatgcatgacattttaagtatgtgttgcataaaatggattatagcagttctcatggtttaggatttttaagaaatagtccatttaatttcagcttaacctttta

SEQ ID NO: 500414 - DNA, 120 bp, Artificial Sequence
  ENSG00000163660_48 (sequence is synthesized)
aatgatctgtaaaatttctttgatagtttaggaatgttgtggggagggttcattaataaaagttcagcaattttttaactgaaatagtttatctcttttacctagtcacaaaaaaggtat

SEQ ID NO: 500415 - DNA, 120 bp, Artificial Sequence
  ENSG00000163660_49 (sequence is synthesized)
gtaaacaaggccattatatgtgtttattgctctttatttccctatctagattttctaagtatcttagctttcttaatataagtttaacttggtacttactgaaaatgcctttttacccct

SEQ ID NO: 500416 - DNA, 120 bp, Artificial Sequence
  ENSG00000163660_50 (sequence is synthesized)
gttaacggtattttgagcttttgaaaagaacttggttgacactgcttttattgtggataaaggagagatggtcagtaattaatggcttgaagtattattggagtggtttatcatttctga

SEQ ID NO: 500417 - DNA, 120 bp, Artificial Sequence
  ENSG00000163660_51 (sequence is synthesized)
aactaatcgtgtcagaattgactttgaaaagcattgctttttacagaaatatattaactttttaggagtaatttctagtttggattgtaatatgaaataatttaaaagggcttcgctcat

SEQ ID NO: 500418 - DNA, 120 bp, Artificial Sequence
  ENSG00000163660_52 (sequence is synthesized)
atataggaaaatcgcatatggtcctagtattaaattcttattgcttactgatttttttgagttaagagttgttatatgctagaatatgaggatgtgaatataaataagagaagaaaaaag

SEQ ID NO: 500419 - DNA, 120 bp, Artificial Sequence
  ENSG00000163660_53 (sequence is synthesized)
aataaagtagattgagtctccaattttatgtaagcttcagaagaactggtttgtttacatgcaagcttatagttgaaatatttttcaggaattacatgaatgacagtcttcgaaccaatg

SEQ ID NO: 500420 - DNA, 120 bp, Artificial Sequence
  ENSG00000163660_54 (sequence is synthesized)
gttagaattaggcttttagtatgaggcaaattatgagaaatgagtttggagatgttctggacatacagtatcttaatggcattctgttatattttctcccatgttttttggagaagtgta

SEQ ID NO: 500421 - DNA, 120 bp, Artificial Sequence
  ENSG00000163660_55 (sequence is synthesized)
ggagctacccacaaagtgcttgagggccatagtattgttcataatgtgaaaacttctttttttttttttaatttcagttagaaaatgtgtttcattaaccccttattaataaccaataat

SEQ ID NO: 500422 - DNA, 120 bp, Artificial Sequence
  ENSG00000163660_56 (sequence is synthesized)
tttcccattttgttctgtaggataaatcacacaaattttcggtggttccaatacagatttagcaaaaatttaatttaaaacattctgttcttatggtttagattccgttgccaactcgtc

SEQ ID NO: 500423 - DNA, 120 bp, Artificial Sequence
  ENSG00000163660_57 (sequence is synthesized)
aggtattctctatttactcgtttgtgccaacatgctaagagtccaagctactctaaggaagaaatactaacttttttttcctccaacagccaaactatgaattactggaaaaagaagtag

SEQ ID NO: 500424 - DNA, 120 bp, Artificial Sequence
  ENSG00000163660_58 (sequence is synthesized)
tcaagtgaatacggatgcaaaagaaaacggactttaatttaggtgttaaagttcatataggaacactgatacttaaaataatttgaaaaaagaaacataattaaccggttatctaaagtt

SEQ ID NO: 500425 - DNA, 120 bp, Artificial Sequence
  ENSG00000163660_59 (sequence is synthesized)
tttaaatggaagaaagtaaggaaaatgtatgataactgactttttactctgatgttaccataggggtaatgaagttcatcgcagattgttttctaaccttcggtgcatgtattgaaatag

SEQ ID NO: 500426 - DNA, 120 bp, Artificial Sequence
  ENSG00000163660_60 (sequence is synthesized)
atttttgttttaaaaatatgagattacatttttctggatctggtgtgcattggggtagagaggatgactgtcttaaaaatagatcgtgtattctgcctagagcaaagactcttaagtctt

SEQ ID NO: 500427 - DNA, 120 bp, Artificial Sequence
  ENSG00000163660_61 (sequence is synthesized)
ttggctgaaaatgaactgagtatggacaaaaatattgaagtattctacttgtaaacttaccgtataatcagtgtcttgataaaatagtagtttttgttggttgaatctaagaatgtgttg

SEQ ID NO: 500428 - DNA, 120 bp, Artificial Sequence
  ENSG00000163660_62 (sequence is synthesized)
gacttgggtaaatttcagacatgaccaacaacaaaaaacaaaagcccaattccttaacctttcctgactgaaacttctcaggaagaaaccagttttgaattgtatgacataaataagatt

SEQ ID NO: 500429 - DNA, 120 bp, Artificial Sequence
  ENSG00000163660_63 (sequence is synthesized)
gtcttttattataagtttttaaactatgtaataaaacatttggggataacatcagttgaatgtgctacttttaaagcattaaaccactgacataagccttctgtattatagaaacttctg

SEQ ID NO: 500430 - DNA, 120 bp, Artificial Sequence
  ENSG00000163660_64 (sequence is synthesized)
agttaccaaaatttagtctggtacagagcccttgaatatgttgtggttccctcattatggcccttcattcccttctgtgttaatagtaaagcatgttgcctaataactacaaccctgacc

SEQ ID NO: 500431 - DNA, 120 bp, Artificial Sequence
  ENSG00000163661_0 (sequence is synthesized)
actctcactctcctccgctcaaactcagctcacttgagagtctcctcccgccagctgtggaaagaactttgcgtctctccagcaatgcatctccttgcgattctgttttgtgctctctgg

SEQ ID NO: 500432 - DNA, 120 bp, Artificial Sequence
  ENSG00000163661_1 (sequence is synthesized)
tctgcagtgttggccgagaactcggatgattatgatctcatgtatgtgaatttggacaacgaaatagacaatggactccatcccactgaggaccccacgccgtgcgcctgcggtcaggag

SEQ ID NO: 500433 - DNA, 120 bp, Artificial Sequence
  ENSG00000163661_2 (sequence is synthesized)
cactcggaatgggacaagctcttcatcatgctggagaactcgcagatgagagagcgcatgctgctgcaagccacggacgacgtcctgcggggcgagctgcagaggctgcgggaggagctg

SEQ ID NO: 500434 - DNA, 120 bp, Artificial Sequence
  ENSG00000163661_3 (sequence is synthesized)
ggctcgcggaaagcctggcgaggccgtgcgcgccgggggctcccgcagaggccaggctgaccagtgctctggacgagctgctgcaggcgacccgcgacgcgggccgcaggctggcgcgta

SEQ ID NO: 500435 - DNA, 120 bp, Artificial Sequence
  ENSG00000163661_4 (sequence is synthesized)
cgtatggagggcgcggaggcgcagcgcccagaggaggcggggcgcgccctggccgcggtgctagaggagctgcggcagacgcgagccgacctgcacgcggtgcagggctgggctgcccgg

SEQ ID NO: 500436 - DNA, 120 bp, Artificial Sequence
  ENSG00000163661_5 (sequence is synthesized)
agctggctgccggcaggttgtgaaacagctattttattcccaatgcgttccaagaagatttttggaagcgtgcatccagtgagaccaatgaggcttgagtcttttagtgcctgcatttgg

SEQ ID NO: 500437 - DNA, 120 bp, Artificial Sequence
  ENSG00000163661_6 (sequence is synthesized)
gtcaaagccacagatgtattaaacaaaaccatcctgttttcctatggcacaaagaggaatccatatgaaatccagctgtatctcagctaccaatccatagtgtttgtggtgggtggagag

SEQ ID NO: 500438 - DNA, 120 bp, Artificial Sequence
  ENSG00000163661_7 (sequence is synthesized)
acatccttgtgggtaaatggtgaactggcggctaccactgttgagatggccacaggtcacattgttcctgagggaggaatcctgcagattggccaagaaaagaatggctgctgtgtgggt

SEQ ID NO: 500439 - DNA, 120 bp, Artificial Sequence
  ENSG00000163661_8 (sequence is synthesized)
ggtggctttgatgaaacattagccttctctgggagactcacaggcttcaatatctgggatagtgttcttagcaatgaagagataagagagaccggaggagcagagtcttgtcacatccgg

SEQ ID NO: 500440 - DNA, 120 bp, Artificial Sequence
  ENSG00000163661_9 (sequence is synthesized)
gggaatattgttgggtggggagtcacagagatccagccacatggaggagctcagtatgtttcataaatgttgtgaaactccacttgaagccaaagaaagaaactcacacttaaaacacat

SEQ ID NO: 500441 - DNA, 120 bp, Artificial Sequence
  ENSG00000163661_10 (sequence is synthesized)
gccagttgggaaggtctgaaaactcagtgcataataggaacacttgagactaatgaaagagagagttgagaccaatctttatttgtactggccaaatactgaataaacagttgaaggaaa

SEQ ID NO: 500442 - DNA, 120 bp, Artificial Sequence
  ENSG00000163661_11 (sequence is synthesized)
gacattggaaaaagcttttgaggataatgttactagactttatgccatggtgctttcagtttaatgctgtgtctctgtcagataaactctcaaataattaaaaaggactgtattgttgaa

SEQ ID NO: 500443 - DNA, 120 bp, Artificial Sequence
  ENSG00000163661_12 (sequence is synthesized)
cagagggacaattgttttacttttctttggttaattttgttttggccagagatgaattttacattggaagaataacaaaataagatttgttgtccattgttcattgttattggtatgtac

SEQ ID NO: 500444 - DNA, 120 bp, Artificial Sequence
  ENSG00000163661_13 (sequence is synthesized)
cttattacaaaaaaaagatgaaaacatatttatactacaaggtgacttaacaactataaatgtagtttatgtgttataatcgaatgtcacgtttttgagaagatagtcatataagttata

SEQ ID NO: 500445 - DNA, 120 bp, Artificial Sequence
  ENSG00000163661_14 (sequence is synthesized)
ttgcaaaagggatttgtattaatttaagactatttttgtaaagctctactgtaaataaaatattttataaaactagctcacgtcatttaattataaatttaagagatgttttggagcaaa

SEQ ID NO: 500446 - DNA, 120 bp, Artificial Sequence
  ENSG00000163666_0 (sequence is synthesized)
atacacgtggggcagagccagcagaggccagagctgttgctctgtgcagaccacgagaggatgtctcccagccttcaggaaggcgctcagctcggggaaaacaaaccctcaacttgctcc

SEQ ID NO: 500447 - DNA, 120 bp, Artificial Sequence
  ENSG00000163666_1 (sequence is synthesized)
ttttcaattgagagaatcttaggactggaccagaagaaagactgtgttccattaatgaaaccccacaggccctgggcagacacctgcagctcatcagggaaagatggtaacttatgtcta

SEQ ID NO: 500448 - DNA, 120 bp, Artificial Sequence
  ENSG00000163666_2 (sequence is synthesized)
catgtcccaaatcctcccagtgggatttcattccctagcgtggtggatcacccaatgccagaagaaagagcttcgaaatatgaaaattacttttcagcctcagaaagactgtctttgaaa

SEQ ID NO: 500449 - DNA, 120 bp, Artificial Sequence
  ENSG00000163666_3 (sequence is synthesized)
agagagttgagttggtatagaggccgaagaccaagaactgcttttactcaaaaccagattgaagtgttagaaaatgtctttagagtaaactgctatcctggtatcgatattagagaagac

SEQ ID NO: 500450 - DNA, 120 bp, Artificial Sequence
  ENSG00000163666_4 (sequence is synthesized)
tctagaggaagacagaatccagatttggtttcaaaatcggcgtgcaaaactgaaaaggtcccatagagaatcacagtttctaatggcgaaaaaaaatttcaacacaaatctgctggaata

SEQ ID NO: 500451 - DNA, 120 bp, Artificial Sequence
  ENSG00000163666_5 (sequence is synthesized)
gatagaaaactaaacaagtgaaattatcttctaattgcagagcatgaagaatcagtggaaatattaagtgttaaaatgtgatgttttctttcctgcatttaatctgaatattgtcatttt

SEQ ID NO: 500452 - DNA, 120 bp, Artificial Sequence
  ENSG00000163666_6 (sequence is synthesized)
gtcattttttctgaaaatatattgtaaatactattatagcatggtacatatttgggcacttttagttatagtaaagaccttttatatatattttaataaacattttcagaaaagattgct

SEQ ID NO: 500453 - DNA, 120 bp, Artificial Sequence
  ENSG00000163666_7 (sequence is synthesized)
agtaagccaaattaatctaataaattagtttgttaaaatcaatagactcatgactaagtgattccacaagctggattctaattataaagtatttcaagtaaaataatctgaagaacaaaa

SEQ ID NO: 500454 - DNA, 120 bp, Artificial Sequence
  ENSG00000163666_8 (sequence is synthesized)
gagcgcgggcgtcggaagcggcggaggtggcagtgtctgccctgggatggccttccctgcacgcgcgcgtttaacaccatgcaccccagctctaaagaaggaagactttcaagaatggag

SEQ ID NO: 500455 - DNA, 84 bp, Artificial Sequence
  ENSG00000163666_9 (sequence is synthesized)
gcaccccagctctaaagaaggaagactttcaagaatggagtgtagtggcatgatcacagttcattgcagcctcaacctcctacg

SEQ ID NO: 500456 - DNA, 120 bp, Artificial Sequence
  ENSG00000163666_10 (sequence is synthesized)
tttttagtgttacaatctttaaaagttttccccttagattgtttatcagccagtctctctctcccgaagagttctttagtttttgaggaagttgatttggaggcagttcttacaatgagt

SEQ ID NO: 500457 - DNA, 120 bp, Artificial Sequence
  ENSG00000163666_11 (sequence is synthesized)
taagggttcccagttgtgttacagtttctttttccttgatatctcatttctactctgccaacaagaacaccatgcaccccagctctaaagaaggaagactttcaagcccccttgtcagcg

SEQ ID NO: 500458 - DNA, 120 bp, Artificial Sequence
  ENSG00000163673_0 (sequence is synthesized)
gactcttgttggtgtttcatgggcagcaaaactggccctttttatctcagctgtagatccttgaaggacagcaaggcctatgtgaccattctctaaaatatttaagctcgagaatcacag

SEQ ID NO: 500459 - DNA, 120 bp, Artificial Sequence
  ENSG00000163673_1 (sequence is synthesized)
agcggaagctgcaaggctcctggctgcctgccagccgagggaatctggagaaaccattcctggggccgcgtggccccgtcgtgcccttgttctgccctcggaatggccttcactcagcac

SEQ ID NO: 500460 - DNA, 120 bp, Artificial Sequence
  ENSG00000163673_2 (sequence is synthesized)
atcctgagaacagccctctgaagcccagggtcgtgaccgtagtgaagctgggtgggcagcgcccccgaaagatcactctgctcctcaacaggcgatcagtgcagacgttcgagcagctct

SEQ ID NO: 500461 - DNA, 120 bp, Artificial Sequence
  ENSG00000163673_3 (sequence is synthesized)
tagctgacatctcagaagccttgggctctcccagatggaagaatgaccgtgtgaggaaactgtttaacctcaagggcagggaaatcaggagcgtctctgatttcttcagggaaggggatg

SEQ ID NO: 500462 - DNA, 120 bp, Artificial Sequence
  ENSG00000163673_4 (sequence is synthesized)
ctttcatagctatgggcaaagaaccactgacactgaagagcattcaggtggctgtagaagaactgtaccccaacaaagcccgggccctgacactggcccagcacagccgtgccccttctc

SEQ ID NO: 500463 - DNA, 120 bp, Artificial Sequence
  ENSG00000163673_5 (sequence is synthesized)
caaggctgaggagcaggctgtttagcaaggctctgaaaggagaccaccgctgtggggagaccgagacccccaagagctgcagcgaagttgcaggatgcaaggcagccatgaggcaccagg

SEQ ID NO: 500464 - DNA, 120 bp, Artificial Sequence
  ENSG00000163673_6 (sequence is synthesized)
ggaagatccccgaggagctttcactagatgacagagcgaggacccagaagaagtgggggagggggaaatgggagccagaacccagtagcaagccccccagggaagccactctggaagaga

SEQ ID NO: 500465 - DNA, 120 bp, Artificial Sequence
  ENSG00000163673_7 (sequence is synthesized)
ggcacgcaaggggagagaagcatcttggggtggagattgaaaagacctcgggtgaaattatcagatgcgagaagtgcaagagagagagggagctccagcagagcctggagcgtgagaggc

SEQ ID NO: 500466 - DNA, 120 bp, Artificial Sequence
  ENSG00000163673_8 (sequence is synthesized)
tttctctggggaccagtgagctggatatggggaagggcccaatgtatgatgtggagaagctggtgaggaccagaagctgcaggaggtctcccgaggcaaatcctgcaagtggggaggaag

SEQ ID NO: 500467 - DNA, 120 bp, Artificial Sequence
  ENSG00000163673_9 (sequence is synthesized)
ggtggaagggtgacagccacaggagcagccccaggaatcccactcaagagctgaggagacccagcaagagcatggacaagaaagaggacagaggcccagaggatcaagaaagccatgctc

SEQ ID NO: 500468 - DNA, 120 bp, Artificial Sequence
  ENSG00000163673_10 (sequence is synthesized)
agggagcagccaaggccaagaaggaccttgtggaagttcttcctgtcacagaggaggggctgagggaggtgaagaaggacaccaggcccatgagcaggagcaaacatggtggctggctcc

SEQ ID NO: 500469 - DNA, 120 bp, Artificial Sequence
  ENSG00000163673_11 (sequence is synthesized)
tgagagagcaccaggcgggctttgagaagctccgcaggacccgaggagaagagaaggaggcagagaaggagaaaaagccatgtatgtctggaggcagaaggatgactctcagagatgacc

SEQ ID NO: 500470 - DNA, 120 bp, Artificial Sequence
  ENSG00000163673_12 (sequence is synthesized)
aacctgcaaagctagaaaaggagcccaagacgaggccagaagagaacaagccagagcggcccagcggtcggaagccacggcccatgggcatcattgccgccaatgtggaaaagcattatg

SEQ ID NO: 500471 - DNA, 120 bp, Artificial Sequence
  ENSG00000163673_13 (sequence is synthesized)
agactggccgggtcattggggatgggaactttgctgtcgtgaaggagtgcagacaccgcgagaccaggcaggcctatgcgatgaagatcattgacaagtccagactcaagggcaaggagg

SEQ ID NO: 500472 - DNA, 120 bp, Artificial Sequence
  ENSG00000163673_14 (sequence is synthesized)
acatggtggacagtgagatcttgatcatccagagcctctctcaccccaacatcgtgaaattgcatgaagtctacgaaacagacatggaaatctacctgatcctggagtacgtgcagggag

SEQ ID NO: 500473 - DNA, 120 bp, Artificial Sequence
  ENSG00000163673_15 (sequence is synthesized)
gagacctttttgacgccatcatagaaagtgtgaagttcccggagcccgatgctgccctcatgatcatggacttatgcaaagccctcgtccacatgcacgacaagagcattgtccaccggg

SEQ ID NO: 500474 - DNA, 120 bp, Artificial Sequence
  ENSG00000163673_16 (sequence is synthesized)
acctcaagccggaaaaccttttggttcagcgaaatgaggacaaatctactaccttgaaattggctgattttggacttgcaaagcatgtggtgagacctatatttactgtgtgtgggaccc

SEQ ID NO: 500475 - DNA, 120 bp, Artificial Sequence
  ENSG00000163673_17 (sequence is synthesized)
caacttacgtagctcccgaaattctttctgagaaaggttatggactggaggtggacatgtgggctgctggcgtgatcctctatatcctgctgtgtggctttcccccattccgcagccctg

SEQ ID NO: 500476 - DNA, 120 bp, Artificial Sequence
  ENSG00000163673_18 (sequence is synthesized)
agagggaccaggacgagctctttaacatcatccagctgggccactttgagttcctccccccttactgggacaatatctctgatgctgctaaagatctggtgagccggttgctggtggtag

SEQ ID NO: 500477 - DNA, 120 bp, Artificial Sequence
  ENSG00000163673_19 (sequence is synthesized)
accccaaaaagcgctacacagctcatcaggttcttcagcacccctggatcgaaacagctggcaagaccaatacagtgaaacgacagaagcaggtgtcccccagcagcgagggtcacttcc

SEQ ID NO: 500478 - DNA, 120 bp, Artificial Sequence
  ENSG00000163673_20 (sequence is synthesized)
ggagccagcacaagagggttgtggagcaggtatcatagtcaccaccttgggaatctgtccagcccccagttctgctcaaggacagagaaaaggatagaagtttgagagaaaaacaatgaa

SEQ ID NO: 500479 - DNA, 120 bp, Artificial Sequence
  ENSG00000163673_21 (sequence is synthesized)
agaggcttcttcacataattggtgaatcagagggagagacactgagtatattttaaagcatattaaaaaaattaagtcaatgttaaatgtcacaacatatttttagatttgtatatttaa

SEQ ID NO: 500480 - DNA, 120 bp, Artificial Sequence
  ENSG00000163673_22 (sequence is synthesized)
tgttttgcttcccctttgtaaccaagtttattctgtactacaggagtggtgcttaccagggtctaaactccccctgtgagattaataaggtgcattgtggtctttctgtgttaataaaat

SEQ ID NO: 500481 - DNA, 120 bp, Artificial Sequence
  ENSG00000163673_23 (sequence is synthesized)
gtgctctgaataacagaagtgggcctgtattctgattacttctttgtgctggtgatgacagcacaaaaattcaaaaatgaattatagttcaggcatatctcctgaagctgatatgactac

SEQ ID NO: 500482 - DNA, 120 bp, Artificial Sequence
  ENSG00000163673_24 (sequence is synthesized)
atatagatgtgaaggacacttgattagttgacaagacctgtttatttaggatgcactaatcttggtctcttgcatttcagtcttaccaaaaatcagttttggtgcagtctgagacatgga

SEQ ID NO: 500483 - DNA, 120 bp, Artificial Sequence
  ENSG00000163673_25 (sequence is synthesized)
aagaaaaaaaacaaaccattgaatcattcttgctcctgcaataccgttatactgcttttcagccccaattatccctgagcctgagtcatttctatgtgaagtcaggcgctcaggctgtga

SEQ ID NO: 500484 - DNA, 120 bp, Artificial Sequence
  ENSG00000163673_26 (sequence is synthesized)
ccgtgttaacattttcagatcacgagggagccatttagtacattaatatgtcagaaatgcagtaaatggattacactggggctcgaaggagctcagagttcaagcacattcctacctgca

SEQ ID NO: 500485 - DNA, 120 bp, Artificial Sequence
  ENSG00000163673_27 (sequence is synthesized)
gggcatacacccaggacacattccagatttctgtgctgaaatattggtctttgcagatgattctgggagtctgtgtgagctgacagcaagacatatcctaatatttcccaaattgacctt

SEQ ID NO: 500486 - DNA, 120 bp, Artificial Sequence
  ENSG00000163673_28 (sequence is synthesized)
cctagattatgaatgacctggttagtaggccacaaaatctagtcaagagtgtggctttttcacgtctaccttccctaacagttttggagccatctgggcggaggcgtgtgttagttagga

SEQ ID NO: 500487 - DNA, 120 bp, Artificial Sequence
  ENSG00000163673_29 (sequence is synthesized)
aaaccggaatagtactagagaattcaacataaggaattgcttaatcaggttttggaaaatggaagaagcacaaaggaggctctggtataatttagagatagtaactgcaggaagtggctc

SEQ ID NO: 500488 - DNA, 120 bp, Artificial Sequence
  ENSG00000163673_30 (sequence is synthesized)
ctgttctttggagaaccaagggaagaagttggggttattagaacctattgaaggagaaatttcttgtagtggacactgtagtatgccactcaggtcctccaagactgaagggaataagct

SEQ ID NO: 500489 - DNA, 120 bp, Artificial Sequence
  ENSG00000163673_31 (sequence is synthesized)
ccttggggtgctgctggatgatggctctcagctttcagccctctacaggaattaccctccactggaagagacacctttcagctccctcctgaagcaggctatatcaaatgactagtccct

SEQ ID NO: 500490 - DNA, 120 bp, Artificial Sequence
  ENSG00000163673_32 (sequence is synthesized)
gtagggtatggtggctcagctcctttgtcccaaacagggacaatactgaagggccatccaactacggacctgcccatgggggttggctgaactgttggttgagactgcatcatagcccac

SEQ ID NO: 500491 - DNA, 120 bp, Artificial Sequence
  ENSG00000163673_33 (sequence is synthesized)
tttctcccttgcccaatcctgcttctttcctttcccttccagaggtaatgatcctgagaccactccctaataagccttttggatgctaatctggattttagagttggcttctcgggaaac

SEQ ID NO: 500492 - DNA, 120 bp, Artificial Sequence
  ENSG00000163673_34 (sequence is synthesized)
caaaccgttgacaccccctagaaacttgaaaccacatcaaagaagtaccagctggtgctttaacctcagaagcttggagaaggggccctgtggagcagggactcagacccctgaggagtg

SEQ ID NO: 500493 - DNA, 120 bp, Artificial Sequence
  ENSG00000163673_35 (sequence is synthesized)
ggtgctgcccagcaggcagtgtaatgggactcattctgaacacgtgaaagaggctggaagctggattcagttgctactagaacatattttgataaagacaccagtaaccttcatttcact

SEQ ID NO: 500494 - DNA, 120 bp, Artificial Sequence
  ENSG00000163673_36 (sequence is synthesized)
aaatccaaaagagaattttcaatcctcaaattagcatcacttgaccctattgaccactttctctttgaataatttctcctgttgactaccatgatgtcacatttttctggtttttttttc

SEQ ID NO: 500495 - DNA, 120 bp, Artificial Sequence
  ENSG00000163673_37 (sequence is synthesized)
tcctatacctttggatctcttgtatagattcagtcttcttccagttgctaaaagctgtagttgcatccttagtggctagggaaatgcaaattaaaatcacaatgaaatatcactatacac

SEQ ID NO: 500496 - DNA, 120 bp, Artificial Sequence
  ENSG00000163673_38 (sequence is synthesized)
ccattagaatagctaaaattaaatggctaaaatgagaagactgaccttaccaactactagcgaggatgcagagtgactggaacttcccgtacattgctgctgggagtataaaatgggact

SEQ ID NO: 500497 - DNA, 120 bp, Artificial Sequence
  ENSG00000163673_39 (sequence is synthesized)
tctcctttggagaatggtttggtagttcctttaaaagttaaacatgtacctaccatatgatattccacttctagatgtttacccagcagaaattcaagcatatgtcctatgaagacttca

SEQ ID NO: 500498 - DNA, 120 bp, Artificial Sequence
  ENSG00000163673_40 (sequence is synthesized)
caatatttataggtgctttatttgtagtagccccaaagtggaaacatcttgaatgggcatgatttggtgcatggataaacagattgtatatccacacaatgaataacagccacaaaaaag

SEQ ID NO: 500499 - DNA, 120 bp, Artificial Sequence
  ENSG00000163673_41 (sequence is synthesized)
ggatgaactattcatacacgaacaacatggatggactgccaaagaattaggctgaatgaaagaagaaaaaaaagactacattttgattatttcatttacatactattccagaaaatacaa

SEQ ID NO: 500500 - DNA, 120 bp, Artificial Sequence
  ENSG00000163673_42 (sequence is synthesized)
gtgaatctatagtgacagaaagtgatcagggggtttgctggagatggaaatggggagaggagggacagaaggattgcaagggaacacttggtaactttggggaagagggacgtgttcatt

SEQ ID NO: 500501 - DNA, 120 bp, Artificial Sequence
  ENSG00000163673_43 (sequence is synthesized)
ttcttgaatgtaataatggatttatgggggtatatatgtcaaaacttaccaaattgtacacttttgttatgtgcagtttattgtgtgtcaattatacctcaataaagttgttaaaaatat

SEQ ID NO: 500502 - DNA, 80 bp, Artificial Sequence
  ENSG00000163673_44 (sequence is synthesized)
cgccttcccgcgcctgctcgaccgtcgagccgcgtccccgcgctgccacctctgctccaggctctccccgagcccgccgc

SEQ ID NO: 500503 - DNA, 120 bp, Artificial Sequence
  ENSG00000163681_0 (sequence is synthesized)
ctggactacggcgcgggagagggggtaggagggcccttgaagggtgcgcgttcccgtggcggtgcaccgggtaggtttcagtcagagtcactatggcggccggcgctggcaaggtcggaa

SEQ ID NO: 500504 - DNA, 120 bp, Artificial Sequence
  ENSG00000163681_1 (sequence is synthesized)
agtttcctgcctcgtcgggcgcagcttgagcttgccccatcggccgcgatcggtggaggctgcggcggatccagcccggggcctcaaggcctctccccaacctccgggccagtctccctc

SEQ ID NO: 500505 - DNA, 120 bp, Artificial Sequence
  ENSG00000163681_2 (sequence is synthesized)
ccccaccttctcgtccgccgggagctgcggctgccgtccctgagatgcgaccctcgcgggggcgaccctgaggggaggcggcccatgtgctgagcggcggcccagaagcctaggcgtccg

SEQ ID NO: 500506 - DNA, 120 bp, Artificial Sequence
  ENSG00000163681_3 (sequence is synthesized)
gggaccaacttcctgccgcctgggaactcgagcctcccggtgtcgcgcctcgctcggtccgcaccggcctgcggagccgggtccccgccctggtcgcggggacgctcgccaggtgcccag

SEQ ID NO: 500507 - DNA, 120 bp, Artificial Sequence
  ENSG00000163681_4 (sequence is synthesized)
gagtcccgacttggccactgcccgcgccccgccggcctccacgcctcgcgcggagaacctcagccaccgccgtctcggatcgtgccaggccggggaccgcgtcccccttcccggggcggc

SEQ ID NO: 500508 - DNA, 120 bp, Artificial Sequence
  ENSG00000163681_5 (sequence is synthesized)
ctccgctcagcaggggcgatgcagactgtcccgccggccgtctagagcccctccgtctccgtcacctctcgccccttcactccgggcgaggactggcggtggctgcccagaggtgcccag

SEQ ID NO: 500509 - DNA, 120 bp, Artificial Sequence
  ENSG00000163681_6 (sequence is synthesized)
ccacaccttccttcggcccaaaaggactttcctggccgcgccgaaccgacccttcattcatgctgcagtgctgcaacgtttccgccaccaagggggaaaagcggccgcgatctcaaacca

SEQ ID NO: 500510 - DNA, 120 bp, Artificial Sequence
  ENSG00000163681_7 (sequence is synthesized)
aacacaagaattggcgtgtgactcatctgcttggatacctccagtccccaaactgtgttccaggagttttcttggccgaagctgcccgatgtttgagccttttcttcccagagaagaaga

SEQ ID NO: 500511 - DNA, 120 bp, Artificial Sequence
  ENSG00000163681_8 (sequence is synthesized)
tggactgaaagctgccagttggggactttttgtgatcacggcgttgcagcgttttaaaggaggtgatggggcttgcgctggcttgtcttcccacccaagtgaagagttgatgttcactgg

SEQ ID NO: 500512 - DNA, 120 bp, Artificial Sequence
  ENSG00000163681_9 (sequence is synthesized)
ttatgcttagacaatgtgcagtttgtgttaatttaaaattttgggtgggataggggcataggcttgtgaagggcagtccggatccggaggaactcctctttgtccctggtaggagagaca

SEQ ID NO: 500513 - DNA, 120 bp, Artificial Sequence
  ENSG00000163681_10 (sequence is synthesized)
cccccagtctatcctcgatgccgtcagccttggccatcttcacttgccgcccgaactcgcacccgtttcaggagcgtcatgtctacctggacgagcccatcaaaatcggccgctcagtgg

SEQ ID NO: 500514 - DNA, 120 bp, Artificial Sequence
  ENSG00000163681_11 (sequence is synthesized)
cccgctgtcgaccagcgcagaataatgccacttttgattgcaaagtgctatcaaggaaccacgctctcgtctggtttgatcacaagacgggcaagttttatcttcaagacactaaaagta

SEQ ID NO: 500515 - DNA, 120 bp, Artificial Sequence
  ENSG00000163681_12 (sequence is synthesized)
gtaatggtacttttataaatagccagagattgagtcgaggctctgaagaaagtccaccatgtgaaattctttccggtgacattatccagtttggagtagacgtgacagagaatacacgga

SEQ ID NO: 500516 - DNA, 120 bp, Artificial Sequence
  ENSG00000163681_13 (sequence is synthesized)
aagttacccatgggtgtattgtttccacaataaaactttttctaccagatggtatggaagcccggctccgctcagatgtcatccatgcaccattaccaagtcctgttgacaaagttgctg

SEQ ID NO: 500517 - DNA, 120 bp, Artificial Sequence
  ENSG00000163681_14 (sequence is synthesized)
ctaacactccaagtatgtactctcaggaactattccagctttctcagtatctacaggaggccttacatcgggaacaaatgttggaacagaagttagccacgcttcagcggctactagcca

SEQ ID NO: 500518 - DNA, 120 bp, Artificial Sequence
  ENSG00000163681_15 (sequence is synthesized)
tcacccaagaggcttcagataccagttggcaggctttaatagatgaagatagactcttatcacggttagaagttatgggaaaccaattacaggcatgctccaaaaatcaaacagaagata

SEQ ID NO: 500519 - DNA, 120 bp, Artificial Sequence
  ENSG00000163681_16 (sequence is synthesized)
gtttacgaaaggaacttatagcattacaagaggataaacataactatgagacaacagccaaagagtccctgaggcgggttcttcaggagaaaattgaagtggttagaaaactttcagaag

SEQ ID NO: 500520 - DNA, 120 bp, Artificial Sequence
  ENSG00000163681_17 (sequence is synthesized)
ttgagcgaagtctgagtaatactgaagatgaatgtacccatctgaaagaaatgaatgaaaggactcaggaagaattaagagaattagccaacaaatataatggagcagttaatgagatta

SEQ ID NO: 500521 - DNA, 120 bp, Artificial Sequence
  ENSG00000163681_18 (sequence is synthesized)
aagatttatctgataaattaaaggtagcagagggaaaacaagaggaaatccaacagaagggacaggctgagaaaaaagaattacaacataaaatagatgaaatggaagaaaaagaacagg

SEQ ID NO: 500522 - DNA, 120 bp, Artificial Sequence
  ENSG00000163681_19 (sequence is synthesized)
agctccaggcaaaaatagaagctttgcaagctgataatgatttcaccaatgaaaggctaacagctttacaagagcacttgctttcaaagagtggcggggactgcacttttattcatcaat

SEQ ID NO: 500523 - DNA, 120 bp, Artificial Sequence
  ENSG00000163681_20 (sequence is synthesized)
tcatagaatgccagaagaagctgatcgtcgaagggcatctaaccaaagcggtagaagaaacaaagctttcaaaagaaaatcagacaagagcaaaagaatctgatttttcagatactctga

SEQ ID NO: 500524 - DNA, 120 bp, Artificial Sequence
  ENSG00000163681_21 (sequence is synthesized)
gtccaagcaaggaaaaaagcagtgacgacactacagacgcccaaatggatgagcaagacctaaatgagcctcttgccaaagtgtcccttttaaaagatgacttgcagggtgcacagtcag

SEQ ID NO: 500525 - DNA, 120 bp, Artificial Sequence
  ENSG00000163681_22 (sequence is synthesized)
gaaaggaattgatcgaagcccaggagctagctagaacaagtaaacaaaaatgctttgaacttcaagctcttttggaagaagaaagaaaagcctatcgaaatcaagttgaggaatccacta

SEQ ID NO: 500526 - DNA, 120 bp, Artificial Sequence
  ENSG00000163681_23 (sequence is synthesized)
aacaaatacaggttcttcaagcccaattgcagaggttacacatcgatactgagaatctccgggaggagaaggacagtgaaatcacaagtactagagatgaattgcttagtgcccgagatg

SEQ ID NO: 500527 - DNA, 120 bp, Artificial Sequence
  ENSG00000163681_24 (sequence is synthesized)
aaattttgctccttcatcaagcagcagcaaaggttgcctctgagcgggacactgacattgcttctttacaagaagagcttaagaaggtgagagctgagcttgagcggtggcggaaagcag

SEQ ID NO: 500528 - DNA, 120 bp, Artificial Sequence
  ENSG00000163681_25 (sequence is synthesized)
cgtctgaatatgagaaagaaatcacaagtctgcaaaacagttttcagcttagatgtcaacagtgtgaggaccagcagagagaagaagcaacaaggttgcaaggtgaactagagaagttga

SEQ ID NO: 500529 - DNA, 120 bp, Artificial Sequence
  ENSG00000163681_26 (sequence is synthesized)
gaaaggaatggaatgcattggaaaccgaatgccattctctaaaaagggaaaatgttttgctatcatcagaactgcaacggcaagaaaaagaattgcacaattctcagaagcagagtttag

SEQ ID NO: 500530 - DNA, 120 bp, Artificial Sequence
  ENSG00000163681_27 (sequence is synthesized)
agcttaccagtgatctcagcatccttcaaatgtctaggaaagaacttgagaatcaagtgggatccttgaaagaacagcatcttcgggattcagctgatttaaaaactcttctcagtaagg

SEQ ID NO: 500531 - DNA, 120 bp, Artificial Sequence
  ENSG00000163681_28 (sequence is synthesized)
cagaaaaccaagcaaaggatgtgcagaaagagtatgaaaagacacagactgtactctcagaactgaagttgaagtttgaaatgactgagcaggaaaagcagtcaatcacagatgagctca

SEQ ID NO: 500532 - DNA, 120 bp, Artificial Sequence
  ENSG00000163681_29 (sequence is synthesized)
aacagtgtaaaaacaacctgaagctgctccgagagaaaggaaataataaaccctggccctggatgcccatgttggctgccctggttgcagtaacagccatcgtgctgtacgtgccaggtc

SEQ ID NO: 500533 - DNA, 120 bp, Artificial Sequence
  ENSG00000163681_30 (sequence is synthesized)
tggccagagcttctccatgagagcgttccttgagtccgtacaccgtcctccctctagaagctggcatcacactcatgctggggacaaacagaaccattttcttcctctttacctcttaaa

SEQ ID NO: 500534 - DNA, 120 bp, Artificial Sequence
  ENSG00000163681_31 (sequence is synthesized)
acagcagaagtacaagaatacagctgtagggtcattgctttaaattatataaaatgtatctgtctataaagaagatataaaattgtgactttattctactgtaagcaataatttgcttgc

SEQ ID NO: 500535 - DNA, 120 bp, Artificial Sequence
  ENSG00000163681_32 (sequence is synthesized)
aatttttcatgtaatttttaaattagtatgttaagattctgaatattatggtggcctaaagtaggcttcttggtacaccagattatttataacattaaatttatgagtattttactctga

SEQ ID NO: 500536 - DNA, 120 bp, Artificial Sequence
  ENSG00000163681_33 (sequence is synthesized)
attctgatcaccagataattcatttttctgatttgataactacccaaaccaaacaaccaatacatacatgggaagagaggccctgtgtgctcagtgcctatcagtttgaaatatatacac

SEQ ID NO: 500537 - DNA, 120 bp, Artificial Sequence
  ENSG00000163681_34 (sequence is synthesized)
atatatatattttttacatatttacgccatttttacttgttatgaaaccactgagctattgggaacaagacttagagacaactatttgcgtggatttttttttttttaaggaaaaatacg

SEQ ID NO: 500538 - DNA, 120 bp, Artificial Sequence
  ENSG00000163681_35 (sequence is synthesized)
tttggaaaataaactgttatggtgataatttggggaatatgtgcacgcttgttcagccttaatgtgacttgaagatgtggaggacatcaactttgaaaaactttccatgagagtgtattt

SEQ ID NO: 500539 - DNA, 120 bp, Artificial Sequence
  ENSG00000163681_36 (sequence is synthesized)
tcttgagcaaactgaagtatttctgggagcaaaaacatagtaattacacaatttcagtgcagtcaaccaaaatgttgagtcaattggaatgtaatttattaaaccatgtatttaaagaga

SEQ ID NO: 500540 - DNA, 120 bp, Artificial Sequence
  ENSG00000163681_37 (sequence is synthesized)
tatttttctttaaaagccaagttactttctcatatacagcattttaggaagcatgattttttttttctatcatctattcctccaagcatgtttaattgaagaaagtattaatatctcttt

SEQ ID NO: 500541 - DNA, 120 bp, Artificial Sequence
  ENSG00000163681_38 (sequence is synthesized)
agataagcttgtattgacctaatttggtttatgatgtgtcagagctaattcatgttcagggtgagcgttgtacctaccaacaaatttcctggttgggtatgcaaatggttattttctttt

SEQ ID NO: 500542 - DNA, 120 bp, Artificial Sequence
  ENSG00000163681_39 (sequence is synthesized)
tattgttgttaattgggactttctgttaatgaaaagcactattcccaagattaatagtgttctatgcacaatgaagcacctaaaaacactgcttgatattataaatttaaaacacaagtg

SEQ ID NO: 500543 - DNA, 120 bp, Artificial Sequence
  ENSG00000163681_40 (sequence is synthesized)
aaagtttagccatggttttgtgcggcatcatagttatgtcaataaagtttatttaggtcatagaatatcctaaagtatcacatagttaaatttttcagtcagtgaagaccgggagggaat

SEQ ID NO: 500544 - DNA, 120 bp, Artificial Sequence
  ENSG00000163681_41 (sequence is synthesized)
gtcagtgaattggcttgaatgttctgtggcaatccacaggtctagccaaatattgaaataggagtttagggtataatttgccttgtgatgtttggcagtcactgtttatactttaaaggt

SEQ ID NO: 500545 - DNA, 120 bp, Artificial Sequence
  ENSG00000163681_42 (sequence is synthesized)
tatattttaagctatttgagattgcttttgggaagatcactagatttatggaggaattagtcacaaatgacttgtagaaaatactgtcatatagttcatttcatcattttctgttgcagg

SEQ ID NO: 500546 - DNA, 120 bp, Artificial Sequence
  ENSG00000163681_43 (sequence is synthesized)
aagccactccaccacagaatgctaatatgccagtggtacccagtacctcttgtatataggttattgcaaatattgttctgaaatgcttaacttcagaattacattttttaaagtaaataa

SEQ ID NO: 500547 - DNA, 120 bp, Artificial Sequence
  ENSG00000163681_44 (sequence is synthesized)
ttgttttaaatctattttgtaaagatataaagtacaatagaatttctggagtacagattaaactatttgcactaacacacgtgacgtgcatgatttaataaaataactttactctcccta

SEQ ID NO: 500548 - DNA, 120 bp, Artificial Sequence
  ENSG00000163681_45 (sequence is synthesized)
cctgaagctgctccgagagaaaggaaataatccttccatattacaacccgtcccagccgtattcatcggcctattcctggctttcctgttttggtgtttcggtccattgtggtagagaaa

SEQ ID NO: 500549 - DNA, 120 bp, Artificial Sequence
  ENSG00000163681_46 (sequence is synthesized)
gtttccagttggcaagtggacagccttgaacaaaagccccagccctcagcaaagcagacatgatccacattataatttaatatgagctacgtgtaataaccagcattccattttggacaa

SEQ ID NO: 500550 - DNA, 120 bp, Artificial Sequence
  ENSG00000163681_47 (sequence is synthesized)
cagggtttaaaagaaaacactgagctgtttcctccaagttttattaaccttttatttaacttactgctttatttttttctcttttaatatggttattgttaaaatgagagtcacttgcta

SEQ ID NO: 500551 - DNA, 120 bp, Artificial Sequence
  ENSG00000163681_48 (sequence is synthesized)
gactggtctctttaaatgtaaggtctagtatcaatatttacttcattcaagtggaataaatggctttttgtagttacttccagttttcctcaagaatagaaataagtctgttcataagca

SEQ ID NO: 500552 - DNA, 120 bp, Artificial Sequence
  ENSG00000163681_49 (sequence is synthesized)
ataccttcagttttgttcagttcacttccacgttaaataaagaataggattattcactggtaataatagagtcattaagaaatattaagcattgcagctaaaaattgaacaaccctgtaa

SEQ ID NO: 500553 - DNA, 120 bp, Artificial Sequence
  ENSG00000163681_50 (sequence is synthesized)
tgatacatttaagaattattcaaaggtgctacatggcagggttagagaataaaaagaacgtggtgtttgaagcaaaacagatctgtattggcatcttggttctaccttttatcagatgtt

SEQ ID NO: 500554 - DNA, 120 bp, Artificial Sequence
  ENSG00000163681_51 (sequence is synthesized)
gttgccttgtgcaaatcacattttctctgagtctccattttctcatttataacatgcggagaataatacttatatttgtggtagtagtgtgaacattaaaaagataatgtatgtgaagta

SEQ ID NO: 500555 - DNA, 120 bp, Artificial Sequence
  ENSG00000163681_52 (sequence is synthesized)
ccattcgagtggtgaatacgtttttatgagaatgtcatactgaaaaaatattgcaaatattaaagttttaggtaagcctaaactttaatctactttaattaaatgaattgattgactcaa

SEQ ID NO: 500556 - DNA, 120 bp, Artificial Sequence
  ENSG00000163681_53 (sequence is synthesized)
atttcaccaatgaaaggctaacagctttacaagtacggttagaacatcttcaggagaaaactcttaaagaatgcagcagcttggggatacaagttgatgacttcttacctaaaataaatg

SEQ ID NO: 500557 - DNA, 120 bp, Artificial Sequence
  ENSG00000163681_54 (sequence is synthesized)
tcgtaaaccagggtatcaaatcaccctttgccataaaatctgttctagatattatgtgaagttttaatttttagttaagagattaagataggttctgtaaagtagcagggactaaaaatt

SEQ ID NO: 500558 - DNA, 120 bp, Artificial Sequence
  ENSG00000163681_55 (sequence is synthesized)
taaagttttggtgtttatacccaatatttcaaactattgttgaataatttggatcagtcaagattacgagggacaaagtgttaagtggtagaatatgaaatgcagctgtgttttttgttt

SEQ ID NO: 500559 - DNA, 120 bp, Artificial Sequence
  ENSG00000163681_56 (sequence is synthesized)
acccttgtgtctctaataggaatttattagcgcttttaacataattagaataaggtgaaaatcttaactttcttgaaagactcaccggtttactctgttatcatatggtagcagttgtaa

SEQ ID NO: 500560 - DNA, 120 bp, Artificial Sequence
  ENSG00000163681_57 (sequence is synthesized)
atttccttattttctggtcttcttcatcttctaataaatatccccaggttcttatgacactcttctagaaattttgggctaagaaactttaggtggatggccaggcatggtggctcacgc

SEQ ID NO: 500561 - DNA, 120 bp, Artificial Sequence
  ENSG00000163681_58 (sequence is synthesized)
gagcaaaactccatctcaaaaaaaaaaatgaaaaaaagaaagaaattttagatgttgataagataagtaatgcatgtaattaactctttgtctcacctctaaacaggaagtacatttctt

SEQ ID NO: 500562 - DNA, 120 bp, Artificial Sequence
  ENSG00000163681_59 (sequence is synthesized)
gatatttacttgtttagaatgaagtgggtagaaaataaatcagcatttataaaaatgtttttaaaataaagttccttggggatagtttactggaaaattgtcaacattcagtctctttta

SEQ ID NO: 500563 - DNA, 120 bp, Artificial Sequence
  ENSG00000163681_60 (sequence is synthesized)
tgttgccttattgtacacaagaaaaattgacatatgttgtaagttcagcccagtgggtttattaaaaatgttggtagtggtgtactaacaccagacagctctctgggatcagagtgacag

SEQ ID NO: 500564 - DNA, 120 bp, Artificial Sequence
  ENSG00000163681_61 (sequence is synthesized)
tagcagcctgtggaaatttctctttgtggaagtgccgatttttctggctggactaatagggaatctccttgtccagaccccgagctttgggattatataaggaaggagcactcttactga

SEQ ID NO: 500565 - DNA, 120 bp, Artificial Sequence
  ENSG00000163681_62 (sequence is synthesized)
tttgtactcttcttaggtgatctttggtgttgataagacatgctttttttctaatgtcataataataaatataagttaatgttggtatgatccagaactctcatctcagaaatgcaatac

SEQ ID NO: 500566 - DNA, 120 bp, Artificial Sequence
  ENSG00000163681_63 (sequence is synthesized)
cattattgtgtaaaatgtagttactgatactgaaagaatgtcagaccctatgggcctttatgggaacgtggagaaaaaagaagggaggtaaatgagtaatgaacacacccatacaaaagt

SEQ ID NO: 500567 - DNA, 120 bp, Artificial Sequence
  ENSG00000163681_64 (sequence is synthesized)
ttttttctttttctttttttctttttgtaggtacatagtaggtgtatatatttatagggtacatgagctgttttggtacaggcattcagtgttacagaaatcttttcaatagccaactta

SEQ ID NO: 500568 - DNA, 120 bp, Artificial Sequence
  ENSG00000163681_65 (sequence is synthesized)
ttcagtgttacagaaatcttttcaatagccaacttaagattgagtatagtgtttatgattgtgttaattgtattcaactattattagtgcttttgtgatttttgtcagtctgttttagat

SEQ ID NO: 500569 - DNA, 120 bp, Artificial Sequence
  ENSG00000163681_66 (sequence is synthesized)
ttgatttttatcccattgcctaccacaatgcaggtattcagtaaaactcagatatttgatgaattaattgataatggacttcttacattaaaattataaagacacaagagcattaggaaa

SEQ ID NO: 500570 - DNA, 120 bp, Artificial Sequence
  ENSG00000163681_67 (sequence is synthesized)
agaactctgggttcagtcataggtttgccatttatttgtaatatgtccttggcaaattgcttaactgctctgtgattcagggttttttcatgtattagactggcgaaaaccaactttata

SEQ ID NO: 500571 - DNA, 120 bp, Artificial Sequence
  ENSG00000163681_68 (sequence is synthesized)
ggtttattgtgaagattgaatgaaagggtgtgcatggaccacttaccatggtgttgggaacataaaatgttaaccaccataatgaagacactgatcatgatgatgatggtgattgataaa

SEQ ID NO: 500572 - DNA, 120 bp, Artificial Sequence
  ENSG00000163681_69 (sequence is synthesized)
agcaggcctatctgttgaaggactctgagtaactccatattaattgaataagattgtggagttttaaaattatttcctatagtatttaggaacaaggatttgtttgtaatggattttttc

SEQ ID NO: 500573 - DNA, 120 bp, Artificial Sequence
  ENSG00000163681_70 (sequence is synthesized)
taattagtaatgcatttatttgtttgttacttgccagataatcaggaaaaaatatttttaatccatgagtagcaccaaacagtatctataaaagtactcacaatatagcctgggaagtca

SEQ ID NO: 500574 - DNA, 120 bp, Artificial Sequence
  ENSG00000163681_71 (sequence is synthesized)
gactcaaggaacagggaatgaaaggggaaagatgtaggaaaagattggaaaatacaagatgcatgtggagctggcggcctgtgtgcagatgctattagtaattgcttcaggtgccattga

SEQ ID NO: 500575 - DNA, 120 bp, Artificial Sequence
  ENSG00000163681_72 (sequence is synthesized)
tgaagatgggtcagagtttccctaaccttgctttacgttaaggtgaaagaacttctaaaacttttctttacatttctgtatgattgccaacttttttgttaatgaagtagtatctttata

SEQ ID NO: 500576 - DNA, 120 bp, Artificial Sequence
  ENSG00000163681_73 (sequence is synthesized)
aatacctgctgaaagattttgtggcttgattttatttttatgaatttttttacttattttgttttgttttgtttttagagacaggggtcttgctaagttggtcaggttggtcttgaactt

SEQ ID NO: 500577 - DNA, 82 bp, Artificial Sequence
  ENSG00000163681_74 (sequence is synthesized)
tacccgacttgtttactctttcactttgtttctctttctctctctgtctctctctctttttgcagcttgattttaagaacag

SEQ ID NO: 500578 - DNA, 120 bp, Artificial Sequence
  ENSG00000163681_75 (sequence is synthesized)
tctgtctctctctctttttgcagcttgattttaagaacagactgtcaagtcagtcagtgattggatgtaaagaaaaatcatctaggtagaaggaggcatattttagaagagtctccaaga

SEQ ID NO: 500579 - DNA, 120 bp, Artificial Sequence
  ENSG00000163681_76 (sequence is synthesized)
gataattatcatagccctttatggtcattattatttttcttttgtaaagtttctcttgtaagagttttacaaattcttaaaagtgatgtattactggtactttttagaaacatttatgtt

SEQ ID NO: 500580 - DNA, 120 bp, Artificial Sequence
  ENSG00000163681_77 (sequence is synthesized)
atgcttgattatgtgtggttatggtttgtatctgtataattaggttcaatagactgacataattttctcttaaaagtataaattactagacaacagtgttgacctttacagctatataag

SEQ ID NO: 500581 - DNA, 120 bp, Artificial Sequence
  ENSG00000163681_78 (sequence is synthesized)
gcagctacatataagtagcctctttattttcctcattcaaactttgtgcctgacttcccgaaccattattttcaagttttttttccccttttttaaaaaatagccaatctttttctttag

SEQ ID NO: 500582 - DNA, 120 bp, Artificial Sequence
  ENSG00000163681_79 (sequence is synthesized)
atttattgtgtacgacttgtcacatttgtcagctaggacaaggaaaataataataaacattcattatgagataaaatgatgatagcagtagtaccttttccctgatatagtaatcatttc

SEQ ID NO: 500583 - DNA, 120 bp, Artificial Sequence
  ENSG00000163681_80 (sequence is synthesized)
tatctatttagttacttttaaatgagaaataagttgatcaaaccatgttttctgtatgcttgaaaccatctcccataaaacgttttttaaaattggaattcacttcaaatcatgtctgtt

SEQ ID NO: 500584 - DNA, 120 bp, Artificial Sequence
  ENSG00000163681_81 (sequence is synthesized)
gcaaatttgctctgtttggggaaccttgccagggactgcagtggttttaaagtctaataagactgtcgggccggacgtagtggctcatgcctgtattcccaacactatgggaggctgagg

SEQ ID NO: 500585 - DNA, 89 bp, Artificial Sequence
  ENSG00000163681_82 (sequence is synthesized)
tcagccactcagaacggcagaggttgcagtcagcccagatcgtgccactacactctagcctcggtgacagagcaagactctgtctcaaa

SEQ ID NO: 500586 - DNA, 120 bp, Artificial Sequence
  ENSG00000163681_83 (sequence is synthesized)
tatcctctggatttaaggaatttcaaggcaaattagtgatagtacattttttaaaactttgtattttccttgtgcctcaacatccccacaaacaggccgtgaacactctgccctggcaac

SEQ ID NO: 500587 - DNA, 120 bp, Artificial Sequence
  ENSG00000163681_84 (sequence is synthesized)
cagatgcaccagtatgataaggctggtccctgccacaagttccccttcataaccttccctggcagtgccctagtgaaatttaacgaaatcacctcatgccttttgtttgtgtatcctgac

SEQ ID NO: 500588 - DNA, 120 bp, Artificial Sequence
  ENSG00000163681_85 (sequence is synthesized)
ccccaatacaagcatttgcctacaggtcctcactctatcagttatacctatttggctgaacccattctttgggcttctcccatatggttccctgcatggtgtaccttgcctccctctcta

SEQ ID NO: 500589 - DNA, 120 bp, Artificial Sequence
  ENSG00000163681_86 (sequence is synthesized)
ggacctttgagtataataaatcctttaatttcatttacctctccaagtataattcccacagctatgttggagtgatccttgaggaccccacagggagacttactccctcccccatttacc

SEQ ID NO: 500590 - DNA, 120 bp, Artificial Sequence
  ENSG00000163681_87 (sequence is synthesized)
acacagagagttatagatgataagctgattattggtggttgttgccatcagcagtcaaagaaaagagaatgcccagggtttttttgtttgtttgtttgtttcagaggatagagaagaaag

SEQ ID NO: 500591 - DNA, 120 bp, Artificial Sequence
  ENSG00000163681_88 (sequence is synthesized)
gcattttgagtttcatgggacaagagtcatttgaaatgactctataaatagtgtgtcttaccatatgtgatatattcagtgattaagaaaaactaaacctaaatctgatcaagactctag

SEQ ID NO: 500592 - DNA, 120 bp, Artificial Sequence
  ENSG00000163681_89 (sequence is synthesized)
ctccaactgccagtttgcaggacatacaaagaactaggcacatattctaaatgatgtgatggggatacaaccagcaaaatccagaatgtggaagattctacaggacatacaacccagttt

SEQ ID NO: 500593 - DNA, 120 bp, Artificial Sequence
  ENSG00000163681_90 (sequence is synthesized)
acaacccagtttctttagcaattaaattagaaggggaaaaaaaggaaaggggatgggggaaatcctataaattaaaagagatttaagagttatgtcggccaggcgtggtggctcacacct

SEQ ID NO: 500594 - DNA, 120 bp, Artificial Sequence
  ENSG00000163681_91 (sequence is synthesized)
ccatctcaaaaagaaaaaaagagagagagatgtcaactaaatataatgtatgaaccttgtatgaatcttcattcaaacaattcaactgtaaaataaatttggaacaatggaaaattttaa

SEQ ID NO: 500595 - DNA, 120 bp, Artificial Sequence
  ENSG00000163681_92 (sequence is synthesized)
aagaacttgagaatcaagtgggatccttgaaagaacagcatcttcgggattcagctgatttaaaaactcttctcagtaaggcagaaaaccaagcaaaggatgtgcagaaagagccttcca

SEQ ID NO: 500596 - DNA, 120 bp, Artificial Sequence
  ENSG00000163681_93 (sequence is synthesized)
ttgacagttcttttggataatgaaggttagtgtatattttcaaggttatagtattttaaccatcagtttacttcttatagctcacaaaatagcaagccagtaacagtatcagataatata

SEQ ID NO: 500597 - DNA, 120 bp, Artificial Sequence
  ENSG00000163681_94 (sequence is synthesized)
taaaataatcagacttctgttttaagaagggtatcgtaactggaatgtgtctttttaagtggatgtatatttatggttttttgaatgttagtacttgatataggtttctttaggtattaa

SEQ ID NO: 500598 - DNA, 120 bp, Artificial Sequence
  ENSG00000163681_95 (sequence is synthesized)
agatttgttgcaatctctgtcattcccagcattaatttcagctttgatctcaaattttaatcaaacacaatgtaagtcgtttgtgatacaacttaagtgaaacatgcttgcacttctatt

SEQ ID NO: 500599 - DNA, 120 bp, Artificial Sequence
  ENSG00000163681_96 (sequence is synthesized)
ttgggggttacagtacctttaaaatctcttatgatgtttaatatttccttaatttttggcatctcagtttgatttaaacaaaattaatgacttttgtgaatgtagaatcttcttatattt

SEQ ID NO: 500600 - DNA, 120 bp, Artificial Sequence
  ENSG00000163681_97 (sequence is synthesized)
tatgagtagtccagtaattgcccaaagtagtttattgtgttaattctgttacagttgtcagagaagaaaagtgagttttaaagcaccatattgtcaagtcacttttatacatagggaaat

SEQ ID NO: 500601 - DNA, 120 bp, Artificial Sequence
  ENSG00000163681_98 (sequence is synthesized)
taggcaaataaatttggtggcatgtgtttatcatagtagaactttcattagactataccagtataaaatttaaaactagattcacagtccttttggccaattaaaacattgagttacaaa

SEQ ID NO: 500602 - DNA, 120 bp, Artificial Sequence
  ENSG00000163681_99 (sequence is synthesized)
agtttgagatacttaattttagtacattctattttattaaagtaactggattcatttgacttttttaaccatgtaagaggatggtgttatttcaaatatctcgtggtttccattctgaat

SEQ ID NO: 500603 - DNA, 120 bp, Artificial Sequence
  ENSG00000163681_100 (sequence is synthesized)
tttgtgcacggcagatgccatatttggggaaaaaatgcatagaatatgcatcattaatattgttttggcaaacaggcattgagtttcagaacagtgaactatttttagtacatatggcaa

SEQ ID NO: 500604 - DNA, 120 bp, Artificial Sequence
  ENSG00000163681_101 (sequence is synthesized)
tttttttcaccttattaaagtgagatgagaacagaccttaaaatagcttttacctcaccatccaaatacctattcagattagttggttgaatagccagcactttgaagtagagccttagg

SEQ ID NO: 500605 - DNA, 120 bp, Artificial Sequence
  ENSG00000163681_102 (sequence is synthesized)
gcattccattttggacaagggtggtgaagaagtaagagattcagtgacctgacctattttaaaagtactttgcgtacctgtagattttgagcattcatagcctgaagcagttttattgat

SEQ ID NO: 500606 - DNA, 120 bp, Artificial Sequence
  ENSG00000163681_103 (sequence is synthesized)
agaaaaccaagcaaaggatgtgcagaaagaggtaaagcgaaaagacattatgagcccaattatggttggacttaaagccaaaagcaaatcggatatccatgctagttagaaataaaggga

SEQ ID NO: 500607 - DNA, 120 bp, Artificial Sequence
  ENSG00000163681_104 (sequence is synthesized)
agcagaagtcacattacctgtcacaaaattgatacttggaacatctctgcttggtgatttctagctgcatatcatggtccatatgtagagaattcttcagtagggttggtctcaaaaata

SEQ ID NO: 500608 - DNA, 120 bp, Artificial Sequence
  ENSG00000163681_105 (sequence is synthesized)
tagcatacttttggaaagcaaactgaggccatactctaatgctgtctgaacccctcaggtaaatatggcctgaaaagttacttaaaattcacctcatagccaggcagccagccaaacaca

SEQ ID NO: 500609 - DNA, 120 bp, Artificial Sequence
  ENSG00000163681_106 (sequence is synthesized)
tgttctgtggccttttactttcttcctcccacccccttttcaccttattcataaatgtgcatgctcacttttcatgtcattctgcttaaaaccttgagttgagtggctttttaaaaattt

SEQ ID NO: 500610 - DNA, 120 bp, Artificial Sequence
  ENSG00000163681_107 (sequence is synthesized)
gtgttgaagtcataacagttgattttggaacagaaaccctacccagtttcttcctgagcaagagaggtgcatttcacttcccaaagccttgaagttgacagcagggcagtaagagctgtc

SEQ ID NO: 500611 - DNA, 120 bp, Artificial Sequence
  ENSG00000163681_108 (sequence is synthesized)
ttcagtcctgctggcctcataccactccctgcattgactcctggccagctcggggaatggagaagcctgatacaacttgatctacagattagggaccaccccagttgtagactttcttaa

SEQ ID NO: 500612 - DNA, 120 bp, Artificial Sequence
  ENSG00000163681_109 (sequence is synthesized)
aaggattctttatgaattagaaggaagttgaagacaactctttgtctttaataatgaactttcccaaagttgtttctagaagatctgcttaatcaatgcagtttttctttgcacttttct

SEQ ID NO: 500613 - DNA, 120 bp, Artificial Sequence
  ENSG00000163681_110 (sequence is synthesized)
ttccttgtagtgtcctgaatttggcaatgattgttcttctgtcttcatgtttgttcctaatgaaaaaatactgtaacattttttattttcttgcggacatactgattttgtgatgtgttc

SEQ ID NO: 500614 - DNA, 120 bp, Artificial Sequence
  ENSG00000163681_111 (sequence is synthesized)
gtttttaccttactaaagatatgtgttttagaagaaatctcattttatttggttggaacacaaattttgtgccaaagtaaatatcttagtatttaatactgtaagcactttgtgtccttc

SEQ ID NO: 500615 - DNA, 120 bp, Artificial Sequence
  ENSG00000163681_112 (sequence is synthesized)
cagtccatatgccataattctttcaaactctgggaagaatgctgtggttggaagattattctgttgtatgttactatgaacgcattagtcattttgttgcattacttgtttgcctgtttt

SEQ ID NO: 500616 - DNA, 120 bp, Artificial Sequence
  ENSG00000163681_113 (sequence is synthesized)
tggtcactgagtaatcggtgcaagatgctttaactgtttccacaaatggcagtggcatgttgtcacagcatctaaattgttgatagtcttggattgcattaaatgcagcacatttaaaaa

SEQ ID NO: 500617 - DNA, 120 bp, Artificial Sequence
  ENSG00000163681_114 (sequence is synthesized)
gacgggcaagggtaatctggacctctgccaacattgtagaattgattctgccctcctagcgaccatctcagagaggctgcaaagggcaattccagggagatagttttatcttcaagacac

SEQ ID NO: 500618 - DNA, 120 bp, Artificial Sequence
  ENSG00000163681_115 (sequence is synthesized)
tcatttagtatgccgtgtatttgtgtcataccaatgaactgaacagtcaactaatcccataactttttgtcttgtttactttgtagtaatgctaaccatgagttaattccaacctaacca

SEQ ID NO: 500619 - DNA, 120 bp, Artificial Sequence
  ENSG00000163681_116 (sequence is synthesized)
gttgttaatatgcttccattaactgagtctttatctctagcaaactggagtgcactatgaatttctgcaatattagtaccctctttccaattatgtgtttaatcagatttgaatgagaaa

SEQ ID NO: 500620 - DNA, 120 bp, Artificial Sequence
  ENSG00000163681_117 (sequence is synthesized)
aaatgctgctcagtttgggcttggatggtaacgtttattttccttggcagagaagctgatcgtcgaagggcatctaaccaaagcggtagaagaaacaaagctttcaaaagacaagagcaa

SEQ ID NO: 500621 - DNA, 120 bp, Artificial Sequence
  ENSG00000163682_0 (sequence is synthesized)
acgcgatacaagtacgtaatgacgacagacgttctttctttgctgcgtctactgcgagaatgaagactattctcagcaatcagactgtcgacattccagaaaatgtcgacattactctga

SEQ ID NO: 500622 - DNA, 120 bp, Artificial Sequence
  ENSG00000163682_1 (sequence is synthesized)
agggacgcacagttatcgtgaagggccccagaggaaccctgcggagggacttcaatcacatcaatgtagaactcagccttcttggaaagaaaaaaaagaggctccgggttgacaaatggt

SEQ ID NO: 500623 - DNA, 120 bp, Artificial Sequence
  ENSG00000163682_2 (sequence is synthesized)
ggggtaacagaaaggaactggctaccgttcggactatttgtagtcatgtacagaacatgatcaagggtgttacactgggcttccgttacaagatgaggtctgtgtatgctcacttcccca

SEQ ID NO: 500624 - DNA, 120 bp, Artificial Sequence
  ENSG00000163682_3 (sequence is synthesized)
ttgttgaaatccgaaatttcttgggtgaaaaatatatccgcagggttcggatgagaccaggtgttgcttgttcagtatctcaagcccagaaagatgaattaatccttgaaggaaatgaca

SEQ ID NO: 500625 - DNA, 120 bp, Artificial Sequence
  ENSG00000163682_4 (sequence is synthesized)
ttgagcttgtttcaaattcagcggctttgattcagcaagccacaacagttaaaaacaaggatatcaggaaatttttggatggtatctatgtctctgaaaaaggaactgttcagcaggctg

SEQ ID NO: 500626 - DNA, 120 bp, Artificial Sequence
  ENSG00000163682_5 (sequence is synthesized)
atgaataagatctaagagttacctggctacagaaagaagatgccagatgacacttaagacctacttgtgatatttaaatgatgcaataaaagacctattgatttggaccttcttcttaaa

SEQ ID NO: 500627 - DNA, 120 bp, Artificial Sequence
  ENSG00000163682_6 (sequence is synthesized)
aaggatgtttctgtgctcgtgggggtactgggaatctgaaaccatctgctctgggaaaggctgcggcgcggctcccactctcggaaccttgtcctgtttgtcccccagctcggcaagcgc

SEQ ID NO: 500628 - DNA, 120 bp, Artificial Sequence
  ENSG00000163682_7 (sequence is synthesized)
catatgagcctggcggcgccagatgcgaatcctgttgtgggctttttggcctattcccgcccctcagtcttgccgggatggcaccgcccgcataggacttccagggttgggctgagtggg

SEQ ID NO: 500629 - DNA, 120 bp, Artificial Sequence
  ENSG00000163682_8 (sequence is synthesized)
agttcgactgctgggcctcgtaattctcgctttggggctgctccttccaggctgggacacactggggcccgctgtcggtctcccgtcctccgacatcttgtctggaacttccgcctggca

SEQ ID NO: 500630 - DNA, 120 bp, Artificial Sequence
  ENSG00000163682_9 (sequence is synthesized)
gtctccagtaggagtggagctctgtgcggcgtagtttggtggaaaaacgggccttgcgtcggcctcacccccagtgtttgtgtttcagaatgaagactattctcagcaatcagactgtcg

SEQ ID NO: 500631 - DNA, 120 bp, Artificial Sequence
  ENSG00000163682_10 (sequence is synthesized)
caagaggaatattgtaccagtgacaggcaaacatgaggccattcatcattgcatatagaactttaggaataccctgaaagtgtctaaatttgctgaggcatgaatttgaatatttggtaa

SEQ ID NO: 500632 - DNA, 120 bp, Artificial Sequence
  ENSG00000163682_11 (sequence is synthesized)
ggcaaatgttgtcttagtcactggtggagaaacagctgaggagtagaacagagtgatacagcatcagttagaattagaaggtgtagttggtttggttcatggtctcaataatcttgtcct

SEQ ID NO: 500633 - DNA, 120 bp, Artificial Sequence
  ENSG00000163682_12 (sequence is synthesized)
ccatgtgttatactttaaatatggtacaaggccaccataactagacttaggtcaacatggtgacccccaaacctttgtgaattctacatctcatttgatggaaactgcaatttctaaggc

SEQ ID NO: 500634 - DNA, 120 bp, Artificial Sequence
  ENSG00000163682_13 (sequence is synthesized)
aaaatttaacattcatccttgatcaaatgcgtcaggaaaacgtactaagtaccttcattgtaaggtatggtcaggtactttatcagaaaaagtaaatataaggacagaggtcacgatcag

SEQ ID NO: 500635 - DNA, 120 bp, Artificial Sequence
  ENSG00000163682_14 (sequence is synthesized)
ttggcatatatgttatcttggatcttacaatgtcttactcagttgcccaggctggaatacagtgccatagtcatagctctgtaacttcaacctactggactcaagcaataatcctacctg

SEQ ID NO: 500636 - DNA, 120 bp, Artificial Sequence
  ENSG00000163682_15 (sequence is synthesized)
taatcctacctgcttcagcctccttagtagcaaggactacaggcaggcaccgtcacatctttttttttttttttttaaagtatggatggggtctcatgtttcccaggctggtcttgaact

SEQ ID NO: 500637 - DNA, 120 bp, Artificial Sequence
  ENSG00000163682_16 (sequence is synthesized)
tgttcctctttggcctcccagagggctggaactacaggcatgggtcaccatgccctatacgtcttagatctggattcaagtacactaattgaacatacattaaggagtcttgttgtttga

SEQ ID NO: 500638 - DNA, 120 bp, Artificial Sequence
  ENSG00000163682_17 (sequence is synthesized)
tgactatttggttaggtttttaagaaatttggaggaaatcataaatctcggatttgctcagaaataacggatggggttgtaggcgatgaatgggatcaacgtgaagtaagatcacatcct

SEQ ID NO: 500639 - DNA, 120 bp, Artificial Sequence
  ENSG00000163682_18 (sequence is synthesized)
cgaaaggttgggaaatatgggtccattagatacaaattttttacaatgtagaaaatgaaacaaagacctgcgaagttcacctggattattgtgacagtcaactggtcatcttcctctcct

SEQ ID NO: 500640 - DNA, 120 bp, Artificial Sequence
  ENSG00000163682_19 (sequence is synthesized)
gtctattttcagcatcagccagggtactgattttgaaatggattatagcactgtttcaaatcctgcaacaggttttttttcccttttttctttttaaaatagcctccccattgtacctgc

SEQ ID NO: 500641 - DNA, 120 bp, Artificial Sequence
  ENSG00000163682_20 (sequence is synthesized)
agccgtttttaactcaatttttctgacttctgcgctatagctgaattgacctggctaatcctctataccaagcactctgtcattaagcatttaagttgtcgttttccctttggaatgctc

SEQ ID NO: 500642 - DNA, 120 bp, Artificial Sequence
  ENSG00000163682_21 (sequence is synthesized)
tcagctgagctgtgtggctaatttcacttaccttcaggtctattcagtgaatcctgccttgaccaccgtattaaaaatagtagaccggctccttaagcttgtcctactgtctcgttaccc

SEQ ID NO: 500643 - DNA, 120 bp, Artificial Sequence
  ENSG00000163682_22 (sequence is synthesized)
cgagaatgaagactattctcagcaatcagactgtcgacattccagaaaatggtatgagacttgatgtcttttacttacatctttactgcacgttccaagcgttgtgtggcctgacgagtg

SEQ ID NO: 500644 - DNA, 68 bp, Artificial Sequence
  ENSG00000163682_23 (sequence is synthesized)
aaatcttaagaaaaggttcttttggtgcatggagttttacatggaataaattagtgcctctgcaattt

SEQ ID NO: 500645 - DNA, 120 bp, Artificial Sequence
  ENSG00000163682_24 (sequence is synthesized)
aaattagtgcctctgcaatttaaatattttttacacagatttgatgctgtgcaaatgccctctccccttttaggtgttgcttgttcagtatctcaagcccagaaagatgaattaatcctt

SEQ ID NO: 500646 - DNA, 120 bp, Artificial Sequence
  ENSG00000163682_25 (sequence is synthesized)
tgaaaaaccagattctgaacacagccaattatataaagctcaaatgtaatagtggtcatcagtgacacgtcttaatggtgttagaagtttggtttattttcctagtgattgctttgtaaa

SEQ ID NO: 500647 - DNA, 120 bp, Artificial Sequence
  ENSG00000163682_26 (sequence is synthesized)
aatcacaggaaccggcagtaggtcatttaaacctgatgatttaattttccagaagggaagtttgttgcaacttctacaaagcttaactgttgggaggttttataggtggttggatttttc

SEQ ID NO: 500648 - DNA, 120 bp, Artificial Sequence
  ENSG00000163682_27 (sequence is synthesized)
ctccgggttgacaaatggtggggtaacagaaaggaactggctaccgttcggactatttgtagtcatgtacagaacatgatcaagggtgttgcttgttcagtatctcaagcccagaaagat

SEQ ID NO: 500649 - DNA, 120 bp, Artificial Sequence
  ENSG00000163682_28 (sequence is synthesized)
ttgttgggatagaaaaagatgtagtttctgagttttctgtctgctgccataatgtatgtcattattctttccaacccaccgtctctcccctcaagataaaaagttcatgctgaaatggtt

SEQ ID NO: 500650 - DNA, 120 bp, Artificial Sequence
  ENSG00000163682_29 (sequence is synthesized)
ttctttgcattataccttctagaatgcacctgataatggcaccctgtacatctattataaatctgttaagattcccccatctacccttgctcttagccttaagttccttgaaggcagggg

SEQ ID NO: 500651 - DNA, 120 bp, Artificial Sequence
  ENSG00000163682_30 (sequence is synthesized)
gcctgcctttggcttggtggtctcaattcctgccatgtgctgtaccttagtaactcagtaaatgttagtctaatgtctaagatcagggctttggggttctcattaaaagaaggcagcatt

SEQ ID NO: 500652 - DNA, 120 bp, Artificial Sequence
  ENSG00000163682_31 (sequence is synthesized)
gttcattgagggcataagagctagtgaaataaagcctccgcaaggagctttacagtccactgaatagacagaacaatgtttataaggcttggttcaggtgacagttattagaaaatcttg

SEQ ID NO: 500653 - DNA, 120 bp, Artificial Sequence
  ENSG00000163682_32 (sequence is synthesized)
cgttttaaaataagtataagcatcttagaaaattttaaaactattaaaaatattcctcagcattgctaatagcttgcttatttatttaacatagggcttccgttacaagatgaggtctgt

SEQ ID NO: 500654 - DNA, 120 bp, Artificial Sequence
  ENSG00000163682_33 (sequence is synthesized)
aaaccagatttgttttagaattatctcttgattacacttaaactgttggtgctacttaagggtttatatcattatgtcgattacaatttcagaaagttgatacattggagtagcttgcag

SEQ ID NO: 500655 - DNA, 120 bp, Artificial Sequence
  ENSG00000163682_34 (sequence is synthesized)
tggtggttgtatttaacttggcaaatgaaatcttttaaaaagactttaaatttacaaaaggtgtatataatggtgtgtatttatggagcacaatgtgatgtttcaacacatgcatattct

SEQ ID NO: 500656 - DNA, 120 bp, Artificial Sequence
  ENSG00000163682_35 (sequence is synthesized)
gtggaatgactaaatcaggctaattaacacatccatcactccatttatttcttcgtggtaagaacctttaaaatctaaagagaaaactacatgagtagtggttaatagcctagcgtaaat

SEQ ID NO: 500657 - DNA, 120 bp, Artificial Sequence
  ENSG00000163682_36 (sequence is synthesized)
ttcagctctcactgtccaccttgggcatgtcatctctctgcagcttaaaattgcaaacatctttgattaaatgagttaaagttgaaaaacaacaatgcatgcgtaatacatagtaaacac

SEQ ID NO: 500658 - DNA, 120 bp, Artificial Sequence
  ENSG00000163682_37 (sequence is synthesized)
gttacactggtaagcagatgtatcagacttccttgttttggaaagggaggtttctcaaacctgtgctttatacagcgtaagtgtctctttcagagaatgggtcatgtattttatttggtg

SEQ ID NO: 500659 - DNA, 120 bp, Artificial Sequence
  ENSG00000163682_38 (sequence is synthesized)
taatacgcaagaacttggcaaaaataggcatctgtgggtctttaagcgatagagctgagagcaaagaccagatgggtacaacatgtttgtttttttctgttgttgggttttttttttttt

SEQ ID NO: 500660 - DNA, 120 bp, Artificial Sequence
  ENSG00000163682_39 (sequence is synthesized)
tcttgggtgaaaaatatatccgcagggttcggatgagaccaggtatgtgcataccctcagacagaattaagaaatttttccttcatatttttttcctccttttccactcccaacttccat

SEQ ID NO: 500661 - DNA, 120 bp, Artificial Sequence
  ENSG00000163683_0 (sequence is synthesized)
ggccagaaacggcagtggcagcagcgtccggagcagccgcagccttctggaagctccaggcggtctttctgccgagcctcggtcccggcccccatcctccccgccccatcggttgttgtc

SEQ ID NO: 500662 - DNA, 120 bp, Artificial Sequence
  ENSG00000163683_1 (sequence is synthesized)
tgggcggatttaaacagtcaagtaaaatcaagctgggtaatcatggcagaaggtggatttgatccctgtgaatgtgtttgctctcatgaacatgcaatgagaagactgatcaatctgtta

SEQ ID NO: 500663 - DNA, 120 bp, Artificial Sequence
  ENSG00000163683_2 (sequence is synthesized)
cggcagtcccagtcctactgcacagacacagagtgtcttcaggaattaccgggaccctctggtgataatggcatcagtgttacaatgatcttggtagcctggatggttattgcattgatc

SEQ ID NO: 500664 - DNA, 120 bp, Artificial Sequence
  ENSG00000163683_3 (sequence is synthesized)
ttgttcttactgagacctcctaatctaagaggatccagcctacctggaaagccaaccagtcctcataatggacaagatccaccagctcctcctgtggactaactttgtgatatgggaagt

SEQ ID NO: 500665 - DNA, 120 bp, Artificial Sequence
  ENSG00000163683_4 (sequence is synthesized)
gaaaatagttaacaccttgcacgaccaaacgaacgaagatgaccagagtactcttaaccccattagaactgtttttccttttgtatctgcaatatgggatggtattgttttcatgagctt

SEQ ID NO: 500666 - DNA, 120 bp, Artificial Sequence
  ENSG00000163683_5 (sequence is synthesized)
ctagaaatttcacttgcaagtttatttttgcttcctgtgttactgccattcctatttacagtatatttgagtgaatgattatatttttaaaaagttacatggggcttttttggttgtcct

SEQ ID NO: 500667 - DNA, 120 bp, Artificial Sequence
  ENSG00000163683_6 (sequence is synthesized)
aaacttacaaacattccactcattctgtttgtaactgtgattataatttttgtgataatttctggcctgattgaaggaaatttgagaggtctgcatttatatattttaaatagatttgat

SEQ ID NO: 500668 - DNA, 120 bp, Artificial Sequence
  ENSG00000163683_7 (sequence is synthesized)
aggtttttaaattgctttttttcataaggtatttataaagttatttggggttgtctgggattgtgtgaaagaaaattagaaccacgctgtatttacatttaccttggtagtttatttgtg

SEQ ID NO: 500669 - DNA, 120 bp, Artificial Sequence
  ENSG00000163683_8 (sequence is synthesized)
gatggcagttttctgtagttttggggactgtggtagctcttggattgttttgcaaattacagctgaaatctgtgtcatggattaaactggcttatgtggctagaataggaagagagaaaa

SEQ ID NO: 500670 - DNA, 120 bp, Artificial Sequence
  ENSG00000163683_9 (sequence is synthesized)
aatgaaatggttgtttactaattttatactcccattaaaaatctctaatgttaagaaaaccttaaataaacatgattgatcaatatggcagatgatttacagtccattatatgacatttg

SEQ ID NO: 500671 - DNA, 120 bp, Artificial Sequence
  ENSG00000163683_10 (sequence is synthesized)
taagccactcaacactagccttacaaggttcatgaaaggaggaaaacattaattctttctgcctttgctgatataatccacatagtaataatttaagctataatttatttttaaaatgag

SEQ ID NO: 500672 - DNA, 120 bp, Artificial Sequence
  ENSG00000163683_11 (sequence is synthesized)
taatttaagctataatttatttttaaaatgagtgcctcttgggaagcttcttttctgttctaacagttccctgttaaaatgaaaatcttaggccagtgcagtggctcacacctgtaatcc

SEQ ID NO: 500673 - DNA, 89 bp, Artificial Sequence
  ENSG00000163683_12 (sequence is synthesized)
cagtgaaccaagatcgcaccactgcattccagcctaagcaatgaagaaaatcttaaagctgtattagggcctgttaggttactgatatt

SEQ ID NO: 500674 - DNA, 120 bp, Artificial Sequence
  ENSG00000163683_13 (sequence is synthesized)
atcttaaagctgtattagggcctgttaggttactgatatttgaatgcctatttacttatttactacattgagtcttttgttatcctctgacctataaaatattttaataaattactggtt

SEQ ID NO: 500675 - DNA, 120 bp, Artificial Sequence
  ENSG00000163683_14 (sequence is synthesized)
tacttcaagggaaaagaaggaaaatgagaaacatacatctttttttcactccttatctcattcctgtttggtgatgggatggattggggtaggaaggaatgttaatatgagagaaatttt

SEQ ID NO: 500676 - DNA, 120 bp, Artificial Sequence
  ENSG00000163683_15 (sequence is synthesized)
gagagaaattttaaaatgtataaaaaagtaaaaggttgtattgttttgctcagtttgaaataaagtgaataccaatagcacttaaaaatgtctgcatgggctgggcacggtggctcacgc

SEQ ID NO: 500677 - DNA, 120 bp, Artificial Sequence
  ENSG00000163683_16 (sequence is synthesized)
ctcaaaataaataaataaataaaaatgtctgcatgacccatatggttatgaagtttttttcctagcaaatgattgcagattatttatgggggctagaagatattttgctatcaatgtaag

SEQ ID NO: 500678 - DNA, 120 bp, Artificial Sequence
  ENSG00000163683_17 (sequence is synthesized)
taaggatttttttccccttaggtcagtctattcactgtttagatctggtaaattacttgtatgaattgaataaattctctgtatcattgtactgtttaatagtctctgatacaattgtga

SEQ ID NO: 500679 - DNA, 120 bp, Artificial Sequence
  ENSG00000163683_18 (sequence is synthesized)
tactcataaggtattttcccccctttattatgattacattctagatcataaacattgtaagggcatcttttcattatataatccaatattgattgtttgaattcctccttgtacatcctg

SEQ ID NO: 500680 - DNA, 120 bp, Artificial Sequence
  ENSG00000163683_19 (sequence is synthesized)
gctttgtgctcaatttcttgaaataatataaccaactctaaattacttgtgttaatagatcggtaacatgacacaggtaagttaaatcctggataaatgagccccacagaataaaggttt

SEQ ID NO: 500681 - DNA, 120 bp, Artificial Sequence
  ENSG00000163683_20 (sequence is synthesized)
ttcctcttgctgtggcctactggaagccttcctaactctatagctggtaaagtagagcagaaagggccagaatggcttaagatggagctaaatccctatagcattccattttctgctctt

SEQ ID NO: 500682 - DNA, 120 bp, Artificial Sequence
  ENSG00000163683_21 (sequence is synthesized)
gcctcttgaacttagaaggcttgcccatatatcctaacaatctgttctctgagctgttaggccaatccctggcaagagatattgatgtagtcactgaatctatggctcacaaataattga

SEQ ID NO: 500683 - DNA, 63 bp, Artificial Sequence
  ENSG00000163683_22 (sequence is synthesized)
gaccagcctggccaagacggtgaaaccccgtgcctacaaaaaattagccgggtttggtgacac

SEQ ID NO: 500684 - DNA, 120 bp, Artificial Sequence
  ENSG00000163683_23 (sequence is synthesized)
gagtgagaccctgtctcaaaaaaaaaaggctttagaaggctttattggatgaaatggctgaaacttggatacagaatgtctagtattagacacctaaaaatctggattctttttggttgt

SEQ ID NO: 500685 - DNA, 90 bp, Artificial Sequence
  ENSG00000163683_24 (sequence is synthesized)
ttggttgttgagctggagtgaagtggcgcgaccttggctcactgcaacatccacccccaggttcgagcgattctccttcctcagcctcct

SEQ ID NO: 500686 - DNA, 120 bp, Artificial Sequence
  ENSG00000163683_25 (sequence is synthesized)
tacagatgtgagccaccgtgcctggccagaaaatctggattcttattcctagttcttcatttctgtcacatgcacttagttgacattacatctacatatattagctttttcctacatgag

SEQ ID NO: 500687 - DNA, 120 bp, Artificial Sequence
  ENSG00000163683_26 (sequence is synthesized)
attacatctacatatattagctttttcctacatgagccatctatttacttagtaaccagtgttcttaatgaagtatttagtcttgggtttcttgtaaaatttctctgcattccttagaca

SEQ ID NO: 500688 - DNA, 120 bp, Artificial Sequence
  ENSG00000163683_27 (sequence is synthesized)
gtgtactatacatgaaatattcttgttgacctagtaatttatattattccatttaattcttaaacctatggcctttttattgagcacactcttaaatcattatttggcttgtaaacattc

SEQ ID NO: 500689 - DNA, 120 bp, Artificial Sequence
  ENSG00000163683_28 (sequence is synthesized)
atctgaagtgtggctacaatcctctttaaataatctaggaaaaaagaaagataaagcttacattttcacagttttggctcttaaacacattccacaaatgccattaagaatttattttgt

SEQ ID NO: 500690 - DNA, 71 bp, Artificial Sequence
  ENSG00000163683_29 (sequence is synthesized)
ttaaacacattccacaaatgccattaagaatttattttgttttaggccaagaactgcttgagcccaggagt

SEQ ID NO: 500691 - DNA, 120 bp, Artificial Sequence
  ENSG00000163683_30 (sequence is synthesized)
tgtctctaccaaaaaaaaaaaagtttattttgttttagagtcatttaatgtgtttttatgcacaataatagtgggaggttgttttgttgcatttgtttgtttgttttgttttgttttgtt

SEQ ID NO: 500692 - DNA, 81 bp, Artificial Sequence
  ENSG00000163683_31 (sequence is synthesized)
ttgtttgttttgttttgttttgttttgctttccatgtgggaaaagttaacattggaactgtttctagtaaaagattttttt

SEQ ID NO: 500693 - DNA, 64 bp, Artificial Sequence
  ENSG00000163683_32 (sequence is synthesized)
ggagaccgaggtccatctccactaaaaatacaaaagtagcctggtgtggtggcacatgcctgta

SEQ ID NO: 500694 - DNA, 120 bp, Artificial Sequence
  ENSG00000163683_33 (sequence is synthesized)
atttttttcatgttatctatccaagcactgttccatggtcagcaagtcatatttcataatgtggattttccaaaataattattgaatacagctattctatggctacttttagtgtttttg

SEQ ID NO: 500695 - DNA, 120 bp, Artificial Sequence
  ENSG00000163683_34 (sequence is synthesized)
tggtatgtggtgtgggagtgtttatggaattaccagtatcttaaattttcaaaggaaccttggaagtctatcactctaaatgaaagtctgtcactctacatgaattatgtgctcaaattt

SEQ ID NO: 500696 - DNA, 120 bp, Artificial Sequence
  ENSG00000163683_35 (sequence is synthesized)
gaccaactcagtttaagacacaaaacagtaatttgaagaaggaaaaatgaagagagtttctagtttaatgggttaaatttttgttgttgcaatagtaagtttagtcttcttataatattt

SEQ ID NO: 500697 - DNA, 120 bp, Artificial Sequence
  ENSG00000163683_36 (sequence is synthesized)
ctaaatgaaaaatcataggtatttgttaccatgtgtgaagattagtttgttaaaagcaaaagtggtcgtgtgatatgctaaatgttaattactgattttatatgtttaaatcacgccaaa

SEQ ID NO: 500698 - DNA, 120 bp, Artificial Sequence
  ENSG00000163683_37 (sequence is synthesized)
caaattatgtctgtgccatccagggtctgttgttaatctttttctgagtacttggattgggataaagggcttgtactatgcactttttattaatgaataaatagaaaacgttagtaacac

SEQ ID NO: 500699 - DNA, 120 bp, Artificial Sequence
  ENSG00000163683_38 (sequence is synthesized)
tttgtgttttctgtttggcttttgtgggaagagaagcaagcatcttttgcctagtagatgttaacattgtgtattaaacagtttctttgtaagacctaactaaagacattcctaagagag

SEQ ID NO: 500700 - DNA, 120 bp, Artificial Sequence
  ENSG00000163683_39 (sequence is synthesized)
aacttaagttttaagaaaagttgtgagaaaaatattcataaaatatgcagtatggggccagtattcagaagtagagtttctctcttggaaattagattgcagtcacatttctttggttat

SEQ ID NO: 500701 - DNA, 120 bp, Artificial Sequence
  ENSG00000163683_40 (sequence is synthesized)
tttctttctctctctcttcctagaataccaggtaaaatagacatttactttgagggactaatatccaatagtgttaattatttaagcagatatatctagctcaaaaggaaccagacatgt

SEQ ID NO: 500702 - DNA, 120 bp, Artificial Sequence
  ENSG00000163683_41 (sequence is synthesized)
cactgtaccaaaaacacacaaaagtgaaaatttgcttctgttctgtgacctagaatgtgtccagacattaaaggtcatgaatactcatatacatgtaaaaatagtaacactgctctggca

SEQ ID NO: 500703 - DNA, 120 bp, Artificial Sequence
  ENSG00000163683_42 (sequence is synthesized)
tgattttgacgtcagtgtttatgtaataacttcagtgttatatttaaaatagataaatttgtgaaataacaatttcttggagacagtcaactttttatgatttaatctaaagattgtcat

SEQ ID NO: 500704 - DNA, 120 bp, Artificial Sequence
  ENSG00000163683_43 (sequence is synthesized)
gtacatgtcaacggatatctgaatcctcagtgaaactgttaagttttcattaaatgactctgctgcaatactagttttcttctcagaaaatggaattcaaataaaataagttttttggtc

SEQ ID NO: 500705 - DNA, 120 bp, Artificial Sequence
  ENSG00000163683_44 (sequence is synthesized)
ttggcatttcacctgatgactttctctgttctggatctcaatttgtagagttgttgggggttcccccccctccaaaagatgctccataaacaccaactacaattatctttcatgatcata

SEQ ID NO: 500706 - DNA, 120 bp, Artificial Sequence
  ENSG00000163683_45 (sequence is synthesized)
tttttaaaaattggagttacctgtgtgatcttttcccattagttgcttgtaggggactttagtgtgcgtatctcttctcagacaaatgtattatgttcgttcaataaacacttcaacaaa

SEQ ID NO: 500707 - DNA, 120 bp, Artificial Sequence
  ENSG00000163683_46 (sequence is synthesized)
ttcttccctgaggagattaatcagttacggcagtcccagtcctactgcacagacacagagtgtcttcaggaatggacaagatccaccagctcctcctgtggactaactttgtgatatggg

SEQ ID NO: 500708 - DNA, 120 bp, Artificial Sequence
  ENSG00000163684_0 (sequence is synthesized)
cgggacgaggagaagccaaacgtaaagacaccaggagtttctcgggcccagctgtggctgctgccggggagccccaagccttggcgggtccttgcggcgaataggagtctggtcaggcgt

SEQ ID NO: 500709 - DNA, 120 bp, Artificial Sequence
  ENSG00000163684_1 (sequence is synthesized)
caggctagtccgacgaagagtgggtgtgatcagcactggaaaagatgcctgcccctgctgccacatatgaaagagtagtttacaaaaacccttccgagtaccactacatgaaagtctgcc

SEQ ID NO: 500710 - DNA, 120 bp, Artificial Sequence
  ENSG00000163684_2 (sequence is synthesized)
tagaatttcaagattgtggagttggactgaatgctgcacagttcaaacagctgcttatttcggctgtgaaggacctgtttggggaggttgatgccgccttacctttggacatcctaacct

SEQ ID NO: 500711 - DNA, 120 bp, Artificial Sequence
  ENSG00000163684_3 (sequence is synthesized)
atgaagagaagaccttgtcagccatcttgagaatatgtagcagtggtcttgtcaaattgtggagctctttgaccctgttaggatcctataaaggcaaaaaatgtgctttccgggtgattc

SEQ ID NO: 500712 - DNA, 120 bp, Artificial Sequence
  ENSG00000163684_4 (sequence is synthesized)
aggtttctccatttcttcttgcattatctggtaatagtagggaactagtattggattgaatgaatagtcttccattttggaaacgttcatccactctcatatttattttttggtgcctgc

SEQ ID NO: 500713 - DNA, 120 bp, Artificial Sequence
  ENSG00000163684_5 (sequence is synthesized)
atgtttgaagactgaagcaggctaaaagctcttgatgaaatttgagggtgctgaagatgttcccactaatttccagccatcacctttggtggggtgggcttcggaggacagtctgtctga

SEQ ID NO: 500714 - DNA, 120 bp, Artificial Sequence
  ENSG00000163684_6 (sequence is synthesized)
acctgccagtgctgaccctgcagcactttcagcatatgcacatcaaagttggagaccgcgctgaacttaggagggccttcacacagactgatgtggctaccttctcagaattaacagggg

SEQ ID NO: 500715 - DNA, 120 bp, Artificial Sequence
  ENSG00000163684_7 (sequence is synthesized)
atgtcaatcctttgcatttgaatgaagactttgcaaaacacaccaagtttggaaatacaattgtacatggagttttgatcaacggacttatctcagctctcctaggaactaaaatgccag

SEQ ID NO: 500716 - DNA, 120 bp, Artificial Sequence
  ENSG00000163684_8 (sequence is synthesized)
ggccaggctgtgtatttctttcccaggaaattagctttccagcccctttatatattggagaagttgttttagcttctgcagaagtgaaaaagctgaagcggttcattgctattattgcag

SEQ ID NO: 500717 - DNA, 120 bp, Artificial Sequence
  ENSG00000163684_9 (sequence is synthesized)
tgtcatgttctgtaatagaaagtaaaaagactgttatggaaggctgggttaaagttatggttccagaagcttccaaatcctgaaatagatgttttaaagatgcaacctcaaacaccaatg

SEQ ID NO: 500718 - DNA, 120 bp, Artificial Sequence
  ENSG00000163684_10 (sequence is synthesized)
ctgttgttaaagagcctatggggaattgctgctctttaccaaagaatggttgataggcccagaagcccatcttagttaggggaagggagcaggaagagggttgttcaaatgcccactttc

SEQ ID NO: 500719 - DNA, 120 bp, Artificial Sequence
  ENSG00000163684_11 (sequence is synthesized)
cagtttggccttatgcttcatgcagacttgagtgtatgcaggatttcattatctgcctgggttttttgtttgttttttgttttttaattcaagaagtaggctgggcccggtggctcatgc

SEQ ID NO: 500720 - DNA, 90 bp, Artificial Sequence
  ENSG00000163684_12 (sequence is synthesized)
agtcccagttgggcctgagagctggaggttatggtgagaaactgagattgcaccactgcactgtagcctgagtgacagagcgagaccctg

SEQ ID NO: 500721 - DNA, 88 bp, Artificial Sequence
  ENSG00000163684_13 (sequence is synthesized)
cactgtgaaagaagtattgggaaggttatttaaagactctacttttaaatcaggcgtggcagctcacgcctgtaatcccagcattttg

SEQ ID NO: 500722 - DNA, 63 bp, Artificial Sequence
  ENSG00000163684_14 (sequence is synthesized)
aacctgaactccacctcaaaaaaaaaaaaaagattctacttttagaaattcagacctagatag

SEQ ID NO: 500723 - DNA, 120 bp, Artificial Sequence
  ENSG00000163684_15 (sequence is synthesized)
aaaaaaaagattctacttttagaaattcagacctagatagatttgcatttggataacaaatccctacctatagccatgtggaagcagcttgtcactgtattttaactgtgtaacaattat

SEQ ID NO: 500724 - DNA, 120 bp, Artificial Sequence
  ENSG00000163684_16 (sequence is synthesized)
tgaaggcgaaaatagaagttgggtcatctttgaacacctaccttttatcaatgaatatttttagactgttcttcagtatctgagtcagagtttattgtaatttgttatttacaccaaggt

SEQ ID NO: 500725 - DNA, 120 bp, Artificial Sequence
  ENSG00000163684_17 (sequence is synthesized)
ggcatcttagtctaccttcagtgagacttgcgtttcaggggaggggcgtatgtgcatcctcggtctcagttatgtaaacggtctgatctgtaaaatagtggtagcacatgccatgtggga

SEQ ID NO: 500726 - DNA, 120 bp, Artificial Sequence
  ENSG00000163684_18 (sequence is synthesized)
tagttggtggagatgatagatggagttaagcacagggcccagcctgtcagcagtagctactattattgttgcccatttcccctgcaactgaggtgagaggttttcctgagtttgaagctg

SEQ ID NO: 500727 - DNA, 120 bp, Artificial Sequence
  ENSG00000163684_19 (sequence is synthesized)
actggcccacagttaaacgtaacagaccagtttttcagggtgtcagccaacctctattagtgttcttaagtacagtttctgttataaaagttcagattattccttgaaaatttggatcta

SEQ ID NO: 500728 - DNA, 120 bp, Artificial Sequence
  ENSG00000163684_20 (sequence is synthesized)
cctcccattattatgagtaatacatgcttatagtaaaaaaaaaaaaattgtaagaaataaatattaagaagattatggaggccaaattcttaagactttgggggctggggtcagggaggt

SEQ ID NO: 500729 - DNA, 120 bp, Artificial Sequence
  ENSG00000163684_21 (sequence is synthesized)
tatattgaaggggagatgtgcctaacatgttactactaaatggccatcccaacacagccaacacttttgtttcccatttttttttgtttcccgttttttaataaaattgagatataattc

SEQ ID NO: 500730 - DNA, 120 bp, Artificial Sequence
  ENSG00000163684_22 (sequence is synthesized)
acataccataaaattcaccttttaaaagtgtacagtttagtggttttcagaatatccacaaagttgtacaaccatcaccaaatcaattttttatagcatttttcatcacccccaaaagaa

SEQ ID NO: 500731 - DNA, 120 bp, Artificial Sequence
  ENSG00000163684_23 (sequence is synthesized)
cctcccattagcagtcaatccatttctctcctccagtctttgggaatcaccagtctactttctgtctctatgggtttccctgttctggacatttcataaaagttcatacaatgtatgatc

SEQ ID NO: 500732 - DNA, 120 bp, Artificial Sequence
  ENSG00000163684_24 (sequence is synthesized)
gtgcgccttgggtagcttgtcctctccgaccccgggcgctgagggcctctgtacggcgccgcgtagggtctcggccgcagaacgtggccgagaggcccgggcgagacttcgggaccgtgt

SEQ ID NO: 500733 - DNA, 120 bp, Artificial Sequence
  ENSG00000163684_25 (sequence is synthesized)
atacatcagttgatatttggattattttcgcttttgggctgttaaaaataatgttatgaacattatagaagaggtttttatgtgcacaggttttaaatatatatatatatatatattttc

SEQ ID NO: 500734 - DNA, 120 bp, Artificial Sequence
  ENSG00000163684_26 (sequence is synthesized)
aagtgctgggattacaggcgttagccattgcgcctggccgacaggttttaaattctaggagtggaattgctggatcatgtaactttaatattataaagaattgtcaaattgttgttcaaa

SEQ ID NO: 500735 - DNA, 120 bp, Artificial Sequence
  ENSG00000163684_27 (sequence is synthesized)
ctctaatgtcagccaacacattcaagacaatctatgacagaatttttaatttttacccagagagcagctgaacagacaactagaaagaattattctaggccaggcgtggtggctcatgcc

SEQ ID NO: 500736 - DNA, 120 bp, Artificial Sequence
  ENSG00000163684_28 (sequence is synthesized)
agactccgtctcaaaaaaaaaaaaaattattctagtcgctagagggcagtgttgtgtataaagttagtactttaaaactttaatactgtattataccatatactagttttctaaggtgga

SEQ ID NO: 500737 - DNA, 120 bp, Artificial Sequence
  ENSG00000163684_29 (sequence is synthesized)
ttctaaggtggaagacaagaccaaaatcaatgtggggagcaaggatactgttcttgtgagtttcagaatgtgcagcatgtgcaggctgagatccacttgaagaagacatttataggtgaa

SEQ ID NO: 500738 - DNA, 120 bp, Artificial Sequence
  ENSG00000163684_30 (sequence is synthesized)
tcactagacatgctgaaaatgtgttcaaatggcaaaacaaaatggggaacatgcacaaatatacggacttgaggccaggactgcttgctcctgcagaactcattccctgggatttagcag

SEQ ID NO: 500739 - DNA, 120 bp, Artificial Sequence
  ENSG00000163684_31 (sequence is synthesized)
cagtcttaaagttaggtccataactggattgggatgtgatcattgatactgatagccaccattttttcaatgcctgatgagttgattttctacattaatgctaatccttgaaacaactgt

SEQ ID NO: 500740 - DNA, 120 bp, Artificial Sequence
  ENSG00000163684_32 (sequence is synthesized)
gtgaagttaacattatcctgtttttaagtaggataactgacttgcccaaggttgttcagcgaataagcagtacagctgggattcaaacttgggcctgcctggctccaaagcctttccttt

SEQ ID NO: 500741 - DNA, 120 bp, Artificial Sequence
  ENSG00000163684_33 (sequence is synthesized)
ttccatcactctgtgggtcttaggttcctgtaggaaccaaggggaaacttcccctttgccctctgaaggttcactgaaaaatcaactgagaaaaggcaaattaattggagaaaaggcata

SEQ ID NO: 500742 - DNA, 120 bp, Artificial Sequence
  ENSG00000163684_34 (sequence is synthesized)
ccaatatattagcttgcatgaaggggagagctacagagtgattaccccccaaacccccacccaatagggtttagaagcttaaataccacctaaaggttacaaaaagagtgtgggctcgga

SEQ ID NO: 500743 - DNA, 120 bp, Artificial Sequence
  ENSG00000163684_35 (sequence is synthesized)
tcagtggcataacatgttcggggagctggagaaggggaagcctggctagcaaaggtggtcttgttatgtaaatgaagccccacaggtggcagccctcaaaagaatagatggtaaatgttt

SEQ ID NO: 500744 - DNA, 120 bp, Artificial Sequence
  ENSG00000163684_36 (sequence is synthesized)
tggtaaatgttttagaccttttttgttgtatgagacagagtctcgctcttattgcccaggctggattgcaatggcacgatcttggttcactgtggcctccgcctcccgggttcaagcgat

SEQ ID NO: 500745 - DNA, 120 bp, Artificial Sequence
  ENSG00000163684_37 (sequence is synthesized)
ggattacagatgtgagccaccatgtccagcatgtttcagacctttaaagtgtcagactaagttaatcttcccgagatccagacaagggaaggcctggctgcatcaagcagattctctgca

SEQ ID NO: 500746 - DNA, 120 bp, Artificial Sequence
  ENSG00000163684_38 (sequence is synthesized)
aaggcctggctgcatcaagcagattctctgcaaatgcaagttttctccaaaaaagacagctttgcagggctgcttcttttggctctctgaacagccatctgaaaatatgacaaatatatt

SEQ ID NO: 500747 - DNA, 120 bp, Artificial Sequence
  ENSG00000163684_39 (sequence is synthesized)
ttggggtgaaatatttttatttccctcattcgtgttgctggaactggagcactgtcagtttctataatggcatcttacatggcattaaaataattggaatcattctatagcaatcttttt

SEQ ID NO: 500748 - DNA, 120 bp, Artificial Sequence
  ENSG00000163684_40 (sequence is synthesized)
gctttcggaatgttctagatcttattccccgctagagttgtagcgttttcctaatactattagttgaaagtcttccacccatgcatatcacctacacattttctaagccgacattcagtg

SEQ ID NO: 500749 - DNA, 120 bp, Artificial Sequence
  ENSG00000163684_41 (sequence is synthesized)
attatttgtcttcaccgaagaatggcttaaagggttaaagatgaaaaatatagggtacggaagggatgtcagatctgaatgatagttgatttatactgtgtaactttcaaaagtagctac

SEQ ID NO: 500750 - DNA, 84 bp, Artificial Sequence
  ENSG00000163684_42 (sequence is synthesized)
gatagttgatttatactgtgtaactttcaaaagtagctactcaatgtgagcatttccactgtttttttttttgtttgttttctg

SEQ ID NO: 500751 - DNA, 120 bp, Artificial Sequence
  ENSG00000163684_43 (sequence is synthesized)
tcctgggcttacacaatcctgcctcagcctcctatatagcagagaacagaggtgcacaccaccatatctggcttattttttgattttttgcagagatgaggtctcactttgttgcccagg

SEQ ID NO: 500752 - DNA, 87 bp, Artificial Sequence
  ENSG00000163684_44 (sequence is synthesized)
tcatgttcacttttttaaaatgtatgtattttttatagagatgtgggtctcactgtgtcgcccaggttgtctcgaactcctggtctc

SEQ ID NO: 500753 - DNA, 120 bp, Artificial Sequence
  ENSG00000163684_45 (sequence is synthesized)
tctcactgtgtcgcccaggttgtctcgaactcctggtctcaagcgatactcctgctttggcctcccaaaatgctggaatgagcctctgcatacagagttccacatttttatgctccctga

SEQ ID NO: 500754 - DNA, 120 bp, Artificial Sequence
  ENSG00000163684_46 (sequence is synthesized)
gtcatggtctttgaaatctataaatcaataaaggttggaaacagagaagtagacaagaagttatcagtacttctctttagtaacttgtcatttttatccagagtcaagattctcaaacca

SEQ ID NO: 500755 - DNA, 120 bp, Artificial Sequence
  ENSG00000163684_47 (sequence is synthesized)
cacgtgctttgttaaagctggctataaggaaaactggttgcttggctttttcattgagtctatacaaactgctcaaaagaatgactcttaatgaaagcctgagtgaccctcaaattagga

SEQ ID NO: 500756 - DNA, 120 bp, Artificial Sequence
  ENSG00000163684_48 (sequence is synthesized)
aattctctcccagataattgagaagtggccttgactgtaccaggtcacacatggaaataagtacaaaagtaatgactaaaataggccaagttgaccgagcactttgtacataggggtatt

SEQ ID NO: 500757 - DNA, 120 bp, Artificial Sequence
  ENSG00000163684_49 (sequence is synthesized)
atacgactgcaaattgtgtgatgtttaattgtcacagaaagagatactcgttttaagcacttttagcctaatgtactggaaaattgcttaatggatttttatactctattggaaacattt

SEQ ID NO: 500758 - DNA, 120 bp, Artificial Sequence
  ENSG00000163684_50 (sequence is synthesized)
ccatattggtgaaatgccactcattcctttttctgaggagcaaatcttgagtagcaatgggaagaaagcctggcaacagccaccatttgtcttgtggacctgacatgcttattcacctag

SEQ ID NO: 500759 - DNA, 120 bp, Artificial Sequence
  ENSG00000163684_51 (sequence is synthesized)
aaaaagaagaaattgctaaatgcacactgatacctcttaggtaaccacaggttttcattttgtgctgaattattagtcatttttcctttatgtttttagagtatgattcagagaccaatt

SEQ ID NO: 500760 - DNA, 120 bp, Artificial Sequence
  ENSG00000163684_52 (sequence is synthesized)
tattcccaaagaaaattgccattacatctactaagttttcatattaaaacattttctaccaagggatgactgtcactctgagcaactgtgccactgtgaatgcctcatgtgtcagcatag

SEQ ID NO: 500761 - DNA, 120 bp, Artificial Sequence
  ENSG00000163684_53 (sequence is synthesized)
cttattatctagctctgagcagaatgggagtgctgctgaattagtcttggtccacaggtatctccagtgtcccagatgtttcacctcctttgttcttatctttgcttttattttgggtta

SEQ ID NO: 500762 - DNA, 120 bp, Artificial Sequence
  ENSG00000163684_54 (sequence is synthesized)
caaacacagcagataaattaattctcagcatcttcagagaaactgtgggttagagcagaatcaccaactagaagaaaccatttaaattcaaaaatcataaggaacccagaaccaatgtta

SEQ ID NO: 500763 - DNA, 120 bp, Artificial Sequence
  ENSG00000163684_55 (sequence is synthesized)
acactgcataaatacaacaagattaataggaggccccacagttaattcctaaggtggttcttagctgtaaagcaattcaaatgaccttcttataaaccctgggcaaaagtcccctgtgat

SEQ ID NO: 500764 - DNA, 120 bp, Artificial Sequence
  ENSG00000163684_56 (sequence is synthesized)
gtggtggaaaatatcaacacgtaaaggaaataagaatgactgtgagttgagttttgttgttttagatccagatcatgaatatttaaagaaataaaagcattttgagttgggaggccatgc

SEQ ID NO: 500765 - DNA, 120 bp, Artificial Sequence
  ENSG00000163684_57 (sequence is synthesized)
agtttctcgggcccagctgtggctgctgccggggagccccaagccttggcgggtccttgcggcgaataggagtctggtcaggcgtcaggctagtccgacgaagagtggccctcttgactt

SEQ ID NO: 500766 - DNA, 120 bp, Artificial Sequence
  ENSG00000163684_58 (sequence is synthesized)
cccagctactcaggagtctgaggcaggaggatcacctgagcctcgagagccagaggtggaggctgcagtgaactctgattgtaccactgcacttcagcctaggtgacagggtgagaccct

SEQ ID NO: 500767 - DNA, 120 bp, Artificial Sequence
  ENSG00000163684_59 (sequence is synthesized)
ttcagcctaggtgacagggtgagaccctgccttaaaacaaacaaacaaaaaaaacccaaataggccaaattctcatcaaaactctgaaaaatagcatgtgcattggtcatttctagccct

SEQ ID NO: 500768 - DNA, 120 bp, Artificial Sequence
  ENSG00000163686_0 (sequence is synthesized)
acctctgtaggcgatcctgctctcgccgtggctttcgggtgctaggagacagttgccggcgttgggttgtgcgagacgctaactgtaccctccgggtttaacgctgtgaggcagcgcgcg

SEQ ID NO: 500769 - DNA, 120 bp, Artificial Sequence
  ENSG00000163686_1 (sequence is synthesized)
gaggaactggggataagcgccccggagcccccaaacagagcgcggccgctgggggacagcgcgcggcgccgggtcggggcggggcggcttttctgtcggaggacgcgaaccggcacgctg

SEQ ID NO: 500770 - DNA, 120 bp, Artificial Sequence
  ENSG00000163686_2 (sequence is synthesized)
gcacgctgcgcctttaaggagtccagctgggctgggcgccggagctgggagcggcgcgggtaggagcccggcggcaggtcccagcccggggctagagaccgagggccggggtccgggccc

SEQ ID NO: 500771 - DNA, 120 bp, Artificial Sequence
  ENSG00000163686_3 (sequence is synthesized)
gacccaggcggttgaggctggtcaggagtcagccagcctgaaagagcaggatggatcttgatgtggttaacatgtttgtgattgcgggcggcacgctggccatcccaatcctggcatttg

SEQ ID NO: 500772 - DNA, 120 bp, Artificial Sequence
  ENSG00000163686_4 (sequence is synthesized)
tggcttcatttcttctgtggccttcagcactgataagaatctattattggtactggcggaggacattgggcatgcaagtccgctatgttcaccatgaagactatcagttctgttattcct

SEQ ID NO: 500773 - DNA, 120 bp, Artificial Sequence
  ENSG00000163686_5 (sequence is synthesized)
tccggggcaggcctgggcacaaaccctccatcctcatgctccacggattctctgcccacaaggatatgtggctcagtgtggtcaagttccttccaaagaacctgcacttggtctgcgtgg

SEQ ID NO: 500774 - DNA, 120 bp, Artificial Sequence
  ENSG00000163686_6 (sequence is synthesized)
acatgccaggacatgagggcaccacccgctcctccctggatgacctgtccatagatgggcaagttaagaggatacaccagtttgtagaatgcctgaagctgaacaaaaaacctttccacc

SEQ ID NO: 500775 - DNA, 120 bp, Artificial Sequence
  ENSG00000163686_7 (sequence is synthesized)
tggtaggcacctccatgggtggccaggtggctggggtgtatgctgcttactacccatcggatgtctccagcctgtgtctcgtgtgtcctgctggcctgcagtactcaactgacaatcaat

SEQ ID NO: 500776 - DNA, 120 bp, Artificial Sequence
  ENSG00000163686_8 (sequence is synthesized)
ttgtacaacggctcaaagaactgcagggctctgccgccgtggagaagattcccttgatcccgtctaccccagaagagatgagtgaaatgcttcagctctgctcctatgtccgcttcaagg

SEQ ID NO: 500777 - DNA, 120 bp, Artificial Sequence
  ENSG00000163686_9 (sequence is synthesized)
aacatggacaagatcaaggttccgacgcagatcatctgggggaaacaagaccaggtgctggatgtgtctggggcagacatgttggccaagtcaattgccaactgccaggtggagcttctg

SEQ ID NO: 500778 - DNA, 120 bp, Artificial Sequence
  ENSG00000163686_10 (sequence is synthesized)
gaaaactgtgggcactcagtagtgatggaaagacccaggaagacagccaagctcataatcgactttttagcttctgtgcacaacacagacaacaacaagaagctggactgaggccccgac

SEQ ID NO: 500779 - DNA, 120 bp, Artificial Sequence
  ENSG00000163686_11 (sequence is synthesized)
tgcagcctgcattctgcacacagcatctgctcccatcccccaagtctgacgcagccaccactctcagggatcctgccccaaatgcggtcggagcgccagtgaccctgaggaagcccgtcc

SEQ ID NO: 500780 - DNA, 120 bp, Artificial Sequence
  ENSG00000163686_12 (sequence is synthesized)
cttatccctggtatccacggttccccagagctttggggaccacgcgaaaacctccaagatatttttcacaaaatagaaactcatatggaacaaaataagaaaccccagccatgaaatcta

SEQ ID NO: 500781 - DNA, 120 bp, Artificial Sequence
  ENSG00000163686_13 (sequence is synthesized)
ccatgaagtcttcaagttcatgtcactgagaagcttgtgcaaagcagccaccttggaccataattaaatcaaggacattttctttgagacattccttatagttggagactcaagatattt

SEQ ID NO: 500782 - DNA, 120 bp, Artificial Sequence
  ENSG00000163686_14 (sequence is synthesized)
ttgttgcatcaggtgtattcccttgcatgggcagtggcttttataggagcattagtcctcattcgctgaaccctgttgtttaggtctaatttaagttttacatagagacccatgtatgac

SEQ ID NO: 500783 - DNA, 120 bp, Artificial Sequence
  ENSG00000163686_15 (sequence is synthesized)
tgcagcccattggctgcaagaccagggaggaaagtggcaagctgtagaaaatgtttacacgcatggaggggcattgctctagccctcagagcgtccggagcagcagggtacatgggtggg

SEQ ID NO: 500784 - DNA, 120 bp, Artificial Sequence
  ENSG00000163686_16 (sequence is synthesized)
aggttcattcagcacccaccagtcaggtatgttctgagtgaacccacagcagtcgcagaatgagcacctggcagggtgggtttcctaggaataatttattatttttaaaaataggcctaa

SEQ ID NO: 500785 - DNA, 120 bp, Artificial Sequence
  ENSG00000163686_17 (sequence is synthesized)
taaagcaataatgttctagacatctgtctaagtaatcagactcaggttccacacacaagcaacaactcgtgggcctcttttctatttcaatgtgctactaagaacccttggatgtaacat

SEQ ID NO: 500786 - DNA, 120 bp, Artificial Sequence
  ENSG00000163686_18 (sequence is synthesized)
actagttagttaatgaattctgtgaattctgtgaagagtaatgtgattgaaaataagtctaaacagctgtaaaagtgaccacaatgacatgaaataaatttaataagtctagatcagcaa

SEQ ID NO: 500787 - DNA, 120 bp, Artificial Sequence
  ENSG00000163686_19 (sequence is synthesized)
ggcttttatttcttaaatctctgacactttgaatgtctctttgggcccctgaagagaggaagtggtggcctggatctggtgactatcccttgattctgcggtggtgccacaggcacagtc

SEQ ID NO: 500788 - DNA, 120 bp, Artificial Sequence
  ENSG00000163686_20 (sequence is synthesized)
agagtcggcgatctgcacttgcctttccactccgctccccgcgcgggcgctgcccccacctcccgctgcctggataggtttgagatgcccgaaacccggcgccccatttcctgggtccag

SEQ ID NO: 500789 - DNA, 120 bp, Artificial Sequence
  ENSG00000163686_21 (sequence is synthesized)
ccagcctcttgaagccgggggacagagtgaggacggaatctcattttcagcttctgccagagccagtagcagttgggaaagaaggctgtgctctttgaagagagtcagccagcctgaaag

SEQ ID NO: 500790 - DNA, 120 bp, Artificial Sequence
  ENSG00000163686_22 (sequence is synthesized)
ttccctttccccagcctgccccggctcccgtgcccttgcgccccttccgtgtcgaaacacttgaatcaggatgctgtccagccaggtacccgccggcaacttgcggtcccccgcctacag

SEQ ID NO: 500791 - DNA, 120 bp, Artificial Sequence
  ENSG00000163686_23 (sequence is synthesized)
cgacacaggtttcacggctgccttagaaatgcggattgtgtaacgccggctgcagggcagtgcacgtgcagggtttgcgcccctgagcccacagcgaggccaggagtcagccagcctgaa

SEQ ID NO: 500792 - DNA, 120 bp, Artificial Sequence
  ENSG00000163686_24 (sequence is synthesized)
gaaattgcccttcccacccccatggtgtacatcccctgatgaagggagcatcgaaatagacctggttcctctctgtgctataggtactggcggaggacattgggcatgcaagtccgctat

SEQ ID NO: 500793 - DNA, 120 bp, Artificial Sequence
  ENSG00000163686_25 (sequence is synthesized)
tacatgggtgggaggttcattcagcacccaccagtcagaaaatctacagccaagtcattctgggaataaagtgagataaactttacagtttaaatctgaattcaggactgtgtttgaata

SEQ ID NO: 500794 - DNA, 120 bp, Artificial Sequence
  ENSG00000163686_26 (sequence is synthesized)
cttagagcttaaaaacaagaagaagatatgaaaatatgacatcaagctgggctgcagctaaagcagtgcctcagagggaaattcataggcttcaatacgtatattagaagggaagaggct

SEQ ID NO: 500795 - DNA, 74 bp, Artificial Sequence
  ENSG00000163686_27 (sequence is synthesized)
attcataggcttcaatacgtatattagaagggaagaggctaggtggagtagctcacacctgtagtttcaacacc

SEQ ID NO: 500796 - DNA, 120 bp, Artificial Sequence
  ENSG00000163687_0 (sequence is synthesized)
gccagaatccagcactccaagcactgctgtcttctcacagagtcttgaagccagagcagcgccaggatgtcacgggagctggccccactgctgcttctcctcctctccatccacagcgcc

SEQ ID NO: 500797 - DNA, 120 bp, Artificial Sequence
  ENSG00000163687_1 (sequence is synthesized)
ctggccatgaggatctgctccttcaacgtcaggtcctttggggaaagcaagcaggaagacaagaatgccatggatgtcattgtgaaggtcatcaaacgctgtgacatcatactcgtgatg

SEQ ID NO: 500798 - DNA, 120 bp, Artificial Sequence
  ENSG00000163687_2 (sequence is synthesized)
gaaatcaaggacagcaacaacaggatctgccccatactgatggagaagctgaacagaaattcaaggagaggcataacgtacaactatgtgattagctctcggcttggaagaaacacatat

SEQ ID NO: 500799 - DNA, 120 bp, Artificial Sequence
  ENSG00000163687_3 (sequence is synthesized)
aaagaacaatatgcctttctctacaaggaaaagctggtgtctgtgaagaggagttatcactaccatgactatcaggatggagacgcagatgtgttttccagggagccctttgtggtctgg

SEQ ID NO: 500800 - DNA, 120 bp, Artificial Sequence
  ENSG00000163687_4 (sequence is synthesized)
ttccaatctccccacactgctgtcaaagacttcgtgattatccccctgcacaccaccccagagacatccgttaaggagatcgatgagttggttgaggtctacacggacgtgaaacaccgc

SEQ ID NO: 500801 - DNA, 120 bp, Artificial Sequence
  ENSG00000163687_5 (sequence is synthesized)
accccaggtttgtttggctgatcggggaccaagaggacaccacggtgaagaagagcaccaactgtgcatatgacaggattgtgcttagaggacaagaaatcgtcagttctgttgttccca

SEQ ID NO: 500802 - DNA, 120 bp, Artificial Sequence
  ENSG00000163687_6 (sequence is synthesized)
agtcaaacagtgtttttgacttccagaaagcttacaagctgactgaagaggaggccctggatgtcagcgaccactttccagttgaatttaaactacagtcttcaagggccttcaccaaca

SEQ ID NO: 500803 - DNA, 120 bp, Artificial Sequence
  ENSG00000163687_7 (sequence is synthesized)
gcaaaaaatctgtcactctaaggaagaaaacaaagagcaaacgctcctagacccaagggtctcatcttattaaccatttcttgcctctaaataaaatgtctctaacagatatgaactgct

SEQ ID NO: 500804 - DNA, 120 bp, Artificial Sequence
  ENSG00000163687_8 (sequence is synthesized)
ccctgtacttaggaaacaagagtgatccaactgctttcattttttgacctgaatttattctgacttgagccaaattggaaggagaatcttttgtatctctcttggtctcatacctcccct

SEQ ID NO: 500805 - DNA, 120 bp, Artificial Sequence
  ENSG00000163687_9 (sequence is synthesized)
gaattgtctaaaagggaaccaggggcatttgtagaccaaaatgatgatcttcatgccctgagccagagccccatccactgtcactggccctgctcaaccctgtcatgcgagaggctgcag

SEQ ID NO: 500806 - DNA, 120 bp, Artificial Sequence
  ENSG00000163687_10 (sequence is synthesized)
ggggaggaagagcgtcagctttcagtcctcatgaggggtcctgttccacacgcaatgaccagaaacaccaaggccccagctgcccctgtgatttgggcaattaactgttttaagagtctg

SEQ ID NO: 500807 - DNA, 120 bp, Artificial Sequence
  ENSG00000163687_11 (sequence is synthesized)
tttcttcttgctgcttttgggtgactcagcctatgacacttttgctcctcctgaaatctccatatcttgcttttctcaaattccaaggtagcctttgcgcaacatatcactctccactga

SEQ ID NO: 500808 - DNA, 120 bp, Artificial Sequence
  ENSG00000163687_12 (sequence is synthesized)
ctcttgtcccatcagggcccatagtggatggctgtatgggggccatgtgactgaactcctgatcctcgtttcagcccactcatgtgacatgcatggagctcttcagcagggacttactga

SEQ ID NO: 500809 - DNA, 120 bp, Artificial Sequence
  ENSG00000163687_13 (sequence is synthesized)
ccaggacaagagcttgagactttgaggggatctgattgtcactgcacaatcaaggacagtattcccaagagtggatgttgctcaagatagtccaaggaattctatgaagaaaaggactcc

SEQ ID NO: 500810 - DNA, 120 bp, Artificial Sequence
  ENSG00000163687_14 (sequence is synthesized)
acagacaataaattttggacaccctgtttcaacacagtgcatcttagagactggtgtttgcaagtatatggagcaggaaacttcatcccgaagatggagaccccggggctgtcagcaggc

SEQ ID NO: 500811 - DNA, 120 bp, Artificial Sequence
  ENSG00000163687_15 (sequence is synthesized)
ggaggtaaggttgccatcttgtctttctatgccattgtcctggaaagatgagttagcttgggcaacatgatgagactccatctctatgaaaaattcaaaaaaattagctgggcatggtga

SEQ ID NO: 500812 - DNA, 120 bp, Artificial Sequence
  ENSG00000163687_16 (sequence is synthesized)
cctgtctcaaaaaaaaaaaaaaaaaaagatgggttgatgccaccctttgaggtcaccactgaagacacaacattgggcactagaccttgaccctcaatgcctatgattctgtgatttgag

SEQ ID NO: 500813 - DNA, 120 bp, Artificial Sequence
  ENSG00000163687_17 (sequence is synthesized)
tgaggcccctccaaaatttctgatcgagctggtcttggaatgacgcttaccagtaagtgttctgtggggtgacttcgggcatttcctctcccctccctggtcctaaatttgctcatcgct

SEQ ID NO: 500814 - DNA, 120 bp, Artificial Sequence
  ENSG00000163687_18 (sequence is synthesized)
accaccagttcacacagccagtgttgcccaggagtccagctcccttagccacggtcctgagaactttcaaccagttgattttactgtgataaaatagaataggggaaatagatgaggggt

SEQ ID NO: 500815 - DNA, 120 bp, Artificial Sequence
  ENSG00000163687_19 (sequence is synthesized)
ctggacacagaaagaaatgaaaaaagcagatgaggctgagctaaaaagtacagttatgaagaaaatgttggagaaaagagaaaagattagaaaccaatagtagaagaaagataataaaat

SEQ ID NO: 500816 - DNA, 120 bp, Artificial Sequence
  ENSG00000163687_20 (sequence is synthesized)
aaattacaacatgctcacacacaggaatattatgcagctgttaaaagtcatgctggtggccaggtgtggtggcacgtgcctatagtctcacctacctgggaggctgaggtgggaggatcg

SEQ ID NO: 500817 - DNA, 120 bp, Artificial Sequence
  ENSG00000163689_0 (sequence is synthesized)
gctcggcgctgctctttcgcggtttgattctggggtggggcggcagcgggagcgcgcccgcttttcctaggccagcgggcggttgtctgtggctccgcgactgggcgccccgtcacgtag

SEQ ID NO: 500818 - DNA, 120 bp, Artificial Sequence
  ENSG00000163689_1 (sequence is synthesized)
gttacacacacaatcactccccagggacggcccggagtccgtccaggcagctgcgccctccccagacccgggcaccgcggaggctggagccgcaatggtgctgatggagggcgggagatg

SEQ ID NO: 500819 - DNA, 120 bp, Artificial Sequence
  ENSG00000163689_2 (sequence is synthesized)
gagctgaccaggggccggaggggctgagaagagcctgcccaagtctgggccaagcacgaagccctttcccacccgtcgggctcctgggttcccgccagccgatttccagccgtcagggtc

SEQ ID NO: 500820 - DNA, 120 bp, Artificial Sequence
  ENSG00000163689_3 (sequence is synthesized)
acgccactcgctggaaaccctgaactctgtgccccccaagccctgggccccctgcgggaatgttcaaaaatgagtaccagggaggtgcatttgttgaaattttcagtgctcaaggaaaaa

SEQ ID NO: 500821 - DNA, 120 bp, Artificial Sequence
  ENSG00000163689_4 (sequence is synthesized)
atcctggagcaaaatggaagatccttggtagtccatctgtgatttggaaagagtttgataaagaagttaaaagttttgtgtttgtcctggaaggcagcagccaaacaaacaaaattcagt

SEQ ID NO: 500822 - DNA, 120 bp, Artificial Sequence
  ENSG00000163689_5 (sequence is synthesized)
taccaaaggagaataagcaaagccttggattgatccagaggtttcttgtacttcagatttacgtacccctgggacaagacttctccactgaattgctaattactgatttagggaacatca

SEQ ID NO: 500823 - DNA, 120 bp, Artificial Sequence
  ENSG00000163689_6 (sequence is synthesized)
aaagaagattatatttatcaacggtccataaggaactatcctccacccctcttcatgcaaaaattccactcttcatgatcaaacgtaaaatttggtgcaatctatgcattgacttagtag

SEQ ID NO: 500824 - DNA, 120 bp, Artificial Sequence
  ENSG00000163689_7 (sequence is synthesized)
cattcaccagtgaaatattcaagggggcagttttccagtcattggatggaattgttgtctcagctaactgtaagctacggaagatcttcaccttaaaatcaaagccacaagacactgctg

SEQ ID NO: 500825 - DNA, 120 bp, Artificial Sequence
  ENSG00000163689_8 (sequence is synthesized)
ataaggatgctgtctatggtgttcccttttcaacagatgagcctacagatattataccacgaagctgtcaactaatgacagatgttccacatgtcacacagctgctaaacatgactaaac

SEQ ID NO: 500826 - DNA, 120 bp, Artificial Sequence
  ENSG00000163689_9 (sequence is synthesized)
ttcgccaaactgaaataaaattcggaggccatcctctaagatcagcagaatcagatcagttcattaacagaggaacaagtattacacggaacagtaaaaatcaagatgtttgtcatatcg

SEQ ID NO: 500827 - DNA, 120 bp, Artificial Sequence
  ENSG00000163689_10 (sequence is synthesized)
catttggatccaaagttcttgggccacctccactctctggcagaaggaataacatgaagatatccagcgagacagtgagatccgttgggtccaaaaataaccgatcatgccagccgtcca

SEQ ID NO: 500828 - DNA, 120 bp, Artificial Sequence
  ENSG00000163689_11 (sequence is synthesized)
ctgtagagaagtgtgttaatggtacagaaatgtcagccttgctgatacctgagtctgaggaacaaggaaataaagaaaatattcaccaaataaagcagactgtacctattcatgcagcca

SEQ ID NO: 500829 - DNA, 120 bp, Artificial Sequence
  ENSG00000163689_12 (sequence is synthesized)
atctacatattatgcatccgcatccccctcaagaaccatcagcagataagaataataacagaagaagattacggttaaaaagtaccagcagagaaaggacagagacacccagcggtagct

SEQ ID NO: 500830 - DNA, 120 bp, Artificial Sequence
  ENSG00000163689_13 (sequence is synthesized)
ttgaactccggcactctaggaccccagtctcctgatcaatcagatgagtggatttttcctgaaaatgctgatcacatttcatatctggcatccagcagacagtctctacttctgggtgat

SEQ ID NO: 500831 - DNA, 120 bp, Artificial Sequence
  ENSG00000163689_14 (sequence is synthesized)
gactcctgcaacccatcacacctgtggctggaagccagcaaagagagtgaacacgaccagcaggcagaggaatcccagagtgttccaaaggacattttcactttttcatcaagaccacga

SEQ ID NO: 500832 - DNA, 120 bp, Artificial Sequence
  ENSG00000163689_15 (sequence is synthesized)
tcagcacctcatggaaagactcagactatgtccccagaggagctctcatttattttggatctaaaagaggataacagtgtgacaagcagagacacccaatcagaggatgatttttacggc

SEQ ID NO: 500833 - DNA, 120 bp, Artificial Sequence
  ENSG00000163689_16 (sequence is synthesized)
ggcgacagcagtgaagagggtaaccacagtatccagggttctcgaggcccaacaactggtccttcagagttaactcagttaacattagagagcctgctggggaaggctgcaaagcggaca

SEQ ID NO: 500834 - DNA, 120 bp, Artificial Sequence
  ENSG00000163689_17 (sequence is synthesized)
agtaaggaatatctaaggagcgcctacacagaagcaggagcaacagaaagccaggattcctcgatggagcaaatagatagaaataactttgaaatgagtttgttgcctacaacatgcctt

SEQ ID NO: 500835 - DNA, 120 bp, Artificial Sequence
  ENSG00000163689_18 (sequence is synthesized)
tctccaactggaagaaggtgtgggtcctgtcagaaaactccagagcccgtaatcaaagcgaaggatctatcagcccagcaagtgccagcttcactaaacaaaacctccctgaaagaaatc

SEQ ID NO: 500836 - DNA, 120 bp, Artificial Sequence
  ENSG00000163689_19 (sequence is synthesized)
tcaggggaaaggctgagctcgatccccgaagcatctgaatatgactggcgaaactatcagccaagccagatgagtgaatccgagttacagatgctagcaagcctacggtggcaacaaaat

SEQ ID NO: 500837 - DNA, 120 bp, Artificial Sequence
  ENSG00000163689_20 (sequence is synthesized)
gaagaactggaggatgctgggacctcccatggcctgagtgcctcccaggtggacaactgtaatgtcagcataagtaccagcagtgacgacacaaccacctggaactcctgcctgccaccc

SEQ ID NO: 500838 - DNA, 120 bp, Artificial Sequence
  ENSG00000163689_21 (sequence is synthesized)
cctgtcaaccagggtcgccactatcagaaagaaatgaacccaccttctccttctaatccccgggactggttaaatatgttgagcccaccaatcgttcctcccagtcaacagccggctgag

SEQ ID NO: 500839 - DNA, 120 bp, Artificial Sequence
  ENSG00000163689_22 (sequence is synthesized)
cagcgtccagattcctgtgaaagtttgagtgttcaaggtgaagaagacctcagtgtggaagaggacgaggaagtactgactttgttgtatgacccttgtctgaactgttactttgacccc

SEQ ID NO: 500840 - DNA, 120 bp, Artificial Sequence
  ENSG00000163689_23 (sequence is synthesized)
caaacagggaaatactatgagttggtataatgcctccttccggggcagagagcaggcactcccagctggagcagaatagcagttcagggtcgcttaaggagtcaccacaacttatgtgtt

SEQ ID NO: 500841 - DNA, 120 bp, Artificial Sequence
  ENSG00000163689_24 (sequence is synthesized)
gggtgaccacaaaatcaacagtaactgagagaaacgaattcattttgtaaataatgttcaacgttaagaatacctatattccttttgtagatgagtatgattttgaaactgaagaaatta

SEQ ID NO: 500842 - DNA, 120 bp, Artificial Sequence
  ENSG00000163689_25 (sequence is synthesized)
atacagaggcaagattttaggagtttgaattggttcttgtttgttctcattctacatataattttgtttatttcagataattttatgtaaacaaattaagagttattcattcaaattttt

SEQ ID NO: 500843 - DNA, 120 bp, Artificial Sequence
  ENSG00000163689_26 (sequence is synthesized)
tgcagtgttaatctgtaaatgatggcttgatgtacagaaaatgtatttttgcttaaaagatgcctgggtaccttttattttatggcatttgtattaaaaataaagtatgatggtaagaag

SEQ ID NO: 500844 - DNA, 120 bp, Artificial Sequence
  ENSG00000163689_27 (sequence is synthesized)
cacaccatactgctcagatggttttaaacaaccaaaagtattgaaagaatactgatgcctccttttgattttcatctgggattattatttgttaaatcaattcttctagaagtccaggaa

SEQ ID NO: 500845 - DNA, 120 bp, Artificial Sequence
  ENSG00000163689_28 (sequence is synthesized)
gcagggctgcatataagatgtcaaagggttcagaagacagcattttatttcaggttttcactggcctccagaattctcttcatcttctaatttaaaaaaccttcatttattaatattggc

SEQ ID NO: 500846 - DNA, 120 bp, Artificial Sequence
  ENSG00000163689_29 (sequence is synthesized)
ccattttgcaactgtgaaggcaaaactcacactctaaagatatcaggacaagaacctggaagtgtgggtcctcacttcttccttgagcatctatactcatcctgaactacagtttccaga

SEQ ID NO: 500847 - DNA, 120 bp, Artificial Sequence
  ENSG00000163689_30 (sequence is synthesized)
acacatttcacatgagaagaataagcatcttttgtctacagatcccaaagcatccttggacacaattcagagtttcatgaacttgagcggaaagagattacattttcattttcacaaagc

SEQ ID NO: 500848 - DNA, 120 bp, Artificial Sequence
  ENSG00000163689_31 (sequence is synthesized)
atgctgacaaatggaccaccgaagaaaaagcacttagcacatgcacatgctcaccaaaatgcaataccatgctatggtcgctcattctgtccacaaagattgcagctttctatgcactct

SEQ ID NO: 500849 - DNA, 120 bp, Artificial Sequence
  ENSG00000163689_32 (sequence is synthesized)
aactgcattctgccacctgcaccctgtggcccacttgaaatgaagtttgactacatgacctgcttctttagccaataaaatgtgagcagaagtgatgcacttccaggtgacagatttaag

SEQ ID NO: 500850 - DNA, 120 bp, Artificial Sequence
  ENSG00000163689_33 (sequence is synthesized)
aactggcatactttgccacttgatttttttccactctacatagcaactgtaatgttcaagatgctggcttctccatcagcctgcatcccagaacggggaaaacaaagtggccctgggaaa

SEQ ID NO: 500851 - DNA, 120 bp, Artificial Sequence
  ENSG00000163689_34 (sequence is synthesized)
ggccctgggaaaaagatgaaaacacaacttttctatcaagcccaatagattgaagtcaagagagagcaacgcacgtcttgaaaagaactgagtgggctgggcgcggtggctcacgcttgt

SEQ ID NO: 500852 - DNA, 120 bp, Artificial Sequence
  ENSG00000163689_35 (sequence is synthesized)
cgtctcaaaaaaaaagaaaagaaaagaactgagtgtaactgtgggcacatgaagctgatcagaattaaatagataagaagccaattaagtttttgagagagttgtatagccagagaaatc

SEQ ID NO: 500853 - DNA, 120 bp, Artificial Sequence
  ENSG00000163689_36 (sequence is synthesized)
aaaatttaaagctaccctgggccctccccctttccccaggcaggaggcaggctgagaaagctgttctgcccccaaggaggacatattcttcaatgctcactttagatgtgggcaaggaaa

SEQ ID NO: 500854 - DNA, 120 bp, Artificial Sequence
  ENSG00000163689_37 (sequence is synthesized)
ggtaaaggaaaatttgcagaagaaagaaccaaatggactgaggagcaacagaatgagaacactgtaggatagcacttcctggccccctatgggaggtggagccaagtcatctcttctaat

SEQ ID NO: 500855 - DNA, 120 bp, Artificial Sequence
  ENSG00000163689_38 (sequence is synthesized)
ggtgtgagtggaagtgatgggtccttctcatcttttctgatggtgtgagtggaagtgatgggtcattctcatctgttctgatggtgtgagtggaagggatgggtcgctctcatctcttct

SEQ ID NO: 500856 - DNA, 120 bp, Artificial Sequence
  ENSG00000163689_39 (sequence is synthesized)
gatggcgtgagtggaagggatgggtcgctctcatctcttctgatggcgcgagtggaagtaatgggtcattcttgtctcttctgatggtgtgagtggaagtgatgggtccttctcatctct

SEQ ID NO: 500857 - DNA, 120 bp, Artificial Sequence
  ENSG00000163689_40 (sequence is synthesized)
tctgatggcgtgagtggaagtgatgggtcattcttgtctcttctgatggtgtcagtggaagtattgggttgttctcatctcttctgatggtgtgaagggaagtgatgggtccttctcatc

SEQ ID NO: 500858 - DNA, 120 bp, Artificial Sequence
  ENSG00000163689_41 (sequence is synthesized)
tcttctgatggtgtgagtgcaagtgatgggtccttctcatctcttctgatggtgtgagtggaagtaataggtcattctcatctcttctgatggtgtgagtggaagggatgggtcactttc

SEQ ID NO: 500859 - DNA, 120 bp, Artificial Sequence
  ENSG00000163689_42 (sequence is synthesized)
atttattctgatggtgtgagtggaagagatgggtcactttcatctattctgatggtgtgagtggaagggatgggttgctttcctgctgagtgtgtttcttactttccagtgagaggtcct

SEQ ID NO: 500860 - DNA, 120 bp, Artificial Sequence
  ENSG00000163689_43 (sequence is synthesized)
gcagaacactttattccttctggcttaaagactttatcattctgccagactggatccttgagagcctatgataagtagagtgcccctgccagcccatgacagcatgctgtgtggacaaga

SEQ ID NO: 500861 - DNA, 120 bp, Artificial Sequence
  ENSG00000163689_44 (sequence is synthesized)
aacaaactttcattgtattcagcttagatttgagggtcgtatgcttctgcattacctacttatcactgatacaccattggagcaaaaaatcccatctatgaagaaactccaatgatttac

SEQ ID NO: 500862 - DNA, 120 bp, Artificial Sequence
  ENSG00000163689_45 (sequence is synthesized)
cctatatagttctttctctgaatatgtcgtatgccttacctagtgaatcctggggctaaaatggtattgaaatggtcagatccaatcctgagcccctagtcttatgaactaggcctcctc

SEQ ID NO: 500863 - DNA, 120 bp, Artificial Sequence
  ENSG00000163689_46 (sequence is synthesized)
taacaggcagtgctaagcttccatcattcccagacagtggcccaagatgaaagaagacttctctttcccagcttagcttgaatcacaaagcaatccatttgttttggccaaggggatgtg

SEQ ID NO: 500864 - DNA, 120 bp, Artificial Sequence
  ENSG00000163689_47 (sequence is synthesized)
ctactcttttaactcagggtcgcaggctttagggtgcacgcgatggaaaagaactcacttgtaactgttgcaccttgagttcttcttgttccaaaaagctccagaaagaagctcagcccc

SEQ ID NO: 500865 - DNA, 120 bp, Artificial Sequence
  ENSG00000163689_48 (sequence is synthesized)
aacagccggctgagcagcgtccagattcctgtgaaagtttgagtgttcaaggtgggactatgaaaaacgatatgcataagaaaataaaaataatttactataaatagagagaatccatca

SEQ ID NO: 500866 - DNA, 120 bp, Artificial Sequence
  ENSG00000163689_49 (sequence is synthesized)
aaaaagcacataagtgtaatgaagcttttaagtagtcacacatatgcatttatattctctctctcatgaatgactaattttaatttttttaaagtagcaattcagcttgcttttagaacc

SEQ ID NO: 500867 - DNA, 120 bp, Artificial Sequence
  ENSG00000163689_50 (sequence is synthesized)
atttaagctttgcacatgattttgttttccccccaaagccaactattcttgattatgagataggggaaggtttgcatatttatttttgcaaagacagtagcataagccctcatcaccata

SEQ ID NO: 500868 - DNA, 120 bp, Artificial Sequence
  ENSG00000163689_51 (sequence is synthesized)
ggactggttaaatatgttgagcccaccaatcgttcctcccagtcaacagccggctgagcagcgtccagattcctgtgaaagtttgagtgttcaagatatttcacacactcctgaccaggc

SEQ ID NO: 500869 - DNA, 120 bp, Artificial Sequence
  ENSG00000163689_52 (sequence is synthesized)
gggaaccaatgggcgcggccggaacgcgggtggcgctcggcgctgctctttcgcggtttgattctggggtggggcggcagcgggagcgcgcccgcttttcctaggccagcgggcggttgt

SEQ ID NO: 500870 - DNA, 120 bp, Artificial Sequence
  ENSG00000163689_53 (sequence is synthesized)
agcataagtaccagcagtgacgacacaaccacctggaactcctgcctgccaccccctgtcaaccagggtcgccactatcagaaagaaatgaacccaccttctccttctaatccccgcctt

SEQ ID NO: 500871 - DNA, 120 bp, Artificial Sequence
  ENSG00000163689_54 (sequence is synthesized)
gatgtttggtgtaggcatgggaaaaaaaaactatattctgaaacaagactggttagaaggcagcttcccacattttgagggactggttaaatatgttgagcccaccaatcgttcctccca

SEQ ID NO: 500872 - DNA, 120 bp, Artificial Sequence
  ENSG00000163689_55 (sequence is synthesized)
caagattttttaattctctgatgtatttttaaaattagccatacctttgggatagtatgagtgtgtggtagcagtttgatgttatgtctgctaaagtaaatttgtcaacagtcatgctga

SEQ ID NO: 500873 - DNA, 120 bp, Artificial Sequence
  ENSG00000163689_56 (sequence is synthesized)
tagtcttgaagcacagttgtttccttagctccaataagcactaaaacaagttgaaatgaaagagggaaaatcaactgctatttataaaaatgcaacagattgccatgtcagtccacagtt

SEQ ID NO: 500874 - DNA, 120 bp, Artificial Sequence
  ENSG00000163689_57 (sequence is synthesized)
gcatcaggttgttatggtaactttaaactgtctttttttttttttaattaacagtcagccaatttcacttttacttatagaaaccagttttgggtttctttctgttttttcattttaatc

SEQ ID NO: 500875 - DNA, 120 bp, Artificial Sequence
  ENSG00000163689_58 (sequence is synthesized)
cagtttagtgctatgatagcaagaccagtaaaacactgagaatatactgttctagatctctggagaaattgtgttgcagttgctaagcattctaaattgatggttttctggcttccttac

SEQ ID NO: 500876 - DNA, 120 bp, Artificial Sequence
  ENSG00000163689_59 (sequence is synthesized)
tcccctgccatcttttcaccttagacctattaggactcattattttccatatggtcccagaatttgaagagttgtgccaattaaagtttagataatgagtcgtggattagtgctgggact

SEQ ID NO: 500877 - DNA, 120 bp, Artificial Sequence
  ENSG00000163689_60 (sequence is synthesized)
tgccttacaggagattttctgtttgcaattatttagaatatggatatatcctataaattagcaaattcgtaaaaagttttaaaatgtttcaaatcaaactgaatataatttggaaatatt

SEQ ID NO: 500878 - DNA, 120 bp, Artificial Sequence
  ENSG00000163689_61 (sequence is synthesized)
tgtttaaaacctaatacattgataactttttccccataggaagtgcatttagtcgtggattttcttcagcattatttttaacgatggtcattcatactttctggaaaaatttattctaaa

SEQ ID NO: 500879 - DNA, 120 bp, Artificial Sequence
  ENSG00000163689_62 (sequence is synthesized)
agcagaatacgaacaactttagggttagtgaaaatgtacaaagcttttctatatagaaattatagaaataactagaaaacctttttatatgtgcccacaaaatatttttataacgtaact

SEQ ID NO: 500880 - DNA, 120 bp, Artificial Sequence
  ENSG00000163689_63 (sequence is synthesized)
gattaagaatcctttttggacagtgaggcacagattaagtccatagcaccaaccttcggaggcagttgagaatatagtgggattgtttaagcagtaattctgggttttttcaacttttaa

SEQ ID NO: 500881 - DNA, 120 bp, Artificial Sequence
  ENSG00000163689_64 (sequence is synthesized)
tgagtttcttcagcaaagcgcgtagaggatcgtcttttcacaatattcttgcttctgagtgtcatgaaacaattagtcataccaaacataacctactgcaaatccttttatacataaata

SEQ ID NO: 500882 - DNA, 120 bp, Artificial Sequence
  ENSG00000163689_65 (sequence is synthesized)
gtgcatttgatgctagcattttaagtgttgctgctggacacatttgttcctttcacctttaataacataaagctataaaaacatggacatttgtcttcagcacctaatagtgtcctcatc

SEQ ID NO: 500883 - DNA, 120 bp, Artificial Sequence
  ENSG00000163689_66 (sequence is synthesized)
ccagctgataatccttccatggtctaaactggctgattaattcagttcattttatgaatagaatagactcatccccttcccatatgcacagcacaatctctcttactaatgcaaaagcat

SEQ ID NO: 500884 - DNA, 120 bp, Artificial Sequence
  ENSG00000163689_67 (sequence is synthesized)
tactctaatagtgggcatttcatggtaggtgggaaatggtagttctctggaaaactatgagagaagtattatggataatctgccctttaaatacaccacatgaagaacttacctcttcca

SEQ ID NO: 500885 - DNA, 120 bp, Artificial Sequence
  ENSG00000163689_68 (sequence is synthesized)
tctataggaaggctaagcctttagaagaaacagtagagcttcatgggaaaatgaagaatactagctctgaatattttaatttgatatcacttaatgctttcttttgctgtagctactctg

SEQ ID NO: 500886 - DNA, 120 bp, Artificial Sequence
  ENSG00000163689_69 (sequence is synthesized)
cctctgacatccttcaacgtttattatgcagatgtgtatttgttaccaactacataaaattgaaaacaaatttatcatgcattacccaagctttcactggcagggctatctggtcacccc

SEQ ID NO: 500887 - DNA, 120 bp, Artificial Sequence
  ENSG00000163689_70 (sequence is synthesized)
tgtgccatgcccatcaaggtgaccagtagcatacggctagagtctgtggtgagaccatcccattgccaacactggcactcaccaccctttaatcagagcctactaagagtggcagccaga

SEQ ID NO: 500888 - DNA, 120 bp, Artificial Sequence
  ENSG00000163689_71 (sequence is synthesized)
gagaggggaaacacctgccacattatcaagctttggggtttgctggtacagagactaacgagatacaagctaagatacaaaaataggaccaacaaaaatgctaggctatatttaaacaag

SEQ ID NO: 500889 - DNA, 120 bp, Artificial Sequence
  ENSG00000163689_72 (sequence is synthesized)
ttttagcatgtgtaatgataccttcttaacaaaattggattttttcttttgtacttttggtaatttcttttcctgtaggatagcttcttctatttattaattgtataaatcaatgggaaa

SEQ ID NO: 500890 - DNA, 120 bp, Artificial Sequence
  ENSG00000163689_73 (sequence is synthesized)
ttaggctacatatttacaatgtttatttacatatagtctttgaagaaaaatcagtttagttaattaaggcatccttactattaattgcattattttagaatgttacatccttatctttgt

SEQ ID NO: 500891 - DNA, 120 bp, Artificial Sequence
  ENSG00000163689_74 (sequence is synthesized)
ataattatacttcaggaaaacataatgtcaagttgtaaataatggtggacaagtgaataacaattatattattatgcttgaagtttataaagtgtaattaaaagactttatttgatgtta

SEQ ID NO: 500892 - DNA, 120 bp, Artificial Sequence
  ENSG00000163694_0 (sequence is synthesized)
agtcagacccaggaggagtgaggtcaattgccctttagtcccaggactaaccggaagcttctgcaacaggaggacattgaaaataagatggaacccatccacataaggatttgcctcaaa

SEQ ID NO: 500893 - DNA, 120 bp, Artificial Sequence
  ENSG00000163694_1 (sequence is synthesized)
gggcactgcaaaaattgaacagaggaatcccaaggaagctgcctgaatttgcctgtatactctcgttctgcgacttataaaggaccagacaaatcaaattagtggttttggtttccgcca

SEQ ID NO: 500894 - DNA, 120 bp, Artificial Sequence
  ENSG00000163694_2 (sequence is synthesized)
gctgtggatgcctttgacattatgaccgcagaggattccaccgcagccatgagcagtgactcggccgccgggtcctccgccaaggtgcccgagggcgtggcgggcgcgcccaacgaggca

SEQ ID NO: 500895 - DNA, 120 bp, Artificial Sequence
  ENSG00000163694_3 (sequence is synthesized)
gcactgctggcgctgatggagcgcacgggctacagcatggtgcaagagaacgggcagcgcaagtacggcggcccaccgcccggctgggagggcccgcacccgcagcgtggctgcgaggtc

SEQ ID NO: 500896 - DNA, 120 bp, Artificial Sequence
  ENSG00000163694_4 (sequence is synthesized)
ttcgtgggcaagatcccgcgcgacgtgtacgaggacgagctggtgcccgtgttcgaggccgtgggccgcatctacgagctgcgcctcatgatggactttgacggcaagaaccgcggctac

SEQ ID NO: 500897 - DNA, 120 bp, Artificial Sequence
  ENSG00000163694_5 (sequence is synthesized)
gccttcgtcatgtactgccacaagcacgaggccaagcgcgcagtgcgtgagctcaacaactacgagatccgcccgggccgcctgctcggcgtgtgctgcagcgtggacaactgccgcctc

SEQ ID NO: 500898 - DNA, 120 bp, Artificial Sequence
  ENSG00000163694_6 (sequence is synthesized)
ttcatcggcgggatccccaagatgaagaagcgcgaggaaatcctggaggagattgccaaggtcaccgagggcgtgctggacgtgatcgtctacgccagcgcggccgacaagatgaagaac

SEQ ID NO: 500899 - DNA, 120 bp, Artificial Sequence
  ENSG00000163694_7 (sequence is synthesized)
cgcggcttcgccttcgtggagtacgagagccaccgcgcggctgccatggctcgccgcaagctcatgcctggccgcatccagctgtggggccaccagatcgccgtggactgggccgaacct

SEQ ID NO: 500900 - DNA, 120 bp, Artificial Sequence
  ENSG00000163694_8 (sequence is synthesized)
gagatcgacgtggacgaggacgtgatggagaccgtgaagatcctctacgtgcgcaacctcatgatcgagaccaccgaggacaccatcaagaagagcttcggccagttcaaccccggctgc

SEQ ID NO: 500901 - DNA, 120 bp, Artificial Sequence
  ENSG00000163694_9 (sequence is synthesized)
gtggagcgcgtcaagaagatccgcgactacgccttcgtgcacttcaccagccgcgaggatgccgtgcatgccatgaacaacctcaacggcactgagctggagggctcgtgcctggaggtc

SEQ ID NO: 500902 - DNA, 120 bp, Artificial Sequence
  ENSG00000163694_10 (sequence is synthesized)
acgctggccaagcccgtggacaaggagcagtactcgcgctaccagaaggcagccaggggcggcggcgcggctgaggcagcgcagcagcccagctacgtgtactcctgcgacccctacaca

SEQ ID NO: 500903 - DNA, 120 bp, Artificial Sequence
  ENSG00000163694_11 (sequence is synthesized)
ctggcctactacggctacccctacaacgcgctcattgggcccaacagggactactttgtgaaagtagccatccctgccattggggctcagtattccatgtttccagcagctccagcccct

SEQ ID NO: 500904 - DNA, 120 bp, Artificial Sequence
  ENSG00000163694_12 (sequence is synthesized)
aaaatgattgaagatggcaaaatccacacagtggagcacatgatcagccccattgctgtgcagccagacccagccagtgctgctgccgccgcagccgcggccgcagccgccgcagccgct

SEQ ID NO: 500905 - DNA, 120 bp, Artificial Sequence
  ENSG00000163694_13 (sequence is synthesized)
gtcattcccactgtgtcgacgccaccacctttccagggccgcccaataactccagtatacacggtggctccaaacgttcagagaattcctactgccgggatctacggggccagttacgtg

SEQ ID NO: 500906 - DNA, 120 bp, Artificial Sequence
  ENSG00000163694_14 (sequence is synthesized)
ccatttgctgctccagctacagccacgatcgccacactacagaagaacgcggcagccgcggccgccatgtatggaggatacgcaggctacatacctcaggccttccctgctgctgccatt

SEQ ID NO: 500907 - DNA, 120 bp, Artificial Sequence
  ENSG00000163694_15 (sequence is synthesized)
caggtccccatccccgacgtctaccagacatactgaggctggtgaccagcacgaagacagaccacacaaacaccactgaaggaacgcttgactatttatgaagaaggaacatgttggatt

SEQ ID NO: 500908 - DNA, 120 bp, Artificial Sequence
  ENSG00000163694_16 (sequence is synthesized)
cacacatgcaacctgaaagtgaagaatgttagcagatttatttctgaattattttatatacatgaagttttcactagttttttaagactattttcaacttagcatgcctacgttcataca

SEQ ID NO: 500909 - DNA, 120 bp, Artificial Sequence
  ENSG00000163694_17 (sequence is synthesized)
tttccaaaagacttgcaatggttcgtgccttcattccatcttttaaaaatttgtatgctgtactacatttgtatagaggtttttgttgttgtttttttaaggatatattttcagtatgaa

SEQ ID NO: 500910 - DNA, 120 bp, Artificial Sequence
  ENSG00000163694_18 (sequence is synthesized)
tctattttgtagtaccttcaataatatatcaactatatattaaaaaagcacacttgaggagctagggaactattttgaaaaatatatacaatatttaaagatacaaacagtagtgcttaa

SEQ ID NO: 500911 - DNA, 120 bp, Artificial Sequence
  ENSG00000163694_19 (sequence is synthesized)
aaatactacataaagcattattttaaaggttatactggaaagtgcaattttaaaatgagtaaaacctctgtatttctgctggcattaagggttgatggtgttaccatgtatcatcatggc

SEQ ID NO: 500912 - DNA, 120 bp, Artificial Sequence
  ENSG00000163694_20 (sequence is synthesized)
ggtactattttttaaaagaaattaaacactggatctctccttaagccaacattgaaaagacttgccgcacttctgagtccaaacactggaaagctctcctttgccaccgttagccggggc

SEQ ID NO: 500913 - DNA, 120 bp, Artificial Sequence
  ENSG00000163694_21 (sequence is synthesized)
tcattctccatgtgccttagccttaaacatgcccccactcccacatctctcaccctgtcccctcctccccagattcccaatcccaccgcaatgtttggcaagcctaggactgataagtag

SEQ ID NO: 500914 - DNA, 120 bp, Artificial Sequence
  ENSG00000163694_22 (sequence is synthesized)
caatgtttggcaagcctaggactgataagtagctctgatagaggagctggtggcttttatacttcttcctgggtttttgttggggtttgttgtttcgttgttttttgtttttttttttgt

SEQ ID NO: 500915 - DNA, 120 bp, Artificial Sequence
  ENSG00000163694_23 (sequence is synthesized)
tattttcagtagcagagtaagcacaaggttttaatcgagttgcataagacacctttgcatagctatttaattgcccaatgtaaaactttaatgccatttctaatgcttttattcattttt

SEQ ID NO: 500916 - DNA, 120 bp, Artificial Sequence
  ENSG00000163694_24 (sequence is synthesized)
gaagtatgagtttgtagggacaaagaatgtatgttatcgtagacaagacccccagagactcttttcagcagaaagttatgcttctagttgccttaccatgtttcttgcaaaactgtccat

SEQ ID NO: 500917 - DNA, 120 bp, Artificial Sequence
  ENSG00000163694_25 (sequence is synthesized)
ggtcctcaagggtgttggaaacattatgtttattaaatgggcctctcttcctttgctgtgcacttgatgggtgaactggattggggtgtgcacatccaggaggaggaggagagacctgta

SEQ ID NO: 500918 - DNA, 120 bp, Artificial Sequence
  ENSG00000163694_26 (sequence is synthesized)
gaagtttaaagatagtttgtaaatatcttctaatgcttgtttttagtccttttatgttggagaagttcatggtatgtagtttaatgcaaaatgaaaccattttatttcaatgttattaaa

SEQ ID NO: 500919 - DNA, 120 bp, Artificial Sequence
  ENSG00000163694_27 (sequence is synthesized)
aaggtttgttttattaggaagttaatgtattgttgcagtgttttgtgcctgtttaaaggcttttgtttagcagagtgaatgtaaaatacagtaaaatgttaagattgtcatctacttttt

SEQ ID NO: 500920 - DNA, 120 bp, Artificial Sequence
  ENSG00000163694_28 (sequence is synthesized)
aaaaaaaaatatcaacttggaattgttttttaaaggctcaatcaaggaagtgaggtgtgcaataaggtagcaagtaaaacgcagttgcgtttttatgtcatgttagagatccatacaatt

SEQ ID NO: 500921 - DNA, 120 bp, Artificial Sequence
  ENSG00000163694_29 (sequence is synthesized)
ttccactcacgggatttttgttgatggctgaattcttgtggattcataagaggatcatgcccttagcaagtacttttgttttgttttaaattaagagattcccaaatgcctttttccccc

SEQ ID NO: 500922 - DNA, 120 bp, Artificial Sequence
  ENSG00000163694_30 (sequence is synthesized)
tcatcttgaaatgagatgagtttttatgtgtaagcaatatttatttaactattctataaaattattgagtgcctactgaggcctttaagcaccgctaacattcctttccatcattctttt

SEQ ID NO: 500923 - DNA, 120 bp, Artificial Sequence
  ENSG00000163694_31 (sequence is synthesized)
aaatgacataaaataattgtgcaatgttcctgatgatgtaccccacaagctgcattcaaactcaaatctgtgggaatgagtgactcgacaaaatgtaattcggatcagatcctcatcccc

SEQ ID NO: 500924 - DNA, 120 bp, Artificial Sequence
  ENSG00000163694_32 (sequence is synthesized)
tgactgtgtgaaaaaagtactctccttctagtgaaggattgtcacagagtttcactggatgaaactatgacccagtattcttactgtattttacatatgcctgtaaattatttgcaaaaa

SEQ ID NO: 500925 - DNA, 120 bp, Artificial Sequence
  ENSG00000163694_33 (sequence is synthesized)
taacatggcaaccaccaaactcccttaaaaacaaacattggtgacatggccaattaagtatcagtgagcctcctatctgggacttatctgttcctattgtttcaaaaccatttcatgtac

SEQ ID NO: 500926 - DNA, 120 bp, Artificial Sequence
  ENSG00000163694_34 (sequence is synthesized)
actactgaggtaagtttataacttgaaatgtgaactttttttttttttagtgttaagaacaaactatataaatgtaaaaaaaaagttttagagttctgttttcaaacattgctagtggtt

SEQ ID NO: 500927 - DNA, 120 bp, Artificial Sequence
  ENSG00000163694_35 (sequence is synthesized)
tagttaactttagctgctttatatttgaaaagcttttatttagatcttgctccatttacagtacattcttaggatgtatgtagtaaataaagctttctttaaagcaatcgcaagacctta

SEQ ID NO: 500928 - DNA, 120 bp, Artificial Sequence
  ENSG00000163694_36 (sequence is synthesized)
agactagacgctgagcgctcccgtgcgcagcgccccacgcagccgggacgcggcgccgctctgcgggtggaaccgccgcgcgctcccggcctcgggagctgagcccgagagaacttcgct

SEQ ID NO: 500929 - DNA, 120 bp, Artificial Sequence
  ENSG00000163694_37 (sequence is synthesized)
gccttcgggtcgccgctcccgctttccactgtggaatgtgcagcttgggatagagagaaaccagggtttggggagcggtcctcctggagactttctctctgcaagtctccaaggttaagc

SEQ ID NO: 500930 - DNA, 120 bp, Artificial Sequence
  ENSG00000163694_38 (sequence is synthesized)
aattctgacccactggaattcccagagcctgggagttaagcctaaaacgctctgttgctttaagcggcgcggtggggagtcgctggacactccttattttggttttacattaaaaagaag

SEQ ID NO: 500931 - DNA, 120 bp, Artificial Sequence
  ENSG00000163694_39 (sequence is synthesized)
gcggacgagaagatgttgtaggtgacttcctagctgtgttaagttgctcctgggctgtgaatggtgttaatttctgaagtgggcggctccaaaaacttaacaaggaaagctcaggtaacg

SEQ ID NO: 500932 - DNA, 120 bp, Artificial Sequence
  ENSG00000163694_40 (sequence is synthesized)
attgggcccaacagggactactttgtgaaagcaggcagcataagaggccgagggcgaggtgcagctggcaacagagccccagggcctaggggttcctacctcgggggatattctgctggt

SEQ ID NO: 500933 - DNA, 120 bp, Artificial Sequence
  ENSG00000163694_41 (sequence is synthesized)
cgtggtatatatagccgatatcatgaagggaaaggaaagcagcaagaaaaaggatatgaactggtgccgaatttggaaatccctaccgtcaacccagttgccattaaacctggtacagta

SEQ ID NO: 500934 - DNA, 120 bp, Artificial Sequence
  ENSG00000163694_42 (sequence is synthesized)
aaggggaagtgtggaaatagagcctgcttgttcattttcattattgtacattacatgatatcttttcgaccattatattgtgttccctcagtggtgtttgctctgagggtgggacacaag

SEQ ID NO: 500935 - DNA, 120 bp, Artificial Sequence
  ENSG00000163694_43 (sequence is synthesized)
cctgtttagtgtctcgtaaaacatttaccaaaagcactgagccatggtttttgaagggcattccgttgccagagtgtgggaggagagagcaagcagggaaagagagcgccaggtgcttag

SEQ ID NO: 500936 - DNA, 120 bp, Artificial Sequence
  ENSG00000163694_44 (sequence is synthesized)
agaaaccctccgtaactctaggtcagagcgcactaaaatgagccacttctgaacgagcagcgcccaggccccaggccctgctgcgaaggccccggcaaaggtcagggccccgtccgcgtg

SEQ ID NO: 500937 - DNA, 120 bp, Artificial Sequence
  ENSG00000163694_45 (sequence is synthesized)
acgctcctgcctgcgcgcggccaagccatgctcggccccagctcaggtaacggaggccttggaaagagactctgcgtcaggtcacccagcagagatcagcaatccttggctcactgagga

SEQ ID NO: 500938 - DNA, 120 bp, Artificial Sequence
  ENSG00000163694_46 (sequence is synthesized)
catgactcaaatgcacataacccggtggcgggggagaaaagtgggtgaacatcacatagcgacatcaaaatgctaatccttgccacccccctttgtttttgtttttacaaacgtattgtt

SEQ ID NO: 500939 - DNA, 120 bp, Artificial Sequence
  ENSG00000163694_47 (sequence is synthesized)
gttgtgtttgtttaatttactaggccagagtgccctgtatgtttgtaagcacaaatgtcctcagaggactcccacagccaaaaagaatgacagaggtgtatttgaatgatttcagtgaaa

SEQ ID NO: 500940 - DNA, 120 bp, Artificial Sequence
  ENSG00000163694_48 (sequence is synthesized)
ctcttttaatactgatttcatgaaaatgtctggtggtgggttcttcctgtagcattactgcatatcatcaactagaatgcatcccccgcccttcacacatacaatttaacatgtctgaaa

SEQ ID NO: 500941 - DNA, 120 bp, Artificial Sequence
  ENSG00000163694_49 (sequence is synthesized)
ttcggtgcaccttatgcaaacaggtctggtgaaatacagcatttctctgataatccccaaatgaccagcattaagtattccctaccttctatttttcacacaatacaaatgttttttttt

SEQ ID NO: 500942 - DNA, 120 bp, Artificial Sequence
  ENSG00000163694_50 (sequence is synthesized)
tttttttctttttagagggttgaatttttaagggtaagaaatgcatagtctgatgagtagatgattagtaagaagtctgtgcttaccaaagaaagaatttaggtttccttttttgttttt

SEQ ID NO: 500943 - DNA, 65 bp, Artificial Sequence
  ENSG00000163694_51 (sequence is synthesized)
gcttaccaaagaaagaatttaggtttccttttttgtttttgtttttgaaatgaagtcacacctgg

SEQ ID NO: 500944 - DNA, 120 bp, Artificial Sequence
  ENSG00000163694_52 (sequence is synthesized)
aacttttttttttggtgacttcatatgatagtcttgagatgagcaccccaaggaccttgtaaatagtgggcgctggcactcagaacagcccatgtgagataatgaagcagccttccagac

SEQ ID NO: 500945 - DNA, 120 bp, Artificial Sequence
  ENSG00000163694_53 (sequence is synthesized)
ataagatcccagaatcagacacttatccaaggttcccctcctgcaatcagcgggtaggagtttgcaatgaaaacactccatgctatgtcccagagtgactcgttcatttatccgtgaaag

SEQ ID NO: 500946 - DNA, 120 bp, Artificial Sequence
  ENSG00000163694_54 (sequence is synthesized)
cagagtccaaatccatgttcatgttaaatgtgcagaaaaatagcatcttgagagttaatgccacagaatgggcatgattccctaagccacatttgcctgattgagacagactttaacatt

SEQ ID NO: 500947 - DNA, 120 bp, Artificial Sequence
  ENSG00000163694_55 (sequence is synthesized)
tgcaaaacctccatgttatgagaccctataggtgatagtacatgatctgtagggatacaagtaaatccattaacaaacattttttgagcacctgctatgtgccaggctctgtgctaggct

SEQ ID NO: 500948 - DNA, 120 bp, Artificial Sequence
  ENSG00000163694_56 (sequence is synthesized)
ctgtgctagatgtagcataattaagaagtaattaggacagaaaggattgctgtccccacagggctactttagtagtcacagaagatattaaataatacattaacagagtaatgagtgggc

SEQ ID NO: 500949 - DNA, 120 bp, Artificial Sequence
  ENSG00000163694_57 (sequence is synthesized)
tgatgaagaactgtaaggagttaagagtctaaaacaagaaaacctaagctagccagagtggctcacgcctgcaatcccagcacatagggaggccagggtgagaggatcacttgagctcag

SEQ ID NO: 500950 - DNA, 120 bp, Artificial Sequence
  ENSG00000163694_58 (sequence is synthesized)
gagttcaagaccaacctgggcaacataatgagacctgtctctacaaaaatttaaaaattgtcatcccattctctactggaaaataaaaaattagctgggtatgctggcacgcacccatag

SEQ ID NO: 500951 - DNA, 120 bp, Artificial Sequence
  ENSG00000163694_59 (sequence is synthesized)
tcccagctacttgggaggctgcagtgagagaattgcttaggcctgggaggttgaggctacagtgagccaagattgcatcactgcagtctagccagggcaacagagcaagaccctatctcg

SEQ ID NO: 500952 - DNA, 120 bp, Artificial Sequence
  ENSG00000163694_60 (sequence is synthesized)
ataaacaggtaaggcggagggggtggggcgcggattgcggacatctgggtttcttgggaattgggatggggtgggggttcgagccaactccccagagagcaggcaaggtgaagcgagggc

SEQ ID NO: 500953 - DNA, 120 bp, Artificial Sequence
  ENSG00000163694_61 (sequence is synthesized)
attgggcccaacagggactactttgtgaaagatacaatcctagaaactcaccctgcaagtttgcctcttgtactaagaagacatgcttaggatgcaaatctaggctgaaatagaatgttg

SEQ ID NO: 500954 - DNA, 120 bp, Artificial Sequence
  ENSG00000163694_62 (sequence is synthesized)
gaagcatctttaccagcctattaaagagcaaaggtgtagccacctgcaattaagactggggcagttaaatgccgagaaccgagggctgaggtctgcctccagcaccgtcactgttggttg

SEQ ID NO: 500955 - DNA, 120 bp, Artificial Sequence
  ENSG00000163694_63 (sequence is synthesized)
taatttctccaacgtggttctggctgggtttctcggagcagcccgaagggggccgagcgtctgactcggacagatgcccccaggtggagcaggtgccacttctgggtgtctgaaaggcat

SEQ ID NO: 500956 - DNA, 120 bp, Artificial Sequence
  ENSG00000163694_64 (sequence is synthesized)
gtgacttttggggcggggagagaagtccgtctggtcaagtcccccaatctctgccatcaaggccgattttctttgaaccttcagcaaagctcaggtaacggaggccttggaaagagactc

SEQ ID NO: 500957 - DNA, 120 bp, Artificial Sequence
  ENSG00000163694_65 (sequence is synthesized)
tgaaccttcagcaaaggtatctgcgctcctaaaaaacaacaggaatgtggcactggcctttagccaggggaggctcagccagcaggataaaatttcagggcagatttacgggaagttgcc

SEQ ID NO: 500958 - DNA, 120 bp, Artificial Sequence
  ENSG00000163697_0 (sequence is synthesized)
ctggagcagagccgctgggcgccggagccgaggcgagcgccgcgcgcaccactggttggagttgctgtgggtgagctgctgtggtctgtagccaagcatgctgtggtcggatctgcccag

SEQ ID NO: 500959 - DNA, 120 bp, Artificial Sequence
  ENSG00000163697_1 (sequence is synthesized)
ccgtggaacagaaacatttgctggatggaaaatccataaaagaaagctcctgtgaaaagctgaggctgacaataatttaagcaaaatcagatcgatctctttgggctgcctgacctcctt

SEQ ID NO: 500960 - DNA, 120 bp, Artificial Sequence
  ENSG00000163697_2 (sequence is synthesized)
gggtgcttgctattaattaacagactttgtggggaaaaaaaggagcttgccttctgagctttgtaccaaagacctgggaaaactaaccatctcagtctttcctgaggacttgggaactgc

SEQ ID NO: 500961 - DNA, 120 bp, Artificial Sequence
  ENSG00000163697_3 (sequence is synthesized)
cgaggcctctgccaatgtgttgactgtcgctatgggctcactgttgtccaggcagctcatatttcaaattataacctatttcctgcaccattgctgacgcctggtgatccatgtcagaag

SEQ ID NO: 500962 - DNA, 120 bp, Artificial Sequence
  ENSG00000163697_4 (sequence is synthesized)
tacttccagctgactcaggtgttgacaccttggcagtgtttatggccagcagcggaactacagacgtcacaaatcggaacagcccagccacaccaccaaacacccttaacctccgatcct

SEQ ID NO: 500963 - DNA, 120 bp, Artificial Sequence
  ENSG00000163697_5 (sequence is synthesized)
cccacaatgaactgttgaacgctgaaataaaacacacagaaaccaagaacagcacacctcccaaatgcaggaaaaaatatgcactaactaacatccaggcggccatgggcctctcggatc

SEQ ID NO: 500964 - DNA, 120 bp, Artificial Sequence
  ENSG00000163697_6 (sequence is synthesized)
cagctgcacagcccctgctgggaaatggctctgccaacatcaagctggtgaaaaatggggagaaccagctccgtaaggctgcagagcaagggcagcaggaccccaacaaaaacctgagcc

SEQ ID NO: 500965 - DNA, 120 bp, Artificial Sequence
  ENSG00000163697_7 (sequence is synthesized)
ccactgcagtcatcaacataacttctgagaagttagagggtaaagagccccacccacaggattcctcgagctgtgagattttaccctcccagcccaggagaactaagagcttcctaaatt

SEQ ID NO: 500966 - DNA, 120 bp, Artificial Sequence
  ENSG00000163697_8 (sequence is synthesized)
actatgcagatctggaaacctcagccagagaactagagcagaaccgaggcaatcaccatgggactgcggaagagaaatcccagccagtccagggccaggcctccaccatcattgggaatg

SEQ ID NO: 500967 - DNA, 120 bp, Artificial Sequence
  ENSG00000163697_9 (sequence is synthesized)
gcgatttgctgctgcagaaaccaaacagaccccagtccagccctgaagacggccaagtagccacagtgtcatccagcccagaaaccaagaaggatcatccgaaaacaggggccaaaaccg

SEQ ID NO: 500968 - DNA, 120 bp, Artificial Sequence
  ENSG00000163697_10 (sequence is synthesized)
actgtgcactgcaccggatccagaacctggcaccgagcgatgaggagtccagctggacaacgttgtcccaagacagtgcctcacccagctccccggatgaaacagatatatggagtgatc

SEQ ID NO: 500969 - DNA, 120 bp, Artificial Sequence
  ENSG00000163697_11 (sequence is synthesized)
actcatttcagactgatccagatttgccgcctggctggaaaagagtcagtgacattgccgggacctattattggcacatcccaacaggaacgactcagtgggaacggcccgtctccatcc

SEQ ID NO: 500970 - DNA, 120 bp, Artificial Sequence
  ENSG00000163697_12 (sequence is synthesized)
cagcagatctccagggttctaggaaagggtcacttagttctgtaacgccatctcccaccccagagaacgaggatttgcatgcagccactgttaacccggaccccagtttaaaagagtttg

SEQ ID NO: 500971 - DNA, 120 bp, Artificial Sequence
  ENSG00000163697_13 (sequence is synthesized)
aaggagcaaccctacgctatgcatctttgaaactcagaaatgccccacaccctgatgatgatgattcttgtagtatcaacagtgacccagaagccaagtgttttgctgtgcgttctctgg

SEQ ID NO: 500972 - DNA, 120 bp, Artificial Sequence
  ENSG00000163697_14 (sequence is synthesized)
gatgggtagagatggcagaagaggacctcgcccccggtaaaagtagtgttgcggtcaacaactgcatcaggcaactttcctactgcaaaaatgacatccgagacacagtcgggatttggg

SEQ ID NO: 500973 - DNA, 120 bp, Artificial Sequence
  ENSG00000163697_15 (sequence is synthesized)
gagaggggaaagacatgtacctgatcctggagaatgacatgctcagcctggtggaccccatggaccgcagcgtgctgcactcgcagcccatcgtcagcatccgcgtgtggggcgtgggcc

SEQ ID NO: 500974 - DNA, 120 bp, Artificial Sequence
  ENSG00000163697_16 (sequence is synthesized)
gcgacaatggccgggattttgcttatgtagcaagagataaagatacaagaattttgaaatgtcatgtatttcgatgtgacacaccagcaaaagccattgccacaagtctccacgagatct

SEQ ID NO: 500975 - DNA, 120 bp, Artificial Sequence
  ENSG00000163697_17 (sequence is synthesized)
cctttgcaagattttccaacaccaaagactgagctggtccagaagttccacgtgcagtacttgggcatgttacctgtagacaaaccagtcggaatggatattttgaacagtgccatagaa

SEQ ID NO: 500976 - DNA, 120 bp, Artificial Sequence
  ENSG00000163697_18 (sequence is synthesized)
aatcttatgacctcatccaacaaggaggactggctgtcagtgaacatgaacgtggctgatgccactgtgactgtcatcagtgaaaagaatgaagaggaagtcttagtggaatgtcgtgtg

SEQ ID NO: 500977 - DNA, 120 bp, Artificial Sequence
  ENSG00000163697_19 (sequence is synthesized)
cgattcctgtccttcatgggtgttgggaaggacgtccacacatttgccttcatcatggacacggggaaccagcgctttgagtgccacgttttctggtgcgagcctaatgctggtaacgtg

SEQ ID NO: 500978 - DNA, 120 bp, Artificial Sequence
  ENSG00000163697_20 (sequence is synthesized)
tctgaggcggtgcaggccgcctgcatgttacgatatcagaagtgcttggtagccaggccgccttctcagaaagttcgaccacctccaccgccagcagattcagtaaccagaagagtcaca

SEQ ID NO: 500979 - DNA, 120 bp, Artificial Sequence
  ENSG00000163697_21 (sequence is synthesized)
accaatgtaaaacgaggggtcttatccctcattgacactttgaaacagaaacgccctgtcaccgaaatgccatagctgcacatgcaaaaggactcggctatttacctgaagattgactag

SEQ ID NO: 500980 - DNA, 120 bp, Artificial Sequence
  ENSG00000163697_22 (sequence is synthesized)
ctacactaaagaaaatgaactccgccatccgaccttccatccagttgctgatgctttgtcttcagagaatttacccttaaccaagcagtgttagacaagcatgttctctcgtcttgccac

SEQ ID NO: 500981 - DNA, 120 bp, Artificial Sequence
  ENSG00000163697_23 (sequence is synthesized)
catcatgtgatatgaaaagaagcatgaataattttttttgctgtaagttacatcatgcgcagtggaaggtctttttcttattgtaaatattgtgaacattacttaacttcacacacacac

SEQ ID NO: 500982 - DNA, 120 bp, Artificial Sequence
  ENSG00000163697_24 (sequence is synthesized)
agagaagagtgtggccccacccctcctagtgaactaacgctgcgtccttggaatgaatgatgcgtgagttagtttcactgtcttcttggctggacctgtcacaagcaacctttaagtcct

SEQ ID NO: 500983 - DNA, 120 bp, Artificial Sequence
  ENSG00000163697_25 (sequence is synthesized)
acagcactttgccctgttttcaacattggagtaggcactgcatagcagataccattgaattgctgtaaaaataggatggcgagtttgtgttttaatttttcataaaattgaacctgttgg

SEQ ID NO: 500984 - DNA, 120 bp, Artificial Sequence
  ENSG00000163697_26 (sequence is synthesized)
ttgacaaaattggctgttggcatcagtatagaaaccaactggcagctttccctgacaagctctttgacacatggacaccatttcatgtctacagctgtttgtgggatgttggaaaaaaat

SEQ ID NO: 500985 - DNA, 120 bp, Artificial Sequence
  ENSG00000163697_27 (sequence is synthesized)
gaaacttcaaaattgatgaaaaactaaattcgaggaattaaaatcgaacaaaacatagcctttcttttccgatggttttcaaactgattatttttaaaagagattaataaaatcataatg

SEQ ID NO: 500986 - DNA, 120 bp, Artificial Sequence
  ENSG00000163697_28 (sequence is synthesized)
cattttgggtgggacatatttcaaacttctgccttatattgtacggtgcagctagagaattatagttcactatggccattctctacataaacattaagatgaaatactcctcatcagcct

SEQ ID NO: 500987 - DNA, 120 bp, Artificial Sequence
  ENSG00000163697_29 (sequence is synthesized)
ttcatccttagtttgagaattagctgatatgcaatttgaagttgaggaaatatcattgatatttctatcatgcacgattattttagatttctaccaccgtgtgatttttgctagtccatg

SEQ ID NO: 500988 - DNA, 120 bp, Artificial Sequence
  ENSG00000163697_30 (sequence is synthesized)
tgctagaggtaaacgttctgctggaattctgcatccagctctatccccctctgatgctttttgcccagaaagctgtctgtccatcatgtattgtccatggcaacaaattacattaggttg

SEQ ID NO: 500989 - DNA, 120 bp, Artificial Sequence
  ENSG00000163697_31 (sequence is synthesized)
aacctttccttgattttatgtatttaatattagaatttgttggactcaactagatatattttttaatttatattttttccattttactttgaagatttgaaatgttcatacctgagcaaa

SEQ ID NO: 500990 - DNA, 120 bp, Artificial Sequence
  ENSG00000163697_32 (sequence is synthesized)
gtctacacaggagtaatggactgtttaacaagtttcccaaaacagcattttcctgctccttcgtatgtaggtgagaaacttagctggaaagacatacaaatttagactctcgttgacatt

SEQ ID NO: 500991 - DNA, 120 bp, Artificial Sequence
  ENSG00000163697_33 (sequence is synthesized)
gtcgttttaaaaggaagttgctaaggcgatcaatctcaatattagtcttgtttacttcttcttaatgtcaaaattaacatttacaacatccaattataaaagtaatgctttatgtttata

SEQ ID NO: 500992 - DNA, 120 bp, Artificial Sequence
  ENSG00000163697_34 (sequence is synthesized)
gccaaagcctggagaagtggaatctcgtcagcgccgctccctgcgcgggactcgcggaacggcactgagcatgctcagttgccggagcccgttctggtctcaagtaggaagctagtgcgc

SEQ ID NO: 500993 - DNA, 120 bp, Artificial Sequence
  ENSG00000163697_35 (sequence is synthesized)
aagttcatgaaaaccaggactaggacccacggctcccaaagcccgttcttgctgtgttgtgctgcctccatatccgtcaggaagagcctttccagaatgattctgggcatatactaagaa

SEQ ID NO: 500994 - DNA, 120 bp, Artificial Sequence
  ENSG00000163697_36 (sequence is synthesized)
gagcaggtatggaaagatctattgtcagggaatcttagaattccctacacgagtgggagaaagatgtccaaattccttacgcagtggtattcatgatggtgccctatctaagtccaggac

SEQ ID NO: 500995 - DNA, 120 bp, Artificial Sequence
  ENSG00000163697_37 (sequence is synthesized)
tgttttcctacagcgtgcctcaaaagtgttgtagagggcaggattctacattcacagcctgttccatctacgagattttccagatgctacttgtggtagacattcctaactcatggtact

SEQ ID NO: 500996 - DNA, 120 bp, Artificial Sequence
  ENSG00000163697_38 (sequence is synthesized)
tagccaccagagatcatgatggaatgagtgggtggcttttctacctgccattccctcagaattcatgaggggtgggggacagggggaccggaattgtcttagcaccccaatgttatgaca

SEQ ID NO: 500997 - DNA, 120 bp, Artificial Sequence
  ENSG00000163697_39 (sequence is synthesized)
aaactatgctactttagaaacgcagtctgtttttcaccaattgacatactactgatctgaagtaaccagtgccatcataagaaattactgcattaagaaaatccttgctgtgccctttga

SEQ ID NO: 500998 - DNA, 120 bp, Artificial Sequence
  ENSG00000163697_40 (sequence is synthesized)
aaagctgttcagaaatcatttacagtgatctttcatctcggtcgctgtagtgaaacattttagtgtgataaatttcaaaattctaaacaaattacccacttttatattggaaatctctac

SEQ ID NO: 500999 - DNA, 120 bp, Artificial Sequence
  ENSG00000163697_41 (sequence is synthesized)
cagaactccctcttcattttttaaggcatacatttgcttgttttcaagatcaagaattctgagctagctttaagtagcaaactgatttatatgtgcaattataggatgcattaagatgaa

SEQ ID NO: 501000 - DNA, 120 bp, Artificial Sequence
  ENSG00000163697_42 (sequence is synthesized)
tgatagcctttacatattgaaaactttgcagacgttttgttttgaaaatggcattgtatagtaaatgcaaattaattttgtaaaattatgttaaagagtatgttcagacactttctgcca

SEQ ID NO: 501001 - DNA, 120 bp, Artificial Sequence
  ENSG00000163697_43 (sequence is synthesized)
tggccaaaaagtatgtatgaaagtatgtgtgtatttgtttgtaaaaggatgccaatgttttacctgatatcttagtgacacttcagttatctatgcattctttagatctgtgattcggta

SEQ ID NO: 501002 - DNA, 120 bp, Artificial Sequence
  ENSG00000163697_44 (sequence is synthesized)
aacaggcagccatgttcacgatgccttctatgtcttaccatatttttaattaacctgttaaatacagcttaaaatatttttattttatttattctatttttactgaaatatactgcatta

SEQ ID NO: 501003 - DNA, 120 bp, Artificial Sequence
  ENSG00000163697_45 (sequence is synthesized)
ttgtgttaatgtattatctttcctggatattatctcccagtgtatccagatctaagtaatctcagtgaactatacattgcctaaaaagtggttttgtaatgatttgtagtcacatttcta

SEQ ID NO: 501004 - DNA, 120 bp, Artificial Sequence
  ENSG00000163697_46 (sequence is synthesized)
ttgggatatgtagaagaaaaggcaaaatgcttaaagttccttttattttttaaaagcagctagatagacacagacttgccacctcatacatctgctccttggcaacatcaaggggaacga

SEQ ID NO: 501005 - DNA, 120 bp, Artificial Sequence
  ENSG00000163697_47 (sequence is synthesized)
ctagccaacatgcctatggctaaaaactttcctttgcagactaaagcactgcttggtgcttcgtttttctacccttcacaacatgtgtgatttcatctaagagatatatacatgtacaca

SEQ ID NO: 501006 - DNA, 120 bp, Artificial Sequence
  ENSG00000163697_48 (sequence is synthesized)
tgccctttgtttccacctggatacaagatcactcatagctaattaggaccattgttttttgttcatctgtcttgttgcatgaagggacattagacccatttccattaaaataagttcttg

SEQ ID NO: 501007 - DNA, 120 bp, Artificial Sequence
  ENSG00000163697_49 (sequence is synthesized)
gtgataaactgtggcactgctacttctttttaaatccactttatgatttcaagatggacacttgtaagatgactcgacacaaggccattgcctggaagccccagagctttcctctgtttg

SEQ ID NO: 501008 - DNA, 120 bp, Artificial Sequence
  ENSG00000163697_50 (sequence is synthesized)
tatggcccgttcatgtcccaggcattgcaacacaaactcctcaagatttcaccacaacatgacaagcattttcctaactgatattagcacaatttaactaataagccccttcgctctcta

SEQ ID NO: 501009 - DNA, 120 bp, Artificial Sequence
  ENSG00000163697_51 (sequence is synthesized)
gttggccaggcttaacctaatacacatctaacgtgtgtgccacacggccagtagaaagtttaacttcagcttcagggcaaagatacccactcacaccgtgtcaacgcaagcagtagttcc

SEQ ID NO: 501010 - DNA, 120 bp, Artificial Sequence
  ENSG00000163697_52 (sequence is synthesized)
tggcctccagagcagcttacttcccctgaaagaacgctttgttttcctttatgcccttttcctgttgaccacttttacacatttaaatgtaatttgttgtgagaataaatttagctgcat

SEQ ID NO: 501011 - DNA, 120 bp, Artificial Sequence
  ENSG00000163697_53 (sequence is synthesized)
aaaacgttcggctcatttatctgacatcttagtcacatatacaaggaatagaaatagaaactcggtgtctctagttatttttaaattattcttacctcagacttcttagaaatcacttta

SEQ ID NO: 501012 - DNA, 120 bp, Artificial Sequence
  ENSG00000163697_54 (sequence is synthesized)
gtaatggagcattttgctttgattagttactacatatttctgcctggtaagaactaggaagtaacttcaaattttgagtaatcaccctgtacttatttggtgatcaggaaggccagctgg

SEQ ID NO: 501013 - DNA, 120 bp, Artificial Sequence
  ENSG00000163697_55 (sequence is synthesized)
ccttccggacatagaagcctatttagtcaccaactcgagtcttttgtaagcggtcttgctaggattgtgatattttagcacgaagaagtttatcacttcctttaagaacctgacatcaaa

SEQ ID NO: 501014 - DNA, 120 bp, Artificial Sequence
  ENSG00000163697_56 (sequence is synthesized)
gaataaagaatagaggtgtacacacactaaatccaaaatgaaaggtaactagagaaatcagttgaatctggtttagcttaactgttaggcgcaggaaggcagataaacagaatttaaagt

SEQ ID NO: 501015 - DNA, 120 bp, Artificial Sequence
  ENSG00000163697_57 (sequence is synthesized)
atgtccccgctttttgttcatcttgcacttccacagtggtttctctctagtcagtaacaaaatttcattatggtttcaggcattatatggtggtaaataatttcagattaaaaatgtgtt

SEQ ID NO: 501016 - DNA, 120 bp, Artificial Sequence
  ENSG00000163697_58 (sequence is synthesized)
tgctattggagtatctgaatactagtaatttcattatttagaattttgcagcacttttatctcaagaagaagtccaagaatgtaaaatgccaaatgaaacatgtcagtggaatcaatatt

SEQ ID NO: 501017 - DNA, 120 bp, Artificial Sequence
  ENSG00000163697_59 (sequence is synthesized)
ctccttcattagaattccctcatattgctttttttttttttcttcagacagaggagtcttactctggagtgcagtggtgtaatttcagctcaccacaacctccacctcccaagttcaagc

SEQ ID NO: 501018 - DNA, 120 bp, Artificial Sequence
  ENSG00000163697_60 (sequence is synthesized)
cctgacctcaggtgatccgcccgccccaacctcccaaagtatgtgagccaccacgtccggcctcatattgcttttatccaaaattcttttcccttttcactctaccaaagtatttaaata

SEQ ID NO: 501019 - DNA, 120 bp, Artificial Sequence
  ENSG00000163697_61 (sequence is synthesized)
atcctgtccttcatagaagattctcaaagaagaaaactgcagtgtaattaatgaatggtttaattcagaatcttcatatacttctaaagagaaaaataatttagtgccaaatgcatgtta

SEQ ID NO: 501020 - DNA, 120 bp, Artificial Sequence
  ENSG00000163697_62 (sequence is synthesized)
ggagataatcaatgtaagtggcaacaaattgtgacttcacatgctactgtagagatcagaaaattatcctaaactattccataacaatgagacaacatcacagaaaatacacttgaaaat

SEQ ID NO: 501021 - DNA, 120 bp, Artificial Sequence
  ENSG00000163697_63 (sequence is synthesized)
aaaaatctcaagaccagctacttctggacaatggaatacttttcagtctggtatggtggagggcccgaaaaggataagggattcttatgatacacaatgggattctttactgaacaatat

SEQ ID NO: 501022 - DNA, 120 bp, Artificial Sequence
  ENSG00000163697_64 (sequence is synthesized)
gttaaattaagctgcaccgccttccttgaggcatggactaccctaaccaaccagatagaaatctgggtgggataagaggatgagccacacgctataattttagggcaaggagatagtgtt

SEQ ID NO: 501023 - DNA, 120 bp, Artificial Sequence
  ENSG00000163697_65 (sequence is synthesized)
tgattttcaaaatcagcaaaataagctgagcactttatatctttctgtacaagagtgataacatgaagaattcttcttcagggatttaaaatacaataagcctggttcaactataaaaag

SEQ ID NO: 501024 - DNA, 120 bp, Artificial Sequence
  ENSG00000163697_66 (sequence is synthesized)
tttttttttttttttttttttgaggcaaggtctcactctgcttcccaggctggagtgcagtggggcaatattggctcactgcaacctgcacctcctggactcaagagatcctcgtacctc

SEQ ID NO: 501025 - DNA, 83 bp, Artificial Sequence
  ENSG00000163697_67 (sequence is synthesized)
gagtgcagtggggcaatattggctcactgcaacctgcacctcctggactcaagagatcctcgtcccaccacacccagctaatt

SEQ ID NO: 501026 - DNA, 90 bp, Artificial Sequence
  ENSG00000163697_68 (sequence is synthesized)
tattttttgtagagatggggttttggggtttcgccatgttgtccaggctcgtctggaactccggtgctcaagtggcgtgcccaatgtgag

SEQ ID NO: 501027 - DNA, 120 bp, Artificial Sequence
  ENSG00000163697_69 (sequence is synthesized)
aatgtaaatctaagctaaaataaaaataatgtattaccgctataatacaattcaccattctcttttctcacttcaagtaagaaagtaaaaatagaatatcagagctgaagtagacctaag

SEQ ID NO: 501028 - DNA, 120 bp, Artificial Sequence
  ENSG00000163697_70 (sequence is synthesized)
tattcatcttgaagaagataatattctaaaaatcatgccacctgaattgagcatttaggaatttatgtaacatttctatacaactgaattgcaaaaataaaactttaaattcaaacttta

SEQ ID NO: 501029 - DNA, 120 bp, Artificial Sequence
  ENSG00000163697_71 (sequence is synthesized)
ttagttctgtaacgccatctcccaccccagagaacgagaaacagccatggagtgattttgctgttctgaatgggggaaagattaatagtgacatttggaaggatttgcatgcagccactg

SEQ ID NO: 501030 - DNA, 120 bp, Artificial Sequence
  ENSG00000163697_72 (sequence is synthesized)
actgctatgtacttgtcaaaatggtttccacattcttatcacatctgagccttaccaggtagagaaggtactaaatacactttagaagtaaaaatatgaagtaccgagaggctaaaccca

SEQ ID NO: 501031 - DNA, 120 bp, Artificial Sequence
  ENSG00000163697_73 (sequence is synthesized)
attaattgctgcagagttgggaaattagatgagctgtcagtgctcagactcgctgttaacggggctgtgttattggcgggatgccgtgtgaatgctaacgtgttgtttctgctctgttcc

SEQ ID NO: 501032 - DNA, 120 bp, Artificial Sequence
  ENSG00000163697_74 (sequence is synthesized)
aacttgagcccggggcagtgcgcgcggctgcttgagcgacggcaccgctggctggtgccggcaccctggggcttgtcgtagcacctggggcggcatccccgcccgacttcggaaggaccg

SEQ ID NO: 501033 - DNA, 120 bp, Artificial Sequence
  ENSG00000163697_75 (sequence is synthesized)
gtgacacaccagcaaaagccattgccacaagtctccacgagatctgctccaaggtaagattatggctgaacggaagaatgccaaagcgctggcctgcagctccttacaggaaagggccaa

SEQ ID NO: 501034 - DNA, 120 bp, Artificial Sequence
  ENSG00000163697_76 (sequence is synthesized)
gtaaccgcatctgatctgggcgctccgggaagggcgagactggagcagagccgctgggcgccggagccgaggcgagcgccgcgcgcaccactgagatgcagtctcactgtgttgcccaga

SEQ ID NO: 501035 - DNA, 120 bp, Artificial Sequence
  ENSG00000163697_77 (sequence is synthesized)
agcttgagccactgcctggcctcaatttcactcttaacaaaatatttcaaatatacaaataatctaaaaagtggggactaatgttctagatactgatattcctaccacacccatcagaaa

SEQ ID NO: 501036 - DNA, 120 bp, Artificial Sequence
  ENSG00000163697_78 (sequence is synthesized)
agaaatgcgaacactgttctagatgttttcagatttatctttacttctccattattgcagttatttttactatttttacttgtgccattcaacatacaccctcttacaactacttgctag

SEQ ID NO: 501037 - DNA, 120 bp, Artificial Sequence
  ENSG00000163697_79 (sequence is synthesized)
atttttgggtaagattcttttatgatttgataggaatatttttatctagccgctgaatggtccatgaaattgacagggaaactgaaacttcccaggctgtgcagctagtaggtgggactt

SEQ ID NO: 501038 - DNA, 120 bp, Artificial Sequence
  ENSG00000163697_80 (sequence is synthesized)
ggacccagaccaggtgtgtgtccatcgctgcattatcatctcttcataaaacaaagaatttaatattgtatgaacgaagataaggttggagttgctgtgggtgagctgctgtggtctgta

SEQ ID NO: 501039 - DNA, 120 bp, Artificial Sequence
  ENSG00000163697_81 (sequence is synthesized)
tgtccctttgcaaggtaagtcagtggcacctcatgtcttcattatggccctgtccctcctggtccaggactgaaggctctcagatggttctctggtatttcaagtctccttaaagagcac

SEQ ID NO: 501040 - DNA, 120 bp, Artificial Sequence
  ENSG00000163697_82 (sequence is synthesized)
actcaactcagtaagcacaagttgagcctgcacgctgggtctcacagaggcacagagttgattttgcatcactagggttaggcataaagccaggatgagttttgttgttattggacaaga

SEQ ID NO: 501041 - DNA, 120 bp, Artificial Sequence
  ENSG00000163697_83 (sequence is synthesized)
ttaaagaatattgtctttagtttttgccttcgttttcattttgttttgtattttatgttctttaagaatactgtcttcatattataattcatgtacaacctgggataaggaccctggctg

SEQ ID NO: 501042 - DNA, 120 bp, Artificial Sequence
  ENSG00000163697_84 (sequence is synthesized)
cttttaagtgaaaatatcttgacccccaacttttggggccctcagccatgggcattccctagtttccaaacaaacacggtacccgtccctcattccacccccaccaccagaaaacagttc

SEQ ID NO: 501043 - DNA, 120 bp, Artificial Sequence
  ENSG00000163697_85 (sequence is synthesized)
tgtttggtttatagggaggaaaatgattattatggaattaggtatgctagttattgaatacttggaattatattgtttgcttttaaaattaccttaaggaaataacttcactgtctgctt

SEQ ID NO: 501044 - DNA, 120 bp, Artificial Sequence
  ENSG00000163697_86 (sequence is synthesized)
ctaataatgtttagtcatttatttggtaagtaattaaagcaccatcactctcctgccctcgtcttcaggtgataatctagacatagagggagtgagccaacaagttgctgttagagttaa

SEQ ID NO: 501045 - DNA, 87 bp, Artificial Sequence
  ENSG00000163697_87 (sequence is synthesized)
acatagagggagtgagccaacaagttgctgttagagttaacttgttccctaacccatcttgtgaatatcaatgctaacaacagtgtc

SEQ ID NO: 501046 - DNA, 120 bp, Artificial Sequence
  ENSG00000163697_88 (sequence is synthesized)
tgtctagaaacagccatggagtgattttgctgttctgaatgggggaaagattaatagtgacatttggaaggcaagtatattgtcagatcttagatcatttaatattttatcctttctgca

SEQ ID NO: 501047 - DNA, 120 bp, Artificial Sequence
  ENSG00000163697_89 (sequence is synthesized)
tggctgtggctgtatatttttcttctttgtgaatatcatgcattctgcagggacacagtgatcgggcttcttgctaggggcattcagctcacactcctgttgcctttttttggtgtctcc

SEQ ID NO: 501048 - DNA, 120 bp, Artificial Sequence
  ENSG00000163697_90 (sequence is synthesized)
cattgtgaatgccctaggttccccgttgttttgtaagaacaggagtttgcaccagtcagcattcaacagtccttgcatgcctttctctgcctaagctcacgtacactctctgcctcttgc

SEQ ID NO: 501049 - DNA, 120 bp, Artificial Sequence
  ENSG00000163697_91 (sequence is synthesized)
tgggaagacgtttctcccctttgatatttgaggcaatgaatggtcttctcccccattgtacattaacaaggttctattttcctctaggatttgcatgcagccactgttaacccggacccc

SEQ ID NO: 501050 - DNA, 120 bp, Artificial Sequence
  ENSG00000163697_92 (sequence is synthesized)
gctgtttacgttctcctgcatttcaggaagccccacagctcagtgacacatggtactgaggggctccgaggtgttcatcaggtgccttttcccattaatgcaggaagtgtaggcatggta

SEQ ID NO: 501051 - DNA, 120 bp, Artificial Sequence
  ENSG00000163697_93 (sequence is synthesized)
cccccgtgtgactgatcccttagcactgccagatgccagtgaggactggggcctggagagagagcgtttctcagtagctaaggacacagattcacgggtgagctttaggggcccagaact

SEQ ID NO: 501052 - DNA, 120 bp, Artificial Sequence
  ENSG00000163697_94 (sequence is synthesized)
cccctaaacatgcctgcaaaatgggatgtgccagtgtataagagcagttttgcagactggaagaaggacctgtattctcaaaggggaaggtgacttccacacgtccacacaaaaatgttg

SEQ ID NO: 501053 - DNA, 120 bp, Artificial Sequence
  ENSG00000163697_95 (sequence is synthesized)
atgcctctgctttaaaagttgacaaattattcttttataacactcttctttacttagcgtctgaagaatcaacattatacatgaattgtggaattgatatttatatacttctccctttta

SEQ ID NO: 501054 - DNA, 120 bp, Artificial Sequence
  ENSG00000163697_96 (sequence is synthesized)
acagagtgattccattttgaaatgttagttgagataatttcagaaaggaaaaaataagtacagataccaaatgtgtatgaaactcacatcaaaccggaaaagctgtattcctggtgtgct

SEQ ID NO: 501055 - DNA, 120 bp, Artificial Sequence
  ENSG00000163697_97 (sequence is synthesized)
ctgagacctgtggaaaaagcattttgggagcatcttggaatagtgtttgctacatgaatagatagatgttgttctctctgcttctagtgaacagagcagtggtagaaaagtttgcttttt

SEQ ID NO: 501056 - DNA, 120 bp, Artificial Sequence
  ENSG00000163697_98 (sequence is synthesized)
ggttgggctgattgggactccactcacattttctcctagcagcacatcccaatgggaagtaggtttccaagcctttccatggtggagtttgtctccttaaagtggagctgaatcactgca

SEQ ID NO: 501057 - DNA, 120 bp, Artificial Sequence
  ENSG00000163697_99 (sequence is synthesized)
gcatttcagggattttgtgtgcccaggcagtgacttcccgacttctccggcgtatccccgacggggcgcagaacaccgcccgtggcgaagtcgggccgggggagtttgggaacccgtccc

SEQ ID NO: 501058 - DNA, 120 bp, Artificial Sequence
  ENSG00000163697_100 (sequence is synthesized)
cgggagctcagcggccagaggagggcgcggaagtgtttcctgggtgagcgcggcagcgggacccgtttccggaaggctgattgcatcaggttggagttgctgtgggtgagctgctgtggt

SEQ ID NO: 501059 - DNA, 120 bp, Artificial Sequence
  ENSG00000163697_101 (sequence is synthesized)
atcactggacgaagaaagataccgtgaatcccttttttctggtgctctgggggtttacttggccaaatgggttttgggccaccaggtgtcctgtatttgggctagatgtaagaagtatgg

SEQ ID NO: 501060 - DNA, 120 bp, Artificial Sequence
  ENSG00000163697_102 (sequence is synthesized)
acggcactgtccctccccacagtgaactcacagccacgtagcataatggagaatgggacccacatcacaccccatgacagcagtgtagttcagagcaagaatgacctccagaacagggta

SEQ ID NO: 501061 - DNA, 120 bp, Artificial Sequence
  ENSG00000163697_103 (sequence is synthesized)
gccatgcagtgatggcctcttcagacatttgggcaaggttccgcctttcgagaaaaacacaggtcctttctgaattcggcctggctatactttctgaatgccagttcctatgtgctgcca

SEQ ID NO: 501062 - DNA, 120 bp, Artificial Sequence
  ENSG00000163697_104 (sequence is synthesized)
ctgggaaaactgactcaggtgttgacaccttggcagtgtttatggccagcagcggaactacagacgtcacaaatcggaacagcccagccacaccaccaaacacccttaacctccgatcct

SEQ ID NO: 501063 - DNA, 89 bp, Artificial Sequence
  ENSG00000163697_105 (sequence is synthesized)
aaaagctgaggctgacaataatttaagcaaaatcaggatcttgctccatcacccaggctggagtgcgtggtacaatcatgctgatcttc

SEQ ID NO: 501064 - DNA, 120 bp, Artificial Sequence
  ENSG00000163701_0 (sequence is synthesized)
gtgttcgctgctgcacagcaaggccctgccacccaccttcaggccatgcagccatgttccgggagccctaattgcacagaagcccatggggagctccagactggcagccctgctcctgcc

SEQ ID NO: 501065 - DNA, 120 bp, Artificial Sequence
  ENSG00000163701_1 (sequence is synthesized)
tctcctcctcatagtcatcgacctctctgactctgctgggattggctttcgccacctgccccactggaacacccgctgtcctctggcctcccacacggatgacagtttcactggaagttc

SEQ ID NO: 501066 - DNA, 120 bp, Artificial Sequence
  ENSG00000163701_2 (sequence is synthesized)
tgcctatatcccttgccgcacctggtgggccctcttctccacaaagccttggtgtgtgcgagtctggcactgttcccgctgtttgtgccagcatctgctgtcaggtggctcaggtcttca

SEQ ID NO: 501067 - DNA, 120 bp, Artificial Sequence
  ENSG00000163701_3 (sequence is synthesized)
acggggcctcttccacctcctggtgcagaaatccaaaaagtcttccacattcaagttctataggagacacaagatgccagcacctgctcagaggaagctgctgcctcgtcgtcacctgtc

SEQ ID NO: 501068 - DNA, 120 bp, Artificial Sequence
  ENSG00000163701_4 (sequence is synthesized)
tgagaagagccatcacatttccatcccctccccagacatctcccacaagggacttcgctctaaaaggacccaaccttcggatccagagacatgggaaagtcttcccagattggactcaca

SEQ ID NO: 501069 - DNA, 120 bp, Artificial Sequence
  ENSG00000163701_5 (sequence is synthesized)
aaggcatggaggacccgagttctcctttgatttgctgcctgaggcccgggctattcgggtgaccatatcttcaggccctgaggtcagcgtgcgtctttgtcaccagtgggcactggagtg

SEQ ID NO: 501070 - DNA, 120 bp, Artificial Sequence
  ENSG00000163701_6 (sequence is synthesized)
tgaagagctgagcagtccctatgatgtccagaaaattgtgtctgggggccacactgtagagctgccttatgaattccttctgccctgtctgtgcatagaggcatcctacctgcaagagga

SEQ ID NO: 501071 - DNA, 120 bp, Artificial Sequence
  ENSG00000163701_7 (sequence is synthesized)
cactgtgaggcgcaaaaaatgtcccttccagagctggccagaagcctatggctcggacttctggaagtcagtgcacttcactgactacagccagcacactcagatggtcatggccctgac

SEQ ID NO: 501072 - DNA, 120 bp, Artificial Sequence
  ENSG00000163701_8 (sequence is synthesized)
actccgctgcccactgaagctggaagctgccctctgccagaggcacgactggcataccctttgcaaagacctcccgaatgccacagctcgagagtcagatgggtggtatgttttggagaa

SEQ ID NO: 501073 - DNA, 120 bp, Artificial Sequence
  ENSG00000163701_9 (sequence is synthesized)
ggtggacctgcacccccagctctgcttcaagttctcttttggaaacagcagccatgttgaatgcccccaccagactgggtctctcacatcctggaatgtaagcatggatacccaagccca

SEQ ID NO: 501074 - DNA, 120 bp, Artificial Sequence
  ENSG00000163701_10 (sequence is synthesized)
gcagctgattcttcacttctcctcaagaatgcatgccaccttcagtgctgcctggagcctcccaggcttggggcaggacactttggtgccccccgtgtacactgtcagccaggcccgggg

SEQ ID NO: 501075 - DNA, 120 bp, Artificial Sequence
  ENSG00000163701_11 (sequence is synthesized)
gaggccagggtgctgtgtcctggtgtggcggtcagatgtccagtttgcctggaagcacctcttgtgtccggatgtctcttacagacacctggggctcttgatcctggcactgctggccct

SEQ ID NO: 501076 - DNA, 120 bp, Artificial Sequence
  ENSG00000163701_12 (sequence is synthesized)
cctcaccctactgggtgttgttctggccctcacctgccggcgcccacagtcaggcccgggcccagcgcggccagtgctcctcctgcacgcggcggactcggaggcgcagcggcgcctggt

SEQ ID NO: 501077 - DNA, 120 bp, Artificial Sequence
  ENSG00000163701_13 (sequence is synthesized)
gggagcgctggctgaactgctacgggcagcgctgggcggcgggcgcgacgtgatcgtggacctgtgggaggggaggcacgtggcgcgcgtgggcccgctgccgtggctctgggcggcgcg

SEQ ID NO: 501078 - DNA, 120 bp, Artificial Sequence
  ENSG00000163701_14 (sequence is synthesized)
gtgctgctgctgtggagcggcgccgaccttcgcccggtcagcggccccgacccccgcgccgcgcccctgctcgccctgctccacgctgccccgcgcccgctgctgctgctcgcttacttc

SEQ ID NO: 501079 - DNA, 120 bp, Artificial Sequence
  ENSG00000163701_15 (sequence is synthesized)
gcgcccgctgctgctgctcgcttacttcagtcgcctctgcgccaagggcgacatccccccgccgctgcgcgccctgccgcgctaccgcctgctgcgcgacctgccgcgtctgctgcgggc

SEQ ID NO: 501080 - DNA, 120 bp, Artificial Sequence
  ENSG00000163701_16 (sequence is synthesized)
gctggacgcgcggcctttcgcagaggccaccagctggggccgccttggggcgcggcagcgcaggcagagccgcctagagctgtgcagccggctcgaacgagaggccgcccgacttgcaga

SEQ ID NO: 501081 - DNA, 120 bp, Artificial Sequence
  ENSG00000163701_17 (sequence is synthesized)
cctaggttgagcagagctccaccgcagtcccgggtgtctgcggccgcaacgcaacggacactggctggaaccccggaatgagccttcgaccctgaaatccttggggtgcctcgaggacga

SEQ ID NO: 501082 - DNA, 120 bp, Artificial Sequence
  ENSG00000163701_18 (sequence is synthesized)
ctggccgaaaagccgcattccctgcctcacaggccggaagtcccagcccagtccccgcgcgcgtccctcttcctcctcatactttcccttgactgagagctcctctaacccctgttctga

SEQ ID NO: 501083 - DNA, 120 bp, Artificial Sequence
  ENSG00000163701_19 (sequence is synthesized)
tgggggagggcggtcttcccacttcctctccagaactccagaaagagcagtgtgcttatgcttcagtccaggctggagaggttggggccggggtagggaggcaggagccatgtcagttct

SEQ ID NO: 501084 - DNA, 120 bp, Artificial Sequence
  ENSG00000163701_20 (sequence is synthesized)
gaaggagggtgaggcggtgggggattgcagggggcggctgagagaaaacctccttgggggccagggattccctttcccactctgaggctctggccagagggagagaggactctggaccta

SEQ ID NO: 501085 - DNA, 120 bp, Artificial Sequence
  ENSG00000163701_21 (sequence is synthesized)
ggaaaagaggcttttggctccaggtggtcaggacagtgggggttgggggtggggtgggtgggtgctggcggtggggaccaagatccggaaagatgaataaagacaaacatgacaaactaa

SEQ ID NO: 501086 - DNA, 120 bp, Artificial Sequence
  ENSG00000163701_22 (sequence is synthesized)
gcccccaccagactggtgagtcaataagtgacctctgctgggaccccctgccccatttcatcctcacccaactgtaaccaagctaaaccccagcccagccctgaattcatcacccaaagc

SEQ ID NO: 501087 - DNA, 120 bp, Artificial Sequence
  ENSG00000163701_23 (sequence is synthesized)
cagctggagcagacacaaacccacctgggaagaattccctagccagtggggactcccctctcccccagctccatgcttcactcagctccccgggaggagaagatgcctggctcatagggg

SEQ ID NO: 501088 - DNA, 120 bp, Artificial Sequence
  ENSG00000163701_24 (sequence is synthesized)
aaacaaatccctgacttttaccatctggtttactttatttacgtgatcagcctctgttcagctaacttgctgacagtaggttcctcaagggagcattttcttttttttctttttttcttt

SEQ ID NO: 501089 - DNA, 120 bp, Artificial Sequence
  ENSG00000163701_25 (sequence is synthesized)
ctggagtcagtggggggaaaagggctgccaagtctaccagtccgcttgccaatagatcagagatcgctgagcaccgcagtactgtgagaagtttagaaatatgaggcctaggagatggtg

SEQ ID NO: 501090 - DNA, 120 bp, Artificial Sequence
  ENSG00000163701_26 (sequence is synthesized)
tcctaagaggatgggccagaagacccagttcccatcacagctctgtcaattgttcttctctgagcctcactttcctcatctgtaaaatctcaatacctgctctgccttcaaagtgtttgt

SEQ ID NO: 501091 - DNA, 120 bp, Artificial Sequence
  ENSG00000163701_27 (sequence is synthesized)
gaagcctgagttaaatattacatatgaaagtggctggtgatgtctgaagtgctgtatgcatgttgttgttctcaaggagaggcaggacactcagacaaaagtgactcacataaagcagcc

SEQ ID NO: 501092 - DNA, 120 bp, Artificial Sequence
  ENSG00000163701_28 (sequence is synthesized)
tacagaacttacagggcagggttatggttaaggactaggctgtagggcaagaaattgggaaagggagaagcccaagaagggccattataagcagagaaggcctcttagaggaagtggcac

SEQ ID NO: 501093 - DNA, 120 bp, Artificial Sequence
  ENSG00000163701_29 (sequence is synthesized)
ctgagctggggtcagaaaaagggcaagacttagaaaggagagataggagggaaagacattcctggttctgagaggaccctaagcagatttcgagtttggggagaagcaaggacctggcca

SEQ ID NO: 501094 - DNA, 120 bp, Artificial Sequence
  ENSG00000163701_30 (sequence is synthesized)
ttcgagtttggggagaagcaaggacctggccagaatggaggcctgggaaggagaggagagagacccctggatagaaagataatgaggttgggcgcaatggctcacgcctgtaattccagc

SEQ ID NO: 501095 - DNA, 86 bp, Artificial Sequence
  ENSG00000163701_31 (sequence is synthesized)
ccctgtctgatgcgcgcctgtagtcccagctactcaggggatcaagacaggagaatcacttgagctcgggaggcagaggttgcagt

SEQ ID NO: 501096 - DNA, 60 bp, Artificial Sequence
  ENSG00000163701_32 (sequence is synthesized)
gtgatgcgcgcctgtagtcccagctactcaggggatcaagacaggagaatcacttgagct

SEQ ID NO: 501097 - DNA, 120 bp, Artificial Sequence
  ENSG00000163701_33 (sequence is synthesized)
tacctccgcagtccctgtgctctggtggcagctttgatgtgtcctctacctagtctcaaaggggtagccaaggtcctttgtgctgagggcctggacagggtggagctgggaagataagag

SEQ ID NO: 501098 - DNA, 120 bp, Artificial Sequence
  ENSG00000163701_34 (sequence is synthesized)
ccagaaggtatgggctattagctatggggctcagaatttgctgatttgaagcaaagaccccaggaatgtgccttatgggagtctctcctaataatagctctttcctttcttttccctact

SEQ ID NO: 501099 - DNA, 120 bp, Artificial Sequence
  ENSG00000163702_0 (sequence is synthesized)
aaaacgaaagcactccgtgctggaagtaggaggagagtcaggactcccaggacagagagtgcacaaactacccagcacagccccctccgccccctctggaggctgaagagggattccagc

SEQ ID NO: 501100 - DNA, 120 bp, Artificial Sequence
  ENSG00000163702_1 (sequence is synthesized)
ccctgccacccacagacacgggctgactggggtgtctgccccccttgggggggggcagcacagggcctcaggcctgggtgccacctggcacctagaagatgcctgtgccctggttcttgc

SEQ ID NO: 501101 - DNA, 120 bp, Artificial Sequence
  ENSG00000163702_2 (sequence is synthesized)
tgtccttggcactgggccgaagcccagtggtcctttctctggagaggcttgtggggcctcaggacgctacccactgctctccggtgagtctggaaccctggggagacgaggaaaggctca

SEQ ID NO: 501102 - DNA, 120 bp, Artificial Sequence
  ENSG00000163702_3 (sequence is synthesized)
gggttcagtttttggctcagcaaagccttagcctggctcctgtcactgctgccactgccagaactgccctgtctggtctgtctggtgctgatggtagaagagaagaacggggaaggggca

SEQ ID NO: 501103 - DNA, 120 bp, Artificial Sequence
  ENSG00000163702_4 (sequence is synthesized)
agagctgggtctgtctttctctgggagggtctgggaatacggagccccagaaaaagggcctctcctgccgcctctgggacagtgacatactctgcctgcctggggacatcgtgcctgctc

SEQ ID NO: 501104 - DNA, 120 bp, Artificial Sequence
  ENSG00000163702_5 (sequence is synthesized)
cgggccccgtgctggcgcctacgcacctgcagacagagctggtgctgaggtgccagaaggagaccgactgtgacctctgtctgcgtgtggctgtccacttggccgtgcatgggcactggg

SEQ ID NO: 501105 - DNA, 120 bp, Artificial Sequence
  ENSG00000163702_6 (sequence is synthesized)
aagagcctgaagatgaggaaaagtttggaggagcagctgactcaggggtggaggagcctaggaatgcctctctccaggcccaagtcgtgctctccttccaggcctaccctactgcccgct

SEQ ID NO: 501106 - DNA, 120 bp, Artificial Sequence
  ENSG00000163702_7 (sequence is synthesized)
gcgtcctgctggaggtgcaagtgcctgctgcccttgtgcagtttggtcagtctgtgggctctgtggtatatgactgcttcgaggctgccctagggagtgaggtacgaatctggtcctata

SEQ ID NO: 501107 - DNA, 120 bp, Artificial Sequence
  ENSG00000163702_8 (sequence is synthesized)
ctcagcccaggtacgagaaggaactcaaccacacacagcagctgcctgactgcagggggctcgaagtctggaacagcatcccgagctgctgggccctgccctggctcaacgtgtcagcag

SEQ ID NO: 501108 - DNA, 120 bp, Artificial Sequence
  ENSG00000163702_9 (sequence is synthesized)
atggtgacaacgtgcatctggttctgaatgtctctgaggagcagcacttcggcctctccctgtactggaatcaggtccagggccccccaaaaccccggtggcacaaaaacctgactggac

SEQ ID NO: 501109 - DNA, 120 bp, Artificial Sequence
  ENSG00000163702_10 (sequence is synthesized)
agggaggacccccgcgcacaccagaacctctggcaagccgcccgactgcaactgctgaccctgcagagctggctgctggacgcaccgtgctcgctgcccgcagaagcggcactgtgctgg

SEQ ID NO: 501110 - DNA, 120 bp, Artificial Sequence
  ENSG00000163702_11 (sequence is synthesized)
cgggctccgggtggggacccctgccagccactggtcccaccgctttcctgggagaacgtcactgtggacaaggttctcgagttcccattgctgaaaggccaccctaacctctgtgttcag

SEQ ID NO: 501111 - DNA, 120 bp, Artificial Sequence
  ENSG00000163702_12 (sequence is synthesized)
gtgaacagctcggagaagctgcagctgcaggagtgcttgtgggctgactccctggggcctctcaaagacgatgtgctactgttggagacacgaggcccccaggacaacagatccctctgt

SEQ ID NO: 501112 - DNA, 120 bp, Artificial Sequence
  ENSG00000163702_13 (sequence is synthesized)
gccttggaacccagtggctgtacttcactacccagcaaagcctccacgagggcagctcgccttggagagtacttactacaagacctgcagtcaggccagtgtctgcagctatgggacgat

SEQ ID NO: 501113 - DNA, 120 bp, Artificial Sequence
  ENSG00000163702_14 (sequence is synthesized)
gacttgggagcgctatgggcctgccccatggacaaatacatccacaagcgctgggccctcgtgtggctggcctgcctactctttgccgctgcgctttccctcatcctccttctcaaaaag

SEQ ID NO: 501114 - DNA, 120 bp, Artificial Sequence
  ENSG00000163702_15 (sequence is synthesized)
gatcacgcgaaagggtggctgaggctcttgaaacaggacgtccgctcgggggcggccgccaggggccgcgcggctctgctcctctactcagccgatgactcgggtttcgagcgcctggtg

SEQ ID NO: 501115 - DNA, 120 bp, Artificial Sequence
  ENSG00000163702_16 (sequence is synthesized)
ggcgccctggcgtcggccctgtgccagctgccgctgcgcgtggccgtagacctgtggagccgtcgtgaactgagcgcgcaggggcccgtggcttggtttcacgcgcagcggcgccagacc

SEQ ID NO: 501116 - DNA, 120 bp, Artificial Sequence
  ENSG00000163702_17 (sequence is synthesized)
ctgcaggagggcggcgtggtggtcttgctcttctctcccggtgcggtggcgctgtgcagcgagtggctacaggatggggtgtccgggcccggggcgcacggcccgcacgacgccttccgc

SEQ ID NO: 501117 - DNA, 120 bp, Artificial Sequence
  ENSG00000163702_18 (sequence is synthesized)
gcctcgctcagctgcgtgctgcccgacttcttgcagggccgggcgcccggcagctacgtgggggcctgcttcgacaggctgctccacccggacgccgtacccgcccttttccgcaccgtg

SEQ ID NO: 501118 - DNA, 120 bp, Artificial Sequence
  ENSG00000163702_19 (sequence is synthesized)
cccgtcttcacactgccctcccaactgccagacttcctgggggccctgcagcagcctcgcgccccgcgttccgggcggctccaagagagagcggagcaagtgtcccgggcccttcagcca

SEQ ID NO: 501119 - DNA, 120 bp, Artificial Sequence
  ENSG00000163702_20 (sequence is synthesized)
gccctggatagctacttccatcccccggggactcccgcgccgggacgcggggtgggaccaggcgcgggacctggggcgggggacgggacttaaataaaggcagacgctgtttttctaccc

SEQ ID NO: 501120 - DNA, 120 bp, Artificial Sequence
  ENSG00000163702_21 (sequence is synthesized)
gggcagtgagcagagtggtccctgcagatgatcccacagcccttggcctggattctgagccctgcaccgccagccttcctcacccctctcctcacagggctctgtggtatatgactgctt

SEQ ID NO: 501121 - DNA, 120 bp, Artificial Sequence
  ENSG00000163702_22 (sequence is synthesized)
tcccccttcccaagtccattcccactgtaggccgatgcctgtgcaaaggacgcagtgccatatcagagaggatccttgaagaggactcaccccaagcaagggaaaattggtgggggaact

SEQ ID NO: 501122 - DNA, 120 bp, Artificial Sequence
  ENSG00000163702_23 (sequence is synthesized)
tctgccttcctggtttccttgactttggcctcctcctcttcctccttatcttctccaacctccttcctttatttgttccacagactggaccgcagatcattaccttgaaccacacagacc

SEQ ID NO: 501123 - DNA, 120 bp, Artificial Sequence
  ENSG00000163702_24 (sequence is synthesized)
ctccccattcccctgggggaggaccagagtggctgtgggagttctccgagggaaagcggcggccgagctcactggctgcctccgcccctctcccctaacagggtggctgaggctcttgaa

SEQ ID NO: 501124 - DNA, 120 bp, Artificial Sequence
  ENSG00000163702_25 (sequence is synthesized)
acaggacgtccgctcggggggtgagtgggagcaagcgctgggcggagggccgcccccggggagccaggcctgtgccagctcacctcttccctccccatctgttttctccggcagcggccg

SEQ ID NO: 501125 - DNA, 120 bp, Artificial Sequence
  ENSG00000163702_26 (sequence is synthesized)
ctcctgccgcctctggggtaagtatccctacttttaaaaagaatttcccaggttggccgaagggagcagagctgtcccaggcccatgccctccatgcccacctcagcctaggacagccaa

SEQ ID NO: 501126 - DNA, 120 bp, Artificial Sequence
  ENSG00000163702_27 (sequence is synthesized)
gttctttggctctctgggtatgtcaggtgccaccaaattctgggcttggaacagcttcagctcccacccgctcctccacacacagacagtgacatactctgcctgcctggggacatcgtg

SEQ ID NO: 501127 - DNA, 120 bp, Artificial Sequence
  ENSG00000163702_28 (sequence is synthesized)
ctccgggcctctcctgccgcctctggggtgccaccaaattctgggcttggaacagcttcagctcccacccgctcctccacacacagacagtgacatactctgcctgcctggggacatcgt

SEQ ID NO: 501128 - DNA, 120 bp, Artificial Sequence
  ENSG00000163702_29 (sequence is synthesized)
aagcacagttcctatccccaaggagcacactgttggctagacacccataaacagataaccacacctacaggtgctaagttttgggttccagggagagcttccgggaagaatttcttccta

SEQ ID NO: 501129 - DNA, 82 bp, Artificial Sequence
  ENSG00000163702_30 (sequence is synthesized)
ttcactcattcaagattttttgagcagcacaagtcactgttttaggcacttgtgatagaccctaacatctctaccctcatag

SEQ ID NO: 501130 - DNA, 120 bp, Artificial Sequence
  ENSG00000163702_31 (sequence is synthesized)
taggcacttgtgatagaccctaacatctctaccctcatagaacttatattgtaatggagaaaggcaggcaacagacattgtaaataaatcatatagtatcttaaaattgcatacaaatac

SEQ ID NO: 501131 - DNA, 120 bp, Artificial Sequence
  ENSG00000163702_32 (sequence is synthesized)
catgggaaagggataaggtgggactggggttgcaatttttagcagggtggtcatgtgagaaaggaatctctttgagaaggttagatgagaggggaaccatgctccgtaagacataaaaac

SEQ ID NO: 501132 - DNA, 120 bp, Artificial Sequence
  ENSG00000163702_33 (sequence is synthesized)
agctttagggtcagaagacgctttatacagatgatctcacaaggctggggcagagaaagatgtagtgattcctaatcacccagccttgaatccacatctgcctcaggtcagattgagtgc

SEQ ID NO: 501133 - DNA, 120 bp, Artificial Sequence
  ENSG00000163703_0 (sequence is synthesized)
tggcagcgacgcggtgaggagacggcccacggcgcccgcgggctggggcggtcgcttcttccttctccgtggcctacgagggtctggatccttctctgccggctcgtgggccgtgccttt

SEQ ID NO: 501134 - DNA, 120 bp, Artificial Sequence
  ENSG00000163703_1 (sequence is synthesized)
gcccttctgcgaggccctgaatctgatcccttcccttcatatccggatccgggctcctccctccaagcccggggttccggacacctcccccaagacaacccctctggcctcctctccttc

SEQ ID NO: 501135 - DNA, 120 bp, Artificial Sequence
  ENSG00000163703_2 (sequence is synthesized)
agtacttggaatctgatctcttctccctaattctgcggatccggcccctaatattctttatcagaccctcagacaagaggctgacttctgcccccttgtcaaggagcgaggccactttcc

SEQ ID NO: 501136 - DNA, 120 bp, Artificial Sequence
  ENSG00000163703_3 (sequence is synthesized)
tctccaccccatgctagcgaggataacttatttctcttctggaattgcatcttatgcgcctttccccacccatccccacagcccctgcaatacccagtttggcctcttttgcttgtaata

SEQ ID NO: 501137 - DNA, 120 bp, Artificial Sequence
  ENSG00000163703_4 (sequence is synthesized)
acgcagatcccagcgccacggcaccttagaacagacctttttctttctcgcgtggggcctgactccttcagtgaagcctctccacgccctctatctgcaggtccccagcctgggtaaaga

SEQ ID NO: 501138 - DNA, 120 bp, Artificial Sequence
  ENSG00000163703_5 (sequence is synthesized)
tggccccatggcccccgaagggcctagtcccagctatgctctggggcctcagcctcttcctcaacctcccaggacctatctggctccagccctctccacctccccagtcttctcccccgc

SEQ ID NO: 501139 - DNA, 120 bp, Artificial Sequence
  ENSG00000163703_6 (sequence is synthesized)
ctcagccccatccgtgtcatacctgccggggactggttgacagctttaacaagggcctggagagaaccatccgggacaactttggaggtggaaacactgcctgggaggaagagaatttgt

SEQ ID NO: 501140 - DNA, 120 bp, Artificial Sequence
  ENSG00000163703_7 (sequence is synthesized)
ccaaatacaaagacagtgagacccgcctggtagaggtgctggagggtgtgtgcagcaagtcagacttcgagtgccaccgcctgctggagctgagtgaggagctggtggagagctggtggt

SEQ ID NO: 501141 - DNA, 120 bp, Artificial Sequence
  ENSG00000163703_8 (sequence is synthesized)
ttcacaagcagcaggaggccccggacctcttccagtggctgtgctcagattccctgaagctctgctgccccgcaggcaccttcgggccctcctgccttccctgtcctgggggaacagaga

SEQ ID NO: 501142 - DNA, 120 bp, Artificial Sequence
  ENSG00000163703_9 (sequence is synthesized)
ggccctgcggtggctacgggcagtgtgaaggagaagggacacgagggggcagcgggcactgtgactgccaagccggctacgggggtgaggcctgtggccagtgtggccttggctactttg

SEQ ID NO: 501143 - DNA, 120 bp, Artificial Sequence
  ENSG00000163703_10 (sequence is synthesized)
aggcagaacgcaacgccagccatctggtatgttcggcttgttttggcccctgtgcccgatgctcaggacctgaggaatcaaactgtttgcaatgcaagaagggctgggccctgcatcacc

SEQ ID NO: 501144 - DNA, 120 bp, Artificial Sequence
  ENSG00000163703_11 (sequence is synthesized)
caattctgcgtgaacactgagggctcctatgagtgccgagactgtgccaaggcctgcctaggctgcatgggggcagggccaggtcgctgtaagaagtgtagccctggctatcagcaggtg

SEQ ID NO: 501145 - DNA, 120 bp, Artificial Sequence
  ENSG00000163703_12 (sequence is synthesized)
ggctccaagtgtctcgatgtggatgagtgtgagacagaggtgtgtccgggagagaacaagcagtgtgaaaacaccgagggcggttatcgctgcatctgtgccgagggctacaagcagatg

SEQ ID NO: 501146 - DNA, 120 bp, Artificial Sequence
  ENSG00000163703_13 (sequence is synthesized)
gaaggcatctgtgtgaaggagcagatcccagagtcagcaggcttcttctcagagatgacagaagacgagttggtggtgctgcagcagatgttctttggcatcatcatctgtgcactggcc

SEQ ID NO: 501147 - DNA, 120 bp, Artificial Sequence
  ENSG00000163703_14 (sequence is synthesized)
acgctggctgctaagggcgacttggtgttcaccgccatcttcattggggctgtggcggccatgactggctactggttgtcagagcgcagtgaccgtgtgctggagggcttcatcaagggc

SEQ ID NO: 501148 - DNA, 120 bp, Artificial Sequence
  ENSG00000163703_15 (sequence is synthesized)
agataatcgcggccaccacctgtaggacctcctcccacccacgctgcccccagagcttgggctgccctcctgctggacactcaggacagcttggtttatttttgagagtggggtaagcac

SEQ ID NO: 501149 - DNA, 120 bp, Artificial Sequence
  ENSG00000163703_16 (sequence is synthesized)
ccctacctgccttacagagcagcccaggtacccaggcccgggcagacaaggcccctggggtaaaaagtagccctgaaggtggataccatgagctcttcacctggcggggactggcaggct

SEQ ID NO: 501150 - DNA, 120 bp, Artificial Sequence
  ENSG00000163703_17 (sequence is synthesized)
tcacaatgtgtgaatttcaaaagtttttccttaatggtggctgctagagctttggcccctgcttaggattaggtggtcctcacaggggtggggccatcacagctccctcctgccagctgc

SEQ ID NO: 501151 - DNA, 120 bp, Artificial Sequence
  ENSG00000163703_18 (sequence is synthesized)
atgctgccagttcctgttctgtgttcaccacatccccacaccccattgccacttatttattcatctcaggaaataaagaaaggtcttggaaagttaaaaggcatcagtcttactacctgt

SEQ ID NO: 501152 - DNA, 120 bp, Artificial Sequence
  ENSG00000163703_19 (sequence is synthesized)
cccaccacccccaccttagggaaatgtcctagaatcctgggaaattgagggcttctttgatggtgagtggagaaaagatagaggagaaggttgcccctgaagtgctgttaggagaaggag

SEQ ID NO: 501153 - DNA, 120 bp, Artificial Sequence
  ENSG00000163703_20 (sequence is synthesized)
gatagaggaatcagccttaggagggttccatgccagctgtcatttggcaaaggaccctggacagatgacttttgcctctgaacttcactcttctctttcctcaaatgggcttcataatgc

SEQ ID NO: 501154 - DNA, 120 bp, Artificial Sequence
  ENSG00000163703_21 (sequence is synthesized)
tttccactcaggcttaacatgagaattaaatgaggtgacaaatgtgaagacctggacagtacacaacagatattcaataaaagtgtggtcgccattatgaccagagcctccaagcctcaa

SEQ ID NO: 501155 - DNA, 120 bp, Artificial Sequence
  ENSG00000163703_22 (sequence is synthesized)
ggaatatgggcaggtgggggaaggaagggtggaatgttgcctgggcaagggcagaggggagtgttgagagatggacaagatggagtcagggtgctgggtggggggccctagcaggactct

SEQ ID NO: 501156 - DNA, 120 bp, Artificial Sequence
  ENSG00000163703_23 (sequence is synthesized)
tgccttcgtgagtttttaagttgctcttggggatgggaggggaccaccgagtccagggatccagtcctggctctgtccctagttcgctgtgtgaactcaggctactcagataaacttctc

SEQ ID NO: 501157 - DNA, 120 bp, Artificial Sequence
  ENSG00000163703_24 (sequence is synthesized)
tggacctcagttcttgcctgcctgacagggctggggagatgggcaaatcagtggggaaaggcttggagaaagcacaggggctagactgagtcatatgcagtatagttatcatcatgtact

SEQ ID NO: 501158 - DNA, 120 bp, Artificial Sequence
  ENSG00000163703_25 (sequence is synthesized)
aaagaaatgatagacttcccagccccttcatttcccatgccagatcggactatggtaccttcctggggaggggcgggtgctgacctggagcctccatgatcgccatccatcctcacacac

SEQ ID NO: 501159 - DNA, 120 bp, Artificial Sequence
  ENSG00000163703_26 (sequence is synthesized)
agtcctggcacaagagctgaacttactaccagcctcttttagagcagtctttcctgaagctacagataaagagctagctacaaagatggcaaattcagtctttgtaaaagaaaatattgg

SEQ ID NO: 501160 - DNA, 120 bp, Artificial Sequence
  ENSG00000163703_27 (sequence is synthesized)
tctgctctgctggtgtagggctaggaactcttggggagcacttattcattcaacaaatagcactgaacatctatagtatagcagtaaacaaggcaagcaaaatgcccccttcctggagct

SEQ ID NO: 501161 - DNA, 120 bp, Artificial Sequence
  ENSG00000163703_28 (sequence is synthesized)
atggtgaagaggctggaatatgggcagatggaaggcatctgtgtgaaggagcagatcccagagtcagcaggcttcttctcagagatgacagaagacgagttggtggtgctgcagcagatg

SEQ ID NO: 501162 - DNA, 120 bp, Artificial Sequence
  ENSG00000163703_29 (sequence is synthesized)
tttaacccctgaaacaacccgacgctggaagttgggttctcatccccactctacatatgtaaaaatgaagatgcagagagatgaagctactttcccagggctatatggcaagcaagtcgc

SEQ ID NO: 501163 - DNA, 120 bp, Artificial Sequence
  ENSG00000163704_0 (sequence is synthesized)
agccgagtctgagcatctcggaggatgcggcgcggcgatcggctgcagggacgcgcgcaaggtgaacacgggggctgcggcgcgcaggctcatccagtgaggactggaaggtgggggctt

SEQ ID NO: 501164 - DNA, 120 bp, Artificial Sequence
  ENSG00000163704_1 (sequence is synthesized)
taggcccaggcatcggagtagaccatggcctccagcccatggggctgtgtatgtggccttctgctgttgctgctgccactcctggggactggccctgccctggggaggggctttcccagg

SEQ ID NO: 501165 - DNA, 120 bp, Artificial Sequence
  ENSG00000163704_2 (sequence is synthesized)
ccacttgaaaactccgaaatccctatgatccctggagcccaccccaagggctctgtgggctcagagccccaggcctttgacgtgttcccggagaaccccagagctgacagtcacaggaac

SEQ ID NO: 501166 - DNA, 120 bp, Artificial Sequence
  ENSG00000163704_3 (sequence is synthesized)
tctgatgtccgccacgcccctgctgaagagatgcctgagaagcctgtagcctctccccttggcccagccctgtacgggcccaaagcagcacaaggagctcagagagaacgactcccagta

SEQ ID NO: 501167 - DNA, 120 bp, Artificial Sequence
  ENSG00000163704_4 (sequence is synthesized)
actgatgacctccagatggctcaaggaccaagctcccacggctggacaggacctctggactcacaagagcttctgcagcaagaagcagtggctccccacccagtgggccaccctcatctc

SEQ ID NO: 501168 - DNA, 120 bp, Artificial Sequence
  ENSG00000163704_5 (sequence is synthesized)
actttcatccccacaactcccagacgtcaactcagggtagccacagttcctccctccctgcagcatgaaggccaagagggacagtggccacctagagatgagggtctgaaggccaaaact

SEQ ID NO: 501169 - DNA, 120 bp, Artificial Sequence
  ENSG00000163704_6 (sequence is synthesized)
aagagcagggtcccacccacttctccctcagaccaccagggcccaccccacacccttgtttcccactcaggtactgtcaagaggccagtgctggaaggacagggtgggtttgaggaacac

SEQ ID NO: 501170 - DNA, 120 bp, Artificial Sequence
  ENSG00000163704_7 (sequence is synthesized)
ttgcaggaggcagctcaaggtccccacttcacccagcaggatccagcagcccctgatgttggctcagtacccccagttgaggtggtgtactctcaggagccaggggcccagccagacttg

SEQ ID NO: 501171 - DNA, 120 bp, Artificial Sequence
  ENSG00000163704_8 (sequence is synthesized)
gcattggccagaagccttcctcctgctgaggagctgccggttgagacccccaagagggctggcgctgaggtgtcctgggaagtcagctccccaggtcccccgcccaagcaggctgacctt

SEQ ID NO: 501172 - DNA, 120 bp, Artificial Sequence
  ENSG00000163704_9 (sequence is synthesized)
cctgacgctaaggattcaccaggaccccagcccacggatccacccgcctcagaggctcctgatcggccgtctaagccagagagagcagcaatgaatggagcagaccccatctccccccag

SEQ ID NO: 501173 - DNA, 120 bp, Artificial Sequence
  ENSG00000163704_10 (sequence is synthesized)
cgggtgagaggagctgtggaggccccaggcacccccaagtctctcatccctggtccctcagaccctggcccagctgtaaaccgaacagagagccccatgggggccctgcagccagatgaa

SEQ ID NO: 501174 - DNA, 120 bp, Artificial Sequence
  ENSG00000163704_11 (sequence is synthesized)
gccgaggagtggccggggcgcccccaaagccatcccccagcacccccagtccaggccccctcgacgtcacgccggggcctcattcgagtcaccacgcagcgagccctgggccagcctccc

SEQ ID NO: 501175 - DNA, 120 bp, Artificial Sequence
  ENSG00000163704_12 (sequence is synthesized)
cctccggagcccaccgccagctccatggcttcagccccagcctccagccccccagccaacgccactgcacccccgctacgctggggcccccttcggcgggtcctgagcttctcctgggag

SEQ ID NO: 501176 - DNA, 120 bp, Artificial Sequence
  ENSG00000163704_13 (sequence is synthesized)
ctgcacgtctacggggtgggggtactctttctgctgcccgcgttgttggcgctggctgcgctggcagccgccccagcagggccccggctggcattggtggccgcggtgctggtgctcgtg

SEQ ID NO: 501177 - DNA, 120 bp, Artificial Sequence
  ENSG00000163704_14 (sequence is synthesized)
gcttcggcgctgcgatccgcctacatgcttaccgacccttacggctcgcaggcgcggctgggcgttcgcgggggcctggtgctctacaacctgcccttccccttgctgcttacggcgctg

SEQ ID NO: 501178 - DNA, 120 bp, Artificial Sequence
  ENSG00000163704_15 (sequence is synthesized)
cactcctgctgggagcagtggcgctggtgcatggtgtagggttgctcgcgacagacctgctgtccacatggtctgtgctcaacctcctgacgcagggcttgtcgtgcgcctggggcgcgg

SEQ ID NO: 501179 - DNA, 120 bp, Artificial Sequence
  ENSG00000163704_16 (sequence is synthesized)
ctgggcacgctctgcctgtgccgtcgccgcctgctggacggcccacggggctgggatgccagcccgggccctcggctgttggctgtggcgggcgcgctggggctgctggctagcggcttg

SEQ ID NO: 501180 - DNA, 120 bp, Artificial Sequence
  ENSG00000163704_17 (sequence is synthesized)
gcggcttgcagctggcggctgcgctctggctgtacccgggcccaggccgcgtgggccgcttctcgtgggcctggtggggtgtccacttctggctgcgcctcctggagctgacatgggcgc

SEQ ID NO: 501181 - DNA, 120 bp, Artificial Sequence
  ENSG00000163704_18 (sequence is synthesized)
tcgccctggcgttggccgcggtggctgccgcgagacccaggccgcccacggagcacgcttgctgggctaagctgatgcgtctggcgtgcccggcgccgtcaggaaagagcgaggtgccgg

SEQ ID NO: 501182 - DNA, 120 bp, Artificial Sequence
  ENSG00000163704_19 (sequence is synthesized)
agcgacccaataactgctatgcagggcccagcaacgttggtgcaggcagcttggacatcagcaagagcctcatccgcaacccggcggagagtgggcagctggccacgcccagttcaggcg

SEQ ID NO: 501183 - DNA, 120 bp, Artificial Sequence
  ENSG00000163704_20 (sequence is synthesized)
cctggggctcggctgcgtcgttgggtcgcggaccccagggtggcccgggactgtcccgcaacggtgtgggaccggcgccatcgctgagcgagctggatctgcggccgccatcgcccatca

SEQ ID NO: 501184 - DNA, 120 bp, Artificial Sequence
  ENSG00000163704_21 (sequence is synthesized)
acctgagccgcagcatcgacgccgcgctcttccgcgagcacctagtgcgagacagtgtgttccagcgctgcggcctccgcggcctggcctccccgccgcctggaggcgctctgcggccgc

SEQ ID NO: 501185 - DNA, 120 bp, Artificial Sequence
  ENSG00000163704_22 (sequence is synthesized)
gccggggcagccatcccaaagccgagctcgacgacgctggctcctcgctcctccgcggccgctgcaggtcgctcagcgacgtgcgcgtgcgcgggccggtcccacagcacgtagtggaag

SEQ ID NO: 501186 - DNA, 120 bp, Artificial Sequence
  ENSG00000163704_23 (sequence is synthesized)
cacccgacggggcagccgctgcggcttctggcagctccctcgacagcttctccaggggttcactcaagatcagttggaacccctggcgccacgggctgtcatcagtggacagtctgcccc

SEQ ID NO: 501187 - DNA, 120 bp, Artificial Sequence
  ENSG00000163704_24 (sequence is synthesized)
tagatgagttgcccagcacggtacagctactgcctgccccgaccccagcccctgattctaccgccgctcggcagggggacggccagggagaggtccagccgcgcggcaagcctggggaat

SEQ ID NO: 501188 - DNA, 120 bp, Artificial Sequence
  ENSG00000163704_25 (sequence is synthesized)
cccgcagcgcctccagtgataccatcgagctttgaagagcggtcctgacgcagggccaggaccctgcccgatgcccacatggcatggcctactgggacagttgagcctttaaaaaatggg

SEQ ID NO: 501189 - DNA, 74 bp, Artificial Sequence
  ENSG00000163704_26 (sequence is synthesized)
ggcatggcctactgggacagttgagcctttaaaaaatgggcatcctggccaggcgcggtggctcacgccaagga

SEQ ID NO: 501190 - DNA, 74 bp, Artificial Sequence
  ENSG00000163704_27 (sequence is synthesized)
cccaggcctctctacctgacggcaacccccgggggacagccaggtttgaactcaccccacccccatgccgtttt

SEQ ID NO: 501191 - DNA, 120 bp, Artificial Sequence
  ENSG00000163704_28 (sequence is synthesized)
gacagccaggtttgaactcaccccacccccatgccgttttttgcttttaatatttctatttttttttcagccggcattttgcacagaggccgtgtcttatgcggaatacagggtgggtgt

SEQ ID NO: 501192 - DNA, 120 bp, Artificial Sequence
  ENSG00000163704_29 (sequence is synthesized)
gcatggattcgggcatgaagaacagggagcaggtgccccagactccccaacgtggagtgatgagcctcgcttgtctagattgtcctctttgtgccaaagaaataaacccttaggacttgg

SEQ ID NO: 501193 - DNA, 120 bp, Artificial Sequence
  ENSG00000163704_30 (sequence is synthesized)
ctgttggggatgtatgggggcggagggtggggaatgaatggagacaatcacctccttaaaggagttgcccagggcctccttcaaacaacctaggataataaattcatactcactgggaaa

SEQ ID NO: 501194 - DNA, 120 bp, Artificial Sequence
  ENSG00000163705_0 (sequence is synthesized)
agagttcagcaggtgagccccgggcccggatggtgggactgggcccaggttcccaccgcatcgtccgcctcagccagaaccttctggtccccgcccccggatagggacccaggaggccca

SEQ ID NO: 501195 - DNA, 120 bp, Artificial Sequence
  ENSG00000163705_1 (sequence is synthesized)
agccccttcttccggcggggagtgggagcctctcgcactctcggcagctccagaccctcgggatctccgtttacagttcaggacctcagctgcactttggcgctaacgccctgtttccca

SEQ ID NO: 501196 - DNA, 120 bp, Artificial Sequence
  ENSG00000163705_2 (sequence is synthesized)
ggactgtcaatggcaggataccagctctggtcaccatggaccccactggatgagagtttccaatggctgcggcacacgacacctacaccttcctccaagcacccattcaaggcctccccc

SEQ ID NO: 501197 - DNA, 120 bp, Artificial Sequence
  ENSG00000163705_3 (sequence is synthesized)
tgcttcccacacacaccgtccgaccttgaagtgcagctgtgctttcaagaggtcactctagtcctagacagcccattcctggaatctggagtgagtcccaagttaccctgccacacatca

SEQ ID NO: 501198 - DNA, 120 bp, Artificial Sequence
  ENSG00000163705_4 (sequence is synthesized)
gcacgatgaacaacaaaggactggtcaggaagccccagcccatccgcctcagtggagtagattctgtctttggcagggttatcacagctcagccaccaaagtggaccgggactttcagag

SEQ ID NO: 501199 - DNA, 120 bp, Artificial Sequence
  ENSG00000163705_5 (sequence is synthesized)
tttcagacaagtcagccttttgcaaaatcattagcagggagcaccagtggcccattggactgaaggagcctcagattcagatgacagtcactatgtgcaaacagatgctgcgctctatcc

SEQ ID NO: 501200 - DNA, 120 bp, Artificial Sequence
  ENSG00000163705_6 (sequence is synthesized)
tcttgctgtatgcaacttacaaaaagtgcacctttgccttgcagcactccaagtaaagggtcctcatttgatccccatttactcacaccatgccctttggtatgtacctaaagcttacag

SEQ ID NO: 501201 - DNA, 120 bp, Artificial Sequence
  ENSG00000163705_7 (sequence is synthesized)
aaacctgtccatgtaaatgaaactgtgacattgtcccagccatcttgcttttgtttcaagcagtgatgattcaggagcccctttcatcccttcccctccaaaaaaggaccaatgatagag

SEQ ID NO: 501202 - DNA, 120 bp, Artificial Sequence
  ENSG00000163705_8 (sequence is synthesized)
aacaaggaagaacattcccattgtaaggttgaaccatttagagtcaaactagcattgacatgtccatgtgataaccgttaaacaaatgatataaaccaatgagcctagtgtgaactcaca

SEQ ID NO: 501203 - DNA, 120 bp, Artificial Sequence
  ENSG00000163705_9 (sequence is synthesized)
gcagcagcctctgatagcaggaagacattatgtggtactcctgaactttcactcctggtccatcaactacaccgtgattctcagcagctaaacactaaaaataaaaatgattttaggaca

SEQ ID NO: 501204 - DNA, 120 bp, Artificial Sequence
  ENSG00000163705_10 (sequence is synthesized)
ggcctcccaaagtgttgggattacagcggtgacccacaatatctggcctttgtagcgttcttgtaactaggttaggtataactcagaaaatggaaataaacattacatatacaaagttaa

SEQ ID NO: 501205 - DNA, 120 bp, Artificial Sequence
  ENSG00000163705_11 (sequence is synthesized)
catggatcccccaatagcaactgcagattaagccaacaggcaggctgctgatagaacctgctccccttcttaccttggaatgcccacacagggctgtgagggaccaaccaaatatgaagc

SEQ ID NO: 501206 - DNA, 120 bp, Artificial Sequence
  ENSG00000163705_12 (sequence is synthesized)
aattctgcaagtaatggacgctctggcttgccttggtgactgtcaaataaaagcaagtatatactcagttctctccacacttcccacatacttaccaagcaaaaagcccatgaaaaatct

SEQ ID NO: 501207 - DNA, 120 bp, Artificial Sequence
  ENSG00000163705_13 (sequence is synthesized)
agaccctcgggatctccgtttacagttcaggacctcagctgcactttggcgctaacgccctgtttcccagggctgtgagggaccaaccaaatatgaagctgttgatttctccaaaataac

SEQ ID NO: 501208 - DNA, 120 bp, Artificial Sequence
  ENSG00000163710_0 (sequence is synthesized)
gtatcccccggctacctgggccgccccgcggcggtgcgcgcgtgagagggagcgcgcgggcagccgagcgccggtgtgagccagcgctgctgccagtgtgagcggcggtgtgagcgcggt

SEQ ID NO: 501209 - DNA, 120 bp, Artificial Sequence
  ENSG00000163710_1 (sequence is synthesized)
gggtgcggaggggcgtgtgtgccggcgcgcgcgccgtggggtgcaaaccccgagcgtctacgctgccatgaggggcgcgaacgcctgggcgccactctgcctgctgctggctgccgccac

SEQ ID NO: 501210 - DNA, 120 bp, Artificial Sequence
  ENSG00000163710_2 (sequence is synthesized)
ccagctctcgcggcagcagtccccagagagacctgttttcacatgtggtggcattcttactggagagtctggatttattggcagtgaaggttttcctggagtgtaccctccaaatagcaa

SEQ ID NO: 501211 - DNA, 120 bp, Artificial Sequence
  ENSG00000163710_3 (sequence is synthesized)
atgtacttggaaaatcacagttcccgaaggaaaagtagtcgttctcaatttccgattcatagacctcgagagtgacaacctgtgccgctatgactttgtggatgtgtacaatggccatgc

SEQ ID NO: 501212 - DNA, 120 bp, Artificial Sequence
  ENSG00000163710_4 (sequence is synthesized)
caatggccagcgcattggccgcttctgtggcactttccggcctggagcccttgtgtccagtggcaacaagatgatggtgcagatgatttctgatgccaacacagctggcaatggcttcat

SEQ ID NO: 501213 - DNA, 120 bp, Artificial Sequence
  ENSG00000163710_5 (sequence is synthesized)
ggccatgttctccgctgctgaaccaaacgaaagaggggatcagtattgtggaggactccttgacagaccttccggctcttttaaaacccccaactggccagaccgggattaccctgcagg

SEQ ID NO: 501214 - DNA, 120 bp, Artificial Sequence
  ENSG00000163710_6 (sequence is synthesized)
agtcacttgtgtgtggcacattgtagccccaaagaatcagcttatagaattaaagtttgagaagtttgatgtggagcgagataactactgccgatatgattatgtggctgtgtttaatgg

SEQ ID NO: 501215 - DNA, 120 bp, Artificial Sequence
  ENSG00000163710_7 (sequence is synthesized)
tttatcagacttaagtttaactgcagatgggtttattggtcactacatattcaggccaaaaaaactgcctacaactacagaacagcctgtcaccaccacattccctgtaaccacgggttt

SEQ ID NO: 501216 - DNA, 120 bp, Artificial Sequence
  ENSG00000163710_8 (sequence is synthesized)
aaaacccaccgtggccttgtgtcaacaaaagtgtagacggacggggactctggagggcaattattgttcaagtgactttgtattagccggcactgttatcacaaccatcactcgcgatgg

SEQ ID NO: 501217 - DNA, 120 bp, Artificial Sequence
  ENSG00000163710_9 (sequence is synthesized)
gagtttgcacgccacagtctcgatcatcaacatctacaaagagggaaatttggcgattcagcaggcgggcaagaacatgagtgccaggctgactgtcgtctgcaagcagtgccctctcct

SEQ ID NO: 501218 - DNA, 120 bp, Artificial Sequence
  ENSG00000163710_10 (sequence is synthesized)
cagaagaggtctaaattacattattatgggccaagtaggtgaagatgggcgaggcaaaatcatgccaaacagctttatcatgatgttcaagaccaagaatcagaagctcctggatgcctt

SEQ ID NO: 501219 - DNA, 120 bp, Artificial Sequence
  ENSG00000163710_11 (sequence is synthesized)
aaaaaataagcaatgttaacagtgaactgtgtccatttaagctgtattctgccattgcctttgaaagatctatgttctctcagtagaaaaaaaaatacttataaaattacatattctgaa

SEQ ID NO: 501220 - DNA, 120 bp, Artificial Sequence
  ENSG00000163710_12 (sequence is synthesized)
agaggattccgaaagatgggactggttgactcttcacatgatggaggtatgaggcctccgagatagctgagggaagttctttgcctgctgtcagaggagcagctatctgattggaaacct

SEQ ID NO: 501221 - DNA, 120 bp, Artificial Sequence
  ENSG00000163710_13 (sequence is synthesized)
gccgacttagtgcggtgataggaagctaaaagtgtcaagcgttgacagcttggaagcgtttatttatacatctctgtaaaaggatattttagaattgagttgtgtgaagatgtcaaaaaa

SEQ ID NO: 501222 - DNA, 120 bp, Artificial Sequence
  ENSG00000163710_14 (sequence is synthesized)
agattttagaagtgcaatatttatagtgttatttgtttcaccttcaagcctttgccctgaggtgttacaatcttgtcttgcgttttctaaatcaatgcttaataaaatatttttaaagga

SEQ ID NO: 501223 - DNA, 120 bp, Artificial Sequence
  ENSG00000163710_15 (sequence is synthesized)
gaattacaagcagcatgctggcgggtatcaagcttctgcatgaccagcggaaagacttcttcaggccgtcaccagatgtgggcccttgactttggacttcccagcctccagaactgtaag

SEQ ID NO: 501224 - DNA, 120 bp, Artificial Sequence
  ENSG00000163710_16 (sequence is synthesized)
gttctccgctgctgaaccaaacgaaagaggtagatgggagatggcagaaaaaaagagtcagtgaacttaaatagaaattactcaatctgaagaaaaaggaggaaaaagattgaagaaaaa

SEQ ID NO: 501225 - DNA, 120 bp, Artificial Sequence
  ENSG00000163710_17 (sequence is synthesized)
ggagaacaaacgggatattcagcagtggcctgtggctgccagagcagctcctcaggggaaactaagcgtcgagtcagacggcaccataatcgcctttaaaagtgcctccgccctgccggc

SEQ ID NO: 501226 - DNA, 120 bp, Artificial Sequence
  ENSG00000163710_18 (sequence is synthesized)
ttcgaagactctcaattttaagaatcagcttctccttgaattgaaaaaccacagcataagtgcttctcatcaacatcagccatctcttcagacagctgagggctttgaggaaaaggtgct

SEQ ID NO: 501227 - DNA, 120 bp, Artificial Sequence
  ENSG00000163710_19 (sequence is synthesized)
tggtgaaacttgggtattctcattttatgaataaccctaagctttgcagtataccaggtcgccatgcaggaagtaccaggcatgtttgaacgtaattacccccaccctgctataactttc

SEQ ID NO: 501228 - DNA, 120 bp, Artificial Sequence
  ENSG00000163710_20 (sequence is synthesized)
tttttttttcttaaatgtgtcgtcgtcacagaacatttaatttaaatgccacaccatctgagcaaaatgattcactgtcttttcttctgctgactaaactcttctccaggaatcatgagg

SEQ ID NO: 501229 - DNA, 120 bp, Artificial Sequence
  ENSG00000163710_21 (sequence is synthesized)
gatttgagtaagaggcaaatgcctgaaatagtgaaatgttggatttaccccaactattgggaagatttttattaatataatagatctagtcgtgtcctgcattagtgattacaaagggca

SEQ ID NO: 501230 - DNA, 120 bp, Artificial Sequence
  ENSG00000163710_22 (sequence is synthesized)
caagataatgcttgaaggaataaattctcagagcagatgtgtttctgaaagcccagtgtgactcagttgagttttatagattcataattaaagctgttttcagtcaaaggcctgttgtaa

SEQ ID NO: 501231 - DNA, 120 bp, Artificial Sequence
  ENSG00000163710_23 (sequence is synthesized)
tgaccttcataagttttttgttgctcgtgccttcataaattcccagtgggaaatggaagatcaaagatagtgctttgactactctatgctcattaggaaaggaaaaagaaaaaaaataaa

SEQ ID NO: 501232 - DNA, 120 bp, Artificial Sequence
  ENSG00000163714_0 (sequence is synthesized)
ctttcggtgctcgactcgcccgtgctgctgccgccgccgaaggaggggcaaagctcaagatggcggacaaaacgccaggcggatctcagaaggccagttcaaagacgagatcatcagatg

SEQ ID NO: 501233 - DNA, 120 bp, Artificial Sequence
  ENSG00000163714_1 (sequence is synthesized)
ttcattcatctggatcttcagatgcacatatggatgcatctggaccctcagatagtgatatgccaagtcggacacgacctaagagcccaagaaaacataattataggaatgaaagtgccc

SEQ ID NO: 501234 - DNA, 120 bp, Artificial Sequence
  ENSG00000163714_2 (sequence is synthesized)
gtgaaagcctttgtgattctcctcatcagaatctctcaagacctcttctggaaaacaaacttaaagcattcagtattggaaaaatgagtacagctaagcgaactttaagtaaaaaggaac

SEQ ID NO: 501235 - DNA, 120 bp, Artificial Sequence
  ENSG00000163714_3 (sequence is synthesized)
aggaagaattaaagaaaaaggaggatgaaaaggcagctgctgagatttatgaggagtttcttgctgcttttgaaggaagtgatggtaataaagtgaaaacatttgtgcgagggggtgttg

SEQ ID NO: 501236 - DNA, 120 bp, Artificial Sequence
  ENSG00000163714_4 (sequence is synthesized)
ttaatgcagctaaagaagaacatgaaacagatgaaaaaagaggtaaaatctataagccatcttcaagatttgcagatcaaaaaaatcctccaaatcagtcttccaatgaaagaccaccat

SEQ ID NO: 501237 - DNA, 120 bp, Artificial Sequence
  ENSG00000163714_5 (sequence is synthesized)
ctcttcttgtgatagaaaccaaaaaacctccacttaaaaaaggagagaaagaaaagaaaaaaagcaatttggaactcttcaaagaagaattaaagcaaattcaagaggaacgtgatgaga

SEQ ID NO: 501238 - DNA, 120 bp, Artificial Sequence
  ENSG00000163714_6 (sequence is synthesized)
gacataaaacaaaaggcagattaagtcgatttgaacctcctcagtcagattctgatggtcagcgtcgttctatggacgcgccttcaagaagaaatagatcatctggtgttcttgatgatt

SEQ ID NO: 501239 - DNA, 120 bp, Artificial Sequence
  ENSG00000163714_7 (sequence is synthesized)
acgcacctggctcacatgatgtaggagatccaagcactactaatttataccttggaaacattaatccacagatgaatgaagaaatgctgtgccaagaatttggaagatttggaccgttag

SEQ ID NO: 501240 - DNA, 120 bp, Artificial Sequence
  ENSG00000163714_8 (sequence is synthesized)
ccagtgtgaaaatcatgtggcctagaactgatgaagaaagagccagagagagaaattgcggctttgtggcctttatgaatagaagagatgctgaaagagctttaaaaaatttgaatggaa

SEQ ID NO: 501241 - DNA, 120 bp, Artificial Sequence
  ENSG00000163714_9 (sequence is synthesized)
aaatgattatgtcttttgaaatgaagttaggttggggtaaagctgtacctattcctccacatccaatatacattccgccttctatgatggaacatacgcttcccccacctccatccggac

SEQ ID NO: 501242 - DNA, 120 bp, Artificial Sequence
  ENSG00000163714_10 (sequence is synthesized)
tgccttttaatgcgcagcctagagagcggttaaaaaaccctaatgctcctatgttaccgccacctaaaaacaaagaggattttgagaagactctgtcgcaagccatagtcaaagtggtta

SEQ ID NO: 501243 - DNA, 120 bp, Artificial Sequence
  ENSG00000163714_11 (sequence is synthesized)
tcccaacagaaaggaatttgctcgccctgatacatcgaatgatagagtttgttgtacgtgaagggccaatgtttgaagctatgattatgaacagagaaatcaacaatcctatgttcaggt

SEQ ID NO: 501244 - DNA, 120 bp, Artificial Sequence
  ENSG00000163714_12 (sequence is synthesized)
tcttatttgaaaaccagacaccagcccatgtttactataggtggaagctttattctattctgcagggagattctccaactaaatggcggacggaagattttcgtatgttcaaaaatggat

SEQ ID NO: 501245 - DNA, 120 bp, Artificial Sequence
  ENSG00000163714_13 (sequence is synthesized)
ctttttggaggccaccaccattaaatccgtacttgcatggaatgtcagaagagcaagaaacagaagcttttgtagaggaacctagtaaaaagggagcacttaaggaagaacagagggata

SEQ ID NO: 501246 - DNA, 120 bp, Artificial Sequence
  ENSG00000163714_14 (sequence is synthesized)
aattggaagaaatcttgcggggattaactccaaggaaaaatgatattggagatgcaatggttttctgtcttaataatgctgaagctgctgaagaaatagtggattgcattactgagtcgt

SEQ ID NO: 501247 - DNA, 120 bp, Artificial Sequence
  ENSG00000163714_15 (sequence is synthesized)
tgtccatcttaaagacaccccttcctaaaaagattgccagattatatttggtttctgatgttttgtacaactcttcagccaaagttgctaatgcttcatattatagaaaattttttgaaa

SEQ ID NO: 501248 - DNA, 120 bp, Artificial Sequence
  ENSG00000163714_16 (sequence is synthesized)
caaagttatgtcagatattttcagacctcaatgccacctatcgtacaattcaaggccatttacaatctgaaaactttaagcaacgggtaatgacttgcttcagagcatgggaagattggg

SEQ ID NO: 501249 - DNA, 120 bp, Artificial Sequence
  ENSG00000163714_17 (sequence is synthesized)
caatttatccagaaccatttttgatcaaactacaaaatattttcttaggacttgtaaatattattgaagaaaaggaaacagaggatgttccagatgaccttgatggtgcccccatcgagg

SEQ ID NO: 501250 - DNA, 120 bp, Artificial Sequence
  ENSG00000163714_18 (sequence is synthesized)
aagagcttgatggtgcacctctggaagatgtagatggaattcctattgatgctactcccatcgatgatcttgatggagtccctataaaaagtcttgatgatgatcttgatggagtgcctt

SEQ ID NO: 501251 - DNA, 120 bp, Artificial Sequence
  ENSG00000163714_19 (sequence is synthesized)
tggatgcaactgaagactcaaaaaagaatgagcctatatttaaagttgccccatcaaaatgggaagctgtggatgaatctgaattggaagcacaggctgttacaacttctaaatgggaat

SEQ ID NO: 501252 - DNA, 120 bp, Artificial Sequence
  ENSG00000163714_20 (sequence is synthesized)
tatttgaccagcatgaagaatcagaagaagaagaaaatcaaaatcaagaagaagaaagtgaagatgaagaagatactcaaagttccaaatctgaagaacatcatttgtactctaatccaa

SEQ ID NO: 501253 - DNA, 120 bp, Artificial Sequence
  ENSG00000163714_21 (sequence is synthesized)
tcaaagaagaaatgactgagtctaagttctctaagtactctgaaatgagtgaggaaaaacgagccaaacttcgtgaaattgagctcaaagttatgaagtttcaggatgaattggaatctg

SEQ ID NO: 501254 - DNA, 120 bp, Artificial Sequence
  ENSG00000163714_22 (sequence is synthesized)
ggaaaagacctaaaaaaccaggccagagttttcaggagcaagtagaacactacagagataaacttcttcaacgagagaaagagaaagagttagaaagagaacgagaaagagacaagaaag

SEQ ID NO: 501255 - DNA, 120 bp, Artificial Sequence
  ENSG00000163714_23 (sequence is synthesized)
ataaagaaaaattggaatctcgctccaaagacaagaaggaaaaagatgagtgtactccgacaaggaaggaaaggaagaggcgacacagtacatcccccagcccatctcgcagtagcagtg

SEQ ID NO: 501256 - DNA, 120 bp, Artificial Sequence
  ENSG00000163714_24 (sequence is synthesized)
gtagacgagtgaaatccccatcaccaaaatcggagcgatcagagcgttcagaaagatctcataaagagagctcacggtccaggtcatctcacaaagattctcctagagatgttagcaaaa

SEQ ID NO: 501257 - DNA, 120 bp, Artificial Sequence
  ENSG00000163714_25 (sequence is synthesized)
aagccaaaagatcaccatctggttcaaggacacctaaaaggtctaggcgatcacggtctagatctcctaaaaaatcaggaaagaagtccagatcccagtccagatctccacacaggtctc

SEQ ID NO: 501258 - DNA, 120 bp, Artificial Sequence
  ENSG00000163714_26 (sequence is synthesized)
ataaaaagtcaaagaaaaacaaacactgacgtaaatttttaagatgctgtcacttattggaaatgcgatttgttttgtgcctgaacggtctgttttttaaaaaaacaaaaaatcaaatga

SEQ ID NO: 501259 - DNA, 120 bp, Artificial Sequence
  ENSG00000163714_27 (sequence is synthesized)
aagagcattcctggggttttttgtttgtttgtgtatgcatgtgtaaactcatgagcaactgcatctgtagatctgtcattgttttatattgtgtaaattactttcattgtggctatttct

SEQ ID NO: 501260 - DNA, 120 bp, Artificial Sequence
  ENSG00000163714_28 (sequence is synthesized)
caagatgaaatttttattgttctaatggatttcatcagaaatgtgtataatggatctgctgacagtagtagtattttgttttaggatgttgtgacttagcaaaaataatacagatgtctt

SEQ ID NO: 501261 - DNA, 120 bp, Artificial Sequence
  ENSG00000163714_29 (sequence is synthesized)
ccccccttttgtagctttgacaatttgaattagatttcaaataaaatctgaacagaaaactataatgttgtttttttgccccaccggtgatattaagtcccttaaagtcctactgagttt

SEQ ID NO: 501262 - DNA, 120 bp, Artificial Sequence
  ENSG00000163714_30 (sequence is synthesized)
tgagactcctatttggtggtttgctaaccatttgcttttgataagtttctcttgggtaatactaatacccagatatcaaagactaggtagatatggcatggcgttttgttagtggaatgc

SEQ ID NO: 501263 - DNA, 120 bp, Artificial Sequence
  ENSG00000163714_31 (sequence is synthesized)
ctggctaaaacatttttttcacagaagcaatatgatttccatacatccaacccatgttctgagcaactacttacttttagggggaaattaaatatcttttcatttcctcttctattatga

SEQ ID NO: 501264 - DNA, 120 bp, Artificial Sequence
  ENSG00000163714_32 (sequence is synthesized)
aagaagtttatttgtaaaacaaattttctaacaaggtttggccatagaattctcttgtatgatcgttgaccttttataatcttctgtaggctatctttcaaacactggcatcagaatatt

SEQ ID NO: 501265 - DNA, 120 bp, Artificial Sequence
  ENSG00000163714_33 (sequence is synthesized)
ttttataagtttgtgtttaaacagcttagttggtccccccccactcccaagagacttgggtttagttatagctttaagtaaaatttaaaaataaaatgtttttcaggaaacttcgtatct

SEQ ID NO: 501266 - DNA, 120 bp, Artificial Sequence
  ENSG00000163714_34 (sequence is synthesized)
aatggtttgtaaattcaaggtgcaaaaagttgatttaaaccatttgcagagttgaactctattatgaaaataaatttgctacggtatgaggaagaaataaaacttgtgtaatgttggtca

SEQ ID NO: 501267 - DNA, 120 bp, Artificial Sequence
  ENSG00000163714_35 (sequence is synthesized)
taatactgctataaatataataaagggttatgtagaattgaactgacactattatttgtgaatcttgatttcagttttttatgtaggcacttcatacactggtttgatgggttttttttt

SEQ ID NO: 501268 - DNA, 120 bp, Artificial Sequence
  ENSG00000163714_36 (sequence is synthesized)
tcctccctaaaagagaaagtagaaaactattctaacaatggattattttgatttagcttgctttttaaaaaaatcttttcaacttgttttacttaatcttgcctagtcacaaaataagat

SEQ ID NO: 501269 - DNA, 120 bp, Artificial Sequence
  ENSG00000163714_37 (sequence is synthesized)
gtgcacccatggtttggagagttcctatattagctgagcagtgagatacactatttccaaacggtgcacacctacagtagctttggaaatgagccaatcactgttttacttaatggttct

SEQ ID NO: 501270 - DNA, 120 bp, Artificial Sequence
  ENSG00000163714_38 (sequence is synthesized)
tatcagcatgcaaatattgcttgaaagttatttccttattcactgttttgttagtccattttgttaggaaacattaattcctaaaaatttgttcagaataattaaaagtgaacatttggt

SEQ ID NO: 501271 - DNA, 120 bp, Artificial Sequence
  ENSG00000163714_39 (sequence is synthesized)
gctgatactcaaaaacctacaaatgtagccatttaaaaagtaacatgtttttctcccctgctcattgcctgggagaatggaattttatataactacctttctttgcaaaaataacggtcg

SEQ ID NO: 501272 - DNA, 120 bp, Artificial Sequence
  ENSG00000163714_40 (sequence is synthesized)
tgtcgagttggtggtgattttggcattccatcttgcactggtttctagtataggcttagaaataattggtcaggtaataatctttccagtcaagttgcaagggatgcttatttctcttca

SEQ ID NO: 501273 - DNA, 120 bp, Artificial Sequence
  ENSG00000163714_41 (sequence is synthesized)
aaaaaagacatcctgcgggattgagtagaaaattttaggtcagttttgggtgcttatttgtaatatttttcctactacattggagtttagcagttctttttttctggatccagatacaag

SEQ ID NO: 501274 - DNA, 120 bp, Artificial Sequence
  ENSG00000163714_42 (sequence is synthesized)
tgtcatggtttatcttacagtgggtgaaactgactttcttttggttgggtgggtgaggatttcttaggcctgatagaatatatattctgtgaagtttgttaatgtacatattagattgta

SEQ ID NO: 501275 - DNA, 120 bp, Artificial Sequence
  ENSG00000163714_43 (sequence is synthesized)
ttggatttttttttcttgaattgcaaatggtattattagataggttatttccagttttacttcatgacaaattacctagagtaaacctacttaatactcccatggattctatgaaagttt

SEQ ID NO: 501276 - DNA, 120 bp, Artificial Sequence
  ENSG00000163714_44 (sequence is synthesized)
aatgggatcagaaattggtgacttataagggggaagatattctaccatatttttataatagcttattattcatgtttcttgtctgaaggacactcaagttacagagcaaaatttctatag

SEQ ID NO: 501277 - DNA, 120 bp, Artificial Sequence
  ENSG00000163714_45 (sequence is synthesized)
gttgactagaatgttcataagcatggtcttccagttgcaggaaagatcatgttctatctgtggacacttactgtcctctaccacagctacgtgccagagttgttttccacagttcttata

SEQ ID NO: 501278 - DNA, 120 bp, Artificial Sequence
  ENSG00000163714_46 (sequence is synthesized)
aagggcatgacttaggctctttaccctccaacttaatgtttatacacagggattgtttactaggttaatgacatttaactcccctctcttctgtaggtgagagaaaataagtaagtcttg

SEQ ID NO: 501279 - DNA, 120 bp, Artificial Sequence
  ENSG00000163714_47 (sequence is synthesized)
atctgtttcttaccaaagagagacagacctatgatggaaaatgatcacgtctctgaattttttctttaacgttatagttccttattacagatagtaagcatatgggaatttctgagctat

SEQ ID NO: 501280 - DNA, 120 bp, Artificial Sequence
  ENSG00000163714_48 (sequence is synthesized)
aacatgttgagaagttagaaattaaaactaacacaacaaaaggcgctgaatcaaaagatctttgcttttatttggctcagaatgtttttggcttttctgctaaagatggcagaaattact

SEQ ID NO: 501281 - DNA, 120 bp, Artificial Sequence
  ENSG00000163714_49 (sequence is synthesized)
ctacacagacctgatttttctttattgcagaccattcttgtgggcttaccctgagacttttatcccaattagtgaatcttggagggaatacttgcttatttatgacttaggtatttcccc

SEQ ID NO: 501282 - DNA, 120 bp, Artificial Sequence
  ENSG00000163714_50 (sequence is synthesized)
ccaaactttaatattcttgagcacttgaaaatacttttgagaaattttaactgtgattaaatttaggtttattagaaatattctgtacacatttgcctccatggtggcgtaagttctgaa

SEQ ID NO: 501283 - DNA, 120 bp, Artificial Sequence
  ENSG00000163714_51 (sequence is synthesized)
aaattatatgaccgtgacaatagtttatcatcatcattattgttattcaaaataagggtaaataaatctctgtattgccaaagtgacttaaactgttctgatgaccacacagtgtgattt

SEQ ID NO: 501284 - DNA, 120 bp, Artificial Sequence
  ENSG00000163714_52 (sequence is synthesized)
ctttagcagagaaagttggttttaaaaataaatagtaccacttttctaagactgtacagtttacaaataaggtttttttctttgttgttttcctcttctattaagttttagtgaaaagcc

SEQ ID NO: 501285 - DNA, 120 bp, Artificial Sequence
  ENSG00000163714_53 (sequence is synthesized)
taattacagaaaattgtgcagatactagtgaagatactagtataagtttaaaggaacacgtgactgtaaaatctcacatttacaaagtgcttgatctcttcatatttcacacgcatgttt

SEQ ID NO: 501286 - DNA, 120 bp, Artificial Sequence
  ENSG00000163714_54 (sequence is synthesized)
tagaatagattttagggagtgtttaattcattatccttttgacttaaaatttttgttaccaacttcctaggacttagataatatataaataagtacaaatcccaggggaagtgttgtgat

SEQ ID NO: 501287 - DNA, 120 bp, Artificial Sequence
  ENSG00000163714_55 (sequence is synthesized)
gctagactaaaaggtgggaatgtgctgctgttccgtgagccttgttccattgttgaaaatttgatgcctcagtgtttattcagtaccacctcatggagcttcaatgtaaatggattatat

SEQ ID NO: 501288 - DNA, 120 bp, Artificial Sequence
  ENSG00000163714_56 (sequence is synthesized)
gtataattggtaatttgtatagttttgtagattgtagattaaatgcactcatcatgtcacatgtaattgtgcttggagtatttgtgttttattcttttacttcaacgggttcttgtctgt

SEQ ID NO: 501289 - DNA, 120 bp, Artificial Sequence
  ENSG00000163714_57 (sequence is synthesized)
tacatctctggtgatttgaaatatcaggaaagacagtttgtcagaaatgagaataatatagttgaaatcagttgggctaaaatattctacagcaagacaatttcttttgggtgaactgat

SEQ ID NO: 501290 - DNA, 120 bp, Artificial Sequence
  ENSG00000163714_58 (sequence is synthesized)
tctataatttacttacttttaatgtaaggattagatttattgttgagctgctttccagatcagactgtcactttatagtttttctacataaagattatatagttgcaaacaaaggttgtg

SEQ ID NO: 501291 - DNA, 120 bp, Artificial Sequence
  ENSG00000163714_59 (sequence is synthesized)
aaatttcccttttgttgtttttgacttttaattaataaaagtacattgttttcatagcaaacttagactgtccatgtaattttctccatattgtttttccgatgcaagcccagttaataa

SEQ ID NO: 501292 - DNA, 120 bp, Artificial Sequence
  ENSG00000163714_60 (sequence is synthesized)
ttagttttttagcagctttctctcaagtgaaataagtgatgtgacatgtttatcagttatggctaaaatgttacactttacatgtttaaactataatcatatgttttcatgctagatggt

SEQ ID NO: 501293 - DNA, 120 bp, Artificial Sequence
  ENSG00000163714_61 (sequence is synthesized)
atttaataaaaaatgcatctggtgtgtgtaccagaaaaacacaggagttggatggattttttattaaatcaggccttaaacttgttaaatagttttgcatttttataaattatagtcatg

SEQ ID NO: 501294 - DNA, 120 bp, Artificial Sequence
  ENSG00000163714_62 (sequence is synthesized)
gttataacatttcagtagcaccataaaagtgcttggtttaggaattttttttttttaaactgagatagtgtgtaaatttctagatggctgtaataacatgcaggctctaagttactgatt

SEQ ID NO: 501295 - DNA, 120 bp, Artificial Sequence
  ENSG00000163714_63 (sequence is synthesized)
ttatatatcaatatttgcagctttctaattagttgtgatttataatttaatgttttacttttggaaaataagtgacatttagaaaattaaatattactatgaggctgtattgtggtttcc

SEQ ID NO: 501296 - DNA, 120 bp, Artificial Sequence
  ENSG00000163714_64 (sequence is synthesized)
taccctccctcacctttccatcccctcccacttccctactcccactgccccacaccctcttaatgcacaaggcattaacatatgctccaggttacttttttggtattaaattcggtgtta

SEQ ID NO: 501297 - DNA, 120 bp, Artificial Sequence
  ENSG00000163714_65 (sequence is synthesized)
agctgccgaagcggcaagaacagcgtttccgtccatcgagcgccaggtcaccagtcagctccagtcctattttgagttgaagtaaaagctcctccctagatggccagtgcacgtctttaa

SEQ ID NO: 501298 - DNA, 120 bp, Artificial Sequence
  ENSG00000163714_66 (sequence is synthesized)
aaagcgactcctttcccacaaaggaaatacgactggttcgcatctatcaagggttggcgttgggataagagggtgaagtatcagctggccctgattctctgaattcccggacccaataac

SEQ ID NO: 501299 - DNA, 120 bp, Artificial Sequence
  ENSG00000163714_67 (sequence is synthesized)
gcgaccaagcaccgtgactcccaggaaaactagcggagtgagcgcggctgaggaaattactgacaccggaagtcacgtgagcggctgcccctaaggtcgctatctcgacagtcgactatt

SEQ ID NO: 501300 - DNA, 120 bp, Artificial Sequence
  ENSG00000163714_68 (sequence is synthesized)
gtaattgaccatttatgttcagagatgacactgccagtgatacttccactgtaagcaagactttggctttttttcgtttttggtgggggcagggtggtagatgttaagttttgatgcttt

SEQ ID NO: 501301 - DNA, 120 bp, Artificial Sequence
  ENSG00000163714_69 (sequence is synthesized)
ctaacccagtaatttacttagatgagagttaatgaattgggacacgtagatgatattctttttatgctttttgagcagtgaacatttgctatttatgctcataatatattgcaagtcaaa

SEQ ID NO: 501302 - DNA, 120 bp, Artificial Sequence
  ENSG00000163714_70 (sequence is synthesized)
aattgactatattgcaagtcaaaaattgactatatttgacttgcaatggggttgtctttttaagcatttctgaactgaggtatttaaattattagtatgtgtagtgtatatttcccagaa

SEQ ID NO: 501303 - DNA, 120 bp, Artificial Sequence
  ENSG00000163714_71 (sequence is synthesized)
cacctaaaaacaaagaggattttgagaaggtaatttaaaaaatggacataaggccgcatctaatttgtaaatactaaagctgtggtagtatttcttttcaacaattttatagaaaatgtg

SEQ ID NO: 501304 - DNA, 120 bp, Artificial Sequence
  ENSG00000163714_72 (sequence is synthesized)
tgtgtaattctgtttggcaacttttaaagaaataagtagatgtgttccctgccttagcccatggaaaccctatatttgaaatactaggtcatatttttatttgtggctaccattcctttt

SEQ ID NO: 501305 - DNA, 120 bp, Artificial Sequence
  ENSG00000163714_73 (sequence is synthesized)
ttgaccacttgttaagttttttttcctttgtccagtgttgtatccagatttgcttaagtgtattaactaaatttactttgttctgagaaagtgatactttgtatttggttaagtgacatt

SEQ ID NO: 501306 - DNA, 120 bp, Artificial Sequence
  ENSG00000163714_74 (sequence is synthesized)
ttacttcctttaggcttaaatttttttcactatggagagatttcattttaagtaggtttgtttgaaagctatgagaaaataattatagtcaccttgagatagattattttattgttcatg

SEQ ID NO: 501307 - DNA, 120 bp, Artificial Sequence
  ENSG00000163714_75 (sequence is synthesized)
tactctgaaatagggcattatagagccacaaaagtctgtcttgttctataactatatatttatttacattctagcagttatatgaacgtaatttgagctgggaatgctaaaggtgtaatt

SEQ ID NO: 501308 - DNA, 120 bp, Artificial Sequence
  ENSG00000163714_76 (sequence is synthesized)
tagtgtgtgctttgtaccaagagccaatatccttttgcttttcccaattgttatttgccagctgtgtatggatggggactggtgaaatgaggaatcaaaagcagcttataaataacctga

SEQ ID NO: 501309 - DNA, 120 bp, Artificial Sequence
  ENSG00000163714_77 (sequence is synthesized)
gtcatttttgcccgacaccataatcaatgtccaaaattgtgtttggagtctaataaaatatcacatgattttaggacccagcttcagataaagacttcctgtgagttcagtcaataaaat

SEQ ID NO: 501310 - DNA, 120 bp, Artificial Sequence
  ENSG00000163714_78 (sequence is synthesized)
gactgtactaaaaaattactcacatatgtttatttttggtaaaatattggaaaataattgttacagaaaatgggaagggcatctcaccgtgtaccccattttgcaatattttggaaagag

SEQ ID NO: 501311 - DNA, 120 bp, Artificial Sequence
  ENSG00000163714_79 (sequence is synthesized)
tagtactccattcacttaaggctttggcaacataatttcttcattgattgatagtgtacaggcatatcaatctcttgttttggagggaaaaaagatatataaaggcagaattatctattt

SEQ ID NO: 501312 - DNA, 120 bp, Artificial Sequence
  ENSG00000163714_80 (sequence is synthesized)
atcctactcttaggtctgctattagtttttttgccttggacgagtcacttttctaagttttctgttttataaaataaagaaattggacgagatggttcagcatatcctagatataacgtt

SEQ ID NO: 501313 - DNA, 120 bp, Artificial Sequence
  ENSG00000163714_81 (sequence is synthesized)
tcttgctcgtaaagggaactagtagggactgttggggagtttgtaggagaaaaattcagagtaataagagttcaagcaattcagttacggttttagagtttaaacacctagtttttgatt

SEQ ID NO: 501314 - DNA, 120 bp, Artificial Sequence
  ENSG00000163714_82 (sequence is synthesized)
atagccaaggttaatgtacagtctacacgtggtctttaccttaacgggaagtaaaaagcacttttgagggtagaggactcgtggtctctttctttatgttgaagaaacagtgaaaagaga

SEQ ID NO: 501315 - DNA, 120 bp, Artificial Sequence
  ENSG00000163714_83 (sequence is synthesized)
cccacccctgcaaaacaacagcaaaaacctttaccaggctctataacagggggaccaaacttgtttttgctcatcattgcctcacaaggtacctggcaccagtgagcacttggtaaatat

SEQ ID NO: 501316 - DNA, 120 bp, Artificial Sequence
  ENSG00000163714_84 (sequence is synthesized)
tagataaatgcacaactgactgcttctttagcaaactggatgatagaatatgttcttacattgtacctcagattgtgggtatccagttatgttggcttgtactggattacaaattaatct

SEQ ID NO: 501317 - DNA, 120 bp, Artificial Sequence
  ENSG00000163714_85 (sequence is synthesized)
ggactggctgctcaaactccacaatttaatgaaaaatctcagatgatgactcagaaaacctctaatgatctgaggaatatattaagggattccagagtcaaaggctgatcatggagggca

SEQ ID NO: 501318 - DNA, 120 bp, Artificial Sequence
  ENSG00000163714_86 (sequence is synthesized)
ttgatgagggaagacttcagcacgtttttcagcaccaggacaagcatcattgctcaaggagagcttggttgacaacaggaagttagaaggagtctgaattgtaacaagtgtggcaagagc

SEQ ID NO: 501319 - DNA, 120 bp, Artificial Sequence
  ENSG00000163714_87 (sequence is synthesized)
accaagatcactgtgtgtgtgtgttcacagaaaatgtaccaaagggagaagccttaaaaacaaatggcaggtgtgggcaccagaaaatcaacacatcgggaagagaaaaatggcatggtt

SEQ ID NO: 501320 - DNA, 120 bp, Artificial Sequence
  ENSG00000163719_0 (sequence is synthesized)
aagtggaagtggaagtagaaggcggtggctgaggcggttccggaggttctagtgtcggagttgggtgcaggcaggtgccatgggcccgcttgaggcacactgaggggacgcggggctggg

SEQ ID NO: 501321 - DNA, 120 bp, Artificial Sequence
  ENSG00000163719_1 (sequence is synthesized)
ccatggccggcgctcgggccgccgccgccgctgcctcggcggggtcctcggcctcttcaggcaaccagccgcctcaggagctggggcttggggagctgctggaggagttctcccggactc

SEQ ID NO: 501322 - DNA, 120 bp, Artificial Sequence
  ENSG00000163719_2 (sequence is synthesized)
agtaccgggccaaggatggcagcgggaccggcggctctaaggttgagcgcattgagaagagatgtctggagctgtttggccgagactactgtttcagcgtgattccaaacacgaatgggg

SEQ ID NO: 501323 - DNA, 120 bp, Artificial Sequence
  ENSG00000163719_3 (sequence is synthesized)
atatctgtggccactatccccggcacatcgtgttcctggagtatgagagttctgagaaggagaaagacacgtttgagagtaccgtacaggtgagcaagttgcaagacctcatccaccgca

SEQ ID NO: 501324 - DNA, 120 bp, Artificial Sequence
  ENSG00000163719_4 (sequence is synthesized)
gcaagatggcccggtgcagaggacggtttgtctgcccagtaatcctgttcaagggcaagcacatttgcaggtcggccacactggctggatggggagagctgtatggacgctcaggctaca

SEQ ID NO: 501325 - DNA, 120 bp, Artificial Sequence
  ENSG00000163719_5 (sequence is synthesized)
actattttttctcagggggtgcagatgatgcctgggcagatgtggaggacgtcacggaggaggactgtgctcttcgaagtggtgacacgcatctttttgataaggtcagaggctatgaca

SEQ ID NO: 501326 - DNA, 120 bp, Artificial Sequence
  ENSG00000163719_6 (sequence is synthesized)
tcaagctgcttcgatacctgtcagtcaaatacatctgtgacctgatggtggagaacaagaaggtgaagtttggcatgaatgtaacctcctctgagaaggtggacaaagcccagcgctatg

SEQ ID NO: 501327 - DNA, 120 bp, Artificial Sequence
  ENSG00000163719_7 (sequence is synthesized)
ccgacttcactctcctctccatcccgtatccaggctgtgaatttttcaaggaatataaagatcgggattacatggcagaagggctcatatttaactggaagcaggactacgttgatgccc

SEQ ID NO: 501328 - DNA, 120 bp, Artificial Sequence
  ENSG00000163719_8 (sequence is synthesized)
cattgagcatccccgacttcctgactcactctctgaacattgactggagccagtatcagtgttgggatctggtgcaacaaacacaaaactacctgaagctgctgctttccttagttaaca

SEQ ID NO: 501329 - DNA, 120 bp, Artificial Sequence
  ENSG00000163719_9 (sequence is synthesized)
gtgatgatgacagcgggctgctggtacactgtatctcaggctgggatcggacccccctcttcatctccctcctgcgcctttccttgtgggctgatgggctcatccacacgtccctgaagc

SEQ ID NO: 501330 - DNA, 120 bp, Artificial Sequence
  ENSG00000163719_10 (sequence is synthesized)
cttctgcttcaattttttgaagcatattacctccgaggagttctctgctctgaagacccagaggaggaagagtttgccagcccgggatggaggcttcaccctggaagacatctgcatgct

SEQ ID NO: 501331 - DNA, 120 bp, Artificial Sequence
  ENSG00000163719_11 (sequence is synthesized)
gagacgaaaggaccgtggcagcaccaccagccttggcagcgacttctccctggtcatggagagttccccaggagccactgggagcttcacctatgaggccgtggagctggtcccagcagg

SEQ ID NO: 501332 - DNA, 120 bp, Artificial Sequence
  ENSG00000163719_12 (sequence is synthesized)
agcgccaactcaggcagcttggaggaagagccactcatcctctccacagagtgtcctctggaaccggccacaaccctcagaggaccgcttgccttcccagcaggggctggcggaagccag

SEQ ID NO: 501333 - DNA, 120 bp, Artificial Sequence
  ENSG00000163719_13 (sequence is synthesized)
gtcttccagctcctcttcctcaaaccattctgataactttttcaggatgggtagcagtcccctggaggtccccaaacccagatcagtggaccatcccctgcccggatcctctctctccac

SEQ ID NO: 501334 - DNA, 120 bp, Artificial Sequence
  ENSG00000163719_14 (sequence is synthesized)
agactatggcagctggcagatggtaacgggctgtggcagtattcaggagcgggctgtcctgcacacagactcctctctccctttcagcttcccggatgagctccctaacagttgtctgct

SEQ ID NO: 501335 - DNA, 120 bp, Artificial Sequence
  ENSG00000163719_15 (sequence is synthesized)
tgcagccctgagtgatcgagagactcggctgcaggaggtgcgctcagccttcttggctgcgtacagcagcacagtggggcttcgggcagtagcccccagtccttccggtgccatcggggg

SEQ ID NO: 501336 - DNA, 120 bp, Artificial Sequence
  ENSG00000163719_16 (sequence is synthesized)
cctgctggagcaatttgcccgtggtgttggactccggagcatcagcagcaatgccttgtgaagaagccagcccatgacattttcctgctcctctctcagctgagcccttagcagagaatc

SEQ ID NO: 501337 - DNA, 120 bp, Artificial Sequence
  ENSG00000163719_17 (sequence is synthesized)
aaagccatgcctggccgaaggggtacttccaggtcaggggaaatttcagtcccccatctccatcatgaacatggcagccccaaagctgagcaaggccaaagacagggttttccaaccccc

SEQ ID NO: 501338 - DNA, 120 bp, Artificial Sequence
  ENSG00000163719_18 (sequence is synthesized)
agcctcttgactggtgaccaccaccccttcttgtcactgtctcccacccaccccatctttgctgggattcccatcaactctcagaactgtgtggggtttccctggggccttgtggaagcc

SEQ ID NO: 501339 - DNA, 120 bp, Artificial Sequence
  ENSG00000163719_19 (sequence is synthesized)
atgacttcacaaagaccctacctgtcagttcttgtttctggggaggagggatcacctgcactgagaatgaggcagtttgacacagatcacaaaataaaatcaaagtctttttgaatagcc

SEQ ID NO: 501340 - DNA, 120 bp, Artificial Sequence
  ENSG00000163719_20 (sequence is synthesized)
gtctgtctcctccagagccctcgagccactgcacccttggggagttcccagttcattctgcctcaactgtatgtttgttggagttgcacaccttacttttgtgctgtgggagaggaattt

SEQ ID NO: 501341 - DNA, 120 bp, Artificial Sequence
  ENSG00000163719_21 (sequence is synthesized)
ggggagttcctagaatcccagaggctgggtgggatttgtccattggtggctttattccatgtcctcaaaatcctagaaaacaaaattaagaactccttaccatctatgccgtgcacaggg

SEQ ID NO: 501342 - DNA, 120 bp, Artificial Sequence
  ENSG00000163719_22 (sequence is synthesized)
tattttcacactgtctcagcattgcacaacagcattgtgtgtggggccaggatgggcctctcattcagaaagatgaggcatgagatgagagaatcaatccgggctgctcagtggatgcac

SEQ ID NO: 501343 - DNA, 120 bp, Artificial Sequence
  ENSG00000163719_23 (sequence is synthesized)
acagcctgtagaggccctgttctccagagtcctccacccagtttggctgttttgattggatgggcctggcttgctcaatgtctctagggcagacggactctaaatccctggtagcaatca

SEQ ID NO: 501344 - DNA, 120 bp, Artificial Sequence
  ENSG00000163719_24 (sequence is synthesized)
cgtatgatctgaaggcctgcaagactgtgggatgtggtcagagttgattcctgtgaagccgtgcagcatgtgggttcagcacttgggctttgttatcagaaaaacttaaggccaaatcct

SEQ ID NO: 501345 - DNA, 120 bp, Artificial Sequence
  ENSG00000163719_25 (sequence is synthesized)
agctgctctattcaccagctgtatcttcaagtgtcagccttgccttttctgagcctgttagctcatctctcaagaaggaatggcactgtagtacctcccttgcctggtgtgtgtccttaa

SEQ ID NO: 501346 - DNA, 120 bp, Artificial Sequence
  ENSG00000163719_26 (sequence is synthesized)
atgggtcacataacctctcctcttttctcatctctcagtaggtggtggtctctgtccctttcacctctcagaaatgggcagccatgtcaggggggtggggcagggcagtgagaatgctca

SEQ ID NO: 501347 - DNA, 120 bp, Artificial Sequence
  ENSG00000163719_27 (sequence is synthesized)
tgtatggatctttggatgttccctgtgagtgtaaactcttggtctgtttctccctcgtatgctataaggagaagctaaggcaagcatgcatggcctttggcctgtgtgaaattagaaagt

SEQ ID NO: 501348 - DNA, 120 bp, Artificial Sequence
  ENSG00000163719_28 (sequence is synthesized)
aaaaagatctcaggccatgcttcttccccagttgccaggagagacttcaggattgttgatggtagtacaggaatccagtctcagctccatgttcttagtgctgctgcaggagtgatttga

SEQ ID NO: 501349 - DNA, 120 bp, Artificial Sequence
  ENSG00000163719_29 (sequence is synthesized)
cttttctttgccccagagcctactgcttccatctctcacatttcactcccaccgatctgctttccctagagtcctgtctatctccccccatacttacctcaggactgtcatttatcctca

SEQ ID NO: 501350 - DNA, 120 bp, Artificial Sequence
  ENSG00000163719_30 (sequence is synthesized)
gacatccctctgctcccacaagccctgggtacaagtcattgagccgttgggattgggttcacttcagctgcctctgacagatttccagggagggactgtccagggattggtttcttgagg

SEQ ID NO: 501351 - DNA, 120 bp, Artificial Sequence
  ENSG00000163719_31 (sequence is synthesized)
gcagatttggagcaagattagtaggcatggatggtcttagtatttaggtgtatgggaatgtgagggctcttctcatgtaagtctgtgacccctagagagggccctccagggacccattgg

SEQ ID NO: 501352 - DNA, 120 bp, Artificial Sequence
  ENSG00000163719_32 (sequence is synthesized)
gggaacactatgtgagtacctgaactttgagtccagagtccatgggcctcttctattaaaggcccttggggatgtcacacagcctcatgtggagtcatgctttgataagcctgagttgtg

SEQ ID NO: 501353 - DNA, 120 bp, Artificial Sequence
  ENSG00000163719_33 (sequence is synthesized)
cgcacttgtttcccttcttgacttgtaatttcagggtaaggaaagaagaggggctttcatctgtgatcagagcctacagaggccaagagaggaatggggaatagaatcagaacacagatc

SEQ ID NO: 501354 - DNA, 120 bp, Artificial Sequence
  ENSG00000163719_34 (sequence is synthesized)
tttctggaaaagccagcaccctttcagctgtttacctggaaaccacagtgactgaaggtgtagctaaagccctagaggtttccagtggggaaccctggcttcaacccagcagacagtggg

SEQ ID NO: 501355 - DNA, 120 bp, Artificial Sequence
  ENSG00000163719_35 (sequence is synthesized)
gtggggaaccctggcttcaacccagcagacagtgggttcttccagggcaatagcttcctcctaagatgcgtcatgtctaggcctcaaggctggggccttttttttcttttcttttttttt

SEQ ID NO: 501356 - DNA, 120 bp, Artificial Sequence
  ENSG00000163719_36 (sequence is synthesized)
gggattacagccaaggctgaggactttcaacagctgcagcgtgctgccagatttcaggggcctccttactgttaggtataagacttcatgcctcagcttgctcttcctgaggagtggaag

SEQ ID NO: 501357 - DNA, 120 bp, Artificial Sequence
  ENSG00000163719_37 (sequence is synthesized)
cagagagctgctggggcaaattccctcctgcttagctaccctccttcccagtgatcgcaaagatagttattttcacaacaggtcaggtcaggccaggcacagttgctcacgcctgtaatc

SEQ ID NO: 501358 - DNA, 73 bp, Artificial Sequence
  ENSG00000163719_38 (sequence is synthesized)
ggtcaggtcaggccaggcacagttgctcacgcctgtaatcccagtactgtgggacgccaaggcaggcggatca

SEQ ID NO: 501359 - DNA, 120 bp, Artificial Sequence
  ENSG00000163719_39 (sequence is synthesized)
ggctgaggtgggaggatggcttgaggctacagtgagcgctgattgtgtcactgcattccagcctgggcaatagagtgagaccttgtctcaagaaaaaaaaaaaaaaggttagtgtcccag

SEQ ID NO: 501360 - DNA, 120 bp, Artificial Sequence
  ENSG00000163719_40 (sequence is synthesized)
taaaagctcctgctctaggtgggaacagtagcctgagggcttagaggaatggtttaagggaaaacagggccagatatttggggcctgaaccacaaggatagcatggccgtaggacagaca

SEQ ID NO: 501361 - DNA, 120 bp, Artificial Sequence
  ENSG00000163719_41 (sequence is synthesized)
ctggccttgtacagtcagaagaagcacaaggacaggtggtatggagggagggaggatgaggatactgggtcctgtcccagggtaatgtctttgttctttctcttgacctccccataggct

SEQ ID NO: 501362 - DNA, 82 bp, Artificial Sequence
  ENSG00000163719_42 (sequence is synthesized)
ttcaccatgttggccaggctggtctttacctcctgacctcaggtgatctgccgcctgagcctccccaagtgctgaattggag

SEQ ID NO: 501363 - DNA, 120 bp, Artificial Sequence
  ENSG00000163719_43 (sequence is synthesized)
agaaggagaaagacacgtgagcatcatgtgaccgtagtgtacatgtctggggagtccgtggcagctaatccctgtggccaggaagtctgtagctgggcagggcagaatcactttccccag

SEQ ID NO: 501364 - DNA, 120 bp, Artificial Sequence
  ENSG00000163719_44 (sequence is synthesized)
agaagtattctgggatcgtttctttcagcacaccaaaatagatggtcccaaattctgcagcacaaatctaatttgtttcctccttgagtgaatggcacttctcatcctgcttttggtccc

SEQ ID NO: 501365 - DNA, 120 bp, Artificial Sequence
  ENSG00000163728_0 (sequence is synthesized)
agacagtttcttccgcttcctgtaccacccggctcaagtagcggacacggaacagggaactatcagcccgtcggcctccgggccctgcattctctagccatggaccgggaccttttgcgg

SEQ ID NO: 501366 - DNA, 120 bp, Artificial Sequence
  ENSG00000163728_1 (sequence is synthesized)
cagtcgctaaattgccacgggtcgtctttgctctctctacttcggagcgaacagcaggacaatccacacttccgtagcctcctggggtcggccgccgagccagcccggggcccgccgccc

SEQ ID NO: 501367 - DNA, 120 bp, Artificial Sequence
  ENSG00000163728_2 (sequence is synthesized)
cagcacccgttgcagggcagaaaagagaagagagttgacaacatcgagatacagaaattcatctccaaaaaagcggatctgctttttgcactttcctggaaatcagatgcacctgcaact

SEQ ID NO: 501368 - DNA, 120 bp, Artificial Sequence
  ENSG00000163728_3 (sequence is synthesized)
tctgaaattaatgaagacagtgaagatcattatgcaatcatgccacctttagagcaattcatggagatacctagtatggatcggagagagctgtttttccgagatattgagcgtggtgat

SEQ ID NO: 501369 - DNA, 120 bp, Artificial Sequence
  ENSG00000163728_4 (sequence is synthesized)
atagtgattggaagaattagttctattcgggaattcggttttttcatggtgttgatctgtttaggaagtggtatcatgagagatatagcccacttagaaatcacagctctttgtccctta

SEQ ID NO: 501370 - DNA, 120 bp, Artificial Sequence
  ENSG00000163728_5 (sequence is synthesized)
agagatgtgccttctcacagtaaccatggggatcctttatcatattaccaaactggtgacatcattcgagctggaatcaaggatattgacagataccatgaaaagctagcagtatctctg

SEQ ID NO: 501371 - DNA, 120 bp, Artificial Sequence
  ENSG00000163728_6 (sequence is synthesized)
tatagctcttctcttccaccacacctatctggtattaaattaggtgtaattagctctgaagagcttcctttatactacaggagaagtgttgagctaaatagcaattctttggagtcctat

SEQ ID NO: 501372 - DNA, 120 bp, Artificial Sequence
  ENSG00000163728_7 (sequence is synthesized)
gaaaatgtcatgcagagttccttgggatttgttaatccaggagtagttgaattccttctagaaaaactaggaatagatgaatctaatccaccatctttaatgagaggcctacaaagcaaa

SEQ ID NO: 501373 - DNA, 120 bp, Artificial Sequence
  ENSG00000163728_8 (sequence is synthesized)
aatttctctgaagatgattttgcttctgcattgagaaaaaaacaatccgcatcttgggctttaaaatgtgtgaagatcggagttgactattttaaagttggacgccatgtggatgctatg

SEQ ID NO: 501374 - DNA, 120 bp, Artificial Sequence
  ENSG00000163728_9 (sequence is synthesized)
aatgaatacaataaagctttggaaatagacaaacaaaacgtggaagctttggtagctcgtggagcattatatgcgacaaaaggaagtttgaacaaagcaatagaagattttgagcttgca

SEQ ID NO: 501375 - DNA, 120 bp, Artificial Sequence
  ENSG00000163728_10 (sequence is synthesized)
ttagaaaactgtccaactcacagaaatgcaagaaaatacctctgccagacacttgtagagagaggaggacagttagaagaagaagaaaagtttttaaatgctgaaagttactataagaaa

SEQ ID NO: 501376 - DNA, 120 bp, Artificial Sequence
  ENSG00000163728_11 (sequence is synthesized)
gctttggctttggatgagacttttaaagatgcagaggatgctttgcagaaacttcataaatatatgcagaaatctttggaattaagagaaaaacaagctgaaaaggaagaaaagcagaaa

SEQ ID NO: 501377 - DNA, 120 bp, Artificial Sequence
  ENSG00000163728_12 (sequence is synthesized)
acaaagaaaatagaaacaagtgcagaaaagttgcgtaagctcttaaaagaagagaagaggctaaagaagaaaagaagaaaatcaacttcttcttcaagtgtttcttctgctgatgaatca

SEQ ID NO: 501378 - DNA, 120 bp, Artificial Sequence
  ENSG00000163728_13 (sequence is synthesized)
gtgtcttcatcatcatcctcttcctcttctggtcacaaaaggcataagaaacataagaggaaccgttcagagtcttctcgcagttccagaaggcattcatctagggcatcctcaaatcag

SEQ ID NO: 501379 - DNA, 120 bp, Artificial Sequence
  ENSG00000163728_14 (sequence is synthesized)
atagatcagaataggaaagatgagtgctacccagttccagctaatacttcagcatcttttcttaaccataaacaagaagtggagaaactactggggaagcaggataggttacagtatgaa

SEQ ID NO: 501380 - DNA, 120 bp, Artificial Sequence
  ENSG00000163728_15 (sequence is synthesized)
aagacacagataaaagagaaagatagatgccctctctcttcatcttcacttgaaataccggatgattttggaggtaggtctgaagatccaagagatttttataacagctataaaacccaa

SEQ ID NO: 501381 - DNA, 120 bp, Artificial Sequence
  ENSG00000163728_16 (sequence is synthesized)
gcaggtagtagcaaaacagaaaagccatataaatcagaaagacatttttccagtagaagaaattcctcagattccttctgtaggaattcagaggacaagatttatggttataggagattt

SEQ ID NO: 501382 - DNA, 120 bp, Artificial Sequence
  ENSG00000163728_17 (sequence is synthesized)
gaaaaggatatagagggaagaaaagagcactatagaaggtgggaaccaggttctgtgaggcattctacctcaccagcaagctcagaatactcttggaagtcagttgagaaatacaaaaaa

SEQ ID NO: 501383 - DNA, 120 bp, Artificial Sequence
  ENSG00000163728_18 (sequence is synthesized)
tacgctcactctggatcacgtgatttcagtagacatgagcaaagataccgtttaaatacaaatcaaggagaatatgaaagagaggacaattatggggaggatatcaaaacagaggttcca

SEQ ID NO: 501384 - DNA, 120 bp, Artificial Sequence
  ENSG00000163728_19 (sequence is synthesized)
gaagaagatgcactaagtagcaaagaacactcagaaagcagtgttaagaaaaatttacctcagaatttactgaatatatttaatcagatagctgaatttgaaaaagaaaaaggaaataag

SEQ ID NO: 501385 - DNA, 120 bp, Artificial Sequence
  ENSG00000163728_20 (sequence is synthesized)
tcaaaaaattaatacaccaaggatatcggcaccattacacaaaatgccattaagtgaagtttttggttgtattagtcataacagttgagtgcagaaatctctgcttctaaaattatttgt

SEQ ID NO: 501386 - DNA, 120 bp, Artificial Sequence
  ENSG00000163728_21 (sequence is synthesized)
agagattacaggaaacaaatgcttttaagtaagtttttctcaaattttgtttcagttctaggtcccttgtcacagcttggtttttagactttttatgtatatgtttatgtacagtatatt

SEQ ID NO: 501387 - DNA, 120 bp, Artificial Sequence
  ENSG00000163728_22 (sequence is synthesized)
actcttgacagtttgaatttcttcacctaaagataattctctgaaagtactgtttcttcattctattgcggtatatgagaattcctgggtgcatcttattctgctgtttgagagaaaaat

SEQ ID NO: 501388 - DNA, 120 bp, Artificial Sequence
  ENSG00000163728_23 (sequence is synthesized)
ttgtgcattgaacacttggatcatttttataaaaattaatttcattttcttttctgttaaattaaaaatcgtcagcttttgaaagattatatgttcgaatgtttcttgaacacttttata

SEQ ID NO: 501389 - DNA, 120 bp, Artificial Sequence
  ENSG00000163728_24 (sequence is synthesized)
tttatcagtttaaatattacattttttgcccaattttttttaaaatttttaaatggtagattatatgtcttaattttcctctaaagcccaatttgattaaaagtggtttgtgaacagtca

SEQ ID NO: 501390 - DNA, 120 bp, Artificial Sequence
  ENSG00000163728_25 (sequence is synthesized)
tcttcacttgaaataccggatgattttggagtgtactcctatttatttaaaaagttaactataaaacagcctcaggcaggtccttcaggagatattccagaagagggcattgttatcata

SEQ ID NO: 501391 - DNA, 120 bp, Artificial Sequence
  ENSG00000163728_26 (sequence is synthesized)
gatgacagctccattcatgttactgaccctgaagaccttcaagtgggacaagatatggaggtggaagacagtggtattgatgatcctgaccacgggtaggcttaggtttatgtgtgtgta

SEQ ID NO: 501392 - DNA, 120 bp, Artificial Sequence
  ENSG00000163728_27 (sequence is synthesized)
tgtgtcttagtttttaacaaaaaaattaaaaagtaaaaaaactaaaaatagaaaaatgcttagagaataaggatataaagaatatttttgtgcagttgaacaatgagtgcttaagctaaa

SEQ ID NO: 501393 - DNA, 120 bp, Artificial Sequence
  ENSG00000163728_28 (sequence is synthesized)
tgtcatcacaaaagagtaaaaaaattttacaaaattaaaaatgtttaaagttaaaaagctctaggaagctaaggtcaatttattattggagaaataaaattatttttatgaatttactgt

SEQ ID NO: 501394 - DNA, 120 bp, Artificial Sequence
  ENSG00000163728_29 (sequence is synthesized)
gcagaggatgctttgcagaaacttcataaatatatgcaggtgattccttatttcctcttagaaatttagtgatatttgaaataatgcccaaacttaattttctcctgaggaaaactattc

SEQ ID NO: 501395 - DNA, 120 bp, Artificial Sequence
  ENSG00000163728_30 (sequence is synthesized)
tacattacttaagtaaggcattatgaaaagtttctttttaggtatagtttttcctaattgggtttgacattgcttcatagtgcctctgtttttgtccataatcgaaagtaaagatagctg

SEQ ID NO: 501396 - DNA, 120 bp, Artificial Sequence
  ENSG00000163728_31 (sequence is synthesized)
tgagaaaactattacctaaatttggtatgttgttttgagaaatgtccttatagggagctcacctggtggtttttaaattattgttgctactataattgagctaattataaaaaccttttt

SEQ ID NO: 501397 - DNA, 120 bp, Artificial Sequence
  ENSG00000163728_32 (sequence is synthesized)
gagacatattttaaattgtcttttcctgtaatactgatgatgatgttttctcatgcattttcttctgaattggaccattgctgctgtgtctgtgacatctggtgctgctcatccccatcc

SEQ ID NO: 501398 - DNA, 120 bp, Artificial Sequence
  ENSG00000163728_33 (sequence is synthesized)
acaaactggaaaatgatttcctatgtaatcatgcatccaactgggctgtgctatttttttaaatggtttgtatttgaacatggtgattcctccttcacttcaccttaacggaatgtcttt

SEQ ID NO: 501399 - DNA, 120 bp, Artificial Sequence
  ENSG00000163728_34 (sequence is synthesized)
atttgaattttatttgtaaaatgtgtcctgtttaaatttttcaatctttaaaaataatttttatgtactttttttttttttttaacctttcttgcactctgggtcatgggtaccactgca

SEQ ID NO: 501400 - DNA, 120 bp, Artificial Sequence
  ENSG00000163728_35 (sequence is synthesized)
atggcttcccctttttttatgggataccaactgcaatatggtcctcaatgctgttctggccatttcaatgactaatgccaaacatctgtatgactaatttttttatgttaaaaaaatact

SEQ ID NO: 501401 - DNA, 120 bp, Artificial Sequence
  ENSG00000163728_36 (sequence is synthesized)
gtttaatgctggctctatggtgatttggttttactaaattgggtttctcgttgggggtggtcttttgaatactgggttttatatattctgctatttttaacgtgtggtttttttcgatat

SEQ ID NO: 501402 - DNA, 120 bp, Artificial Sequence
  ENSG00000163728_37 (sequence is synthesized)
actataatattcagtatttttaaacttaaggcaactactgaattgaacccaaagtgccatactggaggtaaagtaaataaaaatatgaaagtatttcaagtgccaatcagtgactgttaa

SEQ ID NO: 501403 - DNA, 120 bp, Artificial Sequence
  ENSG00000163728_38 (sequence is synthesized)
gaatctttagcaaatatgtgttccatgtattttcttattaaagagatgaagtggaatttaaggctagaattctacaaaaaaagagtatcttagaattaaaatatagaataagttacttta

SEQ ID NO: 501404 - DNA, 120 bp, Artificial Sequence
  ENSG00000163728_39 (sequence is synthesized)
attatgttttaggaagaaatattttagaactagagcagtggttctcaactaggggtggatttattcacccggggacatttgacaagatgtggagacatttttgattgccataactgatag

SEQ ID NO: 501405 - DNA, 120 bp, Artificial Sequence
  ENSG00000163728_40 (sequence is synthesized)
ggtgctactgcatctagtgtataatggtcagggatgctcttaaacattctgtaatgcacaggtcagctcccacccgcacccccaccccctaccaagaattatttggctgaaaataccaat

SEQ ID NO: 501406 - DNA, 120 bp, Artificial Sequence
  ENSG00000163728_41 (sequence is synthesized)
aatcaggtgaagaaaccatgaactagaggtagccaaataaaaaagttgagttctcctttatgtgttcagtagtcttaagtttttaaggtagtgttgaaaaaagtctgtctttcagagatg

SEQ ID NO: 501407 - DNA, 120 bp, Artificial Sequence
  ENSG00000163728_42 (sequence is synthesized)
atggatttgcttacaatgatacctgtctgcaagcattttttcccccaaaagtgcttaatagtaaaattagatcttgtagtagccgagattattgtatcatttatctgaaccacagctttt

SEQ ID NO: 501408 - DNA, 120 bp, Artificial Sequence
  ENSG00000163728_43 (sequence is synthesized)
ataaaatctttaaaggaaacaaatagggcccacatctttatgaataatttagaaacatttttgtatatatatgacaaatgaactgttttttttaggctaaagaagaaaagaagaaaatca

SEQ ID NO: 501409 - DNA, 120 bp, Artificial Sequence
  ENSG00000163728_44 (sequence is synthesized)
ctcaatgcaagaactatatctttgcatgcagttgtgctcaagtatacctgccaagatgcttttggaaattaaatgttaattggagaaaaatagtttaaaaaaattagtgtaagttaccca

SEQ ID NO: 501410 - DNA, 120 bp, Artificial Sequence
  ENSG00000163728_45 (sequence is synthesized)
gtttctccctccatttctggtttttgggattttttaaatttaaactggttggcaggcacagtgttcttttctaaatgctcaaagaggtatcagtggacgtggtgaggttgattgatattc

SEQ ID NO: 501411 - DNA, 120 bp, Artificial Sequence
  ENSG00000163728_46 (sequence is synthesized)
tgatattcagacttatttcttgtagttgaacatatgtattcttaattagttaatatttggcattgtatattttcatgtggataatttggagagaagtttcatttatatatttacaataat

SEQ ID NO: 501412 - DNA, 120 bp, Artificial Sequence
  ENSG00000163728_47 (sequence is synthesized)
agtggtttgtacattatattaagatactttgcccaagatggatagtcctgaatttaaactaatgtgtcacgataaaagattgggtatttgccatctatccaggcagataaaaaggaagaa

SEQ ID NO: 501413 - DNA, 120 bp, Artificial Sequence
  ENSG00000163728_48 (sequence is synthesized)
aagcagaaggtattacagattggataacagacaaaatactttggagaattggcatttcattttcactggaatccttataccttttagacaaattttagtttgtttttgatgcatgttgta

SEQ ID NO: 501414 - DNA, 120 bp, Artificial Sequence
  ENSG00000163728_49 (sequence is synthesized)
tactgtcataagccatcatatttggttcctaaactaatggaaagtttcatgagattttagttttttaactgaaccagcaaacatattttactgtgtttggacacggaaattacttttaac

SEQ ID NO: 501415 - DNA, 120 bp, Artificial Sequence
  ENSG00000163728_50 (sequence is synthesized)
taaatccttatttaaatttttactttaggttgttcaactactagctgtttcataccaaacaactaagataaaagaagacactgttcttatcaaagcttgaaatgtctggtgttttaaaat

SEQ ID NO: 501416 - DNA, 120 bp, Artificial Sequence
  ENSG00000163728_51 (sequence is synthesized)
acttctcattacaggctctttgtcccttaagagatgtgccttctcacagtaaccatggggatcctttatcatattaccaaactggtgacatcattcgaggtgattagtttcatcatacta

SEQ ID NO: 501417 - DNA, 120 bp, Artificial Sequence
  ENSG00000163728_52 (sequence is synthesized)
aaaagtaatgattgttgaatttttgtttttattaatttaaaaaaatacagtctaagagggtagtgtttgggaaagtttatattttttatgttagtttacattttcttactaatcagctta

SEQ ID NO: 501418 - DNA, 120 bp, Artificial Sequence
  ENSG00000163728_53 (sequence is synthesized)
gtgtaattagctctgaagagcttcctttatactacaggtaatttatccgtattatttcaacaacagttcattacaaaagtctcttggattgaggaataccacatttttataacggttaaa

SEQ ID NO: 501419 - DNA, 120 bp, Artificial Sequence
  ENSG00000163728_54 (sequence is synthesized)
ttacttcagacttggtaaaaggaaaccatatcataatattgccacaccatcttatgcaaaaaatggaattagtatttaaacctcaaatgatattatttctttactagaaatggaatgtca

SEQ ID NO: 501420 - DNA, 120 bp, Artificial Sequence
  ENSG00000163728_55 (sequence is synthesized)
agtaagctcagaagctgcgtttagctgaaggacgtattttaccatcctaagccacctagtagcaggcatatgccaaaggttgaatgaaccaggtgatcccatcttctggactggactgtc

SEQ ID NO: 501421 - DNA, 120 bp, Artificial Sequence
  ENSG00000163728_56 (sequence is synthesized)
ttatcagtgattaatatgtgtaccatgtaaccaagtagagaaggatgcagaaactttttataagaattttgtgtgtatgctaaagaaaaatactgggtttttttgttttttgtttttgtt

SEQ ID NO: 501422 - DNA, 120 bp, Artificial Sequence
  ENSG00000163728_57 (sequence is synthesized)
acaggcgtgagccaccgcacctggccaagaaaaatactgtttaacaataataatcatttcgaaagttcaaagattttggtatgtaaatagaatgcagatttcttgcttgggattcatact

SEQ ID NO: 501423 - DNA, 120 bp, Artificial Sequence
  ENSG00000163728_58 (sequence is synthesized)
gatttcttgcttgggattcatactttcactgtcgagtgcctgtcaagcagagttaagtatagttacttaaaaaatatttgtggtttaactttttaatttttattttctttaatagcaaaa

SEQ ID NO: 501424 - DNA, 120 bp, Artificial Sequence
  ENSG00000163728_59 (sequence is synthesized)
atttctctgaagatgattttgcttctgcattgagaaaaaaacaatccgcatcttgggctttaaaatggtatgaagactgtctttcaacaattgcattatatctagtctaaaagcttaggg

SEQ ID NO: 501425 - DNA, 120 bp, Artificial Sequence
  ENSG00000163728_60 (sequence is synthesized)
caaggcaagcatgcttatatcatcaataagacaaatttgagatgcattaaagtgatgcctttttgacatgagcttttcttttatagatgtaagtagtcttacattttacacttaacagat

SEQ ID NO: 501426 - DNA, 120 bp, Artificial Sequence
  ENSG00000163728_61 (sequence is synthesized)
aagttttactcagcatttcagttttctcaaaaggaattagtatattgatatctaggtttcaccaatatttgttgtgaaaatgtccaaaggcagaagaacgttccttaggtatattgtgag

SEQ ID NO: 501427 - DNA, 120 bp, Artificial Sequence
  ENSG00000163728_62 (sequence is synthesized)
tactctgaaaactaaatattttgccaagtttgatgacatttgcttttaaaacttattcacactaacattttatttagatattgtttgaagtgtttgtgatgctttacaaatgtctttttt

SEQ ID NO: 501428 - DNA, 120 bp, Artificial Sequence
  ENSG00000163728_63 (sequence is synthesized)
tgggtggacggggggcgctcctgggttgtgcaatgcgggatgcgggctgaactttttctctggcactgcttggtagaggcgcagattccttagctaaaaatcccttgagctttcctatct

SEQ ID NO: 501429 - DNA, 120 bp, Artificial Sequence
  ENSG00000163734_0 (sequence is synthesized)
acacagcccgggtcgcaggcacctccccgccagctctcccgcttctcgcacagcttcccgacgcgtctgctgagccccatggcccacgccacgctctccgccgcccccagcaatccccgg

SEQ ID NO: 501430 - DNA, 120 bp, Artificial Sequence
  ENSG00000163734_1 (sequence is synthesized)
ctcctgcgggtggcgctgctgctcctgctcctggtggccgccagccggcgcgcagcaggagcgtccgtggtcactgaactgcgctgccagtgcttgcagacactgcagggaattcacctc

SEQ ID NO: 501431 - DNA, 120 bp, Artificial Sequence
  ENSG00000163734_2 (sequence is synthesized)
aagaacatccaaagtgtgaatgtaaggtcccccggaccccactgcgcccaaaccgaagtcatagccacactcaagaatgggaagaaagcttgtctcaaccccgcatcccccatggttcag

SEQ ID NO: 501432 - DNA, 120 bp, Artificial Sequence
  ENSG00000163734_3 (sequence is synthesized)
aaaatcatcgaaaagatactgaacaaggggagcaccaactgacaggagagaagtaagaagcttatcagcgtatcattgacacttcctgcagggtggtccctgcccttaccagagctgaaa

SEQ ID NO: 501433 - DNA, 120 bp, Artificial Sequence
  ENSG00000163734_4 (sequence is synthesized)
atattttacatgctgttatttaaagatgtgagtgtgtttcatcaaacatagctcagtcctgattatttaattggaatatgatgggttttaaatgtgtcattaaactaatatttagtggga

SEQ ID NO: 501434 - DNA, 120 bp, Artificial Sequence
  ENSG00000163734_5 (sequence is synthesized)
gaccataatgtgtcagccaccttgataaatgacagggtggggaactggagggtggggggattgaaatgcaagcaattagtggatcactgttagggtaagggaatgtatgtacacatctat

SEQ ID NO: 501435 - DNA, 120 bp, Artificial Sequence
  ENSG00000163734_6 (sequence is synthesized)
tttttatactttttttttaaaaaaagaatgtcagttgttatttattcaaattatctcacattatgtgttcaacatttttatgctgaagtttcccttagacattttatgtcttgcttgtag

SEQ ID NO: 501436 - DNA, 120 bp, Artificial Sequence
  ENSG00000163734_7 (sequence is synthesized)
ggcataatgccttgtttaatgtccattctgcagcgtttctctttcccttggaaaagagaatttatcattactgttacatttgtacaaatgacatgataataaaagttttatgaaaaaaaa

SEQ ID NO: 501437 - DNA, 120 bp, Artificial Sequence
  ENSG00000163734_8 (sequence is synthesized)
atcagggaaccccaagagttagctgaaggactagaaattgtgattattattttcacaattaaagttgccattaaggttattaatctgctctggtgccagaggatatttcagtatttcagt

SEQ ID NO: 501438 - DNA, 120 bp, Artificial Sequence
  ENSG00000163734_9 (sequence is synthesized)
gtcttccatttccaggcctaacccctgggagggtaaatgtgggtttctagaatactaagtaaatttgactaacaatgccaaaatgccccctgcctgttttgggacgtttacctcagtccc

SEQ ID NO: 501439 - DNA, 120 bp, Artificial Sequence
  ENSG00000163734_10 (sequence is synthesized)
taatgggcttcagacctgaaaaatgcaatgtctggtttgggcactttgggcctgtaagccttcttggtgaagagcagaaactttgcagtaacaccttcagtgagttcaaggctaggatcc

SEQ ID NO: 501440 - DNA, 120 bp, Artificial Sequence
  ENSG00000163734_11 (sequence is synthesized)
taacccaatgtgacaatcagtgaccaatatgttttggctttttcaaaccaagaatctagttgagtccacagccacttctttcttgaaaaaaaaaaaaaaagcattcaggagtgcaagttt

SEQ ID NO: 501441 - DNA, 120 bp, Artificial Sequence
  ENSG00000163734_12 (sequence is synthesized)
tctgctatagaaggcagtgggtacagacagaccttccctgagtggagggctgggagagagtctgcatggggacatccctccaagcaacttcagagtgacagaagagcagccttccttagc

SEQ ID NO: 501442 - DNA, 120 bp, Artificial Sequence
  ENSG00000163734_13 (sequence is synthesized)
gccgccagccggcgcgcagcaggtgggtcccggcgccctggggtccccgggccggacgcggctggggtgggcgccccgcgccgacagccccgctcaatcagcgagtctattcttccctag

SEQ ID NO: 501443 - DNA, 120 bp, Artificial Sequence
  ENSG00000163735_0 (sequence is synthesized)
acagtgctccggatcctccaatcttcgctcctccaatctccgctcctccacccagttcaggaacccgcgaccgctcgcagcgctctcttgaccactatgagcctcctgtccagccgcgcg

SEQ ID NO: 501444 - DNA, 120 bp, Artificial Sequence
  ENSG00000163735_1 (sequence is synthesized)
gcccgtgtccccggtccttcgagctccttgtgcgcgctgttggtgctgctgctgctgctgacgcagccagggcccatcgccagcgctggtcctgccgctgctgtgttgagagagctgcgt

SEQ ID NO: 501445 - DNA, 120 bp, Artificial Sequence
  ENSG00000163735_2 (sequence is synthesized)
tgcgtttgtttacagaccacgcaaggagttcatcccaaaatgatcagtaatctgcaagtgttcgccataggcccacagtgctccaaggtggaagtggtagcctccctgaagaacgggaag

SEQ ID NO: 501446 - DNA, 120 bp, Artificial Sequence
  ENSG00000163735_3 (sequence is synthesized)
gaaatttgtcttgatccagaagccccttttctaaagaaagtcatccagaaaattttggacggtggaaacaaggaaaactgattaagagaaatgagcacgcatggaaaagtttcccagtct

SEQ ID NO: 501447 - DNA, 120 bp, Artificial Sequence
  ENSG00000163735_4 (sequence is synthesized)
tcagcagagaagttttctggaggtctctgaacccagggaagacaagaaggaaagattttgttgttgtttgtttatttgtttttccagtagttagctttcttcctggattcctcactttga

SEQ ID NO: 501448 - DNA, 120 bp, Artificial Sequence
  ENSG00000163735_5 (sequence is synthesized)
agagtgtgaggaaaacctatgtttgccgcttaagctttcagctcagctaatgaagtgtttagcatagtacctctgctatttgctgttattttatctgctatgctattgaagttttggcaa

SEQ ID NO: 501449 - DNA, 120 bp, Artificial Sequence
  ENSG00000163735_6 (sequence is synthesized)
ttgactatagtgtgagccaggaatcactggctgttaatctttcaaagtgtcttgaattgtaggtgactattatatttccaagaaatattccttaagatattaactgagaaggctgtggat

SEQ ID NO: 501450 - DNA, 120 bp, Artificial Sequence
  ENSG00000163735_7 (sequence is synthesized)
ttaatgtggaaatgatgtttcataagaattctgttgatggaaatacactgttatcttcacttttataagaaataggaaatattttaatgtttcttggggaatatgttagagaatttcctt

SEQ ID NO: 501451 - DNA, 120 bp, Artificial Sequence
  ENSG00000163735_8 (sequence is synthesized)
actcttgattgtgggatactatttaattatttcactttagaaagctgagtgtttcacaccttatctatgtagaatatatttccttattcagaatttctaaaagtttaagttctatgaggg

SEQ ID NO: 501452 - DNA, 120 bp, Artificial Sequence
  ENSG00000163735_9 (sequence is synthesized)
agggctaatatcttatcttcctataattttagacattctttatctttttagtatggcaaactgccatcatttacttttaaactttgattttatatgctatttattaagtattttattagg

SEQ ID NO: 501453 - DNA, 120 bp, Artificial Sequence
  ENSG00000163735_10 (sequence is synthesized)
atgaagaagctagaaaacaggcaaattcctgactgctagtttatatagaaatgtattcttttagtttttaaagtaaaggcaaacttaacaatgacttgtactctgaaagttttggaaacg

SEQ ID NO: 501454 - DNA, 120 bp, Artificial Sequence
  ENSG00000163735_11 (sequence is synthesized)
tattcaaacaatttgaatataaatttatcatttagttataaaaatatatagcgacatcctcgaggccctagcatttctccttggataggggaccagagagagcttggaatgttaaaaaca

SEQ ID NO: 501455 - DNA, 120 bp, Artificial Sequence
  ENSG00000163735_12 (sequence is synthesized)
aaacaaaacaaaaaaaaacaaggagaagttgtccaagggatgtcaattttttatccctctgtatgggttagattttccaaaatcataatttgaagaaggccagcatttatggtagaatat

SEQ ID NO: 501456 - DNA, 120 bp, Artificial Sequence
  ENSG00000163735_13 (sequence is synthesized)
ataattatatataaggtggccacgctggggcaagttccctccccactcacagctttggcccctttcacagagtagaacctgggttagaggattgcagaagacgagcgggagcggggaggg

SEQ ID NO: 501457 - DNA, 120 bp, Artificial Sequence
  ENSG00000163735_14 (sequence is synthesized)
cagggaagatgcctgtcgggtttttagcacagttcatttcactgggattttgaagcatttctgtctgaatgtaaagcctgttctagtcctggtgggacacactggggttgggggtggggg

SEQ ID NO: 501458 - DNA, 120 bp, Artificial Sequence
  ENSG00000163735_15 (sequence is synthesized)
aagatgcggtaatgaaaccggttagtcagtgttgtcttaatatccttgataatgctgtaaagtttatttttacaaatatttctgtttaagctatttcacctttgtttggaaatccttccc

SEQ ID NO: 501459 - DNA, 120 bp, Artificial Sequence
  ENSG00000163735_16 (sequence is synthesized)
ttttaaagagaaaatgtgacacttgtgaaaaggcttgtaggaaagctcctccctttttttctttaaacctttaaatgacaaacctaggtaattaatggttgtgaatttctatttttgctt

SEQ ID NO: 501460 - DNA, 120 bp, Artificial Sequence
  ENSG00000163735_17 (sequence is synthesized)
tgtttttaatgaacatttgtctttcagaataggattctgtgataatatttaaatggcaaaaacaaaacataattttgtgcaattaacaaagctactgcaagaaaaataaaacatttcttg

SEQ ID NO: 501461 - DNA, 80 bp, Artificial Sequence
  ENSG00000163735_18 (sequence is synthesized)
atatatattatatatttagcattgctgagctttttagatgcctattgtgtatcttttaaaggttttgaccattttgttat

SEQ ID NO: 501462 - DNA, 120 bp, Artificial Sequence
  ENSG00000163735_19 (sequence is synthesized)
ccattttgttatgagtaattacatatatattacattcactatattaaaattgtacttttttactatgtgtctcattggttcatagtctttattttgtcctttgaataaacattaaaagat

SEQ ID NO: 501463 - DNA, 120 bp, Artificial Sequence
  ENSG00000163736_0 (sequence is synthesized)
acttatctgcagacttgtaggcagcaactcaccctcactcagaggtcttctggttctggaaacaactctagctcagccttctccaccatgagcctcagacttgataccaccccttcctgt

SEQ ID NO: 501464 - DNA, 120 bp, Artificial Sequence
  ENSG00000163736_1 (sequence is synthesized)
aacagtgcgagaccacttcatgccttgcaggtgctgctgcttctgtcattgctgctgactgctctggcttcctccaccaaaggacaaactaagagaaacttggcgaaaggcaaagaggaa

SEQ ID NO: 501465 - DNA, 120 bp, Artificial Sequence
  ENSG00000163736_2 (sequence is synthesized)
agtctagacagtgacttgtatgctgaactccgctgcatgtgtataaagacaacctctggaattcatcccaaaaacatccaaagtttggaagtgatcgggaaaggaacccattgcaaccaa

SEQ ID NO: 501466 - DNA, 120 bp, Artificial Sequence
  ENSG00000163736_3 (sequence is synthesized)
gtcgaagtgatagccacactgaaggatgggaggaaaatctgcctggacccagatgctcccagaatcaagaaaattgtacagaaaaaattggcaggtgatgaatctgctgattaatttgtt

SEQ ID NO: 501467 - DNA, 120 bp, Artificial Sequence
  ENSG00000163736_4 (sequence is synthesized)
ctgtttctgccaaacttctttaactcccaggaagggtagaattttgaaaccttgattttctagagttctcatttattcaggatacctattcttactgtattaaaatttggatatgtgttt

SEQ ID NO: 501468 - DNA, 120 bp, Artificial Sequence
  ENSG00000163736_5 (sequence is synthesized)
acattggactgtactttgcatttttttctttaaaaatttctattctaacacaacttggttgatttttcctggtctactttatggttattagacatactcatgggtattattagatttcat

SEQ ID NO: 501469 - DNA, 120 bp, Artificial Sequence
  ENSG00000163736_6 (sequence is synthesized)
aatggtcaatgataataggaattacatggagcccaacagagaatatttgctcaatacatttttgttaatatatttaggaacttaatggagtctctcagtgtcttagtcctaggatgtctt

SEQ ID NO: 501470 - DNA, 120 bp, Artificial Sequence
  ENSG00000163736_7 (sequence is synthesized)
atttaaaatactccctgaaagtttattctgatgtttattttagccatcaaacactaaaataataaattggtgaatatgaatcttataaactgtggttagctggtttaaagtgaatatatt

SEQ ID NO: 501471 - DNA, 120 bp, Artificial Sequence
  ENSG00000163736_8 (sequence is synthesized)
tgccactagtagaacaaaaatagatgatgaaaatgaattaacatatctacatagttataattctatcattagaatgagccttataaataagtacaatataggacttcaaccttactagac

SEQ ID NO: 501472 - DNA, 120 bp, Artificial Sequence
  ENSG00000163736_9 (sequence is synthesized)
tcctaattctaaattctacttttttcatcaacagaactttcattcattttttaaaccctaaaacttatacccacactattcttacaaaaatattcacatgaaataaaaatttgctattga

SEQ ID NO: 501473 - DNA, 120 bp, Artificial Sequence
  ENSG00000163737_0 (sequence is synthesized)
attggccacagagacccagcccgagtttcccatcgcactgagcactgagatcctgctggaagctctgccgcagcatgagctccgcagccgggttctgcgcctcacgccccgggctgctgt

SEQ ID NO: 501474 - DNA, 120 bp, Artificial Sequence
  ENSG00000163737_1 (sequence is synthesized)
tcctggggttgctgctcctgccacttgtggtcgccttcgccagcgctgaagctgaagaagatggggacctgcagtgcctgtgtgtgaagaccacctcccaggtccgtcccaggcacatca

SEQ ID NO: 501475 - DNA, 120 bp, Artificial Sequence
  ENSG00000163737_2 (sequence is synthesized)
ccagcctggaggtgatcaaggccggaccccactgccccactgcccaactgatagccacgctgaagaatggaaggaaaatttgcttggacctgcaagccccgctgtacaagaaaataatta

SEQ ID NO: 501476 - DNA, 120 bp, Artificial Sequence
  ENSG00000163737_3 (sequence is synthesized)
tagcatacttcttttttccagtttcaatctaactgtgaaagaacttctgatatttgtgttatccttatgattttaaataaacaaaataaatcaagttgtagtatagtcaaaatacttctt

SEQ ID NO: 501477 - DNA, 120 bp, Artificial Sequence
  ENSG00000163737_4 (sequence is synthesized)
aataatagtgcaaaaattgtgttgacacataacaatttcatggaagaaaaaaattccggtattttaagcaaaaagtattttgaaggaaggtgtgaatactggttatgcttggtgttacat

SEQ ID NO: 501478 - DNA, 120 bp, Artificial Sequence
  ENSG00000163737_5 (sequence is synthesized)
gttggctgatacatattcatgcatttacatgattgcagtactttatagctacatatttaccttgaccattattattacctttgccaataaatatcagtaacacagatggcttttaaaaaa

SEQ ID NO: 501479 - DNA, 120 bp, Artificial Sequence
  ENSG00000163738_0 (sequence is synthesized)
gcggccgccttggccgagcgccggcgttgggcagaagcacagcaccctccgtaagggcaccgggagagcccgggagtgcgttccggggctttcggagcagcggtgtgagacatgaagcca

SEQ ID NO: 501480 - DNA, 120 bp, Artificial Sequence
  ENSG00000163738_1 (sequence is synthesized)
ttattatatcaggaaccgaaatggccaagcatatccagaaagaaatacagcgaggtgtggaatcatgggtttcccttggaaacagaagacctcacctcagtataattttagtgggagata

SEQ ID NO: 501481 - DNA, 120 bp, Artificial Sequence
  ENSG00000163738_2 (sequence is synthesized)
acccagcaagccatacatatgtcaggaataagataagagctgcctctgctgtaggtatttgtagtgagctcattctaaaacctaaggatgtttctcaggaagaacttttggacgtaactg

SEQ ID NO: 501482 - DNA, 120 bp, Artificial Sequence
  ENSG00000163738_3 (sequence is synthesized)
atcaattgaatatggacccaagagtcagcggtatattagttcagttaccactaccagaccacgttgatgagcgaacaatatgcaatggaattgccccagaaaaagatgtagatggatttc

SEQ ID NO: 501483 - DNA, 120 bp, Artificial Sequence
  ENSG00000163738_4 (sequence is synthesized)
atattatcaatattggaagattgtgccttgatcagcattctctcatacctgccactgccagtgctgtttgggaaataataaaaagaacaggaattcaaacatttggaaaaaatgtggttg

SEQ ID NO: 501484 - DNA, 120 bp, Artificial Sequence
  ENSG00000163738_5 (sequence is synthesized)
tggctggaagatccaagaacgtagggatgcctattgccatgcttttacacactgatggagagcatgaacggccaggaggtgatgcaactgtgacaatagctcacagatacacccccaaag

SEQ ID NO: 501485 - DNA, 120 bp, Artificial Sequence
  ENSG00000163738_6 (sequence is synthesized)
agcaactgaagattcatacgcagctggcagatattatcatagttgctgcaggtattccaaagttgattacgtctgatatggttaaagaaggtgctgctgtaattgatgtgggtatcaact

SEQ ID NO: 501486 - DNA, 120 bp, Artificial Sequence
  ENSG00000163738_7 (sequence is synthesized)
atgtccacgatccagtgacaggaaagacaaaattagttggagatgtggacttcgaagctgttaaaaagaaagctggctttatcactccagttccaggaggtgtgggacccatgacagtgg

SEQ ID NO: 501487 - DNA, 120 bp, Artificial Sequence
  ENSG00000163738_8 (sequence is synthesized)
caatgcttctgaagaacacccttctggcagctaaaaaaatcatttactagatcacatgaaaggataaagcaaactgaagtcatgctatttgtttatttgacaaagggtaaaacctttata

SEQ ID NO: 501488 - DNA, 120 bp, Artificial Sequence
  ENSG00000163738_9 (sequence is synthesized)
tttctacatggtatttattttttcatgggtgaaatcattgtgaatcaattgattcacatagttttatgcatttcctgctaatttattttgagttttaagaaaacaaccaaaacaattcca

SEQ ID NO: 501489 - DNA, 120 bp, Artificial Sequence
  ENSG00000163738_10 (sequence is synthesized)
tccaatgaaaattttagtaacaattgtttattttgagggtatttgttcataacattaaaacaataaagggctcataataaataaatatatttttgacacaattaaatattacatagagta

SEQ ID NO: 501490 - DNA, 120 bp, Artificial Sequence
  ENSG00000163738_11 (sequence is synthesized)
tacaacaaatatcctgtcagccaaatggttacccatataaaatgtaatttaggttttgctacttgcatgctaacatttttaatgtattttatgatctatgtcatatattaaaaaagagct

SEQ ID NO: 501491 - DNA, 120 bp, Artificial Sequence
  ENSG00000163738_12 (sequence is synthesized)
tgcttactacaagaaaaatattgaaatattgaaaatattgaaaatattattattgaaaataaaatcttgatctcaactatcccccaaatgcatcctataagtccatcctaatgagaaatg

SEQ ID NO: 501492 - DNA, 120 bp, Artificial Sequence
  ENSG00000163738_13 (sequence is synthesized)
atgttctatttaaggaaaggaaaatattccgggaaggcaaaaaatgcagtgctgtttggaagtgtaatgattttatcacatggtgaatgactactaagagtaatgattatatcacattgt

SEQ ID NO: 501493 - DNA, 120 bp, Artificial Sequence
  ENSG00000163738_14 (sequence is synthesized)
gaatgactacttgccacagtaaaaatacatgaagaatgtgttaggtttaaacgtcgtttctttcttctaaaaaatatttggttagtaccttcactgagcaatagtggaaaaataaaaaaa

SEQ ID NO: 501494 - DNA, 120 bp, Artificial Sequence
  ENSG00000163738_15 (sequence is synthesized)
taagtaaacagaaaaaactaaagttgtattttcccacaaatatagtatgaatgaggtcatattaaagaacagcaactgttaatgtttgttcacaaattcagaaatctaataggaaaacat

SEQ ID NO: 501495 - DNA, 120 bp, Artificial Sequence
  ENSG00000163738_16 (sequence is synthesized)
gatactttcaatgtgccaaaactaaaccttagtatacaactaaaaatctcctgccttcttgcctacctgtcttccctcttctgttacagaatttgttcctcaaagtagatgcaatgtttc

SEQ ID NO: 501496 - DNA, 120 bp, Artificial Sequence
  ENSG00000163738_17 (sequence is synthesized)
taacacaatttaaattaggaaatatatatgaatgtcgttgaagtctattttgagactgctaaagctattaattgatactgtgtttttatgcccaaatcccagtatgtttatgtaccaata

SEQ ID NO: 501497 - DNA, 120 bp, Artificial Sequence
  ENSG00000163738_18 (sequence is synthesized)
atgactcttacccagcgcatgtctttatcagtgtgtactcgtgacgatttgtgtgaaaatagacttgatgtttataattaataccattacaactgtataataaaagcaatttgaagaaaa

SEQ ID NO: 501498 - DNA, 120 bp, Artificial Sequence
  ENSG00000163738_19 (sequence is synthesized)
tggagtacaagggatgtggaatccatagtctctgaatgggaggctacactttggatgccacgataatgaacatctcaatatatttagaaaacttgtggaaacctcaagattcagcaacca

SEQ ID NO: 501499 - DNA, 120 bp, Artificial Sequence
  ENSG00000163738_20 (sequence is synthesized)
gatgaatgtaagaagaaatatagtaaattccctccggagcacttgattcctggttgccttccaagttcaatggcaagctactaacttgttaaggagccctctgctccctggttcaccatg

SEQ ID NO: 501500 - DNA, 120 bp, Artificial Sequence
  ENSG00000163738_21 (sequence is synthesized)
aatccagtgtaaatatgacttctaagctggctgttgctctactgctttcttggcagttgcatgctttctgtagcactgtgtgaagtgtgaagcttattcatgaagagacctctgcctgaa

SEQ ID NO: 501501 - DNA, 120 bp, Artificial Sequence
  ENSG00000163738_22 (sequence is synthesized)
catacagcaaatttaagaaggttgtgcagatagtctgaaggaggctggtgcagcatggaaacacggatttgagctcattactccaattttcacgctgagtttggaagggtcctagaggga

SEQ ID NO: 501502 - DNA, 120 bp, Artificial Sequence
  ENSG00000163738_23 (sequence is synthesized)
ccagcagagagaagagattccatcttccagaggttgccactgtctgcctccccacttgtccccatccacagtcatcttttttatatatataatgacacattagttgtctagttcttcata

SEQ ID NO: 501503 - DNA, 120 bp, Artificial Sequence
  ENSG00000163738_24 (sequence is synthesized)
ctgttttaaattaacagatttatcaccatttctgagctgtgtagggccttaattgaaaaagtatctttgattattttttcacattttggccacatgcctataataatggaatatttacag

SEQ ID NO: 501504 - DNA, 120 bp, Artificial Sequence
  ENSG00000163738_25 (sequence is synthesized)
tactttttagtggagaacttttttaagtagaatttcaataattaatgtttgatggagtttggaagttaccgtattttgaagtatcgtttaacattcttctctcaatgagttttcctttaa

SEQ ID NO: 501505 - DNA, 120 bp, Artificial Sequence
  ENSG00000163738_26 (sequence is synthesized)
aatttgcagtgaatttgttttcctgtttatgcatgagaatttaggtcttattaattgggggaaattaatgttaaagtaataaataagcccttgttgcagcttattgtttcttgaaatgaa

SEQ ID NO: 501506 - DNA, 120 bp, Artificial Sequence
  ENSG00000163738_27 (sequence is synthesized)
ttaactatccaggcaaaaggttaaaaatgaaaaaaaaagtctttgtaactaaatttttcccattttgttgtggtatttgaggagtttacaaatcaaaatgtcctgggttaaaaggcatca

SEQ ID NO: 501507 - DNA, 120 bp, Artificial Sequence
  ENSG00000163738_28 (sequence is synthesized)
tgcacattaatgccatgctcaaagcagatttgcaggtatcctgcaacacagggactttcacaaaacccgctttggcttattctacctgaactacttattttaattaactaaatggatatc

SEQ ID NO: 501508 - DNA, 120 bp, Artificial Sequence
  ENSG00000163738_29 (sequence is synthesized)
tatttcttttagcttttaaaaaaattgtgtactgcctacaggtctttatggaagtttcacctttctttgtgtcgcactggcatcggctgtataatttttgcagctagaccacattttaaa

SEQ ID NO: 501509 - DNA, 120 bp, Artificial Sequence
  ENSG00000163738_30 (sequence is synthesized)
aaaatctacatttttggaactagtaaaagatacttatttgtgttatttaagtattcacgtcttttaccgtgggtagttaagtttaataatttaaaaagacacattttatcagtaacaatg

SEQ ID NO: 501510 - DNA, 120 bp, Artificial Sequence
  ENSG00000163738_31 (sequence is synthesized)
ttcattttatttttcagactcttccctctactacttactctgtatttctgtctcttctaatgactaggaaaggcagtttctcaaaatcatcttctatttagttggcaaatgtgataatgt

SEQ ID NO: 501511 - DNA, 120 bp, Artificial Sequence
  ENSG00000163738_32 (sequence is synthesized)
gggtagtgttcctaccttcctgctgtatgtgttctactgaaatgagatataatagccatctggctacaattttgatttctaagaagttcttatgtcattttaaattcaaaaactaagtgt

SEQ ID NO: 501512 - DNA, 120 bp, Artificial Sequence
  ENSG00000163738_33 (sequence is synthesized)
ttcaacatttggtctctcatatcttaagttttattttctttgttccagctgttcagagatagtgtgttctaatatctccacaatcaagatttttgactaaaatggatcagtacatgaaaa

SEQ ID NO: 501513 - DNA, 120 bp, Artificial Sequence
  ENSG00000163738_34 (sequence is synthesized)
agagggactagtattaattttagatcttgttagttaatcatggtcttactaataatttggcaagttctttaatgagccaaatctttgtatttcaaatgccttgaagttgttattctttcc

SEQ ID NO: 501514 - DNA, 120 bp, Artificial Sequence
  ENSG00000163738_35 (sequence is synthesized)
tattagtaccctgatgggaggatgaaaacagcagaaaggagcagcaccagatgatcttttcatgggcacgtactctttcaaggaatcccatggagctcagtgaaattacactttggctta

SEQ ID NO: 501515 - DNA, 120 bp, Artificial Sequence
  ENSG00000163738_36 (sequence is synthesized)
gagataattaagttgtggaaggaggtttaagagaggagcttaggtgaaatttgagctgtaaatgagtatgctaaattaaagaaatgattagtaataaatgagatttgctattaagaaatt

SEQ ID NO: 501516 - DNA, 120 bp, Artificial Sequence
  ENSG00000163738_37 (sequence is synthesized)
cactttggatctgagacaacattttacatacaatgtagaaaactttatggtcagaacagaacacagtctgaacctaaattaacagtagtgttaaagaattcagggcgggatattatccaa

SEQ ID NO: 501517 - DNA, 120 bp, Artificial Sequence
  ENSG00000163738_38 (sequence is synthesized)
gaaggcctagccagctgctccacttaatgttacatcacaagtggtttctgtgttgctattgtttttattagcatttcaatgactgtgtcatattacattaaatcaattggctctaactta

SEQ ID NO: 501518 - DNA, 120 bp, Artificial Sequence
  ENSG00000163738_39 (sequence is synthesized)
gtgcaactttgttcaggatttgaaatgctcgggatataagagtacacaggcttgctctttgtccagtagctgaccctaaagctaaggagaaataaaaatgaccgaatgcagatgctttcc

SEQ ID NO: 501519 - DNA, 120 bp, Artificial Sequence
  ENSG00000163738_40 (sequence is synthesized)
tactcctgtcctgaccgtgcagagattcttatcaataagtggtcactttgtcgagttgtctagtttgaagcctttgaggattagcaccttccagtttattcaagggaattggacaaagaa

SEQ ID NO: 501520 - DNA, 120 bp, Artificial Sequence
  ENSG00000163738_41 (sequence is synthesized)
ggaagagacatttttggaaccacttccagactgagatggttaaaagctgttgtgccctcctccttcacttctgtttctgttgcattgttcttggaaactaggtattacagatggttgtaa

SEQ ID NO: 501521 - DNA, 120 bp, Artificial Sequence
  ENSG00000163738_42 (sequence is synthesized)
tttttttaaacctataaactcacagatcaaagaagctcaccaaactctcaagctcatgaaacatgaagaaaactatgccaaagaacaccataatcaaattattcaaaaccactgatagaa

SEQ ID NO: 501522 - DNA, 120 bp, Artificial Sequence
  ENSG00000163738_43 (sequence is synthesized)
aaaaatcttaaaagcaataagggggttgggggagggcattacatacaaaggaacaaagaggacagtgacagaatatttattgatagaaacaatgcaagcaagaagacaatagaacaatat

SEQ ID NO: 501523 - DNA, 120 bp, Artificial Sequence
  ENSG00000163738_44 (sequence is synthesized)
ctttaagtattaagaggaaaaaaaacacctgtaaacccaaatttctatacctagtgaaaataccttcaaaaacaaaggcaaaaagtcttttatgagacatgtgaggaagagagctcaaaa

SEQ ID NO: 501524 - DNA, 120 bp, Artificial Sequence
  ENSG00000163738_45 (sequence is synthesized)
aaaagtcttttatgagacatgtgaggaagagagctcaaaactaaaaacaattatttactagcagacctatgatctaagaaatactaaaaggcccgggtgtggtggctcatgcctgtaatc

SEQ ID NO: 501525 - DNA, 120 bp, Artificial Sequence
  ENSG00000163738_46 (sequence is synthesized)
accccatctctactgaaaatacaaaaatcagctgggcattgtggtgcacacctgtaatcacagctactcaggaggttgagacaggaggattgcttggacctgggaagtggaggttggagt

SEQ ID NO: 501526 - DNA, 74 bp, Artificial Sequence
  ENSG00000163738_47 (sequence is synthesized)
cacaacaaaaaagagatattaaaggaagtccttcacctagatggaaatgatactagatggaaatatggatctgt

SEQ ID NO: 501527 - DNA, 120 bp, Artificial Sequence
  ENSG00000163738_48 (sequence is synthesized)
acctagatggaaatgatactagatggaaatatggatctgtccaaggaattaagagctctggaagtggtaactacctgaataaatatatattattcatgtatatatatgttataatatatt

SEQ ID NO: 501528 - DNA, 120 bp, Artificial Sequence
  ENSG00000163738_49 (sequence is synthesized)
gttcttattcttattattcagattattttagaagataattaatgtttaaccaaagccaaaaacaatgtagtttgtggtttgtaacatacaattaaaatgtatggcaacaatagcacaaaa

SEQ ID NO: 501529 - DNA, 120 bp, Artificial Sequence
  ENSG00000163738_50 (sequence is synthesized)
gacagaagtgacattatgctggtttcccagtccaagcattaagaggctggtaactaatacttcttgtctcctggaacactcactcttggaagccagctgccaagctgtgagaaaccaagc

SEQ ID NO: 501530 - DNA, 120 bp, Artificial Sequence
  ENSG00000163738_51 (sequence is synthesized)
cccatgaagagttcatgcatatgtgttccagttgacagccttagctatgctcccagccaatcacaagcatccactgcaaccatgtattccaaagttgattacgtctgatatggttaaaga

SEQ ID NO: 501531 - DNA, 120 bp, Artificial Sequence
  ENSG00000163738_52 (sequence is synthesized)
agtgtgaagcttattcatgaagagacctctgcctgaacatacagcaaatttaagaaggttgtgcagatagtctgaaggaggaccagcagagagaagagattccatcttccagagacatga

SEQ ID NO: 501532 - DNA, 120 bp, Artificial Sequence
  ENSG00000163738_53 (sequence is synthesized)
ttaaatttgtcttattaattttcttgacattgctaaaaaaagaagcatgtatatccattcatgcaatattcctcagcagtgaaaaggaatgaactattgatacagcaacctgaatgaatt

SEQ ID NO: 501533 - DNA, 120 bp, Artificial Sequence
  ENSG00000163738_54 (sequence is synthesized)
tccagcaaattatgaagtaaaaaaggcaatctcacatgttctttgttcaatcatagaatatatgattccatttatatagcattcttgaaagtgacaaaattagcggtttccgggagtcaa

SEQ ID NO: 501534 - DNA, 120 bp, Artificial Sequence
  ENSG00000163738_55 (sequence is synthesized)
ggacaggttgatgtgggagggaactgggtgtggctgtaataaggcaacatgagggacccttttgatgatggaaatgttctatatcttaactgtatcaatgtcaatatcctgggtataata

SEQ ID NO: 501535 - DNA, 120 bp, Artificial Sequence
  ENSG00000163738_56 (sequence is synthesized)
ttgtcctgtagtttggcaagatattatcattgtatagtatcttgtattatttcttacaatggatgtgaatctataattatcaaaaaatgacaatttaattaaagcatatagtaaataagt

SEQ ID NO: 501536 - DNA, 120 bp, Artificial Sequence
  ENSG00000163738_57 (sequence is synthesized)
gaggaggtcctgtgcagccttctgactcctttattactttcacagagtcagattgctttcttctaaaatagcccctctatgtgatgcaactgtgacaatagctcacagatacacccccaa

SEQ ID NO: 501537 - DNA, 120 bp, Artificial Sequence
  ENSG00000163738_58 (sequence is synthesized)
ctcgttcaccagagcacctactatgttccaggtggtatcataagaacttgggagacatcactaaacaaaatagaaaaatccctgcccttatggagctgacattctagtgggggcttggtt

SEQ ID NO: 501538 - DNA, 120 bp, Artificial Sequence
  ENSG00000163738_59 (sequence is synthesized)
tttttccttgggtactgggtttgtttttccatgatgagcatatcctatgatgcactatagcactcaagcaagatgcctgaagcaaaggaggccaaagtaatgattcatggattcagcaca

SEQ ID NO: 501539 - DNA, 120 bp, Artificial Sequence
  ENSG00000163738_60 (sequence is synthesized)
ctttcctttgttgaaaagcactgcttgttccccctcaaagctatgtgagaggctgtgtaggagagagtggagagcaggtagcctaccggacctacagttcaccatttcagccctgtaatt

SEQ ID NO: 501540 - DNA, 120 bp, Artificial Sequence
  ENSG00000163738_61 (sequence is synthesized)
ttataaatgcctgtatcagattggggacttaaagatttgcttctcctctggtgaaccacaggtacaatctctggtaagttatcttatccttagatgagcttcttggggtttgtttcctgt

SEQ ID NO: 501541 - DNA, 120 bp, Artificial Sequence
  ENSG00000163738_62 (sequence is synthesized)
gtgtttgttcaggggtcattcagagatacagaatttgtatacaatgtatgggactcctttctgtggctttctcctttcctggatatatcgcttcaattttcaactacggtgttagcccca

SEQ ID NO: 501542 - DNA, 120 bp, Artificial Sequence
  ENSG00000163738_63 (sequence is synthesized)
aacttcatcttttgatctcttaagcaagtaggactgaatatttctatccaaattctagctgtcctgtggctagaaaagcttttaaagtggagaactctttcagtgatttttttttcttta

SEQ ID NO: 501543 - DNA, 120 bp, Artificial Sequence
  ENSG00000163738_64 (sequence is synthesized)
agctatctactttcctctacatctgtttgtttttagtgactttccatttttttcagatagttgtttttgtattttttcaaatgattttactgaagtttgcagttgttttctgtaagaagt

SEQ ID NO: 501544 - DNA, 120 bp, Artificial Sequence
  ENSG00000163738_65 (sequence is synthesized)
taagaagtttagtccaatataagctacttcacaatcactagaaactgaacctacatttttaaatagtgtggtcagaattgtcctcactgatgttaatcaagtttagcctaaagctgcctc

SEQ ID NO: 501545 - DNA, 120 bp, Artificial Sequence
  ENSG00000163738_66 (sequence is synthesized)
tttaagattagcctaaaggtttttctgtatattgtgaactataacaagtagaggtgtaaaccaatcgtggcccacacctgtgccaatcactgagttttggccaatcaagtgtagccagct

SEQ ID NO: 501546 - DNA, 82 bp, Artificial Sequence
  ENSG00000163738_67 (sequence is synthesized)
tgtgttgtgtccctttttttgtctacaaatcttcttctaccacgtggctgttctggagtctctctgaatctgctgtgattct

SEQ ID NO: 501547 - DNA, 120 bp, Artificial Sequence
  ENSG00000163738_68 (sequence is synthesized)
ttctaccacgtggctgttctggagtctctctgaatctgctgtgattctggggggctgcccaattcgttaattgttcattgctcaattaaacatctttaaatttaatttggctgaagtttt

SEQ ID NO: 501548 - DNA, 120 bp, Artificial Sequence
  ENSG00000163738_69 (sequence is synthesized)
cagtgagaatgtggtatttaagaaaacatttgaaagaaggtagggatttagcctaggtgacagttcttttttaggaaagccttccaggcagatagaaagctatagctaaggtggcaaaat

SEQ ID NO: 501549 - DNA, 120 bp, Artificial Sequence
  ENSG00000163738_70 (sequence is synthesized)
gcctcatgttttcaaggaacatcaaggggaccagcttgatgctcacagattgagagaagacgagagtaaccagtgatgggattagacacatagctatggttttggtgcagtaaaaatcat

SEQ ID NO: 501550 - DNA, 120 bp, Artificial Sequence
  ENSG00000163738_71 (sequence is synthesized)
gtagagccttgtttgcaatttttaaggtaataacattgcagggttttgagaaaagcaatgtgatcaaatatgtacttcaaaggtataactctattgctgttttgtgaataaattgtatgg

SEQ ID NO: 501551 - DNA, 120 bp, Artificial Sequence
  ENSG00000163738_72 (sequence is synthesized)
ttgcacatatagaagaaggaaactaattaggaggctgtttcaagaattgacaggaagaataatgttcactcaaagtagagtagtatcatgaacatggtgagactgataaagtgctagata

SEQ ID NO: 501552 - DNA, 120 bp, Artificial Sequence
  ENSG00000163738_73 (sequence is synthesized)
tattattatgaagaaagtcaacagattttccaatggtttggatgttaggtgtgagagaaagagggatatttaagatgactccaggttttcttggcaagtagcacagaaggatgggtttcc

SEQ ID NO: 501553 - DNA, 120 bp, Artificial Sequence
  ENSG00000163738_74 (sequence is synthesized)
cacccattagacagcctcagagtcctgaaaacatgtgcccaaggtagttgggccacagcttggttttatacattttagggagtcgtgagacatcaatcaacatatgtaagaagtacactg

SEQ ID NO: 501554 - DNA, 120 bp, Artificial Sequence
  ENSG00000163739_0 (sequence is synthesized)
acagagcccgggccgcaggcacctcctcgccagctcttccgctcctctcacagccgccagacccgcctgctgagccccatggcccgcgctgctctctccgccgcccccagcaatccccgg

SEQ ID NO: 501555 - DNA, 120 bp, Artificial Sequence
  ENSG00000163739_1 (sequence is synthesized)
ctcctgcgagtggcactgctgctcctgctcctggtagccgctggccggcgcgcagcaggagcgtccgtggccactgaactgcgctgccagtgcttgcagaccctgcagggaattcacccc

SEQ ID NO: 501556 - DNA, 120 bp, Artificial Sequence
  ENSG00000163739_2 (sequence is synthesized)
aagaacatccaaagtgtgaacgtgaagtcccccggaccccactgcgcccaaaccgaagtcatagccacactcaagaatgggcggaaagcttgcctcaatcctgcatcccccatagttaag

SEQ ID NO: 501557 - DNA, 120 bp, Artificial Sequence
  ENSG00000163739_3 (sequence is synthesized)
aaaatcatcgaaaagatgctgaacagtgacaaatccaactgaccagaagggaggaggaagctcactggtggctgttcctgaaggaggccctgcccttataggaacagaagaggaaagaga

SEQ ID NO: 501558 - DNA, 120 bp, Artificial Sequence
  ENSG00000163739_4 (sequence is synthesized)
agattctatgttaatattttaggtgtaaaataattaagggtatgattaactctacctgcacactgtcctattatattcattctttttgaaatgtcaaccccaagttagttcaatctggat

SEQ ID NO: 501559 - DNA, 120 bp, Artificial Sequence
  ENSG00000163739_5 (sequence is synthesized)
tcatatttaatttgaaggtagaatgttttcaaatgttctccagtcattatgttaatatttctgaggagcctgcaacatgccagccactgtgatagaggctggcggatccaagcaaatggc

SEQ ID NO: 501560 - DNA, 120 bp, Artificial Sequence
  ENSG00000163739_6 (sequence is synthesized)
caatgagatcattgtgaaggcaggggaatgtatgtgcacatctgttttgtaactgtttagatgaatgtcagttgttatttattgaaatgatttcacagtgtgtggtcaacatttctcatg

SEQ ID NO: 501561 - DNA, 120 bp, Artificial Sequence
  ENSG00000163739_7 (sequence is synthesized)
ttgaaactttaagaactaaaatgttctaaatatcccttggacattttatgtctttcttgtaaggcatactgccttgtttaatggtagttttacagtgtttctggcttagaacaaaggggc

SEQ ID NO: 501562 - DNA, 120 bp, Artificial Sequence
  ENSG00000163739_8 (sequence is synthesized)
ttaattattgatgttttcatagagaatataaaaataaagcacttatagaaaaaactcgtttgatttttggggggaaacaagggctacctttactggaaaatctggtgatttatatcaata

SEQ ID NO: 501563 - DNA, 120 bp, Artificial Sequence
  ENSG00000163739_9 (sequence is synthesized)
aaaaataaaatcaggaaaacccaggggttagttgaaggactagaaattgggattattgttttcacaattaaggtttcctttacgataattactgctctggtgccagaggatattcccaat

SEQ ID NO: 501564 - DNA, 120 bp, Artificial Sequence
  ENSG00000163743_0 (sequence is synthesized)
gagagagggaggacccgtcacaggtaacgatgcgcccagtgagcgtcctttcctctggggccaaccagcgtctccgcgccgctgccgccaacctcgcgccgaactacgccctgagatttg

SEQ ID NO: 501565 - DNA, 120 bp, Artificial Sequence
  ENSG00000163743_1 (sequence is synthesized)
ggcgggtagcgattgggggaaaacaggcaacctaagagttattaccgttagcagcgaagactgcgactaacgtcaacgacggagactgcgtctgccttcgcttccgcctcgtagccccgg

SEQ ID NO: 501566 - DNA, 120 bp, Artificial Sequence
  ENSG00000163743_2 (sequence is synthesized)
gaaccggaaatccgtctgccccgggtcacgtgcttaggagccatattgtcgctagtggccgctggggctgggaggggtgtgctagagaggcgcagcttctctgggcgtggtttttatcct

SEQ ID NO: 501567 - DNA, 120 bp, Artificial Sequence
  ENSG00000163743_3 (sequence is synthesized)
gggggaaggatcggtggaatgtgaggggaggtggaggagatggcggcgacggcccgggaagatggcgccagcggtcaagagcgaggtcagcggggctgcgagcactatgacagaggatgt

SEQ ID NO: 501568 - DNA, 120 bp, Artificial Sequence
  ENSG00000163743_4 (sequence is synthesized)
ctcctaaaggcaccttgctgtgacaagctttatacttgccgcttgtgtcatgataacaatgaagatcatcaactagatcgctttaaagtgaaggaagtgcagtgcataaactgtgaaaaa

SEQ ID NO: 501569 - DNA, 120 bp, Artificial Sequence
  ENSG00000163743_5 (sequence is synthesized)
attcaacatgcccaacagacttgtgaagaatgtagcacattgtttggagaatattattgcgatatatgccatttgtttgacaaagataagaagcagtatcactgtgaaaactgtggaatt

SEQ ID NO: 501570 - DNA, 120 bp, Artificial Sequence
  ENSG00000163743_6 (sequence is synthesized)
tgtaggattggtccaaaggaagattttttccattgtttgaaatgtaacttatgcctagctatgaatcttcaaggaagacacaagtgtattgaaaatgtgtcccgacagaattgtccaata

SEQ ID NO: 501571 - DNA, 120 bp, Artificial Sequence
  ENSG00000163743_7 (sequence is synthesized)
tgtttggaggacattcacacatcccgtgttgttgctcatgtcttgccatgtggacatcttttacatagaacgtgttatgaagaaatgttgaaagaaggctacagatgtccattatgtatg

SEQ ID NO: 501572 - DNA, 120 bp, Artificial Sequence
  ENSG00000163743_8 (sequence is synthesized)
cactctgctttagatatgaccaggtattggagacagctggatgatgaagtagcacagactcctatgccatcagaatatcagaacatgactgtggatattctctgcaatgactgtaatgga

SEQ ID NO: 501573 - DNA, 120 bp, Artificial Sequence
  ENSG00000163743_9 (sequence is synthesized)
cgatccactgttcagtttcatatattaggcatgaaatgtaagatttgtgaatcctataatactgctcaagctggaggacgtagaatttcactggatcagcaatgacgagcctacacagta

SEQ ID NO: 501574 - DNA, 120 bp, Artificial Sequence
  ENSG00000163743_10 (sequence is synthesized)
ctggagaacttggcattttctgatatagaaaaaggctttccttggtatcgtgttatcatgtgtcgtcatctatgcattagagttgatgtgttttgtactagtgtcacagcataaaatcat

SEQ ID NO: 501575 - DNA, 120 bp, Artificial Sequence
  ENSG00000163743_11 (sequence is synthesized)
attacaagtacgtaaggattcagggtctcttgatagacttatcatagctctatattgaatgaaagccactgtgcttgtgttttgattggaaattcctttagtgtcagttttttggaagcc

SEQ ID NO: 501576 - DNA, 120 bp, Artificial Sequence
  ENSG00000163743_12 (sequence is synthesized)
aatgatgtttgccactgatacattcatagaagtgtattatattttcatgaagctttgctttaagtgacactacgcgtgcagttcatttctagttcttgatagaactgcacttaattttca

SEQ ID NO: 501577 - DNA, 120 bp, Artificial Sequence
  ENSG00000163743_13 (sequence is synthesized)
gtagtagtcttgactttttaagggctgtgttatattaagttctcccttactgttaaaacctaattaaatatgctttagaattttctaagacagtcctctggatcctctaaatgtgaattt

SEQ ID NO: 501578 - DNA, 120 bp, Artificial Sequence
  ENSG00000163743_14 (sequence is synthesized)
tgatgtaataactgctaataaaattatattgaaactgttttatagaaagttttttccaaagttttctatgtttggctcaattagggcagtatcatcagttctataatgtaaaagaaattt

SEQ ID NO: 501579 - DNA, 120 bp, Artificial Sequence
  ENSG00000163743_15 (sequence is synthesized)
tctttcttttgaggtattccataaaagtagttgggaaaattattatgtaaaataataagactcttccaaagccttaataaaaacatcaacattgaaaacagttttttttaggttgcccaa

SEQ ID NO: 501580 - DNA, 120 bp, Artificial Sequence
  ENSG00000163743_16 (sequence is synthesized)
aattatttcttcaaagagtcattcattccttcatttagcaagtatttattgagcaactgctatgtggcagatatgtttctagatgctgtagagacaacagtgaacaataaagataaaagt

SEQ ID NO: 501581 - DNA, 120 bp, Artificial Sequence
  ENSG00000163743_17 (sequence is synthesized)
ccttgtcctcacagcagtacattctattgttcatcatatttgatcaatgtactcatttttctttatgcaaggagtggatgtcttattgtaaatgaatagaatatttcttccctaagcgtg

SEQ ID NO: 501582 - DNA, 120 bp, Artificial Sequence
  ENSG00000163743_18 (sequence is synthesized)
tgaaaataggggatggatgagtgggaagggcatgggatattcctggcaagatctctgatttcataatacttttttgggctcatgtagtggaattaaatatacctcttacttcaggaacaa

SEQ ID NO: 501583 - DNA, 120 bp, Artificial Sequence
  ENSG00000163743_19 (sequence is synthesized)
caaatatgtttgatgatccagccgactttgacactgttatctccgtaatagctttaccattaggctaggatgtaaaatgtacatttatcagttgataagtacctattgagcaccagttgt

SEQ ID NO: 501584 - DNA, 120 bp, Artificial Sequence
  ENSG00000163743_20 (sequence is synthesized)
atttccaactttgagctatttgaatcttctttgaataaggaagttagccttttaactagaaagcctaagagttctggcacatttatttcttcttttgttgaaatttattcacctagataa

SEQ ID NO: 501585 - DNA, 120 bp, Artificial Sequence
  ENSG00000163743_21 (sequence is synthesized)
aggcagcagtttgggactcagatctttattttatcccaccttcttgtcttctgtattccactcttcttatgttctttcccttcatctgtttccttggcctggccagagcagcagtgctga

SEQ ID NO: 501586 - DNA, 120 bp, Artificial Sequence
  ENSG00000163743_22 (sequence is synthesized)
tcttcatttgggaaaggatgttcctgggtattaccaattagtatacagataagtaaagactagttttccagatctaatacttttttttgaagtggttttgctctgtcatttaggctagag

SEQ ID NO: 501587 - DNA, 86 bp, Artificial Sequence
  ENSG00000163743_23 (sequence is synthesized)
cagctaatttttaattgttttgtagaaacaaatttctcctacctcggccttccaagggctaggattacaggcatgagccactgtgc

SEQ ID NO: 501588 - DNA, 120 bp, Artificial Sequence
  ENSG00000163743_24 (sequence is synthesized)
tattactttttatgtttggtattattctgccaaaccaatcatgttattgtttttaatcattgaatcattggatctttaaataggagtgagtatataataataaggctcttctgttttcaa

SEQ ID NO: 501589 - DNA, 120 bp, Artificial Sequence
  ENSG00000163743_25 (sequence is synthesized)
catctgtgctgggtcatgcattagcattaattactacaatgattctgtggggtaagtgttgtcctcatagacaagaaagctgaggtttagaggttaaaatgacacattgggggtaaataa

SEQ ID NO: 501590 - DNA, 120 bp, Artificial Sequence
  ENSG00000163743_26 (sequence is synthesized)
cagacactatatgttggagttgggaatcagatccaagtttgactccaaacccacttttaccacattgcttttgatctaaacttctattttgctaaaatacccctcacagctagtcatcca

SEQ ID NO: 501591 - DNA, 120 bp, Artificial Sequence
  ENSG00000163743_27 (sequence is synthesized)
tatcattgaagcgctcatgatttgatagattaacctttcatttttttaggtgactctagttagaaagtcttatttcacaatctgattgtttctttaacttaggatccaaacatgtccaaa

SEQ ID NO: 501592 - DNA, 120 bp, Artificial Sequence
  ENSG00000163743_28 (sequence is synthesized)
ataatgcagagtacatatgcaatcactcgtttatgctgtctagtcatgcacttaaagcaattttcaaatgtactcaaagtctctaggcttcggtacccagggttgcttcaagtatttgtt

SEQ ID NO: 501593 - DNA, 120 bp, Artificial Sequence
  ENSG00000163743_29 (sequence is synthesized)
catgacacgtcaactcgatgattaaaatccttcaacacttctcattcacaataagaataaaatctacatcccttaccattcagtatgcaaaacttaaaatacataactttacccttaaat

SEQ ID NO: 501594 - DNA, 120 bp, Artificial Sequence
  ENSG00000163743_30 (sequence is synthesized)
attttttctttctctgacttcataagtataggttatacctctataagaaagaaggtaaaaaactctcaacaatcccttctttcagagagaactactgttaacattttaacagacaacttc

SEQ ID NO: 501595 - DNA, 120 bp, Artificial Sequence
  ENSG00000163743_31 (sequence is synthesized)
attcttttcctattcttttttataatgcttacaggaatgttaaatacttagacagatcttaagtacactagaattatctgtccctgaaataagttaggttgccctgccgcagaatttgta

SEQ ID NO: 501596 - DNA, 120 bp, Artificial Sequence
  ENSG00000163743_32 (sequence is synthesized)
tctatagtttatttggattatttttgaaaaaagtaaaataacaatacccttacgaattttttggtgcatagcatctcagcttcttttatcattaaagatgtatgtataaaaaaaaaatga

SEQ ID NO: 501597 - DNA, 120 bp, Artificial Sequence
  ENSG00000163743_33 (sequence is synthesized)
gtgtatatcaagttgttcatttcttagtttctggggtcttcttaaccagtacatagaactctttatgaattaactttagcttatgttggaagtagtagtttgtttatagtgtcatggatt

SEQ ID NO: 501598 - DNA, 120 bp, Artificial Sequence
  ENSG00000163743_34 (sequence is synthesized)
ttaaaatcaaactcagtttttatttcttcactaaaacctattttcatatgatatacatgttaaatttcccttttattttggtcatgcatcaaaataaatttactaagtactaaagagcca

SEQ ID NO: 501599 - DNA, 120 bp, Artificial Sequence
  ENSG00000163743_35 (sequence is synthesized)
acattattttataagtgcctggcaataggtattcactagttgaatagtttaatttgaaatgaattaattttaaatgggagttgttcaaaactatgccactttttcttttgtcctttgtgt

SEQ ID NO: 501600 - DNA, 120 bp, Artificial Sequence
  ENSG00000163743_36 (sequence is synthesized)
tttaattgataattgtgtatattatatatatggagtacaatgtgatgttttgatatatgtttacagtgtagaatgattaaatcaatgtaataaatttattgcctcataccattttttgtg

SEQ ID NO: 501601 - DNA, 120 bp, Artificial Sequence
  ENSG00000163743_37 (sequence is synthesized)
tttttgtggtaaaaaaaccacttaaaatctactcttaatatttttgaaatgtacaatgcattatttattatactcaccattctgtgtaatagatcagtaaagtttattcctcttgtctaa

SEQ ID NO: 501602 - DNA, 120 bp, Artificial Sequence
  ENSG00000163743_38 (sequence is synthesized)
tgtgtgtgtctgtgtttctctctttttgcaattttatagaaaaagaaaaaaaagccctagaagggtagataccactctgtgtatagtgcttacatttggagagggatgttggggagatag

SEQ ID NO: 501603 - DNA, 120 bp, Artificial Sequence
  ENSG00000163743_39 (sequence is synthesized)
ggatttatcccatattctccattgtggctggaaattttttttacagagactaaacttgtgttttacataatgaacaaatcatgactgtagtaaaaaataatctaatcttttggctttcat

SEQ ID NO: 501604 - DNA, 120 bp, Artificial Sequence
  ENSG00000163743_40 (sequence is synthesized)
gttgttgctcatgtcttgccatgtggacatcttttacataggtaaagtaacatctttttctcaatgatgtttgaaaatagtggagacagtttttgttttactaaaataatcttatatttt

SEQ ID NO: 501605 - DNA, 120 bp, Artificial Sequence
  ENSG00000163743_41 (sequence is synthesized)
ctttcagaacgtgttatgaagaaatgttgaaagagtgagtgtttgggattttaaaaataattgtaagatgtttgacttttttgtgtgtgtggtgtggggaggtggacaaacattgttact

SEQ ID NO: 501606 - DNA, 120 bp, Artificial Sequence
  ENSG00000163743_42 (sequence is synthesized)
tatactatattgggcatggcaatatttatattgaaatgggtagggtagatgaatattgttaaaacaggacaaagtgtcttggatatagaactacacttttgccatatgtttctcttaaat

SEQ ID NO: 501607 - DNA, 120 bp, Artificial Sequence
  ENSG00000163743_43 (sequence is synthesized)
cttgtctcctcccacaatttgaggtagttacctcttttttttctggccatatataccaggaagtgcagtttttgccagatgcagttatagtgttgtaaaaatgctgaaaaatattgccaa

SEQ ID NO: 501608 - DNA, 120 bp, Artificial Sequence
  ENSG00000163743_44 (sequence is synthesized)
aaatttgttaggttgttatattggccaagtatagtaaactaaaagaaagtaggtgaagtgatcattaaagctaagactttattaatggaaaagatattaaaattagatgaaaataattga

SEQ ID NO: 501609 - DNA, 120 bp, Artificial Sequence
  ENSG00000163743_45 (sequence is synthesized)
atgtgaagagctagagagagcattctttttttcaaatttttagaaaggaaataatatctgaataattttaaacaaatacagtctctttacatgagtgtattaagaaattaaggttgttta

SEQ ID NO: 501610 - DNA, 120 bp, Artificial Sequence
  ENSG00000163743_46 (sequence is synthesized)
gataaggagtagcttaattagtttataaaaatatatgaagtgtattctacaaagaatatggactaattcctctccattttagagtactgaggaaaaagacttagttttaaataagtatac

SEQ ID NO: 501611 - DNA, 120 bp, Artificial Sequence
  ENSG00000163743_47 (sequence is synthesized)
aggaattaatttaaaagttttatagtgtgaaagttcccaggttcctaagagattatcttgaaatggaggaaaatgcctgttttgaatggttcatgtggcagttagcctgcatcttcttgt

SEQ ID NO: 501612 - DNA, 120 bp, Artificial Sequence
  ENSG00000163743_48 (sequence is synthesized)
aatgaggaagaagcaaaagtggaaactcctgataaacccatcagatctcatgagattttattcattatcacgagaatggcacgggagagtctggcccccatgattcagttacctccttct

SEQ ID NO: 501613 - DNA, 86 bp, Artificial Sequence
  ENSG00000163743_49 (sequence is synthesized)
tttattcattatcacgagaatggcacgggagagtctggcccccatgattcagttacctccttctaagtctttcaagttgagatttg

SEQ ID NO: 501614 - DNA, 120 bp, Artificial Sequence
  ENSG00000163743_50 (sequence is synthesized)
agtgtttcaatctagggatttccttcataattcttttgttttaaagttgtgttcaacttcatacagacgtagtgatgttgaagggaagaattaacataaaatatgccaagaaactagtga

SEQ ID NO: 501615 - DNA, 120 bp, Artificial Sequence
  ENSG00000163743_51 (sequence is synthesized)
aatgttatgtttaggatcagtttagcaactgatctattggttgtaatctttcagttccatccaggaggaggaggaagaaattttctttttgtattgcacacttagtttcttttgcttctt

SEQ ID NO: 501616 - DNA, 120 bp, Artificial Sequence
  ENSG00000163746_0 (sequence is synthesized)
ggccgaatggagaatgaagccttttcaaattcacctcccagtgaaccaccctcaaaatagaagtgaatgtgaaaccacagatatttcattaaaacatatctgaagataaaaacatacctc

SEQ ID NO: 501617 - DNA, 120 bp, Artificial Sequence
  ENSG00000163746_1 (sequence is synthesized)
aagcttcacagatataggacttctgagctgagaggacctcccggacatattgtctaccctaagcaccaggctggacacactgggaaacaggctgaccacctgggctcccaggccttctac

SEQ ID NO: 501618 - DNA, 120 bp, Artificial Sequence
  ENSG00000163746_2 (sequence is synthesized)
ccaggacgtcagcatgactacctagtcccacctgctggcacagctggcattcctgttcaaaatcagccaggtagacctgaaggggtaccatggatgccagcaccaccaccaccattaaac

SEQ ID NO: 501619 - DNA, 120 bp, Artificial Sequence
  ENSG00000163746_3 (sequence is synthesized)
tgtccgccaggattggaatacttaagtcagatagatatgatactaattcatcagcaaattgaacttctggaagttctattcagttttgaaagtagtaacatgtatgaaatcaagaacagc

SEQ ID NO: 501620 - DNA, 120 bp, Artificial Sequence
  ENSG00000163746_4 (sequence is synthesized)
tttgggcagaggatttattttgcagcagaagatactaatttctgtatccgaaattgctgtgggcggtctagaccttttaccttgaggattactgataatgtgggtcgagaagtcataact

SEQ ID NO: 501621 - DNA, 120 bp, Artificial Sequence
  ENSG00000163746_5 (sequence is synthesized)
cctggtgtaccagtaggttatgttactcagacctggcacccatgtctaacaaagtttacaattaaaaatcagaaaagagaggatgtactaaaaattagtggtccatgtatcgtgtgcagc

SEQ ID NO: 501622 - DNA, 120 bp, Artificial Sequence
  ENSG00000163746_6 (sequence is synthesized)
tgtattgcgggtgttgattttgagattacatctcttgatgaacaaattgtggttggcaggatttctaagcactggtctgggtttttaagagaggcatttactgatgctgacaactttgga

SEQ ID NO: 501623 - DNA, 120 bp, Artificial Sequence
  ENSG00000163746_7 (sequence is synthesized)
atccaattccctagagaccttgatgttaaaatgaaagccgtgatgattggtgcctgtttcctcattgactacatgttttttgaaagaactaggtaatgactggaatgtcagagtgtggga

SEQ ID NO: 501624 - DNA, 120 bp, Artificial Sequence
  ENSG00000163746_8 (sequence is synthesized)
gtggattaatgattccggatctttggctaggcaaaatgaaactataactgatctaaacggttccttccttcttctactgtgcaaggaagatgtaaggaaaaactcgcacactatctgtgg

SEQ ID NO: 501625 - DNA, 120 bp, Artificial Sequence
  ENSG00000163746_9 (sequence is synthesized)
aactcatttaaattcaaatactagataaacatttcgcattgaatatttacatggagaaaaatcatcaaacatcaacaattatcaagttaattaataaaaatactaggtattgcaaaaaag

SEQ ID NO: 501626 - DNA, 120 bp, Artificial Sequence
  ENSG00000163746_10 (sequence is synthesized)
acaccagaaccgttcgaatgacaaggggtgtcctgcctgaaaacgccttgcggggctcagcttccccttagctacactgctttacaggtagagagcggccctgaatcctgggcagagtct

SEQ ID NO: 501627 - DNA, 120 bp, Artificial Sequence
  ENSG00000163746_11 (sequence is synthesized)
gggctcaggagcatgtgccagcatagtggggctattagaagggacggttaatacagcctgcaagctgtcatttatcaggccaaataaacccacttggaattattcaacctttgctgaact

SEQ ID NO: 501628 - DNA, 120 bp, Artificial Sequence
  ENSG00000163746_12 (sequence is synthesized)
tcttgagtagatgtaactaagaggtgactataattggagaattcttaagagtttcactatattatgaaaatgtgtgcttaaagttggtaatcataaaaaataattttgaaatggcagctt

SEQ ID NO: 501629 - DNA, 120 bp, Artificial Sequence
  ENSG00000163746_13 (sequence is synthesized)
atgaaaggatattatttgtagctgtgttttcccttgtaaattccagtactgggcactcctgaaaacttcgcaagatatatatgagatcatggaactcactcttctgcttaaattcctcca

SEQ ID NO: 501630 - DNA, 120 bp, Artificial Sequence
  ENSG00000163746_14 (sequence is synthesized)
gtatctgcccatcttagattcttcctagcaataattctgagagactctggattgtgggccgaatggagaatgaagccttttcaaattcacctcccaggacctcccggacatattgtctac

SEQ ID NO: 501631 - DNA, 120 bp, Artificial Sequence
  ENSG00000163746_15 (sequence is synthesized)
ggggaatattaaccaatggtgagaaatttgggatccagtttccatttgatcttgatgttaaaattaaagcattgatgcttggagcaactttcctcattgaatacatgtattttgaactgt

SEQ ID NO: 501632 - DNA, 120 bp, Artificial Sequence
  ENSG00000163746_16 (sequence is synthesized)
ggccataagaattaccctgaaagaatatgtcagagattactggcatttatttttgccagccctcaacaaaactaagcaactttcactgaaaatatctaaataaagttttattttactaaa

SEQ ID NO: 501633 - DNA, 120 bp, Artificial Sequence
  ENSG00000163746_17 (sequence is synthesized)
tgagagactctggattgtgggccgaatggagaatgaagccttttcaaattcacctcccaggatacctggattcactttatagctcttccatgtataaatctaatggataacacaacatct

SEQ ID NO: 501634 - DNA, 120 bp, Artificial Sequence
  ENSG00000163746_18 (sequence is synthesized)
ctgaggctcatattttgatccataaaactgggatcagagttgacctacaaatgatctgcaagtttctacagtgaacccactaggaaacacttctagagataagagtgtttcataagtatg

SEQ ID NO: 501635 - DNA, 120 bp, Artificial Sequence
  ENSG00000163746_19 (sequence is synthesized)
ctgaattttctttcaaaattaagaaacctatatatttgggtgaagcataatgcaaaatcatattccttctaagacttcaggagaactttccaactaatataattgtgtgattattactat

SEQ ID NO: 501636 - DNA, 120 bp, Artificial Sequence
  ENSG00000163746_20 (sequence is synthesized)
tctttgaagatctgtgatttagaaagtatttaaaccatgagtgtttaaaaactgtttgtattttaggttcactgacagcaatatattactttatcaaattaaatagacttaagaataata

SEQ ID NO: 501637 - DNA, 120 bp, Artificial Sequence
  ENSG00000163749_0 (sequence is synthesized)
gcacgaagcatattaaggtagatatgttctatcgttaattgtagttttgacaggtggcatctcagtaatcaaaaggaagaaaatgaaccaaaagaaccaaagagggaaccattcatactt

SEQ ID NO: 501638 - DNA, 120 bp, Artificial Sequence
  ENSG00000163749_1 (sequence is synthesized)
caagatctctaataagaagtagcaatatttaatatggaatcaaaagcttgggaatcaaataatgaagatcttttatcaagtagtggtgtcacatctaatggaggttcttcaagttcattt

SEQ ID NO: 501639 - DNA, 120 bp, Artificial Sequence
  ENSG00000163749_2 (sequence is synthesized)
tttgtgtcatctattcgtggtacaataattgaaaacacatcttcagctgggactttgacacaggttccttttttccctaaatatgaagtggaacttgattctcctagaaaaatcatccca

SEQ ID NO: 501640 - DNA, 120 bp, Artificial Sequence
  ENSG00000163749_3 (sequence is synthesized)
tctcctggaaaggaacactttgaacgtgttttggaagaatattcacatcaagtcaaagatttacagagaagactaaatgaaagcaatgaattgcatgagaaacaaaagttttatttgagg

SEQ ID NO: 501641 - DNA, 120 bp, Artificial Sequence
  ENSG00000163749_4 (sequence is synthesized)
cagtcagtcattgatttgcaaacaaaacttcaggagatgcaaatggagagagatgctatggctgacatcagacgaagggagagtcagtcccaggaggatttaagaaatcagcttcaaaat

SEQ ID NO: 501642 - DNA, 120 bp, Artificial Sequence
  ENSG00000163749_5 (sequence is synthesized)
acagttcatgaacttgaagctgccaaatgccttaaagaggacatgctgaaagacagcaacacacagatagagcaactacgaaaaatgatgcttagtcatgagggagtgcttcaagaaatc

SEQ ID NO: 501643 - DNA, 120 bp, Artificial Sequence
  ENSG00000163749_6 (sequence is synthesized)
cggtcaatcctagttgactttgaagaagcctcaggcaaaaaaatatgtgaacatgacagcatgtctactctgcacttccgcagcttgggctcagctattagtaaaatactaagagaatta

SEQ ID NO: 501644 - DNA, 120 bp, Artificial Sequence
  ENSG00000163749_7 (sequence is synthesized)
gacacagagatttcttatcttaaagggaggatatttccagtagaggatcaacttgaagcactgaaatctgaatcacagaacaaaatagaactacttctgcaacaacaccaagataggatt

SEQ ID NO: 501645 - DNA, 120 bp, Artificial Sequence
  ENSG00000163749_8 (sequence is synthesized)
gagcagttaataagtgaacatgaagttgaaataacaggacttactgagaaagctagcagtgctcgaagccaagccaatagtatccagagtcaaatggaaatcattcaagagcaagcaaga

SEQ ID NO: 501646 - DNA, 120 bp, Artificial Sequence
  ENSG00000163749_9 (sequence is synthesized)
aaccaaaactctatgtatatgcgtcagctcagcgatctggaatctactgtttctcagctacgttctgaattaagggaagccaaaaggatgtatgaagacaagacagaagagctggaaaag

SEQ ID NO: 501647 - DNA, 120 bp, Artificial Sequence
  ENSG00000163749_10 (sequence is synthesized)
cagttagtccttgccaactcagagctaactgaagcccggacagagcgtgatcaattcagtcaggaatctggaaatttagatgatcaacttcaaaagctgttggctgatctacacaaaagg

SEQ ID NO: 501648 - DNA, 120 bp, Artificial Sequence
  ENSG00000163749_11 (sequence is synthesized)
gagaaggagctgagtctggagaaggagcagaataagcgtctgtgggaccgagacacaggcaacagcatcaccattgaccacctgcggcgggaactggacaaccggaacatggaggtgcag

SEQ ID NO: 501649 - DNA, 120 bp, Artificial Sequence
  ENSG00000163749_12 (sequence is synthesized)
cgcctggaagccctgctcaaggccttgaagagcgagtgtcagggccagatggagcggcagatggcagcaattcaaggaaagaatgaaagtctagaaaaagtatcctccttgactgctcag

SEQ ID NO: 501650 - DNA, 120 bp, Artificial Sequence
  ENSG00000163749_13 (sequence is synthesized)
cttgaatccaccaaagagatgctgcgcaaagtagtagaagagttgacagccaagaaaatgactctggagagctcagagaggacaatatcggacctgacaacttctctccaggaaaaagag

SEQ ID NO: 501651 - DNA, 120 bp, Artificial Sequence
  ENSG00000163749_14 (sequence is synthesized)
agagccatcgaggctaccaatgcagagatcacaaagctccgctcccgggtggacttgaaattgcaggagctgcaacacttgaaaaatgaaggggatcatctcagaaatgtgcagacagaa

SEQ ID NO: 501652 - DNA, 120 bp, Artificial Sequence
  ENSG00000163749_15 (sequence is synthesized)
attgagaacatgacacagctggtgggccagcatggacgaactgctggagctatgcaagtagaaaaagctcaactggagaaagaaattaatgataggcggatggaactaaaggaacttaag

SEQ ID NO: 501653 - DNA, 120 bp, Artificial Sequence
  ENSG00000163749_16 (sequence is synthesized)
atattaaaagataaaaaagatgcaaagatccgggagcttgaggccagagtgagtgacttggagctggaaaaggtgaagctggtgaatgcaggctctgagcggctccgtgcagtgaaggac

SEQ ID NO: 501654 - DNA, 120 bp, Artificial Sequence
  ENSG00000163749_17 (sequence is synthesized)
atcaaacaagagagagatcaattattaaatgaggtgaaaacaagtaggagtgaattaaacaatctttcagaggagtatgaagtcttaaaaaggaatttccgaaacaaaagtgaagaaatg

SEQ ID NO: 501655 - DNA, 120 bp, Artificial Sequence
  ENSG00000163749_18 (sequence is synthesized)
gaaatgactacaaataagttgaaaatgcaattaaaatctgcacagtctgaactagaacagacaagaaatacattaaagtcaatggaaggatctgatggtcatgctatgaaagtggcaatg

SEQ ID NO: 501656 - DNA, 120 bp, Artificial Sequence
  ENSG00000163749_19 (sequence is synthesized)
gggatgcaaaagcaaatcacagccaaaagaggtcagatagatgcccttcagagcaagatacagtttttggaagaggcaatgacaaatgcaaataaggagaaacattttctgaaagaagag

SEQ ID NO: 501657 - DNA, 120 bp, Artificial Sequence
  ENSG00000163749_20 (sequence is synthesized)
aaaagtaaactcagtcaggaattgagtactgttgccacagaaaaaaacaagatggctggggagttggaagttctgcgatctcaggaacgccgtttgaaagaaaaggttactaatatggaa

SEQ ID NO: 501658 - DNA, 120 bp, Artificial Sequence
  ENSG00000163749_21 (sequence is synthesized)
gtggctctggataaggcatctttgcagtttgcagaatgtcaagatataatacagcgtcaggagcaagaatcagtgcgcttaaaacttcaacacactttggatataaaagaacttcagggc

SEQ ID NO: 501659 - DNA, 120 bp, Artificial Sequence
  ENSG00000163749_22 (sequence is synthesized)
cctggatacacctcaaattcttcattgaaaccacgccttctccagccagcatctgttactcgttctcattctaatgtaccatcttcgcagtctacagccagcttcctgtctcatcactct

SEQ ID NO: 501660 - DNA, 120 bp, Artificial Sequence
  ENSG00000163749_23 (sequence is synthesized)
acaaaagctaacacactgaaggaagatccaacaagggacctgaaacagcttctccaagagttgagaagcgtgatcaatgaggagccagctgtgtctctgagcaagacagaggaagatgga

SEQ ID NO: 501661 - DNA, 120 bp, Artificial Sequence
  ENSG00000163749_24 (sequence is synthesized)
agaacatctctgggagccttagaggatagggtaagagattgcattactgaatccagcctgagatcagacatgtgccatagaagcaacaactcgttgagggactccactgaaggaagcaaa

SEQ ID NO: 501662 - DNA, 120 bp, Artificial Sequence
  ENSG00000163749_25 (sequence is synthesized)
tcaagtgaaactcttagtagagagccagtcacattacacgcaggagacagggaagatccctctggttgcttcacattcacatctgcagcaagtccatctgtgaaaaactcagcttctcgt

SEQ ID NO: 501663 - DNA, 120 bp, Artificial Sequence
  ENSG00000163749_26 (sequence is synthesized)
tcattcaattcttctcctaagaagtctccagtgcactcactcctaactagttcagttgaaggttcaataggttccacatcacagtatagatctgccaaacctattcattcatctgattct

SEQ ID NO: 501664 - DNA, 120 bp, Artificial Sequence
  ENSG00000163749_27 (sequence is synthesized)
gttaaagattcacagtctccgccaatagaaacaacaggaaaaacatgcaggaagcttcagaacagactagaaagcttgcaaactctggtagaagatttacagctgaagaaccaagcaatg

SEQ ID NO: 501665 - DNA, 120 bp, Artificial Sequence
  ENSG00000163749_28 (sequence is synthesized)
tcttcaatgatcagaaatcaagaaaagaggatacagaaagtaaaagaccaggaaaaaatgttactaaaatgactcgttgcttgcctattctttacagaggaatgaggcccaattaattgt

SEQ ID NO: 501666 - DNA, 120 bp, Artificial Sequence
  ENSG00000163749_29 (sequence is synthesized)
ggtgttactcgtaattagtgccctgtgtactttttctttttatgtgaaaatttaataaaagataccctgtcttgtaaactctattttgaaataaactattcttgaatccctcacagtaaa

SEQ ID NO: 501667 - DNA, 120 bp, Artificial Sequence
  ENSG00000163749_30 (sequence is synthesized)
agcacagcggagggaacaagtctccagaggcagaagggtcagctatgccgagaacacgtttgaacttgaacattcggggacagagaaaacagagctgcaaaataatatggtgattaattg

SEQ ID NO: 501668 - DNA, 120 bp, Artificial Sequence
  ENSG00000163749_31 (sequence is synthesized)
gatatggaatttgaattgatgaagatacttgaaacacccaagaaagaaggtttagtgaggagatgaaaagagcagatttgggataagatattaatagaataagtgaaaataagaatatcc

SEQ ID NO: 501669 - DNA, 120 bp, Artificial Sequence
  ENSG00000163749_32 (sequence is synthesized)
cactattggctctgtagatttggctttacccttaactttcgctttttgacaacaaaaatatctcctgatgttgattcagcatttatttttactactttgaaagcagttggggctgaattt

SEQ ID NO: 501670 - DNA, 120 bp, Artificial Sequence
  ENSG00000163749_33 (sequence is synthesized)
tgtattaaaaaagtgatgatttagtagcactggctggagctatatactgtgcaggaagattctgtgcaaacctctgcatagttctgccaatgcaccgccatgctggcctgtagcatccct

SEQ ID NO: 501671 - DNA, 120 bp, Artificial Sequence
  ENSG00000163749_34 (sequence is synthesized)
tattattccatagctgtgtctttttgagcacagaaaaacagaaaacaccaccaccaacagacaaaccaaacctcgtgtgatttgatatgattggcaatatctctaaaatcaatgtgagat

SEQ ID NO: 501672 - DNA, 120 bp, Artificial Sequence
  ENSG00000163749_35 (sequence is synthesized)
tagaatgaaatcccaatactcatttgtccagtgatccaaaccaaaaagtgcattcatagatggtgaaagggaaaaccagtgctactacgtaaaaataaaagaaaaagaaaaaatctttaa

SEQ ID NO: 501673 - DNA, 120 bp, Artificial Sequence
  ENSG00000163749_36 (sequence is synthesized)
agagataatgacagagggtaactgtagcacagcggagggaacaagtctccagaggcagaagggtcagctatgccgagaacacgtttgaacttgaacattcggggacagagaaaacagagc

SEQ ID NO: 501674 - DNA, 120 bp, Artificial Sequence
  ENSG00000163749_37 (sequence is synthesized)
ttattaactaaacatatgaagtaattatcaactaaatagttattaaccaaatagaattgttctgaacaaaagctctatgtagacaggaactgaatgtatcaatttgtgttgtatcccaat

SEQ ID NO: 501675 - DNA, 120 bp, Artificial Sequence
  ENSG00000163749_38 (sequence is synthesized)
cacctagcacaaaggaaaaccctatcctattagagaaggcgtttctgaattttaaaatgtggtcataatgcatactttttgccaaattttctttttcaggctaacatagtcacaggagca

SEQ ID NO: 501676 - DNA, 120 bp, Artificial Sequence
  ENSG00000163749_39 (sequence is synthesized)
gtaagatcaaagatgtaagatgttcctgatatccatagtgacatgaataagtaaaaaggtctccatgagcacctgatttaccaccaaaaagtgacttgggtacttggtagaatacagtct

SEQ ID NO: 501677 - DNA, 120 bp, Artificial Sequence
  ENSG00000163749_40 (sequence is synthesized)
gttaataatgtcaataaaatgataaagtaatgctaatggctggcactttgtggggtccagaaggtgcatgtaggaaacatagcttaaagaatgagaaggatcagtgatactttttgtcat

SEQ ID NO: 501678 - DNA, 120 bp, Artificial Sequence
  ENSG00000163749_41 (sequence is synthesized)
tgccgtttattgtagagaaataaatctcccttcctgtcacctagaaactctggaagcctaaaattgtaccaaaaccatccttgattgctaagaaaacagtgcctttatggttagatacaa

SEQ ID NO: 501679 - DNA, 120 bp, Artificial Sequence
  ENSG00000163749_42 (sequence is synthesized)
agatacaataatctgggatctcatctctgctacctttgtttcttaaaacatgctatattgactctgtgaatttcagttgtggttattttttaaaatttattttattttattttatttttt

SEQ ID NO: 501680 - DNA, 120 bp, Artificial Sequence
  ENSG00000163749_43 (sequence is synthesized)
gccagttatggttattttaatataaatttttatactttggtaaagctgtttgctcattccatccttagttcattcattgtttgcccttcacatactaaaagttacgtatttgctgggggt

SEQ ID NO: 501681 - DNA, 120 bp, Artificial Sequence
  ENSG00000163749_44 (sequence is synthesized)
atagaggataaaaacatggcctccagttgctcacagttcactaaataaaacagataaatagatcattgtaatatagtttggtagaagggcaggaagattttttgaagagatggcagctct

SEQ ID NO: 501682 - DNA, 120 bp, Artificial Sequence
  ENSG00000163751_0 (sequence is synthesized)
caaagaagaaccatgaggctcatcctgcctgtgggtttgattgctaccactcttgcaattgctcctgtccgctttgacagggagaaggtgttccgcgtgaagccccaggatgaaaaacaa

SEQ ID NO: 501683 - DNA, 120 bp, Artificial Sequence
  ENSG00000163751_1 (sequence is synthesized)
gcagacatcataaaggacttggccaaaaccaatgagcttgacttctggtatccaggtgccacccaccacgtagctgctaatatgatggtggatttccgagttagtgagaaggaatcccaa

SEQ ID NO: 501684 - DNA, 120 bp, Artificial Sequence
  ENSG00000163751_2 (sequence is synthesized)
gccatccagtctgccttggatcaaaataaaatgcactatgaaatcttgattcatgatctacaagaagagattgagaaacagtttgatgttaaagaagatatcccaggcaggcacagctac

SEQ ID NO: 501685 - DNA, 120 bp, Artificial Sequence
  ENSG00000163751_3 (sequence is synthesized)
gcaaaatacaataattgggaaaagattgtggcttggactgaaaagatgatggataagtatcctgaaatggtctctcgtattaaaattggatctactgttgaagataatccactatatgtt

SEQ ID NO: 501686 - DNA, 120 bp, Artificial Sequence
  ENSG00000163751_4 (sequence is synthesized)
ctgaagattggggaaaagaatgaaagaagaaaggctatttttacggattgtggcattcacgcacgagaatgggtctccccagcattctgccagtggtttgtctatcaggcaaccaaaact

SEQ ID NO: 501687 - DNA, 120 bp, Artificial Sequence
  ENSG00000163751_5 (sequence is synthesized)
tatgggagaaacaaaattatgaccaaactcttggaccgaatgaatttttacattcttcctgtgttcaatgttgatggatatatttggtcatggacaaagaaccgcatgtggagaaaaaat

SEQ ID NO: 501688 - DNA, 120 bp, Artificial Sequence
  ENSG00000163751_6 (sequence is synthesized)
cgttccaagaaccaaaactccaaatgcatcggcactgacctcaacaggaattttaatgcttcatggaactccattcctaacaccaatgacccatgtgcagataactatcggggctctgca

SEQ ID NO: 501689 - DNA, 120 bp, Artificial Sequence
  ENSG00000163751_7 (sequence is synthesized)
attcctactcccagatgctattgtttccctatggatatacatcaaaactgccacctaaccatgaggacttggccaaagttgcaaagattggcactgatgttctatcaactcgatatgaaa

SEQ ID NO: 501690 - DNA, 120 bp, Artificial Sequence
  ENSG00000163751_8 (sequence is synthesized)
cccgctacatctatggcccaatagaatcaacaatttacccgatatcaggttcttctttagactgggcttatgacctgggcatcaaacacacatttgcctttgagctccgagataaaggca

SEQ ID NO: 501691 - DNA, 120 bp, Artificial Sequence
  ENSG00000163751_9 (sequence is synthesized)
aatttggttttctccttccagaatcccggataaagccaacgtgcagagagaccatgctagctgtcaaatttattgccaagtatatcctcaagcatacttcctaaagaactgccctctgtt

SEQ ID NO: 501692 - DNA, 120 bp, Artificial Sequence
  ENSG00000163751_10 (sequence is synthesized)
tggaataagccaattaatccttttttgtgcctttcatcagaaagtcaatcttcagttatccccaaatgcagcttctatttcacctgaatccttctcttgctcatttaagtcccatgttac

SEQ ID NO: 501693 - DNA, 120 bp, Artificial Sequence
  ENSG00000163751_11 (sequence is synthesized)
tgctgtttgcttttacttactttcagtagcaccataacgaagtagctttaagtgaaaccttttaactacctttctttgctccaagtgaagtttggacccagcagaaagcattattttgaa

SEQ ID NO: 501694 - DNA, 120 bp, Artificial Sequence
  ENSG00000163751_12 (sequence is synthesized)
aggtgatatacagtggggcacagaaaacaaatgaaaaccttcagtttctcacagattttcaccatgtggcttcatcaatttatgtgctaatacaataaaataaaatgcacttaatgcttt

SEQ ID NO: 501695 - DNA, 120 bp, Artificial Sequence
  ENSG00000163751_13 (sequence is synthesized)
atgcacttaatgctttaaaattcatctttttatgataaactatattctctgtatttctctatagcattaataatcaatattaatgccattcattcagtctgttaataagaaataatatct

SEQ ID NO: 501696 - DNA, 80 bp, Artificial Sequence
  ENSG00000163754_0 (sequence is synthesized)
agcaggggcgccggtgagccgcagccgcagcggcagcctagccccgagggagggaggaggagccgagggagacgcgggac

SEQ ID NO: 501697 - DNA, 120 bp, Artificial Sequence
  ENSG00000163754_1 (sequence is synthesized)
tgggaggatgcggacggcagcgagagcgtgcgcggccacgtgacggccgctataagagcgcacggggcagacgctcggttccccgccgtgcctcctcgctggccgcgctccctcccggtg

SEQ ID NO: 501698 - DNA, 120 bp, Artificial Sequence
  ENSG00000163754_2 (sequence is synthesized)
ccggcttctctgagtcaccaacctgaggctgccccggccgcctgcgcacccggcagcaccatgacagatcaggcctttgtgacactaaccacaaacgatgcctacgccaaaggtgccctg

SEQ ID NO: 501699 - DNA, 120 bp, Artificial Sequence
  ENSG00000163754_3 (sequence is synthesized)
gtcctgggatcatctctgaaacagcacaggaccaccaggaggctggtcgtgctcgccacccctcaggtctcagactccatgagaaaagttttagagacagtctttgatgaagtcatcatg

SEQ ID NO: 501700 - DNA, 120 bp, Artificial Sequence
  ENSG00000163754_4 (sequence is synthesized)
gtagatgtcttggacagtggcgattctgctcatctaaccttaatgaagaggccagagttgggtgtcacgctgacaaagctccactgctggtcgcttacacagtattcaaaatgtgtattc

SEQ ID NO: 501701 - DNA, 120 bp, Artificial Sequence
  ENSG00000163754_5 (sequence is synthesized)
atggatgcagatactctggtcctagcaaatattgatgatctttttgacagagaagaattgtcagcagcaccagacccagggtggcctgactgcttcaattccggagtcttcgtttatcag

SEQ ID NO: 501702 - DNA, 120 bp, Artificial Sequence
  ENSG00000163754_6 (sequence is synthesized)
ccttcagttgaaacatacaatcagctgttgcatcttgcttctgagcaaggtagttttgatggtggggaccaaggcatactgaacacattttttagcagctgggcaacaacagatatcaga

SEQ ID NO: 501703 - DNA, 120 bp, Artificial Sequence
  ENSG00000163754_7 (sequence is synthesized)
aaacacctgccgtttatttataacctaagcagcatctctatatactcctacctcccggcatttaaagtgtttggtgcaagtgccaaagttgtgcatttcctgggacgagtcaaaccatgg

SEQ ID NO: 501704 - DNA, 120 bp, Artificial Sequence
  ENSG00000163754_8 (sequence is synthesized)
gatcccaaaacaaaaagtgtcaaaagtgaggcccatgatcccaacatgactcatccagagtttctcatcctgtggtggaacatctttaccaccaacgttttacctctgcttcaacaattt

SEQ ID NO: 501705 - DNA, 120 bp, Artificial Sequence
  ENSG00000163754_9 (sequence is synthesized)
ggccttgtcaaagacacctgctcatatgtaaatgtgctttcagacttggtctatacactggctttctcttgtggcttctgtagaaaggaagatgtctcaggagccatatcacatctgtcc

SEQ ID NO: 501706 - DNA, 120 bp, Artificial Sequence
  ENSG00000163754_10 (sequence is synthesized)
cttggggagatcccagctatggcacagccgtttgtatcctcggaagaacggaaggaacgatgggaacagggccaggctgattatatgggagcagattcctttgacaacatcaagaggaaa

SEQ ID NO: 501707 - DNA, 120 bp, Artificial Sequence
  ENSG00000163754_11 (sequence is synthesized)
cttgacacttacctccagtagaaacactgcatttttctgtgaacacatccacttcacaagccttgtttctgatacttagtatctagagctgggttgagaaaagtctgttacagttgctag

SEQ ID NO: 501708 - DNA, 120 bp, Artificial Sequence
  ENSG00000163754_12 (sequence is synthesized)
aggttttcattaaaacttatcagatgagaggcttttttaggataagaggtgagaactgggcaaaagttgtgaagcagcaattctgttatatggacagtgttctgctttttaatcctattt

SEQ ID NO: 501709 - DNA, 120 bp, Artificial Sequence
  ENSG00000163754_13 (sequence is synthesized)
agcttgtttcagaaattctcacttttgttgactgccaacatacaaagtaagggaaactcaagatattaagatggctgtatcagttcttaaaatctgcagagcctggttcaaaatcagtca

SEQ ID NO: 501710 - DNA, 120 bp, Artificial Sequence
  ENSG00000163754_14 (sequence is synthesized)
ctcccttcagaagcagacatggcatctgttccttgcttgcttgttggttgtgtacctttcacgagacctgaattttagaattgcccagtgctgccagagtgagtgagtgtaattctcctt

SEQ ID NO: 501711 - DNA, 120 bp, Artificial Sequence
  ENSG00000163754_15 (sequence is synthesized)
tcaggtaaagataggctatctcaacactgctgagtgattcataaacatatcaaccaatagcattaacccattttatttcctgtccttagtgtctgaagatgctcaccagttttctgtgta

SEQ ID NO: 501712 - DNA, 120 bp, Artificial Sequence
  ENSG00000163754_16 (sequence is synthesized)
cagtaaggcagcatgctaaaatgcttttgttcagttctgtatatttgaaaatagcagtgtgttctctgatggttacctgcagtggcaccctgtacaaaaaataaaagacttattgctgta

SEQ ID NO: 501713 - DNA, 120 bp, Artificial Sequence
  ENSG00000163754_17 (sequence is synthesized)
ctccctcccggtgccggcttctctgagtcaccaacctgaggctgccccggccgcctgcgcacccggcagcaccatgacagattgacagcgatgttacccatgttataatgggctgaagat

SEQ ID NO: 501714 - DNA, 120 bp, Artificial Sequence
  ENSG00000163754_18 (sequence is synthesized)
aatagaagcaagtacaggcggatgttgatgggcctgtcaagggacaggtgccactgttcagagctttcctagagtatcaggcctttgtgacactaaccacaaacgatgcctacgccaaag

SEQ ID NO: 501715 - DNA, 120 bp, Artificial Sequence
  ENSG00000163754_19 (sequence is synthesized)
taccaggtggggaccaaggcatactgaacacattttttagcagctgggcaacaacagatatcagaaaacacctgccgtttatttataacctaagcagcatctctatatactcctacctcc

SEQ ID NO: 501716 - DNA, 120 bp, Artificial Sequence
  ENSG00000163754_20 (sequence is synthesized)
gccacaaagattgcaggtgtaacccagagttcagccgtctttaggaagattaaactcctacccagctgtcattggtctttcttggtcatttgtaatgttggctagtctggtgttctaacc

SEQ ID NO: 501717 - DNA, 120 bp, Artificial Sequence
  ENSG00000163754_21 (sequence is synthesized)
tgtgttctatcccttatttaatcttggaaatcatccatatccttgcttccagaaatccttgaatcctgctcaccttattacatttttctccatgatcgcctggaacctggacttcatttg

SEQ ID NO: 501718 - DNA, 120 bp, Artificial Sequence
  ENSG00000163754_22 (sequence is synthesized)
aaacaaataggcccagtttctgataaatgcatccatggttaccaggtatgtgaccctgctcagaagacctagaaagtaccaagtctgtagttgcaaggtggggaccaaggcatactgaac

SEQ ID NO: 501719 - DNA, 120 bp, Artificial Sequence
  ENSG00000163754_23 (sequence is synthesized)
aagctccactgctggtcctagcaaatattgatgatctttttgacagagaagaattgtcagcagcaccagacccagggtggcctgactgcttcaattccggagtcttcgtttatcagcctt

SEQ ID NO: 501720 - DNA, 70 bp, Artificial Sequence
  ENSG00000163754_24 (sequence is synthesized)
tttgggaggccaaggcaggtgtatcacttgagatcaggggttcgagtattgcctgacgtggtggcatgca

SEQ ID NO: 501721 - DNA, 120 bp, Artificial Sequence
  ENSG00000163754_25 (sequence is synthesized)
attgagtcccataagcagagtacagtaatgttttaaaataatgtttaacagaaatgatttggtgctacattgtattaaagtgtaaaattgaccccagagctagattttaaaatctttgta

SEQ ID NO: 501722 - DNA, 120 bp, Artificial Sequence
  ENSG00000163754_26 (sequence is synthesized)
gttaattaggcttcatgttggacctgcccaaaaaaagaatgaaggactgagatatttcaagatggtacttgtccaaaccaaatgagctgagagattttggtgtgcttcacttggttccct

SEQ ID NO: 501723 - DNA, 120 bp, Artificial Sequence
  ENSG00000163754_27 (sequence is synthesized)
tatgcaggcttgtatgctggtcattttacctactttttcacttatttctcaacagtcctgtgaggaaacaaataggcccagtttctgataaatgcatccatggttaccagatatgaagtc

SEQ ID NO: 501724 - DNA, 120 bp, Artificial Sequence
  ENSG00000163754_28 (sequence is synthesized)
caggagccccaagggctgagcagacactttgctgtatcattgtagctgacgctggccacagtggtgactgagcaggatctgcccagagacttttggggaaagtctgaaatctttaactgg

SEQ ID NO: 501725 - DNA, 120 bp, Artificial Sequence
  ENSG00000163755_0 (sequence is synthesized)
ggaagtagtcctacattcgcggtcagcgcggggtctccgggcgccctgcagggcgggcaggctgtgccatcccgccggacgtcgggatggtgcagctgtacaacctgcacccgttcgggt

SEQ ID NO: 501726 - DNA, 120 bp, Artificial Sequence
  ENSG00000163755_1 (sequence is synthesized)
cgcagcaggtggtgccctgcaagctggagccggaccggttctgtggcggggggcgtgacgcgcttttcgtggcggcgggctgcaaggtggaggcgttcgcggtggccggccaggagctgt

SEQ ID NO: 501727 - DNA, 120 bp, Artificial Sequence
  ENSG00000163755_2 (sequence is synthesized)
gccagccgcggtgcgccttctccacgctgggccgggtgttgcgcctggcctacagcgaggctggagattatttggtagcaattgaagagaaaaacaaagctacatttctacgtgcttatg

SEQ ID NO: 501728 - DNA, 120 bp, Artificial Sequence
  ENSG00000163755_3 (sequence is synthesized)
tgaactggagaaataaaaggactgaaaactctcgtgtgtgtatccgaatgattgggcataatgtggagggaccattcagcaaagccttcagagaccagatgtacattattgaaatgccgc

SEQ ID NO: 501729 - DNA, 120 bp, Artificial Sequence
  ENSG00000163755_4 (sequence is synthesized)
tttcggaggcccccttgtgcatttcctgttgccctgtgaaaggagaccttctcgttggctgcacaaataaattagtcttatttagtttgaagtaccagatcattaatgaggaattctcac

SEQ ID NO: 501730 - DNA, 120 bp, Artificial Sequence
  ENSG00000163755_5 (sequence is synthesized)
tattggactttgaacgttctttaattatacacatagataatatcactcctgttgaggtttctttttgtgttggatatgttgctgtcatgtcagacttagaagtcttaatcgtaaaactgg

SEQ ID NO: 501731 - DNA, 120 bp, Artificial Sequence
  ENSG00000163755_6 (sequence is synthesized)
agtcaggccctaaaaatggagagagagttcaccaccatccacataagaccaacaatcgaataagacggacagaagaaggcatcagtaatgaaatttcacagcttgagtcagatgattttg

SEQ ID NO: 501732 - DNA, 120 bp, Artificial Sequence
  ENSG00000163755_7 (sequence is synthesized)
tcatctgccagaagcccctggaacttcttggtgaaaaaagtgaacagtctggattatctgttacactggagtctacgggattagctgatgaaaaaagaaaatattcccactttcagcacc

SEQ ID NO: 501733 - DNA, 120 bp, Artificial Sequence
  ENSG00000163755_8 (sequence is synthesized)
tgctctatagacgttttgctcctgatatttcgtcctatgtcttgtctgatgacatcaagctacattccctccagctgctacccatttaccagaccggttctcttacatctgatggaaaaa

SEQ ID NO: 501734 - DNA, 120 bp, Artificial Sequence
  ENSG00000163755_9 (sequence is synthesized)
atttgtctcaggaaaaagaattgctgagtctcttttgctttttctccttacctcatgtgggctatctctacatggttgtcaaatctgttgaattgatgtcagtctaccagtatcctgaaa

SEQ ID NO: 501735 - DNA, 120 bp, Artificial Sequence
  ENSG00000163755_10 (sequence is synthesized)
agtctcagcaggcagtactcacgccacaatttttgcacgtcattacaagtaacaacctgcagtgtttcactgtgcggtgcagtgcggcggcagctcgtgaggaggacccgtacatggaca

SEQ ID NO: 501736 - DNA, 120 bp, Artificial Sequence
  ENSG00000163755_11 (sequence is synthesized)
ccaccctgaaggcttgcccacctgtcagtatggatgtctgtgctttaagaatacagcttttcataggcttgaaagccatctgtcactttaaaaaccacatcatacttttgactaaagcag

SEQ ID NO: 501737 - DNA, 120 bp, Artificial Sequence
  ENSG00000163755_12 (sequence is synthesized)
aacctgaagccattccagagagaagacagtcacccaagaggcttctttcgagaaaagataccagtgttaaaatcaaaatacctcctgtagctgaggctgggtggaatttgtatattgtga

SEQ ID NO: 501738 - DNA, 120 bp, Artificial Sequence
  ENSG00000163755_13 (sequence is synthesized)
atacgatctcaccagtgcagctgtacaaagagatggtagactatagcaatacctataagactgtcaaaacccagagctgcattcaccttctcagtgaggctcatctgttagtgcgagctg

SEQ ID NO: 501739 - DNA, 120 bp, Artificial Sequence
  ENSG00000163755_14 (sequence is synthesized)
ccctgatggatgccagtcagctggaacctggagagaaggcagagcttttggaagcatttaaggaaagctgtgggcaccttggggactgttacagcaggcttgactcccagcattctcatc

SEQ ID NO: 501740 - DNA, 120 bp, Artificial Sequence
  ENSG00000163755_15 (sequence is synthesized)
tcaccttgccatactataagatgtctggtttgtctatggctgaagttctggcccgcacggactggacagtagaggatggattacagaaatacgagagaggattaatcttttacattaatc

SEQ ID NO: 501741 - DNA, 120 bp, Artificial Sequence
  ENSG00000163755_16 (sequence is synthesized)
attcactttatgaaaacctggatgaagaattaaatgaagaattagcagcaaaagtggttcagatgttttatgtggctgagccaaagcaagtgccccatattctctgtagtccttctatga

SEQ ID NO: 501742 - DNA, 120 bp, Artificial Sequence
  ENSG00000163755_17 (sequence is synthesized)
agaatattaatcctttaactgccatgagctatctaaggaagctggatacttctgggttttcatcgatcttagtgacattgaccaaggcagcagtggctctgaaaatgggagatcttgaca

SEQ ID NO: 501743 - DNA, 120 bp, Artificial Sequence
  ENSG00000163755_18 (sequence is synthesized)
tgcacagaaatgaaatgaaaagccattcagagatgaagttggtatgtggcttcattctggaacctcggctgttgattcaacagagaaagggacagattgttccaaccgagcttgcacttc

SEQ ID NO: 501744 - DNA, 120 bp, Artificial Sequence
  ENSG00000163755_19 (sequence is synthesized)
agaagaacaacaaaattggaattgaagaagcagattccttttttaaggtgctttgtgctaaggatgaagatacaattcctcagctcttggtagacttttgggaagctcagctagtggcat

SEQ ID NO: 501745 - DNA, 120 bp, Artificial Sequence
  ENSG00000163755_20 (sequence is synthesized)
gtctcccagatgtggtacttcaggaactctttttcaaactcacatcacagtacatctggagattgtctaagaggcagcctcctgacaccacaccattgcgaacatcggaggatctgataa

SEQ ID NO: 501746 - DNA, 120 bp, Artificial Sequence
  ENSG00000163755_21 (sequence is synthesized)
atgcctgtagtcattatggcttaatttatccatgggttcacgtcgtaatatcatctgattctttagctgataaaaattatacagaagatctttcaaaattacagtctcttatatgtggtc

SEQ ID NO: 501747 - DNA, 120 bp, Artificial Sequence
  ENSG00000163755_22 (sequence is synthesized)
cttcatttgacatagcttccattattccgttcttggagccactttcagaagacactattgccggcctcagtgtccatgttctgtgtcgtacacgcttgaaagagtatgaacagtgcatag

SEQ ID NO: 501748 - DNA, 120 bp, Artificial Sequence
  ENSG00000163755_23 (sequence is synthesized)
acatactgttagagagatgcccggaggcagtcattccatatgctaatcatgaactgaaagaagagaaccggactctgtggtggaaaaaactgttgcctgaactttgtcagagaataaaat

SEQ ID NO: 501749 - DNA, 120 bp, Artificial Sequence
  ENSG00000163755_24 (sequence is synthesized)
gtggtggagagaagtatcaactctacctgtcatcattaaaagaaacattgtcaattgttgctgtggaactagaactgaaggatttcatgaatgttctcccagaagatggtactgcaacat

SEQ ID NO: 501750 - DNA, 120 bp, Artificial Sequence
  ENSG00000163755_25 (sequence is synthesized)
ttttcttgccatatcttctctattgcagtcgaaagaaaccattgacttaaaggtatcatttgaaaaataccataatggcatttgagactgaatttctaaaaattgaatgccaaagtacaa

SEQ ID NO: 501751 - DNA, 89 bp, Artificial Sequence
  ENSG00000163755_26 (sequence is synthesized)
tacaaatgctttcaggctgcttaccttaccgtgtagtggtaactattcacttcttaatttatgacctcaatcaatttaattgtctagaa

SEQ ID NO: 501752 - DNA, 120 bp, Artificial Sequence
  ENSG00000163755_27 (sequence is synthesized)
cttcttaatttatgacctcaatcaatttaattgtctagaatgtaaaaagtctttaagacataagaattcctcaaagaagccatacattttttaaggtggggattgacttttattccaagg

SEQ ID NO: 501753 - DNA, 120 bp, Artificial Sequence
  ENSG00000163755_28 (sequence is synthesized)
aacaacatcagttcactgttgttggagacatgacaatcattttcatcccaagaacactttaaggaaacattttacaagtatgcttgaaagaatgtcactaactggtccagaattttatct

SEQ ID NO: 501754 - DNA, 120 bp, Artificial Sequence
  ENSG00000163755_29 (sequence is synthesized)
tcttgatttttccagatttctctatgtttttgagaaagatgttaatgttttgccatggtaaaagatttcaaacctcattttttttgttccttttcttgttacttttaagaaaactcatgc

SEQ ID NO: 501755 - DNA, 120 bp, Artificial Sequence
  ENSG00000163755_30 (sequence is synthesized)
tctgtttctctgaatcaaatgaagtagaagtttacaaagctaactttcttcttgtctagctattaacatgatttgtcaaatgcatgtttttttcagccaaagccttgtttccatttttgt

SEQ ID NO: 501756 - DNA, 120 bp, Artificial Sequence
  ENSG00000163755_31 (sequence is synthesized)
tgatgtgtactcttgctcttttagctagagtgtatgtgaaaataaagaaatacatcattgtattcacaaccatgtgtcttcatttataactttttgtttaaaaaatttttagttcaagtt

SEQ ID NO: 501757 - DNA, 120 bp, Artificial Sequence
  ENSG00000163755_32 (sequence is synthesized)
tagttcattgatattatcctctgaatgcagttaaggctgggcagaaattctactcatgtgacatctgccacaggtctattttgaagcttttcttctaatggcaatgtttgtccttaccag

SEQ ID NO: 501758 - DNA, 120 bp, Artificial Sequence
  ENSG00000163755_33 (sequence is synthesized)
gatttaatctatagaattgtctctcaactctgcttttctccagttccagataacgtccttaagaccatctgttcaggggttcacaaaactcaaatttgtgtcattctattttatttattt

SEQ ID NO: 501759 - DNA, 120 bp, Artificial Sequence
  ENSG00000163755_34 (sequence is synthesized)
tattttttatttccttccctcataccttgcccattccctctgaatattaggtgtgatgtcaacagcatgttagaaggatcaatgggaaggcaatgattgaaaacatttcaatgaacctta

SEQ ID NO: 501760 - DNA, 120 bp, Artificial Sequence
  ENSG00000163755_35 (sequence is synthesized)
atagtgttcctttgaggagcacccaggagaatatctggtcatagatctttttttaaatgcagttttataaaaccctaacagcggtgatatcattagactgtatgaatcagttttattacc

SEQ ID NO: 501761 - DNA, 120 bp, Artificial Sequence
  ENSG00000163755_36 (sequence is synthesized)
tagtgtacaagtgtcagtcatgtatcattatatagtctgttgatctttccatttgcaaaaaattaatagttttcccccacaaatgtacaaagttgtatgcttccagtcttcttttaatgt

SEQ ID NO: 501762 - DNA, 120 bp, Artificial Sequence
  ENSG00000163755_37 (sequence is synthesized)
ttatagtcattccaaagtaacattctattttacactttcacatacattgttatgaatcattggtttttctcttttttccacttatcaccaatttatttcattcagccagatttggtgtct

SEQ ID NO: 501763 - DNA, 120 bp, Artificial Sequence
  ENSG00000163755_38 (sequence is synthesized)
agtcacccaagaggcttctgtaagcatccccttgccccaggcattcctgccagtttctggaatgagttgtaactggtatattttgtgtttatcttttttcaaatcataacttggaatgat

SEQ ID NO: 501764 - DNA, 120 bp, Artificial Sequence
  ENSG00000163755_39 (sequence is synthesized)
caaatggcttttttatggtggtctttttccagagaaagaaaagaaggttctaacaatctctgtaatacactttataactgacctggaaacttttaggagaaaatggattataaaatagtt

SEQ ID NO: 501765 - DNA, 120 bp, Artificial Sequence
  ENSG00000163755_40 (sequence is synthesized)
tcagtaaaaatcaaaggtgttttagattagttaaaggccatgcttttctgtgtaattaatgagaaagactgagcctataatgctaattgaaactacaggactttttactgtctttcttct

SEQ ID NO: 501766 - DNA, 120 bp, Artificial Sequence
  ENSG00000163755_41 (sequence is synthesized)
ttgaccctttcagttgttacatttttatctaaaattattttctgatattatgaaagaaattaataatgtatgtcttaccttaaagcacatttatgatctatagatatgtgctcatgtatc

SEQ ID NO: 501767 - DNA, 120 bp, Artificial Sequence
  ENSG00000163755_42 (sequence is synthesized)
gcggaccgaacgtctgggctgtagctctagctagggatgggacttcttgcttcccggaatttgccggatggtctccctgggtctggccgctgattgcttgaagtcgcattgagctatgcg

SEQ ID NO: 501768 - DNA, 120 bp, Artificial Sequence
  ENSG00000163755_43 (sequence is synthesized)
gttgtcgcggcaagcataggtatgagcttgcttctgtcggggcggagacgctgacatctcttcgtcttggttttctgcagaaaggcctctggctggattccactcatctcggatacttaa

SEQ ID NO: 501769 - DNA, 120 bp, Artificial Sequence
  ENSG00000163755_44 (sequence is synthesized)
gcaaacaacaacaaaaaactctttagtgcatcagatttcaaagacttaccaaaaaaacaagtaggaataaggagactagtactgtatcccggaacctccaagtactcccagctttaacaa

SEQ ID NO: 501770 - DNA, 120 bp, Artificial Sequence
  ENSG00000163755_45 (sequence is synthesized)
ttattccaactcttggcagttctttcacatctgtacctccatctacttccggtcggtttttgaaagctcacattatgtgttgatttttaaatgtgtgagattatttggtagcaattgaag

SEQ ID NO: 501771 - DNA, 120 bp, Artificial Sequence
  ENSG00000163755_46 (sequence is synthesized)
atcatgaactgaaagaagagaaccggactctgtggtggaaaaaactgttgcctgaactttgtcagagaataaaatgtggtggagagaagtatcaactctacctgtcatcattaaaaggta

SEQ ID NO: 501772 - DNA, 120 bp, Artificial Sequence
  ENSG00000163755_47 (sequence is synthesized)
aaatgattttttttttgcttgattataaacttaagtttcagttttaaatttggtgaagccttcttaagtattttcatgtgattctcaagtgaaaccgagggcctttcagaaccatctggg

SEQ ID NO: 501773 - DNA, 120 bp, Artificial Sequence
  ENSG00000163755_48 (sequence is synthesized)
agcttattttcagcattcacgtaccctccccttgacatttgatattgatttatctcctagtcacagaactgatgttcttttaacttaatcctttcaaacacttaacaaattatcacagtc

SEQ ID NO: 501774 - DNA, 120 bp, Artificial Sequence
  ENSG00000163755_49 (sequence is synthesized)
atagaaaatgacagcatcagtgttttaaaatgtgagtagtcattaaggcaattacatcttttatcaatgatcagagtacttaatttacttcatgtaggaagttaagatcattactattaa

SEQ ID NO: 501775 - DNA, 120 bp, Artificial Sequence
  ENSG00000163755_50 (sequence is synthesized)
acataattataagcaagtattgatgaataacaacctcaaggatttaaaagttgagtatctaaattgtaccgtattttacagcatagtagttatttgaattttcataattcataatcataa

SEQ ID NO: 501776 - DNA, 120 bp, Artificial Sequence
  ENSG00000163755_51 (sequence is synthesized)
acgggaactgtggaagctagcagacagtaccactacattataaatgaggaacctaggacttggaagattaagtgactttcttaaagccactcgaaacattgtcaattgttgctgtggaac

SEQ ID NO: 501777 - DNA, 120 bp, Artificial Sequence
  ENSG00000163762_0 (sequence is synthesized)
gatcattgtctattgttctccaaacagtaaaccagtatttcacactgagattgtcggctgcgggtatattccaattccccgtctcctcatgaatatgaagtgaagggctctgaccctgga

SEQ ID NO: 501778 - DNA, 120 bp, Artificial Sequence
  ENSG00000163762_1 (sequence is synthesized)
agtggttctaagcagggcaaaatggggtctcggaagtgtggaggctgcctaagttgtttgctgattccgcttgcactttggagtataatcgtgaacatattattgtatttcccgaatggg

SEQ ID NO: 501779 - DNA, 120 bp, Artificial Sequence
  ENSG00000163762_2 (sequence is synthesized)
caaacttcctatgcatccagcaataaactcaccaactacgtgtggtattttgaaggaatctgtttctcaggcatcatgatgcttatagtaacaacagttcttctggtactggagaataat

SEQ ID NO: 501780 - DNA, 120 bp, Artificial Sequence
  ENSG00000163762_3 (sequence is synthesized)
aacaactataaatgttgccagagtgaaaactgcagcaaaaaatatgtgacactgctgtcaattatcttttcttccctcggaattgctttttctggatactgcctggtcatctctgccttg

SEQ ID NO: 501781 - DNA, 120 bp, Artificial Sequence
  ENSG00000163762_4 (sequence is synthesized)
ggtcttgtccaagggccatattgccgcacccttgatggctgggagtatgcttttgaaggcactgctggacgtttccttacagattctagcatatggattcagtgcctggaacctgcacat

SEQ ID NO: 501782 - DNA, 120 bp, Artificial Sequence
  ENSG00000163762_5 (sequence is synthesized)
gttgtggagtggaacatcattttattttccattctcataaccctcagtgggcttcaagtgatcatctgcctcatcagagtagtcatgcaactatccaagatactgtgtggaagctattca

SEQ ID NO: 501783 - DNA, 120 bp, Artificial Sequence
  ENSG00000163762_6 (sequence is synthesized)
gtgatcttccagcctggaatcatttgaataaggacaaaatgttttccattatcaagacatggccatctatctaaatattatatcaactgtgtagacttgagggcaatattgaaatgatgg

SEQ ID NO: 501784 - DNA, 120 bp, Artificial Sequence
  ENSG00000163762_7 (sequence is synthesized)
tgctttctgcatttggtgtttatttgtaaaaaatttgcagtcctcactgcacatgcaagtataccacccttccatttagtatgttttttaagtaatatgcatcagaaacttcagaaatac

SEQ ID NO: 501785 - DNA, 120 bp, Artificial Sequence
  ENSG00000163762_8 (sequence is synthesized)
ttctgccctttgatcaaacaaatccatttccaagaatctgtactagggaagtaaataagaatatgagagaaacctttatgcaaatatgtatattgcaacattatttaatattctggaaaa

SEQ ID NO: 501786 - DNA, 120 bp, Artificial Sequence
  ENSG00000163762_9 (sequence is synthesized)
ttggaaacaccccaaaattctaaactcagaggaaggattaagtaaagagtggtacatactgtaaatgttttctgatattaaaaaaaaaattaaataaaaaataaagagtactacatggtt

SEQ ID NO: 501787 - DNA, 120 bp, Artificial Sequence
  ENSG00000163762_10 (sequence is synthesized)
gtaaaattacagtcattacaaatgatgtttttaaaattatgaataatgctacatcaaaaagcaggttacaaattcatgtttactatataactatttaaagcaaatgaaacactaatagtc

SEQ ID NO: 501788 - DNA, 120 bp, Artificial Sequence
  ENSG00000163762_11 (sequence is synthesized)
aaagtttaggatgaaaactaaatctaaaaggaaatataacaaaatgccaattatgcttggtttggggcattgatgacccttcttcccacttttctatattttccaagatttctttattga

SEQ ID NO: 501789 - DNA, 120 bp, Artificial Sequence
  ENSG00000163762_12 (sequence is synthesized)
atatgttttactataaatattttctaaactcatattttcactattaaaatttttttatttttccaaactttaaggcatatgctctttccacattcctcaacattatttgcaaacatcatg

SEQ ID NO: 501790 - DNA, 120 bp, Artificial Sequence
  ENSG00000163762_13 (sequence is synthesized)
aaatgacacttccatcaacattcaatgaggaaagtagtgatatagatgagccaaaaagagttttatataaacttatacaatctaaactcttgctcttcctttctgactcctgagggtgag

SEQ ID NO: 501791 - DNA, 120 bp, Artificial Sequence
  ENSG00000163762_14 (sequence is synthesized)
tgtgatggactagaagaggtagccttaaaataagtgagcagctagggaacatgctcaatgggcaagagaaaatgaccactgaccagtcaatacctgtgtcagggggagttaccagtacct

SEQ ID NO: 501792 - DNA, 120 bp, Artificial Sequence
  ENSG00000163762_15 (sequence is synthesized)
tttttaaagtaattaaaaagtagaacacttacaaattttccacctatacatgccatgtcttcctcggggacagtagccacatcttatatatttcccaccatgcataggacccagcacaca

SEQ ID NO: 501793 - DNA, 120 bp, Artificial Sequence
  ENSG00000163762_16 (sequence is synthesized)
gtgaagccagtaggcactcagtgttgaatgctcataccaggttttctgcttcctgtagttaccctgctgagcactgcttccatcacaggtgcactgggcctcaacacttctgccatttcc

SEQ ID NO: 501794 - DNA, 120 bp, Artificial Sequence
  ENSG00000163762_17 (sequence is synthesized)
ccatttgtctcctccatggacactgtcaacaatggtctgtcaacacctgctctgtgccaaagccagggagtaggctggggggatacggaagagaatatctttctccttgatgcctgctgt

SEQ ID NO: 501795 - DNA, 120 bp, Artificial Sequence
  ENSG00000163762_18 (sequence is synthesized)
gccaacagccccctttaagccttgttcacagcctttgctgaaacaagcatcttgaaagcaagccatgttatacaccgcatgaccttcatgctctgggcccagctgactgaactggggcag

SEQ ID NO: 501796 - DNA, 120 bp, Artificial Sequence
  ENSG00000163762_19 (sequence is synthesized)
gccccagagtcatgggcagcctattgtcttgctaatggcctctgacttagcctggagtaaaacactgtccaaacaagactggtggttattcaagcataagaatttgaactaggaagccaa

SEQ ID NO: 501797 - DNA, 120 bp, Artificial Sequence
  ENSG00000163762_20 (sequence is synthesized)
gaatgaagcaaccggaccattaccatcaaaaaatgattaaaggatgaagaaggaagccaacattcagagagtatctggttcatgttaataatggtatcatattaaaaggaagatacatga

SEQ ID NO: 501798 - DNA, 120 bp, Artificial Sequence
  ENSG00000163762_21 (sequence is synthesized)
acttctactccaaaagctcctaaaactgcctttgcccacaatgaacagtgtaccctaggcctggtttctgttcttggattcctagatagtctttcttctttgtcactgtgctgatcattt

SEQ ID NO: 501799 - DNA, 120 bp, Artificial Sequence
  ENSG00000163762_22 (sequence is synthesized)
cagtaaacccccgactaaatcagtgcagctctgtttattgcaactaaaacgatccaaatgaagtctcccttttctagatgttgggttggagggatgctaagacaaagatgcttaggctcc

SEQ ID NO: 501800 - DNA, 120 bp, Artificial Sequence
  ENSG00000163762_23 (sequence is synthesized)
agagttttacagagcttcattcaataacactctactttccaaagaacttaaatatgaggtctgaaggacttggaccaagaggcaaacccaagctacagacaccatgttgtactcagagtg

SEQ ID NO: 501801 - DNA, 120 bp, Artificial Sequence
  ENSG00000163762_24 (sequence is synthesized)
acctctcccctctgacagcccaggatttctctatcaagtccataagctagtcatatctaggaccatcttgttaaaaattctctcaaagtctcctcagccctcttgtaaacagacttctgg

SEQ ID NO: 501802 - DNA, 120 bp, Artificial Sequence
  ENSG00000163762_25 (sequence is synthesized)
aaggtccacttcatcagtttgttatatactttcagactgtctatctcttgtttagattcagcatggcaccgtacgttgaatggactgttaatagatgtttgctgaatgactccaccacag

SEQ ID NO: 501803 - DNA, 120 bp, Artificial Sequence
  ENSG00000163762_26 (sequence is synthesized)
cattggacacatcaggggtacagccaaatgcagcatgatacctctatcaggaaaattaaattttaacacagccaccaaatattctatatttgaagagtatatgctaatcatgcaatttta

SEQ ID NO: 501804 - DNA, 120 bp, Artificial Sequence
  ENSG00000163762_27 (sequence is synthesized)
agtaaaaaaaagctgaatacaaaaaaagctgaatatgtgttttatatcctcgtgaattcaaagtaaaaaggaaaaaaaactcaaaaaccaaatatatgtatgcagtttgagcccaaattt

SEQ ID NO: 501805 - DNA, 120 bp, Artificial Sequence
  ENSG00000163762_28 (sequence is synthesized)
ttaattaagtaaccatataattacatgtagacatgtataaaccttgagatatgtaaagaccagaaaaatatttaaaagttaatagttacatcatctgtggtcacaacaccctgaaaatgc

SEQ ID NO: 501806 - DNA, 120 bp, Artificial Sequence
  ENSG00000163762_29 (sequence is synthesized)
ctaatattggaaacttaagcaggattgatccaggttattacttggatgggagaccagatgctataggctgaaaaaagaaagcataagtacgcacaagttaatacttaataattatctcct

SEQ ID NO: 501807 - DNA, 120 bp, Artificial Sequence
  ENSG00000163762_30 (sequence is synthesized)
aatgataggactataagttctatctcttttctttacattgttcagtattttcaaatttccctttgaaaatgtgttatgtacttgaattattagaaaaaataaatgtcatttaaaaagcaa

SEQ ID NO: 501808 - DNA, 120 bp, Artificial Sequence
  ENSG00000163762_31 (sequence is synthesized)
acccttgatggctgggagtatgcttttgaaggcactgctggacggtaaggaataattccccaaaccaaggaggtcggaaaatcagaaacaccttgcctcatgctcaagctcacgctcatt

SEQ ID NO: 501809 - DNA, 120 bp, Artificial Sequence
  ENSG00000163762_32 (sequence is synthesized)
gctttctttcctctcactcagaaacacaaaaatattgacagtattataccctcactactgttgagtacagtacagagatcaagagtttactgccaagatcatcttccattttgcttagtc

SEQ ID NO: 501810 - DNA, 120 bp, Artificial Sequence
  ENSG00000163762_33 (sequence is synthesized)
tttcctccacttttgttctactgatgcactttcagaaaatcagcatttaaagatacctaaaattaggaaataatacttttttttcctaactaagtttccattagtctattttttctttac

SEQ ID NO: 501811 - DNA, 120 bp, Artificial Sequence
  ENSG00000163762_34 (sequence is synthesized)
aaactttattgagggctaaattacatataataagtggcatccattaaaattatgcaatatcatgagttttaacagttgactacactcatgaaaccaccattgcagtcaagataacagaat

SEQ ID NO: 501812 - DNA, 120 bp, Artificial Sequence
  ENSG00000163781_0 (sequence is synthesized)
agtcggttcccgttctgggcaatttccgggttctccagcgtttgctttggggtaggggcggcgccgagtcgggggagggggctgtgcgccgggctggcgcccgaccccagccaccgccct

SEQ ID NO: 501813 - DNA, 120 bp, Artificial Sequence
  ENSG00000163781_1 (sequence is synthesized)
gcggccagcgcgtcccccgactcgccgcccggagaccccgaggctccaacgagttcagaaatgtccagaaatgacaaagaaccgttttttgtgaagtttttaaagtcttcagacaattcc

SEQ ID NO: 501814 - DNA, 120 bp, Artificial Sequence
  ENSG00000163781_2 (sequence is synthesized)
aaatgtttttttaaagctctcgagtccataaaagaattccaatcagaagaatatcttcagattattacagaagaagaggcattgaagataaaggagaatgatagatcactttatatctgt

SEQ ID NO: 501815 - DNA, 120 bp, Artificial Sequence
  ENSG00000163781_3 (sequence is synthesized)
gacccttttagtggcgttgtctttgatcacctcaaaaagcttggctgcagaattgttggtcctcaagtagtcatattttgtatgcaccaccagcgatgtgtcccaagagccgaacatcca

SEQ ID NO: 501816 - DNA, 120 bp, Artificial Sequence
  ENSG00000163781_4 (sequence is synthesized)
gtttataatatggttatgtctgatgtaaccatatcttgtacaagtctggaaaaagaaaaaagggaagaagttcataaatatgtacaaatgatgggcggacgagtatacagagaccttaat

SEQ ID NO: 501817 - DNA, 120 bp, Artificial Sequence
  ENSG00000163781_5 (sequence is synthesized)
gtatcagtaactcaccttattgcaggagaagttggtagcaaaaaatatttagttgctgcaaacctgaagaaacctattttgcttccctcttggataaaaacactttgggagaagtcacaa

SEQ ID NO: 501818 - DNA, 120 bp, Artificial Sequence
  ENSG00000163781_6 (sequence is synthesized)
gagaaaaaaataactagatatactgatataaacatggaagatttcaagtgtcctatttttcttggttgcataatctgtgtgactggcttatgtggcttagacaggaaagaagttcagcaa

SEQ ID NO: 501819 - DNA, 120 bp, Artificial Sequence
  ENSG00000163781_7 (sequence is synthesized)
ctcacagttaagcatggaggtcaatacatgggacaattgaaaatgaatgaatgtacacacctcattgtgcaagaaccaaaaggtcagaagtatgagtgtgccaagagatggaatgtacac

SEQ ID NO: 501820 - DNA, 120 bp, Artificial Sequence
  ENSG00000163781_8 (sequence is synthesized)
tgtgtgaccacacagtggttttttgacagtattgagaaaggtttttgtcaggatgaatccatatacaagacagaacctagaccagaagcaaagactatgcccaattcttcaactcctacc

SEQ ID NO: 501821 - DNA, 120 bp, Artificial Sequence
  ENSG00000163781_9 (sequence is synthesized)
agccagatcaacacaattgatagtcgtactctttcagatgtcagcaatatttccaacataaatgcaagttgcgtaagtgaatcaatatgtaattcacttaacagcaaactggagcctaca

SEQ ID NO: 501822 - DNA, 120 bp, Artificial Sequence
  ENSG00000163781_10 (sequence is synthesized)
cttgaaaatctagaaaatctggatgtcagtgcatttcaagcacctgaagatttattagatggttgtcggatatatctttgcggttttagtggcagaaagctagataaactgagaagactt

SEQ ID NO: 501823 - DNA, 120 bp, Artificial Sequence
  ENSG00000163781_11 (sequence is synthesized)
attaacagtggaggtggagttcgttttaaccagctaaatgaagatgtaactcatgttattgtgggagattatgatgatgaattgaagcagttttggaataaatcagcccacaggcctcat

SEQ ID NO: 501824 - DNA, 120 bp, Artificial Sequence
  ENSG00000163781_12 (sequence is synthesized)
gtagtgggagcaaagtggttgctagagtgtttcagtaaaggttatatgctttctgaagaaccatatatccatgctaattaccagccagtggaaattccagtttcacataagcctgaaagt

SEQ ID NO: 501825 - DNA, 120 bp, Artificial Sequence
  ENSG00000163781_13 (sequence is synthesized)
aaagcagctcttttaaaaaagaagaacagcagcttctctaagaaagactttgctcctagtgaaaagcatgagcaagctgatgaagatctgctctctcaatatgaaaatggtagctccaca

SEQ ID NO: 501826 - DNA, 120 bp, Artificial Sequence
  ENSG00000163781_14 (sequence is synthesized)
gtagttgaggctaagacgtctgaagccaggccctttaatgattctactcatgctgagcccttgaatgattctactcacatttctttgcaagaagaaaaccagtcttctgtcagtcattgt

SEQ ID NO: 501827 - DNA, 120 bp, Artificial Sequence
  ENSG00000163781_15 (sequence is synthesized)
gtccctgatgtttctacaattactgaagaaggcttatttagccaaaagagtttccttgttttgggttttagtaatgaaaatgaatctaacatcgcaaacatcataaaagaaaatgctggg

SEQ ID NO: 501828 - DNA, 120 bp, Artificial Sequence
  ENSG00000163781_16 (sequence is synthesized)
aaaatcatgtcccttctgagcagaactgttgcggattatgctgtggttcctctgctggggtgtgaagtggaagccactgtgggagaagttgttacaaatacatggctggttacttgcata

SEQ ID NO: 501829 - DNA, 120 bp, Artificial Sequence
  ENSG00000163781_17 (sequence is synthesized)
gactatcagactttgtttgatccaaagtcgaatcctctcttcacaccagttccagtaatgacaggaatgactcctttagaggattgtgttatttcatttagccagtgtgctggagcagaa

SEQ ID NO: 501830 - DNA, 120 bp, Artificial Sequence
  ENSG00000163781_18 (sequence is synthesized)
aaagagtctttaacattcctagcaaacctccttggagcaagtgttcaagaatactttgttcgcaaatccaatgcaaagaaaggcatgtttgccagtactcatcttatactgaaagaacgt

SEQ ID NO: 501831 - DNA, 120 bp, Artificial Sequence
  ENSG00000163781_19 (sequence is synthesized)
ggtggctctaaatatgaagctgcaaagaagtggaatttacctgccgttactatagcttggctgttggagactgctagaacgggaaagagagcagacgaaagccattttctgattgaaaat

SEQ ID NO: 501832 - DNA, 120 bp, Artificial Sequence
  ENSG00000163781_20 (sequence is synthesized)
tcaactaaagaagaacgaagtttggaaacagaaataacaaatggaatcaatctaaattcagatactgcagagcatcctggcacacgcctgcaaactcacagaaaaaccgtcgttacacct

SEQ ID NO: 501833 - DNA, 120 bp, Artificial Sequence
  ENSG00000163781_21 (sequence is synthesized)
ttagatatgaaccgctttcagagtaaagctttccgtgctgtggtctcacaacatgccagacaggtcgcagcctccccagcagtaggacaaccacttcagaaggagccctcgttacacctg

SEQ ID NO: 501834 - DNA, 120 bp, Artificial Sequence
  ENSG00000163781_22 (sequence is synthesized)
gatacaccatcaaaattcctgtccaaggacaaactcttcaagccttcctttgatgtgaaggatgcacttgcagccttggaaactccaggacgtcccagccaacagaaaaggaaaccgagt

SEQ ID NO: 501835 - DNA, 120 bp, Artificial Sequence
  ENSG00000163781_23 (sequence is synthesized)
acgccactctcagaagttattgtcaaaaacttgcaacttgctttggcaaatagctctcgaaatgctgtcgctctttctgccagccctcaactgaaagaggcccagtcagagaaggaagaa

SEQ ID NO: 501836 - DNA, 120 bp, Artificial Sequence
  ENSG00000163781_24 (sequence is synthesized)
ccccaaagccacttcacaaagtagtggtatgtgttagtaaaaaactcagtaagaagcagagtgaactaaatgggatcgcagcctctctaggagcagattacaggtggagttttgatgaaa

SEQ ID NO: 501837 - DNA, 120 bp, Artificial Sequence
  ENSG00000163781_25 (sequence is synthesized)
cagtgactcatttcatctatcaagggcggccaaatgacactaatcgggagtataaatctgtaaaagaaagaggagtacacattgtttccgagcactggcttttagattgtgcccaagagt

SEQ ID NO: 501838 - DNA, 120 bp, Artificial Sequence
  ENSG00000163781_26 (sequence is synthesized)
gtaaacatcttcctgaatctctttatccacatacttataatcccaaaatgagcttggatatcagcgcagtgcaagatggccggctctgtaatagtcgactactctcagctgtgtcttcaa

SEQ ID NO: 501839 - DNA, 120 bp, Artificial Sequence
  ENSG00000163781_27 (sequence is synthesized)
caaaggatgatgagccagatcctttgattttagaagaaaatgatgtagacaatatggccaccaataataaagagtcagcaccatcaaatggaagtggaaagaatgactctaaaggagttc

SEQ ID NO: 501840 - DNA, 120 bp, Artificial Sequence
  ENSG00000163781_28 (sequence is synthesized)
tgacacagaccttagagatgagagagaactttcagaagcagttacaggagataatgtctgcaacatcaatagtgaaaccccaagggcagaggacttccctttcaagaagtggttgtaaca

SEQ ID NO: 501841 - DNA, 120 bp, Artificial Sequence
  ENSG00000163781_29 (sequence is synthesized)
gcgcatcttcaacccctgacagcactcgctctgctcgcagtggacgaagtagagtcctagaggcactgaggcagtctcgtcagacagtacctgatgtcaacacagagccttcccaaaatg

SEQ ID NO: 501842 - DNA, 120 bp, Artificial Sequence
  ENSG00000163781_30 (sequence is synthesized)
aacagatcatttgggatgaccctacagcaagggaggagagagcaaggcttgccagcaatttgcagtggcctagttgtcccacacaatactctgagcttcaggttgacattcaaaacttgg

SEQ ID NO: 501843 - DNA, 120 bp, Artificial Sequence
  ENSG00000163781_31 (sequence is synthesized)
aggattctccttttcaaaagcctttacatgattcagaaattgctaaacaggctgtctgtgatcctggaaacatacgtgtgactgaagctcccaaacacccaatctctgaagaactggaaa

SEQ ID NO: 501844 - DNA, 120 bp, Artificial Sequence
  ENSG00000163781_32 (sequence is synthesized)
ctcccataaaagacagccacctgatccctacgcctcaagcccccagtattgcctttccactcgccaacccccctgtggctccgcaccctagagaaaagattataacgatagaggagactc

SEQ ID NO: 501845 - DNA, 120 bp, Artificial Sequence
  ENSG00000163781_33 (sequence is synthesized)
atgaagaattaaaaaaacagtacatatttcagttatcatctctgaatcctcaagaacgtattgactattgtcatctgattgagaaactaggtggattggtgatagaaaagcagtgctttg

SEQ ID NO: 501846 - DNA, 120 bp, Artificial Sequence
  ENSG00000163781_34 (sequence is synthesized)
atcccacctgtacacacattgttgtgggacatccacttcgaaacgagaagtatttagcctcagtggcagctgggaagtgggtgcttcatcgctcctaccttgaagcctgcaggactgctg

SEQ ID NO: 501847 - DNA, 120 bp, Artificial Sequence
  ENSG00000163781_35 (sequence is synthesized)
gacacttcgtgcaggaagaagactatgaatggggaagtagttccatacttgatgttctgactggaatcaatgtacagcaacgaagactagcacttgcagcaatgagatggagaaaaaaaa

SEQ ID NO: 501848 - DNA, 120 bp, Artificial Sequence
  ENSG00000163781_36 (sequence is synthesized)
tccagcaaagacaagaatctggcattgttgagggagcatttagtgggtggaaggttattttacatgtggatcagtctcgagaagcaggcttcaaacgccttcttcagtcaggaggagcaa

SEQ ID NO: 501849 - DNA, 120 bp, Artificial Sequence
  ENSG00000163781_37 (sequence is synthesized)
aggtgctacctggtcattctgtacctttatttaaagaggccacacatcttttttctgacttgaataaactgaaaccagatgactcaggagttaatatagcagaagctgctgcccagaacg

SEQ ID NO: 501850 - DNA, 120 bp, Artificial Sequence
  ENSG00000163781_38 (sequence is synthesized)
tgtactgcttgagaacagaatacattgctgattatctcatgcaggaatcacctcctcatgtagaaaattactgtctaccagaagctatttcatttattcagaataataaggaacttggga

SEQ ID NO: 501851 - DNA, 120 bp, Artificial Sequence
  ENSG00000163781_39 (sequence is synthesized)
ctggattatcacaaaagaggaaagctcctacagaaaaaaataaaatcaaacgacctagagtacactaatcgcatctaccctttagttaccaaacattaaatgtttttaaaaattgaaagc

SEQ ID NO: 501852 - DNA, 120 bp, Artificial Sequence
  ENSG00000163781_40 (sequence is synthesized)
ctgaatgtgactgtgatagatttgggtagtaatttaaagatgagtacctgaagaattctgcttcagagtataatgatgacccttcttgagttttgaacacctgaaattgtaatcactgaa

SEQ ID NO: 501853 - DNA, 120 bp, Artificial Sequence
  ENSG00000163781_41 (sequence is synthesized)
atattaactgtttcttaataaaaagttacctgaaataacaacaaaatacaactcctcagctagcttgctgttaaaccacattgaagtctgttaaaagatatttatttttcttgtaaatat

SEQ ID NO: 501854 - DNA, 120 bp, Artificial Sequence
  ENSG00000163781_42 (sequence is synthesized)
ctgaagctgtagcttagtggaaattttagcaaggtaatggattttgctttaaaatgtctgccttacaaattcataacaacaagatttgtcagtcagcatttattcatgttttccctgatt

SEQ ID NO: 501855 - DNA, 120 bp, Artificial Sequence
  ENSG00000163781_43 (sequence is synthesized)
tttatcttctcaccattttacctcttttaacaggagcctgagcacaaggtttaatgaggaagctggggctataaatatgtgtgtatatatgtatatgtatgtttgtacaaatctccatga

SEQ ID NO: 501856 - DNA, 120 bp, Artificial Sequence
  ENSG00000163781_44 (sequence is synthesized)
tgtttgccaagtttgaatgcgcaaaacttggaaaatgtgacaataaagaataaaagtagtaactcaaattagtattaagatgtgtttacatagataaattttttaaaagagcaccctggc

SEQ ID NO: 501857 - DNA, 120 bp, Artificial Sequence
  ENSG00000163781_45 (sequence is synthesized)
catagataaattttttaaaagagcaccctggcatctgttcttctgttgaagcaacaaaacatttatgtaacgtaaaaaatgaattgcaggggcctgggtgcggtggctcgtgcctgtaat

SEQ ID NO: 501858 - DNA, 120 bp, Artificial Sequence
  ENSG00000163781_46 (sequence is synthesized)
ctaccacctactagccgtgtgcccttgaacccatcatttaacttcctccgtttttacatctacaaaatggaactaccactatttgcctcacggaattgttttggataataccttttcccg

SEQ ID NO: 501859 - DNA, 120 bp, Artificial Sequence
  ENSG00000163781_47 (sequence is synthesized)
tgcatgcctggtataagacaggtgtaaaataaatatctattgaggaaatcctttctttccctggcttttttaacagtaaaggagtattcctggcctgtggtcctacctcttgaaccgacg

SEQ ID NO: 501860 - DNA, 120 bp, Artificial Sequence
  ENSG00000163781_48 (sequence is synthesized)
gcgctgggcctactcgcagcggagactaggcccgcccagcaaagccctaaacccaaagggtccggcccaagctttccctgaagccccaccgcccacagactgctcacctccacgtttgac

SEQ ID NO: 501861 - DNA, 120 bp, Artificial Sequence
  ENSG00000163781_49 (sequence is synthesized)
tactgcttgagaacagaatacattgctgattatctcatgcaggtaggaatcctcaacctgtgcctaggattcagcaacaaaccacctggaacacatggtcccttagcacttgaagaggtt

SEQ ID NO: 501862 - DNA, 120 bp, Artificial Sequence
  ENSG00000163781_50 (sequence is synthesized)
gattaaatgaggtcataagaatgagtccctaacccaccaggactagtgtcctggtaagaagagggaggcacaccaggagtttgccggcacggaggaaaagccctgtgaggacacggggag

SEQ ID NO: 501863 - DNA, 120 bp, Artificial Sequence
  ENSG00000163781_51 (sequence is synthesized)
ggacacggggagggcagctatctgtttacacaccaggaagaaatgtctcaccagataccaaccctggccgtctcctggattttggatttccaatctccagaactgtgagaaaataaattt

SEQ ID NO: 501864 - DNA, 120 bp, Artificial Sequence
  ENSG00000163781_52 (sequence is synthesized)
acagtactcaattatactcagatttagtatttacactgttaaggactgagcttgtccccctaaaattcacaggttaaagcctaacctgctatgtgactgtagacagagcctttataaggg

SEQ ID NO: 501865 - DNA, 120 bp, Artificial Sequence
  ENSG00000163781_53 (sequence is synthesized)
tttattgttattattgtcacatgcagatgggatgcatttatttataagttctggggataggatacttttttgcctgtactttttacattccagagtttgtgcttgacttcatcttgacta

SEQ ID NO: 501866 - DNA, 120 bp, Artificial Sequence
  ENSG00000163781_54 (sequence is synthesized)
tttcaaaagcctttacatgattcagaaattgctaaacagggtaacaagaaagaaatctttgcatttgtttgtattaagtacatgttgacctcttaaaaataaacagatgagcatgttgta

SEQ ID NO: 501867 - DNA, 120 bp, Artificial Sequence
  ENSG00000163781_55 (sequence is synthesized)
ttctgtttcatggtgatatgactgaaatttataaggaaacctaaagctattgtgagcatctacaagaatacatttattttgtttcatgcatctttatctacaaaatctctccagttgatt

SEQ ID NO: 501868 - DNA, 120 bp, Artificial Sequence
  ENSG00000163781_56 (sequence is synthesized)
tttaatttaccacatctgttgaaaatagcctctcacatatcaattcactcttatatgtatataatgtatattttttagggtatgcacaacaaatattggagagcctattttatgccacta

SEQ ID NO: 501869 - DNA, 80 bp, Artificial Sequence
  ENSG00000163785_0 (sequence is synthesized)
ggccggagttgcctcccgggggcccgcggcctgagggccccgccgccgccgccgctgctgcttctgcttgcgctgttgcc

SEQ ID NO: 501870 - DNA, 120 bp, Artificial Sequence
  ENSG00000163785_1 (sequence is synthesized)
cggcccccggagctgcagtcggcttccgcggggcccagcgtgagtctctacctgagcgaggacgaggtgcgccggctgatcggtcttgatgcagaactttattatgtgagaaatgacctt

SEQ ID NO: 501871 - DNA, 120 bp, Artificial Sequence
  ENSG00000163785_2 (sequence is synthesized)
attagtcactacgctctatcctttagtctgttagtacccagtgagacaaatttcctgcacttcacctggcatgcgaagtccaaggttgaatataagctgggattccaagtggacaatgtt

SEQ ID NO: 501872 - DNA, 120 bp, Artificial Sequence
  ENSG00000163785_3 (sequence is synthesized)
ttggcaatggatatgccccaggtcaacatttctgttcagggggaagttccacgcactttatcagtgtttcgggtagagctttcctgtactggcaaagtagattctgaagttatgatacta

SEQ ID NO: 501873 - DNA, 120 bp, Artificial Sequence
  ENSG00000163785_4 (sequence is synthesized)
atgcagctcaacttgacagtaaattcttcaaaaaattttaccgtcttaaattttaaacgaaggaaaatgtgctacaaaaaacttgaagaagtaaaaacttcagccttggacaaaaacact

SEQ ID NO: 501874 - DNA, 120 bp, Artificial Sequence
  ENSG00000163785_5 (sequence is synthesized)
agcagaactatttatgatcctgtacatgcagctccaaccacttctacgcgtgtgttttatattagtgtaggggtttgttgtgcagtaatatttctcgtagcaataatattagctgttttg

SEQ ID NO: 501875 - DNA, 120 bp, Artificial Sequence
  ENSG00000163785_6 (sequence is synthesized)
caccttcatagtatgaaaaggattgaactggatgacagcattagtgccagcagtagttcccaagggctgtctcagccatccacccagacgactcagtatctgagagcagacacgcccaac

SEQ ID NO: 501876 - DNA, 120 bp, Artificial Sequence
  ENSG00000163785_7 (sequence is synthesized)
aatgcaactcctatcaccagctccttaggttatcctaccttgcggatagagaagaacgacttgagaagtgtcactcttttggaggccaaaggcaaggtgaaggatatagcaatatccaga

SEQ ID NO: 501877 - DNA, 120 bp, Artificial Sequence
  ENSG00000163785_8 (sequence is synthesized)
gagaggataactctaaaagatgtactccaagaaggtacttttgggcgtattttccatgggattttaatagatgaaaaagatccaaataaagaaaaacaagcatttgtcaaaacagttaaa

SEQ ID NO: 501878 - DNA, 120 bp, Artificial Sequence
  ENSG00000163785_9 (sequence is synthesized)
gatcaagcttctgaaattcaggtgacaatgatgctcactgaaagttgtaagctgcgaggtcttcatcacagaaatcttcttcctattactcatgtgtgtatagaagaaggagaaaagccc

SEQ ID NO: 501879 - DNA, 120 bp, Artificial Sequence
  ENSG00000163785_10 (sequence is synthesized)
atggtgatattgccttacatgaattgggggaatcttaaattgtttttacgacagtgcaagttagtagaggccaataatccacaggcaatttctcagcaagacctggtacacatggctatt

SEQ ID NO: 501880 - DNA, 120 bp, Artificial Sequence
  ENSG00000163785_11 (sequence is synthesized)
caggaactgtgtcattgatgacacacttcaagttaagatcacagacaatgccctctccagagacttgttccccatggactatcactgtctgggggacaatgaaaacaggccagttcgttg

SEQ ID NO: 501881 - DNA, 120 bp, Artificial Sequence
  ENSG00000163785_12 (sequence is synthesized)
gatggctcttgaaagtctggttaataacgagttctctagcgctagtgatgtgtgggcctttggagtgacgctgtgggaactcatgactctgggccagactccctacgtggacattgaccc

SEQ ID NO: 501882 - DNA, 120 bp, Artificial Sequence
  ENSG00000163785_13 (sequence is synthesized)
cttcgagatggccgcatacctgaaagatggttaccgaatagcccagccaatcaactgtcctgatgaattatttgctgtgatggcctgttgctgggccttagatccagaggagaggcccaa

SEQ ID NO: 501883 - DNA, 120 bp, Artificial Sequence
  ENSG00000163785_14 (sequence is synthesized)
gtttcagcagctggtacagtgcctaacagagtttcatgcagccctgggggcctacgtctgactcctctccaatcccacaccatcaggaagaaggtgcctgtcggggctcacttgaagcct

SEQ ID NO: 501884 - DNA, 120 bp, Artificial Sequence
  ENSG00000163785_15 (sequence is synthesized)
gtcagggatgctttgtatctaacacaacgccaacagaagcacatttgtcttccagaacaccgtgccttagaaatgctttagaatctgaactttttaagacagacttaataatgtggcata

SEQ ID NO: 501885 - DNA, 120 bp, Artificial Sequence
  ENSG00000163785_16 (sequence is synthesized)
ttttctagatatcacttttattaggttgaactgaaagggtttttgtaaattttttggccaaaattttttaaaacatacttactttggactaggggtacattcttacaaaataaataaaca

SEQ ID NO: 501886 - DNA, 120 bp, Artificial Sequence
  ENSG00000163785_17 (sequence is synthesized)
gtttttaaaattgtttagacacagatatttggaattagctatcttagtgccaactgctttttatttttttacttcatcaaggtgatgtaagtgactcacctttaaagtttttttagtgtt

SEQ ID NO: 501887 - DNA, 120 bp, Artificial Sequence
  ENSG00000163785_18 (sequence is synthesized)
attttttatcactactctgggaaatggtttgtcttcaagatgcaatacttttcttagtaaaggaaaaacagcataaaaagatacctggtctgccttgtacaagaaaaggcaatattagag

SEQ ID NO: 501888 - DNA, 120 bp, Artificial Sequence
  ENSG00000163785_19 (sequence is synthesized)
gaagaaaatttaaagaaaagctagaggaaaaaaaaatttttttaaaaatacttattagaagcaaactgcccttgcatggaaaactgtttatttttttcagtgaaaaggaattctgctttc

SEQ ID NO: 501889 - DNA, 120 bp, Artificial Sequence
  ENSG00000163785_20 (sequence is synthesized)
gtgtttttgggaaagcaggaactgagttcattacatctttaatttggcagaaattagcctttctgtgaaccagatgtggtttggggcagatctgtagtaaacaatggtgattttatttat

SEQ ID NO: 501890 - DNA, 120 bp, Artificial Sequence
  ENSG00000163785_21 (sequence is synthesized)
ttttactctctggaaaaggagataatacaattccagaaagtgaactcatatttctaaggttaagattcccttttattgcacctagaatagtgctatgcacagagcgggtgcttgagttgt

SEQ ID NO: 501891 - DNA, 120 bp, Artificial Sequence
  ENSG00000163785_22 (sequence is synthesized)
tgtcgttttttgtttgttttttaaatgtaaactggtaaattttgtgcttatcttcaaggctggcttaagtataaaattgttttttaaacacttgaaaaattaaaggatttgttttatatt

SEQ ID NO: 501892 - DNA, 120 bp, Artificial Sequence
  ENSG00000163785_23 (sequence is synthesized)
ggagggccctcttggctgctcttctgactccaacagctggatgaagcctattcttgtcctacaggagccccactggaagtgaataagctcagttgccatatttggaccaaaattctcaca

SEQ ID NO: 501893 - DNA, 120 bp, Artificial Sequence
  ENSG00000163785_24 (sequence is synthesized)
cctcaaacgagaggcagagtccctcaagcctttgtacaatgccaccaagggtgctgccccttcttcaacagaacgtcctccttgcagggaggctgcagtgatgtcagagatgaatcacag

SEQ ID NO: 501894 - DNA, 120 bp, Artificial Sequence
  ENSG00000163785_25 (sequence is synthesized)
gccagaggtgagagctggagaaagggaaactctcccagtccctgggagtggtcattacagactgggaaatcgctctccagctgatggtaaaggactgcaaatcctattcatgtgactcag

SEQ ID NO: 501895 - DNA, 120 bp, Artificial Sequence
  ENSG00000163785_26 (sequence is synthesized)
ggcctggtgtgccttctgggaagaaagcagaagagggttcctaactgtagaagggaaaagtttccctttattcttccagccacgtggttcaataagcatgtacaagctcttaccagggcc

SEQ ID NO: 501896 - DNA, 120 bp, Artificial Sequence
  ENSG00000163785_27 (sequence is synthesized)
aggcactgtgcgggcaccagaaacattaagatggaatgacacaggtctgccctggaagaaacattaagatggaatgacacaggtctgccctggaagggctcctttccagggctcagggac

SEQ ID NO: 501897 - DNA, 120 bp, Artificial Sequence
  ENSG00000163785_28 (sequence is synthesized)
tctgtgactccttttggggagcagagttgtggacaagagtgcatttttctagagagatggtccacaagccatccagagccaggctctgtctccaggtacccttgatccttggagacctcc

SEQ ID NO: 501898 - DNA, 120 bp, Artificial Sequence
  ENSG00000163785_29 (sequence is synthesized)
agattaaaatatcagtattggaacatcatgaattattgtgatctccgtaaggattttaggctggttttaatggctatgtgcattttgtatgtatggaaaaaggaaatttctcattgaaac

SEQ ID NO: 501899 - DNA, 120 bp, Artificial Sequence
  ENSG00000163785_30 (sequence is synthesized)
ttattgatttatatgagctatttaaataggaaaaaaggaagttagcagtatatatgccttatgtgttgcatatgtttttccagtctgttattgcattttctgctttgtttatggaaactt

SEQ ID NO: 501900 - DNA, 120 bp, Artificial Sequence
  ENSG00000163785_31 (sequence is synthesized)
aattgattttaatataaaaatttctgggaaaattgacctatttaatgagactgcagtagaatttttatctagatctatttagatttacctgtaacttataatgaaaacctatgtacctta

SEQ ID NO: 501901 - DNA, 120 bp, Artificial Sequence
  ENSG00000163785_32 (sequence is synthesized)
ggttatctctgttggaagatgtttataggcttctgaaaaaatatagtttctgtatactttagacagttccttgagttctgctgaaaaataaggtgactacccagagccttacttttaaat

SEQ ID NO: 501902 - DNA, 120 bp, Artificial Sequence
  ENSG00000163785_33 (sequence is synthesized)
ttagttatattttggttcatattcagaaggatttgaggacctaaaaagaaggcagccacagtaagataaataaaatggtaatgaaaaagaaactgagttttttggcattgtggtggtaaa

SEQ ID NO: 501903 - DNA, 120 bp, Artificial Sequence
  ENSG00000163785_34 (sequence is synthesized)
aaagaaaacaaatgagccagcagtaaggagaacaaatatttttactgtgactgaacataaaacacctcctagcttctcggcaaccaagggtgaaggaaacactaaaagttgataatctca

SEQ ID NO: 501904 - DNA, 120 bp, Artificial Sequence
  ENSG00000163785_35 (sequence is synthesized)
gtagcagaagggaaagaaacagttggaatattgtcctttttggcagtgttgaaagtgcttaatggtctattacactgactctagggagaagggccaaaggtgtttaatcctagtatataa

SEQ ID NO: 501905 - DNA, 120 bp, Artificial Sequence
  ENSG00000163785_36 (sequence is synthesized)
tgttaacctattacttagatacctagccaatgttcttaccccagtgaaaggtttgcatcacttcagcacagaagtgagtagcagggataaatgtagacaaagccaggattttcccaagaa

SEQ ID NO: 501906 - DNA, 120 bp, Artificial Sequence
  ENSG00000163785_37 (sequence is synthesized)
acggttttatattcactgtagccttaaagatgtcttggctgaaaaatgctcagagcaagcatttgcagtgttgtgtctcatgcagttttagattgtaaggttttgcagcatcccatcagg

SEQ ID NO: 501907 - DNA, 120 bp, Artificial Sequence
  ENSG00000163785_38 (sequence is synthesized)
atgaattagcagtctcaggaggtccttagggaattgaatgacattacatactaaattggggttatttgatactgagcattcagtccttgaggaaagtcttgtaaaggtaggttatagctt

SEQ ID NO: 501908 - DNA, 120 bp, Artificial Sequence
  ENSG00000163785_39 (sequence is synthesized)
gattatgcttaattgttcttccttctatgaggtgatagcaggagtcctagttacaatgaataaaacacattgtcagcatgtagaaagtatattattctttccattcattgtagcagttca

SEQ ID NO: 501909 - DNA, 120 bp, Artificial Sequence
  ENSG00000163785_40 (sequence is synthesized)
tttcatttttaaggtgaccagggcctatcacacattttgttttgatccttaatatgtatagactgttcatagctatacttatgtatttgtttgttcattcttttattctaattcattcag

SEQ ID NO: 501910 - DNA, 120 bp, Artificial Sequence
  ENSG00000163785_41 (sequence is synthesized)
tacccattttgcacttggaactgtgttaggcagaatgaaaatgaaatgatcttcagagatcgtattatagaatttatcaagcaacagaatatagaatttattcagcaagaaaagacacct

SEQ ID NO: 501911 - DNA, 120 bp, Artificial Sequence
  ENSG00000163785_42 (sequence is synthesized)
gtttttagattttaccttgtggtatgtaatacagcatgtttgcttcatgttttaacatccatggttacggattgtacgcgtattgaagtgttttaaagcattttgaaatcctttcttttc

SEQ ID NO: 501912 - DNA, 120 bp, Artificial Sequence
  ENSG00000163785_43 (sequence is synthesized)
acacatttttccactggaatttatgaaaataattttattaaaagttaaaatagctgtatacataaaagatattaacctattttaatttcattagaagtgcttcacatcaaagtactcttg

SEQ ID NO: 501913 - DNA, 120 bp, Artificial Sequence
  ENSG00000163785_44 (sequence is synthesized)
cgctatttctgcttgtagtttggccccttcattggcccaaagatgcctgatggtgaacacttcttatgccaaatggctcacagctctccctctgcaaacgccctcaacaagactgagaat

SEQ ID NO: 501914 - DNA, 120 bp, Artificial Sequence
  ENSG00000163785_45 (sequence is synthesized)
tagaggcagttcttgtgccaagccccacagaacctacccttcctgtaccttctttcttcactatagcatctcctgctttcattcactcttcttagagatccagaccttccccttcatcct

SEQ ID NO: 501915 - DNA, 120 bp, Artificial Sequence
  ENSG00000163785_46 (sequence is synthesized)
ccttttcattacaagatgggcagaatgaaaaacagccatttgtactttgaaacattttcatgaagtttgttagctctaccagtggatttttaatcctgtggtagtggaataaaagatttg

SEQ ID NO: 501916 - DNA, 120 bp, Artificial Sequence
  ENSG00000163785_47 (sequence is synthesized)
acttcacccagcaaacctaatggataaaatgtctttaactctgctaaatgaatttcagtcacaaagaaagaaacagaagtaatctttggtgagttaaatagattgggcaacagtgtttaa

SEQ ID NO: 501917 - DNA, 120 bp, Artificial Sequence
  ENSG00000163785_48 (sequence is synthesized)
tggtatgcccaagttaatccttagtgtaaacctgtagtcattttagtattcatgggagttggtggaaaggaagctctgtaatctcccatgtgatctcccttgctcctctggagagaaagt

SEQ ID NO: 501918 - DNA, 120 bp, Artificial Sequence
  ENSG00000163785_49 (sequence is synthesized)
ctagtggtccaggggaatgcaaagggtattgaatcagatgaagatctgatatttttctccgtgtacttgctctttgtccttggcaggttacctaaactttctctcccagcgtggatttcc

SEQ ID NO: 501919 - DNA, 120 bp, Artificial Sequence
  ENSG00000163785_50 (sequence is synthesized)
ttgcatataaagtggaactcctaatcgctgccacttgagcggttatagagaggttgcctcttagaggtttactgatctttaagtcctcattttcccacctcctcagggtcagtgctttcc

SEQ ID NO: 501920 - DNA, 120 bp, Artificial Sequence
  ENSG00000163785_51 (sequence is synthesized)
atgttagtaactcctgcaaatatgaggggagcgcacagctttgccacttgtgcattggtgattgtgccacggttttataactggggtttaaaaagtgatacatgctcaattaagacaatt

SEQ ID NO: 501921 - DNA, 120 bp, Artificial Sequence
  ENSG00000163785_52 (sequence is synthesized)
tttaggaaatacagaaaacaaagctgaaattatctatagtcttacaacttaaagacaactcttaactctttgcatatttccatgcagacctttattatttttctccatttttataattat

SEQ ID NO: 501922 - DNA, 120 bp, Artificial Sequence
  ENSG00000163785_53 (sequence is synthesized)
catccttagaagcaggatttgccaagttaaggagtaggaatgttttaaggctatttgttactgttatttgttattaaatgtttgttttatatagcatagattacgaagtgttgggtataa

SEQ ID NO: 501923 - DNA, 120 bp, Artificial Sequence
  ENSG00000163785_54 (sequence is synthesized)
aaattgagtttaccttagtttttgtcttctagcaatttttagcttagtggggaagatgatataattatgtaaaaagttacataaccttgggaaaaattagcagttatttccagatgtcag

SEQ ID NO: 501924 - DNA, 120 bp, Artificial Sequence
  ENSG00000163785_55 (sequence is synthesized)
tggaggaggtgttattagacagtaggatgaaatgtatgtatgtatgccatagaaattaaaataggaacgggattgtccactacatgcttggttttattttgcacatcacagcaacctttt

SEQ ID NO: 501925 - DNA, 120 bp, Artificial Sequence
  ENSG00000163785_56 (sequence is synthesized)
atggttggtggggtccctatgttataagaatggaaaccaaagccaagagaagatggtcactctgatagtaattggtaaatctaggattcaaaaatctgattctaaatccagtgtgaccag

SEQ ID NO: 501926 - DNA, 120 bp, Artificial Sequence
  ENSG00000163785_57 (sequence is synthesized)
ctaagaactttttggcttttgtggcagtttcagccttttagagaccttttttgatgatcatattcttgaccaccgtctggattgggccttttttttttttcatgtgtgataatggagtaa

SEQ ID NO: 501927 - DNA, 120 bp, Artificial Sequence
  ENSG00000163785_58 (sequence is synthesized)
gtgggatattgttatcataatacactcatgggcaagtcagtttttagatgtctctgattaattgccctttggagtaaagatatagtgtggttagagtgtgccttcagagaatccagccca

SEQ ID NO: 501928 - DNA, 120 bp, Artificial Sequence
  ENSG00000163785_59 (sequence is synthesized)
caggaagcaactttgagtttatgatttttccctaccaagaatgtgcatatatggggatatatgcacatatataggggacacttaagtctggtttaaaatacagaacacttataattttac

SEQ ID NO: 501929 - DNA, 120 bp, Artificial Sequence
  ENSG00000163785_60 (sequence is synthesized)
atttttaatggtaatcatgtttttaagtattttggggattttgttttgttttagattatttttattagaagtaagcccctaacattttggattcctttgtctttctcccaattttttatt

SEQ ID NO: 501930 - DNA, 120 bp, Artificial Sequence
  ENSG00000163785_61 (sequence is synthesized)
gatgcacagtggtgcagggaaaggagggaggatgattaagccccagccaaaggaaaaataagatgacctaatcactgtctctggtttctctgattttatttttattttttaaaaattaag

SEQ ID NO: 501931 - DNA, 120 bp, Artificial Sequence
  ENSG00000163788_0 (sequence is synthesized)
agctacccggcaccccctccccgcggccggcagcccgctcggtattatgattagcgctgggtgcggggtttcggcggccgggagggagttgtcggcgccgcggccgctgcggacggacgc

SEQ ID NO: 501932 - DNA, 120 bp, Artificial Sequence
  ENSG00000163788_1 (sequence is synthesized)
tcgcctgccggctgaggaaaaagaagcaactaacaaaacactgtgataataaggattattcagtatgcagtttgcaggatatccatgacgacattgaaaatgaattttttgtattcacca

SEQ ID NO: 501933 - DNA, 120 bp, Artificial Sequence
  ENSG00000163788_2 (sequence is synthesized)
gatattcttatatgagaagatctattttaaacagtctaaatattttttcttctgttggaccagcatggcaggatttaagcgagggtatgatggaaagattgctggattatatgatctgga

SEQ ID NO: 501934 - DNA, 120 bp, Artificial Sequence
  ENSG00000163788_3 (sequence is synthesized)
taaaaccttgggtcgaggccattttgccgtggttaaacttgccaggcatgtctttacgggtgaaaaggtggcagtaaaagttattgacaagacaaaactggacactctagctactggtca

SEQ ID NO: 501935 - DNA, 120 bp, Artificial Sequence
  ENSG00000163788_4 (sequence is synthesized)
tcttttccaggaagtgagatgcatgaaactagtgcagcatcctaacatcgtccgcctttatgaagttattgacacccagaccaaactatatcttattctagaacttggggatggaggaga

SEQ ID NO: 501936 - DNA, 120 bp, Artificial Sequence
  ENSG00000163788_5 (sequence is synthesized)
tatgtttgattatataatgaaacatgaggagggtcttaatgaagacttggccaagaagtattttgctcagatagttcatgctatatcttattgccataaactccatgtggttcacagaga

SEQ ID NO: 501937 - DNA, 120 bp, Artificial Sequence
  ENSG00000163788_6 (sequence is synthesized)
cttaaaaccagagaatgtagtcttctttgaaaaacaaggtcttgtaaagttgacagactttgggttcagcaacaaatttcaaccagggaagaagctcactacaagctgtggatctcttgc

SEQ ID NO: 501938 - DNA, 120 bp, Artificial Sequence
  ENSG00000163788_7 (sequence is synthesized)
atattccgctccagaaattctgcttggtgatgagtatgatgcacctgcagtagatatttggagtctgggagtgatccttttcatgttggtgtgtgggcagccgccctttcaagaagccaa

SEQ ID NO: 501939 - DNA, 120 bp, Artificial Sequence
  ENSG00000163788_8 (sequence is synthesized)
tgacagtgaaacactgacaatgatcatggattgcaaatatacagtaccatcccatgtgtctaaagagtgtaaagacctaatcacacggatgctacagagagatcccaagagaagggcttc

SEQ ID NO: 501940 - DNA, 120 bp, Artificial Sequence
  ENSG00000163788_9 (sequence is synthesized)
tttagaagagattgaaaatcatccttggcttcagggagtggacccttcaccagctacaaagtataacattccccttgtgtcatacaaaaatctctcggaagaggagcacaacagcatcat

SEQ ID NO: 501941 - DNA, 120 bp, Artificial Sequence
  ENSG00000163788_10 (sequence is synthesized)
tcagcgcatggtgcttggggacatagcggatcgagacgccattgtagaagccctggaaaccaacaggtataaccatatcacagccacatacttcctgctggctgaaaggatcctgagaga

SEQ ID NO: 501942 - DNA, 120 bp, Artificial Sequence
  ENSG00000163788_11 (sequence is synthesized)
aaagcaagagaaagaaatacagaccagatctgcaagcccgagcaatatcaaggcccagtttaggcagtcatggccaaccaaaattgatgtaccccaggaccttgaggatgacctcacggc

SEQ ID NO: 501943 - DNA, 120 bp, Artificial Sequence
  ENSG00000163788_12 (sequence is synthesized)
cactcctttgtcccacgcgactgtccctcagtctcctgctcgggctgctgacagtgtcctcaatggccacaggagcaaaggcctgtgtgactcagctaagaaagatgacctccctgagtt

SEQ ID NO: 501944 - DNA, 120 bp, Artificial Sequence
  ENSG00000163788_13 (sequence is synthesized)
ggctggaccagcactctctacggtgccacccgcaagcttaaaacccacagccagtgggcggaagtgtctgttcagggtggaagaagatgaagaggaagatgaggaggacaagaaacccat

SEQ ID NO: 501945 - DNA, 120 bp, Artificial Sequence
  ENSG00000163788_14 (sequence is synthesized)
gtccctctcaacacaagtggttttgcgccggaagccatctgtaaccaaccgcctgacatccaggaagagtgcgcccgtcctcaaccagatctttgaggaaggggaatctgacgatgagtt

SEQ ID NO: 501946 - DNA, 120 bp, Artificial Sequence
  ENSG00000163788_15 (sequence is synthesized)
tgacatggatgagaatctgcctcccaagttgagcaggttaaagatgaatatagcttctccaggtacagttcacaaacgctaccaccggaggaaaagtcagggccggggctccagctgcag

SEQ ID NO: 501947 - DNA, 120 bp, Artificial Sequence
  ENSG00000163788_16 (sequence is synthesized)
tagttcggagaccagtgatgatgattctgaaagccggcggcggctcgataaagatagcgggttcacctactcctggcaccgacgggatagcagcgaggggccccctggcagtgaggggga

SEQ ID NO: 501948 - DNA, 120 bp, Artificial Sequence
  ENSG00000163788_17 (sequence is synthesized)
tggcgggggccagagcaagccaagcaatgccagtggaggggtggacaaggccagccccagtgagaacaatgctggtgggggcagtccctccagcggctcgggtggcaaccccaccaatac

SEQ ID NO: 501949 - DNA, 120 bp, Artificial Sequence
  ENSG00000163788_18 (sequence is synthesized)
atcgggtaccacacgccgctgtgccggccccagcaactccatgcagctggcctctcgcagtgctggggagctcgttgagagcctcaaactcatgagcctctgcctcggctcccagcttca

SEQ ID NO: 501950 - DNA, 120 bp, Artificial Sequence
  ENSG00000163788_19 (sequence is synthesized)
tgggagcaccaagtacattattgatccacagaatggcttgtcattttccagtgtgaaagtccaagagaaatctacgtggaaaatgtgcattagctccacagggaatgcagggcaggtccc

SEQ ID NO: 501951 - DNA, 120 bp, Artificial Sequence
  ENSG00000163788_20 (sequence is synthesized)
tgcagtgggcggcataaagtttttctctgaccacatggcagataccaccactgaattggaacggataaagagcaagaacctgaaaaataacgtgctgcagctacctctgtgcgaaaagac

SEQ ID NO: 501952 - DNA, 120 bp, Artificial Sequence
  ENSG00000163788_21 (sequence is synthesized)
aaggaggggctgctgtgcgcatccagcccagccagctgttgccatgtcatctgactgtggccccatctggccgctagcacgcttcctgctcagagcagtgaagaccggctcacttcactg

SEQ ID NO: 501953 - DNA, 120 bp, Artificial Sequence
  ENSG00000163788_22 (sequence is synthesized)
ttccatttggttttactattttaaagtgggcgttaggagcaattatttattacctttccatttgttcgcctgatgatgtgacaatgcatggtctttgtgcatgctgctagacacttttct

SEQ ID NO: 501954 - DNA, 120 bp, Artificial Sequence
  ENSG00000163788_23 (sequence is synthesized)
ttcccagccgaaaagcctattatgtaatttttacattcataattttaatgtggatgatcaggattaaatcaagatatatatctggaacctcttataaatggagcacttagaaatttgttg

SEQ ID NO: 501955 - DNA, 120 bp, Artificial Sequence
  ENSG00000163788_24 (sequence is synthesized)
ttctgcacttaacctagagagagaaaaaatgcttttctttgtgaaaaatctgaattcctgtcctgaccttctgtgatgtggaaaccctaggctctgagacacactctctggtgtctgaga

SEQ ID NO: 501956 - DNA, 120 bp, Artificial Sequence
  ENSG00000163788_25 (sequence is synthesized)
cagaaccaaagcaataacgttgtgatgcccacaggcctggagccagctagcgaccttgtgccgcccagctgtccatggcccgtgcagagcagaggacagtgagtgtctgcactgagaacc

SEQ ID NO: 501957 - DNA, 120 bp, Artificial Sequence
  ENSG00000163788_26 (sequence is synthesized)
ttaaaccacagttgaacatacccacacctgtttgtcttaagctatagtgtaaaaacaaagtttgggctctgaaaatttaactgaaaaagatttccttgtttttgtaataggtgagataaa

SEQ ID NO: 501958 - DNA, 120 bp, Artificial Sequence
  ENSG00000163788_27 (sequence is synthesized)
gtacttagatttataaggcagcttcccctgtagtgataaattacaagcagacaatcttattttgtaatgtgatgaagtgatgatgtcttaactctacttagagagtgtatgtctgtctaa

SEQ ID NO: 501959 - DNA, 120 bp, Artificial Sequence
  ENSG00000163788_28 (sequence is synthesized)
cagaacaaaaagatgctctgtgtaaattccttcctgtagggcacactgcaggatttccatgtagatagaagaactatagggcctagtacagaaggtgcacacaaatgttggcaaagtcaa

SEQ ID NO: 501960 - DNA, 120 bp, Artificial Sequence
  ENSG00000163788_29 (sequence is synthesized)
aaccccatgaattaaaacctactggaatttggtttttaggagtttggtaattagattatctcttttgttattttcattcagttatatcctttggctcagctagctttgaaattggctgat

SEQ ID NO: 501961 - DNA, 120 bp, Artificial Sequence
  ENSG00000163788_30 (sequence is synthesized)
gaaaaaatatacataaaagggtaaaattcacacatacagcaaacaaaaatgcacaaagcctgcttcgtaacttttttttctggaattgtttttcactttgcctttttctgccaaaacaat

SEQ ID NO: 501962 - DNA, 120 bp, Artificial Sequence
  ENSG00000163788_31 (sequence is synthesized)
aatcaaagaactcttgctttaacctattcctgtacaaagactgtttttgaccagataatcatctgttgtggcattctatcttgtaggacactgtatattgcaaattgctgattatggaag

SEQ ID NO: 501963 - DNA, 120 bp, Artificial Sequence
  ENSG00000163788_32 (sequence is synthesized)
gggccagttgctgttttttcatgcagtgccctgggagtcttaaaagcagtgcttagcaacattggtgatagcatgtggctgggacccagggcccttccccactcttcagccccgagtcat

SEQ ID NO: 501964 - DNA, 120 bp, Artificial Sequence
  ENSG00000163788_33 (sequence is synthesized)
gtgtctgaggtgacggactgagacgcatctggtcctgtaattcagagagtgggcacatcaccaaagaactgcattgctgtggtcactgtttcttcaagtacacactgactctgctacttt

SEQ ID NO: 501965 - DNA, 120 bp, Artificial Sequence
  ENSG00000163788_34 (sequence is synthesized)
aggataaatatattttactcagaactctgaatttcacagtatacttactaaactaagtaaaaatgatacttaaaatacttattttactttctagacctaggctagatgttttaagctaca

SEQ ID NO: 501966 - DNA, 120 bp, Artificial Sequence
  ENSG00000163788_35 (sequence is synthesized)
gctctagttcattgtgatatttataatttgaaagctatgagaatagatgtgtgggtgaagccatagaacatatttgcttgaaattcttgagcagggatcttataaagggccagaaataag

SEQ ID NO: 501967 - DNA, 120 bp, Artificial Sequence
  ENSG00000163788_36 (sequence is synthesized)
atgtgtggttcacatagatagtgagcgtaacatctgtattaaacataggagagaagtttataaagggcattggcaataaactctttgttgcagctgttttccaagcagtgtaaatacttt

SEQ ID NO: 501968 - DNA, 120 bp, Artificial Sequence
  ENSG00000163788_37 (sequence is synthesized)
ttcctgtgattatgtatagccttggaatggcaccttttaactaacccatatgtgtttggtttcaatggttttttatattcagatgtatatatggtgctcactttaggatcagcagtgttg

SEQ ID NO: 501969 - DNA, 120 bp, Artificial Sequence
  ENSG00000163788_38 (sequence is synthesized)
accatttatgctgcatagctgtattatagccttattagttgtgtggttgacccttggggtatacaaatgtcagtctgagtggtgtcttactcctttgtttataagtgaatgattgtgcat

SEQ ID NO: 501970 - DNA, 120 bp, Artificial Sequence
  ENSG00000163788_39 (sequence is synthesized)
gttttgtatgtcatagtatgtcgtcacataaaagggagggagcgaaaaaccattacattaagataatattggaccaaactacttacttgctctaaacagttacttgtaccccttaacctg

SEQ ID NO: 501971 - DNA, 120 bp, Artificial Sequence
  ENSG00000163788_40 (sequence is synthesized)
tcttcaaaagttgcatatagttacagtagtgtataaattaaatattgtggaaaaacagtcttgtatttttctgtatgtgtgtatatatatataattatgtacttctggcaattctatctg

SEQ ID NO: 501972 - DNA, 120 bp, Artificial Sequence
  ENSG00000163788_41 (sequence is synthesized)
tatttaaagatgtgacaatcttgacaccaattttaagaatagctgtgagaccgaattaaagataatccctaccaagtgaaaattgatgtgtgttaagagggtacagaattatcaactgat

SEQ ID NO: 501973 - DNA, 120 bp, Artificial Sequence
  ENSG00000163788_42 (sequence is synthesized)
ttggtcagttgcttccaatgctggttgatttccctcattgtgtaaacattgacaggtatgtgacaaatgggaaaaaaaatccaaataataaagtgacatattggtgttcagcaatataaa

SEQ ID NO: 501974 - DNA, 120 bp, Artificial Sequence
  ENSG00000163788_43 (sequence is synthesized)
ttaatttttgaatttaatatttctgctgttgtttcagagtgttcggtcggcgggggtgggggtggttagcccctgaatatgatctgaaatttaatattagagtacaaaatgtattcatct

SEQ ID NO: 501975 - DNA, 120 bp, Artificial Sequence
  ENSG00000163788_44 (sequence is synthesized)
atttcttattcaagaaatctattacatgcctcttcaaccttcaggagtggtggttatttcacttgaactgaagaaataccatgggaactacctttctctgcatgagcaaaaagcaagatc

SEQ ID NO: 501976 - DNA, 120 bp, Artificial Sequence
  ENSG00000163788_45 (sequence is synthesized)
acctggaattgttttaagttccagagaagagttagggcattttctttcctgaatagaccatcaacacactattttagggtttacatagtatgtctcataattttcttcacacaccttctg

SEQ ID NO: 501977 - DNA, 120 bp, Artificial Sequence
  ENSG00000163788_46 (sequence is synthesized)
ctaattgactaaagagctgtttaggtttatgtgactatgggaagccagcataaaaagtatactcaattatttggaatttaaagtagtacatagtactatgatatgtgtagtgagaaatat

SEQ ID NO: 501978 - DNA, 120 bp, Artificial Sequence
  ENSG00000163788_47 (sequence is synthesized)
agtaatggaatagaactgttggaagttcagtattgacattttaagtgacattttttaatgagctcagctgagattatagccactacttacaggactttgctgtagaaacagagttttgag

SEQ ID NO: 501979 - DNA, 120 bp, Artificial Sequence
  ENSG00000163788_48 (sequence is synthesized)
tttctcctatcagctggtaagaaggaaatctgattgcccaaggactttttttctctaaatgaagccccatctcaggtggatgtttaagaacttaggtattcaaggccgaggcaggcagat

SEQ ID NO: 501980 - DNA, 120 bp, Artificial Sequence
  ENSG00000163788_49 (sequence is synthesized)
tacttaacacagcctttggacacctgtgtaatagataagagttcccagttggcaagagttgtgtcatttatctctaaagttcttggcccagggcctgacacaggttttttttggtgtttt

SEQ ID NO: 501981 - DNA, 120 bp, Artificial Sequence
  ENSG00000163788_50 (sequence is synthesized)
atgattagcgctgggtgcggggtttcggcggccgggagggagttgtcggcgccgcggccgctgcggacggacgctcgcctgccggctgagatatttggagtctgggagtgatccttttca

SEQ ID NO: 501982 - DNA, 120 bp, Artificial Sequence
  ENSG00000163788_51 (sequence is synthesized)
tttttgcatttctgaggactgatggctccaccagattcaccaaccagtcctgtggccctcacccaggaactgactcagctgaagaagacagctttgactcactgtgatttcacctctgat

SEQ ID NO: 501983 - DNA, 120 bp, Artificial Sequence
  ENSG00000163788_52 (sequence is synthesized)
ccaattagtcggtactccccattccctggccccctacccaccaaactatccttgaaaaactctagtctgaatttttggggagactgatttgagtaataataaaactgctctcatgttcaa

SEQ ID NO: 501984 - DNA, 120 bp, Artificial Sequence
  ENSG00000163788_53 (sequence is synthesized)
attccagccattgaatttaacttgcttgtacttttaaaaatcaattctgcttcttgtaaaaaaacctcctgatatggctgacgtttgctctcaccttgttttcctcagagccctggaaac

SEQ ID NO: 501985 - DNA, 120 bp, Artificial Sequence
  ENSG00000163792_0 (sequence is synthesized)
gagttggcgccagcttcctcggatgtagatattgctggctggatgaccagccacagccagctagcttgagtccaaggcctcctcaggcactgtgtttctgctctgtgggctgcagcccca

SEQ ID NO: 501986 - DNA, 120 bp, Artificial Sequence
  ENSG00000163792_1 (sequence is synthesized)
gtggggtggcatgtcacagaggaaggccagagggccaccagccatgccaggggtggggcatagccagactcaggccaaagcacggttgctgccaggcgctgacaggaagaggagccgcct

SEQ ID NO: 501987 - DNA, 120 bp, Artificial Sequence
  ENSG00000163792_2 (sequence is synthesized)
cagcaggacaaggcaggacccgtgggaagaaagaagctggagcaaccagagatggagcagagctacccctggccctcgagggaccagggctgggggcctggctcttggcaggagcgaggc

SEQ ID NO: 501988 - DNA, 120 bp, Artificial Sequence
  ENSG00000163792_3 (sequence is synthesized)
cagtcctgagaatgccgcgcgggagcggagccgggtcaggacgctgcgccaggccttcttggccttgcaggctgctctgcctgccgtgccgcccgacaccaagctctccaagttggacgt

SEQ ID NO: 501989 - DNA, 120 bp, Artificial Sequence
  ENSG00000163792_4 (sequence is synthesized)
gctggtgctcgccgccagctacatagcccacctcacccgcacactcggccacgagttgcctggccctgcctggccgcccttcctgcgtggactccgctacttgcaccctctcaagaagtg

SEQ ID NO: 501990 - DNA, 120 bp, Artificial Sequence
  ENSG00000163792_5 (sequence is synthesized)
gccgatgcgatctcgtctctatgctggaggcctggggtactccgatcttgactccaccacagccagcacccccagccaaagaacaagagatgcagaggtggggtcccaagtccctggaga

SEQ ID NO: 501991 - DNA, 120 bp, Artificial Sequence
  ENSG00000163792_6 (sequence is synthesized)
ggcagatgctctcctttccaccacaccactctcaccagctcttggtgacaaataattatcacactcgcccttttctcctagactgtgactcatgcttatgggcctggattttctaccagc

SEQ ID NO: 501992 - DNA, 120 bp, Artificial Sequence
  ENSG00000163792_7 (sequence is synthesized)
ccccagattctcagccatcagacttgactcagactcagctcccaagttccagcatgcagaccaagagaagcagtagcacttctgtgatggacagtacctagaggggcacaggttggagag

SEQ ID NO: 501993 - DNA, 120 bp, Artificial Sequence
  ENSG00000163792_8 (sequence is synthesized)
cctcctccttggtccccaggaggggacttccccatggctcttctgtgacagctactgggaagtgggagagaaagaggtataattgggctcaaagttgaggtagggaaccaccctagcttt

SEQ ID NO: 501994 - DNA, 120 bp, Artificial Sequence
  ENSG00000163792_9 (sequence is synthesized)
cttcccctaaggtttctacaaaccctctgcagatagcaaaaaggcaggtgcagagggaggggcctgggatggcaccagccccaggtgctgatgggaaagccaggtggccggataggctcc

SEQ ID NO: 501995 - DNA, 120 bp, Artificial Sequence
  ENSG00000163792_10 (sequence is synthesized)
tggtagctccaagtgtaaacagatctgggctgggtcacacagccagaggggaaactgaagaaggaaatgtgctttctaactgcatcatgagatgcttacctgatgttagagagatagtga

SEQ ID NO: 501996 - DNA, 120 bp, Artificial Sequence
  ENSG00000163792_11 (sequence is synthesized)
ggaattcaggattcctccctctgtagtatgggcctttccagaagctgcccctcaccactacattttctctccctctcggctcctgcactcttccactcttttcttttcttttcttttctt

SEQ ID NO: 501997 - DNA, 120 bp, Artificial Sequence
  ENSG00000163792_12 (sequence is synthesized)
ccactcttttcttttcttttcttttcttttcgtttcttcttctttttatgtagagatgggggtcttgatatgttgcccaggctggcctcgaacccctggcctcaagtgatcctcccacct

SEQ ID NO: 501998 - DNA, 120 bp, Artificial Sequence
  ENSG00000163792_13 (sequence is synthesized)
catgagccaccatgcccaaccccactgttttcttgacatgagttatatctacaggttaagccatacatcttgcattgcttacattccagtttccagagaaacttttagatagtcccagat

SEQ ID NO: 501999 - DNA, 120 bp, Artificial Sequence
  ENSG00000163792_14 (sequence is synthesized)
gcctagtttgagatcttaaccagaagcaattctaccttaattgaaccaagcagcaacttatggccttaaatatgaaggatattgacagaatcaattacatccttgaaggaccttaagaga

SEQ ID NO: 502000 - DNA, 120 bp, Artificial Sequence
  ENSG00000163792_15 (sequence is synthesized)
agatcaggtatatagggggtgatcattacagtcttctctttccattatgttagaaacctgccctcaagcaaaaacaagataggcctgccttcaactgctcaaccactcaattggctcctt

SEQ ID NO: 502001 - DNA, 120 bp, Artificial Sequence
  ENSG00000163792_16 (sequence is synthesized)
gtaaaatttgtgttcgaggcttccctggctctggagttatttctatagtctattagctccctagggccggctccgcctcatggagatcgtccttgggggctttctctaagtcctaccatg

SEQ ID NO: 502002 - DNA, 120 bp, Artificial Sequence
  ENSG00000163792_17 (sequence is synthesized)
gggtgccagaaatgtgatatagcttcggtgaaactcatctctggccctaaagaaataacttgaggactaatcatagaatctacacacactgaaaataactttccagatcggatgtagcct

SEQ ID NO: 502003 - DNA, 120 bp, Artificial Sequence
  ENSG00000163792_18 (sequence is synthesized)
caaacctggcacctgaagtccagatggaacaaattacctttcggttaaatttcagcccttcagagtgggaggggacgggcatgaccaactagagtcccaacaaggttatccttagacaca

SEQ ID NO: 502004 - DNA, 120 bp, Artificial Sequence
  ENSG00000163792_19 (sequence is synthesized)
caccattgttgttatcatgaatgtaagtgagctctgggcaggctgggaatggttggggtctgggttctggcatgacaggaccctgtacctccacagggctggccagggcagagctgaaat

SEQ ID NO: 502005 - DNA, 120 bp, Artificial Sequence
  ENSG00000163792_20 (sequence is synthesized)
gtgggagaacagctggaatgtggatgggagccatggggagaaggcctcggccaaggctgaactcgtaaatctgccttgaaccacgtctctgcagagggaccctgaagagcttgtgcagag

SEQ ID NO: 502006 - DNA, 120 bp, Artificial Sequence
  ENSG00000163792_21 (sequence is synthesized)
ctgatgtgggcagctggacagggccaggcaggggcagaggccaggtgtgggagggcatgagcacagtgttcttcacaagaccataaaagtccagctagaatgtactatttttaaagccaa

SEQ ID NO: 502007 - DNA, 120 bp, Artificial Sequence
  ENSG00000163792_22 (sequence is synthesized)
acagcagtatcttcctggttgagttcacgggagtgctaggaagagaagcagatacatttcctcctcagttggtggcacactttcctggggatgaagggaaattggcttggggtgtgtgtc

SEQ ID NO: 502008 - DNA, 120 bp, Artificial Sequence
  ENSG00000163792_23 (sequence is synthesized)
ggggtcctctggatagcatggagcttctcctgataatagagtagactttgggttggagcttgccccaccctgtcctgctcagactcaggcctttgcctagtaacattagagccctcaggg

SEQ ID NO: 502009 - DNA, 120 bp, Artificial Sequence
  ENSG00000163792_24 (sequence is synthesized)
gtgaccgcatggccctggtgtagacaaggagggcacaggaaggatgacgcaggtggagggctgcaggaggcaggtcccatcgctacaagtttctcagggtgtcttgggccctttccaggc

SEQ ID NO: 502010 - DNA, 120 bp, Artificial Sequence
  ENSG00000163792_25 (sequence is synthesized)
aaagctgttctcctttgtgcccaggacagtcgaggggggtggggcagaggccatctcctccagccacagagacccagccccgtcaggccagcaagcaaaggggcctggcagggggcaggg

SEQ ID NO: 502011 - DNA, 120 bp, Artificial Sequence
  ENSG00000163792_26 (sequence is synthesized)
tgagccaagggaaggcctaggggatggatgggaataaccagaggatggactgggccctccctccctgacaagcacagtaatgcccttgagacatgtcaggacttggatgcgtgaatgaac

SEQ ID NO: 502012 - DNA, 82 bp, Artificial Sequence
  ENSG00000163792_27 (sequence is synthesized)
tgcccttgagacatgtcaggacttggatgcgtgaatgaaccagaagtaacccgctttgtctctgcaatgagaaagaaaaaca

SEQ ID NO: 502013 - DNA, 120 bp, Artificial Sequence
  ENSG00000163792_28 (sequence is synthesized)
gaaataaaagaaaatatggatgaaaacatttgagcatggatgacaaatgacactagggtggcctggctcaggagttggaggctcagctgctccataggggattggcctggcctacctggt

SEQ ID NO: 502014 - DNA, 120 bp, Artificial Sequence
  ENSG00000163792_29 (sequence is synthesized)
cttcctgcaccacctgccccatccccaggacttgggattgggatggaggtggaggtggggaacaagacttccctgctggctccctccacagagcatgtgctttctgaggaacaggatggc

SEQ ID NO: 502015 - DNA, 66 bp, Artificial Sequence
  ENSG00000163792_30 (sequence is synthesized)
tccctccacagagcatgtgctttctgaggaacaggatggcagggtggaggcttagatggggctgtg

SEQ ID NO: 502016 - DNA, 61 bp, Artificial Sequence
  ENSG00000163792_31 (sequence is synthesized)
accctgtctctactaaaaatacgaaattagctgggtgtggtggcacatggagtttgcagtg

SEQ ID NO: 502017 - DNA, 81 bp, Artificial Sequence
  ENSG00000163792_32 (sequence is synthesized)
aaaaaaaaaaaaaaaatgcggctgtgggagaagcagagctggcccagtgatttctttttttttgttttttgagacagagtc

SEQ ID NO: 502018 - DNA, 87 bp, Artificial Sequence
  ENSG00000163792_33 (sequence is synthesized)
cccagtgatttctaagtaatacagtggacactggattttaccaaattgggaactagagaagtagaggatctagccttctctgagact

SEQ ID NO: 502019 - DNA, 120 bp, Artificial Sequence
  ENSG00000163792_34 (sequence is synthesized)
gggaactagagaagtagaggatctagccttctctgagactccttttctcttcctctgggaggagcctggctagggtgagtcagatggcactgtcctctcccttttgtggcatgagcccta

SEQ ID NO: 502020 - DNA, 120 bp, Artificial Sequence
  ENSG00000163792_35 (sequence is synthesized)
gagccctaaacccagggcccctaaaagcttattctattctagatcaaggtaggcaaactatggccagtgggccaaacccagccccccatgtatttttgtaaataaagttttattggaaca

SEQ ID NO: 502021 - DNA, 120 bp, Artificial Sequence
  ENSG00000163792_36 (sequence is synthesized)
agcctcgtcgtctcaggacctggctaggtcaagggtccgccctcccaaacagggtgtagctctgaactccccctggccccagcacaccctgataagcaggattcagattgggcatgggac

SEQ ID NO: 502022 - DNA, 120 bp, Artificial Sequence
  ENSG00000163792_37 (sequence is synthesized)
aggacaaaggctctgaggaggcatgagtggagtagtagagagaacacaggactctgggttctgagccaagctctgccatcctgcagccatctgacccctggccaggccttcccccaactt

SEQ ID NO: 502023 - DNA, 120 bp, Artificial Sequence
  ENSG00000163793_0 (sequence is synthesized)
ctgctggacccggccggtgtgaagtttcacacccaaaaggatgaagggcacccacctggcttaagagaacgactcccagatgctgcttctcctctggctcagatcatgtctactgtgaag

SEQ ID NO: 502024 - DNA, 120 bp, Artificial Sequence
  ENSG00000163793_1 (sequence is synthesized)
gaagcagcacaccggctgtccaaaagtgagatgagcctctatgcagtgctggatcttaagaagggcgcctcacctgaagacttcaaaaaatcctacaggaaactggccttgcggtatcat

SEQ ID NO: 502025 - DNA, 120 bp, Artificial Sequence
  ENSG00000163793_2 (sequence is synthesized)
cccgacaagaatccagggaatgctcaagcagcagaaatattcaaagagatcaacgcagctcatgccatactgagcgactctaagaagcggaaaatttacgaccagcatggctcattggga

SEQ ID NO: 502026 - DNA, 120 bp, Artificial Sequence
  ENSG00000163793_3 (sequence is synthesized)
atatatctgtatgatcactttggtgaagaaggcgtcagatactattttattctgaatagttgttggttcaagacacttgtcatcctgtgtactctgctcacttgttgctgtttctgttgt

SEQ ID NO: 502027 - DNA, 120 bp, Artificial Sequence
  ENSG00000163793_4 (sequence is synthesized)
tgctgctgtttttgctgtggagcacttaaaccaccacctgagcaggatagtgggagaaaatatcagcagaatgtccagagtcagcctccaaggtcaggagccaaatgtgattttagaagc

SEQ ID NO: 502028 - DNA, 120 bp, Artificial Sequence
  ENSG00000163793_5 (sequence is synthesized)
gaggaaaatagcgaagatgatttttaagagatgaagaaggatgaggtgctgacccagtgagggtgccttctgctgcccagtcccctggacacattgaagagaggagcaagtagccctgtc

SEQ ID NO: 502029 - DNA, 120 bp, Artificial Sequence
  ENSG00000163793_6 (sequence is synthesized)
catcacctctacccttggtaccacaactctgtatggggttgcccagctactcttcctttcagttgcagtcccaattttactccgtcagaaagcagccctcccctccctccccttatgagg

SEQ ID NO: 502030 - DNA, 120 bp, Artificial Sequence
  ENSG00000163793_7 (sequence is synthesized)
tctcaggcagtggtggcagatttttcctgaagagtctttttcctgtgtctgccttgttattggaaccaatgccagctggtaggatccctgagccccttgcgatatcaccaccaagagcct

SEQ ID NO: 502031 - DNA, 120 bp, Artificial Sequence
  ENSG00000163793_8 (sequence is synthesized)
gataactgagcagggtggatcctgtccctggagctgctgcacccattaattctcccttgttgcaactctgtgtaccaagaacccctagcatcagcctcattcctaagccaataacgcctg

SEQ ID NO: 502032 - DNA, 120 bp, Artificial Sequence
  ENSG00000163793_9 (sequence is synthesized)
tatggagttggtttcatcttctggtgcccacggccattggcattgccagcctcattccatgccactatgagtcaactcaggaaaactgcgagtgcatttgaggcttaggggtagtcattc

SEQ ID NO: 502033 - DNA, 120 bp, Artificial Sequence
  ENSG00000163793_10 (sequence is synthesized)
catctttagattatccttggacttcagctaccagcacagcatgcattagccttggtcctgtaggttaactgaagttcaaacatcagtgccagcttgcctccatccttttcacatattatg

SEQ ID NO: 502034 - DNA, 120 bp, Artificial Sequence
  ENSG00000163793_11 (sequence is synthesized)
caggccaattgacatataatttgttcttaaaaataggggcatgaaatatgtgatctggaaaagattgtactttctggactcttttcccactcttgcctctttgtgctgctgtttcgtatc

SEQ ID NO: 502035 - DNA, 120 bp, Artificial Sequence
  ENSG00000163793_12 (sequence is synthesized)
ctcctcacaccgtgtatttcccacccactcagggtcacagcctactaattcctcaaacttctctccctggactaggagaaaggctaaagaatgtcagtaaataaaagagctttcatccaa

SEQ ID NO: 502036 - DNA, 120 bp, Artificial Sequence
  ENSG00000163793_13 (sequence is synthesized)
gcccagaccctcagcgtcgacgctgcgcacaagcgcagtcaactgctggacccggccggtgtgaagtttcacacccaaaaggatgaagggcacccacctggcttaagagaacgactccca

SEQ ID NO: 502037 - DNA, 120 bp, Artificial Sequence
  ENSG00000163793_14 (sequence is synthesized)
cttcagcctgggcaacaagagcaaaaaactccgtcaaaaaaaaaaaaaagaagaagaagttgtggagctgtctgattcctgatcctgtccgttcaggctggggccgccctggtctttcaa

SEQ ID NO: 502038 - DNA, 120 bp, Artificial Sequence
  ENSG00000163793_15 (sequence is synthesized)
ctgctggacccggccggtgtgaagtttcacacccaaaaggatgaagggcacccacctggcttaagagaacgactcccagtgagtttcctgtcactggaagtgcacttctcggtaccctta

SEQ ID NO: 502039 - DNA, 120 bp, Artificial Sequence
  ENSG00000163793_16 (sequence is synthesized)
ggctcattgggaatatatctgtatgatcactttggtgaagaaggcgtcagatactattttattctgaatagttgttggttcaaggtacacaattctccaggtcctttaagaataaggaaa

SEQ ID NO: 502040 - DNA, 120 bp, Artificial Sequence
  ENSG00000163793_17 (sequence is synthesized)
gaagggtgaccttcctttccttatgacaaatgcttctgttgtctcattttctgggtgccaggaggattgagggagggaagcttgagcagtcatatagaaaactgctggactgaggccatt

SEQ ID NO: 502041 - DNA, 120 bp, Artificial Sequence
  ENSG00000163793_18 (sequence is synthesized)
aagcgcagtcaactgctggacccggccggtgtgaagtttcacacccaaaaggatgaagggcacccacctggcttaagagaacgactcccaggtaaagggccagacccaggaggtggaggt

SEQ ID NO: 502042 - DNA, 120 bp, Artificial Sequence
  ENSG00000163794_0 (sequence is synthesized)
tgcgtccagtgctgcttccagcgctagccccaggggcacgaaggctggtgtagggaggtgcgcccctccgggggcccgccagccgtcagactcgaagctgtggctgtcattgcttctaca

SEQ ID NO: 502043 - DNA, 120 bp, Artificial Sequence
  ENSG00000163794_1 (sequence is synthesized)
atcagtgcatgttcttcgctgacgtcagtcggagctgtcctggcactatataaggctggcgacagccccgggacagaccctgtgttccccaaggcgtcttcagcctgccccgagggacag

SEQ ID NO: 502044 - DNA, 120 bp, Artificial Sequence
  ENSG00000163794_2 (sequence is synthesized)
agactggagctcaatcttggaccgtacagacgctcgccgacaacctggccggcggcaccatgaggcaggcgggacgcgcagcgctgctggccgcgctgctgctcctggtacagctgtgcc

SEQ ID NO: 502045 - DNA, 120 bp, Artificial Sequence
  ENSG00000163794_3 (sequence is synthesized)
gggcccgcgcgctcctcttgctgctggcggagcgcttcccgcgccgcgcggggcccggccgattgggactcgggacggcaggcgagcggccgcggcgggacaacccttctctgtccattg

SEQ ID NO: 502046 - DNA, 120 bp, Artificial Sequence
  ENSG00000163794_4 (sequence is synthesized)
ctctgtccattgacctcacctttcacctgctgcggaccctgctggagctggcgcggacgcagagccagcgggagcgcgccgagcagaaccgcatcatattcgactcggtgggcaagtgat

SEQ ID NO: 502047 - DNA, 120 bp, Artificial Sequence
  ENSG00000163794_5 (sequence is synthesized)
ggcccggtttggggctgcgaaaacgttgacccctttcccccaccccagagttgggatgcggggcagagccaccagggcactgtctgcgtgactattttttaataaaagtactgaagaccc

SEQ ID NO: 502048 - DNA, 80 bp, Artificial Sequence
  ENSG00000163795_0 (sequence is synthesized)
ggctgcccagggcccgcgccgctgcatgggggcggcccgcgggccctgagaggaagggcagacaggcgggccgagatagg

SEQ ID NO: 502049 - DNA, 120 bp, Artificial Sequence
  ENSG00000163795_1 (sequence is synthesized)
agaggaagggcagacaggcgggccgagataggaggggcggggtcgggcggccgcaggccggaggcgcgtcgggctggagccggtcacgatgccccgaaggaagcaaagccacccgcagcc

SEQ ID NO: 502050 - DNA, 120 bp, Artificial Sequence
  ENSG00000163795_2 (sequence is synthesized)
cgtgaaatgcgagggggtcaaagtggatactgaagactccctcgacgaaggacccggggccctggtattggagagtgatttgctactaggccaggatctggagtttgaggaggaagagga

SEQ ID NO: 502051 - DNA, 120 bp, Artificial Sequence
  ENSG00000163795_3 (sequence is synthesized)
agaggaggaaggcgacggcaacagtgaccagctcatgggcttcgagagagactcggaaggagactctctgggggccaggcctgggcttccctatgggctgagcgacgatgagtctggggg

SEQ ID NO: 502052 - DNA, 120 bp, Artificial Sequence
  ENSG00000163795_4 (sequence is synthesized)
cggccgggcactaagtgcggagagtgaagttgaggagccagccaggggtccaggggaggccaggggtgagaggccaggcccagcctgccagctgtgtggggggccgacaggtgaggggcc

SEQ ID NO: 502053 - DNA, 120 bp, Artificial Sequence
  ENSG00000163795_5 (sequence is synthesized)
gtgttgtggggcaggagggccgggtggggggcccctgctgcccccacggctactgtactcatgccgcctctgcaccttcgtgtcccactactcgagccacctgaagcggcacatgcagac

SEQ ID NO: 502054 - DNA, 120 bp, Artificial Sequence
  ENSG00000163795_6 (sequence is synthesized)
acacagcggagagaagccgttccgctgtggccgctgcccctacgcctcagcccagctcgtcaacctgacacgacatacccgcacccacactggcgagaagccctaccgctgtccccactg

SEQ ID NO: 502055 - DNA, 120 bp, Artificial Sequence
  ENSG00000163795_7 (sequence is synthesized)
cccctttgcctgcagcagcctgggcaacctgaggcggcatcagcgtacccacgcagggccccccactcctccctgcccgacctgtggcttccgctgctgtactccacgaccagcccggcc

SEQ ID NO: 502056 - DNA, 120 bp, Artificial Sequence
  ENSG00000163795_8 (sequence is synthesized)
tgccagactgtgggcagctgcggggtgaaggggagggcctctgcgggactggatcagaaccactgccagagctgctattcccttggacctgccggggctgtggacaagagctggaggagg

SEQ ID NO: 502057 - DNA, 120 bp, Artificial Sequence
  ENSG00000163795_9 (sequence is synthesized)
gtgagggtagtcggctgggagctgccatgtgtgggcgctgcatgcgaggagaggctggagggggtgccagtggggggccccagggccccagtgacaaaggctttgcctgtagcctctgcc

SEQ ID NO: 502058 - DNA, 120 bp, Artificial Sequence
  ENSG00000163795_10 (sequence is synthesized)
cctttgccactcactatcccaaccacctggcccggcacatgaagacacacagtggtgagaagcccttccgctgcgcccgctgtccttatgcctctgctcatctggataacctgaaacggc

SEQ ID NO: 502059 - DNA, 120 bp, Artificial Sequence
  ENSG00000163795_11 (sequence is synthesized)
accagcgcgtccatacaggagagaagccctacaagtgccccctctgcccttatgcctgtggcaatctggccaacctcaagcgtcatggtcgcatccactctggtgacaaaccttttcggt

SEQ ID NO: 502060 - DNA, 120 bp, Artificial Sequence
  ENSG00000163795_12 (sequence is synthesized)
gtagcctttgcaactacagctgcaaccagagcatgaacctcaaacgtcacatgctgcggcacacaggcgagaagcccttccgctgtgccacctgcgcctataccacgggccactgggaca

SEQ ID NO: 502061 - DNA, 120 bp, Artificial Sequence
  ENSG00000163795_13 (sequence is synthesized)
actacaagcgccaccagaaggtgcatggccacggtggggcaggagggcctggtctctctgcctctgagggctgggccccacctcatagcccaccctctgttttgagctctcggggcccac

SEQ ID NO: 502062 - DNA, 120 bp, Artificial Sequence
  ENSG00000163795_14 (sequence is synthesized)
cagccctggggactgctggcagccgggctgtccacacagactcatcctgaactaggtccttcttccccatgttttatacagacggaccagaagccacctttttctcccccgctggccagg

SEQ ID NO: 502063 - DNA, 120 bp, Artificial Sequence
  ENSG00000163795_15 (sequence is synthesized)
ggctccacacagactaacgtaggcactataaggaccagcccaaccccatgggcgggggggcccatatggaccaggggaccttgccttgactgaggcacttcacgagctcagtgagaaggg

SEQ ID NO: 502064 - DNA, 120 bp, Artificial Sequence
  ENSG00000163795_16 (sequence is synthesized)
ccctgtattcacctccactgcccccaggggctgtggacaaaccggctgggggactgcccagcctcccacctgtttatttaacttatttcagtgctttataataaaggaaacactaacaaa

SEQ ID NO: 502065 - DNA, 120 bp, Artificial Sequence
  ENSG00000163795_17 (sequence is synthesized)
aggagcgggggtggggtcagtggagtgggctcaggtcagggtggagggggactcctgagggatgaagtgggcgatccagactcctagcttcccaccgaggcactaagggaatcagagtgg

SEQ ID NO: 502066 - DNA, 120 bp, Artificial Sequence
  ENSG00000163795_18 (sequence is synthesized)
cggccgggcactaagtgcggagagtgaagttgaggagccagccaggggtccaggggaggccaggggtgagaggccaggcccagcctgccagctgtgtggggggccgacagcctgggcaac

SEQ ID NO: 502067 - DNA, 120 bp, Artificial Sequence
  ENSG00000163798_0 (sequence is synthesized)
aggtctggacctgaaccgagacaaggaggtaccacactattcactgctgcgtcgcagagcgggctgggcggctgtctggacctcgagaggcctgaggcaaggatcgcgtcagaccccgaa

SEQ ID NO: 502068 - DNA, 120 bp, Artificial Sequence
  ENSG00000163798_1 (sequence is synthesized)
agctggtttgttgattagtgatctaagaccgccggaagcgcttcttctcaatcaagctatgcaacaggaagtcattacgatcccgttgtaacctctaaatatgtccccgttctgcacagc

SEQ ID NO: 502069 - DNA, 120 bp, Artificial Sequence
  ENSG00000163798_2 (sequence is synthesized)
atcccgataaccgttttgtttttctcatattatgaccttctcatgttagcaccacttcgcaacgctccaggtcgtgaaggagcaacttcaccatcgccgcctacagacgccactgggagc

SEQ ID NO: 502070 - DNA, 120 bp, Artificial Sequence
  ENSG00000163798_3 (sequence is synthesized)
ttgggagagtgggacgtggacaggaacgtaaagaccgaagggtgggtttcgaaggagcggatttcgaagttgcaccggttgaggatggctgacattctctctcagtcagagaccctggcg

SEQ ID NO: 502071 - DNA, 120 bp, Artificial Sequence
  ENSG00000163798_4 (sequence is synthesized)
tcgcaagacctcagtggggacttcaagaagccagctctgccggtgtccccagcggcgcggagtaaggccccggccagcagttcttcaaaccctgaggaggtacagaaggaagggcccact

SEQ ID NO: 502072 - DNA, 120 bp, Artificial Sequence
  ENSG00000163798_5 (sequence is synthesized)
gcgttgcaggactccaattctggggagcccgacatccctcctcctcagccggactgcggtgattttaggagtctacaggaggagcagtcgcgccccccgacagcggtttcttcccctggc

SEQ ID NO: 502073 - DNA, 120 bp, Artificial Sequence
  ENSG00000163798_6 (sequence is synthesized)
ggtccagcccgggctcccccctaccaagagcctccatggggtggccctgccacagccccctacagcttagagaccctgaagggcggcactatccttggcacccgtagcttgaaagggacg

SEQ ID NO: 502074 - DNA, 120 bp, Artificial Sequence
  ENSG00000163798_7 (sequence is synthesized)
agttactgccttttcgggaggctgtctggctgcgacgtgtgcctggagcacccttcggtgtctcggtaccacgcagtgctgcagcacagggcgtccggccctgacggagaatgcgacagc

SEQ ID NO: 502075 - DNA, 120 bp, Artificial Sequence
  ENSG00000163798_8 (sequence is synthesized)
aacgggccgggcttctacctctacgatctgggaagcacccatggcacttttctcaacaaaactcgcatcccacctcgcacctactgtcgagtccacgttgggcatgttgttcgctttgga

SEQ ID NO: 502076 - DNA, 120 bp, Artificial Sequence
  ENSG00000163798_9 (sequence is synthesized)
ggcagcacccggctctttatcctgcagggaccagaggaagaccgagaggcagaatccgagttaacagtaacacagttgaaggaattgcgcaagcagcagcaaatattgttggagaagaag

SEQ ID NO: 502077 - DNA, 120 bp, Artificial Sequence
  ENSG00000163798_10 (sequence is synthesized)
atgctaggagaagactcagatgaagaagaggaaatggatacctctgaaaggaagataaatgctggtagccaagatgatgagatgggttgcacctggggaatgggagaagatgcagtagag

SEQ ID NO: 502078 - DNA, 120 bp, Artificial Sequence
  ENSG00000163798_11 (sequence is synthesized)
gatgatgctgaagagaaccctattgtcttagagtttcagcaggaaagggaggccttttatataaaggatcccaaaaaggctctccaaggcttttttgaccgagaaggagaagaattagaa

SEQ ID NO: 502079 - DNA, 120 bp, Artificial Sequence
  ENSG00000163798_12 (sequence is synthesized)
tggtggctgaggccattcactcaggaaagaaaaaagaagcaatgatccagtgctcattggaagcttgtcggattcttgacactttgggattgcttcggcaggaagcagtatctcggaaaa

SEQ ID NO: 502080 - DNA, 120 bp, Artificial Sequence
  ENSG00000163798_13 (sequence is synthesized)
ggaaagccaagaactgggaagatgaagacttttatgatagtgatgatgacacatttcttgataggactggcctgattgagaagaagcgtctgaacagaatgaagaaggctggcaagattg

SEQ ID NO: 502081 - DNA, 120 bp, Artificial Sequence
  ENSG00000163798_14 (sequence is synthesized)
atgagaagccagagacctttgaatcattggttgcaaaattaaatgatgctgaaagggaactttctgaaatttctgagagattgaaagcctcaagccaagttctatcagagtctccatctc

SEQ ID NO: 502082 - DNA, 120 bp, Artificial Sequence
  ENSG00000163798_15 (sequence is synthesized)
aggattctttagatgcgttcatgtcagaaatgaaatcaggcagtacattagatggtgtgtcccggaagaaacttcacctgagaacttttgaactgaggaaagaacaacagagacttaaag

SEQ ID NO: 502083 - DNA, 120 bp, Artificial Sequence
  ENSG00000163798_16 (sequence is synthesized)
ggttaataaaaattgtaaagccagcagagattccagaactaaaaaagactgaaactcagactacaggtgcagaaaacaaagctaaaaagcttacattgcctctatttggtgccatgaaag

SEQ ID NO: 502084 - DNA, 120 bp, Artificial Sequence
  ENSG00000163798_17 (sequence is synthesized)
gaggaagcaaattcaaattaaaaactggaacagtagggaagttaccccccaagcgtccagaactccctccaactctaatgagaatgaaagatgagcctgaagtagaagaggaggaggaag

SEQ ID NO: 502085 - DNA, 120 bp, Artificial Sequence
  ENSG00000163798_18 (sequence is synthesized)
aggaagaggaagaagagaaagaaaaggaggagcatgaaaagaaaaaactggaggatggaagcctcagtaggccacagccagagatagagccagaagcagcagtgcaggaaatgaggcctc

SEQ ID NO: 502086 - DNA, 120 bp, Artificial Sequence
  ENSG00000163798_19 (sequence is synthesized)
ccacagatctcacacattttaaagaaacccaaacccatgaaaacatgtctcaacttagcgaggaagaacagaataaagattatcaagactgtagcaaaaccacttcattgtgcgcaggac

SEQ ID NO: 502087 - DNA, 120 bp, Artificial Sequence
  ENSG00000163798_20 (sequence is synthesized)
cctcagcatcaaagaatgaatatgagaaaagcagaggtgaattgaagaaaaagaaaacacctggtccaggcaaacttccaccaacactttcttccaaatatcctgaagatgacccagact

SEQ ID NO: 502088 - DNA, 120 bp, Artificial Sequence
  ENSG00000163798_21 (sequence is synthesized)
actgtgtgtgggtcccacctgaaggtcaaagtggagatggcagaacccatcttaatgacaagtatggctattgattgcttcagaatcccaaaagaaaaccttgtggaccatgtgacatgg

SEQ ID NO: 502089 - DNA, 120 bp, Artificial Sequence
  ENSG00000163798_22 (sequence is synthesized)
aatatttgggataatgtatcaaattgaatggccagagaagtttagatgattatttgtaagatctggtgactggcttttcgttctgtgttcttggcttcctaaatttatctgcccatatga

SEQ ID NO: 502090 - DNA, 120 bp, Artificial Sequence
  ENSG00000163798_23 (sequence is synthesized)
ttctcatgcatttgatatttatgtttaaaagtgtttatatatgtatgtaaaaagggaaccatatgttttgagaatttgtaaagtgagagacatgatcctattaaaataagaaggcaaaaa

SEQ ID NO: 502091 - DNA, 120 bp, Artificial Sequence
  ENSG00000163798_24 (sequence is synthesized)
ccaaaaaggctctccaaggcttttttgaccgagaagatggggttttgccatgttgcacagactggtttcgcgctccttaactcaagctgtcatcccgcctcagcctcccaaagtgttagg

SEQ ID NO: 502092 - DNA, 84 bp, Artificial Sequence
  ENSG00000163798_25 (sequence is synthesized)
tagctgggattcttttgttagaagcaggatttcaccatgttgaccaggctcgtcttgaactcctggactcaagcgatctgccca

SEQ ID NO: 502093 - DNA, 120 bp, Artificial Sequence
  ENSG00000163798_26 (sequence is synthesized)
ttttgtacttttgttagaagcaggatttcaccatgttgaccaggctcgtcttgaactcctggactcaagcgatctgcccaccccagcctctcaaagtgctgggattataggtatgagcca

SEQ ID NO: 502094 - DNA, 120 bp, Artificial Sequence
  ENSG00000163798_27 (sequence is synthesized)
tccttgaggtgtgacattaggttgtcaatttgtgatctttcagacttttctctctctctctctctctcttttttaaatagagatgaggtcttgctatgttatccaggctggtcttgaact

SEQ ID NO: 502095 - DNA, 120 bp, Artificial Sequence
  ENSG00000163798_28 (sequence is synthesized)
agctcaagcaatcctcctgccttggcctttcaaagtgctggggttataggcgtgagtcaccatgcctggctcaagacttcttgatgtaggcatttaacactataaatttttcctcttagc

SEQ ID NO: 502096 - DNA, 120 bp, Artificial Sequence
  ENSG00000163798_29 (sequence is synthesized)
cttttgctgtatcccagaggttttgataacttgtgtcactattatttattttgaagaatttttaaatttccagtgatttcattgttaacccaaaaatcatttagaagcagattgtttaat

SEQ ID NO: 502097 - DNA, 120 bp, Artificial Sequence
  ENSG00000163798_30 (sequence is synthesized)
cccaaaaatcatttagaagcagattgtttaatttccatgtatttgtatagttttgaaggttccttttcaagttggtttctagttttattcgactgtggtctgagaagatacttgatatga

SEQ ID NO: 502098 - DNA, 120 bp, Artificial Sequence
  ENSG00000163798_31 (sequence is synthesized)
ttgttttgtggtctatcatatggtctatcttggagaatatttcaggcactgatgagaagattgtatattctgcagttctggagtagatgttctgtaaatatgttagttgatttgttctgg

SEQ ID NO: 502099 - DNA, 120 bp, Artificial Sequence
  ENSG00000163798_32 (sequence is synthesized)
agtatagtataggtccagtgtttgttgactttctgccttgatgatctgtttgctgttgtcagtggagtgtgaagtcttccactatcattgtgttgctgtctttctcttttgttaggtctg

SEQ ID NO: 502100 - DNA, 120 bp, Artificial Sequence
  ENSG00000163798_33 (sequence is synthesized)
gtagtagttgttttatgaatctgggagctccagttttaggtgcatatatatttaggattgtaatatcttcttgttgggttgatccttttataattatataatagccttctttgtcttttt

SEQ ID NO: 502101 - DNA, 120 bp, Artificial Sequence
  ENSG00000163798_34 (sequence is synthesized)
aaattctattttatttgatataagaaaagctactgctgcttgcatttggcttccatttgtatggaatatctttttccactcctttacctttagtctataagaagcctcacatgttaagtg

SEQ ID NO: 502102 - DNA, 85 bp, Artificial Sequence
  ENSG00000163798_35 (sequence is synthesized)
cctttacctttagtctataagaagcctcacatgttaagtgagtctcttgaagatggcagatatttggtttgcgatctcgctctgt

SEQ ID NO: 502103 - DNA, 120 bp, Artificial Sequence
  ENSG00000163798_36 (sequence is synthesized)
gtggagtatttagaccatttacattgaatgttaatattgagatgtgaggtactgttacagtcatcatgttgattgttacctagatacttttcttccttcattacattattgttttatagg

SEQ ID NO: 502104 - DNA, 120 bp, Artificial Sequence
  ENSG00000163798_37 (sequence is synthesized)
ccctgtgagttttatgctttcaagaggttctattctggtgcatgccaaccttttgttttaagatttagaactcctttttgcatttcttgtaggtctggtctggtagtgacaaattccctc

SEQ ID NO: 502105 - DNA, 120 bp, Artificial Sequence
  ENSG00000163798_38 (sequence is synthesized)
agcatgtgcttgtctgaaaaagactttatttctctttcattcatgaaacttagttttgttggatacaaaattcttgactaatgtttattctgcttaaggaggctaacaataggaccccaa

SEQ ID NO: 502106 - DNA, 120 bp, Artificial Sequence
  ENSG00000163803_0 (sequence is synthesized)
atccatctgctggagcagctcttccagaggcccgagtcacctggagcattctggcatggggctgcggccaggcattttcctcctggagctgctgctgcttctggggcaagggacccctca

SEQ ID NO: 502107 - DNA, 120 bp, Artificial Sequence
  ENSG00000163803_1 (sequence is synthesized)
gatccatacctctcctagaaagagtacattggaagggcagctatggccagagaccctgaagaattctccattcccatgcaacccaaataaattaggagtgaatatgccttctaaatcagt

SEQ ID NO: 502108 - DNA, 120 bp, Artificial Sequence
  ENSG00000163803_2 (sequence is synthesized)
tcactctctgaagccttctgatattaaatttgtggcagccattggcaatctggaaattcctccagacccagggacgggcgatctggagaagcaagactggactgaaaggccacagcaggt

SEQ ID NO: 502109 - DNA, 120 bp, Artificial Sequence
  ENSG00000163803_3 (sequence is synthesized)
gtgcatgggagtgatgacagtcctttcagacatcatcagatatttcagtccttctgttccaatgcctgtgtgccacactggaaagagagtcataccccacgatggtgctgaagacttgtg

SEQ ID NO: 502110 - DNA, 120 bp, Artificial Sequence
  ENSG00000163803_4 (sequence is synthesized)
gattcaggctcaagaactggtgagaaacatgaaagagaacctgcaacttgactttcaatttgactggaagctcatcaatgtgttcttcagtaatgcaagccagtgttacctgtgcccctc

SEQ ID NO: 502111 - DNA, 120 bp, Artificial Sequence
  ENSG00000163803_5 (sequence is synthesized)
tgctcaacagaatgggcttgcggcgggcggcgtggatgagctgatgggggtgctggactacctgcagcaggaggtccccagagcatttgtaaacctggtggacctctctgaggttgcaga

SEQ ID NO: 502112 - DNA, 120 bp, Artificial Sequence
  ENSG00000163803_6 (sequence is synthesized)
ggtctctcgtcagtatcacggcacttggctcagccctgcaccagagccctgtaattgctcagaggagaccacccggctggccaaggtggtgatgcagtggtcttatcaggaagcctggaa

SEQ ID NO: 502113 - DNA, 120 bp, Artificial Sequence
  ENSG00000163803_7 (sequence is synthesized)
cagcctcctggcctccagcaggtacagtgagcaggagtccttcaccgtggttttccagcctttcttctatgagaccaccccatctctacactcggaggacccccgactccaggattctac

SEQ ID NO: 502114 - DNA, 120 bp, Artificial Sequence
  ENSG00000163803_8 (sequence is synthesized)
cacgctggcctggcatctctggaataggatgatggagccagcaggagagaaagatgagccattgagtgtaaaacacgggaggccaatgaagtgtccctctcaggagagcccctatctgtt

SEQ ID NO: 502115 - DNA, 120 bp, Artificial Sequence
  ENSG00000163803_9 (sequence is synthesized)
cagctacagaaacagcaactacctgaccagactgcagaaaccccaagacaagcttgaggtaagagaaggagcggaaatcagatgtcctgacaaagacccctccgatacggttcccacctc

SEQ ID NO: 502116 - DNA, 120 bp, Artificial Sequence
  ENSG00000163803_10 (sequence is synthesized)
agttcataggctgaagccggctgacatcaacgtaattggagccctgggtgactctctcacggcaggcaatggggccgggtccacacctgggaacgtcttggacgtcttgactcagtaccg

SEQ ID NO: 502117 - DNA, 120 bp, Artificial Sequence
  ENSG00000163803_11 (sequence is synthesized)
aggcctgtcctggagcgtcggcggagatgagaacatcggcaccgttaccaccctggcgaacatcctccgggaattcaacccttccctgaagggcttctctgttggcactgggaaagaaac

SEQ ID NO: 502118 - DNA, 120 bp, Artificial Sequence
  ENSG00000163803_12 (sequence is synthesized)
cagtcctaatgccttcttaaaccaggctgtggcaggaggccgagctgaggatctacctgtccaggccaggaggctggtggacctgatgaagaatgacacgaggatacactttcaggaaga

SEQ ID NO: 502119 - DNA, 120 bp, Artificial Sequence
  ENSG00000163803_13 (sequence is synthesized)
ctggaagataataaccctgtttataggcggcaatgacctctgtgatttctgcaatgatctggtccactattctccccagaacttcacagacaacattggaaaggccctggacatcctcca

SEQ ID NO: 502120 - DNA, 120 bp, Artificial Sequence
  ENSG00000163803_14 (sequence is synthesized)
tgctgaggttcctcgggcatttgtgaacctggtgacggtgcttgagatcgtcaacctgagggagctgtaccaggagaaaaaagtctactgcccaaggatgatcctcaggtctctgtgtcc

SEQ ID NO: 502121 - DNA, 120 bp, Artificial Sequence
  ENSG00000163803_15 (sequence is synthesized)
ctgtgtcctgaagtttgatgataactcaacagaacttgctaccctcatcgaattcaacaagaagtttcaggagaagacccaccaactgattgagagtgggcgatatgacacaagggaaga

SEQ ID NO: 502122 - DNA, 120 bp, Artificial Sequence
  ENSG00000163803_16 (sequence is synthesized)
ttttactgtggttgtgcagccgttctttgaaaacgtggacatgccaaagacctcggaaggattgcctgacaactctttcttcgctcctgactgtttccacttcagcagcaagtctcactc

SEQ ID NO: 502123 - DNA, 120 bp, Artificial Sequence
  ENSG00000163803_17 (sequence is synthesized)
ccgagcagccagtgctctctggaacaatatgctggagcctgttggccagaagacgactcgtcataagtttgaaaacaagatcaatatcacatgtccgaaccaggtccagccgtttctgag

SEQ ID NO: 502124 - DNA, 120 bp, Artificial Sequence
  ENSG00000163803_18 (sequence is synthesized)
gacctacaagaacagcatgcagggtcatgggacctggctgccatgcagggacagagccccttctgccttgcaccctacctcagtgcatgccctgagacctgcagacatccaagttgtggc

SEQ ID NO: 502125 - DNA, 120 bp, Artificial Sequence
  ENSG00000163803_19 (sequence is synthesized)
tgctctgggggattctctgaccgctggcaatggaattggctccaaaccagacgacctccccgatgtcaccacacagtatcggggactgtcatacagtgcaggaggggacggctccctgga

SEQ ID NO: 502126 - DNA, 120 bp, Artificial Sequence
  ENSG00000163803_20 (sequence is synthesized)
gaatgtgaccaccttacctaatatccttcgggagtttaacagaaacctcacaggctacgccgtgggcacgggtgatgccaatgacacgaatgcattcctcaatcaagctgttcccggagc

SEQ ID NO: 502127 - DNA, 120 bp, Artificial Sequence
  ENSG00000163803_21 (sequence is synthesized)
aaaggctgaggatcttatgagccaagtccaaactctgatgcagaagatgaaagatgatcatagagtaaatttccatgaagactggaaggtcatcacagtgctgatcggaggcagcgattt

SEQ ID NO: 502128 - DNA, 120 bp, Artificial Sequence
  ENSG00000163803_22 (sequence is synthesized)
tggacttcctgaaccccactatcatgcggcaggtgttcctgggaaacccagacaagtgcccagtgcagcaggccagcgttttgtgtaactgcgttctgaccctgcgggagaactcccaag

SEQ ID NO: 502129 - DNA, 120 bp, Artificial Sequence
  ENSG00000163803_23 (sequence is synthesized)
agctagccaggctggaggccttcagccgagcctaccggagcagcatgcgcgagctggtggggtcaggccgctatgacacgcaggaggacttctctgtggtgctgcagcccttcttccaga

SEQ ID NO: 502130 - DNA, 120 bp, Artificial Sequence
  ENSG00000163803_24 (sequence is synthesized)
acatccagctccctgtcctggcggatgggctcccagatacgtccttctttgccccagactgcatccacccaaatcagaaattccactcccagctggccagagccctttggaccaatatgc

SEQ ID NO: 502131 - DNA, 120 bp, Artificial Sequence
  ENSG00000163803_25 (sequence is synthesized)
ttgaaccacttggaagcaaaacagagaccctggacctgagagcagagatgcccatcacctgtcccactcagaatgagcccttcctgagaacccctcggaatagtaactacacgtacccca

SEQ ID NO: 502132 - DNA, 120 bp, Artificial Sequence
  ENSG00000163803_26 (sequence is synthesized)
tcaagccagccattgagaactggggcagtgacttcctgtgtacagagtggaaggcttccaatagtgttccaacctctgtccaccagctccgaccagcagacatcaaagtggtggccgccc

SEQ ID NO: 502133 - DNA, 120 bp, Artificial Sequence
  ENSG00000163803_27 (sequence is synthesized)
tgggtgactctctgactacagcagtgggagctcgaccaaacaactccagtgacctacccacatcttggaggggactctcttggagcattggaggggatgggaacttggagactcacacca

SEQ ID NO: 502134 - DNA, 120 bp, Artificial Sequence
  ENSG00000163803_28 (sequence is synthesized)
cactgcccaacattctgaagaagttcaacccttacctccttggcttctctaccagcacctgggaggggacagcaggactaaatgtggcagcggaaggggccagagctagggacatgccag

SEQ ID NO: 502135 - DNA, 120 bp, Artificial Sequence
  ENSG00000163803_29 (sequence is synthesized)
cccaggcctgggacctggtagagcgaatgaaaaacagccccgacatcaacctggagaaagactggaagctggtcacactcttcattggggtcaacgacttgtgtcattactgtgagaatc

SEQ ID NO: 502136 - DNA, 120 bp, Artificial Sequence
  ENSG00000163803_30 (sequence is synthesized)
cggaggcccacttggccacggaatatgttcagcacatccaacaggccctggacatcctctctgaggagctcccaagggctttcgtcaacgtggtggaggtcatggagctggctagcctgt

SEQ ID NO: 502137 - DNA, 120 bp, Artificial Sequence
  ENSG00000163803_31 (sequence is synthesized)
accagggccaaggcgggaaatgtgccatgctggcagctcagaacaactgcacttgcctcagacactcgcaaagctccctggagaagcaagaactgaagaaagtgaactggaacctccagc

SEQ ID NO: 502138 - DNA, 120 bp, Artificial Sequence
  ENSG00000163803_32 (sequence is synthesized)
atggcatctccagtttctcctactggcaccaatacacacagcgtgaggactttgcggttgtggtgcagcctttcttccaaaacacactcaccccactgaacgagagaggggacactgacc

SEQ ID NO: 502139 - DNA, 120 bp, Artificial Sequence
  ENSG00000163803_33 (sequence is synthesized)
tcaccttcttctccgaggactgttttcacttctcagaccgcgggcatgccgagatggccatcgcactctggaacaacatgctggaaccagtgggccgcaagactacctccaacaacttca

SEQ ID NO: 502140 - DNA, 120 bp, Artificial Sequence
  ENSG00000163803_34 (sequence is synthesized)
cccacagccgagccaaactcaagtgcccctctcctgagagcccttacctctacaccctgcggaacagccgattgctcccagaccaggctgaagaagcccccgaggtgctctactgggctg

SEQ ID NO: 502141 - DNA, 120 bp, Artificial Sequence
  ENSG00000163803_35 (sequence is synthesized)
tcccagtggcagcgggagtcggccttgtggtgggcatcatcgggacagtggtctggaggtgcaggagaggtggccggagggaagatcctccaatgagcctgcgcactgtggccctctagg

SEQ ID NO: 502142 - DNA, 120 bp, Artificial Sequence
  ENSG00000163803_36 (sequence is synthesized)
cccgggggtgggtcctcaccctaaactccctatagccactctcttcaccgccctctgccccagccactcccggccaccaggacatgcttcaatgcctggtgccataggaagcccagggga

SEQ ID NO: 502143 - DNA, 120 bp, Artificial Sequence
  ENSG00000163803_37 (sequence is synthesized)
cagtcacaacttcttggggcctgggcttcttccaggcctatgctcctggaatggatacatttaaataaagtccaaagctattttattcctgggtttgcctgcgtgaagcactcaccttcc

SEQ ID NO: 502144 - DNA, 120 bp, Artificial Sequence
  ENSG00000163803_38 (sequence is synthesized)
atctcttgtgcagcccaggtgtgggagctgccactttttgtggcctgcctccagcagggctgcccaagccacgaccaaccagagcccaaactgcctgccaccacgagcatatcctcaagt

SEQ ID NO: 502145 - DNA, 120 bp, Artificial Sequence
  ENSG00000163803_39 (sequence is synthesized)
caccaaacccactatttcaaaggcagaaaaaatgctggtcaccaggtggtggctggaattttggagctggctggttgccattcagtccaatccaacacatacctattaagcaactgtttt

SEQ ID NO: 502146 - DNA, 120 bp, Artificial Sequence
  ENSG00000163803_40 (sequence is synthesized)
gtatccaggacaatgcgaagcactgaggtgcctcctaggctgtgcatgtcgcagcctggcagagaggtcaaactccttcaataaccaagaagccacgtgatgatgtgtaactactagggc

SEQ ID NO: 502147 - DNA, 120 bp, Artificial Sequence
  ENSG00000163803_41 (sequence is synthesized)
atcagtaggtaaatgtgtctgattgttttaaagaatagaaagggttcttcggggaaagtttcttgggggagagcaaccttcacatgtcattttgggaaaaggaataaaaaatgattggga

SEQ ID NO: 502148 - DNA, 120 bp, Artificial Sequence
  ENSG00000163803_42 (sequence is synthesized)
cacaaatacctcctatattctcaacctgattttctcaaggtgctaaatttaggaaaaaattcctatttctatatgcccaggtttctgagggaaaactagagagagtctgaaaatatgggc

SEQ ID NO: 502149 - DNA, 120 bp, Artificial Sequence
  ENSG00000163803_43 (sequence is synthesized)
tgcattcactgagcccctgctaggggcgaggccccgtgctggaggccttccacagatggtctcttttatgctgcacaaaagcccagggagggggtaaagggaaaatctttgaaaatagaa

SEQ ID NO: 502150 - DNA, 120 bp, Artificial Sequence
  ENSG00000163803_44 (sequence is synthesized)
gtgatgcttgcgcaacaccgtgaatgtactaaacgccgcaaattgttccatttaaaatgattaattgtgtatcatgtgaatttcacttcaataaaaaagaatccagggaggtagacatca

SEQ ID NO: 502151 - DNA, 120 bp, Artificial Sequence
  ENSG00000163803_45 (sequence is synthesized)
actgtggccgtcctccctggggccagggccttcctgctggaggaggggaagaggaggttatctgcaagaagggaagtcagccagccctgaaaagccccagaactcctgtgtcccacccat

SEQ ID NO: 502152 - DNA, 120 bp, Artificial Sequence
  ENSG00000163803_46 (sequence is synthesized)
aaatcttctttagcttcgtttggtatggtcagcaggtcagccagccaggctcctcattagcacagatctctgaactccaagttaaaagaaatgtattgagtctcaagccagcgtttctgc

SEQ ID NO: 502153 - DNA, 120 bp, Artificial Sequence
  ENSG00000163803_47 (sequence is synthesized)
ctgtcatacagagaaagtaaaccagggttcttatcagactcctgggtcagcaaatccaacaggaaatgcaccagaaaagcaccaaatccctgaatcttcacctccccgcttgcatgtata

SEQ ID NO: 502154 - DNA, 120 bp, Artificial Sequence
  ENSG00000163803_48 (sequence is synthesized)
cgtgtacacgtggtgttcctacgtctctgtttactgtctttatgtgtttattcatgttgtcttgtagtcacacagctgcctttacatatatgtacacatctgcacagaaaacctctgaaa

SEQ ID NO: 502155 - DNA, 120 bp, Artificial Sequence
  ENSG00000163803_49 (sequence is synthesized)
ttagcaattcgacaagaggaaagggtgagaaagggcatcccgaacacggaagtggagaagctcagggtgtgtcaggcgagcggttgcgtgtagatattctcaagtttctttctctcctaa

SEQ ID NO: 502156 - DNA, 120 bp, Artificial Sequence
  ENSG00000163803_50 (sequence is synthesized)
taaagttctcattcctgtaggcttcaaagtaagtggcgagtagctcagaatttacctgggaaaacaactagaacgaagctggccacaagggggcagcgtgctaatgagtggcggagccag

SEQ ID NO: 502157 - DNA, 120 bp, Artificial Sequence
  ENSG00000163803_51 (sequence is synthesized)
gacagcacctttgctgccgcctcccttttcttctgagtcagtttgcttcctggggaagtgacagggagcagggagggggtgatcaagactgtgaaggttctctggccagacctgagcaga

SEQ ID NO: 502158 - DNA, 120 bp, Artificial Sequence
  ENSG00000163803_52 (sequence is synthesized)
gtcccagagaggatgggtttccagggcgagagggaggcgccatcactcggcctgtaccacccacaacgaggacctaggttgtccttagcatgaggacatcaacctctcaagaacagaggt

SEQ ID NO: 502159 - DNA, 120 bp, Artificial Sequence
  ENSG00000163803_53 (sequence is synthesized)
cagtgccttcctgcgccaaggtccctgcgtttccacaagtccttggtcaggtacctggtcctaacaggctgccatggaacaaatcagagcctcactgactcaccattctgctcctaatga

SEQ ID NO: 502160 - DNA, 120 bp, Artificial Sequence
  ENSG00000163803_54 (sequence is synthesized)
ggctacaagaaaaaaaaccagaggagagaaagcagagcttattacaatcaggaaagagcatgaggttctggcagctgcacttggtctcagctaaagaaggcaatgacctcatacgatagc

SEQ ID NO: 502161 - DNA, 120 bp, Artificial Sequence
  ENSG00000163803_55 (sequence is synthesized)
atgggaaacaaaaatcaagcagacgaaccacattgcaggtgatagatacgcgacgtgcacctggtggggcagcctggggaagtgaggtgatgtgccctactttaaaacagatcgaccagc

SEQ ID NO: 502162 - DNA, 120 bp, Artificial Sequence
  ENSG00000163803_56 (sequence is synthesized)
tgggctcctgggattcagatatgaaccagcagtcctctactaaaagtttctttctgcagcgatgggaaaattcagccattgctctgtttcttccaacaagtgaagtccattacagcctaa

SEQ ID NO: 502163 - DNA, 120 bp, Artificial Sequence
  ENSG00000163803_57 (sequence is synthesized)
tgtctcaatcttttagttctagctctaaggcctcaggttcaatggctgctgtccctttaaacccttcatttgtcctaaatgtttcaaatagctgcccccaaatgcacgtgtgttaaagat

SEQ ID NO: 502164 - DNA, 120 bp, Artificial Sequence
  ENSG00000163803_58 (sequence is synthesized)
ggaagctctaggtcggggtctgagagacagcttgacacttggtagaatacatagactactgtgtctcaaagtgtgttccatggaacattaactccagacctgttcctggagaagagaaaa

SEQ ID NO: 502165 - DNA, 120 bp, Artificial Sequence
  ENSG00000163803_59 (sequence is synthesized)
tcctttgtatctgagggggaaacattaccataaccttcctttggggaattcatgtgtgtattagcatattaaaggctctcataaggcctgcaatgcagaaatctatttaagttttatctg

SEQ ID NO: 502166 - DNA, 120 bp, Artificial Sequence
  ENSG00000163803_60 (sequence is synthesized)
tttaacccaatgtttcccttaattccagaacattttctttgttcataacacctgttaacacctcctgaaagtgttcacgtagtagacttatctgagaaaagcaatttttgagccgttaaa

SEQ ID NO: 502167 - DNA, 120 bp, Artificial Sequence
  ENSG00000163803_61 (sequence is synthesized)
gcttctagattggacaaactaggcaattaatgatactagatcaattcagaatgcaatttgagcctcttccccctgggaaacaaagtgaaaagagtggatctcatggaattaggggagaag

SEQ ID NO: 502168 - DNA, 120 bp, Artificial Sequence
  ENSG00000163803_62 (sequence is synthesized)
tagacccagaattcatggggggtgggtggctgtgaacaggacctgcagaagaggctcggctgtgaatatttccaaggccccttgacctgtgagattctgtagtgaacggttccagctttg

SEQ ID NO: 502169 - DNA, 120 bp, Artificial Sequence
  ENSG00000163803_63 (sequence is synthesized)
gccagcttaacaatgtgctgggccccaaggtcttgagagcattgccttttcttccattgaaataagttcgcttgtttgggaccattcaaaggatcaaaataaaatttacttaccaaaaaa

SEQ ID NO: 502170 - DNA, 120 bp, Artificial Sequence
  ENSG00000163803_64 (sequence is synthesized)
aataatattaatgcacgctgcagtggctagttggaaaggggctggcagacgagggactacttcccctttgaaagcaggggtgcaaggaaccaacctacctccccttccccaacatcagcg

SEQ ID NO: 502171 - DNA, 120 bp, Artificial Sequence
  ENSG00000163803_65 (sequence is synthesized)
aaaatcagccgctggtttaaagctggcgttttgtttggatgtgctggcctatggggaggggagtcgtattctggtttgctttttccgtttttctactgaagtgatggggaaagtgcaagc

SEQ ID NO: 502172 - DNA, 120 bp, Artificial Sequence
  ENSG00000163806_0 (sequence is synthesized)
gggtaccgctgctggctagcgaccgacgagcaaccgtctgaggccaggagcgctgcgacggagccttgaccgccgttgcccggccctctcccgcgcagccccgggcttccgcagtccttc

SEQ ID NO: 502173 - DNA, 120 bp, Artificial Sequence
  ENSG00000163806_1 (sequence is synthesized)
cttcagaagggaaatttctgagggtcaggaaggggaatctgtacctcactccttgaacaccaaggaaggaatattgggaaaccaaaatgaggcacaatcagatgtgttgtgagacaccac

SEQ ID NO: 502174 - DNA, 120 bp, Artificial Sequence
  ENSG00000163806_2 (sequence is synthesized)
ctactgtcactgtttatgtaaaatcagggtcaaatagatcacatcagcctaaaaagcccattactctgaagcgtcctatttgtaaagataattggcaagcatttgaaaaaaatacacata

SEQ ID NO: 502175 - DNA, 120 bp, Artificial Sequence
  ENSG00000163806_3 (sequence is synthesized)
ataacaacaaatctaaacgccccaaaggaccttgtctggttatacagcgtcaggatatgactgctttctttaaattatttgatgacgatttaattcaagatttcttgtggatggactgct

SEQ ID NO: 502176 - DNA, 120 bp, Artificial Sequence
  ENSG00000163806_4 (sequence is synthesized)
gctgtaaaattgcagacaagtatcttttggctatgacctttgtttatttcaagagggctaaatttactataagtgagcataccaggataaatttctttattgctctgtatctggctaata

SEQ ID NO: 502177 - DNA, 120 bp, Artificial Sequence
  ENSG00000163806_5 (sequence is synthesized)
cagttgaagaagatgaagaagaaaccaagtacgaaatttttccatgggctttagggaaaaactggagaaaattgttccctaatttcttaaagttaagggaccagctctgggatagaattg

SEQ ID NO: 502178 - DNA, 120 bp, Artificial Sequence
  ENSG00000163806_6 (sequence is synthesized)
actatagggctattgtaagcaggcgatgttgtgaggaggttatggccattgcaccaacccattatatctggcaaagagaacgttctgttcatcacagtggagctgtcagaaactacaaca

SEQ ID NO: 502179 - DNA, 120 bp, Artificial Sequence
  ENSG00000163806_7 (sequence is synthesized)
ccccggggacctagtgccacaccagtagattgttcactctgtggtaaaaaaagaagatatgttagactgggattgtcttcatcatcatctttatccagtcatacagcaggggtgacagaa

SEQ ID NO: 502180 - DNA, 120 bp, Artificial Sequence
  ENSG00000163806_8 (sequence is synthesized)
aaacattctcaggactcatacaactcactgtcaatggacataataggtgatccttctcaagcttatactggttctgaagtagtcaatgaccatcaatcaaataaaggaaagaaaactaat

SEQ ID NO: 502181 - DNA, 120 bp, Artificial Sequence
  ENSG00000163806_9 (sequence is synthesized)
ttcttgaagaaagacaaatctatggagtggtttacaggaagtgaagaatgagatggcccaactaaaccaatttggaatcattaactacaaaatgtcaaactaactgcaagacaagtgtca

SEQ ID NO: 502182 - DNA, 120 bp, Artificial Sequence
  ENSG00000163806_10 (sequence is synthesized)
aaatgggatgtttaagcagttttgctatgttatacatcttttagttgttattttcaaaattatatgtataagttatataagtcatagtaatagctaaaaatgccaatctatggaagcagt

SEQ ID NO: 502183 - DNA, 120 bp, Artificial Sequence
  ENSG00000163806_11 (sequence is synthesized)
gattttcaatataaagttctattttgatatttttccatcttcaagtcagttactgtcatctggagtactcagttaagttgtggtttgaccttcctcaacttgacaagaaaagctaattta

SEQ ID NO: 502184 - DNA, 120 bp, Artificial Sequence
  ENSG00000163806_12 (sequence is synthesized)
agagaagaaaaacataaagtcattatattaattaaaagaaaaaacaccatttaatatgttctgaaaacattactcacctgtatgaccaggttgccagtgtactggtctagcaacataggg

SEQ ID NO: 502185 - DNA, 120 bp, Artificial Sequence
  ENSG00000163806_13 (sequence is synthesized)
aaatgatccatatggaaaatcagaatgcgattcttctgttgtaaaaaaatatatgtactataagctacataaaatattttctatttttttcacaaaactgttaaaatatgagttactctc

SEQ ID NO: 502186 - DNA, 120 bp, Artificial Sequence
  ENSG00000163806_14 (sequence is synthesized)
tttattgtaagttttttctttatttatttccttgcatatgttttagagctactctgccagttattatacagaaactatttgtcaatgattatgtaataaacatatgattttataaccaaa

SEQ ID NO: 502187 - DNA, 120 bp, Artificial Sequence
  ENSG00000163806_15 (sequence is synthesized)
gggagaccttagagcgggtaccgctgctggctagcgaccgacgagcaaccgtctgaggccaggagcgctgcgacggagccttgaccgccgttgcccggccctctcccgcgcagccccggg

SEQ ID NO: 502188 - DNA, 120 bp, Artificial Sequence
  ENSG00000163806_16 (sequence is synthesized)
tctttatccagtcatacagcaggggtgacagaaaaacattctcaggactcatacaactcactgtcaatggacataataggtgatccttctcaagcttatactggttctgaagccaacttt

SEQ ID NO: 502189 - DNA, 120 bp, Artificial Sequence
  ENSG00000163806_17 (sequence is synthesized)
tccactcagcagataaggaaactgaagcttagagaagttaaataatttgcccaaggagctggagtgacatgtgaaccccggtctctgactccaaactagagcctgaattcctaaatatta

SEQ ID NO: 502190 - DNA, 120 bp, Artificial Sequence
  ENSG00000163806_18 (sequence is synthesized)
tggtctactgcccttttgatgcaatcctgctgttggcagtgaaaataagctgccacggaagccttctagcagactactaaggaggtggcgaaagcattaagatctaagtccctgatgaaa

SEQ ID NO: 502191 - DNA, 120 bp, Artificial Sequence
  ENSG00000163806_19 (sequence is synthesized)
gttgcccggccctctcccgcgcagccccgggcttccgcaggtacctgtgctcgcccccgggaaggggcctcgcaggcgaatctccagtttcgagtgtgcccggtccctgggttcgctcgc

SEQ ID NO: 502192 - DNA, 120 bp, Artificial Sequence
  ENSG00000163806_20 (sequence is synthesized)
cggcgaccccaccgcccgccttagatgagaaggcagcgctccagcctcgtcctcacgccgcctcccgtgggcgccctcagctgccttcgcggcgacgacacacgcgctccccgcagcggg

SEQ ID NO: 502193 - DNA, 120 bp, Artificial Sequence
  ENSG00000163806_21 (sequence is synthesized)
aggaaagactgggtacatgtgtgtatggaggcatgggttttagaggataaataggctttggagaagttaaaaggacttgagacactctttgttgtctagtttagggaatgtgtaagaact

SEQ ID NO: 502194 - DNA, 120 bp, Artificial Sequence
  ENSG00000163806_22 (sequence is synthesized)
ggcctgactagaaggtcaagtacatgctgggaaatgatggaatcagattatggagatttgactattgagcaacggagtttgttgagtgatttaataaccgtattgggtttttgtacaggg

SEQ ID NO: 502195 - DNA, 120 bp, Artificial Sequence
  ENSG00000163806_23 (sequence is synthesized)
aagtaatttaatggaaatagtgtaagaaaattagtttttcatcaatatacgggaagaattaaagtggaaaaacgctgaaaagatagatgcacttgcctaggcccgaggattgtcaccaga

SEQ ID NO: 502196 - DNA, 120 bp, Artificial Sequence
  ENSG00000163806_24 (sequence is synthesized)
cctgcaatctatggagcagattcggagaattatgagacctactgatgtccctgatacaggtttgctctgtgatttgctatggtctgatccagataaggatgtgcaaggctggggagaaaa

SEQ ID NO: 502197 - DNA, 120 bp, Artificial Sequence
  ENSG00000163806_25 (sequence is synthesized)
tgatcgtggtgtttcctttacttttggagctgatgtagtcagtaaatttctgaatcgtcatgatttagatttgatttgtcgagctcatcaggtggtggaagatggatatgaattttttgc

SEQ ID NO: 502198 - DNA, 120 bp, Artificial Sequence
  ENSG00000163806_26 (sequence is synthesized)
taaacgacagttggtaaccttattttcagccccaaattactgtggcgagtttgataatgctggtggaatgatgagtgtggatgaaactttgatgtgttcatttcagatattgaaaccatc

SEQ ID NO: 502199 - DNA, 120 bp, Artificial Sequence
  ENSG00000163806_27 (sequence is synthesized)
ccttctcaagcttatactggttctgaaggtatgatttagtaatatgccagaattagatttatgcatgttgtttactgagctctagtcagtcctttctggcggggatacataataatttat

SEQ ID NO: 502200 - DNA, 120 bp, Artificial Sequence
  ENSG00000163806_28 (sequence is synthesized)
atactccaacaatatgagttaaattaatcttgaaactttctcccctttcagttactttttgtcttgtgtccatatttgttttgtggtgacccacctaaacagatttttaatgtgacctat

SEQ ID NO: 502201 - DNA, 120 bp, Artificial Sequence
  ENSG00000163806_29 (sequence is synthesized)
gttaagttgaaaactaatgcaccataagcctcagtattttaagagcctgaatcatttttttgaaatgtttattttattcaaaagggtttcaagaagaaaataaatttacttgtaatctca

SEQ ID NO: 502202 - DNA, 120 bp, Artificial Sequence
  ENSG00000163807_0 (sequence is synthesized)
ctttacccagagctaccatgagcaagcggaaccaggtatcgtacgtgcggccagccgagccggcgtttctggcccgcttcaaggaacgggtcggctacagggagggacccaccgtagaga

SEQ ID NO: 502203 - DNA, 120 bp, Artificial Sequence
  ENSG00000163807_1 (sequence is synthesized)
ctaagagaattcagcctcagcccccagatgaagatggggatcacagtgacaaagaagatgaacagcctcaagtggtggttttaaaaaagggagacctgtcagttgaagaagtcatgaaaa

SEQ ID NO: 502204 - DNA, 120 bp, Artificial Sequence
  ENSG00000163807_2 (sequence is synthesized)
ttaaagcagaaataaaggctgccaaagcagatgaagaaccaactccagccgatggaagaatcatatatcgaaaaccagtcaagcatccctcagatgaaaaatattcaggtttaacagcaa

SEQ ID NO: 502205 - DNA, 120 bp, Artificial Sequence
  ENSG00000163807_3 (sequence is synthesized)
gctcaaaaaagaagaagccaaatgaagatgaagtaaatcaggactcggtcaaaaagaactcacaaaaacaaattaaaaatagtagcctcctttcttttgacaacgaagatgaaaatgagt

SEQ ID NO: 502206 - DNA, 120 bp, Artificial Sequence
  ENSG00000163807_4 (sequence is synthesized)
aagtgtaaatattttgaatttagtctactttgaaagtatatggagtgttcattaaaatcacattttttcctattataaagatactacaagttctttatagaaagtttaggaaatagagaa

SEQ ID NO: 502207 - DNA, 120 bp, Artificial Sequence
  ENSG00000163807_5 (sequence is synthesized)
aaaaatttaataaactacatctattcatcaatacccctctgacttaaaatgccaactctatagaaattagctagtattaacattttgttatttcccttgtgtggttgtatatatatgtaa

SEQ ID NO: 502208 - DNA, 120 bp, Artificial Sequence
  ENSG00000163807_6 (sequence is synthesized)
attatatttttaagcaaaatacattttttgtgtgtaaacaaaattttataaatacaactgtattgcaaatgttctttgtcctgcttctcacttgacattgcattacgagtattcttccag

SEQ ID NO: 502209 - DNA, 120 bp, Artificial Sequence
  ENSG00000163807_7 (sequence is synthesized)
gtcagtaaatttcaaaaacctgacattaatagctacagataatttcataaacatctcattgtatctttttcattagcaatagctccactttgggtgggggagatgataatgtgccttgtt

SEQ ID NO: 502210 - DNA, 120 bp, Artificial Sequence
  ENSG00000163807_8 (sequence is synthesized)
aaaaatacctccccaactcctgctaagggtggccatgagactcagctctggcaagttaagaaatacaggtggaattctgcttgataaagctgctgggttttttgttacaaaaggacagac

SEQ ID NO: 502211 - DNA, 120 bp, Artificial Sequence
  ENSG00000163807_9 (sequence is synthesized)
ttggcaaacatgagcctttgctcttatcttttcatcctacttggagtgcagagataaaacctgagtaccagagccacttttaggcataaggaaggcagccatgtgctttgggtcatgtta

SEQ ID NO: 502212 - DNA, 120 bp, Artificial Sequence
  ENSG00000163807_10 (sequence is synthesized)
gtaaaaagactcagagcttggctccttgctgacatgcctggaggagctgctacaccagcttggattgctgacctctgacttcttggtagtgagaagaataaacactgtgcttaattaggc

SEQ ID NO: 502213 - DNA, 120 bp, Artificial Sequence
  ENSG00000163807_11 (sequence is synthesized)
ctgtgcttaattaggccttggtcaggtttcttttatatgcagccaaatgcagtcctaagtaatacaataaataactggtcaaactgttactggtggagggtgtccaggttcttggcattt

SEQ ID NO: 502214 - DNA, 120 bp, Artificial Sequence
  ENSG00000163807_12 (sequence is synthesized)
caaaacgcacaaagcaatgaatatcctctagaggtttgccattggttacttggcgtacaccctgtgtaaatgaagtagtggcccgtgacctgtctgattggtgcagaaagtgaccaatca

SEQ ID NO: 502215 - DNA, 120 bp, Artificial Sequence
  ENSG00000163807_13 (sequence is synthesized)
gaggctgaagtgaagttacaaagttatactcctgtgtaaatgaggacttggcctatgaccagtctgattggttgcaggaggggaccaatcagaggcactttcatttttcatctgcaatgc

SEQ ID NO: 502216 - DNA, 120 bp, Artificial Sequence
  ENSG00000163807_14 (sequence is synthesized)
agaaaaggcaaggggattgcaaagggagtagcctctgatccttttgttacttaggtatggagaggtggggttttccttttgattcagttctaggaagtcaatgtgaatcagccttaggtt

SEQ ID NO: 502217 - DNA, 120 bp, Artificial Sequence
  ENSG00000163807_15 (sequence is synthesized)
ccctgtctccagaccctattctcctgcctcattttccccctgagagacgtgatcctcgtaaatctttatgggaggctgagagactgagggtctttcttctgtaactgcttcatgctaact

SEQ ID NO: 502218 - DNA, 120 bp, Artificial Sequence
  ENSG00000163807_16 (sequence is synthesized)
tgggacacagtccctacctattggagatcacgtaactctcaccctgctttgtctaggggagacagggtagcttcttgatggccggtggtgtcttctcctgaaactggctagaaatcttgt

SEQ ID NO: 502219 - DNA, 120 bp, Artificial Sequence
  ENSG00000163807_17 (sequence is synthesized)
cacatgatcatctaacttggtggtctctaggcaaaaggaaatggatttggttaaaagatttaacagatatggtccaaaaaccaaggcaaatataatcattaataatgggctggccaaggg

SEQ ID NO: 502220 - DNA, 120 bp, Artificial Sequence
  ENSG00000163807_18 (sequence is synthesized)
agggagccatgaaacccaacttagtgccctttaggtgccccagctgttgtcatattttagaggcccagtcagctagttttcaggtggtgtcccttactaatcctgattggttgacatcaa

SEQ ID NO: 502221 - DNA, 120 bp, Artificial Sequence
  ENSG00000163807_19 (sequence is synthesized)
aacagcattcttcttctaggaaaatacataagccacctgtttcagcagttaggagatctagtccccttcgattttgcaaagcgaccactgccaaggagcctatccgaatttgtaaggtga

SEQ ID NO: 502222 - DNA, 120 bp, Artificial Sequence
  ENSG00000163807_20 (sequence is synthesized)
caatactttgagcaatgttatccaggctttccataaaatccttggacaagcgttggtaataggatagggaagttgcaatcccgctaactcccattcctacctctgctgttattcctagcc

SEQ ID NO: 502223 - DNA, 120 bp, Artificial Sequence
  ENSG00000163807_21 (sequence is synthesized)
ttggttgttgggagctatattaatttagggacatacaatatttctgtctccagtctaccacttccaccaaagacaaatcacagcagaaccgacctaacttcaaaataaactgcagtccca

SEQ ID NO: 502224 - DNA, 120 bp, Artificial Sequence
  ENSG00000163807_22 (sequence is synthesized)
tatactgggcctgattacccacacaaagtgcaacaagaatcattgtccatatagactctcctagattggctttgctagaacatttcacaaggccatttcagtcaaagtcctgagaaagta

SEQ ID NO: 502225 - DNA, 120 bp, Artificial Sequence
  ENSG00000163807_23 (sequence is synthesized)
accggtttcaattgtgccctattacaaaagaaaacgtggttattaactttatacagacaaatgccatgaattaagaatattcataaatagtttacaaattctggagaaattagaatactc

SEQ ID NO: 502226 - DNA, 120 bp, Artificial Sequence
  ENSG00000163807_24 (sequence is synthesized)
aatacacttaaagtgtatttcaaggctataaatagctcaaaataaaaagattattcagactctgaaaaaacaaaaagaagtagcaatatttcaaacaacaaaagccatacaaattatttc

SEQ ID NO: 502227 - DNA, 120 bp, Artificial Sequence
  ENSG00000163807_25 (sequence is synthesized)
agtcttccattagttcatttcagtccatgtaatcaactcctgctctacttcatattcatctttatgaacacatcagcctttcaattagtgccttggaagttttctgtctaatccaatggc

SEQ ID NO: 502228 - DNA, 120 bp, Artificial Sequence
  ENSG00000163807_26 (sequence is synthesized)
acactctccaaagttaccagaaacctgcattcaagagttcttttcatgaactccaaagaagtaagccttggactgtagctgattataagtcactttttttttttgagaaggatcagagca

SEQ ID NO: 502229 - DNA, 120 bp, Artificial Sequence
  ENSG00000163807_27 (sequence is synthesized)
aaacatcaattatggatgacaaaagtcttaagacagccataaagacacagttgacaaatgtggctatttctgtggcttacaacaatttaacataatcattacaacatatattaagacata

SEQ ID NO: 502230 - DNA, 120 bp, Artificial Sequence
  ENSG00000163807_28 (sequence is synthesized)
tcagaattttagaactctcatacaatcctggaacacatattaacaacaaatctctatcagtataacccaaaggaagctaaacaccacctcacacttgacaatgtttcctgtataattcaa

SEQ ID NO: 502231 - DNA, 120 bp, Artificial Sequence
  ENSG00000163807_29 (sequence is synthesized)
acattacaaataagcctaatataagcctaatatgtcactcttgaacttcaggaagcctaatatccaaaaagttagtttaaggtcaaaagtttttgaattaacttttttccattagtatgg

SEQ ID NO: 502232 - DNA, 120 bp, Artificial Sequence
  ENSG00000163807_30 (sequence is synthesized)
tcatatctttcttactaatttgtaagttatgtaatttatcaatttttttttgttgttctgtttcccaacctctatgtcagataaagaatcacccaggccagacacaatggctcatgcttg

SEQ ID NO: 502233 - DNA, 120 bp, Artificial Sequence
  ENSG00000163807_31 (sequence is synthesized)
taatcccaacactttgggaagccaaggtgggagaattgcttgaagccaggaatctgagcccagcctgggcgacaaagcaatacccctatctctacaaaaaataaaaaatagccaggtgta

SEQ ID NO: 502234 - DNA, 88 bp, Artificial Sequence
  ENSG00000163807_32 (sequence is synthesized)
ataaaaaatagccaggtgtagcgacaagcaggaggatggcttgggcccaggagttcaacgctgcagtgagctatgattgcaccactgc

SEQ ID NO: 502235 - DNA, 120 bp, Artificial Sequence
  ENSG00000163807_33 (sequence is synthesized)
gcaacagagtaagaactgtctcaaaaaaaataaaaaatagaaataaattttaaaaaaagaattacccatattctctttgtttttgtttattcacattaacctttattctatctggaattt

SEQ ID NO: 502236 - DNA, 120 bp, Artificial Sequence
  ENSG00000163807_34 (sequence is synthesized)
atacttttttctcaaataatcaattgtcctagaaccatgtgtttctcatttatttgaaaggccatctagtgagagatttctccaaatgttggggtagggaagggaggggaagcactttaa

SEQ ID NO: 502237 - DNA, 120 bp, Artificial Sequence
  ENSG00000163807_35 (sequence is synthesized)
agtctgagcctttagaggtgattcctcaagaccctgcttaatcctaacaattttcctcattagtaaaagtcagcccaaactgggggcttgttaagatccttaccagccacatccatctga

SEQ ID NO: 502238 - DNA, 120 bp, Artificial Sequence
  ENSG00000163807_36 (sequence is synthesized)
tgggggcttgttaagatccttaccagccacatccatctgaaattatgaatttcaaagtatcttacaaatttggtgccacattatcttttttaagtttgttttgttttgtttttttgagac

SEQ ID NO: 502239 - DNA, 120 bp, Artificial Sequence
  ENSG00000163807_37 (sequence is synthesized)
tttttaagttttaagtacctataaagaacactgaaaggtgatgtgtgtggatgagctaggaagacctgaaataggctctctctaaattaatcaaattaatcctgaagccattctgcaata

SEQ ID NO: 502240 - DNA, 120 bp, Artificial Sequence
  ENSG00000163807_38 (sequence is synthesized)
ctgtctttaatgtatactcacttgttatagaagccagggttttttcccctaatttgtatcattgctatatgtgttattgtaccaaactacactgttttaattgctgtaaattttaatatg

SEQ ID NO: 502241 - DNA, 120 bp, Artificial Sequence
  ENSG00000163807_39 (sequence is synthesized)
tcttagtatctgggtgtgggaatcttgaaagcatggagtttgtgttattcaccactgtattctcaaatatcagaagagtatctggcctactaagtgcacaataaacatagttaaaatgaa

SEQ ID NO: 502242 - DNA, 120 bp, Artificial Sequence
  ENSG00000163807_40 (sequence is synthesized)
aggctgctctcgaatgcctgggctcagttgatcctccttcctcagcctcctagctaacaggtggaaattctgtcaacaatgtggggtgagttggaaattcaaaaaaaattttttggtacc

SEQ ID NO: 502243 - DNA, 120 bp, Artificial Sequence
  ENSG00000163808_0 (sequence is synthesized)
agtcgcgcgcggtgcagtcgggaggtggaggcaccggctgcattgttttcgggatcgaggggtgagggcgctatggcacccggctgcaaaactgagttacgcagcgtgacaaatggtcag

SEQ ID NO: 502244 - DNA, 120 bp, Artificial Sequence
  ENSG00000163808_1 (sequence is synthesized)
tctaaccaaccaagtaatgaaggtgatgccatcaaagtttttgtgcgaattcgtcctcctgcagaaagatctgggtcagctgatggagagcagaacttatgcttatctgtgctgtcctcc

SEQ ID NO: 502245 - DNA, 120 bp, Artificial Sequence
  ENSG00000163808_2 (sequence is synthesized)
acgagtctccggctgcactccaaccctgagcccaagaccttcacgtttgatcatgttgcagatgtggataccactcaggaatctgtattcgcaactgtggctaaaagcattgtggagtct

SEQ ID NO: 502246 - DNA, 120 bp, Artificial Sequence
  ENSG00000163808_3 (sequence is synthesized)
tgcatgagcggttataatggtaccatctttgcatatggacagactggctcagggaagacatttactatgatgggaccatctgaatctgataatttttctcataacctgagaggagtaatc

SEQ ID NO: 502247 - DNA, 120 bp, Artificial Sequence
  ENSG00000163808_4 (sequence is synthesized)
ccacgaagttttgaatatttgttttccttaattgatcgtgaaaaagaaaaggctggagctggaaagagtttcctttgtaagtgttcctttattgaaatctacaacgagcagatatatgat

SEQ ID NO: 502248 - DNA, 120 bp, Artificial Sequence
  ENSG00000163808_5 (sequence is synthesized)
ctactggactctgcatcggctggactgtacttaagggagcatatcaagaagggagtctttgttgttggtgcggtggagcaggtggtaacctcagctgctgaagcctatcaggtgttgtct

SEQ ID NO: 502249 - DNA, 120 bp, Artificial Sequence
  ENSG00000163808_6 (sequence is synthesized)
ggaggatggaggaatagacgtgtggcatcaacatcaatgaacagagaatcgtctaggtctcatgccgtctttacaattacaatagagtcaatggagaaaagtaatgagattgtgaatata

SEQ ID NO: 502250 - DNA, 120 bp, Artificial Sequence
  ENSG00000163808_7 (sequence is synthesized)
cggacctccctactcaacctggtggatttagcaggatctgaaaggcaaaaagatacccatgcagaagggatgagattgaaggaagcaggtaacataaatcgatcattgagctgcctgggc

SEQ ID NO: 502251 - DNA, 120 bp, Artificial Sequence
  ENSG00000163808_8 (sequence is synthesized)
caagtgattacagcacttgtcgacgtgggtaatggaaaacagagacatgtttgctacagagactccaaacttaccttcttactacgggattcccttggaggtaatgccaaaacagccata

SEQ ID NO: 502252 - DNA, 120 bp, Artificial Sequence
  ENSG00000163808_9 (sequence is synthesized)
attgcaaatgttcatcctggatccaggtgttttggggaaaccctatcaacacttaactttgctcaaagagccaagctgattaaaaacaaggcagtagtaaatgaagacacccaaggaaat

SEQ ID NO: 502253 - DNA, 120 bp, Artificial Sequence
  ENSG00000163808_10 (sequence is synthesized)
gtgagccagctccaagctgaagtgaagaggctcaaagaacaactggcggagcttgcttcaggacagacaccaccagaaagcttcctgaccagagacaaaaagaagactaactatatggag

SEQ ID NO: 502254 - DNA, 120 bp, Artificial Sequence
  ENSG00000163808_11 (sequence is synthesized)
tatttccaggaagcaatgttattctttaagaaatctgaacaggaaaagaagtctctgatagaaaaagttacccaattagaagacctcaccctcaaaaaggaaaaatttattcaatctaat

SEQ ID NO: 502255 - DNA, 120 bp, Artificial Sequence
  ENSG00000163808_12 (sequence is synthesized)
aaaatgattgtgaaattccgagaggatcaaataatacgcttggaaaagctccacaaggaatcccggggaggttttctgcctgaggagcaggatcgtttgctctcagaattaaggaatgag

SEQ ID NO: 502256 - DNA, 120 bp, Artificial Sequence
  ENSG00000163808_13 (sequence is synthesized)
attcaaactctgcgagaacaaatagagcaccaccccagagttgcaaagtatgctatggaaaatcattccctcagggaggagaatagaagactgagattattagagcctgtgaaaagagct

SEQ ID NO: 502257 - DNA, 120 bp, Artificial Sequence
  ENSG00000163808_14 (sequence is synthesized)
caagaaatggatgcccagaccattgcaaaactagaaaaagctttctctgaaataagtggcatggagaaaagtgacaaaaatcagcaaggattttcacctaaagctcagaaagagccatgt

SEQ ID NO: 502258 - DNA, 120 bp, Artificial Sequence
  ENSG00000163808_15 (sequence is synthesized)
ttgtttgcaaacactgagaagttaaaagcacaactcctgcaaattcagacagagctgaataattcaaagcaagaatatgaagaattcaaagaacttactaggaaaaggcagctagaattg

SEQ ID NO: 502259 - DNA, 120 bp, Artificial Sequence
  ENSG00000163808_16 (sequence is synthesized)
gaatcagagcttcagtctttgcaaaaagcgaaccttaatcttgaaaaccttttggaagcaacaaaagcctgcaagcggcaagaagtttctcagctgaataaaattcatgctgaaacactt

SEQ ID NO: 502260 - DNA, 120 bp, Artificial Sequence
  ENSG00000163808_17 (sequence is synthesized)
aagattataactacaccaaccaaggcctaccaacttcattcccgaccagtaccaaaattaagccctgaaatgggaagctttggctctctatacactcagaattctagcatattagataat

SEQ ID NO: 502261 - DNA, 120 bp, Artificial Sequence
  ENSG00000163808_18 (sequence is synthesized)
gatatattaaatgagccagttcctcctgagatgaatgaacaagcttttgaggccatttctgaagagcttagaacagtgcaggaacaaatgagtgctcttcaagccaaactggatgaagaa

SEQ ID NO: 502262 - DNA, 120 bp, Artificial Sequence
  ENSG00000163808_19 (sequence is synthesized)
agaaagaattgattggaccaaacagcaggaagagcttctctcacagttgaatgtccttgaaaagcagcttcaagagactcaaactaaaaatgactttttgaaaagtgaggtacatgacct

SEQ ID NO: 502263 - DNA, 120 bp, Artificial Sequence
  ENSG00000163808_20 (sequence is synthesized)
gcgagtagtccttcattctgctgacaaggagctttcttcagtgaaattggaatatagttcattcaaaacgaatcaggagaaagaattcaacaaactttccgaaagacacatgcatgtaca

SEQ ID NO: 502264 - DNA, 120 bp, Artificial Sequence
  ENSG00000163808_21 (sequence is synthesized)
gcttcaattagataatctcaggttagaaaacgaaaagctgcttgagagcaaagcctgcctacaggattcctatgacaacttacaagaaataatgaaatttgagattgaccaactttcaag

SEQ ID NO: 502265 - DNA, 120 bp, Artificial Sequence
  ENSG00000163808_22 (sequence is synthesized)
aaacctccaaaacttcaaaaaagaaaatgaaactctgaaatctgatctgaataatttgatggagcttcttgaggcagaaaaagaacgcaataacaaattatcattacagtttgaagaaga

SEQ ID NO: 502266 - DNA, 120 bp, Artificial Sequence
  ENSG00000163808_23 (sequence is synthesized)
taaagaaaacagttctaaagaaatcttaaaagttcttgaggctgtacgtcaggagaaacagaaagagacggccaagtgtgagcagcagatggcaaaagtacagaaactagaagagagctt

SEQ ID NO: 502267 - DNA, 120 bp, Artificial Sequence
  ENSG00000163808_24 (sequence is synthesized)
gcttgctactgaaaaagtgatcagttccctggaaaagtctagagattctgataagaaagttgtagctgacctcatgaaccagatccaggagctaagaacatcggtctgtgagaaaacaga

SEQ ID NO: 502268 - DNA, 120 bp, Artificial Sequence
  ENSG00000163808_25 (sequence is synthesized)
aactatagacaccctgaaacaagaactgaaggacataaattgcaaatacaactctgctttggttgacagagaagagagcagagtgttgatcaagaagcaggaagtggatattctggatct

SEQ ID NO: 502269 - DNA, 120 bp, Artificial Sequence
  ENSG00000163808_26 (sequence is synthesized)
gaaagaaacccttaggctgagaatactttctgaggacatagagagggatatgctctgtgaggacctggctcatgccactgagcagctgaacatgctcacagaggcctcaaaaaaacactc

SEQ ID NO: 502270 - DNA, 120 bp, Artificial Sequence
  ENSG00000163808_27 (sequence is synthesized)
ggggctgctgcagtctgcccaggaagaactgaccaagaaggaagccctgattcaggaacttcagcacaagctaaaccaaaagaaagaggaagtagaacagaagaagaatgaatataactt

SEQ ID NO: 502271 - DNA, 120 bp, Artificial Sequence
  ENSG00000163808_28 (sequence is synthesized)
caaaatgaggcaactagaacatgtgatggattctgctgctgaggatccccagagtcctaagacaccacctcactttcaaacacatttggcaaaactcctggaaacacaagaacaagagat

SEQ ID NO: 502272 - DNA, 120 bp, Artificial Sequence
  ENSG00000163808_29 (sequence is synthesized)
agaagatggaagagcctctaagacttctttggaacaccttgtaacaaagctaaatgaagacagagaagtcaaaaatgctgaaatcctcagaatgaaggagcagttgcgtgaaatggaaaa

SEQ ID NO: 502273 - DNA, 120 bp, Artificial Sequence
  ENSG00000163808_30 (sequence is synthesized)
cctacgcctggaaagtcagcagttaatagagaaaaactggctcctgcaaggtcagctggatgatattaaaagacaaaaggaaaacagtgatcagaatcatccagataatcaacagctgaa

SEQ ID NO: 502274 - DNA, 120 bp, Artificial Sequence
  ENSG00000163808_31 (sequence is synthesized)
gaatgaacaagaagaaagtatcaaagaaagacttgcaaaaagtaaaatagttgaagaaatgctgaaaatgaaagcagacctagaagaagtccaaagtgccctttacaacaaagagatgga

SEQ ID NO: 502275 - DNA, 120 bp, Artificial Sequence
  ENSG00000163808_32 (sequence is synthesized)
atgccttagaatgactgatgaagtcgaacgaacccaaactttggagtctaaagcattccaggaaaaagaacaactgagatcaaagctggaagaaatgtatgaagaaagagagagaacatc

SEQ ID NO: 502276 - DNA, 120 bp, Artificial Sequence
  ENSG00000163808_33 (sequence is synthesized)
ccaggagatggaaatgttaaggaagcaggtggagtgtcttgctgaggaaaatggaaagttggtaggtcaccaaaatttgcatcagaagattcagtacgtagtgcgactaaagaaggaaaa

SEQ ID NO: 502277 - DNA, 120 bp, Artificial Sequence
  ENSG00000163808_34 (sequence is synthesized)
tgtcaggcttgctgaggagacagaaaagttgcgtgccgaaaatgtatttttaaaagaaaagaaaagaagtgaatcttgaggattccggtcagctacctaggcatcaccttgtttgaagat

SEQ ID NO: 502278 - DNA, 120 bp, Artificial Sequence
  ENSG00000163808_35 (sequence is synthesized)
gtttcttctcttttacaagtaagacctactcctggccacttaggagagctgaatttatggaccttaattattaaatgtttataaggtggtggtaaccacctcaagtttctgatgaacatt

SEQ ID NO: 502279 - DNA, 120 bp, Artificial Sequence
  ENSG00000163808_36 (sequence is synthesized)
ctgcatccatatacaccctgtgacagtcagcagtctgctattaagtggcctacttcaaggctttgaatcaacttaagggaaaaccttttgtctttgtaaaaataaaagcctgtagctaag

SEQ ID NO: 502280 - DNA, 120 bp, Artificial Sequence
  ENSG00000163808_37 (sequence is synthesized)
gtttacagtggacattagccagatcattttcttcttagattatgccataatctcctttgattcttatggaagttctaacaatatatggtggttccaacacctgcagtgagtttaatgact

SEQ ID NO: 502281 - DNA, 120 bp, Artificial Sequence
  ENSG00000163808_38 (sequence is synthesized)
gacttagtagcaggtacaagaagcaaacttgttaatatagattatttttgtattcttactttaggtattttcttgagcattttccatgactgtaaataaagccattttttaagataataa

SEQ ID NO: 502282 - DNA, 120 bp, Artificial Sequence
  ENSG00000163808_39 (sequence is synthesized)
tgaacgtagagcttacatccagttgagagacaagcaattgacatttactcatttattcaaacatttattgatatccaacaagccaggcactgatctggtgaattccagaacatttagagt

SEQ ID NO: 502283 - DNA, 120 bp, Artificial Sequence
  ENSG00000163808_40 (sequence is synthesized)
agtaccttgtaatgaggctggccataagaatcagaagcaactggaaatggctgcttaacacacaaaagaacaaaaccaagagccttctactagtcactctcaatggcagtagtaaatgaa

SEQ ID NO: 502284 - DNA, 120 bp, Artificial Sequence
  ENSG00000163808_41 (sequence is synthesized)
cctccatgcgggcgtcaacgtccgatccaagcgccaaattcaaatttgcggccatcttgagcgggcggaattcagtcgcgcgcggtgcagtcgggaggtggaggcaccggctgcattgtt

SEQ ID NO: 502285 - DNA, 120 bp, Artificial Sequence
  ENSG00000163810_0 (sequence is synthesized)
accgactgtgtggaagcaccaggcatcagagatagagtcttccctggcattgcaggagagaatctgaagggatgatggatgcatcaaaagagctgcaagttctccacattgacttcttga

SEQ ID NO: 502286 - DNA, 120 bp, Artificial Sequence
  ENSG00000163810_1 (sequence is synthesized)
atcaggacaacgccgtttctcaccacacatgggagttccaaacgagcagtcctgtgttccggcgaggacaggtgtttcacctgcggctggtgctgaaccagcccctacaatcctaccacc

SEQ ID NO: 502287 - DNA, 120 bp, Artificial Sequence
  ENSG00000163810_2 (sequence is synthesized)
aactgaaactggaattcagcacagggccgaatcctagcatcgccaaacacaccctggtggtgctcgacccgaggacgccctcagaccactacaactggcaggcaacccttcaaaatgagt

SEQ ID NO: 502288 - DNA, 120 bp, Artificial Sequence
  ENSG00000163810_3 (sequence is synthesized)
ctggcaaagaggtcacagtggctgtcaccagttcccccaatgccatcctgggcaagtaccaactaaacgtgaaaactggaaaccacatccttaagtctgaagaaaacatcctataccttc

SEQ ID NO: 502289 - DNA, 120 bp, Artificial Sequence
  ENSG00000163810_4 (sequence is synthesized)
tcttcaacccatggtgtaaagaggacatggttttcatgcctgatgaggacgagcgcaaagagtacatcctcaatgacacgggctgccattacgtgggggctgccagaagtatcaaatgca

SEQ ID NO: 502290 - DNA, 120 bp, Artificial Sequence
  ENSG00000163810_5 (sequence is synthesized)
aaccctggaactttggtcagtttgagaaaaatgtcctggactgctgcatttccctgctgactgagagctccctcaagcccacagataggagggaccccgtgctggtgtgcagggccatgt

SEQ ID NO: 502291 - DNA, 120 bp, Artificial Sequence
  ENSG00000163810_6 (sequence is synthesized)
gtgctatgatgagctttgagaaaggccagggcgtgctcattgggaattggactggggactacgaaggtggcacagccccatacaagtggacaggcagtgccccgatcctgcagcagtact

SEQ ID NO: 502292 - DNA, 120 bp, Artificial Sequence
  ENSG00000163810_7 (sequence is synthesized)
acaacacgaagcaggctgtgtgctttggccagtgctgggtgtttgctgggatcctgactacagtgctgagagcgttgggcatcccagcacgcagtgtgacaggcttcgattcagctcacg

SEQ ID NO: 502293 - DNA, 120 bp, Artificial Sequence
  ENSG00000163810_8 (sequence is synthesized)
acacagaaaggaacctcacggtggacacctatgtgaatgagaatggcgagaaaatcaccagtatgacccacgactctgtctggaatttccatgtgtggacggatgcctggatgaagcgac

SEQ ID NO: 502294 - DNA, 120 bp, Artificial Sequence
  ENSG00000163810_9 (sequence is synthesized)
cggatctgcccaagggctacgacggctggcaggctgtggacgcaacgccgcaggagcgaagccagggtgtcttctgctgtgggccatcaccactgaccgccatccgcaaaggtgacatct

SEQ ID NO: 502295 - DNA, 120 bp, Artificial Sequence
  ENSG00000163810_10 (sequence is synthesized)
ttattgtctatgacaccagattcgtcttctcagaagtgaatggtgacaggctcatctggttggtgaagatggtgaatgggcaggaggagttacacgtaatttcaatggagaccacaagca

SEQ ID NO: 502296 - DNA, 120 bp, Artificial Sequence
  ENSG00000163810_11 (sequence is synthesized)
tcgggaaaaacatcagcaccaaggcagtgggccaagacaggcggagagatatcacctatgagtacaagtatccagaaggctcctctgaggagaggcaggtcatggatcatgccttcctcc

SEQ ID NO: 502297 - DNA, 120 bp, Artificial Sequence
  ENSG00000163810_12 (sequence is synthesized)
ttctcagttctgagagggagcacagacgacctgtaaaagagaactttcttcacatgtcggtacaatcagatgatgtgctgctgggaaactctgttaatttcaccgtgattcttaaaagga

SEQ ID NO: 502298 - DNA, 120 bp, Artificial Sequence
  ENSG00000163810_13 (sequence is synthesized)
agaccgctgccctacagaatgtcaacatcttgggctcctttgaactacagttgtacactggcaagaagatggcaaaactgtgtgacctcaataagacctcgcagatccaaggtcaagtat

SEQ ID NO: 502299 - DNA, 120 bp, Artificial Sequence
  ENSG00000163810_14 (sequence is synthesized)
ctacatcaacagcctggctatattagatgatgagccagttatcagaggtttcatcattgcggaaattgtggagtctaaggaaatcatggcctctgaagtattcacgtctttccagtaccc

SEQ ID NO: 502300 - DNA, 120 bp, Artificial Sequence
  ENSG00000163810_15 (sequence is synthesized)
tgagttctctatagagttgcctaacacaggcagaattggccagctacttgtctgcaattgtatcttcaagaataccctggccatccctttgactgacgtcaagttctctttggaaagcct

SEQ ID NO: 502301 - DNA, 120 bp, Artificial Sequence
  ENSG00000163810_16 (sequence is synthesized)
gggcatctcctcactacagacctctgaccatgggacggtgcagcctggtgagaccatccaatcccaaataaaatgcaccccaataaaaactggacccaagaaatttatcgtcaagttaag

SEQ ID NO: 502302 - DNA, 120 bp, Artificial Sequence
  ENSG00000163810_17 (sequence is synthesized)
ttccaaacaagtgaaagagattaatgctcagaagattgttctcatcaccaagtagccttgtctgatgctgtggagccttagttgagatttcagcatttcctaccttgtgcttagctttca

SEQ ID NO: 502303 - DNA, 120 bp, Artificial Sequence
  ENSG00000163810_18 (sequence is synthesized)
gattatggatgattaaatttgatgacttatatgagggcagattcaagagccagcaggtcaaaaaggccaacacaaccataagcagccagacccacaaggccaggtcctgtgctatcacag

SEQ ID NO: 502304 - DNA, 120 bp, Artificial Sequence
  ENSG00000163810_19 (sequence is synthesized)
ggtcacctcttttacagttagaaacaccagccgaggccacagaatcccatccctttcctgagtcatggcctcaaaaatcagggccaccattgtctcaattcaaatccatagatttcgaag

SEQ ID NO: 502305 - DNA, 120 bp, Artificial Sequence
  ENSG00000163810_20 (sequence is synthesized)
ccacagagtctctccctggagcagcagactatgggcagcccagtgctgccacctgctgacgacccttgagaagctgccatatcttcaggccatgggttcaccagccctgaaggcacctgt

SEQ ID NO: 502306 - DNA, 120 bp, Artificial Sequence
  ENSG00000163810_21 (sequence is synthesized)
caactggagtgctctctcagcactgggatgggcctgatagaagtgcattctcctcctattgcctccattctcctctctctatccctgaaatccaggaagtccctctcctggtgctccaag

SEQ ID NO: 502307 - DNA, 120 bp, Artificial Sequence
  ENSG00000163810_22 (sequence is synthesized)
cagtttgaagcccaatctgcaaggacatttctcaagggccatgtggttttgcagacaaccctgtcctcaggcctgaactcaccatagagacccatgtcagcaaacggtgaccagcaaatc

SEQ ID NO: 502308 - DNA, 120 bp, Artificial Sequence
  ENSG00000163810_23 (sequence is synthesized)
ctcttcccttattctaaagctgccccttgggagactccagggagaaggcattgcttcctccctggtgtgaactctttctttggtattccatccactatcctggcaactcaaggctgcttc

SEQ ID NO: 502309 - DNA, 120 bp, Artificial Sequence
  ENSG00000163810_24 (sequence is synthesized)
tgttaactgaagcctgctccttcttgttctgccctccagagatttgctcaaatgatcaataagctttaaattaaactctacttcaagaaaactctgtggtccctgagtccttttttcttt

SEQ ID NO: 502310 - DNA, 120 bp, Artificial Sequence
  ENSG00000163810_25 (sequence is synthesized)
atgccaataagcttcttaaatgtgctggcggtttatgcagtcacttggggagccatggaatcctttgatctccccaggcaaggtgctctgaggagttggcttctttattgtctgttcagt

SEQ ID NO: 502311 - DNA, 120 bp, Artificial Sequence
  ENSG00000163810_26 (sequence is synthesized)
acatccaacccctctctcaaaggctgtcaccccaactggatacacaccctggcaaaggcacgtagcttgaatgagggttattttgtgtctaattcacaggagagtcatgggtgggatacc

SEQ ID NO: 502312 - DNA, 120 bp, Artificial Sequence
  ENSG00000163810_27 (sequence is synthesized)
tgtcatcctctgcctttccagctgtccaagtgaaaaaaacctcaatcctggtcacccttgcccaagttgcccacatccctggcatacagtaggtgttcaataaatgtttattgaaggaaa

SEQ ID NO: 502313 - DNA, 120 bp, Artificial Sequence
  ENSG00000163810_28 (sequence is synthesized)
ctggcaaagaggtgagcacccactgggctggcgggtgggctggctggcttctggcggaatgctcctaatgtgagcagcccctatccccttcctcacctgtcagctggtaacatggtttaa

SEQ ID NO: 502314 - DNA, 120 bp, Artificial Sequence
  ENSG00000163810_29 (sequence is synthesized)
agccatccacagcacagcatgatagaggggccatggctccaaatgtctgtttccccactcagcctcctccaagcacacagtatcgctgtggccaaacctcctacatgtcacccttcccct

SEQ ID NO: 502315 - DNA, 120 bp, Artificial Sequence
  ENSG00000163810_30 (sequence is synthesized)
ttccatttcaaagggaacaatgttcactggaggacatgagcggagagaagtacataaaaataacccatggttccaccaactaagttacccatccttccttccaggctttttctgtgtcat

SEQ ID NO: 502316 - DNA, 120 bp, Artificial Sequence
  ENSG00000163810_31 (sequence is synthesized)
ggtcaaatacaaaatgggggtccatctcatgcttcactcacttgacaagacctaatggatgttttccacagtggcttctgcccgagtgtgtggcttacggtggctggttttccacccttt

SEQ ID NO: 502317 - DNA, 120 bp, Artificial Sequence
  ENSG00000163810_32 (sequence is synthesized)
agatctttggactggtttatggatatttccttgggctaaattcctagaagtttaatgctaagctaatgccatgatttaaaaatggcaactacattgggtttttgtggaagcagaatctgc

SEQ ID NO: 502318 - DNA, 120 bp, Artificial Sequence
  ENSG00000163810_33 (sequence is synthesized)
tggtggaaatgagatgaatgggccagctgctgctggaatcctcgctagtgccccggcctcttccttcctctccctcccatccagatcccagactctcaaccccaattttgcatctgagtg

SEQ ID NO: 502319 - DNA, 120 bp, Artificial Sequence
  ENSG00000163810_34 (sequence is synthesized)
tttttcagggtatcatgaaaatctctcctgaggtgggcatgggttgtgggcaggagctgcatttctttactcaaaaagtgttatttttaattttttttaattgacatataacacacataa

SEQ ID NO: 502320 - DNA, 120 bp, Artificial Sequence
  ENSG00000163810_35 (sequence is synthesized)
aggacacaaatcttaatggtttgcacaatgaatttttacatatgaatacagctgtgggaccaccagccagatcaaggtggaggccatttcctgcaccctggaaggctggttctcctgagc

SEQ ID NO: 502321 - DNA, 120 bp, Artificial Sequence
  ENSG00000163810_36 (sequence is synthesized)
tccattgtaatgaacagtgagggcacaacctcctccctcttgccacaagaggggtatggggagttagccttgtggattctggagttgtagcacagtgagtttgatcccagctccacctct

SEQ ID NO: 502322 - DNA, 120 bp, Artificial Sequence
  ENSG00000163810_37 (sequence is synthesized)
tgggctacctctgtgaacctcagtttccccaccagcaaaataatgacaattaaacatttatatttattagctcatttaattttcacaatgctcccacaaagaagggggcctgttatcatt

SEQ ID NO: 502323 - DNA, 120 bp, Artificial Sequence
  ENSG00000163810_38 (sequence is synthesized)
ccaaacttttaaacaagaaaactgaggcacaggagaggttaagtaatcagccaaggtcatacagccagtaagaggtagagctggccagcctgggcaacacagggctaccccatctctact

SEQ ID NO: 502324 - DNA, 120 bp, Artificial Sequence
  ENSG00000163810_39 (sequence is synthesized)
cagggaggtgaaaatgcccagtctctccagggcccttgcaagacgtgccaaaacttcatgctgtatggagctgcttttctgtctcatgcatcctgcccttgcaggggcgctcctggctgt

SEQ ID NO: 502325 - DNA, 120 bp, Artificial Sequence
  ENSG00000163810_40 (sequence is synthesized)
ccagggtcctgaccattccttgtctccaggctggttccagatgggatgagttgttaggactgacggattcttctgggaagcatttgtaagatttgggatctggccagagggggagatgtc

SEQ ID NO: 502326 - DNA, 120 bp, Artificial Sequence
  ENSG00000163810_41 (sequence is synthesized)
aaacactgcagatgtcaagacagataagatttagttctgcttcgagttcaccatctctagtggtgaagactcccaggctctttgaaatccataggcagggtgacggtctcatgaggttcc

SEQ ID NO: 502327 - DNA, 120 bp, Artificial Sequence
  ENSG00000163810_42 (sequence is synthesized)
cccagccctgccccctgcacacaactctgtgccctgggaggctttctgagaggcaggtgggactcaccggtggccccttccttgccagtgttgacaaaggttcccaaacccctgagaaca

SEQ ID NO: 502328 - DNA, 120 bp, Artificial Sequence
  ENSG00000163810_43 (sequence is synthesized)
tagagtcttccctggcattgcaggagagaatctgaagggatgatggatgcatcaaaaggaggtcaggacatccaaatagggacctggaagatggtgatatgtgtgggataaaggtaggat

SEQ ID NO: 502329 - DNA, 120 bp, Artificial Sequence
  ENSG00000163811_0 (sequence is synthesized)
gaacacgtggctgcagcggggccagagcagcaatggcggcgggcggcggcggtagctgcgaccccctggcccctgctggggtcccttgcgccttctccccgcacagccaggcctacttcg

SEQ ID NO: 502330 - DNA, 120 bp, Artificial Sequence
  ENSG00000163811_1 (sequence is synthesized)
ctttggcctctaccgacggtcacttacgagtatgggagacggccaacaaccggctgcaccaggagtacgtgccttccgcgcacctcagtggtacctgcacctgtctggcctgggcgccag

SEQ ID NO: 502331 - DNA, 120 bp, Artificial Sequence
  ENSG00000163811_2 (sequence is synthesized)
cgcggctgcaggccaaggaaagtccccagaggaaaaaaaggaaatcagaagctgtaggaatgagtaaccagactgacttattggctcttggcacagcagttggtagcattttattataca

SEQ ID NO: 502332 - DNA, 120 bp, Artificial Sequence
  ENSG00000163811_3 (sequence is synthesized)
gcacagtaaaaggagagttacacagtaaattaataagtggtggacatgacaacagagtcaactgcatacagtggcatcaagacagtggctgtttatatagttgttcagatgataaacata

SEQ ID NO: 502333 - DNA, 120 bp, Artificial Sequence
  ENSG00000163811_4 (sequence is synthesized)
ttgtggaatggaacgtacagacatgcaaagtaaagtgcaaatggaaaggcgacaatagcagtgtcagttccctatgtatcagcccagatggaaagatgttgctttcagctggtcgaacaa

SEQ ID NO: 502334 - DNA, 120 bp, Artificial Sequence
  ENSG00000163811_5 (sequence is synthesized)
tcaaactatgggttttggagaccaaagaagtctacaggcatttcacaggacatgcaacgccagtttcgtcactgatgttcactaccatcagacctcctaatgagagccagccctttgatg

SEQ ID NO: 502335 - DNA, 120 bp, Artificial Sequence
  ENSG00000163811_6 (sequence is synthesized)
gaattacaggtctttatttcttatctggagcagtacatgaccggttacttaatgtctggcaggtccgatcagaaaacaaagaaaagagtgcagtgatgtcatttacagttaccgatgaac

SEQ ID NO: 502336 - DNA, 120 bp, Artificial Sequence
  ENSG00000163811_7 (sequence is synthesized)
ctgtctatattgacttaactttgtcagaaaacaaagaagagcctgtcaagttggctgttgtttgcagagatggtcaagtccatctttttgaacacatattaaatgggtactgcaaaaagc

SEQ ID NO: 502337 - DNA, 120 bp, Artificial Sequence
  ENSG00000163811_8 (sequence is synthesized)
ctttgacttcaaactgcacaattcagatagcaacacctgggaaaggcaagaagtcaacaccaaaacccatccctattctagctgctggtttttgctcagacaaaatgtcattgttgcttg

SEQ ID NO: 502338 - DNA, 120 bp, Artificial Sequence
  ENSG00000163811_9 (sequence is synthesized)
tatatggcagttggtttcagcctactattgagcgagtggctttaaactccagagaacctcatatgtgtttagtaagagatatttcaaactgctgggcccccaaagtagaaacagctataa

SEQ ID NO: 502339 - DNA, 120 bp, Artificial Sequence
  ENSG00000163811_10 (sequence is synthesized)
caaaggtgaggacaccagtgatgaattctgaagcaaaagttctggtgcctgggattcctggtcatcatgcagctatcaagcccgctcctccacaaaccgagcaagtagagagcaagagga

SEQ ID NO: 502340 - DNA, 120 bp, Artificial Sequence
  ENSG00000163811_11 (sequence is synthesized)
agtcagggggaaatgaggttagcattgaagaacgtctgggagcaatggatatagacacacacaaaaaaggaaaggaagacctccagacgaatagctttccagttcttcttacccagggct

SEQ ID NO: 502341 - DNA, 120 bp, Artificial Sequence
  ENSG00000163811_12 (sequence is synthesized)
tagaaagtaacgattttgaaatgctaaataaagtacttcaaactaggaatgtaaaccttataaagaagactgtattaaggatgcccctgcatactattattccgttgttacaagagctta

SEQ ID NO: 502342 - DNA, 120 bp, Artificial Sequence
  ENSG00000163811_13 (sequence is synthesized)
caaagaggttacaaggacatcctaatagtgctgtgctaatggttcagtggctaaaatgtgtgttaacagttcatgcatcatacctgtccacgttgcctgacctggtaccccagctgggga

SEQ ID NO: 502343 - DNA, 120 bp, Artificial Sequence
  ENSG00000163811_14 (sequence is synthesized)
gtcaaaacttttcagaaactttcacaccttcatggaaagcttattcttctaattacacaagtaacagcatcagagaagacaaagggagcaacttcccctggacagaaggcaaagttggtg

SEQ ID NO: 502344 - DNA, 120 bp, Artificial Sequence
  ENSG00000163811_15 (sequence is synthesized)
tatgaagaagagtcttctgaagaggagtctgatgatgaaatagcagataaggattctgaagataattgggatgaagatgaggaggagagtgaaagtgaaaaagatgaggacgttgaagag

SEQ ID NO: 502345 - DNA, 120 bp, Artificial Sequence
  ENSG00000163811_16 (sequence is synthesized)
gaagatgaggatgccgaaggaaaagatgaagaaaatggcgaggacagagatacagcaagtgaaaaagaattaaatggagattctgatttagatcctgaaaatgaaagtgaagaagaatga

SEQ ID NO: 502346 - DNA, 120 bp, Artificial Sequence
  ENSG00000163811_17 (sequence is synthesized)
agacagcaaagcaagccggtcaaactatataaactctggctcaccttgcccagtggtgagggctgcctctgtgccaggatgccaaggaccgctgcacatttccaaattcacagcagtgga

SEQ ID NO: 502347 - DNA, 120 bp, Artificial Sequence
  ENSG00000163811_18 (sequence is synthesized)
tcccatgccactttgctgtcctgagcaccccagacttgactgtgtaaataagagtgtttcattcaaatgttaataaactttacacagtatatagacacattttctgcaatgtactgacat

SEQ ID NO: 502348 - DNA, 120 bp, Artificial Sequence
  ENSG00000163811_19 (sequence is synthesized)
cagtgtccaatatatggtatatttttataatataatatcctagtatgattggttatatcaagaattgacaagtgcagataaagacctttcccataggagttcaagaactggactgttgtg

SEQ ID NO: 502349 - DNA, 120 bp, Artificial Sequence
  ENSG00000163811_20 (sequence is synthesized)
aagaagtcagctcttatctcaggttggtatctttcatcaaatccagatgcaaagcagcactagtgaaaatttttttaatttagtacatttaatttggtacattttcataaaatatgaagg

SEQ ID NO: 502350 - DNA, 120 bp, Artificial Sequence
  ENSG00000163811_21 (sequence is synthesized)
gataactacaaactggagtaaaaatgatggtaattaaaaaaaatcctcagtatccctagcttgtctattaactgtgataatctgacttgagtcagattgaatatttggagtgcttcccca

SEQ ID NO: 502351 - DNA, 120 bp, Artificial Sequence
  ENSG00000163811_22 (sequence is synthesized)
gaataaccacttatttttgaagctatcatgtgaagtatttttttaaaacaaaacaaaaattatggtcattaaaaaactagagaattagccatattaaggatttttcttgactgcaaatta

SEQ ID NO: 502352 - DNA, 120 bp, Artificial Sequence
  ENSG00000163811_23 (sequence is synthesized)
cttctaaagaatcatcagtgtatagattagaagtgctcattacctgcaacttttaaaaaaaattcagttatagctgcttttgaagaggtttccatttttatttaaattactaatggatca

SEQ ID NO: 502353 - DNA, 120 bp, Artificial Sequence
  ENSG00000163811_24 (sequence is synthesized)
tttttctctttggttttagatattaatgataaccttgttggaattttttttccaaagaaaatatttttataattaaataatttaatgtttttcttccttttcattacctactcttggcag

SEQ ID NO: 502354 - DNA, 120 bp, Artificial Sequence
  ENSG00000163811_25 (sequence is synthesized)
tacctactcttggcagtgttagggtatctgtttacctttaaaatgataagtctcactcaagattttttatgtatgtataaatattttggtgtgctacaaaagcctttgcaaattatcagt

SEQ ID NO: 502355 - DNA, 120 bp, Artificial Sequence
  ENSG00000163811_26 (sequence is synthesized)
ttttttttttttttttttttttaaagaatgagccgatattggcttagtgctcactaggggacatgcacatggaagctcacctctaagaaagggctgggcagatggatttattttttccca

SEQ ID NO: 502356 - DNA, 120 bp, Artificial Sequence
  ENSG00000163811_27 (sequence is synthesized)
ttttcccacctgtgaatatgtaaaacaaaaccattatctttgagggagtttttaataccaatgacagaacagagatttgtgtgctcatcttaagagccagagccatataagcatcttggg

SEQ ID NO: 502357 - DNA, 120 bp, Artificial Sequence
  ENSG00000163811_28 (sequence is synthesized)
aaagcaagtttgaaccagctgctggtgtaatgtacagttatatttgtctataaatggagctgtttatggcaatttaataccattctctttgtaaagtgaataaatattcatctttaccca

SEQ ID NO: 502358 - DNA, 120 bp, Artificial Sequence
  ENSG00000163811_29 (sequence is synthesized)
gcgtgcggcctgccgcgagggcagtgagggagggcgcagctcgacccggccggcctcgtatccgagccctgccggctggcccaatgaggcctgggccccactgttgacgggcagccatgt

SEQ ID NO: 502359 - DNA, 120 bp, Artificial Sequence
  ENSG00000163811_30 (sequence is synthesized)
gcggcttccttctgccgggccttggctcatcagagttctggtttttgacagagccccatcttgggactatctaactttcctctgtctgtgatccggctcatcagttttgcactgggcagt

SEQ ID NO: 502360 - DNA, 120 bp, Artificial Sequence
  ENSG00000163811_31 (sequence is synthesized)
tggaaagtccccagaggaaaaaaaggaaatcagaagctgtaggaatgagtaaccagactgacttattggctcttggcacagcagttggtagcattttattatacagcacagtaaaaggag

SEQ ID NO: 502361 - DNA, 120 bp, Artificial Sequence
  ENSG00000163811_32 (sequence is synthesized)
tttttcatttcagcatcctaatgccatgagttaaatggaaaattcagtagttagagaaatggatttgtaatacgtaaggacacatggcatttagagtgagtaatggatggaggaaagtac

SEQ ID NO: 502362 - DNA, 120 bp, Artificial Sequence
  ENSG00000163811_33 (sequence is synthesized)
gaaaatgcgttcctgagtttttactctggattccagaaacttatttccccctggccgtgagagggggcagtgaggtggaaccttggcaatggaaagtacttcaaactaggaatgtaaacc

SEQ ID NO: 502363 - DNA, 120 bp, Artificial Sequence
  ENSG00000163812_0 (sequence is synthesized)
aacctgcgcggcggccgctcctgcagccgcggccgccgccactgccgggagagctcgatgggcttctcctgcgcgccgcccggtgtctggccgagtccagagagccgcggcgcctcgttc

SEQ ID NO: 502364 - DNA, 120 bp, Artificial Sequence
  ENSG00000163812_1 (sequence is synthesized)
cgaggagccatcgccgaagcccgaggccgggtcccgggttggggactgcaggggaaggcagcggcggcggcggcgggagccccaccggggtctgggactggggaactgcctccggcttca

SEQ ID NO: 502365 - DNA, 120 bp, Artificial Sequence
  ENSG00000163812_2 (sequence is synthesized)
cgatgccagtatggacagaatagcttatgatgcttatccccacccaccacttccgaaacattgagcggaaaccagaatacctccagccagagaagtgtgtcccacccccctaccctggtc

SEQ ID NO: 502366 - DNA, 120 bp, Artificial Sequence
  ENSG00000163812_3 (sequence is synthesized)
ctgtgggaaccatgtggtttatccgtgacggctgtggcatcgcctgtgccatcgttacctggtttctggtcctctatgcggagttcgtggtcctctttgtcatgctgattccatctcgag

SEQ ID NO: 502367 - DNA, 120 bp, Artificial Sequence
  ENSG00000163812_4 (sequence is synthesized)
actacgtgtatagcatcatcaacggaattgtgttcaacctgctggccttcttggccctggcctcccactgccgggccatgctgacggaccccggggcagtgcccaaaggaaatgccacta

SEQ ID NO: 502368 - DNA, 120 bp, Artificial Sequence
  ENSG00000163812_5 (sequence is synthesized)
aagaattcatcgagagtttacagttgaagcctgggcaggtggtgtacaagtgccccaaatgctgcagcatcaagcccgaccgagcccaccactgcagtgtttgtaagcggtgcattcgga

SEQ ID NO: 502369 - DNA, 120 bp, Artificial Sequence
  ENSG00000163812_6 (sequence is synthesized)
agatggaccaccactgtccctgggtcaacaactgtgtaggcgagaacaaccagaagtacttcgtcctgtttacaatgtacatagctctcatttccttgcacgccctcatcatggtgggat

SEQ ID NO: 502370 - DNA, 120 bp, Artificial Sequence
  ENSG00000163812_7 (sequence is synthesized)
tccacttcctgcattgctttgaagaagattggacaaagtgcagctccttctctccacccaccacagtgattctccttatcctgctgtgctttgagggcctgctcttcctcattttcacat

SEQ ID NO: 502371 - DNA, 120 bp, Artificial Sequence
  ENSG00000163812_8 (sequence is synthesized)
cagtgatgtttgggacccaggtgcactccatctgcacagatgagacgggaatagaacaattgaaaaaggaagagagaagatgggctaaaaaaacaaaatggatgaacatgaaagccgttt

SEQ ID NO: 502372 - DNA, 120 bp, Artificial Sequence
  ENSG00000163812_9 (sequence is synthesized)
ttggccaccccttctctctaggctgggccagcccctttgccacgccagaccaagggaaggcagacccgtaccagtatgtggtctgaaggaccccgaccggcatggccactcagacacaag

SEQ ID NO: 502373 - DNA, 120 bp, Artificial Sequence
  ENSG00000163812_10 (sequence is synthesized)
tccacaccacagcactaccgtcccatccgttctcatgaatgtttaaatcgaaaaagcaaaacaactactcttaaaactttttttatgtctcaagtaaaatggctgagcattgcagagaaa

SEQ ID NO: 502374 - DNA, 120 bp, Artificial Sequence
  ENSG00000163812_11 (sequence is synthesized)
aaaaaaagtccccacattttattttttaaaaaccatcctttcgatttcttttggtgaccgaagctgctctcttttccttttaaaatcacttctctggcctctggtttctctctgctgtct

SEQ ID NO: 502375 - DNA, 120 bp, Artificial Sequence
  ENSG00000163812_12 (sequence is synthesized)
gtctggcatgactaatgtagagggcgctgtctcgcgctgtgcccattctactaactgagtgagacatgacgctgtgcgtggatggaatagtctggacacctggtgggggatgcatgggaa

SEQ ID NO: 502376 - DNA, 120 bp, Artificial Sequence
  ENSG00000163812_13 (sequence is synthesized)
agccaggagggccctgacctcccactgcccaggaggcagtggcgggctccccgatgggacataaaacctcaccgaagatggatgcttaccccttgaggcctgagaagggcaggatcagaa

SEQ ID NO: 502377 - DNA, 120 bp, Artificial Sequence
  ENSG00000163812_14 (sequence is synthesized)
gggaccttggcacagcgacctcatcccccaagtggacacggtttgcctgctaactcgcaaagcaattgcctgccttgtactttatgggcttggggtgtgtagaatgattttgcgggggag

SEQ ID NO: 502378 - DNA, 120 bp, Artificial Sequence
  ENSG00000163812_15 (sequence is synthesized)
tggggagaaagatgaaagaggtcttatttgtattctgaatcagcaattatattccctgtgattatttggaagagtgtgtaggaaagacgtttttccagttcaaaatgccttatacaatca

SEQ ID NO: 502379 - DNA, 120 bp, Artificial Sequence
  ENSG00000163812_16 (sequence is synthesized)
agaggaaaaaaaattacacaatttcaggcaagctacgttttcctttgtttcatctgcttcctctctcaccaccccatctccctctcttccccagcaagatgtcaattaagcagtgtgaat

SEQ ID NO: 502380 - DNA, 120 bp, Artificial Sequence
  ENSG00000163812_17 (sequence is synthesized)
tctgactgcaataggcaccagtgcccaacacatacagccccaccatcatccccttctcattttataaacctcaaagtggattcactttctgatagttaacccccataaatgtgcacgtac

SEQ ID NO: 502381 - DNA, 120 bp, Artificial Sequence
  ENSG00000163812_18 (sequence is synthesized)
ctgtgtcttatctatattttaacctgggagactgttgtcctggcatggagatgaccatgatgctggggttacctcacagtccccaccctttcaaagttgacatatggccatcccattggc

SEQ ID NO: 502382 - DNA, 120 bp, Artificial Sequence
  ENSG00000163812_19 (sequence is synthesized)
cagaatccacagacacacctaagcctgtggcactgggacagaatagattttccatttgagaggcacttcctgtgtcagtcttgtttgaaggaggtggtgatggtggatagaggtgaagga

SEQ ID NO: 502383 - DNA, 120 bp, Artificial Sequence
  ENSG00000163812_20 (sequence is synthesized)
ggtagggagtgccctccaagtgcaaaaataacaaatatgattattgaccatcggggaattctcacacattgatttgttttttaagcaattgccagaaacccccttttttagcttttgctt

SEQ ID NO: 502384 - DNA, 120 bp, Artificial Sequence
  ENSG00000163812_21 (sequence is synthesized)
ggggtgggggtaggagttaaggtttattcaatcctgtcctgggtagggcgaaagttaatctagccatgtgatttttcagaaaagtaagtggaacatgctgccacttttcaattctgtcag

SEQ ID NO: 502385 - DNA, 120 bp, Artificial Sequence
  ENSG00000163812_22 (sequence is synthesized)
tgcttccacatggaaacaaaatgcaataaaatttttccaaaacctgttctgatttagctctctcttgaggtgttacccttagtgggaggccgactatccacaatctacttgagttttctc

SEQ ID NO: 502386 - DNA, 120 bp, Artificial Sequence
  ENSG00000163812_23 (sequence is synthesized)
tggttgggtgtttgtttcattgctctgtctcttgaatgaggatactttattttttttgttttaaaatgcatttatggtccctctcttgaaccagcttgccccaccaggcctctttccttt

SEQ ID NO: 502387 - DNA, 120 bp, Artificial Sequence
  ENSG00000163812_24 (sequence is synthesized)
gctttctgcagcctgaatcaattcctttgtgctgatgggctctcctaagagctttcctgagtcagttaactttacctcgtgtctacggtgctattcatgcgatacgggcgaggctgagat

SEQ ID NO: 502388 - DNA, 120 bp, Artificial Sequence
  ENSG00000163812_25 (sequence is synthesized)
gctaagattaaaaagaaaagaatgctgttttagatcaagttgatagcatttgttttccatatgcttttttaaaattttttcataacatacagctcagttaggtgtatgaaagaagtgtta

SEQ ID NO: 502389 - DNA, 120 bp, Artificial Sequence
  ENSG00000163812_26 (sequence is synthesized)
ttgtattaaataactagagcagggctacagctctggccctcccctagggggaagagattggtaatactccatcttccagggcattttttaaagtgagccaggttagctcttttcccctgg

SEQ ID NO: 502390 - DNA, 120 bp, Artificial Sequence
  ENSG00000163812_27 (sequence is synthesized)
catttctcaggaatgcagtagatagtgctgaagatgcactgacttttttttagtcctaaaaatagaaactcctcctttaaagctgtgcatactatgcttatctttccaatagagtggggt

SEQ ID NO: 502391 - DNA, 120 bp, Artificial Sequence
  ENSG00000163812_28 (sequence is synthesized)
tccttcagatatcctataggattctgcctctggttttgtataggccttggctagaaagagtcaatgtttctgagctctcaaaccagttgctctcagaagataggaataccccaaggttcc

SEQ ID NO: 502392 - DNA, 120 bp, Artificial Sequence
  ENSG00000163812_29 (sequence is synthesized)
tggcatttttcctatttcatttttgttcagactgatattttgccaagagcacaatgactgaggaatgtagccatcatttgcagggtagtgattggttcccagcctggcttccacacagga

SEQ ID NO: 502393 - DNA, 120 bp, Artificial Sequence
  ENSG00000163812_30 (sequence is synthesized)
caggaagggaaagcatccctgagctctcctcagtatttccggatgtaatgaaagaggacatctttctacacaaagtcagccccaacttttggcttggtcacaggagttctgatagtactg

SEQ ID NO: 502394 - DNA, 120 bp, Artificial Sequence
  ENSG00000163812_31 (sequence is synthesized)
tttggtgcactcatgggaaattgaaccagtcgtagccacagtctttcagagcctgggctctggggagtggaagtgaaaaataaagatgtggcttgttggattgtgatccccagcttgctt

SEQ ID NO: 502395 - DNA, 120 bp, Artificial Sequence
  ENSG00000163812_32 (sequence is synthesized)
tccttctgtcaactctgtcaggtttgtgttcatagcaactagactgaatatgcaaaaggcttagatccaagcaaatctataatctatgcatatttgcatgggcttggtaatatcatgtac

SEQ ID NO: 502396 - DNA, 120 bp, Artificial Sequence
  ENSG00000163812_33 (sequence is synthesized)
gtacacaaaacacatttgggtagaagtgcatgtgctaaatctccttttagtcccaccattttgtcttcttcatactgtacttcctcttttttgtttgagacaaggtcttgctctgtcacc

SEQ ID NO: 502397 - DNA, 120 bp, Artificial Sequence
  ENSG00000163812_34 (sequence is synthesized)
cttgaactcctgggctcaagtgattcttgtgccttggcctcctgaatatccagggctacaggcacgtactaccatgcctggctaatttttttgttttttaatagagtcagggtctcactg

SEQ ID NO: 502398 - DNA, 120 bp, Artificial Sequence
  ENSG00000163812_35 (sequence is synthesized)
cctggctaatttttttgttttttaatagagtcagggtctcactgtgttgccctagctagtctcaaatgcccggcctccagcaattttcctgccttagcctcccaaagtcctgggattaca

SEQ ID NO: 502399 - DNA, 120 bp, Artificial Sequence
  ENSG00000163812_36 (sequence is synthesized)
ccactgggcccagccctgtacttcttgaaaaagccccaagtattagcttttgctcatctggctaggccacttaaatagttagaatccaccgtcccctaatgcagaaaccgtttaggtgag

SEQ ID NO: 502400 - DNA, 120 bp, Artificial Sequence
  ENSG00000163812_37 (sequence is synthesized)
agaatccaccgtcccctaatgcagaaaccgtttaggtgaggtaaattaacaaacattttaagccgggcgcggacacttctcactgtggacatccctcacgcctgtaatcccagcactttg

SEQ ID NO: 502401 - DNA, 63 bp, Artificial Sequence
  ENSG00000163812_38 (sequence is synthesized)
cattttaaacatgtatgtgaggttggcattacacagaaactcctctccgggtgggctgggatg

SEQ ID NO: 502402 - DNA, 120 bp, Artificial Sequence
  ENSG00000163812_39 (sequence is synthesized)
tggcattacacagaaactcctctccgggtgggctgggatgggctttctcagccaggctaatgggttttaaatttctctcttttcaagacttgcagtgcatcagcttaaagggtgagccag

SEQ ID NO: 502403 - DNA, 120 bp, Artificial Sequence
  ENSG00000163812_40 (sequence is synthesized)
ccagtagaggggaaggcgccccacctagaaggtgcccttagatatcaaagaaatgtgaaaagagaaagattttgctagaatcctcctcaaaggtgttcttgaggttgccagaccagcaac

SEQ ID NO: 502404 - DNA, 120 bp, Artificial Sequence
  ENSG00000163812_41 (sequence is synthesized)
gtcaacatcagcatcacctgagaacttgttagaaatgcacattctcggtccccaccccaggctaccgaaccagaaaccgagcggggcccagcagcccgtgtcttaacagccctccaggtg

SEQ ID NO: 502405 - DNA, 120 bp, Artificial Sequence
  ENSG00000163812_42 (sequence is synthesized)
attctgactatcaagtttgagaatccagttggggctagcaggagtcccccctcaggtggtccctgatgcctgctggtgatatgggtcttgtgtgctgctgggctcagcatagtgcagttg

SEQ ID NO: 502406 - DNA, 120 bp, Artificial Sequence
  ENSG00000163812_43 (sequence is synthesized)
gggtgtgctgattgtgagacaggcacgtgttccctccgcggagaagccactgagactgccttccctcataagctgcggcctccccaacaaacaactgccaagacatcaaagaaagtctgt

SEQ ID NO: 502407 - DNA, 120 bp, Artificial Sequence
  ENSG00000163812_44 (sequence is synthesized)
atgaagcagatccaaattattagcctgcccaccactccttgtgcatctcatcagtggaacccatctctagaccaagggccctttgggtgaagaagcagcccggaagggaaagagaaaaga

SEQ ID NO: 502408 - DNA, 120 bp, Artificial Sequence
  ENSG00000163812_45 (sequence is synthesized)
gtagaaccaagggacctccagatgggagcggcggccggtgagtagtctagagccaggggcattgtagcagcctggatacatgacctgaacacgtcttgacctttgctttctacgtgtggg

SEQ ID NO: 502409 - DNA, 120 bp, Artificial Sequence
  ENSG00000163812_46 (sequence is synthesized)
tttcaacacccatgtggctttttcttgtattctttaaatatgtatctggcttaggatcacctcatagaagagaaagaattcacagtgaagcagaaacaagccactgaccagcgtactccc

SEQ ID NO: 502410 - DNA, 120 bp, Artificial Sequence
  ENSG00000163812_47 (sequence is synthesized)
aacctgaaccttctttttctcaccctctccctcaagtaaacatcttgctgacttgagcagtgtgattgccgtagcaaagcagagtggcccccagggatcccgctctgttgggcccacagg

SEQ ID NO: 502411 - DNA, 120 bp, Artificial Sequence
  ENSG00000163812_48 (sequence is synthesized)
aggagccgatgaagctgatccaaggagtgaggacaagcgctgcagagggacgttcgctaaaagccttctaggggccgcacatgctctaacacggacataaggatgccctgaatttctgca

SEQ ID NO: 502412 - DNA, 120 bp, Artificial Sequence
  ENSG00000163812_49 (sequence is synthesized)
gctgaggccatatagtctggtgaccaagtatttgggtcctggcttcagtctttggttgaaatgtctgcttggctacttattaccgcacctactaccaaaatatgaccttgagcagtaact

SEQ ID NO: 502413 - DNA, 120 bp, Artificial Sequence
  ENSG00000163812_50 (sequence is synthesized)
tctttaagcctcagttttttcatctgaaaacgggaatgataatctaaatcacaaagttaatggaaggattaaatgagggtgatgaataggaatgtatagcgtctggccctggtatggctt

SEQ ID NO: 502414 - DNA, 120 bp, Artificial Sequence
  ENSG00000163812_51 (sequence is synthesized)
ataagtattgttttatgaagcttagggagttgtgtgtatatgtgttctggaatgcaacagaaaaatgtttcctcttgtgggttacaatatagaggtatgaaatctctgatgaggagagac

SEQ ID NO: 502415 - DNA, 120 bp, Artificial Sequence
  ENSG00000163812_52 (sequence is synthesized)
agtgttatctggcccgctatgaagagacacatttgcataggctgctccctgaggctctggctttctacatctgatgatacagggagcagggaacagcctgttctcgttctgtggggctca

SEQ ID NO: 502416 - DNA, 120 bp, Artificial Sequence
  ENSG00000163812_53 (sequence is synthesized)
gctgagtctgttctgcacagactcttccttcctcgggagccttagtcctaatacattcattttggagtgttggtgagtttgttcacagatcacagctcatgtgtcacccagactgacctg

SEQ ID NO: 502417 - DNA, 120 bp, Artificial Sequence
  ENSG00000163812_54 (sequence is synthesized)
ggccaaaaggcccatcacacaccctgcaagagcttctggtgtcgactatgacccccttaccaggcatcaaccatttttgttcgttctcttgagcctgaagctactattactgctcctctg

SEQ ID NO: 502418 - DNA, 120 bp, Artificial Sequence
  ENSG00000163812_55 (sequence is synthesized)
caaacctcaagcttaagaactttgcctgcaggatccctttaaatccacacaaaactcaaaattgagtcctaccaggaaaaagcagccctcagcccatttttatacatcggatttgtttgc

SEQ ID NO: 502419 - DNA, 120 bp, Artificial Sequence
  ENSG00000163812_56 (sequence is synthesized)
aatattttctttctagactcaaaagtcaacactccctgaaagtttgtcgactttactgctgaagacctctggtagacaggccaggctctgtctggaatactttatgaggttggtgaggag

SEQ ID NO: 502420 - DNA, 120 bp, Artificial Sequence
  ENSG00000163812_57 (sequence is synthesized)
gttgagtataatccaagagtgcctatctgggagcatgccacatgaatggcaaataatcatcctgtgggctcttggcttcattccccttctctctgactgagctcagcctgggcacagtgg

SEQ ID NO: 502421 - DNA, 120 bp, Artificial Sequence
  ENSG00000163812_58 (sequence is synthesized)
tgatttgcagtagaactggaaacctgttgggcagaaaaaaagacactagttctggttccagttctgatacataacaagctagatgagccttggccaccgtcatggcctcttggaacttct

SEQ ID NO: 502422 - DNA, 120 bp, Artificial Sequence
  ENSG00000163812_59 (sequence is synthesized)
gtttcttccccatctgccaatcatcaatactcatacccacctcctcacaaggaggccataaaaacctatggtcatggctttgagtccaagtcagtgtggatgcagccagtctgtcatttt

SEQ ID NO: 502423 - DNA, 120 bp, Artificial Sequence
  ENSG00000163812_60 (sequence is synthesized)
tgggtgtttcctctgtagccgggtctgccatatggtgatgtcccagctctcgtgctatgaagttaaagcctctttctcaacaggctgcagatgatcacccaggaagagaatgcagaatgc

SEQ ID NO: 502424 - DNA, 120 bp, Artificial Sequence
  ENSG00000163812_61 (sequence is synthesized)
ccaaagcaaaccatctcagctggtcactgcttctgtgccaagaagggaggcctggcgaggggccagtcaggaagcagcatggcatcacatgctcatgacccacatgaaggtccctttaga

SEQ ID NO: 502425 - DNA, 120 bp, Artificial Sequence
  ENSG00000163812_62 (sequence is synthesized)
cttgtgtcaacaagatccattttctgaaacaactatttttgttctgattataaaagtaacattggctcattggtaaaacttggattgtgtgagaagtctacagaaataaatacaaatcct

SEQ ID NO: 502426 - DNA, 120 bp, Artificial Sequence
  ENSG00000163812_63 (sequence is synthesized)
ctagaattccatccccaaaagtaaccactcagacaaatgttctaatgtcatgtaaaaccatattaaaccatcttttctagctgcatagtgttatagaatcatttgcttaaccatcattat

SEQ ID NO: 502427 - DNA, 120 bp, Artificial Sequence
  ENSG00000163812_64 (sequence is synthesized)
tgggcatttctcatttccagctttgcattattataattcagtgttcaagtttgtattgcataaatctttgtctcagattattgattatttttaaactttttgtgaaatcagacttacaaa

SEQ ID NO: 502428 - DNA, 120 bp, Artificial Sequence
  ENSG00000163812_65 (sequence is synthesized)
aatgtgacaaaaacagtacaaagagttcccatgtacctttcagtcagtctcaccaaaggtaaacattttatacaaccataatacaaatataaaaccctggacattggcaacaccataccc

SEQ ID NO: 502429 - DNA, 120 bp, Artificial Sequence
  ENSG00000163812_66 (sequence is synthesized)
ttaactaatgtatgtaccttattcacatttctccagttgtcccattaacacccttttctgttccaggatcccacactgcatcatttgcgatgtctccttagtctcctccagtttgtgaca

SEQ ID NO: 502430 - DNA, 120 bp, Artificial Sequence
  ENSG00000163812_67 (sequence is synthesized)
gttcctcagtcttcctttgtctttcatgaccttgaccctttttaaaaatcgaggtgaaattcctgtaacacaaaattagccattttaaagtgtacatttaatgcattcacaatgttttgt

SEQ ID NO: 502431 - DNA, 120 bp, Artificial Sequence
  ENSG00000163812_68 (sequence is synthesized)
aaccaccaggtctgtctggttccaaaatcttttcatcaatctttgacccttttgaagattgtagggcaggtattctgtaggctgtccttcagattgtgtttttgatgtttttctcatgat

SEQ ID NO: 502432 - DNA, 120 bp, Artificial Sequence
  ENSG00000163812_69 (sequence is synthesized)
tagattgaggttaggcatttggggcaggagcactgctgaagcaatgtgtcctcgttgcaccgtatcaggaggcatatggtgttgatacgtttcattattgtgatgttaactttgatcatt

SEQ ID NO: 502433 - DNA, 120 bp, Artificial Sequence
  ENSG00000163812_70 (sequence is synthesized)
gggtgaaggtggtacgtgcaatgtttcttccctgctattaaggtactgtttttccctttgtaattgataagtatcttatgaggatatacttttgagatccaatttttttaacttagaatt

SEQ ID NO: 502434 - DNA, 120 bp, Artificial Sequence
  ENSG00000163812_71 (sequence is synthesized)
tattcaaaagtcaagaatcttaaatctctgaaatggcgtgggaagaaaaagtgctagatacacagagatctttcttgagtcatgtgaaggagcagtgcccaagcccagcaaacccacagc

SEQ ID NO: 502435 - DNA, 120 bp, Artificial Sequence
  ENSG00000163812_72 (sequence is synthesized)
aaattcccttggcttccagaagagatggagaaagcagtgcccccagtggagggtcaaaggcctctgtgcagggtgttgtgggcctggagagctggcctggccatgtctttacctcctctg

SEQ ID NO: 502436 - DNA, 120 bp, Artificial Sequence
  ENSG00000163812_73 (sequence is synthesized)
ggcatctccccaccccaacaccctttctgtggcctggtggctgagttgcagccgacacccagaggcaggtgagttgacagcttggaagaggctgcagggtggatctgctgcatgagcagg

SEQ ID NO: 502437 - DNA, 120 bp, Artificial Sequence
  ENSG00000163812_74 (sequence is synthesized)
cctgagcccagccttacctccccacagtggtcctgtgtgccctccggctgcctaatgcatgttggcacttgctgtacgagcacccgcttcttcacctcgcatgctgtttgtgtcctgcac

SEQ ID NO: 502438 - DNA, 120 bp, Artificial Sequence
  ENSG00000163812_75 (sequence is synthesized)
tccttccttaaccccatcgtccttctgctgtgtttgcagcccctatctaccctggtgggagtggccaaaaatatttaggaggggatcaccagtttgtagtggcctcagaggatgtgtggt

SEQ ID NO: 502439 - DNA, 120 bp, Artificial Sequence
  ENSG00000163812_76 (sequence is synthesized)
cccccttatgcctcagccactcatcagcctagcccctgcccatcatctggcattgcacttgtggaaggaaagaaggggagggctgggtggtgggtggagaacacgtcagtccaccaggcg

SEQ ID NO: 502440 - DNA, 120 bp, Artificial Sequence
  ENSG00000163812_77 (sequence is synthesized)
ggccctgcttgctgtgttcctccacgctgctgtccacccacaccccagcagtcctctgagggacctcccgggggtgacctgggccacaacagactgcccactcagaccccatcttaccca

SEQ ID NO: 502441 - DNA, 120 bp, Artificial Sequence
  ENSG00000163812_78 (sequence is synthesized)
tgccgtggacaccccgcccccccccccgccactgctatgctatagctgggggtgtctatgtgagctgtacagcccagcaccacgctgacgatgttcttcatccccttctccctgcagggc

SEQ ID NO: 502442 - DNA, 120 bp, Artificial Sequence
  ENSG00000163812_79 (sequence is synthesized)
atcgagcgcctcaaacgaaagaaccagcccagggagcacatggggagctggcagtcagtaaaggagacctttggtggggacttctccctgaactggttcaaccccttctccagaccgtgt

SEQ ID NO: 502443 - DNA, 120 bp, Artificial Sequence
  ENSG00000163812_80 (sequence is synthesized)
cagccagagatccccagtgacaaagacatggtgcggcaggtgacatcgctgtcagacaccgaaacaatggaggatccatcagaggagacaaaggacgaggactctgtggaggtgacagat

SEQ ID NO: 502444 - DNA, 120 bp, Artificial Sequence
  ENSG00000163812_81 (sequence is synthesized)
gaatagatgctgctgtggggagagaagcaaacactaaaaagtgctgtcaaccttcatcctggggttttggctaaaggggcttatgggcatggtgcgctcccagcacccccagtgcttccc

SEQ ID NO: 502445 - DNA, 120 bp, Artificial Sequence
  ENSG00000163812_82 (sequence is synthesized)
ttagccactcgcttggccttgccatttcccctccttcttctctccatgttgggccaggtctgggggtcgggagtaggctggggacatcagaggaggatgggggctttctcagagttcatc

SEQ ID NO: 502446 - DNA, 120 bp, Artificial Sequence
  ENSG00000163812_83 (sequence is synthesized)
taagaagagtctgcactgagacggctcatcaagaaccgttctccaagactgggtggctttcacattctccgcccagcaaagggagcttttgaacagggcatcccaggggcagaaaagagc

SEQ ID NO: 502447 - DNA, 120 bp, Artificial Sequence
  ENSG00000163812_84 (sequence is synthesized)
ttgcctttggctttccccaggatttctgtcttctcttgggaaggctgggcccctggctcctggctttgagaagtaaggttgtgacagaaggaccgggcagggcttgccttggggacctgg

SEQ ID NO: 502448 - DNA, 120 bp, Artificial Sequence
  ENSG00000163812_85 (sequence is synthesized)
gttgggacactgacatcaggggagactagcctggaaagactgcagagctgccagctactccctggaaagggcttccccatgctgcctgccgaaattaggaggtagaggtggctgccacat

SEQ ID NO: 502449 - DNA, 120 bp, Artificial Sequence
  ENSG00000163812_86 (sequence is synthesized)
ctacctgcaagggccaggcatggttcaaagaggaccctgcattaagctctacacacacatgtgcaggacatgtccagcatggacagagccagagttaagacagtagcaccgaaaatgagc

SEQ ID NO: 502450 - DNA, 120 bp, Artificial Sequence
  ENSG00000163812_87 (sequence is synthesized)
ccccattccacagacactggagtcttcactgagcgagacagctgggagctgtcctgcctgtggctacatatctagccattcacagatgtggatatgggaaggacctctttggagctactg

SEQ ID NO: 502451 - DNA, 120 bp, Artificial Sequence
  ENSG00000163812_88 (sequence is synthesized)
gggactccctaaccactcgcatgagaacttaattgaatgttacctcttggagggagtctaataacacatgtaggtagaactgaccataaaccctgcctgtgtgtttgaaaaggccagttc

SEQ ID NO: 502452 - DNA, 120 bp, Artificial Sequence
  ENSG00000163812_89 (sequence is synthesized)
tcccaaattggtgcccatcttgtctctgaaaagatgggtgatggccagggtctgctgattgatgaatcagatgaatcaggaagatagacaaacacacacacacacacacacaccccacca

SEQ ID NO: 502453 - DNA, 120 bp, Artificial Sequence
  ENSG00000163812_90 (sequence is synthesized)
ggatgagtctgccctctattcaccccatttgaagcctgtggtgtctgtgaccactgctgaaggtctgagcagcgttctggtgctcctaaaccccattccagtggttgctgaagcagcatc

SEQ ID NO: 502454 - DNA, 120 bp, Artificial Sequence
  ENSG00000163812_91 (sequence is synthesized)
ttctgcacaaagcccaacagaagggttcttatccccgtttggtataagaagtggattcaccacccactccctccacgtgcctttgttcctctctttggcccatttccccagcgtctactg

SEQ ID NO: 502455 - DNA, 120 bp, Artificial Sequence
  ENSG00000163812_92 (sequence is synthesized)
gcgtcaggattggcaggagcacaggcactcagcagagcatgcccctgcaagacctcagtgttagggccccccttccagctccaggcaaaagggcatgagtcctggccccaaggggcctgt

SEQ ID NO: 502456 - DNA, 120 bp, Artificial Sequence
  ENSG00000163812_93 (sequence is synthesized)
ggctgcagttcagaggagaagaaggtcagtgtttggaggtgcagcctcaggatgctgagaaaggaaactggcgaccgtgagaaagaaaagagccaagcagcatcctggttcttggacagc

SEQ ID NO: 502457 - DNA, 120 bp, Artificial Sequence
  ENSG00000163812_94 (sequence is synthesized)
atctttggacactctgtgaagggcaacgatcctgccagagaccgtctctctacaactgatgacccactagggcctggggttaattgctcaaagggcccagtgttcacaaagccacctctg

SEQ ID NO: 502458 - DNA, 120 bp, Artificial Sequence
  ENSG00000163812_95 (sequence is synthesized)
ccctaacccttgccagagctctccaactatgacccacgagaggggtgatggtgggattctaacatcaacagagcaaccagaaagacattgggcctcccacactcaggctgcaggcccact

SEQ ID NO: 502459 - DNA, 120 bp, Artificial Sequence
  ENSG00000163812_96 (sequence is synthesized)
ttcttggtccttatcagctttaatatttattaatgacgacataggagcccgagtcagctgtaaaggccattaacttgcaatctggacaggaagttgacgctcaccactttgggtaagagc

SEQ ID NO: 502460 - DNA, 120 bp, Artificial Sequence
  ENSG00000163812_97 (sequence is synthesized)
tgctctgactgtagggccccctatttgttgtcctaacccagaagcagctctgggctgccaggatggtggatggaataccagagagttcacactagggaggaagcaatgcctgccccctgg

SEQ ID NO: 502461 - DNA, 120 bp, Artificial Sequence
  ENSG00000163812_98 (sequence is synthesized)
agtctcctagggggcagcagttagaataagggaagaggatttgctggtcactgtttgctgacatgggtttccatggtgagttcaggcctgaggacagcagtgtctgcaaaaccacatggc

SEQ ID NO: 502462 - DNA, 120 bp, Artificial Sequence
  ENSG00000163812_99 (sequence is synthesized)
ccttgagaaatgtccttgcacattgggcttcaaactcctcttctagggaatccatcttggcctgaaagcagaggtacaacaccagccccaaaggcaattctgttttcagattggttgctc

SEQ ID NO: 502463 - DNA, 120 bp, Artificial Sequence
  ENSG00000163812_100 (sequence is synthesized)
tggaaaggaaggctggggtgagggggcattttacttgcacagaggctgaccctgcctcccctcttcactgaccccatctccaaggtagacctcagccatgtcagtccctgttctgggagg

SEQ ID NO: 502464 - DNA, 120 bp, Artificial Sequence
  ENSG00000163812_101 (sequence is synthesized)
tgctgggctgggccacagccagggttatgtaggtaattaacctgtccaaccctgagcctcgcctccccacaccagcaacacagtggtctctctgtggtgaccattcacagcataacattc

SEQ ID NO: 502465 - DNA, 120 bp, Artificial Sequence
  ENSG00000163812_102 (sequence is synthesized)
tgcttagcctcagactgaaagcattgcaactgatgtcaaaaccagatgagatcttacagggagagagattgggtgcaatttgcctctttctttgaataaaaagctctttgctcaccctca

SEQ ID NO: 502466 - DNA, 120 bp, Artificial Sequence
  ENSG00000163812_103 (sequence is synthesized)
ggtctctgcctagcatggggggaggcgttttttctcacaaaaagcagcattctgttacttggcaccacaggaagtatttcccagccaaagcagattttagggattcaatcctaggtgact

SEQ ID NO: 502467 - DNA, 120 bp, Artificial Sequence
  ENSG00000163812_104 (sequence is synthesized)
cttctggctgaggcttcacggccttcctgcctcctaggttagggcaggatcggtattctaaatgttggctggtattcagccagggccccaccttagagcccaaaatgcttatgttcaggc

SEQ ID NO: 502468 - DNA, 120 bp, Artificial Sequence
  ENSG00000163812_105 (sequence is synthesized)
gtcatgcctggtgacgggcttgcttctgttctggttccacgtactcccggaggtggctgctcacttgacccagggctggtgggtagacggatctgtagggaatcgctagctggccctctg

SEQ ID NO: 502469 - DNA, 120 bp, Artificial Sequence
  ENSG00000163812_106 (sequence is synthesized)
gtccctcctggtcaggccttgtcctgactaagtgttcctgagtggcaaattctgagtgcccctgtcccgggagcccgtgaggtcagaggattctcacaacaatggtgtctgcactggttt

SEQ ID NO: 502470 - DNA, 120 bp, Artificial Sequence
  ENSG00000163814_0 (sequence is synthesized)
agggcggagcgcagctgcgccgggcttgggcgcctggggccgccgctccccaccgtcgttttccccaccgaggccgaggcgtcccggagtcatggccggcctgaactgcggggtctctat

SEQ ID NO: 502471 - DNA, 120 bp, Artificial Sequence
  ENSG00000163814_1 (sequence is synthesized)
cgcactgctaggggttctgctgctgggtgcggcgcgcctgccgcgcggggcagaagcttttgagattgctctgccacgagaaagcaacattacagttctcataaagctggggaccccgac

SEQ ID NO: 502472 - DNA, 120 bp, Artificial Sequence
  ENSG00000163814_2 (sequence is synthesized)
tctgctggcaaaaccctgttacatcgtcatttctaaaagacatataaccatgttgtccatcaagtctggagaaagaatagtctttacctttagctgccagagtcctgagaatcactttgt

SEQ ID NO: 502473 - DNA, 120 bp, Artificial Sequence
  ENSG00000163814_3 (sequence is synthesized)
catagagatccagaaaaatattgactgtatgtcaggcccatgtccttttggggaggttcagcttcagccctcgacatcgttgttgcctaccctcaacagaactttcatctgggatgtcaa

SEQ ID NO: 502474 - DNA, 120 bp, Artificial Sequence
  ENSG00000163814_4 (sequence is synthesized)
agctcataagagcatcggtttagagctgcagttttccatccctcgcctgaggcagatcggtccgggtgagagctgcccagacggagtcactcactccatcagcggccgaatcgatgccac

SEQ ID NO: 502475 - DNA, 120 bp, Artificial Sequence
  ENSG00000163814_5 (sequence is synthesized)
cgtggtcaggatcggaaccttctgcagcaatggcactgtgtcccggatcaagatgcaagaaggagtgaaaatggccttacacctcccatggttccaccccagaaatgtctccggcttcag

SEQ ID NO: 502476 - DNA, 120 bp, Artificial Sequence
  ENSG00000163814_6 (sequence is synthesized)
cattgcaaaccgctcatctataaaacgtctgtgcatcatcgagtctgtgtttgagggtgaaggctcagcaaccctgatgtctgccaactacccagaaggcttccctgaggatgagctcat

SEQ ID NO: 502477 - DNA, 120 bp, Artificial Sequence
  ENSG00000163814_7 (sequence is synthesized)
gacgtggcagtttgtcgttcctgcacacctgcgggccagcgtctccttcctcaacttcaacctctccaactgtgagaggaaggaggagcgggttgaatactacatcccgggctccaccac

SEQ ID NO: 502478 - DNA, 120 bp, Artificial Sequence
  ENSG00000163814_8 (sequence is synthesized)
caaccccgaggtgttcaagctggaggacaagcagcctgggaacatggcggggaacttcaacctctctctgcaaggctgtgaccaagatgcccaaagtccagggatcctccggctgcagtt

SEQ ID NO: 502479 - DNA, 120 bp, Artificial Sequence
  ENSG00000163814_9 (sequence is synthesized)
ccaagttttggtccaacatccacaaaatgaaagcaataaaatctacgtggttgacttgagtaatgagcgagccatgtcactcaccatcgagccacggcccgtcaaacagagccgcaagtt

SEQ ID NO: 502480 - DNA, 120 bp, Artificial Sequence
  ENSG00000163814_10 (sequence is synthesized)
tgtccctggctgtttcgtgtgtctagaatctcggacctgcagtagcaacctcaccctgacatctggctccaaacacaaaatctccttcctttgtgatgatctgacacgtctgtggatgaa

SEQ ID NO: 502481 - DNA, 120 bp, Artificial Sequence
  ENSG00000163814_11 (sequence is synthesized)
tgtggaaaaaaccataagctgcacagaccaccggtactgccaaaggaaatcctactcactccaggtgcccagtgacatcctccacctgcctgtggagctgcatgacttctcctggaagct

SEQ ID NO: 502482 - DNA, 120 bp, Artificial Sequence
  ENSG00000163814_12 (sequence is synthesized)
gctggtgcccaaggacaggctcagcctggtgctggtgccagcccagaagctgcagcagcatacacacgagaagccctgcaacaccagcttcagctacctcgtggccagtgccatacccag

SEQ ID NO: 502483 - DNA, 120 bp, Artificial Sequence
  ENSG00000163814_13 (sequence is synthesized)
ccaggacctgtacttcggctccttctgcccgggaggctctatcaagcagatccaggtgaagcagaacatctcggtgacccttcgcacctttgcccccagcttccaacaagaggcctccag

SEQ ID NO: 502484 - DNA, 120 bp, Artificial Sequence
  ENSG00000163814_14 (sequence is synthesized)
gcagggtctgacggtgtcctttataccttatttcaaagaggaaggcgttttcacggtgacccctgacacaaaaagcaaggtctacctgaggacccccaactgggaccggggcctgccatc

SEQ ID NO: 502485 - DNA, 120 bp, Artificial Sequence
  ENSG00000163814_15 (sequence is synthesized)
cctcacctctgtgtcctggaacatcagcgtgcccagagaccaggtggcctgcctgactttctttaaggagcggagcggcgtggtctgccagacagggcgcgcattcatgatcatccagga

SEQ ID NO: 502486 - DNA, 120 bp, Artificial Sequence
  ENSG00000163814_16 (sequence is synthesized)
gcagcggacccgggctgaggagatcttcagcctggacgaggatgtgctccccaagccaagcttccaccatcacagcttctgggtcaacatctctaactgcagccccacgagcggcaagca

SEQ ID NO: 502487 - DNA, 120 bp, Artificial Sequence
  ENSG00000163814_17 (sequence is synthesized)
gctagacctgctcttctcggtgacacttaccccaaggactgtggacttgactgtcatcctcatcgcagcggtgggaggtggagtcttactgctgtctgccctcgggctcatcatttgctg

SEQ ID NO: 502488 - DNA, 120 bp, Artificial Sequence
  ENSG00000163814_18 (sequence is synthesized)
tgtgaaaaagaagaaaaagaagacaaacaagggccccgctgtgggtatctacaatgacaacatcaatactgagatgccgaggcagccaaaaaagtttcagaaagggcgaaaggacaatga

SEQ ID NO: 502489 - DNA, 120 bp, Artificial Sequence
  ENSG00000163814_19 (sequence is synthesized)
ctcccatgtgtatgcagtcatcgaggacaccatggtatatgggcatctgctacaggattccagcggctccttcctgcagccagaggtggacacctaccggccgttccagggcaccatggg

SEQ ID NO: 502490 - DNA, 120 bp, Artificial Sequence
  ENSG00000163814_20 (sequence is synthesized)
ggtctgtcctccctccccacccaccatatgctccagggccccaactgcaaagttggccactgaggagccacctcctcgctcccctcctgagtctgagagtgaaccgtacaccttctccca

SEQ ID NO: 502491 - DNA, 120 bp, Artificial Sequence
  ENSG00000163814_21 (sequence is synthesized)
tcccaacaatggggatgtaagcagcaaggacacagacattcccttactgaacactcaggagcccatggagccagcagaataacttgatccattccagacgctttgctgagtttcataaag

SEQ ID NO: 502492 - DNA, 120 bp, Artificial Sequence
  ENSG00000163814_22 (sequence is synthesized)
cagggcactgagacacccgtccgtgttcctaaccagaaatcctaaagaagaggaattatacagaaggaacagcaggaggttttcctggacaccgccaacttcacattgctcagtggactc

SEQ ID NO: 502493 - DNA, 120 bp, Artificial Sequence
  ENSG00000163814_23 (sequence is synthesized)
attctaagggcaagacattgaaaatgatgaattccaatctggatacagtcatgacagctcatgtgctcctcaacttaggctgtgcggttagccagcctgtaatgagaggagagaggcctg

SEQ ID NO: 502494 - DNA, 120 bp, Artificial Sequence
  ENSG00000163814_24 (sequence is synthesized)
tccaaggagcctacctgaggtccctactctcactggggtccccaggatgaaaacgacaatgtgcctttttattattatttatttggtggtcctgtgttatttaagagatcaaatgtataa

SEQ ID NO: 502495 - DNA, 120 bp, Artificial Sequence
  ENSG00000163814_25 (sequence is synthesized)
ccacctagctcttttcacctgacttagtaataactcatactaactggtttggatgcctgggttgtgacttctactgaccgctagataaacgtgtgcctgtcccccaggtggtgggaataa

SEQ ID NO: 502496 - DNA, 120 bp, Artificial Sequence
  ENSG00000163814_26 (sequence is synthesized)
tttacaatctgtccaaccagaaaagaatgtgtgtgtttgagcagcattgacacatatctgctttgataagagacttcctgattctctaggtcggttcgtggttatcccattgtggaaatt

SEQ ID NO: 502497 - DNA, 120 bp, Artificial Sequence
  ENSG00000163814_27 (sequence is synthesized)
catcttgaatcccattgtcctatagtcctagcaataagagaaatttcctcaagtttccatgtgcggttctcctagctgcagcaatactttgacatttaaagagaaatttagagaatattc

SEQ ID NO: 502498 - DNA, 120 bp, Artificial Sequence
  ENSG00000163814_28 (sequence is synthesized)
tcatcctctaaaaatgtttaaatatataccaaacagtggccccctgcattagttttctgttgccactgcaacctattacttggtagcttaaaaacaacacattagcttatagtcctgggg

SEQ ID NO: 502499 - DNA, 120 bp, Artificial Sequence
  ENSG00000163814_29 (sequence is synthesized)
atcagaattccaaaatggatgtccctgaatgaaaatcaaggtgtcagcagagctgtgctccttctgaaggctctagggagaagccggttccttgccatttcaagcttctagaggctggct

SEQ ID NO: 502500 - DNA, 120 bp, Artificial Sequence
  ENSG00000163814_30 (sequence is synthesized)
gcattcccaggctccagtggctggtcaagcttttctcacatggcatcactgtgacactggccctcccacttccctctttgacttacaaagcccaccaggaagatccaggataatctctcc

SEQ ID NO: 502501 - DNA, 120 bp, Artificial Sequence
  ENSG00000163814_31 (sequence is synthesized)
atctaaagttccttcatcatcctggaagagccttttgccatgcaagacaacatagccacaggtggggattaggaccagaacatctttggggtgctgttattctgcctaccacaccttcct

SEQ ID NO: 502502 - DNA, 120 bp, Artificial Sequence
  ENSG00000163814_32 (sequence is synthesized)
gccactgactcccacaggagaggctacaaaatgatctggcgcacagggatgttttgtttagcttgcggactctaacacttaaaaaaaaacccagatcagaagatctggccatgctggggc

SEQ ID NO: 502503 - DNA, 120 bp, Artificial Sequence
  ENSG00000163814_33 (sequence is synthesized)
tcacattctcacctagcaacaactggctggagctgggcaccagctctgcctttagaaggggtgtccacttcaccaggtcaccacagcccacactacgccctatcacttcccacaatgagg

SEQ ID NO: 502504 - DNA, 120 bp, Artificial Sequence
  ENSG00000163814_34 (sequence is synthesized)
ctgagtgtttgtttctactgatcaatgcccctgcaggttgcatttattgtaatgaaaaagaaagactgggattaatctctaatcaggtgagtagaccatgagaccaatgtgtgctcacat

SEQ ID NO: 502505 - DNA, 78 bp, Artificial Sequence
  ENSG00000163814_35 (sequence is synthesized)
aatcaggtgagtagaccatgagaccaatgtgtgctcacattaccgtgagacaggatctcattctgttgcctaggctgg

SEQ ID NO: 502506 - DNA, 77 bp, Artificial Sequence
  ENSG00000163814_36 (sequence is synthesized)
ccagccccacaccctcatttataccaattacctgcccagtaactgtggacttttgcttcctcacccctgctctgatc

SEQ ID NO: 502507 - DNA, 120 bp, Artificial Sequence
  ENSG00000163814_37 (sequence is synthesized)
agtaactgtggacttttgcttcctcacccctgctctgatctggaaggagagggattatgttatagcttgtcagcacagtcccaagttcaatatttctgcggcaaaaacttccttcaaaaa

SEQ ID NO: 502508 - DNA, 120 bp, Artificial Sequence
  ENSG00000163814_38 (sequence is synthesized)
ataaatgtacttcattgtattcaatgaattcaccttggaaatgcaccgcctcaacttgttcacatggcataaatgaaaggaattttatagtctcctaaatggcgtgtactgcaagacctc

SEQ ID NO: 502509 - DNA, 120 bp, Artificial Sequence
  ENSG00000163814_39 (sequence is synthesized)
ttgaacactttccagaggataggatatttaagtcatgcccttggcgttgcctatggcacctttcccttctgaaagtctggttcctgcccagtgacccttggccttgtgagccgagatgct

SEQ ID NO: 502510 - DNA, 120 bp, Artificial Sequence
  ENSG00000163814_40 (sequence is synthesized)
gaccctgcataaagggccaaaggagggctgcggcttccttccctcactgaagagcccttatttgaattcactgtgtggagccctagccctccattctcgacattccccaacctcccagcc

SEQ ID NO: 502511 - DNA, 120 bp, Artificial Sequence
  ENSG00000163814_41 (sequence is synthesized)
ccttccaagcaggactaggtgccctgcattccacccaaggtgggattggccttccttaggctggctacttgtcaccatcaccgacatcactgttgcctgcaaggacaccacgtggccatt

SEQ ID NO: 502512 - DNA, 120 bp, Artificial Sequence
  ENSG00000163814_42 (sequence is synthesized)
ttccttcaactgagggctcaaaactcctggacaagttgctggctcctgagaccagtatttcctggagctgtgcctcagtgaaggggcccagcctgaggaaccctggctcttttctttaaa

SEQ ID NO: 502513 - DNA, 120 bp, Artificial Sequence
  ENSG00000163814_43 (sequence is synthesized)
gcccaggccccacttacgtaaaacatttcagggtcactggaaacagtgaagtgccatttgttgaagcctactgcatgccagcccactgctcatccacgtggtctgccatgcctacgagga

SEQ ID NO: 502514 - DNA, 120 bp, Artificial Sequence
  ENSG00000163814_44 (sequence is synthesized)
aggccagcgcatgcaggactggtctctaatgctgtggtcattgcacagaagggaaaggtctcaaggaagagtcaactggaacaagcacaagcccaccggacatggccttggtaaaggtta

SEQ ID NO: 502515 - DNA, 120 bp, Artificial Sequence
  ENSG00000163814_45 (sequence is synthesized)
gcagactggtgtgtgtggatctgcagtgcttcactggaaataatttattcattgcagatactttttaggtggcattttattcatttcctgtgctttaaataaacaaatgtaccaaaaaac

SEQ ID NO: 502516 - DNA, 120 bp, Artificial Sequence
  ENSG00000163814_46 (sequence is synthesized)
aagtatcaagctgtttaagtgcttcggctacttgtcccctggttcagtagaggccccggtttcccagttgttgactgtgacaggctcagcatgggctcagcagatgctgtcttaatttgt

SEQ ID NO: 502517 - DNA, 120 bp, Artificial Sequence
  ENSG00000163814_47 (sequence is synthesized)
ggatgatacagaaagccaggctttgggatacaagttctttcctcttcatttgatgccgtgcactgtgtgaagcagatgtttttgtccggaaataaaaataatagtcttggagtctcgcca

SEQ ID NO: 502518 - DNA, 120 bp, Artificial Sequence
  ENSG00000163814_48 (sequence is synthesized)
tcctttttcttcctcctccagcaccttcgttgtttcctgggtagtctgcctgggtgaggctcccttcctgtttctcatctgtggcttctgaaacacttagactctggacccagcaagagt

SEQ ID NO: 502519 - DNA, 120 bp, Artificial Sequence
  ENSG00000163814_49 (sequence is synthesized)
ttcaggaagtgggttgctaggcagttagacaggcttgttggtgaacacccggtatgtagttccatttcagcacaataaaaagaaatcttgcattcaagatgctaaattgtttttaacgaa

SEQ ID NO: 502520 - DNA, 120 bp, Artificial Sequence
  ENSG00000163814_50 (sequence is synthesized)
attgcctctgagttcttgctcactgctacattgcccgtgtcttcagactgcacatcccaaagggcttagcttcccagctggaagttggtggagggaggagggcagagaaatggaaggact

SEQ ID NO: 502521 - DNA, 120 bp, Artificial Sequence
  ENSG00000163814_51 (sequence is synthesized)
ggagccaaagacctcactggactcagagttgcctttccagctttttggagacagcctcattcagacaagctctggagttggtcaaagcttggttcaaatcctgactccaccacttattaa

SEQ ID NO: 502522 - DNA, 120 bp, Artificial Sequence
  ENSG00000163815_0 (sequence is synthesized)
gtcactgcgttcggacccagacccgctgcaggcagcagcagcccccgcccgcgcagcagcatggagctctggggggcctacctcctcctctgcctcttctccctcctgacccaggtcacc

SEQ ID NO: 502523 - DNA, 120 bp, Artificial Sequence
  ENSG00000163815_1 (sequence is synthesized)
accgagccaccaacccagaagcccaagaagattgtaaatgccaagaaagatgttgtgaacacaaagatgtttgaggagctcaagagccgtctggacaccctggcccaggaggtggccctg

SEQ ID NO: 502524 - DNA, 120 bp, Artificial Sequence
  ENSG00000163815_2 (sequence is synthesized)
ctgaaggagcagcaggccctgcagacggtctgcctgaaggggaccaaggtgcacatgaaatgctttctggccttcacccagacgaagaccttccacgaggccagcgaggactgcatctcg

SEQ ID NO: 502525 - DNA, 120 bp, Artificial Sequence
  ENSG00000163815_3 (sequence is synthesized)
ctgggcctcaacgacatggcggccgagggcacctgggtggacatgaccggcgcccgcatcgcctacaagaactgggagactgagatcaccgcgcaacccgatggcggcaagaccgagaac

SEQ ID NO: 502526 - DNA, 120 bp, Artificial Sequence
  ENSG00000163815_4 (sequence is synthesized)
tgcgcggtcctgtcaggcgcggccaacggcaagtggttcgacaagcgctgccgcgatcagctgccctacatctgccagttcgggatcgtgtagccggcggggcgggggccgtggggggcc

SEQ ID NO: 502527 - DNA, 120 bp, Artificial Sequence
  ENSG00000163815_5 (sequence is synthesized)
tggaggagggcaggggccgcgggaggccgggaggagggtggggaccttgcagcccccatcctctccgtgcgcttggagcctctttttgcaaataaagttggtgcagcttcgcggagagga

SEQ ID NO: 502528 - DNA, 120 bp, Artificial Sequence
  ENSG00000163815_6 (sequence is synthesized)
cggcttagcccagagcctggcctcctctgtaagagtggaaaacctgggttccttctgccctcatcttattagtagctgtgatgggcacacactcagccaagcactgagatgttgtgaaca

SEQ ID NO: 502529 - DNA, 120 bp, Artificial Sequence
  ENSG00000163817_0 (sequence is synthesized)
ggtgggacggcgcgcctggcgaccgcgcactgagactgccgtgccggacccccgagccggagccgagcgcgccgaggccggggccatggagaaagcgcggccgctgtgggccaactcgct

SEQ ID NO: 502530 - DNA, 120 bp, Artificial Sequence
  ENSG00000163817_1 (sequence is synthesized)
gagaaagcgcggccgctgtgggccaactcgctacagttcgtgttcgcctgcatctcgtacgccgtgggcctgggcaacgtgtggcgattcccgtacctgtgccagatgtacggcggaggt

SEQ ID NO: 502531 - DNA, 120 bp, Artificial Sequence
  ENSG00000163817_2 (sequence is synthesized)
agtttcctggtcccctacatcatcatgcttatcgtggagggaatgccgctcttgtacctggaactggctgtggggcagcgcatgcggcagggcagcatcggcgcctggaggaccatcagc

SEQ ID NO: 502532 - DNA, 120 bp, Artificial Sequence
  ENSG00000163817_3 (sequence is synthesized)
ccgtacctcagtggtgtcggggtcgccagcgtggtggtctctttcttcctctccatgtactacaacgtcatcaacgcctgggccttctggtacctcttccactccttccaggatcccctg

SEQ ID NO: 502533 - DNA, 120 bp, Artificial Sequence
  ENSG00000163817_4 (sequence is synthesized)
ccgtggtctgtctgcccactgaatggtaaccacacgggctacgatgaggagtgtgagaaggcgtcctccacacagtacttctggtacaggaaaaccctcaatatctcgccgtccctccag

SEQ ID NO: 502534 - DNA, 120 bp, Artificial Sequence
  ENSG00000163817_5 (sequence is synthesized)
gagaacgggggtgtgcagtgggagccggcgctgtgcctcctcctggcctggctggtggtgtacctgtgcatcctgcgtggcaccgagtccactggcaaggtggtgtatttcacggcgtca

SEQ ID NO: 502535 - DNA, 120 bp, Artificial Sequence
  ENSG00000163817_6 (sequence is synthesized)
ctgccctattgcgtgctcatcatctacctcatcaggggcctcacgctccacggagccaccaatggcctcatgtacatgttcactcccaagatagagcagctggccaaccccaaggcctgg

SEQ ID NO: 502536 - DNA, 120 bp, Artificial Sequence
  ENSG00000163817_7 (sequence is synthesized)
atcaatgcagccacccagatcttcttctcacttggcctgggcttcggcagcctgatcgccttcgccagctacaatgagccatccaacaactgccagaagcacgccatcatcgtgtccctc

SEQ ID NO: 502537 - DNA, 120 bp, Artificial Sequence
  ENSG00000163817_8 (sequence is synthesized)
atcaacagcttcacctccatatttgccagcattgtcaccttctccatctatggcttcaaggccaccttcaattatgaaaactgcttgaagaaggtgagtctgctgctgaccaacactttt

SEQ ID NO: 502538 - DNA, 120 bp, Artificial Sequence
  ENSG00000163817_9 (sequence is synthesized)
gaccttgaagatggctttttgacagccagcaacctggagcaggtgaagggctacctcgcatctgcctacccaagcaaatacagcgagatgttcccgcaaatcaaaaactgcagcttggaa

SEQ ID NO: 502539 - DNA, 120 bp, Artificial Sequence
  ENSG00000163817_10 (sequence is synthesized)
tcggagctagacacggccgtccagggcactggcctggcattcatcgtctacacagaggccattaaaaacatggaggtgtcccagctgtggtcggtgctctacttcttcatgctgctgatg

SEQ ID NO: 502540 - DNA, 120 bp, Artificial Sequence
  ENSG00000163817_11 (sequence is synthesized)
ctgggcattgggagcatgctggggaacacagcggccatcctcacccctctgacagacagcaagatcatctccagccacctgcccaaggaggccatctcaggtctggtgtgccttgtcaac

SEQ ID NO: 502541 - DNA, 120 bp, Artificial Sequence
  ENSG00000163817_12 (sequence is synthesized)
tgtgccattggcatggtgttcacgatggaggctgggaactactggtttgacatattcaacgactacgcggccacactgtccctgctgctcatcgtgctggtggagacgattgccgtgtgc

SEQ ID NO: 502542 - DNA, 120 bp, Artificial Sequence
  ENSG00000163817_13 (sequence is synthesized)
tacgtgtacgggctgaggagatttgaaagtgaccttaaggccatgaccggccgagctgtgagctggtactggaaggtgatgtgggctggcgtaagcccactgctgattgtcagcctcttt

SEQ ID NO: 502543 - DNA, 120 bp, Artificial Sequence
  ENSG00000163817_14 (sequence is synthesized)
gtcttctacctgagcgactacatcctcacggggaccctgaagtatcaagcctgggacgcctcccagggccagctcgtgaccaaagattacccggcctatgcactggctgtcatcgggctg

SEQ ID NO: 502544 - DNA, 120 bp, Artificial Sequence
  ENSG00000163817_15 (sequence is synthesized)
cttgtggcctcctccaccatgtgcatccccctggcggccctggggacttttgttcagcgtcgcctcaagaggggagacgcagaccccgtggcctgagatgtgggcttcccagccgctcac

SEQ ID NO: 502545 - DNA, 120 bp, Artificial Sequence
  ENSG00000163817_16 (sequence is synthesized)
ggttttacagatactatttacaggcggaaactcctcggctgctttttcaaatgcttaagccaggagtgctcagcccatcaacttcctgagtgtctaaagaagatgaggaaggtgtgcagg

SEQ ID NO: 502546 - DNA, 120 bp, Artificial Sequence
  ENSG00000163817_17 (sequence is synthesized)
aagaaaactcccttgggagaacgcacaccctcccgtggtggctgttcctccctgtcacctgcctcctcatcatggaagggggtgggctatgaaagccggtctcaaagataactgcatcct

SEQ ID NO: 502547 - DNA, 120 bp, Artificial Sequence
  ENSG00000163817_18 (sequence is synthesized)
tcattccaggaaagccctagaattagggcacattgcaaactgaaatatgactataattcttatgggaccaaatttaagcaatttttgtttttggctgaagagacaccaaaatattagagg

SEQ ID NO: 502548 - DNA, 120 bp, Artificial Sequence
  ENSG00000163817_19 (sequence is synthesized)
acaaatatttttagatccatttaaggagttttgaagtgcctaagatgacctatttgtcagtggtgcaaaattaattctcttcttttttgagttgtagtgaatatgcaatttctgtgttcc

SEQ ID NO: 502549 - DNA, 120 bp, Artificial Sequence
  ENSG00000163817_20 (sequence is synthesized)
ccttccaccctttaaatcttaggatgacaagttataaagaaagaagatctttgtctgggacccccaaagggatcctttctctaaggtctctgacggtgggtccaggaccagacctctcta

SEQ ID NO: 502550 - DNA, 120 bp, Artificial Sequence
  ENSG00000163817_21 (sequence is synthesized)
caaaaaattgccccaactacagtttgcaaccccaaaccacattagaagtctgtgcagacatccctccgtggtgtgtgtcttggtgcattggaaaaggagtcaggagccactgtgaggtga

SEQ ID NO: 502551 - DNA, 120 bp, Artificial Sequence
  ENSG00000163817_22 (sequence is synthesized)
aaaaaattagctgggagtggtggcataggcctgtaattccagctactctggctgctgaggcacaagaatcatttgaacctaggaggtggcggttgctgtgagccaagatcatgccactcc

SEQ ID NO: 502552 - DNA, 120 bp, Artificial Sequence
  ENSG00000163817_23 (sequence is synthesized)
ctgactcaaaaaaaaaaaaaaaaaaaagtggctctgactttcccataggcttaatattacatttggacatcgtggccaactctatcaagaccacaaataccacttacaattaattttaaa

SEQ ID NO: 502553 - DNA, 120 bp, Artificial Sequence
  ENSG00000163817_24 (sequence is synthesized)
acaaataccacttacaattaattttaaattattcatctgtacatagttttctaaaatgtatataattcaaacagagcatcttgtaactgaagacacaccatatctatgatatcgcattag

SEQ ID NO: 502554 - DNA, 90 bp, Artificial Sequence
  ENSG00000163817_25 (sequence is synthesized)
aagaaaaattgtttctgctttgagatgttgttagcctataactttagccccaactctgtgctcacagaaacatgcgctgtaatgaatcaa

SEQ ID NO: 502555 - DNA, 84 bp, Artificial Sequence
  ENSG00000163817_26 (sequence is synthesized)
ttgttaacaatatgtttgcaggctgtatgcttggtagacacaatgcacagcagaaagctgcagggacctctgcccaagaaagcc

SEQ ID NO: 502556 - DNA, 68 bp, Artificial Sequence
  ENSG00000163817_27 (sequence is synthesized)
agacctgactgtcccccagcccgacacctgtaaagggtcggtgctgaggaggaatagtgaatgtccct

SEQ ID NO: 502557 - DNA, 75 bp, Artificial Sequence
  ENSG00000163817_28 (sequence is synthesized)
agataagaggaaggcttctgtctcctgcttgtccctggtaatggaatgtctcggtgtaaaaagctgaccattccc

SEQ ID NO: 502558 - DNA, 70 bp, Artificial Sequence
  ENSG00000163817_29 (sequence is synthesized)
actctgcacatctgggcacagtacctttccttgaacttattcgtgatacagattcctttgctcacatgtt

SEQ ID NO: 502559 - DNA, 76 bp, Artificial Sequence
  ENSG00000163817_30 (sequence is synthesized)
tgctcacatgtttccctgctgaccttcttcccacctgttgccctgctacactcccctcgctaagaagcgccggtgc

SEQ ID NO: 502560 - DNA, 65 bp, Artificial Sequence
  ENSG00000163817_31 (sequence is synthesized)
tcaataaatactgagggaactcagaggccagcgccggtgcgggtcctccacatgctgagcgccgg

SEQ ID NO: 502561 - DNA, 120 bp, Artificial Sequence
  ENSG00000163817_32 (sequence is synthesized)
tgcaataaagtaggtcgttacccctaaagtgagcgagtcccttcctgctctaacgtccagtgcttccttgagatcatggaattctggagagtttctgtggatatatttgcacagatatct

SEQ ID NO: 502562 - DNA, 120 bp, Artificial Sequence
  ENSG00000163817_33 (sequence is synthesized)
ttgaagacacaaacactcacctgggacgttggccggagatgtctttttatttttgtgctgtaaaattctcttacagcaaaaataggctttagaaaggtcttctactgtcttcagcaacca

SEQ ID NO: 502563 - DNA, 120 bp, Artificial Sequence
  ENSG00000163817_34 (sequence is synthesized)
tctcatcttccagcttcacctgattgtccagttatcatacatttgactttcaaatgtatgaaccagcatgtaccccatggatttaatcttatctaccccgtggattcaatcttcttatca

SEQ ID NO: 502564 - DNA, 120 bp, Artificial Sequence
  ENSG00000163817_35 (sequence is synthesized)
gaaggttcttttatgtcaaaaaacctgctgtcaaggcttgaagagccggcacactcaatggcaaacacagcaccgagtctgctctgaatcctggaggatctggccctcctctcaatcccc

SEQ ID NO: 502565 - DNA, 120 bp, Artificial Sequence
  ENSG00000163817_36 (sequence is synthesized)
actcacagtcaccgtcttacaactcagggccacctgggatcagtcatcagtcagggtgcgtaagccttgaataccaggtagcctcaggagtgaaaagataaatgtcctagatcattacct

SEQ ID NO: 502566 - DNA, 120 bp, Artificial Sequence
  ENSG00000163817_37 (sequence is synthesized)
tattcagtgtccccaccttgcagcgcattccaaccacctgggagcatttaaaactccagatgcccacaccacaccctggggccacccatcagaccttctggaagcaagacctgggcctcc

SEQ ID NO: 502567 - DNA, 120 bp, Artificial Sequence
  ENSG00000163817_38 (sequence is synthesized)
atggccccaaaaactccctaggtgatccgatgtgcagccaaatctgagaggccccatttaaaaaagaaagaacatgggtggtacattgaggagtatttacattttataaaatgacttaaa

SEQ ID NO: 502568 - DNA, 120 bp, Artificial Sequence
  ENSG00000163817_39 (sequence is synthesized)
aatttgaaggcatttttgagcatttccaattatatggaagagttacttctacggaatagtttttgctcatggaactcaaacagatgaagcaccactgttacagaataatgtgctccagat

SEQ ID NO: 502569 - DNA, 120 bp, Artificial Sequence
  ENSG00000163817_40 (sequence is synthesized)
gaaaatgtctcgtttctgtgaatttcatgaagagcagaacatttctcaagaatcctcttgagccagtaatcaatcctgtctcaaaaaatgttctttgccatttcctagatactgcacaaa

SEQ ID NO: 502570 - DNA, 120 bp, Artificial Sequence
  ENSG00000163817_41 (sequence is synthesized)
agtggccatgtcgacatttgtccacccaccctccaataagctggagcgacaaagggacattccatccctgtacccttagtggtagccatgacacgatggccagatcatggactccggaaa

SEQ ID NO: 502571 - DNA, 120 bp, Artificial Sequence
  ENSG00000163817_42 (sequence is synthesized)
gctttctgtttttactggaaacatagcaaaccttgatttagctccaagaaattgagtagggaaatatttgttttttagcaattgtcatagtaaataaaactctaagcaagtgtatctaca

SEQ ID NO: 502572 - DNA, 120 bp, Artificial Sequence
  ENSG00000163817_43 (sequence is synthesized)
ggatcacctcctcagccaggtcatccccactccctgttaattctggagcattaagtctttctttcagcttctcctcttcatcctcactgtcccccaactgctgcacccctgccactgcct

SEQ ID NO: 502573 - DNA, 120 bp, Artificial Sequence
  ENSG00000163817_44 (sequence is synthesized)
cacctcaagcccctttcagactgtggaccaagctttttgccatgagcaccactctggtcatcttgcttgcctgcttacatggttccacgcacccgtttccctacagagtttcccaaccca

SEQ ID NO: 502574 - DNA, 120 bp, Artificial Sequence
  ENSG00000163817_45 (sequence is synthesized)
cccattctccatgcaccccacacccagggttcatccatggagggtgcactcttgcctttgggatggggcaagttcttcatttggcaaatgcagtccctagaaataaaatgactgtgtcat

SEQ ID NO: 502575 - DNA, 120 bp, Artificial Sequence
  ENSG00000163817_46 (sequence is synthesized)
ccttccccttccccattccagacgccaccgatgtcagtgccgagagtcaacccacacctagacctcccctgccaggccacaccccctccatctctgaatgcccagacctgtgcagtaact

SEQ ID NO: 502576 - DNA, 120 bp, Artificial Sequence
  ENSG00000163817_47 (sequence is synthesized)
gcctatgaatcagggccccatttgtgttttaattattttaccctgcagtattccattgcacacctccgcactggcgtatagtggtgagcatagctgcttctggttacacacctcctatgg

SEQ ID NO: 502577 - DNA, 120 bp, Artificial Sequence
  ENSG00000163817_48 (sequence is synthesized)
ctgaggtgctatggaggatacgtagcaccttatgtcctccacatagcacctgtattctccacagcaccttagccctgggaggtgtgcagcttgaggtgtgtgtttcatctgccagggagt

SEQ ID NO: 502578 - DNA, 120 bp, Artificial Sequence
  ENSG00000163817_49 (sequence is synthesized)
ggatggggccaggagagctggtctccagccctaggggtgcccctgatggctgcgtgctgtaggtgagctccttcccctctctgggctactctcctgttgcgggtctgagcatttgggatt

SEQ ID NO: 502579 - DNA, 120 bp, Artificial Sequence
  ENSG00000163817_50 (sequence is synthesized)
gtacgccgtgggcctgggcaacgtgtggcgattcccgtacctgtgccagatgtacggcggagtcatgtaagacgtgcctacttccccttcaccttcttccaaaattgcaagtttcctgag

SEQ ID NO: 502580 - DNA, 120 bp, Artificial Sequence
  ENSG00000163817_51 (sequence is synthesized)
tgtacagcctgtggaactgttgactgggtttgactccaaatgggaaacttttgggggaagaccaagatggaggcgagtgaatgaagagaaggaaggcgctggggtggagagtctcacaga

SEQ ID NO: 502581 - DNA, 120 bp, Artificial Sequence
  ENSG00000163817_52 (sequence is synthesized)
atagagcagtggttcccaaagtggaacccccaggccagcagcttcagcatcccctggtgtgctcggtgttccttacattaaacattacattaaacattgtgtatatgcacacacatacac

SEQ ID NO: 502582 - DNA, 120 bp, Artificial Sequence
  ENSG00000163818_0 (sequence is synthesized)
agaggcttctaaacaacctaccctccttccccattttctgtggtccaactaccctcggcgatcccaggcttggcggggcaccgcctggcctctcccgttcctttaggctgccgccgctgc

SEQ ID NO: 502583 - DNA, 120 bp, Artificial Sequence
  ENSG00000163818_1 (sequence is synthesized)
ctgccgccatggcagagttgggcctaaatgagcaccatcaaaatgaagttattaattatatgcgttttgctcgttcaaagagaggcttgagactcaaaactgtagattcctgcttccaag

SEQ ID NO: 502584 - DNA, 120 bp, Artificial Sequence
  ENSG00000163818_2 (sequence is synthesized)
acctcaaggagagcaggctggtggaggacaccttcaccatagatgaagtctctgaagtcctcaatggattacaagctgtggttcatagtgaggtggaatctgagctcatcaacactgcct

SEQ ID NO: 502585 - DNA, 120 bp, Artificial Sequence
  ENSG00000163818_3 (sequence is synthesized)
ataccaatgtgttacttctgcgacagctgtttgcacaagctgagaagtggtatcttaagctacagacagacatctctgaacttgaaaaccgagaattattagaacaagttgcagaatttg

SEQ ID NO: 502586 - DNA, 120 bp, Artificial Sequence
  ENSG00000163818_4 (sequence is synthesized)
aaaaagcagagattacatcttcaaacaaaaagcccatcttagatgtcacaaagccaaaacttgctccacttaatgaaggtggaacagcagaactcctaaacaaggaaattttaagacttc

SEQ ID NO: 502587 - DNA, 120 bp, Artificial Sequence
  ENSG00000163818_5 (sequence is synthesized)
aagaagagaatgagaaattgaagtcaaggttgaagaccattgaaatacaggctacaaatgcactggatgaaaagtcaaaactagaaaaagcactgcaagatttacagcttgatcaaggaa

SEQ ID NO: 502588 - DNA, 120 bp, Artificial Sequence
  ENSG00000163818_6 (sequence is synthesized)
atcaaaaggattttataaaggcccaagacttaagtaacttagaaaacactgtcgctgccttaaagagtgagtttcagaagacacttaatgacaagacagaaaaccagaagtcactggagg

SEQ ID NO: 502589 - DNA, 120 bp, Artificial Sequence
  ENSG00000163818_7 (sequence is synthesized)
agaatctggcgacagccaagcacgatctactcagggttcaggagcagctgcacatggctgaaaaggaattagaaaagaaatttcagcaaacagcagcttatcgaaacatgaaagagattc

SEQ ID NO: 502590 - DNA, 120 bp, Artificial Sequence
  ENSG00000163818_8 (sequence is synthesized)
ttaccaagaagaatgaccaaatcaaagatctgaggaaaagactggcacaatatgaacctgaagattaaaactgaagatttcctctggaagctaccacatgcaaacatacaagcagtctca

SEQ ID NO: 502591 - DNA, 120 bp, Artificial Sequence
  ENSG00000163818_9 (sequence is synthesized)
cctcaggcatgtattttgaaaagcattttgtcatatcccctctccttatttttctaatatttagactttgaatatttagaactagagttcctattttcagctagttgaaaacagagaaaa

SEQ ID NO: 502592 - DNA, 120 bp, Artificial Sequence
  ENSG00000163818_10 (sequence is synthesized)
cctagtgattctgtctggtcatcccacacacctctctactgagtgctccagagtcttagctcacatgcactgagaattctttacagcaaagaagagatttttagagtgggaagaagaggc

SEQ ID NO: 502593 - DNA, 120 bp, Artificial Sequence
  ENSG00000163818_11 (sequence is synthesized)
ttatccttctgcattagtataaagagtctgtatttttaataaatgttaaataagctaacaatgtttgtacttatgcattccccatgggtaaaaataaataatagcattgttaaagatagt

SEQ ID NO: 502594 - DNA, 120 bp, Artificial Sequence
  ENSG00000163818_12 (sequence is synthesized)
acaaataaatatgtctctttatttttaaaaatgaaatcttaattcatttactctatttgatgataaactataaattcattgaaaatgtgaattctattatgggtagcctttttaccaatt

SEQ ID NO: 502595 - DNA, 120 bp, Artificial Sequence
  ENSG00000163818_13 (sequence is synthesized)
ttatgggtagcctttttaccaattataaggaaaatttacagcagtgaacatgaacattcacttagcttcctcagtctctccatcttaaagatcatttatcagaggaggttcagcattttt

SEQ ID NO: 502596 - DNA, 120 bp, Artificial Sequence
  ENSG00000163818_14 (sequence is synthesized)
tgcagcataacttttcatgagtctgtattactaatggataagtcaaatccatcctgcacttctacagtttagaaagtatctggactcagaataaatgtaatatttatacttgtttccaga

SEQ ID NO: 502597 - DNA, 120 bp, Artificial Sequence
  ENSG00000163818_15 (sequence is synthesized)
atgttattttacattttatgttcaataagaacactttttaaaagacgtatattcaacataaaatcagctatcagacttcagattagactttatttatgtgggtctataataattgtattt

SEQ ID NO: 502598 - DNA, 120 bp, Artificial Sequence
  ENSG00000163818_16 (sequence is synthesized)
aactgggcatcatatccacagttatgtaaggcagtgatatactataaggataaacaaagtcaagtccataaagcaataatccctcagaaggaaagtccttacttttcacatattaatatt

SEQ ID NO: 502599 - DNA, 120 bp, Artificial Sequence
  ENSG00000163818_17 (sequence is synthesized)
tagtaatttttcctgcttctaaaagtgagagtatcacaccctaaatgaacactgtctactaagagacatcattccatttccacaaatgaagattttattccaagaaacgagtttactgat

SEQ ID NO: 502600 - DNA, 120 bp, Artificial Sequence
  ENSG00000163818_18 (sequence is synthesized)
tggagcatagggcttgttgttatttttattcaagcttttagtaatagccttgaatttattatttttcttataggctttttgttaaaatagtgaaggaacaaatgttaaagggtaagataa

SEQ ID NO: 502601 - DNA, 120 bp, Artificial Sequence
  ENSG00000163818_19 (sequence is synthesized)
tttccctgcaaaaggacacagaaggcagtcttaagaagatgaatggatgagagaagggagagaataaaatgcaataacgagccagcatttactatgtattttctcctcacctgtctctcc

SEQ ID NO: 502602 - DNA, 120 bp, Artificial Sequence
  ENSG00000163818_20 (sequence is synthesized)
atatttaggtcacttaccagtttctgtgcccttttggagcttttgttgagggcttcattctcaccctgtatttctttagccctaaattgacactctctccaaaaatccattccattgtct

SEQ ID NO: 502603 - DNA, 120 bp, Artificial Sequence
  ENSG00000163818_21 (sequence is synthesized)
gtggaccaagatgttctatgtaattcagaagcagaactcttggctaaagggctagtgtggccttcagaaaccattcaattattttctccctacacctttgtcagtttgaaaccagtgagg

SEQ ID NO: 502604 - DNA, 120 bp, Artificial Sequence
  ENSG00000163818_22 (sequence is synthesized)
aaaaaaggtatgttgataagaaacctatattgctaggtagaatttgtacttgttttcttggtagcagttttgaaatattctgtacagtacgttcctattgtttaataataaattcaaaaa

SEQ ID NO: 502605 - DNA, 120 bp, Artificial Sequence
  ENSG00000163818_23 (sequence is synthesized)
tatttctaaaaccttaaaaccaactatgccaagcattaagataaacaaatatgatgttctttgacgtaaatcaacgtgatgattctttcacatgtaaacacattttagtgtttctggttt

SEQ ID NO: 502606 - DNA, 120 bp, Artificial Sequence
  ENSG00000163818_24 (sequence is synthesized)
gtcatttttgttgttgttgttgttgttgttatttactctataccctttagcaaaatacagttttaaatttttattgtttttagtagtttcccaactttaagacttatctaatttaactga

SEQ ID NO: 502607 - DNA, 120 bp, Artificial Sequence
  ENSG00000163818_25 (sequence is synthesized)
gaaagaaagcctttttcatatatatatatattggatttctaaggatggtggtttgagccttgattagacttttgatgtgctaagccagacaggcagtctgtacattgatggccatcacaa

SEQ ID NO: 502608 - DNA, 120 bp, Artificial Sequence
  ENSG00000163818_26 (sequence is synthesized)
tgcagctttggtttaatttaattcaggcctgctgctgagttatgcacagactttttgttgaccaaaataaaatataaagggttttcttctgtttgacatttgtgttcattttttctcttt

SEQ ID NO: 502609 - DNA, 120 bp, Artificial Sequence
  ENSG00000163818_27 (sequence is synthesized)
atgtattacattttaacctatattaaataaatgtttaaatgataatttgcttatgtcttataaaactcagcataagaaaaatactgccctaccttgactgtgtaatcttatttgataaag

SEQ ID NO: 502610 - DNA, 120 bp, Artificial Sequence
  ENSG00000163818_28 (sequence is synthesized)
cctttgctattcattatttccattctgattaactgaaagagatttatagagatgctcaaattttaagcccttggtgcttttagatatatattggttgcaaaagtttggcattaatgattt

SEQ ID NO: 502611 - DNA, 120 bp, Artificial Sequence
  ENSG00000163818_29 (sequence is synthesized)
ccctctgcttatgtgtaaatgcctatgttccaaagctttgccactagatattcaaatcataaattgtcatgtaagccagtcttccagaaagaaaagctatttcagcaaaatgatatttca

SEQ ID NO: 502612 - DNA, 120 bp, Artificial Sequence
  ENSG00000163818_30 (sequence is synthesized)
catttagacaaaacagtagtatttagacaataatattttgacaaaaccattttcaaaactgcttaggaaaaaggggaaatattatacttaaaggtaatgacctctgtcttgaatagaggt

SEQ ID NO: 502613 - DNA, 120 bp, Artificial Sequence
  ENSG00000163818_31 (sequence is synthesized)
gagtgggttggtgacaactggtttggaggcttttgtgggggactgtggtgtcttttggattgtgtcatcagctccttcatcaagtaagcgtgtagctgttattgcctattgtaaaacatg

SEQ ID NO: 502614 - DNA, 120 bp, Artificial Sequence
  ENSG00000163818_32 (sequence is synthesized)
aattgatgtgaacagtactcaatctcttacattatatgaagtataacttcctctcttttttgcctataatacatcctttaacttttacagattaaaaaaccactgttagacaaagcaaaa

SEQ ID NO: 502615 - DNA, 120 bp, Artificial Sequence
  ENSG00000163818_33 (sequence is synthesized)
ataaaatttgaacttgcaactgtgacaataatggcccaagcataatcttaaaagttagtgaacatctttggctgcatattttcttggggctagtgtgtgaggaaatttgggtagggtaac

SEQ ID NO: 502616 - DNA, 120 bp, Artificial Sequence
  ENSG00000163818_34 (sequence is synthesized)
agcaaagcattgagtcactgagtgatctcttgggtaccactaagcacccttttaaaagttctctgtttctactgttcctaggtattacaaaggccatcgagatttatgaaattgcttttc

SEQ ID NO: 502617 - DNA, 120 bp, Artificial Sequence
  ENSG00000163818_35 (sequence is synthesized)
aggctatcattaattatttcttacagcatttttgttagcttggtcagtattaccatcagtctttatagattggtcaactaagaaatagagattatgagacagttgaaaagtcaattcaaa

SEQ ID NO: 502618 - DNA, 120 bp, Artificial Sequence
  ENSG00000163818_36 (sequence is synthesized)
tataataaataccatcaattcaatccagtagcattggaagttttctaaataatggaatttaaaagtatacatttattaactttgaaataggaaatatacaaaaaagcttataatatggac

SEQ ID NO: 502619 - DNA, 120 bp, Artificial Sequence
  ENSG00000163818_37 (sequence is synthesized)
atctaagagctcaaattcaaaaaatatggtaaaattggtgaagttgaaactcattttaagaaaaagcatgccagaaatcaggaaggactgaccgccaagccccgtgaactactctaagca

SEQ ID NO: 502620 - DNA, 120 bp, Artificial Sequence
  ENSG00000163818_38 (sequence is synthesized)
tgtcagtagatgactggtgagaaaactctgagaaggtggtgctttaagaagcttagaagctgactgctgttaacactctaagcttgtgtgtagtcacttctcattggcctttgcaaatct

SEQ ID NO: 502621 - DNA, 120 bp, Artificial Sequence
  ENSG00000163818_39 (sequence is synthesized)
tcagatggcacacccccactatctgtctttcctaggaatttgtggtactctttttcagtagatactatggactattttcatttttctgagactactttattaagaatcttttttgaacac

SEQ ID NO: 502622 - DNA, 120 bp, Artificial Sequence
  ENSG00000163818_40 (sequence is synthesized)
ctactagctaacaatacacattatgtaataaaacagtctcctcatagcacctcaagaatacaaagttgactataaattttcctcatatttgtattaacattatggtttatttctagcagt

SEQ ID NO: 502623 - DNA, 120 bp, Artificial Sequence
  ENSG00000163818_41 (sequence is synthesized)
agatattgcatacctagtagatacaaaatgccaggtactgtggatgattacatttgagtccatgtggtttaggttctcaaccatttgcaactaacatttttgatatggtgaagtttggtc

SEQ ID NO: 502624 - DNA, 120 bp, Artificial Sequence
  ENSG00000163818_42 (sequence is synthesized)
catcttgctctgttctctctggcatgtaatgggttggtaccagtgattttactcttcttgcgtgtgatataaatctattttaaatgaataatttttatctttgctttcttcttcaagaga

SEQ ID NO: 502625 - DNA, 120 bp, Artificial Sequence
  ENSG00000163818_43 (sequence is synthesized)
cctaaacaaggtaatattattattttgagaaacggaaagtctctcattctgtcctgtcattgcctagggtggagaaacagaagtggaaggtttgtttcaggtcctctgaggataattagt

SEQ ID NO: 502626 - DNA, 120 bp, Artificial Sequence
  ENSG00000163818_44 (sequence is synthesized)
ccattgcagtagttttacttgatggtaccccatgggccagaagagggcatacttaaccttctagagagcctgaagtagctcctgatcacaccttttcaaggtaaagtgaagagcatgaaa

SEQ ID NO: 502627 - DNA, 120 bp, Artificial Sequence
  ENSG00000163818_45 (sequence is synthesized)
ttttggacagcgtttattgatggacatttaaagtttgtgatctgcggtaacaaggagaagggtttttaagtttataaaaattatttatcaattagccgggtgtggtggtacgtgcctata

SEQ ID NO: 502628 - DNA, 120 bp, Artificial Sequence
  ENSG00000163818_46 (sequence is synthesized)
agctaaaaaatgaacaaaacctgagatgcatgagtgtccttaccaaaaggaagtccttgtttctaggacaggtctgtcttcgggcctgtgggtccatagaatcatcacagaaaaaatgat

SEQ ID NO: 502629 - DNA, 120 bp, Artificial Sequence
  ENSG00000163818_47 (sequence is synthesized)
ttcaggaggtctcccccgctttctgctcccaaggccgactctgactgagcctcggaggagagaaggaagccatttctgggaggccaaaacgtccgtcttccaggctcttgctgtaagtca

SEQ ID NO: 502630 - DNA, 120 bp, Artificial Sequence
  ENSG00000163818_48 (sequence is synthesized)
gcttcctagaggccagagttcacagtggattaatcgcaagggaaggcagagaaaatccatcaagttgtaccctacccaccctttggtgacttttccaagaagctgggctaagttccagga

SEQ ID NO: 502631 - DNA, 120 bp, Artificial Sequence
  ENSG00000163818_49 (sequence is synthesized)
aagactggcacagtaagccacactgatcccgcctttggatttctctctctggattgatgtttgttctctgttaaatctaagcttgttccagagaggtcaagccggtggtagttgctggat

SEQ ID NO: 502632 - DNA, 120 bp, Artificial Sequence
  ENSG00000163818_50 (sequence is synthesized)
catttagtccagaagccttcatttgaggaaagtggaggagctctggcctgaccttatctataatgcccaccagggcttctttttaggttcatctaggcctttagactcacacaggcctac

SEQ ID NO: 502633 - DNA, 120 bp, Artificial Sequence
  ENSG00000163818_51 (sequence is synthesized)
acacacatctgaagagcaaacagatggtgaaaccagtagcccaagatgagaaaacggactttttttgagacagcagttgaagctgaagcctcaaaagccgggcggggggaaagcatagca

SEQ ID NO: 502634 - DNA, 120 bp, Artificial Sequence
  ENSG00000163818_52 (sequence is synthesized)
attatgaaagacattcaaagtgggttaggggtgagggaaaggtcagccttttacttttcccacacccgctgttttctgaagaaggatggtaatgcgagcagaagggtgatggccaacctc

SEQ ID NO: 502635 - DNA, 120 bp, Artificial Sequence
  ENSG00000163818_53 (sequence is synthesized)
tgggctttgatgtgtgtcccctcctcccgcccccatcctgcaagctctggggaggtcggagactagtgtggtttcctcacacctcccaccatgctggcactgaggttatctaagagttga

SEQ ID NO: 502636 - DNA, 64 bp, Artificial Sequence
  ENSG00000163818_54 (sequence is synthesized)
aagaagctgggctaagttccaggagaaagctctgctagagtgcaatggcaccatctcggctcat

SEQ ID NO: 502637 - DNA, 120 bp, Artificial Sequence
  ENSG00000163818_55 (sequence is synthesized)
gagaaggggagctgcgccgggcgcgagagattcggttaaccgcagcccaagcccttctggggtaatcctgggtgaagccttttcccagcagcccagctccgccgcatcgcttcgtttctc

SEQ ID NO: 502638 - DNA, 120 bp, Artificial Sequence
  ENSG00000163820_0 (sequence is synthesized)
accctcttggtgtgcgcgtcatggccgtcagcaccgcgttcccgtcctcttccgcttggccccagaaagtttcggttctgcccggcggtggacccacgagcgcgtgccaccatggagtct

SEQ ID NO: 502639 - DNA, 120 bp, Artificial Sequence
  ENSG00000163820_1 (sequence is synthesized)
gaccactgctgagcagacagccaccgagggccgaaattctgagccttcctctggacccaggcaggagacatacagacaagaaaggcaaactcaccatggcctccaccaatgcagagagcc

SEQ ID NO: 502640 - DNA, 120 bp, Artificial Sequence
  ENSG00000163820_2 (sequence is synthesized)
agctccagagaatcatccgagacttgcaagatgctgtgacagaactaagcaaagaatttcaggaagcaggggaacccatcacggatgacagcaccagcttgcataaattttcttataaac

SEQ ID NO: 502641 - DNA, 120 bp, Artificial Sequence
  ENSG00000163820_3 (sequence is synthesized)
ttgagtatctcctgcaatttgatcagaaagagaaggccaccctcctgggcaacaagaaggactactgggattacttctgtgcctgcctggccaaggtgaaaggagccaatgatgggatcc

SEQ ID NO: 502642 - DNA, 120 bp, Artificial Sequence
  ENSG00000163820_4 (sequence is synthesized)
gctttgtcaagtctatctcagagctccgaacatccttggggaaaggaagagcatttattcgctactccttggtgcaccagaggttggcagacaccttacagcagtgcttcatgaacacca

SEQ ID NO: 502643 - DNA, 120 bp, Artificial Sequence
  ENSG00000163820_5 (sequence is synthesized)
aagtgaccagtgactggtactatgcaagaagcccctttctgcagccaaagctgagctcggacattgtgggccaactctatgagctgactgaggttcagtttgacctggcgtcgaggggct

SEQ ID NO: 502644 - DNA, 120 bp, Artificial Sequence
  ENSG00000163820_6 (sequence is synthesized)
ttgacttggatgctgcctggccaacatttgccaggaggacgctgaccactggctcttctgcttacctgtggaaaccccctagccgcagctccagcatgagcagcttggtgagcagctacc

SEQ ID NO: 502645 - DNA, 120 bp, Artificial Sequence
  ENSG00000163820_7 (sequence is synthesized)
tgcagactcaagagatggtgtccaactttgacctgaacagccccctaaacaacgaggcattggagggctttgatgagatgcgactagagctggaccagttggaggtgcgggagaagcagc

SEQ ID NO: 502646 - DNA, 120 bp, Artificial Sequence
  ENSG00000163820_8 (sequence is synthesized)
tacgggagcgcatgcagcagctggacagagagaaccaggagctgagggcagctgtcagccagcaaggggagcaactgcagacagagagggagagggggcgcactgcagcggaggacaacg

SEQ ID NO: 502647 - DNA, 120 bp, Artificial Sequence
  ENSG00000163820_9 (sequence is synthesized)
ttcgcctcacttgcttggtagctgagctccagaagcagtgggaggtcacccaggccacccagaacactgtgaaggagctgcagacatgcctgcagggcctggagctaggagcagcagaga

SEQ ID NO: 502648 - DNA, 120 bp, Artificial Sequence
  ENSG00000163820_10 (sequence is synthesized)
aggaggaggactaccacacagccctgcggcggctggagtccatgctgcagcccttggcacaggagcttgaggccacacgggactcactggacaagaaaaaccagcatttagccagcttcc

SEQ ID NO: 502649 - DNA, 120 bp, Artificial Sequence
  ENSG00000163820_11 (sequence is synthesized)
caggctggctagccatggctcagcagaaggcagatacggcatcagacacaaagggccggcaagaacctattcccagtgatgcggcccaggagatgcaggagctaggggagaagcttcaag

SEQ ID NO: 502650 - DNA, 120 bp, Artificial Sequence
  ENSG00000163820_12 (sequence is synthesized)
ccctagaaagggagagaaccaaggtcgaggaggtcaacagacagcagagtgcccaactggaacagctggtcaaggagcttcagctgaaagaggatgcccgggccagcctggagcgcctgg

SEQ ID NO: 502651 - DNA, 120 bp, Artificial Sequence
  ENSG00000163820_13 (sequence is synthesized)
tgaaggagatggccccactccaggaggagttgtctgggaagggacaggaggcagaccagctctggcgacggctgcaggagttgctggcccacacgagctcctgggaggaggagctagcag

SEQ ID NO: 502652 - DNA, 120 bp, Artificial Sequence
  ENSG00000163820_14 (sequence is synthesized)
agttgaggcgggagaaaaaacagcaacaggaggagaaggagctgctggagcaggaggtcaggtctctgacccggcagctgcagttcctggagacccagctggcacaggtgagccaacatg

SEQ ID NO: 502653 - DNA, 120 bp, Artificial Sequence
  ENSG00000163820_15 (sequence is synthesized)
tgagtgacctggaggagcagaagaagcagctcattcaggacaaagaccacctcagccagcaggtgggtatgctcgagcggcttgctgggccgcctggcccagaactgccagtggcaggtg

SEQ ID NO: 502654 - DNA, 120 bp, Artificial Sequence
  ENSG00000163820_16 (sequence is synthesized)
agaagaatgaggccctggtccctgtgaactccagtctgcaagaggcctgggggaagccagaggaggagcagaggggcctgcaggaggcacagttagacgataccaaggtgcaagagggca

SEQ ID NO: 502655 - DNA, 120 bp, Artificial Sequence
  ENSG00000163820_17 (sequence is synthesized)
gccaggaggaagagctccggcaggccaacagggagctggagaaggagctacagaatgtggtcgggcgtaaccagctcctggagggcaagctgcaagccctgcaggccgattaccaggctt

SEQ ID NO: 502656 - DNA, 120 bp, Artificial Sequence
  ENSG00000163820_18 (sequence is synthesized)
tgcagcagcgggaatcagccatccagggctccttggcctccctggaggccgagcaggccagcatccggcacttgggtgaccagatggaggcgagcttgctggctgtaaggaaggccaagg

SEQ ID NO: 502657 - DNA, 120 bp, Artificial Sequence
  ENSG00000163820_19 (sequence is synthesized)
aggccatgaaagcccagatggcagagaaggaggccattctacagagcaaggagggcgagtgtcagcagctgcgggaggaggtggagcagtgccagcaactggcagaagcccggcacagag

SEQ ID NO: 502658 - DNA, 120 bp, Artificial Sequence
  ENSG00000163820_20 (sequence is synthesized)
agcttagggctctcgagagccagtgccagcagcagacccagctgattgaggtcctcacagcagagaaaggccaacagggagttggcccacccactgacaatgaagcccgtgagctggctg

SEQ ID NO: 502659 - DNA, 120 bp, Artificial Sequence
  ENSG00000163820_21 (sequence is synthesized)
cccagctagccctgtctcaggcgcagctggaagtccatcagggggaggtccaacggctgcaggctcaggtggtggacctccaggccaagatgcgggcagccctggatgaccaggacaagg

SEQ ID NO: 502660 - DNA, 120 bp, Artificial Sequence
  ENSG00000163820_22 (sequence is synthesized)
tgcagagccagctaagcatggctgaggccgtcctgagggagcacaaaacccttgtgcagcagctgaaggagcagaatgaagcccttaacagagcccatgtccaggagctgctgcaatgct

SEQ ID NO: 502661 - DNA, 120 bp, Artificial Sequence
  ENSG00000163820_23 (sequence is synthesized)
cggagcgtgaaggggcactgcaggaggagagggccgatgaggcccagcagagggaggaggagctgcgggccctgcaggaggagctgtcccaggccaaatgcagctccgaggaagcacagc

SEQ ID NO: 502662 - DNA, 120 bp, Artificial Sequence
  ENSG00000163820_24 (sequence is synthesized)
tggagcacgctgagctgcaagagcagctgcaccgggccaacacagacacagctgagctgggcatccaggtttgcgcactgaccgtggaaaaggagcgagtggaggaggcactggcctgtg

SEQ ID NO: 502663 - DNA, 120 bp, Artificial Sequence
  ENSG00000163820_25 (sequence is synthesized)
ctgtccaggagctccaggacgccaaagaggcagcctcaagggagcgagagggcctggagcgccaagtagctgggctgcagcaagagaaggagagcttgcaggagaagctgaaggcggcca

SEQ ID NO: 502664 - DNA, 120 bp, Artificial Sequence
  ENSG00000163820_26 (sequence is synthesized)
aggcagcagccggctcactgcctggcctgcaggcccagctcgcccaggcagagcagcgggcccagagcctccaagaggctgcacaccaggagctcaacaccctcaagttccagctgagtg

SEQ ID NO: 502665 - DNA, 120 bp, Artificial Sequence
  ENSG00000163820_27 (sequence is synthesized)
ctgaaatcatggactaccagagcagacttaagaatgctggtgaagagtgcaagagcctcaggggccagcttgaggagcaaggccggcagctgcaggctgctgaggaagctgtggagaagc

SEQ ID NO: 502666 - DNA, 120 bp, Artificial Sequence
  ENSG00000163820_28 (sequence is synthesized)
tgaaggccacccaagcagacatgggagagaagctgagctgcactagcaaccatcttgcagagtgccaggcggccatgctgaggaaggacaaggagggggctgccctgcgtgaagacctag

SEQ ID NO: 502667 - DNA, 120 bp, Artificial Sequence
  ENSG00000163820_29 (sequence is synthesized)
aaaggacccagaaggaactcgaaaaagccacaacaaaaatccaagagtattacaacaaactctgccaggaggtgacaaatcgtgagaggaatgaccagaagatgcttgctgacctggatg

SEQ ID NO: 502668 - DNA, 120 bp, Artificial Sequence
  ENSG00000163820_30 (sequence is synthesized)
acctcaacagaaccaagaagtatctcgaggagcggctgatagagctgctcagggacaaggatgctctctggcagaagtcagatgccctggaattccagcagaagctcagtgctgaggaga

SEQ ID NO: 502669 - DNA, 120 bp, Artificial Sequence
  ENSG00000163820_31 (sequence is synthesized)
gatggctcggagacacagaggcaaaccactgcctcgactgtaagcgggagttcagctggatggtgcggcggcaccactgcaggatatgtggccgcatcttctgttactactgctgcaaca

SEQ ID NO: 502670 - DNA, 120 bp, Artificial Sequence
  ENSG00000163820_32 (sequence is synthesized)
actacgtcctgagcaagcacggtggcaaaaaggagcgctgctgccgagcctgtttccagaagctcagtgaaggccctggctcccctgatagcagtggctcaggcactagccagggagagc

SEQ ID NO: 502671 - DNA, 120 bp, Artificial Sequence
  ENSG00000163820_33 (sequence is synthesized)
ccagccctgcactgtcaccagcctcacctgggccccaggccacaggaggccaaggagcaaatacagactacaggccaccggacgacgctgtgtttgatatcatcacagatgaggaattgt

SEQ ID NO: 502672 - DNA, 120 bp, Artificial Sequence
  ENSG00000163820_34 (sequence is synthesized)
gccagatacaggagtccggctcctctttgcctgaaacacccactgaaactgattctctcgacccaaatgcggctgaacaggatactacatcaacctcgctaacgcctgaggacactgaag

SEQ ID NO: 502673 - DNA, 120 bp, Artificial Sequence
  ENSG00000163820_35 (sequence is synthesized)
tgtttgtgaggtccagcacctacagcctgatccccatcactgtggccgaggcaggcctcaccatcagctgggtcttctcctctgaccccaagagcatctccttcagtgtggtcttccagg

SEQ ID NO: 502674 - DNA, 120 bp, Artificial Sequence
  ENSG00000163820_36 (sequence is synthesized)
aggccgaggacacaccgctggatcagtgtaaggtcctcattcccacgacccgatgcaactcccacaaggagaacatccagggccagctcaaggttcgcacacccggcatctacatgctca

SEQ ID NO: 502675 - DNA, 120 bp, Artificial Sequence
  ENSG00000163820_37 (sequence is synthesized)
tcttcgacaataccttctcaaggtttgtctctaaaaaggtattttatcacttgacggttgatcggcctgtgatctacgatggaagtgatttcctgtagcttcagcacctcagtaacttca

SEQ ID NO: 502676 - DNA, 120 bp, Artificial Sequence
  ENSG00000163820_38 (sequence is synthesized)
cttcatccacaggaaacactgctcttcctcacctgtcacataaagcatttttttaaaaagtcagctgctccaaaatcatcaactcagcccctgggctgcccctcagaggcggtgtctggg

SEQ ID NO: 502677 - DNA, 120 bp, Artificial Sequence
  ENSG00000163820_39 (sequence is synthesized)
gaggactttgtgctcagcactctgcaccggccactcttagcccccgaggcgttgaagggctcaggcaatgtttccattaagtagagactcagctgttgtcacacccaaagggatgctctg

SEQ ID NO: 502678 - DNA, 120 bp, Artificial Sequence
  ENSG00000163820_40 (sequence is synthesized)
ccaaaggtttaaacacccaggagaccatcagcctctcctgggagcacagttggctacaggcctcttgtggagagtttcacgggcaggggtgattccaacttctgcctgtggagagatttt

SEQ ID NO: 502679 - DNA, 120 bp, Artificial Sequence
  ENSG00000163820_41 (sequence is synthesized)
ctgccctgccccaccagggccctgcatgttggagactgagctgggtgcactggccatgccctgtgaatcctcaggctgtgacgccctcaggtactcctgggaaaaggaggtacacagcca

SEQ ID NO: 502680 - DNA, 120 bp, Artificial Sequence
  ENSG00000163820_42 (sequence is synthesized)
tcatgcgagtcggtgccaggggaccccccggagatcctgaccagctcctccagtcatgctcttgtccctcactgccccagtaagctggaggctgctccagaactcagcagtgttggaggg

SEQ ID NO: 502681 - DNA, 120 bp, Artificial Sequence
  ENSG00000163820_43 (sequence is synthesized)
gcctctaagctgcactctctttctggcccttttgtctgggtgattctgtcctcaaataaagcccttcactcagccagacctctccacagctcaaagcattgccctaagaatcagaagtaa

SEQ ID NO: 502682 - DNA, 120 bp, Artificial Sequence
  ENSG00000163820_44 (sequence is synthesized)
agataatccaagagcaaaacccactgtacttggggcctgcaatggctgtgtgtacactacatctaatgcccaaatgccagccagtgtggatgttgtgaccacagagcaggattgtgcatt

SEQ ID NO: 502683 - DNA, 120 bp, Artificial Sequence
  ENSG00000163820_45 (sequence is synthesized)
ggctttagagctactcctcagctgatggcccacttttgtttatataaataagagcttctgccccacctgcagacatgtttactaatgatcatagccaggattagaaccactttcaaacat

SEQ ID NO: 502684 - DNA, 120 bp, Artificial Sequence
  ENSG00000163820_46 (sequence is synthesized)
tggggccttcttaacaaaagtctttgataacttaagaaccaaagtaacagagtaaacagaggcatgatggatccctgggccccactcccctcctgacaggttccccaacagcccatttgc

SEQ ID NO: 502685 - DNA, 120 bp, Artificial Sequence
  ENSG00000163820_47 (sequence is synthesized)
ccacttcccactgctcagcccacaccagacctccaggagacatccccccttgaggcagagagatcctgttccctattcccagacaagaattatttaatcttccctgttctctgtggtcct

SEQ ID NO: 502686 - DNA, 120 bp, Artificial Sequence
  ENSG00000163820_48 (sequence is synthesized)
tttcttccccaacaacagatagctcaccttggacagctcttcgtcccttgttcatggaaccagctgcctgcagtcaggccccaggttcttccatgggtgaacagagcatctgacaaaagg

SEQ ID NO: 502687 - DNA, 120 bp, Artificial Sequence
  ENSG00000163820_49 (sequence is synthesized)
tcccagtttggccaggggtgagggagagagcaccagacaggctatccgagaatctgagagctgggcccggcagttcctccagctacccttgtgacctaagtccagtcacacatttcccaa

SEQ ID NO: 502688 - DNA, 120 bp, Artificial Sequence
  ENSG00000163820_50 (sequence is synthesized)
agtttctctttgtcataaccctggtctggctggttttgagggcttgagaatgggtcagggactccaggccaagtccaacagagaccccaaacccaccacacaccagcagccacaacctca

SEQ ID NO: 502689 - DNA, 120 bp, Artificial Sequence
  ENSG00000163820_51 (sequence is synthesized)
ccaccaacaaagaggacttttgtggggccacaagtaagaggtcatttctggaatggactcagacctttaaacaggagagttgagcacttccagtcagtttttaagcaaggcatggggaac

SEQ ID NO: 502690 - DNA, 120 bp, Artificial Sequence
  ENSG00000163820_52 (sequence is synthesized)
agggaatagaacctttcaaagaggttgcccagagaaaagctgggcctcttgcattcggcttccttggagcagcctcttctggcagaaagccatcaggtgctcaatcatcttctcctggcc

SEQ ID NO: 502691 - DNA, 120 bp, Artificial Sequence
  ENSG00000163820_53 (sequence is synthesized)
aaggctctgaccatgcttagtactggaatagaggtggccaggcccccagcgactcttcttggcctgatgtttgtcctcacaggcatgccacgtggcctgagatgattcagaacaaatcat

SEQ ID NO: 502692 - DNA, 120 bp, Artificial Sequence
  ENSG00000163820_54 (sequence is synthesized)
gctaactttgaatccatccagccacttgcaaatgataatcagaagtcagcttgttcactgttagaaagaaactaacaaaagagaacccagagcaatctagaatctttgagtgcttggctt

SEQ ID NO: 502693 - DNA, 120 bp, Artificial Sequence
  ENSG00000163820_55 (sequence is synthesized)
tccaaggatactgcggagactctggccaagctgatgaccttctgaagtgtcactggcaccatatgcaacaagaaccaccattcactgagtagctaatgggtttggggcctgggacattcc

SEQ ID NO: 502694 - DNA, 120 bp, Artificial Sequence
  ENSG00000163820_56 (sequence is synthesized)
atctgaggtccttcctgaacatgtcactccacagcagaggaccggttgcagcttacccagaaccactcctccaggagagctggatgttttgcgtgcaacaccttgagcactgactgctat

SEQ ID NO: 502695 - DNA, 120 bp, Artificial Sequence
  ENSG00000163820_57 (sequence is synthesized)
tgttcaaaaaaagcctttgctgcattcggaggactgccccgtgccctgaggtgacttcctaactatgtggtttcattagcgaatttattttttgtgctgggtggacatttgtattttgtt

SEQ ID NO: 502696 - DNA, 120 bp, Artificial Sequence
  ENSG00000163820_58 (sequence is synthesized)
aggttgctgtttaagctcaagtttgctgtgctctctgcagctacaaaacatcttggcatatttaagagtggcttttataaatagctttattctgatattaatcagattcccaactttact

SEQ ID NO: 502697 - DNA, 120 bp, Artificial Sequence
  ENSG00000163820_59 (sequence is synthesized)
gagaattaaggactggggtactttaaagaaatgcaaatagcaattgaagaaccactgctgcaggtggtagccctggctagactgaattacactagaaatcagccagaaggaagcgtcctt

SEQ ID NO: 502698 - DNA, 120 bp, Artificial Sequence
  ENSG00000163820_60 (sequence is synthesized)
gggatcccagatcactctttttttttttttttaaaaggggcagccccttgatggctcatctctctgaataacagttacgtcttcatatcgataccagatgccttcttcatcatgccactg

SEQ ID NO: 502699 - DNA, 120 bp, Artificial Sequence
  ENSG00000163820_61 (sequence is synthesized)
aagccactcaccaccttcaagaacatgccaacctctgtcagattcacttacccacaaacaaggaggcacgtttggcacaaagtgttgtcctccaggtccaagtggactctacagagtgct

SEQ ID NO: 502700 - DNA, 120 bp, Artificial Sequence
  ENSG00000163820_62 (sequence is synthesized)
tgacctcaacacactggattccaggtggactggaccaagagcaggcaaagacacgggaactgaaaaactccacagggtttggagaatagaaatgaaaagccacgtcatataactcaagaa

SEQ ID NO: 502701 - DNA, 120 bp, Artificial Sequence
  ENSG00000163820_63 (sequence is synthesized)
taaatggtgttttggaaattttaaaattatcatcgaaggtggtgaaactatttcaggcccaaatgaaaggaaatcgccagttggggatgaaatcacagagcctgtgttttatgatatggt

SEQ ID NO: 502702 - DNA, 120 bp, Artificial Sequence
  ENSG00000163820_64 (sequence is synthesized)
tggatgtccactgatgaaattttaaaggagtttcagttttaaaagtgcgcatgattctacatatgagaattctttaggccaagaaactgtccttggctcagaggtgttgggaattaaagc

SEQ ID NO: 502703 - DNA, 120 bp, Artificial Sequence
  ENSG00000163820_65 (sequence is synthesized)
agagagaagccattcgtgatgcttagaaccaaggatggtcatgtacacaaagaccatcgagacggccattcttgtttacaaaacacttaccaagaaagcactttgtaggggaactttagt

SEQ ID NO: 502704 - DNA, 120 bp, Artificial Sequence
  ENSG00000163820_66 (sequence is synthesized)
aagttcttctcatttcattatgtttcttccaaggaaacaggagagactgaattaataattctctctttcctcttaagcacttttaaaataataaagtacatcttgaaatttggggaggca

SEQ ID NO: 502705 - DNA, 120 bp, Artificial Sequence
  ENSG00000163820_67 (sequence is synthesized)
tctctgatttaaaaaaagaaaaaggctgcttgatgtatgttatgcagagacactctgcctctggtggctgcagagcaatacccaagcctcatttggaaggctcaacatttggaattgcac

SEQ ID NO: 502706 - DNA, 120 bp, Artificial Sequence
  ENSG00000163820_68 (sequence is synthesized)
tttaattgattaatcctcaattcatgtggccttacgggatggtgggtctgggaccccaattcattcttatctgccaaagaattatctagaagcacatcaaataccagcaccccacctgct

SEQ ID NO: 502707 - DNA, 120 bp, Artificial Sequence
  ENSG00000163820_69 (sequence is synthesized)
caatgggggtggaaaacttttgtatccctaagcatattattttatagtgtctgccatgccatgtggaaatactttatttttaacctcaggatttaaataaagtaaacactatgacattta

SEQ ID NO: 502708 - DNA, 120 bp, Artificial Sequence
  ENSG00000163820_70 (sequence is synthesized)
tgagggacttgtggcagggctttttgctgttgccagttgaaattcaaccctttcatttttgttcacacaacgagtaattggagtcctcaggtcacatcatattgaaatatttgggtctca

SEQ ID NO: 502709 - DNA, 120 bp, Artificial Sequence
  ENSG00000163820_71 (sequence is synthesized)
aatatccaccttgtgtaaggcttggaaagcttgcctggtttcctttcagagaactgtaaagccagtttgtaaacaaaatcatacacccggctccaggactgggtctgatttccattagtg

SEQ ID NO: 502710 - DNA, 120 bp, Artificial Sequence
  ENSG00000163823_0 (sequence is synthesized)
agacttcacggacaaagtcccttggaaccagagagaagccgggatggaaactccaaacaccacagaggactatgacacgaccacagagtttgactatggggatgcaactccgtgccagaa

SEQ ID NO: 502711 - DNA, 120 bp, Artificial Sequence
  ENSG00000163823_1 (sequence is synthesized)
ggtgaacgagagggcctttggggcccaactgctgccccctctgtactccttggtatttgtcattggcctggttggaaacatcctggtggtcctggtccttgtgcaatacaagaggctaaa

SEQ ID NO: 502712 - DNA, 120 bp, Artificial Sequence
  ENSG00000163823_2 (sequence is synthesized)
aaacatgaccagcatctacctcctgaacctggccatttctgacctgctcttcctgttcacgcttcccttctggatcgactacaagttgaaggatgactgggtttttggtgatgccatgtg

SEQ ID NO: 502713 - DNA, 120 bp, Artificial Sequence
  ENSG00000163823_3 (sequence is synthesized)
taagatcctctctgggttttattacacaggcttgtacagcgagatctttttcatcatcctgctgacgattgacaggtacctggccatcgtccacgccgtgtttgccttgcgggcacggac

SEQ ID NO: 502714 - DNA, 120 bp, Artificial Sequence
  ENSG00000163823_4 (sequence is synthesized)
cgtcacttttggtgtcatcaccagcatcatcatttgggccctggccatcttggcttccatgccaggcttatacttttccaagacccaatgggaattcactcaccacacctgcagccttca

SEQ ID NO: 502715 - DNA, 120 bp, Artificial Sequence
  ENSG00000163823_5 (sequence is synthesized)
ctttcctcacgaaagcctacgagagtggaagctgtttcaggctctgaaactgaacctctttgggctggtattgcctttgttggtcatgatcatctgctacacagggattataaagattct

SEQ ID NO: 502716 - DNA, 120 bp, Artificial Sequence
  ENSG00000163823_6 (sequence is synthesized)
gctaagacgaccaaatgagaagaaatccaaagctgtccgtttgatttttgtcatcatgatcatcttttttctcttttggaccccctacaatttgactatacttatttctgttttccaaga

SEQ ID NO: 502717 - DNA, 120 bp, Artificial Sequence
  ENSG00000163823_7 (sequence is synthesized)
cttcctgttcacccatgagtgtgagcagagcagacatttggacctggctgtgcaagtgacggaggtgatcgcctacacgcactgctgtgtcaacccagtgatctacgccttcgttggtga

SEQ ID NO: 502718 - DNA, 120 bp, Artificial Sequence
  ENSG00000163823_8 (sequence is synthesized)
gaggttccggaagtacctgcggcagttgttccacaggcgtgtggctgtgcacctggttaaatggctccccttcctctccgtggacaggctggagagggtcagctccacatctccctccac

SEQ ID NO: 502719 - DNA, 120 bp, Artificial Sequence
  ENSG00000163823_9 (sequence is synthesized)
aggggagcatgaactctctgctgggttctgactcagaccataggaggccaacccaaaataagcaggcgtgacctgccaggcacactgagccagcagcctggctctcccagccaggttctg

SEQ ID NO: 502720 - DNA, 120 bp, Artificial Sequence
  ENSG00000163823_10 (sequence is synthesized)
actcttggcacagcatggagtcacagccacttgggatagagagggaatgtaatggtggcctggggcttctgaggcttctggggcttcagtcttttccatgaacttctcccctggtagaaa

SEQ ID NO: 502721 - DNA, 120 bp, Artificial Sequence
  ENSG00000163823_11 (sequence is synthesized)
gaatgagcaaaaccaaatattccagagactgggactaagtgtaccagagaagggcttggactcaagcaagatttcagatttgtgaccattagcatttgtcaacaaagtcacccacttccc

SEQ ID NO: 502722 - DNA, 120 bp, Artificial Sequence
  ENSG00000163823_12 (sequence is synthesized)
actattgcttgcacaaaccaattaaacccagtagtggtgactgtgggctccattcaaagtgagctcctaagccatgggagacactgatgtatgaggaatttctgttcttccatcacctcc

SEQ ID NO: 502723 - DNA, 120 bp, Artificial Sequence
  ENSG00000163823_13 (sequence is synthesized)
ccccccccgccaccctcccactgccaaagaacttggaaatagtgatttccacagtgactccactctgagtcccagagccaatcagtagccagcatctgcctccccttcactcccaccgca

SEQ ID NO: 502724 - DNA, 120 bp, Artificial Sequence
  ENSG00000163823_14 (sequence is synthesized)
ggatttgggctcttggaatcctggggaacatagaactcatgacggaagagttgagacctaacgagaaatagaaatggggaactactgctggcagtggaactaagaaagcccttaggaaga

SEQ ID NO: 502725 - DNA, 120 bp, Artificial Sequence
  ENSG00000163823_15 (sequence is synthesized)
atttttatatccactaaaatcaaacaattcagggagtgggctaagcacgggccatatgaataacatggtgtgcttcttaaaatagccataaaggggagggactcatcatttccatttacc

SEQ ID NO: 502726 - DNA, 120 bp, Artificial Sequence
  ENSG00000163823_16 (sequence is synthesized)
cttcttttctgactatttttcagaatctctcttcttttcaagttgggtgatatgttggtagattctaatggctttattgcagcgattaataacaggcaaaaggaagcagggttggtttcc

SEQ ID NO: 502727 - DNA, 120 bp, Artificial Sequence
  ENSG00000163823_17 (sequence is synthesized)
cttctttttgttcttcatctaagccttctggttttatgggtcagagttccgactgccatcttggacttgtcagcaaaaaaaaaaaataataataataataaggcctgctgtgtaagctga

SEQ ID NO: 502728 - DNA, 120 bp, Artificial Sequence
  ENSG00000163823_18 (sequence is synthesized)
cagtatttgtagctgatagggggttgggaggaaagtgtctactaggagggtggggtgagattctgtgttgatgtaggaggccgagaaggcccttaactcaaagtagcttatttatccaaa

SEQ ID NO: 502729 - DNA, 120 bp, Artificial Sequence
  ENSG00000163823_19 (sequence is synthesized)
atgttctggatgcatcatctccaaccaaggaccccttatttatcatgcctttgttctcttttccctcagatgtatatttctttaaaaataattttcctaataacaaaacttatttctaaa

SEQ ID NO: 502730 - DNA, 120 bp, Artificial Sequence
  ENSG00000163823_20 (sequence is synthesized)
acagcttaaaaattcaaagaaaaaccccaaacactgacattacctacacttccactacccaaagacaaaatgtgcccactgtgtgcttttgagtgtattttcttttagtttgttttttgt

SEQ ID NO: 502731 - DNA, 120 bp, Artificial Sequence
  ENSG00000163823_21 (sequence is synthesized)
tgggtgcatatttatgataataacaatgatggacttcaattgtactcactgttctattgttggttttaattagcagcaagttgtgatcactttcccaggtgaataaatcatttcaaagca

SEQ ID NO: 502732 - DNA, 120 bp, Artificial Sequence
  ENSG00000163825_0 (sequence is synthesized)
ctctgaagtcagaaacctcatctcccactacagacctgccagggcccaggagagctcgacccacccaggcacaccatagccccagagatggctggggacacagaagtgtggaagcaaatg

SEQ ID NO: 502733 - DNA, 120 bp, Artificial Sequence
  ENSG00000163825_1 (sequence is synthesized)
tttcaggagttaatgcgggaggtgaagccatggcacaggtggaccctgagaccagacaagggccttcttcccaacgtcctgaagccaggctggatgcaataccagcagtggaccttcgcc

SEQ ID NO: 502734 - DNA, 120 bp, Artificial Sequence
  ENSG00000163825_2 (sequence is synthesized)
aggttccagtgctcctcctgctctcgtaactgggcctctgcccaagttctggtccttttccacatgaactggagtgaggagaagtccaggggccaggtgaagatgagggtgtttacccag

SEQ ID NO: 502735 - DNA, 120 bp, Artificial Sequence
  ENSG00000163825_3 (sequence is synthesized)
tttcagttgatagaggaggttcctatgatcaaggacatctctcttgaagggccacacaatagtgacaactgtgaggcatgtctgcagggcttctgtgctgggcccatacaggttacaagc

SEQ ID NO: 502736 - DNA, 120 bp, Artificial Sequence
  ENSG00000163825_4 (sequence is synthesized)
ctccccccatctcagaccccaagagtacactccatttacaaggtggaggaggtagttaagccctgggcctcaggagagaatgtctattcctacgcatgccaaaaccacatctgtaggaac

SEQ ID NO: 502737 - DNA, 120 bp, Artificial Sequence
  ENSG00000163825_5 (sequence is synthesized)
ttaagcattttctgctgttgtgtcattctcattgttatcgtggtgattgttgtaaaaactgctatatgagccttggaaacatgaagctaagtcagaaaaaaaatcagatacaaaaagtca

SEQ ID NO: 502738 - DNA, 120 bp, Artificial Sequence
  ENSG00000163827_0 (sequence is synthesized)
acttcaaagggcaaaagaaagaggagaacctccgcttaccacagccgggtagaaatgcctgaggaaagcagcggagctgaccgtgccagcatttacacagggaacacttcttgggcagcc

SEQ ID NO: 502739 - DNA, 120 bp, Artificial Sequence
  ENSG00000163827_1 (sequence is synthesized)
aggtgtcatggggcacagacccacagttcctgagaatgaacaggtaatttcatgctcccaaaatgggacataaagtggttgtcttcgacatttctgtcatcagagccttgtgggaaactc

SEQ ID NO: 502740 - DNA, 120 bp, Artificial Sequence
  ENSG00000163827_2 (sequence is synthesized)
gtgtcaagaagcacaaagcttggcagaagaaggaggtggaaaggcttgagaagagcgccttggagaagataaaggaggagtggaactttgtggccgaatgcaggaggaagggcatccccc

SEQ ID NO: 502741 - DNA, 120 bp, Artificial Sequence
  ENSG00000163827_3 (sequence is synthesized)
aggctgtatactgcaagaatggcttcatagacaccagcgtgcggcttctggacaagattgaaaggaacactctcacaaggcagagttcacttcccaaggacagaggcaaacggagcagtg

SEQ ID NO: 502742 - DNA, 120 bp, Artificial Sequence
  ENSG00000163827_4 (sequence is synthesized)
cgtttgtgtttgaactttctggggagcactggacggagctcccagattcattgaaggagcagacacacctgagagaatggtacataagcaataccttgattcaaatcattcctacatata

SEQ ID NO: 502743 - DNA, 120 bp, Artificial Sequence
  ENSG00000163827_5 (sequence is synthesized)
ttcagttatttcaagcgatgagaattctggatctgccaaaaaaccaaatctcacatcttccagcagaaatcggttgtttgaagaacctgaaagaactcaatgtgggtttcaactatctga

SEQ ID NO: 502744 - DNA, 120 bp, Artificial Sequence
  ENSG00000163827_6 (sequence is synthesized)
agagcattcctccagaattgggagattgtgaaaatctagagagactggattgttctggaaatctagaattaatggagctgccctttgaattaagtaatttgaagcaagttacatttgtag

SEQ ID NO: 502745 - DNA, 120 bp, Artificial Sequence
  ENSG00000163827_7 (sequence is synthesized)
atatctcagcaaacaagttttccagtgtcccaatctgtgtcctgcggatgtcgaatttgcagtggttggatatcagcagcaataacctgaccgacctgccgcaagatatagacaggctag

SEQ ID NO: 502746 - DNA, 120 bp, Artificial Sequence
  ENSG00000163827_8 (sequence is synthesized)
ccttccctattccatgctgaacctgaagaagctcactctgttagtcgtcagtggggaccatttggtggagctcccaactgccctttgtgactcatccacacctttaaaatttgtaagcct

SEQ ID NO: 502747 - DNA, 120 bp, Artificial Sequence
  ENSG00000163827_9 (sequence is synthesized)
tatggacaatcctattgataatgcccaatgtgaagatggcaatgaaataatggaaagtgaacgggatcgccaacattttgataaagaagttatgaaagcctatattgaagaccttaaaga

SEQ ID NO: 502748 - DNA, 120 bp, Artificial Sequence
  ENSG00000163827_10 (sequence is synthesized)
aagagaatctgttcccagctataccaccaaagtgtcttttagccttcaactttgatatccatcagaagactgcaaatctcactattctctggagctatatataaatctttgttatgatca

SEQ ID NO: 502749 - DNA, 120 bp, Artificial Sequence
  ENSG00000163827_11 (sequence is synthesized)
tgtcatataggaagaatggcttgtgcttaaggacaaagtctagaaaccactatcatagttgctaaaaaaaatggttttcaaatgtcaaatacatgagtatctccctccatggactggaga

SEQ ID NO: 502750 - DNA, 120 bp, Artificial Sequence
  ENSG00000163827_12 (sequence is synthesized)
attgaaaaattggtttgtatattgatatttccaggttcatttgcatatacttttttccaaataatgcacatttaatatgttttaaaatgtcttatttttaagaattataactaaaagacc

SEQ ID NO: 502751 - DNA, 120 bp, Artificial Sequence
  ENSG00000163827_13 (sequence is synthesized)
aggcttcttccggctcggccgtgctgctcagcgggtgtaaacagcctctgcggtgtaaacagcctctgcggtgtaaacagccgcggcgggcaggccaggactgtcagtgcccgcccctcg

SEQ ID NO: 502752 - DNA, 120 bp, Artificial Sequence
  ENSG00000163827_14 (sequence is synthesized)
agataaagggattgtgaaaagagcatttatattggactaatcagatgagagtgttttgttattttgaaagagtttcttttactgagaataatcttccttgagtttatataaactgctatt

SEQ ID NO: 502753 - DNA, 120 bp, Artificial Sequence
  ENSG00000163827_15 (sequence is synthesized)
tccatatgttttaagttatattttggcaagtgtagactcccaggagagacttgtaggtacaatctaggccttgaagaaacaaaggctggaatatctgcccatgctttgggcatgagatgc

SEQ ID NO: 502754 - DNA, 120 bp, Artificial Sequence
  ENSG00000163827_16 (sequence is synthesized)
tcagatggtgcgtgggtagatctagttgaggaagtgtgggcctggctgttcatgggaagtcttcagtggccttcatggatggccatccagtcctgagtggtcaccctgggggtcctggga

SEQ ID NO: 502755 - DNA, 120 bp, Artificial Sequence
  ENSG00000163827_17 (sequence is synthesized)
cacacctcagtaaagagcaaaggcaacgccctcagggtcccttcctccaagatggccatgtagggtaatggagatgaccagtccacactgataaggagttcctagcaaggcttccttgtg

SEQ ID NO: 502756 - DNA, 120 bp, Artificial Sequence
  ENSG00000163827_18 (sequence is synthesized)
tacaagactttgggctcttatgtcacatcacatgatttggagaaattagacacaatctcttatttttataccactgtcttgggctaaaataaacaggttgtggctgatggtgttgaagat

SEQ ID NO: 502757 - DNA, 120 bp, Artificial Sequence
  ENSG00000163827_19 (sequence is synthesized)
tggctcacacctataatcccagcactatgggaggctgaggcaagcaggttgtttgagcccaggaatttgagaacaggattttgagaacagcttggacatcatgacgaaaccccatctcca

SEQ ID NO: 502758 - DNA, 86 bp, Artificial Sequence
  ENSG00000163827_20 (sequence is synthesized)
caggttgtttgagcccaggaatttgagaacaggattttgagaacagcttggacatcatgacgaaaccccatctccacaaaaaaatt

SEQ ID NO: 502759 - DNA, 73 bp, Artificial Sequence
  ENSG00000163827_21 (sequence is synthesized)
tgtgcaaaacaaacagcaataacaatattattattgttataactaaaaaaaaaaaaacaaaaacaagcagctt

SEQ ID NO: 502760 - DNA, 120 bp, Artificial Sequence
  ENSG00000163827_22 (sequence is synthesized)
tataactaaaaaaaaaaaaacaaaaacaagcagcttttgtgactaagaaggaaaatatgcatatagtggcatatttttatatgaatcatctcctctgtggtcttgcccagtaccatccag

SEQ ID NO: 502761 - DNA, 120 bp, Artificial Sequence
  ENSG00000163827_23 (sequence is synthesized)
tggagctttctgcagtgacggaaatgttctgtatttgcgttgtccaacgtggtaaaccagacacatgtgattcttgagcacttgaacaatgactgatgtgattgaagaacccatctttca

SEQ ID NO: 502762 - DNA, 120 bp, Artificial Sequence
  ENSG00000163827_24 (sequence is synthesized)
attcaattaaatttaaatagccacatttaactccagccttgggtttgacctgatggaaaattcccatgagagagtgctccaaaccgttccaaggtggggccagttgcgattctaaaggaa

SEQ ID NO: 502763 - DNA, 120 bp, Artificial Sequence
  ENSG00000163827_25 (sequence is synthesized)
gaagcactaaatggcagggtgatcagtccaaagcatttatgaggggagcttacatacagcatgggctgcagcgtccttgtgatgggcagtgagacaagggatgttctacctgggcatgtc

SEQ ID NO: 502764 - DNA, 120 bp, Artificial Sequence
  ENSG00000163827_26 (sequence is synthesized)
cccagcgagggggttgggggatggagttcacatgaagatgtaaggaatttgggtgggggctgggctggcttctacatgtttagcaacacggctgatctttcagtgtttccagcaacaacc

SEQ ID NO: 502765 - DNA, 120 bp, Artificial Sequence
  ENSG00000163827_27 (sequence is synthesized)
taagcaccgttatcagtgcctaggaatgttcaaggcccaggctggggttcagacctgcagaggaaaacatcagctggctgggtcaaggcaccatgtgttacttggtcaggacagagacaa

SEQ ID NO: 502766 - DNA, 120 bp, Artificial Sequence
  ENSG00000163827_28 (sequence is synthesized)
aaatgaggaaaactaggggaccccacacacatgtggctaccatactcctgaacaggtctagctagttatttgtttttttggaagttaatctggggtagaaatgtatggtgatttttattt

SEQ ID NO: 502767 - DNA, 120 bp, Artificial Sequence
  ENSG00000163827_29 (sequence is synthesized)
tctctgtctgaagaaccagccatttttaaaaaggttattattgacatcccaatattttgtcttggtgggcttactcataagtccaaacattttattctcaacaggtgtaaaacaggcaga

SEQ ID NO: 502768 - DNA, 120 bp, Artificial Sequence
  ENSG00000163827_30 (sequence is synthesized)
gcattctaaaaccacatggtagtgctttggtggaggactgcttccacttagaaacaaactctgagaagtaggctaagagaagacaagagggccgggcgcggtgactcacgcctataatcc

SEQ ID NO: 502769 - DNA, 120 bp, Artificial Sequence
  ENSG00000163827_31 (sequence is synthesized)
aaaaaaaaaaaaaaaagagagagagatgaaaagagtaggaaaatgagaaatcaccttcgttgaatcttaaatagttacatttttttctttttaacactaaaaatacaattcaaatttatt

SEQ ID NO: 502770 - DNA, 120 bp, Artificial Sequence
  ENSG00000163827_32 (sequence is synthesized)
acaattcaaatttattagctctactacttgaatgattttggaattttatgtcatgctaaggtatgtgttacatatggccaagtggaaaatatatctgaagaggggctttcatacaaatag

SEQ ID NO: 502771 - DNA, 120 bp, Artificial Sequence
  ENSG00000163827_33 (sequence is synthesized)
gctttcatacaaatagactgttcataatttatgtaaattttattttaataaaatcagttttttgtttaaaaaccttgtttcactgtcacatatgaaaaaaatactgcattgatatataat

SEQ ID NO: 502772 - DNA, 120 bp, Artificial Sequence
  ENSG00000163827_34 (sequence is synthesized)
ataacccaaaacaaataattacttgaatatgtttgtagagatactatttaatttattcatataaatgtgcagaaagattccaaaggagaatatatatcttgtgaaaatatggagatttga

SEQ ID NO: 502773 - DNA, 120 bp, Artificial Sequence
  ENSG00000163827_35 (sequence is synthesized)
aaatttgacatgatgcaaatagactgatacataatttggaaaggttatttacatggcagaatacatgtatgaatattaaagtaatatgaatgaaagaataaaatattcttagaagaaaaa

SEQ ID NO: 502774 - DNA, 120 bp, Artificial Sequence
  ENSG00000163827_36 (sequence is synthesized)
tgtgaaaatgtctggccctgggtaggaggctgcagatagtccctgggccggggctcgcgctggccggctgcagcgcgcagggtgccaagccctcccctacgaagtctgttttgtctcagg

SEQ ID NO: 502775 - DNA, 120 bp, Artificial Sequence
  ENSG00000163827_37 (sequence is synthesized)
ttcctcattaaacttcagagccttacactgttgctcagtacaaatacgcagttcctatgatagcaacacccatggttataaggacctacccaccacccttgtggtaggcacgaggaagac

SEQ ID NO: 502776 - DNA, 120 bp, Artificial Sequence
  ENSG00000163827_38 (sequence is synthesized)
cgagatgacacgataaatccccccacagtaaatgctgtagcaggctgcctagctagagttcactgagctaactcactaggctgtctggcgctctggacaccatctgactgccatctgggg

SEQ ID NO: 502777 - DNA, 120 bp, Artificial Sequence
  ENSG00000163832_0 (sequence is synthesized)
ggcattgcgcatgcgcgcttccttgcgcgagccgggctgtcgggtgtgttttgctctccagcctccgtcgtctctgcagcactccgggttctcctccagagcgctagtcccaggagctcg

SEQ ID NO: 502778 - DNA, 120 bp, Artificial Sequence
  ENSG00000163832_1 (sequence is synthesized)
gaatgttcgtggaacttaataacctgcttaacaccacccccgacagggcggagcaggggaaactgactctactctgtgatgccaagacagatgggagtttccttgtacaccactttctct

SEQ ID NO: 502779 - DNA, 120 bp, Artificial Sequence
  ENSG00000163832_2 (sequence is synthesized)
ccttctatctcaaagctaattgtaaagtctgctttgtggcactcatccagtccttcagccactacagtatcgtgggacagaagctgggtgtcagcctgaccatggcgcgggagcgtgggc

SEQ ID NO: 502780 - DNA, 120 bp, Artificial Sequence
  ENSG00000163832_3 (sequence is synthesized)
agcttgtgttccttgagggactcaagtctgcagtggacgtcgtcttccaggctcaaaaggagccacaccccctgcagtttctcagggaggctaatgctgggaacttgaaaccattgtttg

SEQ ID NO: 502781 - DNA, 120 bp, Artificial Sequence
  ENSG00000163832_4 (sequence is synthesized)
agtttgtacgggaggccctgaagccagtagacagtggagaggctcggtggacgtacccggtgctgttggtggacgacctcagtgtgctcctgagcctgggcatgggggcggtggctgtgc

SEQ ID NO: 502782 - DNA, 120 bp, Artificial Sequence
  ENSG00000163832_5 (sequence is synthesized)
tgctgggaactaaagggaaacatggtggtccttgtgcacgacagtggagatgcggaggatgaggagaatgacatcctgctgaatggcctcagtcatcagagccatctgatactgcgggct

SEQ ID NO: 502783 - DNA, 120 bp, Artificial Sequence
  ENSG00000163832_6 (sequence is synthesized)
gagggcctggccactggcttctgcagggatgtgcacgggcagctgaggatcctgtggaggagaccatcgcagcccgcagtccaccgggatcagagcttcacttaccagtataagatacag

SEQ ID NO: 502784 - DNA, 120 bp, Artificial Sequence
  ENSG00000163832_7 (sequence is synthesized)
gacaaaagcgtgtccttttttgccaaaggaatgtctcctgctgttctgtgacctgatttcggagcagctgaagctacataggactgtttttggacgtggaagatagagcaacatagcaag

SEQ ID NO: 502785 - DNA, 120 bp, Artificial Sequence
  ENSG00000163832_8 (sequence is synthesized)
aatgggtctttctcctctgtagtaatatttcaggctggaccggcgactccactgtgaccagagggttgagtgctgcagtgatggcatgccttggctgccctgggccctgttcagaaaaca

SEQ ID NO: 502786 - DNA, 120 bp, Artificial Sequence
  ENSG00000163832_9 (sequence is synthesized)
caagggaccacaatcctgcctttgctgagagagaggctggatgctagacccaagtgaaaggggtcctttggagcctttgtttaaatatgccttagccccagctgcccatttttggttgac

SEQ ID NO: 502787 - DNA, 120 bp, Artificial Sequence
  ENSG00000163832_10 (sequence is synthesized)
aagcctttcagagccagagtgggtatagatgtgccagccaggagatggcaccggatggcaggtgtgcaaggtgacaactaggataatcatggctggaataaagtaagtttccacactgga

SEQ ID NO: 502788 - DNA, 120 bp, Artificial Sequence
  ENSG00000163832_11 (sequence is synthesized)
tgtagtccgcagaggatcgacccggggattggactggaggcttgggcccgccgaaagtgggcttctgggccatctcgcatattctcaacggctgggaaactgactctactctgtgatgcc

SEQ ID NO: 502789 - DNA, 120 bp, Artificial Sequence
  ENSG00000163832_12 (sequence is synthesized)
cccagcccggaagcaacacgtggcaggtgggcccaggcagggttcctggttgctgtgtgattccttcttattgtgcaggaggatggaactggcttcaggagtcagacacttcatctggtg

SEQ ID NO: 502790 - DNA, 120 bp, Artificial Sequence
  ENSG00000163832_13 (sequence is synthesized)
ccctggtttggtattcaacatcacaggcctgagactggttttcctgcttttcctcctttctgaacattggccacaaacatagctctgtgaagactccccgcttggctgctgttcttcgtc

SEQ ID NO: 502791 - DNA, 120 bp, Artificial Sequence
  ENSG00000163832_14 (sequence is synthesized)
cacacacacccttatgcagtgggtgtgaggccatgtttcctgaccctgtgtgtgacttcacacacatcccttagcatctctgacttggggtttcctcatttgaaggcaggggctggttat

SEQ ID NO: 502792 - DNA, 120 bp, Artificial Sequence
  ENSG00000163832_15 (sequence is synthesized)
taaggtgtggacacaattgactagatttctgcactaagctgacctctttccagggagtctaacctttttgtgttccttgtaacttttaggggaaactgactctactctgtgatgccaaga

SEQ ID NO: 502793 - DNA, 120 bp, Artificial Sequence
  ENSG00000163832_16 (sequence is synthesized)
ggacagaagctggtaaatattttggagctccatgatgaggtccctgagtgagtgtgtgtgtcacacatggtctaaagcttggctttcctgtttgcattgtacagaacttagcaaaagagg

SEQ ID NO: 502794 - DNA, 62 bp, Artificial Sequence
  ENSG00000163832_17 (sequence is synthesized)
atctcgcatattctcaacggctgtgcgtgtccttaaaagtccctgggaagccatcatctaag

SEQ ID NO: 502795 - DNA, 62 bp, Artificial Sequence
  ENSG00000163832_18 (sequence is synthesized)
tgggaagccatcatctaaggggaaactgactctactctgtgatgccaagacagatgggagtt

SEQ ID NO: 502796 - DNA, 120 bp, Artificial Sequence
  ENSG00000163832_19 (sequence is synthesized)
gaaagtgggcttctgggccatctcgcatattctcaacggctgtgcgtgagccaccacgcccagcctggtttattcataatctttgtcttcctaatgaaatggtaaactcctccaggcaac

SEQ ID NO: 502797 - DNA, 120 bp, Artificial Sequence
  ENSG00000163832_20 (sequence is synthesized)
caggatactaagtgtctaaagcctttttatgaccccatagcgccaaattgtagctttcagtagatccttgtggattttagttgccaggcagttcttgtccagatgactctgattaccttg

SEQ ID NO: 502798 - DNA, 120 bp, Artificial Sequence
  ENSG00000163832_21 (sequence is synthesized)
caggaaatgacagcactaggggtaacactgaaggtctgacgatgtgatctttcacattttgtaagtgaaaaaacctgaagcccagagaagttaaggcatttgtggaaggtcacacggcaa

SEQ ID NO: 502799 - DNA, 120 bp, Artificial Sequence
  ENSG00000163832_22 (sequence is synthesized)
ggaggtggcatgcatgatatcacttgatcctgaccttccctgtcactgacagaaatagaggtgaatggagcaggacagtcaggctctgcagagaccacccttagaggtctttctagagct

SEQ ID NO: 502800 - DNA, 120 bp, Artificial Sequence
  ENSG00000163832_23 (sequence is synthesized)
ctcatggaactgccttctctgcgcccacctgtgacctccaagaactcagacaggtccagacctcacttgcttgctgtgatctttttatttgcttggggttttggctttactctggcaggc

SEQ ID NO: 502801 - DNA, 120 bp, Artificial Sequence
  ENSG00000163833_0 (sequence is synthesized)
gccttcccaacagaacgctgtcctctactgcagctgatgcaacccagccacctcccggcaatccgcttacttgcaatcaagggttcaggtgcaagcagatgctgactcagcctgttccat

SEQ ID NO: 502802 - DNA, 120 bp, Artificial Sequence
  ENSG00000163833_1 (sequence is synthesized)
taagagctaagaagcaagaagaaattggggcgccatggggaaagcccgcagatccccgccagggcaccacaggcattgtgagggatgcttcaaccgccactgccacattcctgtggaacc

SEQ ID NO: 502803 - DNA, 120 bp, Artificial Sequence
  ENSG00000163833_2 (sequence is synthesized)
caacacctcctgcctggtaataagctgccacctgctctgtggtgccaccttccacatgtgcaaagaggcagagcaccagctcctctgccctttagagcaggttccgtgcctcaactccga

SEQ ID NO: 502804 - DNA, 120 bp, Artificial Sequence
  ENSG00000163833_3 (sequence is synthesized)
atatggctgccctctgtccatgtcccgccacaaactggccaagcacctgcaggtgtgccccgccagcgtggtctgctgctccatggagtggaaccgctggccaaatgtggactctgaaac

SEQ ID NO: 502805 - DNA, 120 bp, Artificial Sequence
  ENSG00000163833_4 (sequence is synthesized)
cacccttcatgaaaacatcatgaaagagacccccagtgaggagtgtttggacacagccctggccctgcaggatcagaaggtcctcttcagatccttgaaaatggtggaacttttcccaga

SEQ ID NO: 502806 - DNA, 120 bp, Artificial Sequence
  ENSG00000163833_5 (sequence is synthesized)
aactagagaggctactgaggaggaaccaactatgaatggtgaaaccagtgtggaggaaatgggaggagcagtgggtggagtggatatcggtttggtaccacatggtctgtcagcaactaa

SEQ ID NO: 502807 - DNA, 120 bp, Artificial Sequence
  ENSG00000163833_6 (sequence is synthesized)
tggggagatggcagagctaagtcaagaagaacgggaggtgctagccaaaaccaaagaagggatggacctggtcaagtttggccagtgggaaaatattttcagcaaagagcacgcagcctc

SEQ ID NO: 502808 - DNA, 120 bp, Artificial Sequence
  ENSG00000163833_7 (sequence is synthesized)
tgctttaacaaattcatcagcgagctgtgagagcaagaacaagaatgactccgagaaagaacagatttccagtggccataacatggtagaaggagagggcgctcccaaaaagaaagaacc

SEQ ID NO: 502809 - DNA, 120 bp, Artificial Sequence
  ENSG00000163833_8 (sequence is synthesized)
acaggaaaatcagaagcagcaggacgttcgtacagccatggaaaccacagggcttgccccttggcaggatggtgttctggaaagactgaaaacagctgtggatgcaaaggactataacat

SEQ ID NO: 502810 - DNA, 120 bp, Artificial Sequence
  ENSG00000163833_9 (sequence is synthesized)
gtatctagtgcacaatgggcggatgctgatacactttggtcagatgcctgcttgtacacccaaggagagagactttgtttatggcaagctggaggctcaggaagttaagactgtttacac

SEQ ID NO: 502811 - DNA, 120 bp, Artificial Sequence
  ENSG00000163833_10 (sequence is synthesized)
cttcaaagttcctgtgagctactgtggaaagcgagctcgacttggagatgccatgttgagttgtaagccaagtgaacacaaggcagtggatacttcagatttggggatcactgtggagga

SEQ ID NO: 502812 - DNA, 120 bp, Artificial Sequence
  ENSG00000163833_11 (sequence is synthesized)
cctgcccaaatcagatctcatcaagaccaccctccagtgtgctttggaaagagaactcaaaggccacgtcatctctgaatccagaagcattgatggactgttcatggattttgccacaca

SEQ ID NO: 502813 - DNA, 120 bp, Artificial Sequence
  ENSG00000163833_12 (sequence is synthesized)
aacatacaactttgagccagaacagttttcctctgggacagtgctggctgacctaaccgctgccaccccagggggactccacgtggagctccacagcgagtgtgtgaccaggagacacaa

SEQ ID NO: 502814 - DNA, 120 bp, Artificial Sequence
  ENSG00000163833_13 (sequence is synthesized)
caaaagcagctctgccttcactttcacttgcaacaaattcttcaggagggatgagttccccctgcacttcaagaatgtccacacagacattcagtcatgtctcaatggctggttccagca

SEQ ID NO: 502815 - DNA, 120 bp, Artificial Sequence
  ENSG00000163833_14 (sequence is synthesized)
tcgatgccccctcgcctacttgggatgtacatttgttcaaaaccatttccgtcccccagggcaaaaggcaaaagtaatctatagccaggagctcaagacctttgccattaagccggaggt

SEQ ID NO: 502816 - DNA, 120 bp, Artificial Sequence
  ENSG00000163833_15 (sequence is synthesized)
tgctccagagctgagcgagggaaggaagaacaaccatcttttgggtcatggaggaaaaagccagaattctttaaccagcctgcccctggagattttgaagtacattgctgggttcttgga

SEQ ID NO: 502817 - DNA, 120 bp, Artificial Sequence
  ENSG00000163833_16 (sequence is synthesized)
cagcgtcagcctggcccagctctcccaggtgtctgtgctgatgaggaatatctgtgccactttgttacaagagagaggaatggtccttttgcaatggaagaaaaagaggtattcccatgg

SEQ ID NO: 502818 - DNA, 120 bp, Artificial Sequence
  ENSG00000163833_17 (sequence is synthesized)
aggcacctcctggagagtccacagagagatctggcagttcagcagcctcttctccaaaatcaagagctgggagtttaatgaagtcacctccatgtctgagcacctgaagtcctgtccttt

SEQ ID NO: 502819 - DNA, 120 bp, Artificial Sequence
  ENSG00000163833_18 (sequence is synthesized)
caacattgtagagcacaaaactgacccgattcttttgactagcatgtgtcagccccgtgagcaggcccgagagagcttagtctccacctttagaatcagaccacgaggaagatacgtctc

SEQ ID NO: 502820 - DNA, 120 bp, Artificial Sequence
  ENSG00000163833_19 (sequence is synthesized)
ctaaaaattcagatgccactcgatgcacccttcttggatttcttctcggagttcctgaagtaggacagagtgtgtggttttgaggactcccttctgtaaactgcctatttgcttatcggg

SEQ ID NO: 502821 - DNA, 120 bp, Artificial Sequence
  ENSG00000163833_20 (sequence is synthesized)
gtgtattggaacacgcaatgtccttcgaaacctcaacacgaggcctaagaatttcctaagccatgtcttgtaccatagtgccacattgatgacttgtttccttttttcttttcttttctt

SEQ ID NO: 502822 - DNA, 120 bp, Artificial Sequence
  ENSG00000163833_21 (sequence is synthesized)
ttcttttttctttctttctaaaatagattggtctgagaagaaaataagtaatttgaggccatttggaagatgggcccaatttcttaagtgatgagagagcacgaaattccataaccagta

SEQ ID NO: 502823 - DNA, 120 bp, Artificial Sequence
  ENSG00000163833_22 (sequence is synthesized)
caggcctgtgcttttacatgggctttttagttcacaaagcactttcaaatttatgggacaggaaatgcaggatgggactccccagggaacgcagggtgaagggaacaaagctggaggctc

SEQ ID NO: 502824 - DNA, 120 bp, Artificial Sequence
  ENSG00000163833_23 (sequence is synthesized)
ccagggctcattttggttattctactgcctctaggccagggtagtcctaacacagcctgacataggagagcccctggctgagcatggcagccttgaagacaccacaggccaaaacatgag

SEQ ID NO: 502825 - DNA, 120 bp, Artificial Sequence
  ENSG00000163833_24 (sequence is synthesized)
gggcagaaatgggatcacagagtctgttgctagaatcttggcaacatacagcaggaaagccttgataaatcgggagtccaaaggagacaccatatttatggagaacattaggacaaaaag

SEQ ID NO: 502826 - DNA, 120 bp, Artificial Sequence
  ENSG00000163833_25 (sequence is synthesized)
tcaccaacttactttgtaacattttaataatgacttaagggtcaagatttttttcttctgaaaattatgttctgagttaggcagaacatagccatggccctgggccaccctgtgctatct

SEQ ID NO: 502827 - DNA, 120 bp, Artificial Sequence
  ENSG00000163833_26 (sequence is synthesized)
gaaatgacctcaatacactaatgccaacctcagcgtcatgccagaatgcacagggcagcccagggagatcacacctttggcaaagtccagacaaggcccactgcagttcctatggcgcca

SEQ ID NO: 502828 - DNA, 120 bp, Artificial Sequence
  ENSG00000163833_27 (sequence is synthesized)
gtcaccagctcctagacagcacttgggtaccccattggggtcttggagaggaagacatgtgaacataacggctccctgaaattgctcctacccatccatatttctggtcatgctttcagt

SEQ ID NO: 502829 - DNA, 120 bp, Artificial Sequence
  ENSG00000163833_28 (sequence is synthesized)
ctgacaaaaatggatgatactgctgtttttggtaacaaacagtgaatattcataagaacaaaagtaaaagaaaaaaagacacagtagaaactggcatcccctaaagcagggcttcttagc

SEQ ID NO: 502830 - DNA, 120 bp, Artificial Sequence
  ENSG00000163833_29 (sequence is synthesized)
tcccctaaagcagggcttcttagccttggaactattgacatttttaaatggataattctttttttttttttctaggtggggaggggatggagttcactcttgttgcccaggctggagcgc

SEQ ID NO: 502831 - DNA, 89 bp, Artificial Sequence
  ENSG00000163833_30 (sequence is synthesized)
cctttgcgccctgcctgaactggataattctttgttgcaagggactgttctgtgtactacaggatacttggcagcatccttggcctatc

SEQ ID NO: 502832 - DNA, 120 bp, Artificial Sequence
  ENSG00000163833_31 (sequence is synthesized)
ctgtgtactacaggatacttggcagcatccttggcctatccattaaatgtcagtagcacccccacagtggcaacaatcaaaaatgtcaccagacattgctaaatattggggagcaaaatg

SEQ ID NO: 502833 - DNA, 120 bp, Artificial Sequence
  ENSG00000163833_32 (sequence is synthesized)
gctccccgttgaaaatccctaaaggatgtcatactagtgacaataagttaggatatgcttattttttagtacagcaaaatcttatcgcacatagctatccacaatagttatgatttaatg

SEQ ID NO: 502834 - DNA, 120 bp, Artificial Sequence
  ENSG00000163833_33 (sequence is synthesized)
cagctctttatttatgaaataggttttagacatgtggtgattttaagttgggaaccagaaggaaatgattcgtttggtatggcttcatgtccttcagccacccccaagaatgtatccttt

SEQ ID NO: 502835 - DNA, 120 bp, Artificial Sequence
  ENSG00000163833_34 (sequence is synthesized)
cagctctctttggttatacctgaagccaggagcgttgagttattagccttgtgtttatattcctctcactgtaattggtgtcattttcccagcagtcctagcagtcctcaagcaagtggg

SEQ ID NO: 502836 - DNA, 120 bp, Artificial Sequence
  ENSG00000163833_35 (sequence is synthesized)
aaatcggaaaagaaaaggacaggcattgtagggaagcagaggataaagaatttagccaacaaaagaaacaatctagtcaatctgggtgcttttatttcctgggttctctctaaacatggc

SEQ ID NO: 502837 - DNA, 120 bp, Artificial Sequence
  ENSG00000163833_36 (sequence is synthesized)
tcagagctggtgtagatgaagtaggtgaaacctctgaaaagagtctagaaggcagtagagcaagtcccagaccagaaacatgctcatcttttcatcgtaatgtgccactcggtactattt

SEQ ID NO: 502838 - DNA, 120 bp, Artificial Sequence
  ENSG00000163833_37 (sequence is synthesized)
ggtaatgtcactctatttttcctaatcccatcctttggtttgtatttcatatttgtatataaggcaccattttctaaaaatatgactagggtgtgacctaaggttttattctgtgaagat

SEQ ID NO: 502839 - DNA, 120 bp, Artificial Sequence
  ENSG00000163833_38 (sequence is synthesized)
gagtaactggaaagaagctaacactgcagtgggaaggaaggaagagagttgtccaggtggtagttcgacgtgttttgaatctagtccttcctacatggaggataaaagctcctaaagtcc

SEQ ID NO: 502840 - DNA, 120 bp, Artificial Sequence
  ENSG00000163833_39 (sequence is synthesized)
actctgggtttgtgattttaatagaaatagaaagggaaactatagaccaatggagatgaaaatcaggggctatcgacagatggaggagaaataaggtgctacatagagaaaggaagaggg

SEQ ID NO: 502841 - DNA, 120 bp, Artificial Sequence
  ENSG00000163833_40 (sequence is synthesized)
cagaaggctttcccttcccaaactgggtgagctggggaagccttggttcaggagagtggcactgcccacaactgctttgtgggttgtgcacttccagccgcactctccccctccagttgc

SEQ ID NO: 502842 - DNA, 120 bp, Artificial Sequence
  ENSG00000163833_41 (sequence is synthesized)
tgccttcagagccgtactgaagcacgagcttcaataagacaagcacacttcatagtgagagggcagcggtaccaaagcctttcagagagactatggattagacagaaatgatttgtgaga

SEQ ID NO: 502843 - DNA, 120 bp, Artificial Sequence
  ENSG00000163833_42 (sequence is synthesized)
ggaagctggagtgaacagcatgaacagcgagtgttacctgacagaggcaagacagctagaagtggcttcagatttagaaacagctgaggggagcaaagacggactgtgtacacagggagg

SEQ ID NO: 502844 - DNA, 120 bp, Artificial Sequence
  ENSG00000163833_43 (sequence is synthesized)
gaggatgtctatgggcagagcccttggtgagtatcatcaccaagaaaggcagtccagagtagagatcagccgaatatggaggctgaggtctgtagaactgggccagagaggaccttactg

SEQ ID NO: 502845 - DNA, 120 bp, Artificial Sequence
  ENSG00000163833_44 (sequence is synthesized)
ccttagtagcataagggtctggaaaagaagtttctatctcacaacaaaggaaaaagtgaaaagcaaggtggaacttgaagatacgtcacgaaaatcactataaaagtctgatttatgtgt

SEQ ID NO: 502846 - DNA, 120 bp, Artificial Sequence
  ENSG00000163833_45 (sequence is synthesized)
gatgtcaaatcaaactgaaatgaagaatgagattgagtatatctgtggtgactgacctctgtatactagaaacctcaacatctctagaagaggaaataaaagctgctttgcactctgaaa

SEQ ID NO: 502847 - DNA, 120 bp, Artificial Sequence
  ENSG00000163840_0 (sequence is synthesized)
cagggcgggccgcgcctttaccgcccagctgcctcccggagcccccgcgccctcccgacgcgcagagccatggcctcccacctgcgcccgccgtccccgctcctcgtgcgggtgtacaag

SEQ ID NO: 502848 - DNA, 120 bp, Artificial Sequence
  ENSG00000163840_1 (sequence is synthesized)
tcctcgtgcgggtgtacaagtccggcccccgagtacgaaggaagctggagagctacttccagagctctaagtcctcgggcggcggggagtgcacggtcagcacccaggaacacgaagccc

SEQ ID NO: 502849 - DNA, 120 bp, Artificial Sequence
  ENSG00000163840_2 (sequence is synthesized)
cgggcaccttccgggtggagttcagtgaaagggcagctaaggagagagtgttgaaaaaaggagagcaccaaatacttgttgacgaaaaacctgtgcccattttcctggtacccactgaaa

SEQ ID NO: 502850 - DNA, 120 bp, Artificial Sequence
  ENSG00000163840_3 (sequence is synthesized)
attcaataaagaagaacacgagacctcaaatttcttcactgacacaatcacaagcagaaacaccgtctggtgatatgcatcaacatgaaggacatattcctaatgctgtggattcctgtc

SEQ ID NO: 502851 - DNA, 120 bp, Artificial Sequence
  ENSG00000163840_4 (sequence is synthesized)
tccaaaagatctttcttactgtaacagctgacctgaactgtaacctgttctccaaagagcagagggcatacataaccacactgtgccctagtatcagaaaaatggaaggtcacgatggaa

SEQ ID NO: 502852 - DNA, 120 bp, Artificial Sequence
  ENSG00000163840_5 (sequence is synthesized)
ttgagaaggtgtgtggtgacttccaagacattgaaagaatacatcaatttttgagtgagcagttcctggaaagtgagcagaaacaacaattttccccttcaatgacagagaggaagccac

SEQ ID NO: 502853 - DNA, 120 bp, Artificial Sequence
  ENSG00000163840_6 (sequence is synthesized)
tcagtcagcaggagagggacagctgcatttctccttctgaaccagaaaccaaggcagaacaaaaaagcaactattttgaagttcccttgccttactttgaatactttaaatatatctgtc

SEQ ID NO: 502854 - DNA, 120 bp, Artificial Sequence
  ENSG00000163840_7 (sequence is synthesized)
ctgataaaatcaactcaatagagaaaagatttggtgtaaacattgaaatccaggagagttctccaaatatggtctgtttagatttcacctcaagtcgatcaggtgacctggaagcagctc

SEQ ID NO: 502855 - DNA, 120 bp, Artificial Sequence
  ENSG00000163840_8 (sequence is synthesized)
gtgagtcttttgctagtgaatttcagaagaacacagaacctctgaagcaagaatgtgtctctttagcagacagtaagcaggcaaataaattcaaacaggaattgaatcaccagtttacaa

SEQ ID NO: 502856 - DNA, 120 bp, Artificial Sequence
  ENSG00000163840_9 (sequence is synthesized)
agctccttataaaggagaaaggaggcgaattaactctccttgggacccaagatgacatttcagctgccaaacaaaaaatctctgaagcttttgtcaagatacctgtgaaactatttgctg

SEQ ID NO: 502857 - DNA, 120 bp, Artificial Sequence
  ENSG00000163840_10 (sequence is synthesized)
ccaattacatgatgaatgtaattgaggttgatagtgcccactataaacttttagaaactgaattactacaggagatatcagagatcgaaaaaaggtatgacatttgcagcaaggtttctg

SEQ ID NO: 502858 - DNA, 120 bp, Artificial Sequence
  ENSG00000163840_11 (sequence is synthesized)
agaaaggtcagaaaacctgcattctgtttgaatccaaggacaggcaggtagatctatctgtgcatgcttatgcaagtttcatcgatgcctttcaacatgcctcatgtcagttgatgagag

SEQ ID NO: 502859 - DNA, 120 bp, Artificial Sequence
  ENSG00000163840_12 (sequence is synthesized)
aagttcttttactgaagtctttgggcaaggagagaaagcacttacatcagaccaagtttgctgatgactttagaaaaagacatccaaatgtacactttgtgctaaatcaagagtcaatga

SEQ ID NO: 502860 - DNA, 120 bp, Artificial Sequence
  ENSG00000163840_13 (sequence is synthesized)
ctttgactggtttgccaaatcaccttgcaaaggcgaagcagtatgttctaaaaggaggaggaatgtcttcattggctggaaagaaattgaaagagggtcatgaaacaccgatggacattg

SEQ ID NO: 502861 - DNA, 120 bp, Artificial Sequence
  ENSG00000163840_14 (sequence is synthesized)
atagcgatgattccaaagcagcttctccgccactcaagggctctgtgagttctgaggcctcagaactggacaagaaggaaaagggcatctgtgtcatctgtatggacaccattagtaaca

SEQ ID NO: 502862 - DNA, 120 bp, Artificial Sequence
  ENSG00000163840_15 (sequence is synthesized)
aaaaagtgctaccaaagtgcaagcatgaattctgcgccccttgtatcaacaaagccatgtcatataagccaatctgtcccacatgccagacttcctatggtattcagaaaggaaatcagc

SEQ ID NO: 502863 - DNA, 120 bp, Artificial Sequence
  ENSG00000163840_16 (sequence is synthesized)
cagagggaagcatggttttcactgtttcaagagactcacttccaggttatgagtcctttggcaccattgtgattacttattctatgaaagcaggcatacaaacagaagaacacccaaacc

SEQ ID NO: 502864 - DNA, 120 bp, Artificial Sequence
  ENSG00000163840_17 (sequence is synthesized)
caggaaagagataccctggaatacagcgaactgcatacttgcctgataataaggaaggaaggaaggttttgaaactgctttatagggcctttgaccaaaagctgatttttacagtggggt

SEQ ID NO: 502865 - DNA, 120 bp, Artificial Sequence
  ENSG00000163840_18 (sequence is synthesized)
actctcgcgtattaggagtctcagatgtcatcacttggaatgatattcaccacaaaacatcccggtttggaggaccagaaatgtatggctatcctgatccttcttacctgaaacgtgtca

SEQ ID NO: 502866 - DNA, 120 bp, Artificial Sequence
  ENSG00000163840_19 (sequence is synthesized)
aagaggagctgaaagccaaaggaattgagtaagacaactgctggaagatgtcttaaatcaagctttcaaaaaaatatattttaggaggctgatttaatgccagtctaaatccttatgtag

SEQ ID NO: 502867 - DNA, 120 bp, Artificial Sequence
  ENSG00000163840_20 (sequence is synthesized)
aaaggactttgaaatttttcttctcaagaaatggtttgtataagaataacaatctgctagtctgtcatttctggagtgatacttttttttttgagacggagtctgctctgtcgctcgcgc

SEQ ID NO: 502868 - DNA, 120 bp, Artificial Sequence
  ENSG00000163840_21 (sequence is synthesized)
agccaccgcgcccagccctggagtgatactttttatggaagacaaaagccccccaaatctgtgtaaaatctgctgcaaaggtgtcatccctcttgtgtcatcactggggttagaggtggg

SEQ ID NO: 502869 - DNA, 120 bp, Artificial Sequence
  ENSG00000163840_22 (sequence is synthesized)
aatcttctgtgtccttcagttggactctcggctgccaattgatctctttttcattgccatctctggggtggttctttggttttttgtgtgttttccccttcatctctacctgtgaaagtg

SEQ ID NO: 502870 - DNA, 120 bp, Artificial Sequence
  ENSG00000163840_23 (sequence is synthesized)
aaattctattgtaaatgggaggaaaaagggttggttgtgaaaaattaaagacccacattctgctttcttactcatggtaagaaaagtggccatgagtagagattgggcaagcattggtaa

SEQ ID NO: 502871 - DNA, 88 bp, Artificial Sequence
  ENSG00000163840_24 (sequence is synthesized)
cacaagactatcatttttaatgaccaagagcctagtatatagttggtgcctgtcttagtctgtttgtgttgctataaaagaacacctg

SEQ ID NO: 502872 - DNA, 120 bp, Artificial Sequence
  ENSG00000163840_25 (sequence is synthesized)
cctgtcttagtctgtttgtgttgctataaaagaacacctgagactgggtaattgataaagaaaaaggtttgtttggctcacaattttgctggctagaaggttgggcatccggtgaaagcc

SEQ ID NO: 502873 - DNA, 120 bp, Artificial Sequence
  ENSG00000163840_26 (sequence is synthesized)
tcaggctgcttccattcatagcaaagggcagccagtgtgtgcagaaatcaaatgacagagaggaagtgagagagagaggtgtcggggaggtgccaggctctttttaacaagcagttcttc

SEQ ID NO: 502874 - DNA, 120 bp, Artificial Sequence
  ENSG00000163840_27 (sequence is synthesized)
aggaactaagagtgagtcactcccatgagaacagcaccaagccattcatgggggaatctgcccccatgacccagacccctcccgttaggcttcacctccaacactgaggatcaaatttca

SEQ ID NO: 502875 - DNA, 120 bp, Artificial Sequence
  ENSG00000163840_28 (sequence is synthesized)
acatgagatttggaggaggtcaaacaaactaaactgtagcagtgtttcataaaattgtttgcctgactcaggttgctagtaagccagcagagggatatttgcctcctaaatctttggcag

SEQ ID NO: 502876 - DNA, 120 bp, Artificial Sequence
  ENSG00000163840_29 (sequence is synthesized)
aggcaggagtaaggaagccatttctggagtccttgctactaatttggaaaactgagcttctttctttcattgctttttcccttaagagacaagtccttactatattgccctgtctctcaa

SEQ ID NO: 502877 - DNA, 120 bp, Artificial Sequence
  ENSG00000163840_30 (sequence is synthesized)
gggaagacatcaagactggacttgaactcctgggctcaagccatcccccaaccttggcctctcgagtagatgggattataggcatgtgccacggtgcctgacttgagtttcttattctag

SEQ ID NO: 502878 - DNA, 120 bp, Artificial Sequence
  ENSG00000163840_31 (sequence is synthesized)
aacacttggagcctgaactctgaccaggcccctcacttgagcctttgctttctgctccttgtaaactgccatattgggtgcacttgccctgccacagtaatgctatatatttctgagcat

SEQ ID NO: 502879 - DNA, 120 bp, Artificial Sequence
  ENSG00000163840_32 (sequence is synthesized)
tgtttttctctagataattttatatttttgagtataccccacttccaagtgttttttgttttgttttgctttgtttttgttgttgttgttttgagacagggtctcactgtgtcccccagg

SEQ ID NO: 502880 - DNA, 89 bp, Artificial Sequence
  ENSG00000163840_33 (sequence is synthesized)
acctcctggggcggctgggaccacagaagtgcaccaccatgcctggcttttttttttttttttggtcgagatggggtgtccctgtgttg

SEQ ID NO: 502881 - DNA, 120 bp, Artificial Sequence
  ENSG00000163840_34 (sequence is synthesized)
cctggcttttttttttttttttggtcgagatggggtgtccctgtgttgcccagactggtcttgaactcctggactcaagggatcctcctgtcttgggctcccaaagtgttgggattacag

SEQ ID NO: 502882 - DNA, 120 bp, Artificial Sequence
  ENSG00000163840_35 (sequence is synthesized)
gaccatgcctagctcacttccaggtttaacagacaaaataaacttactctagtttccatctctatcattttataataaccgtagcccacattgtagtagtttttcagctctttactaagt

SEQ ID NO: 502883 - DNA, 120 bp, Artificial Sequence
  ENSG00000163840_36 (sequence is synthesized)
cccaccaattcatgttttcacccttaaaatctttctcactgatactctctctggacagaaaaaaggtgaaataagcctactataaggaatatatgacatgctaaattttatttttaaacg

SEQ ID NO: 502884 - DNA, 120 bp, Artificial Sequence
  ENSG00000163840_37 (sequence is synthesized)
gttcttcaagtcagattaaagtaataatagcaaattatgtgattatccatgtcccagcctctctccaaaaaaatagtaaacaagatgtcttcttcttttcccaaagatacacatacacac

SEQ ID NO: 502885 - DNA, 120 bp, Artificial Sequence
  ENSG00000163840_38 (sequence is synthesized)
atgtacaaatttttttatcagataataatagctaatatttaatgagtacttaccttagtttgtcccctttacaacagctttacatctgtgtgattgatacagttcatattcccattttat

SEQ ID NO: 502886 - DNA, 120 bp, Artificial Sequence
  ENSG00000163840_39 (sequence is synthesized)
aactgagaaaactggtgcacagagaggataagcaacttgccaaaggtcacacagttaataagtggaaatgctggggtatgaaccaggtagtctgcccccatagctctgccccccagagct

SEQ ID NO: 502887 - DNA, 120 bp, Artificial Sequence
  ENSG00000163840_40 (sequence is synthesized)
gtactgtctcccatgagggtacttctccatggagcagcctgaggcgatccctttattctgggcttctctcagaaatggattcccacacagtattcaaagcaaatttccccagaggaaatc

SEQ ID NO: 502888 - DNA, 120 bp, Artificial Sequence
  ENSG00000163840_41 (sequence is synthesized)
ctattggaagaacttaaaaactcagaatctttttctttgtccagagagttgaggaagcttaagctaaatgatacatgtttttaaaaaaaaatcagattataaatttagtttttggtgatt

SEQ ID NO: 502889 - DNA, 120 bp, Artificial Sequence
  ENSG00000163840_42 (sequence is synthesized)
cattaaattctttactattatagttattttctagctgttcatcttttagctaaatttgttccaaagaagcaaaagtttggtttctactaagttctggattctggatgggagattgcactg

SEQ ID NO: 502890 - DNA, 120 bp, Artificial Sequence
  ENSG00000163840_43 (sequence is synthesized)
tgtgtgacatgcaagtttcatggtgtgggagattgcagagcatttgggttactgcttttactctttggaagctgttatcatctgtatctgctttaaataaagttaaagatttggaacaaa

SEQ ID NO: 502891 - DNA, 120 bp, Artificial Sequence
  ENSG00000163848_0 (sequence is synthesized)
ggcgaccgcggcggcgctctagctgcggcatgtctgcgtctctactgctctgggaggaggaagagaaggaggaagaggaggaggaggaggagggggaggaagaggagaaaggcgcagggg

SEQ ID NO: 502892 - DNA, 120 bp, Artificial Sequence
  ENSG00000163848_1 (sequence is synthesized)
tgggagctgttgccgaagctgccacagcaaaagttctcccccctccccccttcccctcctctcaaggcccctagaaaggttggagctgccgccgcctgcagtcggtgaccgcgcgactcg

SEQ ID NO: 502893 - DNA, 120 bp, Artificial Sequence
  ENSG00000163848_2 (sequence is synthesized)
gcgcccgcccgcggatagagggaggaatcagcagcttggaaattcaagcacgtgatctggcgggatgggcgtttgcctaacgtatttaatggaggaatcggatggcataagtgattaagg

SEQ ID NO: 502894 - DNA, 120 bp, Artificial Sequence
  ENSG00000163848_3 (sequence is synthesized)
tggtattgaggatttctgaagcctatgaaaggtagaaactcaaccatgatttctttttcaactctacagcattcctttccttgaagtcttcgtttttaccttagtctcgggcagttatac

SEQ ID NO: 502895 - DNA, 120 bp, Artificial Sequence
  ENSG00000163848_4 (sequence is synthesized)
ttaagcatgaacattgacgacaaactggaaggattgtttcttaaatgtggcggcatagacgaaatgcagtcttccaggacaatggttgtaatgggtggagtgtctggccagtctactgtg

SEQ ID NO: 502896 - DNA, 120 bp, Artificial Sequence
  ENSG00000163848_5 (sequence is synthesized)
tctggagagctacaggattcagtacttcaagatcgaagtatgcctcaccaggagatccttgctgcagatgaagtgttacaagaaagtgaaatgagacaacaggatatgatatcacatgat

SEQ ID NO: 502897 - DNA, 120 bp, Artificial Sequence
  ENSG00000163848_6 (sequence is synthesized)
gaactcatggtccatgaggagacagtgaaaaatgatgaagagcagatggaaacacatgaaagacttcctcaaggactacagtatgcacttaatgtccctataagcgtaaagcaggaaatt

SEQ ID NO: 502898 - DNA, 120 bp, Artificial Sequence
  ENSG00000163848_7 (sequence is synthesized)
acttttactgatgtatctgagcaactgatgagagacaaaaaacaaatcagagagccagtagacttacagaaaaagaagaagcggaaacaacgttctcccgcaaaaatccttacaataaat

SEQ ID NO: 502899 - DNA, 120 bp, Artificial Sequence
  ENSG00000163848_8 (sequence is synthesized)
gaggatggatcacttggtttgaaaacccctaaatctcacgtttgtgagcactgcaatgctgcctttagaacgaactatcacttacagagacatgtcttcattcatacaggtgaaaaacca

SEQ ID NO: 502900 - DNA, 120 bp, Artificial Sequence
  ENSG00000163848_9 (sequence is synthesized)
tttcaatgtagtcaatgtgacatgcgtttcatacagaagtacctgcttcagagacatgagaagattcatactggtgaaaaaccatttcgctgtgatgaatgtggtatgagattcatacaa

SEQ ID NO: 502901 - DNA, 120 bp, Artificial Sequence
  ENSG00000163848_10 (sequence is synthesized)
aaatatcatatggaaaggcataagagaactcatagtggagaaaaaccttaccagtgtgaatactgtttacagtatttttccagaacagatcgtgtattgaaacataaacgtatgtgccat

SEQ ID NO: 502902 - DNA, 120 bp, Artificial Sequence
  ENSG00000163848_11 (sequence is synthesized)
gaaaatcatgacaaaaaactaaatagatgtgccatcaaaggtggccttctgacatctgaggaagattctggcttttctacatcaccaaaagacaactcactgccaaaaaagaaaaggcag

SEQ ID NO: 502903 - DNA, 120 bp, Artificial Sequence
  ENSG00000163848_12 (sequence is synthesized)
aaaacggagaaaaaatcatctggaatggacaaagagagtgctttggacaaatctgacctgaaaaaagacaaaaatgattacttgcctctttattcttcaagtactaaagtaaaagatgag

SEQ ID NO: 502904 - DNA, 120 bp, Artificial Sequence
  ENSG00000163848_13 (sequence is synthesized)
tatatggttgcagaatatgctgttgaaatgccacattcgtcagttgggggctcgcatttagaagatgcgtcaggagaaatacacccacctaagttagttctcaaaaaaattaatagtaag

SEQ ID NO: 502905 - DNA, 120 bp, Artificial Sequence
  ENSG00000163848_14 (sequence is synthesized)
agaagtctgaaacagccactggagcaaaatcaaacaatttcacctttatccacatatgaagagagcaaagtttcaaagtatgcttttgaacttgtggataaacaggctttactggactca

SEQ ID NO: 502906 - DNA, 120 bp, Artificial Sequence
  ENSG00000163848_15 (sequence is synthesized)
gaaggcaatgctgacattgatcaggttgataatttgcaggaggggcccagtaaacctgtgcatagtagtactaattatgatgatgccatgcagtttttgaagaagaagcggtatcttcaa

SEQ ID NO: 502907 - DNA, 120 bp, Artificial Sequence
  ENSG00000163848_16 (sequence is synthesized)
gcagcaagtaacaacagcagggaatatgcgctgaatgtgggtaccatagcttctcagccttctgtaacacaagcagctgtggcaagtgtcattgatgaaagtaccacggcatccatatta

SEQ ID NO: 502908 - DNA, 120 bp, Artificial Sequence
  ENSG00000163848_17 (sequence is synthesized)
gagtcacaggcactgaatgtggagattaagagtaatcatgacaaaaatgttattccagatgaggtactgcagactctgttggatcattattcccacaaagctaatggacagcatgagata

SEQ ID NO: 502909 - DNA, 120 bp, Artificial Sequence
  ENSG00000163848_18 (sequence is synthesized)
tccttcagtgttgcagatactgaagtgacttctagcatatcaataaattcttcagaagtaccagaggtcaccccgtcagagaatgttggatcaagctcccaagcatcctcatcagataaa

SEQ ID NO: 502910 - DNA, 120 bp, Artificial Sequence
  ENSG00000163848_19 (sequence is synthesized)
gccaacatgttgcaggaatactccaagtttctgcagcaggctttggacagaactagccaaaatgatgcctatttgaatagcccgagccttaactttgtgactgataaccagaccctccca

SEQ ID NO: 502911 - DNA, 120 bp, Artificial Sequence
  ENSG00000163848_20 (sequence is synthesized)
aatcagccagcattctcttccatagacaagcaggtctatgccaccatgcccatcaatagctttcgatcaggaatgaattctccactaagaacaactccagataagtcccactttggacta

SEQ ID NO: 502912 - DNA, 120 bp, Artificial Sequence
  ENSG00000163848_21 (sequence is synthesized)
atagttggtgattcacagcactcatttcccttttcaggtgatgagacaaaccatgcttctgccacatcaacacaggactttctggatcaagtgacttctcagaagaaagctgaggcccag

SEQ ID NO: 502913 - DNA, 120 bp, Artificial Sequence
  ENSG00000163848_22 (sequence is synthesized)
cctgtccaccaagcttaccaaatgagctcctttgaacagcccttccgtgctccctatcatggatcaagagctggaatagctactcaatttagcactgccaatggacaggtgaaccttcgg

SEQ ID NO: 502914 - DNA, 120 bp, Artificial Sequence
  ENSG00000163848_23 (sequence is synthesized)
ggaccagggacaagtgctgaattttcagaatttcccttggtgaatgtaaatgataatagagctgggatgacatcttcacctgatgccacaactggccagacttttggctaaaaaaaaaaa

SEQ ID NO: 502915 - DNA, 120 bp, Artificial Sequence
  ENSG00000163848_24 (sequence is synthesized)
aaaagtgtaaataatactggcactttagaacagattaatcaagagtggggttactctgtgtaaatggagtgctgtacagatttaagagcaatgcgtaataacaagttaagctgatatgaa

SEQ ID NO: 502916 - DNA, 120 bp, Artificial Sequence
  ENSG00000163848_25 (sequence is synthesized)
tagcaagataatccaataactgcatttcgtttggttagtcagcattctttgaactgccttacatgttgtcacctttatagaagcaatgcattacttgttttagatcagaaacttgctatt

SEQ ID NO: 502917 - DNA, 120 bp, Artificial Sequence
  ENSG00000163848_26 (sequence is synthesized)
ccacccacaccaagttaaaaaggaaaaaaaaaagactttcgcacaattgtttcctaactgataacattgtacattcttaggagattagtaattgtgtgaaatttactcatactgtttcta

SEQ ID NO: 502918 - DNA, 120 bp, Artificial Sequence
  ENSG00000163848_27 (sequence is synthesized)
agtttttcagcatagtcattgcacttcagcagggaatctgagtatactttacagacagagtgaacttaaaagtttaatgtcaagagattatggcttaaataaattagtgtgtcctatagg

SEQ ID NO: 502919 - DNA, 120 bp, Artificial Sequence
  ENSG00000163848_28 (sequence is synthesized)
gggaaaaaaaccaagaaaccaccttttaaaaagaatgatatgccatatacccttgattttcattttgcattatattgacgtgtttttttgaaggaaaaaaagtaataaaaatctgatagt

SEQ ID NO: 502920 - DNA, 120 bp, Artificial Sequence
  ENSG00000163848_29 (sequence is synthesized)
ctaagactccactatttaaaagcctaattactttaaaaatatgcatactttcagaacttttaccaaaacacacaactgttgaagcagtcacttctctatggaagtatgcatattggtgtc

SEQ ID NO: 502921 - DNA, 120 bp, Artificial Sequence
  ENSG00000163848_30 (sequence is synthesized)
agtttctttgtacagttgtacttagatattttttatgatttttcatgtgcaggtatcaaggttttgaagttttagtaaaagaaattctgtagattacattcccaagaacataatgcttac

SEQ ID NO: 502922 - DNA, 120 bp, Artificial Sequence
  ENSG00000163848_31 (sequence is synthesized)
acaaaatgtatattccacgttttaaagcttaattgtattttactttacatatacacttcagttaacatagagcacttagaatctatttggtatttttgatttctcaaagtaaaaaaaaaa

SEQ ID NO: 502923 - DNA, 120 bp, Artificial Sequence
  ENSG00000163848_32 (sequence is synthesized)
ttagatttttaggtttgatatggttgtgtcataatcatctcgtaattgacaattttaacttttggcaataaaaggaaattgggatatctttggaactgtaaaacctggtttaatcttttt

SEQ ID NO: 502924 - DNA, 120 bp, Artificial Sequence
  ENSG00000163848_33 (sequence is synthesized)
ctttctagactcttgatagattggataattaaacagtatccagagaaactaaagaaatgggcattttaattgcatattttatcttgagttactttttaatgaacactgctcattacaact

SEQ ID NO: 502925 - DNA, 120 bp, Artificial Sequence
  ENSG00000163848_34 (sequence is synthesized)
ttacaaaccaaaagtgtttactaattccagtaactaccatttctttttcagctagatgagtgatcggaaaatttttgttgcatttcaaaatctaaataaactacagactttatccttata

SEQ ID NO: 502926 - DNA, 120 bp, Artificial Sequence
  ENSG00000163848_35 (sequence is synthesized)
ccatgaatgtttttttttaatactctgtcttaaaataatacagcatggtacaataaatagtgcttttatgtatatatacacacacacacttttctgaagaatgatggtttgagttatgcg

SEQ ID NO: 502927 - DNA, 120 bp, Artificial Sequence
  ENSG00000163848_36 (sequence is synthesized)
ttgggcagttttgatttttggaagttatattagttattgactctttgttacaactttttcatttttacattttaaattttctgccatcgttgtcacaatgcacatcctgatatagcacca

SEQ ID NO: 502928 - DNA, 120 bp, Artificial Sequence
  ENSG00000163848_37 (sequence is synthesized)
gtgaaaatctaaaattaatacccttggaaaatgaaaatattcttaatttccattttgactcttatactggccctatagctctgcagtctttgtttcaatatagaatatgttatccattta

SEQ ID NO: 502929 - DNA, 120 bp, Artificial Sequence
  ENSG00000163848_38 (sequence is synthesized)
aattattttttcttttatttaatgttatcccaagactgttctcataaagaaagggaagaaataactatccacccttaacatccttcatttattttgaatatattggtgtttttatgataa

SEQ ID NO: 502930 - DNA, 120 bp, Artificial Sequence
  ENSG00000163848_39 (sequence is synthesized)
ggaatataaattatatttaatgtggtttcctgtatactttggttattaagttttgcttgaaatagtagttttcccgtttgacagctttctttgctgccaaagttttcaagaatttaagac

SEQ ID NO: 502931 - DNA, 120 bp, Artificial Sequence
  ENSG00000163848_40 (sequence is synthesized)
tgtgttgtgttgtgcattacataattacaaaaaggcttcattcaggtgatacgttaaaaatggaactgtgctcaccctaaataggcattggtatttttctcttttggtgagagtaggcat

SEQ ID NO: 502932 - DNA, 120 bp, Artificial Sequence
  ENSG00000163848_41 (sequence is synthesized)
ttatttcttgagttgttttggagcctgatcaaaaattttgttcatggagaacttgatgcaattttgatacagtggagaggtttttttcggttgttttaacatcaccagcatagtttttag

SEQ ID NO: 502933 - DNA, 120 bp, Artificial Sequence
  ENSG00000163848_42 (sequence is synthesized)
aatgtgactcttgctgagcatttagggtgagcttgggaaggaaggcctttgaaaatggtagttatgcaagcagactttcaggtgttgcattcctgttttcaacacatttctttaaatcta

SEQ ID NO: 502934 - DNA, 120 bp, Artificial Sequence
  ENSG00000163848_43 (sequence is synthesized)
cataatggcagacttttctaccaggttataagcagtttttagataagtgatactcagccagcataacttattgacttaccatttacgtatagtcatcactctcttactgtgaaattccaa

SEQ ID NO: 502935 - DNA, 120 bp, Artificial Sequence
  ENSG00000163848_44 (sequence is synthesized)
atgcctaccagagttaccttgttctatcataatatgacaaacatctcaacagttttggatttccccactttggttcagaaggttatttaatttctatctgggcattaatggagaaaataa

SEQ ID NO: 502936 - DNA, 120 bp, Artificial Sequence
  ENSG00000163848_45 (sequence is synthesized)
gtagccttgtgtgctgcttcagattgaaacatggaggatatgagatattcttctgcaattcatgtttctcatttctcaaagtgagcacattgttctataaaaacatgctggtacaccctt

SEQ ID NO: 502937 - DNA, 120 bp, Artificial Sequence
  ENSG00000163848_46 (sequence is synthesized)
aaacttttgatcaatctgagtgaggtgtgcttttcctcttgggacctactcacgtttgaagattggaaacatcacgttaggcgaggcagtatctcttgaacatcttctaaagggtttttt

SEQ ID NO: 502938 - DNA, 120 bp, Artificial Sequence
  ENSG00000163848_47 (sequence is synthesized)
aaaaccttattctcacatatttcatttgtcttgaatatttaagtggctcttaaacgttttgggtctacatgcaaatgtggtacttaacaaggtaggaatccatcttcttagctctggctg

SEQ ID NO: 502939 - DNA, 120 bp, Artificial Sequence
  ENSG00000163848_48 (sequence is synthesized)
agggtgccagccatcggtcaggtcatttttatctcaagaggcagaaggcagttatgtcaagaattgtgctcagggcaggatttcgtttccacagaggagagacacttgcagagtgccagc

SEQ ID NO: 502940 - DNA, 120 bp, Artificial Sequence
  ENSG00000163848_49 (sequence is synthesized)
taggttagatcttttgccgcttctttcatttgattaatttgggtttttaaagggctgtttaaaaaaaaaaaaaaaaggccgggaaactttaaaagtaggcattactgtagtactgcattt

SEQ ID NO: 502941 - DNA, 120 bp, Artificial Sequence
  ENSG00000163848_50 (sequence is synthesized)
cttagaacattttaaactagaactcatttttttttcacagtatatttacttgaagaagcactataataatcattgagaagtattttgagtctgaaatttaatttaattttccgtttcaaa

SEQ ID NO: 502942 - DNA, 120 bp, Artificial Sequence
  ENSG00000163848_51 (sequence is synthesized)
ttgctttatttcagggaaataattttccagttgttttgctatattctgcaaataaaaaccgtgtttccttttttcacttaaactttggtaggaaacaaactaaagcagacaaacatttct

SEQ ID NO: 502943 - DNA, 120 bp, Artificial Sequence
  ENSG00000163848_52 (sequence is synthesized)
tgttatgtttgttgctttctttaatccaatggataaaaaagtaaaaccctgtaaacattattttatttttttatgcaataccatgctgtaaatatggttcatcaaataaggatgtaccta

SEQ ID NO: 502944 - DNA, 120 bp, Artificial Sequence
  ENSG00000163848_53 (sequence is synthesized)
tgattgaatctttaattctgcacagttagagtttatatataaacgtgtcttgacaatcaaggacttttatgtgagtcttcctttatgatgtttattaatgttatgcattccatttgtttt

SEQ ID NO: 502945 - DNA, 120 bp, Artificial Sequence
  ENSG00000163848_54 (sequence is synthesized)
gaagtgagtaccaatgtgctaatttgtattgtctgaaagtatgtaatgtttttacagcttgtttttaagaatctgtaaatatgtacaaacaaatcacagtactgctttatgttagaaggc

SEQ ID NO: 502946 - DNA, 120 bp, Artificial Sequence
  ENSG00000163848_55 (sequence is synthesized)
atatgatgttgtactgtatgtaagcaataatacatagcagtgctaactttacaagtagcatcaggaaagttctaaaaacatttcagagttattaattatccttatttcatttaataatga

SEQ ID NO: 502947 - DNA, 120 bp, Artificial Sequence
  ENSG00000163848_56 (sequence is synthesized)
ttatctttaatcagtttttataagcaaattccattgttcctcctattggaacgtaacactgtttacacagcataattgaagttgcaggggagacaggctaaatctgacttcatctgtact

SEQ ID NO: 502948 - DNA, 120 bp, Artificial Sequence
  ENSG00000163848_57 (sequence is synthesized)
cactttcactaagcattgaatggccttaccactcttctgcaagatggaggaagaccgcaaaacttagtgcccatcacactgaaggaagggatgtggttttttttcctgcttctgtactgc

SEQ ID NO: 502949 - DNA, 120 bp, Artificial Sequence
  ENSG00000163848_58 (sequence is synthesized)
tacctaactttgtgatttgctttggattttaatatttgtttctgttttagattcaagcccgtaagttttgaggtgacttcagctccattgtgaaatagatagttctcttcatatttcata

SEQ ID NO: 502950 - DNA, 120 bp, Artificial Sequence
  ENSG00000163848_59 (sequence is synthesized)
actacatttcaataattctaaactttctacattgatttttagatacttatttttcaagcttggtttctcagctgatcagatgaatttattcaacttcaatacaaagaaagacaaacctat

SEQ ID NO: 502951 - DNA, 120 bp, Artificial Sequence
  ENSG00000163848_60 (sequence is synthesized)
tatagtttcaagtgagtagatattatactgtacaggacagctatttgaacacacacatcactgctttagaaataaaaccgccaatttataaatgtatatgacctacattttataggaaaa

SEQ ID NO: 502952 - DNA, 120 bp, Artificial Sequence
  ENSG00000163848_61 (sequence is synthesized)
aatgtttttaaatgctagtcatttatataatgtgctttgaaggatttgctagtccacttctgtcactttttagtacactggtatcttttatatgtaatgtatgctttttattattgtagc

SEQ ID NO: 502953 - DNA, 120 bp, Artificial Sequence
  ENSG00000163848_62 (sequence is synthesized)
aaagcatttcagtagaaagaattttgcaacaatatgggggaaatttttcattgttggatttgaattatactggattttatctgtgtagtcttacttgtctttattttaatgctgtctgaa

SEQ ID NO: 502954 - DNA, 120 bp, Artificial Sequence
  ENSG00000163848_63 (sequence is synthesized)
gggaacttggtatccaaataaagcaggtaacctcattttacttcaagggcatactgtgtagtgctgaatttaatctgaaaatctgatgattttgaaaagaaaaacaagtttataaacatt

SEQ ID NO: 502955 - DNA, 120 bp, Artificial Sequence
  ENSG00000163848_64 (sequence is synthesized)
gtacagaagaaattaaatgtgtgtgatggaaatcctgatggtggagcacgttgaattttctgatatatagtgttattttcctgggatcccctatgccttctttgtatttcaactaataaa

SEQ ID NO: 502956 - DNA, 120 bp, Artificial Sequence
  ENSG00000163848_65 (sequence is synthesized)
ggaaaaaccctgtcattaaaactggtaagataataggatattctgattatacagtattactattcctatcccattttctgaccttttctcaatcactgtaaatttttattttctatttcc

SEQ ID NO: 502957 - DNA, 120 bp, Artificial Sequence
  ENSG00000163848_66 (sequence is synthesized)
tattgataattaaatatgtacataatatagacactgttgtatagaactaaatgaattgggttgctatgcttgagtgggtagtgaaatggaaatatttgatgaatactgagagttcctaaa

SEQ ID NO: 502958 - DNA, 120 bp, Artificial Sequence
  ENSG00000163848_67 (sequence is synthesized)
atgctagagcaaatttccgagggaaaggggggcatcgtgtgtcttgggaaggttgcagcaggttgtttcttcaactccctaagaaatcattgggaaggactcaactgcaaactcgggatc

SEQ ID NO: 502959 - DNA, 120 bp, Artificial Sequence
  ENSG00000163848_68 (sequence is synthesized)
agatacaaaatgggtctttccttcccctctcccccaaaaaataggagcactaaattttaaaatctactcaggtgacagttgctttgcaatgaaacttatcacattgaaattttcagtgtt

SEQ ID NO: 502960 - DNA, 120 bp, Artificial Sequence
  ENSG00000163848_69 (sequence is synthesized)
aaataaaaagagatttgtgatatttttaaatataaacttttacatcagtagtcagcagcctgacaattgaaatttggtaagtcgatatattttaaaatattttgctctccaaatagaatt

SEQ ID NO: 502961 - DNA, 120 bp, Artificial Sequence
  ENSG00000163848_70 (sequence is synthesized)
gtttttaaacaattgggaggttttttgtttctttaaatatgttttaattgtcattgtaaaaacaaaatcttgcttgaccctatattatgccatgaatgaattgctgagcctttataatac

SEQ ID NO: 502962 - DNA, 120 bp, Artificial Sequence
  ENSG00000163848_71 (sequence is synthesized)
agtgacagcttgtttcatgcatagtcatggaacatagagatgttctttaaactgacctattgataagaggtttaatgagtttcacggctttcaacactattgtcatatagttatctttgc

SEQ ID NO: 502963 - DNA, 120 bp, Artificial Sequence
  ENSG00000163848_72 (sequence is synthesized)
catttggagtttataaaaccattttatgtattgtgatactaaaggaagttgttttgctttactttaaattgaattattagactaatatttgcaaattctgcattttaaatgtggacactg

SEQ ID NO: 502964 - DNA, 120 bp, Artificial Sequence
  ENSG00000163848_73 (sequence is synthesized)
gctgtttgaaaaataaaatatagaatacagttttatggataattttcgagctgaatttttcacaatattctgaaccaaataacgaatggtaaatatgcaaaaatcatggtgcatagatat

SEQ ID NO: 502965 - DNA, 120 bp, Artificial Sequence
  ENSG00000163848_74 (sequence is synthesized)
aaccgtaaagagaaaagaatttctgtgtggaattaacagttacacaaattgggtaacaattatcagggcctttattatagctttatgtggaatgttattctaaaatgcaagagtcaaatg

SEQ ID NO: 502966 - DNA, 120 bp, Artificial Sequence
  ENSG00000163848_75 (sequence is synthesized)
ttactgtcattgaatattttagacttgaaacgtgtttatcatagagcgaagaaaatatgtgttcttttctttacagataagactctgttaacccactgtcagcatacgtgggatttcttt

SEQ ID NO: 502967 - DNA, 120 bp, Artificial Sequence
  ENSG00000163848_76 (sequence is synthesized)
tcttttttctttcattagtggagatttgttttcatccatctaccaccttgccagtaccctagcttgtgaccagcgggatgcattgtaagaaagttgtctgtggttaggagtgcagtctgg

SEQ ID NO: 502968 - DNA, 120 bp, Artificial Sequence
  ENSG00000163848_77 (sequence is synthesized)
gtccatggaacaaatttaaactaattggccctcgcaatgatcagtcctaggaccctggccttattattagcatggtgctttaaccaattgtacataataataccactgatagtctactaa

SEQ ID NO: 502969 - DNA, 120 bp, Artificial Sequence
  ENSG00000163848_78 (sequence is synthesized)
tgcatttcctagatcccagtttttcttgaatgattaggaatggtggggagaggggaggggagatattctacatgatacttctccaatcttctaaagattataagaaaaaataaaaaattg

SEQ ID NO: 502970 - DNA, 120 bp, Artificial Sequence
  ENSG00000163848_79 (sequence is synthesized)
aagtcacttgaattaatgtgttgtcattgagtcttactcgacaatttatcatgcacaaagtgattatgaagattttcctgattatatgtttggattgaatttaaaaattttttttttcag

SEQ ID NO: 502971 - DNA, 120 bp, Artificial Sequence
  ENSG00000163848_80 (sequence is synthesized)
tgaatgacctgaaagggcataagggaccttcaggagtccccatgctatgctggctgtttcttgcaagttctaaaacatctcttaattaccctgacctttttctcattttcagtctttcct

SEQ ID NO: 502972 - DNA, 120 bp, Artificial Sequence
  ENSG00000163848_81 (sequence is synthesized)
tttttattctcccgactttaaacataaagagttaagaaccactgatgtagatttactgaaactgttacaaaatacaggcacatattactggaaggatggatccagaagaactgctatgaa

SEQ ID NO: 502973 - DNA, 120 bp, Artificial Sequence
  ENSG00000163848_82 (sequence is synthesized)
ggaggaggaggcggaggggcgcggagaagctggcgcactttgggcctcggcggggtcgtctgcggcggccggacctcccagataccgcgccttctgggcctgccccgctggcgcagtcag

SEQ ID NO: 502974 - DNA, 120 bp, Artificial Sequence
  ENSG00000163848_83 (sequence is synthesized)
gaccccttccctcaacgggatgggaaactttgtgagtggcttctccgcagccactaacaagtgtccgccagacagcgggggggccgccgaaggctgatgatggacacccgtttttcttct

SEQ ID NO: 502975 - DNA, 120 bp, Artificial Sequence
  ENSG00000163864_0 (sequence is synthesized)
agactccatctgcccggggccgctaagggagcgcaaggtcaagttcgccttggccccgcctccagctcaggtactaggggatctagacctgaggctgcccgggccggaggcagccttgag

SEQ ID NO: 502976 - DNA, 120 bp, Artificial Sequence
  ENSG00000163864_1 (sequence is synthesized)
tcccgagaccaaacgtcgtttccctctcggacctcgggcgccgggccgcgcgctgaccgacagcccctgctaggcccagcaggtcccctagtcccccgcagtcccccgagactcgccgag

SEQ ID NO: 502977 - DNA, 120 bp, Artificial Sequence
  ENSG00000163864_2 (sequence is synthesized)
cgccgttgctgagccctgcaaatagcagctacctgcttcagcctagatcctgccatgaagcggactgctgctccctggctcccactctgatctgcttttcactcttgccttgtctcccaa

SEQ ID NO: 502978 - DNA, 120 bp, Artificial Sequence
  ENSG00000163864_3 (sequence is synthesized)
ttaataagcagggtggccactgcaacaggtgtggatgtgcctgacaagatgaagagccgaatacctgtggtgctcctggcctgtggctcctttaaccccatcaccaacatgcacctgcgc

SEQ ID NO: 502979 - DNA, 120 bp, Artificial Sequence
  ENSG00000163864_4 (sequence is synthesized)
atgtttgaggtggccagagatcacctacaccaaacagaatatgaagaaaaggaccatgaagttgcacttgtttttcctggacctcagtctatctcaataaaagatatttcttttcatctg

SEQ ID NO: 502980 - DNA, 120 bp, Artificial Sequence
  ENSG00000163864_5 (sequence is synthesized)
caaaaaaggattcaaaataatgttagcagcaaaaatgatgaccctgacaagtcatcttttaaacgcaaaagaactgaagaacaagcgttctgtgatttgaatgacagcaagtgcaaaggc

SEQ ID NO: 502981 - DNA, 120 bp, Artificial Sequence
  ENSG00000163864_6 (sequence is synthesized)
acaacactgaaaaaaattatatttatagatagcacctggaaccaaacaaacaaaatattcactgatgagcgacttcaaggaatgtaccaggtcatccagggtatcatctctcctgtcaac

SEQ ID NO: 502982 - DNA, 120 bp, Artificial Sequence
  ENSG00000163864_7 (sequence is synthesized)
gacacctatgggaagaaagacctcgcagcttctcatcaccgagtggccatggcccggctggccctgcagacatccgactggatccgggtggacccttgggagagtgagcaggcacagtgg

SEQ ID NO: 502983 - DNA, 120 bp, Artificial Sequence
  ENSG00000163864_8 (sequence is synthesized)
atggagacagtgaaggtgctgaggcatcatcacagcaaactgctcagatctccaccccagatggaaggcccagaccatggcaaggcactcttctcgacccctgcagctgtgcctgagctg

SEQ ID NO: 502984 - DNA, 120 bp, Artificial Sequence
  ENSG00000163864_9 (sequence is synthesized)
cgagtaggtcacgacccaaaaggttacatcgcagaatctcccatcctacggatgcaccagcacaacattcacctggccaaggagcctgtgcagaatgagatcagtgccacatacatcagg

SEQ ID NO: 502985 - DNA, 120 bp, Artificial Sequence
  ENSG00000163864_10 (sequence is synthesized)
cgagccttgggccaagggcagagcgtaaagtacctgattcccgatgctgtcatcacgtacatcaaggaccatggcctctacaccaagggcagtacctggaaaggcaaaagcacccagagc

SEQ ID NO: 502986 - DNA, 120 bp, Artificial Sequence
  ENSG00000163864_11 (sequence is synthesized)
actgagggcaagacaagctagggaggggggactcagcacccacacctcctccaacaagctcctgctggggagagggctgttaaggtttctgttttactttggtttttgcttctccatttt

SEQ ID NO: 502987 - DNA, 120 bp, Artificial Sequence
  ENSG00000163864_12 (sequence is synthesized)
tcatttgctttatttctacagtgattctacttctgaggagtcttctgtcccaggaagagataccttctttacaggagaggaaaggtctaaatcacaaggatagacatttatcaaagaagt

SEQ ID NO: 502988 - DNA, 120 bp, Artificial Sequence
  ENSG00000163864_13 (sequence is synthesized)
taaaatggtgtggcaggtcattaggattaggcagaatctctcagagctgctggacaaggaggtctacttattttgtgtggatggtaattatggcatgcacgctgaatgcagttctgagca

SEQ ID NO: 502989 - DNA, 120 bp, Artificial Sequence
  ENSG00000163864_14 (sequence is synthesized)
tggcagcggcccctgagggtcagatcagaattgcccacaatgtgttttttaactaggaccaggtgcagcatgctagtcttgattggaaagatttgacaggatgctaattactgaacagtg

SEQ ID NO: 502990 - DNA, 120 bp, Artificial Sequence
  ENSG00000163864_15 (sequence is synthesized)
ggttttgtcaacgccctggtttcagaatatgaactgaggagtcaaacagttggaaacagcacattgctgatttacactggatcttgccttagaaaccattgtctgcctgcctaaccagct

SEQ ID NO: 502991 - DNA, 120 bp, Artificial Sequence
  ENSG00000163864_16 (sequence is synthesized)
tttcataaaatttaaacaaaactctttctacgtagtgatcctcaagcaatatttttgatacagcaagtgtcaaacttgctatagcataaaagccggggctcctgatttccaggtttctaa

SEQ ID NO: 502992 - DNA, 120 bp, Artificial Sequence
  ENSG00000163864_17 (sequence is synthesized)
aaaggaactgaggtaaaacagatgcctgaccgttttaaaggatcttttttaatgttttatgactgcctgtctgtttgaatactggcaaagggataaataataaattgacatcaaaaagta

SEQ ID NO: 502993 - DNA, 120 bp, Artificial Sequence
  ENSG00000163864_18 (sequence is synthesized)
ttttgtttttagcagcattgtgtgcccgtagcaacagcgggttaaaaagaaaaagtactggagatcgcatgaaggttgattgccctagagaagtcgacacgctcacacagatggaaatga

SEQ ID NO: 502994 - DNA, 120 bp, Artificial Sequence
  ENSG00000163864_19 (sequence is synthesized)
tttcaccgagtcctgaaaaatgtggtcgtcagccccacatacaaaccacgacttgtgttttctttaagatgaggagtctggtcaagaggtctgtgtaataaaagatgtttgtagaatcca

SEQ ID NO: 502995 - DNA, 120 bp, Artificial Sequence
  ENSG00000163864_20 (sequence is synthesized)
atggccatcttcaaaacagggatctgcaggctgggaacatgatgtggctggctttacacctcccacagttgccctccaatctttcctgaagaccagtgggactgctgaggacaccaagaa

SEQ ID NO: 502996 - DNA, 120 bp, Artificial Sequence
  ENSG00000163864_21 (sequence is synthesized)
catgcccccagggtcaatccacaggcccaaggtaccactcaggcaggcagcaagaagcagttaatggtcatgccccatagaggcgcagtggaagtccctggcaaatgcatgttgtattgg

SEQ ID NO: 502997 - DNA, 120 bp, Artificial Sequence
  ENSG00000163864_22 (sequence is synthesized)
ttaataaggtaaatatctcttttagtcaccttccactctgcattagacccagtgggatccctgccctcagggatttacagtgtgctatgcaaggaaagaatggaggctacaaaatataga

SEQ ID NO: 502998 - DNA, 120 bp, Artificial Sequence
  ENSG00000163864_23 (sequence is synthesized)
ctaaaaatatttatatatagacaactatactatgtcaccttttcaaggttagaggagggagctctgacttccaggtgggccttgcaggaagctctacaggagagttggcatggaagagaa

SEQ ID NO: 502999 - DNA, 120 bp, Artificial Sequence
  ENSG00000163864_24 (sequence is synthesized)
cattctagcactaggaaatggcataaacagaggcccaagaagcaggaacatgcagaagacacattagagaatggtagatgatcccagcttggcgatgatatggagtacttgtaaggaata

SEQ ID NO: 503000 - DNA, 120 bp, Artificial Sequence
  ENSG00000163864_25 (sequence is synthesized)
gagaaggtgggtgggagacaagtaggagaggtagagtgaggccaaaatctccattttccatatggttcactaaggctgagactgaccaattaaatcatatagtaagcacaaggctatttg

SEQ ID NO: 503001 - DNA, 120 bp, Artificial Sequence
  ENSG00000163864_26 (sequence is synthesized)
ccagatatttctggctttccaccttcagcacatagagaccagttgtactttctagctcactatagttgtgtgggatctatagaggtgacatgtggcaatttggggccaagcgtaaagttg

SEQ ID NO: 503002 - DNA, 120 bp, Artificial Sequence
  ENSG00000163864_27 (sequence is synthesized)
ctggtgagggactttccagagccttctttttctctactattgctactaactgcattccatgtagtggctggtctatcatcttgagtcatggattgagggacaaagataacacagagcaga

SEQ ID NO: 503003 - DNA, 120 bp, Artificial Sequence
  ENSG00000163864_28 (sequence is synthesized)
gccctcaactggtgtggaatgggtatgaattattaacatgaaataaacctttattgttttaagccactaagattaaggttgtttgttagtgcagcttacctggcctctcctgactcatac

SEQ ID NO: 503004 - DNA, 120 bp, Artificial Sequence
  ENSG00000163864_29 (sequence is synthesized)
acttaatcaaggtaactcggttagaaagtacttgttggctttgattccatgtctgtcttgtcatcaagccagtgtcaggcagacgtctgtgtacctttaggggcccataagcagggtcaa

SEQ ID NO: 503005 - DNA, 120 bp, Artificial Sequence
  ENSG00000163864_30 (sequence is synthesized)
gtctagagctgtagatttggacatcacctacacaaatgtagtaggacatggaaagaaagtaatagagatttagtctgtggactttgggagtgaggcttcttgccctcatgttctttctgt

SEQ ID NO: 503006 - DNA, 120 bp, Artificial Sequence
  ENSG00000163864_31 (sequence is synthesized)
cccacaggtttgtagtcaattccacatggcctattgataagtaggacatcattgctgcctgcagggtctggaggttcagagatgctggcttgagtttgttgacagctgcacactcataac

SEQ ID NO: 503007 - DNA, 120 bp, Artificial Sequence
  ENSG00000163864_32 (sequence is synthesized)
attgctaaaaacttcataaactctgatgcctggaaatagcccaagtgatttgaggttttgctcacttgtaaatgtttgagtattgtgtccacaaattgcaaattgagtaactcaatttcg

SEQ ID NO: 503008 - DNA, 120 bp, Artificial Sequence
  ENSG00000163864_33 (sequence is synthesized)
aggcacagctgttatttggaaaagacccatctaggaacgcaagctccttgcaaaataattgtgcttcatttttgtcaagtatcagaaaatcattaaactgccaagccatatggcaaatgc

SEQ ID NO: 503009 - DNA, 120 bp, Artificial Sequence
  ENSG00000163864_34 (sequence is synthesized)
ccactagaagcagagtgcaacaacgagccataatgaatctgttttggggagaagtacataggacagcgtctggtttttgtgatctacagaaaagattcgctgctgcacatttcagccatc

SEQ ID NO: 503010 - DNA, 120 bp, Artificial Sequence
  ENSG00000163864_35 (sequence is synthesized)
acaatgtccatttgagtttctgcatataaaatagacttaactgggacaatagaaacttctaaaagtttacatacttttccatttttatatactaacccaataaacattcattaaatattg

SEQ ID NO: 503011 - DNA, 120 bp, Artificial Sequence
  ENSG00000163864_36 (sequence is synthesized)
gcatagcagttagaattaggtttagctgtgtataatagaaaaatggaaaataatggtggctttgaagatcgtttctaccccaggtaaaagaaacctggaggtaggcagcccggggttggc

SEQ ID NO: 503012 - DNA, 120 bp, Artificial Sequence
  ENSG00000163864_37 (sequence is synthesized)
atgacagcttcagggtcatcaagtcctggttttctcttgacctattctttgtcaaacctggagtaggtccttgtcctcagggtctaatacagctgccatgctccagctatcacattccag

SEQ ID NO: 503013 - DNA, 120 bp, Artificial Sequence
  ENSG00000163864_38 (sequence is synthesized)
gtagcaagagtagaggagaggagaaaggtatgcctttcccttttaaggacagtgcctgacctaacacttctattcaaagatcactggccagaccttaggcatgtggcctcagcctactgc

SEQ ID NO: 503014 - DNA, 120 bp, Artificial Sequence
  ENSG00000163864_39 (sequence is synthesized)
caaagacattgggaaaggtagcaatatgcccagctgaagacgcattctgtgactaaagaggatgggagaatggatattgaggagtcgccagcaaactttatcctaccagaggtccttgat

SEQ ID NO: 503015 - DNA, 120 bp, Artificial Sequence
  ENSG00000163864_40 (sequence is synthesized)
gcttgttcttcctgctagattataaccttcttgaggacaggaacagattttatttactcctctatctccgaggcactagcacagtagctggtaggttgtgtttttaattttctgctattt

SEQ ID NO: 503016 - DNA, 120 bp, Artificial Sequence
  ENSG00000163864_41 (sequence is synthesized)
gcattcctaacagcagacccaaaatactcctcaccttctaaccccctcttctgccttctttgtccatgttgacagatcagctatgattttaggcatatttatttttcatcagaaaatttt

SEQ ID NO: 503017 - DNA, 120 bp, Artificial Sequence
  ENSG00000163864_42 (sequence is synthesized)
acttctaccagaatgatattagactgtctgttcatgtgtttttcaatattgactctgaattccagggacaagagatgcttagaggagggttgttttcttggagctagacaaaagactaca

SEQ ID NO: 503018 - DNA, 120 bp, Artificial Sequence
  ENSG00000163864_43 (sequence is synthesized)
cagcattggtacttgggcttgaccttcctcatcagcacccttcagtggtgacatctcccaggctgagctggcctgagcaagctgcctaataggtagaaggatgccgaatgtgtgtccaag

SEQ ID NO: 503019 - DNA, 120 bp, Artificial Sequence
  ENSG00000163864_44 (sequence is synthesized)
ggctgccaggtcttaggtaactagaaaaatgggaggtctttttcaaacaaggtaaagaacctcctggaagctggtatagggagtgacaaattatgttttaaacacaatgaaagacaaagg

SEQ ID NO: 503020 - DNA, 120 bp, Artificial Sequence
  ENSG00000163864_45 (sequence is synthesized)
agctaatatttctagagaaccctctatgggccaggtactgtgctagacaggtcacctccaataaccctcatgaaagttctaagaggtagatataattatctccactttctatgtggctca

SEQ ID NO: 503021 - DNA, 120 bp, Artificial Sequence
  ENSG00000163864_46 (sequence is synthesized)
ctgagccttagggaggttgattggactctttaccagaaagcaagcacaaacccttcccttccaggtgtgttgaaagaattagcattgatgtgtgtgaagtttttagcacagtgcctagcc

SEQ ID NO: 503022 - DNA, 120 bp, Artificial Sequence
  ENSG00000163864_47 (sequence is synthesized)
tattactcaataaacccagtagtagttactcagacgtactttattgtggcaattgaaactagtcccaaattatgagtatggcattgcaagagatctcattccacgccttgtgctccttca

SEQ ID NO: 503023 - DNA, 120 bp, Artificial Sequence
  ENSG00000163864_48 (sequence is synthesized)
aatcttttgaaatttctcgaaactaaagagtgggctgcctgctttcctgggagtctcataattaggatgaatgcttaattgacatgtttgtttcctccaaggggtggctggcagaggatc

SEQ ID NO: 503024 - DNA, 120 bp, Artificial Sequence
  ENSG00000163864_49 (sequence is synthesized)
aggattctacagacactttttgagcacctcactggaacagactctgggctcaggctgagaacagagacagccagccccagcccccacctcaagctggagacagggtatgaatggagctgt

SEQ ID NO: 503025 - DNA, 75 bp, Artificial Sequence
  ENSG00000163864_50 (sequence is synthesized)
aacgggcagactgcctcctcaagtggggcggactgacacctcacacggccgagtactcctctgagacaaaacttc

SEQ ID NO: 503026 - DNA, 63 bp, Artificial Sequence
  ENSG00000163864_51 (sequence is synthesized)
agcatcgggtctggaggggacctctagcaaactccagcagacatgcagctgagggtcctgtct

SEQ ID NO: 503027 - DNA, 87 bp, Artificial Sequence
  ENSG00000163864_52 (sequence is synthesized)
tcaaactactccgagctacaggaggaaatctgaaccaatggcaaagaagttaaaatctttgaaaaaaatcagaagtccttaaaggac

SEQ ID NO: 503028 - DNA, 61 bp, Artificial Sequence
  ENSG00000163864_53 (sequence is synthesized)
aggctgggggaggggtgcccgccattgccgagttagttgtttcattaggtaaacaaagcga

SEQ ID NO: 503029 - DNA, 120 bp, Artificial Sequence
  ENSG00000163864_54 (sequence is synthesized)
aggtggccagagatcacctacaccaaacagctgtgcctgagctgaagcttctctgtggggcagacgtcttgaagaccttccagacccccaacctctggaaggatgcgcacatccaggaaa

SEQ ID NO: 503030 - DNA, 120 bp, Artificial Sequence
  ENSG00000163864_55 (sequence is synthesized)
tgcatgaggtggtaggggccagactgtgcttgtgcccacagaaacaccaagcttctcccagcaaaagccccagaactgaagtctgcaaaagggaagaggcaaattagtaatcattctgtg

SEQ ID NO: 503031 - DNA, 120 bp, Artificial Sequence
  ENSG00000163864_56 (sequence is synthesized)
ctacagagcagccacgtctgagcattacctaatgcttttctcaattgttttgacacatgtagttttgttttaaatatgtatggtaatttttaataaaatgctgataagtgtgccaagcca

SEQ ID NO: 503032 - DNA, 120 bp, Artificial Sequence
  ENSG00000163866_0 (sequence is synthesized)
gccaccttttgggggagagtgggtggaggatgttgtgattttacactagggagtttgggctgtcattcattcgttcagcagaccttttttgggcactctgccaggcagggtaggagaggt

SEQ ID NO: 503033 - DNA, 120 bp, Artificial Sequence
  ENSG00000163866_1 (sequence is synthesized)
gcctggatggatagggcataattgggccagacagacacggttcttagccttttggagcttaaagtgtcttgagaaacgcagacagggaaaaggaacgacttttcatattgtgaaaccagg

SEQ ID NO: 503034 - DNA, 120 bp, Artificial Sequence
  ENSG00000163866_2 (sequence is synthesized)
ttttcccttcttgaaatgttggcagactaggtcctggggtcaacaataggcttgaagctctattagatgtcatgtggcctgtgttttggaccgtggttcgtacctatgctccttatgtca

SEQ ID NO: 503035 - DNA, 120 bp, Artificial Sequence
  ENSG00000163866_3 (sequence is synthesized)
cattccctgttgccttcgtggtcggggctgtgggttaccacctggaatggttcatcaggggaaaggacccccagcccgtggaggaggaaaagagcatctcagagcgccgggaggatcgca

SEQ ID NO: 503036 - DNA, 120 bp, Artificial Sequence
  ENSG00000163866_4 (sequence is synthesized)
agctggatgagcttctaggcaaggaccacacgcaggtggtgagccttaaggacaagctagaatttgccccgaaagctgtgctgaacagaaaccgcccagagaagaattaatggaggacac

SEQ ID NO: 503037 - DNA, 120 bp, Artificial Sequence
  ENSG00000163866_5 (sequence is synthesized)
gagagcgggggccgcactggggagtgtgggctgggccgcaggtgagcgcgcggtcccggcgagcaggtcgggtcagcccaggccagtaacctctgagttacgggaggagtgatcgctagg

SEQ ID NO: 503038 - DNA, 120 bp, Artificial Sequence
  ENSG00000163866_6 (sequence is synthesized)
gtccaccccggtcccggccagatctgccagctcccctctctggcgggtgttctggtgccaagtctgggagcccaggtagccctccgcagacagggcttctcggcacctcaatgaggacgg

SEQ ID NO: 503039 - DNA, 120 bp, Artificial Sequence
  ENSG00000163866_7 (sequence is synthesized)
ttcccacaccacacagccacacaaatactggctgctccttgatggccaggcagacccagcagcagccgaggggccagtgaagaggaaggccgcatctgttgtgtggtggccacaagcact

SEQ ID NO: 503040 - DNA, 120 bp, Artificial Sequence
  ENSG00000163866_8 (sequence is synthesized)
caggcatctgagtttactggtgcactgctgggaggagagttatgagatgaacattggctgtcaatctctgtgggcaggcggtttggcctctagtgggaatggctgggatttgggcgttgc

SEQ ID NO: 503041 - DNA, 120 bp, Artificial Sequence
  ENSG00000163866_9 (sequence is synthesized)
atcgtgcctgacacagagtaagtggttataagtgtcgaataaaggaatgaattgacttatttgggaatgattagaatgtgagcaggacggtagcgagagactttatgctgcatgtgagag

SEQ ID NO: 503042 - DNA, 120 bp, Artificial Sequence
  ENSG00000163866_10 (sequence is synthesized)
atagttgtgaactcatgcgcgatatgttttaagacaggtttggaaatctgaacggacagttgctatttagggaagcatttacttatacagaggacttgctttaaaggtggaagtaaaatg

SEQ ID NO: 503043 - DNA, 120 bp, Artificial Sequence
  ENSG00000163866_11 (sequence is synthesized)
gagaagtattaggtttgggattcttcagaggtgcctcttttaactattactatgtctctgaatttcataaatccctgagtacaatctcagagtttgggaaaaggaaagctcttctaggta

SEQ ID NO: 503044 - DNA, 120 bp, Artificial Sequence
  ENSG00000163866_12 (sequence is synthesized)
atgaaatgccaggctgatgggaaaaaactgtaggaagctctccctaagtccagggtttggacagaaaccgtatacctctgcagtgtgttcttcccactagaaagagtgtaggctttgaaa

SEQ ID NO: 503045 - DNA, 120 bp, Artificial Sequence
  ENSG00000163866_13 (sequence is synthesized)
ttggagaggcctgggttcaaaatcagtggctctatcacttctagtgatcttggataagttaacataatgtctgtgagcctttgtggccttcacaagagtctgggctaataattcctacat

SEQ ID NO: 503046 - DNA, 120 bp, Artificial Sequence
  ENSG00000163866_14 (sequence is synthesized)
catagaggtgttatgaggatcaaatgatgattagtgtgtaaattgtcatcatagtgcctggtgctgagacaataagcgggggagtcttggagatgctgcaattttttttttttttttaaa

SEQ ID NO: 503047 - DNA, 120 bp, Artificial Sequence
  ENSG00000163866_15 (sequence is synthesized)
tttcatgatgctgccttattgcaggggtccttaaccccctgggccacagaccagtggtggtcttcagcccattagaaactgggctgcacagcaggaggtgagcggtgggcaagctggcaa

SEQ ID NO: 503048 - DNA, 120 bp, Artificial Sequence
  ENSG00000163866_16 (sequence is synthesized)
ggtgagcggtgggcaagctggcaagcattaccgcctgagctccaccttctgatagatcagcagcggcattagattctcacaggagtgcaaactctattgtgaactgcgcatgtgagggat

SEQ ID NO: 503049 - DNA, 88 bp, Artificial Sequence
  ENSG00000163866_17 (sequence is synthesized)
ggatctacgttgtgtgccctggaacagtttcatcccgaaaccatccctctccaacccccatctgtggaaaaattgtcttccacgaaac

SEQ ID NO: 503050 - DNA, 120 bp, Artificial Sequence
  ENSG00000163866_18 (sequence is synthesized)
ggaaccaaagagagagggggagaatcatcttatccttggtgaggtttcgattgttcactttagatcagagatagtagtgttggagaaatacctacaggggcataaacagaaagatctttt

SEQ ID NO: 503051 - DNA, 120 bp, Artificial Sequence
  ENSG00000163866_19 (sequence is synthesized)
agtggatacttttgggcaagtctcttaaccctctgatagtgggttatgtatctacctcacgtggtggacatgaggattaagagagtgagtgtatatgaagcacctagcccaaggcctggc

SEQ ID NO: 503052 - DNA, 120 bp, Artificial Sequence
  ENSG00000163866_20 (sequence is synthesized)
atgtaagtgctcaataaatggtagctgtgttattataactgtgaatgatctttgataattgataatggtaataatcatttgagatggaattggccattagagtgatccaatttgtgtgtt

SEQ ID NO: 503053 - DNA, 120 bp, Artificial Sequence
  ENSG00000163866_21 (sequence is synthesized)
gccattagagtgatccaatttgtgtgtttttacattactttggtattgccctacttcaattcaggaggccctgaggccattccactccgctccccgccccaccccaccccaccccacccc

SEQ ID NO: 503054 - DNA, 120 bp, Artificial Sequence
  ENSG00000163866_22 (sequence is synthesized)
cacctggctcccttcactattttgccctatcctttgtgctcattcttactgaaatctgtcttgtcagctcaggaatgggattcccccaggaaggaaagcacttttctgttctgggaagcc

SEQ ID NO: 503055 - DNA, 120 bp, Artificial Sequence
  ENSG00000163866_23 (sequence is synthesized)
cagactgttcactttggggcagggacgaacatgtgcctcgtgaatttgcttgaaaacagtcaccatcttctacccccatcactgtatagtgaaaaacctgattaaagtggtatctgagaa

SEQ ID NO: 503056 - DNA, 120 bp, Artificial Sequence
  ENSG00000163866_24 (sequence is synthesized)
ctgggtgcggcgacttccgtgctcccggcgagcgggcggagagcgggggccgcactggggagtgtgggctgggccgcaggtgagcgcgcggtcccggcgagcagatgtcatgtggcctgt

SEQ ID NO: 503057 - DNA, 120 bp, Artificial Sequence
  ENSG00000163866_25 (sequence is synthesized)
gcggcgacttccgtgctcccggcgagcgggcggagagcgggggccgcactggggagtgtgggctgggccgcagatgtcatgtggcctgtgttttggaccgtggttcgtacctatgctcct

SEQ ID NO: 503058 - DNA, 120 bp, Artificial Sequence
  ENSG00000163866_26 (sequence is synthesized)
agagcaggataacattggtattaaagggtgccaaggagccctggaaactgctttactagtgcggttgcactgaaccctggaggcacagattcccaggaacctttttaccattattacaat

SEQ ID NO: 503059 - DNA, 120 bp, Artificial Sequence
  ENSG00000163866_27 (sequence is synthesized)
tggctgcagcaccttcaagtctaaatggaggtagacctcacatacacacacatagacgcctttccctataaaagtatatacgcacattcaagaaaatttggtagggattttaaaaaggtc

SEQ ID NO: 503060 - DNA, 120 bp, Artificial Sequence
  ENSG00000163866_28 (sequence is synthesized)
acccatgttcccagctcgttaataacaaccgttaacattttgttgtcttttactaattctctgcataggttttagagatagttatcattactgtacatttaattttatatacttttctca

SEQ ID NO: 503061 - DNA, 73 bp, Artificial Sequence
  ENSG00000163866_29 (sequence is synthesized)
acaattacggctcagtgcaaccttgacctcctgggctcaagtgatcctctcacttcagctcctcaagtagatg

SEQ ID NO: 503062 - DNA, 120 bp, Artificial Sequence
  ENSG00000163866_30 (sequence is synthesized)
gtgcagtacaattacggctcagtgcaaccttgacctcctgggctcaagtgatcctctcacttcagctcctcaagtagatgggactacaggagtatgccaccatgcccagctaattttttt

SEQ ID NO: 503063 - DNA, 80 bp, Artificial Sequence
  ENSG00000163866_31 (sequence is synthesized)
ggccttggcctgtagtttcttttttctttttttttggagatggactctcattctgtcacccgggctggagtgcagtggcg

SEQ ID NO: 503064 - DNA, 120 bp, Artificial Sequence
  ENSG00000163866_32 (sequence is synthesized)
caagcgattctcctacctcagcttcctaagtagctgggattacaggcgtgcgccatcgtgcctggctagtttttgtgtttttagtaaagacaggggtttcaccatcttggccaggctggt

SEQ ID NO: 503065 - DNA, 65 bp, Artificial Sequence
  ENSG00000163866_33 (sequence is synthesized)
ccatcgtgcctggctagtttttgtgtttttagtaaagaccatctgcctcggcctcccaaagtgct

SEQ ID NO: 503066 - DNA, 84 bp, Artificial Sequence
  ENSG00000163866_34 (sequence is synthesized)
gttgtttataatagcaacataattgtctatcaagtgggagtatgacataagtttatcctggacaatttccatattgctggacat

SEQ ID NO: 503067 - DNA, 120 bp, Artificial Sequence
  ENSG00000163866_35 (sequence is synthesized)
acataagtttatcctggacaatttccatattgctggacatttgaattgtttctggttggtcactcgtttagatactgcaacgaatatcttatatgaagcttttcctgcgttttggaataa

SEQ ID NO: 503068 - DNA, 120 bp, Artificial Sequence
  ENSG00000163866_36 (sequence is synthesized)
acagtaaaaatagtaaatgtcattttggatgaaatgggataaatgagcagttttgaggatctcatgcataacaccaaatgtctttccaaaagggctctaggagtttctactaaatcttac

SEQ ID NO: 503069 - DNA, 120 bp, Artificial Sequence
  ENSG00000163866_37 (sequence is synthesized)
cactgaagacgttgctggtaaggctgtgaggggagtaaaagcagagagcaggaagaagcataagaagctgttgcctcttgaagcctactgatgtttaactaaagtcagcacagggcagta

SEQ ID NO: 503070 - DNA, 120 bp, Artificial Sequence
  ENSG00000163866_38 (sequence is synthesized)
ttcttaggttctctctcgtgaggcctgatggtgtccacaggtgggtgagggtggagttcctgaacagttagaggggccagctgtgaagaggtgccagctggaggtgccttccaggacctg

SEQ ID NO: 503071 - DNA, 120 bp, Artificial Sequence
  ENSG00000163866_39 (sequence is synthesized)
gtggtggcctgagaggagggagcaggttgagtcgttggcttcttctaaggctccctgaggcctagtgggaatgcggaaatgagctgctgttgcttcccagggaacaaatcggatggaact

SEQ ID NO: 503072 - DNA, 120 bp, Artificial Sequence
  ENSG00000163866_40 (sequence is synthesized)
tgggaagagactgtcagctaccaagtaaggagatttctggttctggctgcaggttctggctgatgagcaggccttatcggcacaccagtgctgccaccctatggcagtcctgggcattac

SEQ ID NO: 503073 - DNA, 120 bp, Artificial Sequence
  ENSG00000163866_41 (sequence is synthesized)
caagcctgcagtcacttccctgggctaaaccaaacactagtgctgacagaggtcaggtgacaaatgagccaccacgctggcagaaagtatagacctgccgaaagggggcagtggtgactc

SEQ ID NO: 503074 - DNA, 120 bp, Artificial Sequence
  ENSG00000163866_42 (sequence is synthesized)
accttccaatctgctgctcatccagtggtaccagatttttgaatttttctaaaagatgttctaagagctccagagggggtaaaaaaaaaaaaatgaagagatgctagaaattcagggttt

SEQ ID NO: 503075 - DNA, 120 bp, Artificial Sequence
  ENSG00000163866_43 (sequence is synthesized)
tttggtgtgtgtaaccttctgattttcaagtgttgataattcattatacaaaattctaagcatgctatcatacccgtggggttaatttgacccagtggctgccaatttgtgacctctcaa

SEQ ID NO: 503076 - DNA, 120 bp, Artificial Sequence
  ENSG00000163866_44 (sequence is synthesized)
atggttttttttttttttttttttttggcgatctaacaacttgttacaaatattagatcccagaattggtttccctcaaaacacttttgggcatcctgtacaaaggcagcttaataacct

SEQ ID NO: 503077 - DNA, 120 bp, Artificial Sequence
  ENSG00000163866_45 (sequence is synthesized)
gggcatcctgtacaaaggcagcttaataacctaagaaaaatgtgaggatggaaagcctacagaaataatagcaaacacatttcccatggacatttttggattttcagatcttttaaaata

SEQ ID NO: 503078 - DNA, 120 bp, Artificial Sequence
  ENSG00000163866_46 (sequence is synthesized)
tccctgtcaccacccgttggcctccacttggtgtctggtcgagagagccctatctttgggaatccaggtggctcccttcttccagtctcactttgattgtgcccccttttaaattctttt

SEQ ID NO: 503079 - DNA, 120 bp, Artificial Sequence
  ENSG00000163866_47 (sequence is synthesized)
ctttcctttccaagggcactttgtcactgaattcttcctctagcaagtctattagtgttctcagctagatctttctttcccacaggctggctgaaatcagccgttgcggtggctgtaaga

SEQ ID NO: 503080 - DNA, 120 bp, Artificial Sequence
  ENSG00000163866_48 (sequence is synthesized)
tagtatatgtgctcttgcctctgctcgggtgacattagatagcaaggtttatgtggacgtgggtatagacaggtcagggttgctgggatgaaccaaggtgcagaccggttttcttccatg

SEQ ID NO: 503081 - DNA, 120 bp, Artificial Sequence
  ENSG00000163866_49 (sequence is synthesized)
cttgctgattcaccttggaggcatgtgaccctctttttgactggccttccagtcacagttcactgaaacacatgagtgagtggatgtgcttggggctttttgctccccgcttacccccgt

SEQ ID NO: 503082 - DNA, 120 bp, Artificial Sequence
  ENSG00000163866_50 (sequence is synthesized)
ctcttcccagcccaatgatggtggtggctttagtatagggtcctctccgagcacggcaggaatcacttctctccctgcagcggttcagtgtctggtgcttttccactctttctagactct

SEQ ID NO: 503083 - DNA, 120 bp, Artificial Sequence
  ENSG00000163866_51 (sequence is synthesized)
ttcctgtgcctgttgctgtgttagcacaagtcggctgggcagctgccagaacaagcctgccagggagccttttgactctggtcagctccccagggctccaggctggtgggactgccgctg

SEQ ID NO: 503084 - DNA, 120 bp, Artificial Sequence
  ENSG00000163866_52 (sequence is synthesized)
agtgaaacatcatggaattagccttgccagagtctgggttgggagccaggcagtgaaaatgtaaaagcccctccgtcttgctcacttttccttttctactttgctttagatctctaagca

SEQ ID NO: 503085 - DNA, 120 bp, Artificial Sequence
  ENSG00000163866_53 (sequence is synthesized)
cttgtagggtagggagccagggcagtgtagcagaggaaaaataaagtggattctagagtctgacaggctcgagttatgaatactgccttaacaattaactggatgaccttgggcaagtca

SEQ ID NO: 503086 - DNA, 120 bp, Artificial Sequence
  ENSG00000163866_54 (sequence is synthesized)
cttagcccttctgaacctcaatatcctcacctgtaaaataggggtaagaatttttgttgggttgttgtgaggatgaggtaattatgtaaggttcttagcatagtacgctaagaactttat

SEQ ID NO: 503087 - DNA, 120 bp, Artificial Sequence
  ENSG00000163866_55 (sequence is synthesized)
atacattgtcacagactgtgctaaaactttacatacattacctcatcctcacaacaaccagtaggtactcagtaaatgttagcagctttaattgtattgcaggaagaacctatgtttcct

SEQ ID NO: 503088 - DNA, 120 bp, Artificial Sequence
  ENSG00000163866_56 (sequence is synthesized)
gcaatagttgtgtgtatccttgtgaccctggtgaggtggggatctaggggagagagcagccttggctgagggacaacagggaccctcatagacctggtggttgagggctgcttagaaata

SEQ ID NO: 503089 - DNA, 120 bp, Artificial Sequence
  ENSG00000163866_57 (sequence is synthesized)
tttcacagagagaactggcttgcataagaaccaagaagcacaagctggtcaggagattgcaggctccacacctgccttagtggtagttccatcagtgcagtctgcaaagtcagagggaag

SEQ ID NO: 503090 - DNA, 120 bp, Artificial Sequence
  ENSG00000163866_58 (sequence is synthesized)
cagattggccagaatgcccaggaggtcacagatcaggagaattgggaggggaaagagccttggacttggaggcaagcgatctgagtgatgacctggggtatgccgcttcacctctactgg

SEQ ID NO: 503091 - DNA, 120 bp, Artificial Sequence
  ENSG00000163866_59 (sequence is synthesized)
ccttggtttccctgcaaaatggggaacgtgttccctgctgatcgtgtgaaaagagtgagacaaccagtttagagtgctctgaaaacatgcaagtgctagatattacagcccagtaaaacc

SEQ ID NO: 503092 - DNA, 120 bp, Artificial Sequence
  ENSG00000163866_60 (sequence is synthesized)
tcctttatctagttgggatggcagccagtctgaataataaaatacaaatacatgtgctattatttctttcctgtacagagcgtattttatagtatttgctaagtagaagtctttagggga

SEQ ID NO: 503093 - DNA, 120 bp, Artificial Sequence
  ENSG00000163866_61 (sequence is synthesized)
atcagtttgaagagtgaagagtaattagtaaccggtgtatcagttttcatcctgttccagcagtgcctctggtacttaaaaaacagtttattctttttgaattaaacttgttaacatcaa

SEQ ID NO: 503094 - DNA, 120 bp, Artificial Sequence
  ENSG00000163866_62 (sequence is synthesized)
tgagcttctaggcaaggaccacacgcaggtggctggaatgaggctgtgaggctccagcagccgttttgtgccacgaggcagtagaaacctgggttcctgatgactgtggagctgccgaac

SEQ ID NO: 503095 - DNA, 120 bp, Artificial Sequence
  ENSG00000163866_63 (sequence is synthesized)
taatctggacctccagattccatacctgcaagacacatgaacatctgtcttatccatccctggagaggatccctggagaggagcaaacccaggccatccggattttctgcatgggagacc

SEQ ID NO: 503096 - DNA, 120 bp, Artificial Sequence
  ENSG00000163866_64 (sequence is synthesized)
tggctgaccgctgcctgggctgctttcaagtctcaccgaattatgaagtcaactactgggtgtttagaatgtctcaagttcaaagactagcaggctagaagcagacatctgagagaactt

SEQ ID NO: 503097 - DNA, 120 bp, Artificial Sequence
  ENSG00000163866_65 (sequence is synthesized)
cgggcaccttagcaggaggaatattaagatgtggcatgctgggcttatcgggagactggatagggatcagaaggaatacatttctattctgcgagctgcagagctcaggagtcgttctga

SEQ ID NO: 503098 - DNA, 120 bp, Artificial Sequence
  ENSG00000163866_66 (sequence is synthesized)
tatcaggcccattgctgactctgctaggaaatgtggaaagctgcagctgcagacagctggctgtgcctgcttcactggagttctcagctctcttacacctgtctgtttagaaaggagcag

SEQ ID NO: 503099 - DNA, 120 bp, Artificial Sequence
  ENSG00000163866_67 (sequence is synthesized)
acaggctgtgaagctctgcaggattcttttcagtgctggggcagaaggagaaatggtggggacagccactctgggcatcagaaccgaatacctgctccccactcctctcagttgcacagc

SEQ ID NO: 503100 - DNA, 120 bp, Artificial Sequence
  ENSG00000163866_68 (sequence is synthesized)
ccagctcctggcttcactgcagtgggaagggagatgaaggactcttgaactcagaatatgactgaccaagacccttacagctggggtggaggtagggggctgaaggcaggttctggaggt

SEQ ID NO: 503101 - DNA, 120 bp, Artificial Sequence
  ENSG00000163866_69 (sequence is synthesized)
ggagattgagtcttccagttgttttcctggcaacagcgggaacaatagattctaggttctggctggctcaggagttggggtgtctgacctgtctttcctcagtcccttctgctatagata

SEQ ID NO: 503102 - DNA, 120 bp, Artificial Sequence
  ENSG00000163866_70 (sequence is synthesized)
cctggtaccagttgtgtctccctgaatacaggatctgagagctggggagctatggacacccagagcccatcagcctggtctctcccctcactgtaggttcccaggccagtggctggttcc

SEQ ID NO: 503103 - DNA, 120 bp, Artificial Sequence
  ENSG00000163866_71 (sequence is synthesized)
tgattttacctagtcttctgcactgggataagaacctgacatccagcttcccctttgggagtaaggcctcttccacgggctgctcctggtctgtgttttccactgcagtctgggagccta

SEQ ID NO: 503104 - DNA, 120 bp, Artificial Sequence
  ENSG00000163866_72 (sequence is synthesized)
cttcccccatgaaggccctaaccccacccatgaagacactacatgaattactgtccagactggactccagatgcagcctcggattagacccaatttggcctcatctccttggagctgtct

SEQ ID NO: 503105 - DNA, 120 bp, Artificial Sequence
  ENSG00000163866_73 (sequence is synthesized)
agtaatttggaatacacgctgctccctacttagccacctgcaaagcagggtccatctcccagcctggttctgccttttcctcagtcttatatgtgtgtgtctgagtacatgtgtcagtca

SEQ ID NO: 503106 - DNA, 120 bp, Artificial Sequence
  ENSG00000163866_74 (sequence is synthesized)
gtgatcatgccaggacggccagctggacttgtgtcagcatgcacatatgttccttgaggctgtcccgtgcaggcgtgcactgagttctcagcccagttctgaagcgtgtttgtgaatatg

SEQ ID NO: 503107 - DNA, 120 bp, Artificial Sequence
  ENSG00000163866_75 (sequence is synthesized)
cccagatacatcatgaacattgctgggatgctaggagggggatcagtatgaatgacattgcatgtcctcaagtacacaggtatgtgtctacgcacacgcacaaacctctctaatatgtat

SEQ ID NO: 503108 - DNA, 120 bp, Artificial Sequence
  ENSG00000163866_76 (sequence is synthesized)
gtatgcacgtgtacatgtgtataatatggctaagtgtgtgtctgggagtatttgaccatgtctgatgtgaatcttctgcccattctgaaaggaaaggggacatgggcccactctcccttt

SEQ ID NO: 503109 - DNA, 120 bp, Artificial Sequence
  ENSG00000163866_77 (sequence is synthesized)
ttgtagttacactgtggtcagggctggcttgtgacagagggagtcaaggtgagtgcccctctgaacttctgggatctttctgcctaacattctgagacttccccagctgttccctagtcc

SEQ ID NO: 503110 - DNA, 70 bp, Artificial Sequence
  ENSG00000163866_78 (sequence is synthesized)
tgcctaacattctgagacttccccagctgttccctagtcctgcagccttggctgtcagtacttcaagatt

SEQ ID NO: 503111 - DNA, 66 bp, Artificial Sequence
  ENSG00000163866_79 (sequence is synthesized)
ccgaggcgggcagatcatttgaagtcaggagtttgagaccaactggcacgtgcctgtaatcccagc

SEQ ID NO: 503112 - DNA, 67 bp, Artificial Sequence
  ENSG00000163866_80 (sequence is synthesized)
aatccaggagacagaggctgtggtctcaaaaacaaacgaacaaacaacaaacaaacaaaaaaaaaaa

SEQ ID NO: 503113 - DNA, 120 bp, Artificial Sequence
  ENSG00000163867_0 (sequence is synthesized)
aggcgtggttggccggtcgttgcgttgggatggatcaggcggaattccagaagagaaaataatccctgtctagatgcagaggacttggttcctattccagtgctcctccggtagcaggga

SEQ ID NO: 503114 - DNA, 120 bp, Artificial Sequence
  ENSG00000163867_1 (sequence is synthesized)
ggcgacagaaggtgtccaactatccattaccaagaagaaatctattcgtttgagcctgagacactctttgaggtaaaaaattagaatgaaagaacctttggatggtgaatgtggcaaagc

SEQ ID NO: 503115 - DNA, 120 bp, Artificial Sequence
  ENSG00000163867_2 (sequence is synthesized)
agtggtaccacagcaggagcttctggacaaaattaaagaagaaccagacaatgctcaagagtatggatgtgtccaacagccaaaaactcaagaaagtaaattgaaaattggtggtgtgtc

SEQ ID NO: 503116 - DNA, 120 bp, Artificial Sequence
  ENSG00000163867_3 (sequence is synthesized)
ttcagttaatgagagacctattgcccagcagttgaacccaggctttcagctttcttttgcatcatctggcccaagtgtgttgcttccttcagttccagctgttgctattaaggttttttg

SEQ ID NO: 503117 - DNA, 120 bp, Artificial Sequence
  ENSG00000163867_4 (sequence is synthesized)
ttctggttgtaaaaaaatgctttataagggccaaactgcatatcataagacaggatctactcagctcttctgctccacacgatgcatcaccagacattcttcacctgcctgcctgccacc

SEQ ID NO: 503118 - DNA, 120 bp, Artificial Sequence
  ENSG00000163867_5 (sequence is synthesized)
tcctcccaagaaaacctgcacaaactgctcgaaagacattttaaatcctaaggatgtgatcacaactcgctttgagaattcctatcctagcaaagatttctgcagccaatcatgcttgtc

SEQ ID NO: 503119 - DNA, 120 bp, Artificial Sequence
  ENSG00000163867_6 (sequence is synthesized)
atcttatgagctaaagaaaaaacctgttgttaccatatataccaaaagcatttcaactaagtgcagtatgtgtcagaagaatgctgatactcgatttgaagttaaatatcaaaatgtggt

SEQ ID NO: 503120 - DNA, 120 bp, Artificial Sequence
  ENSG00000163867_7 (sequence is synthesized)
acatggtctttgtagtgatgcctgtttttcaaaatttcactctacaaacaacctcaccatgaactgttgtgagaactgtgggagctattgctatagtagctctggtccttgccaatccca

SEQ ID NO: 503121 - DNA, 120 bp, Artificial Sequence
  ENSG00000163867_8 (sequence is synthesized)
gaaggtttttagttcaacaagtgtcacggcatacaagcagaattctgcccaaattcctccatatgccctggggaagtcattgaggccctcagctgaaatgattgagactacaaatgattc

SEQ ID NO: 503122 - DNA, 120 bp, Artificial Sequence
  ENSG00000163867_9 (sequence is synthesized)
aggaaaaacagagcttttctgctctattaattgcttatctgcttacagagttaagactgttacttcttcaggtgtccaggtttcatgtcatagttgtaaaacctcagcaatccctcagta

SEQ ID NO: 503123 - DNA, 120 bp, Artificial Sequence
  ENSG00000163867_10 (sequence is synthesized)
tcacctagccatgtcaaatggaactatatacagcttctgcagctccagttgtgtggttgctttccagaatgtatttagcaagccaaaaggaacaaactcttcggcggtgcccctgtctca

SEQ ID NO: 503124 - DNA, 120 bp, Artificial Sequence
  ENSG00000163867_11 (sequence is synthesized)
gggccaagtggttgtaagcccgccctcctccaggtcagcagtgtcaataggaggaggtaacacctctgccgtttcccccagctccatccgtggctctgctgcagccagcctccaacctct

SEQ ID NO: 503125 - DNA, 120 bp, Artificial Sequence
  ENSG00000163867_12 (sequence is synthesized)
tgctgaacaatcccagcaagttgctttaacccatacagttgttaaactcaagtgtcagcactgtaaccatctatttgccacaaaaccagaacttcttttttacaagggtaaaatgtttct

SEQ ID NO: 503126 - DNA, 120 bp, Artificial Sequence
  ENSG00000163867_13 (sequence is synthesized)
gttttgtggcaagaattgctctgatgaatacaagaagaaaaataaagttgtggcaatgtgtgactactgtaaactgcagaaaattataaaggagactgtgcgattctcaggggttgataa

SEQ ID NO: 503127 - DNA, 120 bp, Artificial Sequence
  ENSG00000163867_14 (sequence is synthesized)
gccattctgtagtgaagtttgcaaattcctctctgcccgtgactttggagaacgatggggaaactactgtaagatgtgcagctactgttcacagacatccccaaatttggtagaaaatcg

SEQ ID NO: 503128 - DNA, 120 bp, Artificial Sequence
  ENSG00000163867_15 (sequence is synthesized)
attggagggcaagttagaagagttttgttgtgaagattgtatgtccaaatttacagttctgttttatcagatggccaagtgtgatggttgtaaacgacagggtaaactaagcgagtccat

SEQ ID NO: 503129 - DNA, 120 bp, Artificial Sequence
  ENSG00000163867_16 (sequence is synthesized)
aaagtggcgaggcaacattaaacatttctgtaacctattttgtgtcttggagttttgtcatcagcaaattatgaatgactgtcttccacaaaataaagtaaatatttctaaagcaaaaac

SEQ ID NO: 503130 - DNA, 120 bp, Artificial Sequence
  ENSG00000163867_17 (sequence is synthesized)
tgctgtgacggagctcccttctgcaaggacagatacaacaccagttataaccagtgtgatgtcattggcaaaaatacctgctaccttatctacagggaacactaacagtgttttaaaagg

SEQ ID NO: 503131 - DNA, 120 bp, Artificial Sequence
  ENSG00000163867_18 (sequence is synthesized)
tgcagttactaaagaggcagcaaagatcattcaagatgaaagtacacaggaagatgctatgaaatttccatcttcccaatcttcccagccttccaggcttttaaagaacaaaggcatatc

SEQ ID NO: 503132 - DNA, 120 bp, Artificial Sequence
  ENSG00000163867_19 (sequence is synthesized)
atgcaaacccgtcacacagaccaaggccacttcttgcaaaccacatacacagcacaaagaatgtcagacagatttacctatgcctaatgaaaaaaatgatgcagaacttgattctccacc

SEQ ID NO: 503133 - DNA, 120 bp, Artificial Sequence
  ENSG00000163867_20 (sequence is synthesized)
ttcaaagaaaaaaagattaggttttttccagacttatgatacagaatatttaaaagttggttttattatctgtcctggatcaaaagaaagttcaccaaggccacagtgtgtcatttgtgg

SEQ ID NO: 503134 - DNA, 120 bp, Artificial Sequence
  ENSG00000163867_21 (sequence is synthesized)
ccagtagatttttttgaacaaaaatctttagaaatggaatgtcaaaatagttctttaaaaaagtgtttactagttgaaaagtcacttgtgaaagcttcttatttaattgctttccaaact

SEQ ID NO: 503135 - DNA, 120 bp, Artificial Sequence
  ENSG00000163867_22 (sequence is synthesized)
gctgcaagcaagaagccattctccattgctgaagaattaattaaaccatatttagtagaaatgtgttcagaagttttgggttcaagtgctggagacaaaatgaaaactattccactttct

SEQ ID NO: 503136 - DNA, 120 bp, Artificial Sequence
  ENSG00000163867_23 (sequence is synthesized)
aatgttacaattcaacacaggattgatgaactatctgcagacattgaagaccagctgattcaaaaggtcagagagtcaaagtggtttgcccttcagatagatgagtcatcagaaatctca

SEQ ID NO: 503137 - DNA, 120 bp, Artificial Sequence
  ENSG00000163867_24 (sequence is synthesized)
aatatcacacttcttttgtgctatattcgtttcattgattatgattgtcgtgatgtaaaagaagaattattattttgcattgaaatgcctactcaaataactggctttgaaatatttgaa

SEQ ID NO: 503138 - DNA, 120 bp, Artificial Sequence
  ENSG00000163867_25 (sequence is synthesized)
ctaataaataaatatattgatagtaaatctctgaattggaaacattgtgttggtctctgtaccgatggggctgcaagcatgactggcaggtattctggtttaaaagcaaaaattcaagaa

SEQ ID NO: 503139 - DNA, 120 bp, Artificial Sequence
  ENSG00000163867_26 (sequence is synthesized)
gttgccatgaatacagcggcatttacacattgttttattcaccgtgaacgtttagtggcagaaaagttgtctccatgtttacataaaattcttttgcagtcagcacaaattttaagtttt

SEQ ID NO: 503140 - DNA, 120 bp, Artificial Sequence
  ENSG00000163867_27 (sequence is synthesized)
ataaagagcaatgcattaaattcacgtatgttaacaattttgtgtgaagagatgggatctgagcatgtgagtttaccgcttcatgctgaagtacgttggatatcaagagggagaatgtta

SEQ ID NO: 503141 - DNA, 120 bp, Artificial Sequence
  ENSG00000163867_28 (sequence is synthesized)
aaaagattatttgaattacgacatgagattgaaatatttttaagtcaaaagcattcagatttggccaagtattttcatgatgaggaatgggttggaaagctggcctacttatcagatata

SEQ ID NO: 503142 - DNA, 120 bp, Artificial Sequence
  ENSG00000163867_29 (sequence is synthesized)
ttttcacttataaatgaattaaatttaagtctccaaggaactttgactactttcttcaatttgtgtaataaaattgatgtatttaagagaaagttaaaaatgtggttgaagcgcacacaa

SEQ ID NO: 503143 - DNA, 120 bp, Artificial Sequence
  ENSG00000163867_30 (sequence is synthesized)
gagaatgattatgacatgttcccttcattttctgaattctcaaattcatcaggcttaaatatgacagacatcacaaggattatttttgagcacctggaaggactttctcaagtgttcagt

SEQ ID NO: 503144 - DNA, 120 bp, Artificial Sequence
  ENSG00000163867_31 (sequence is synthesized)
gactgttttccaccagaacaagacttgcgttcaggaaatttgtggataattcacccttttatgaatcaccaaaataataatctcaccgacttcgaagaagaaaagctaacagagctatct

SEQ ID NO: 503145 - DNA, 120 bp, Artificial Sequence
  ENSG00000163867_32 (sequence is synthesized)
tcagatttaggattacaagcactatttaaatcagtgtctgtaactcagttttggataaatgcaaagacaagttacccagaactccatgaaagggcaatgaaatttttattacccttttca

SEQ ID NO: 503146 - DNA, 120 bp, Artificial Sequence
  ENSG00000163867_33 (sequence is synthesized)
actgtttatttatgtgatgctgccttttcagctttgactgagtcaaaacaaaaaaatctgttgggttctggccctgccctaagacttgcagtcacatctttaattccaaggatagaaaaa

SEQ ID NO: 503147 - DNA, 120 bp, Artificial Sequence
  ENSG00000163867_34 (sequence is synthesized)
ttagtgaaggagaaagagtagcaatatgcacattgcttaacagtgaagtcaataatcctgtgttaagttttgtataagtatcctaaaagataatttcctaatgtggatttgtgttttcag

SEQ ID NO: 503148 - DNA, 120 bp, Artificial Sequence
  ENSG00000163867_35 (sequence is synthesized)
ttttccctttttgttgaggaatttaataattatgattgttataaataattatgtataattataatctagggtagaaaatttagttatttcattaaatttggactagtgacaaagactgca

SEQ ID NO: 503149 - DNA, 120 bp, Artificial Sequence
  ENSG00000163867_36 (sequence is synthesized)
gactagtgacaaagactgcaggtaatgagaagcccagtttataatgtaacagcacaacctggatgttgaaacagcttggcctttagaagcaagtggaacatttcagtcttctagccaacc

SEQ ID NO: 503150 - DNA, 83 bp, Artificial Sequence
  ENSG00000163867_37 (sequence is synthesized)
ctttagaagcaagtggaacatttcagtcttctagccaaccagctacttacccctgcaaggttgtgagtaggtggaaaagatag

SEQ ID NO: 503151 - DNA, 76 bp, Artificial Sequence
  ENSG00000163867_38 (sequence is synthesized)
acgtgcccagctggaaaaagatagatctaagcagcttgggtaactataaatggaagcagcagggggatttgagacc

SEQ ID NO: 503152 - DNA, 120 bp, Artificial Sequence
  ENSG00000163867_39 (sequence is synthesized)
tgggtaactataaatggaagcagcagggggatttgagacccctgcttggggcctttctggcccaatataccagggcttagcaaactttttaaataaagagccagatagtaaatattttca

SEQ ID NO: 503153 - DNA, 120 bp, Artificial Sequence
  ENSG00000163867_40 (sequence is synthesized)
gctttgcaggccatactgtcacaactactcaattctgcagttgcagtgcaaaagcagccatagacaatatgcagataagtgtggctgtttttaaataaaacttattcatgaacactgaaa

SEQ ID NO: 503154 - DNA, 120 bp, Artificial Sequence
  ENSG00000163867_41 (sequence is synthesized)
tgctcgaagtataaaattcttaacatccctttttactttaccttttttttagtgtgtatattgtttagttcaaacatactgttgatactttaaatctcttcagcatgtatctgtagaaat

SEQ ID NO: 503155 - DNA, 120 bp, Artificial Sequence
  ENSG00000163867_42 (sequence is synthesized)
aactttttagttaatggaagaattcaccaattttaaagttttgcaacattaaataagtgacttggtgttagaatattgcctaaaccagttttctatcactttaaattttactatggaaag

SEQ ID NO: 503156 - DNA, 120 bp, Artificial Sequence
  ENSG00000163867_43 (sequence is synthesized)
aaataacaaatgacatgtgggaattgcaggactatcctgtaattgtagacacccaccatttaaatttatttaacagttatcttgaaagctattgggtatagcataaaataatatcactct

SEQ ID NO: 503157 - DNA, 120 bp, Artificial Sequence
  ENSG00000163867_44 (sequence is synthesized)
tttaatagtatacaaaagctatttaattctttaaaaagtaaaaactctacatggtcgcaaaaatgtgtttatttctaatgtccttgtggggtcattgttgctttacaataatgcttagat

SEQ ID NO: 503158 - DNA, 120 bp, Artificial Sequence
  ENSG00000163867_45 (sequence is synthesized)
gcagagagaggaaaaaacagcaacaaagtcacataaatctttccctgacttagtacatttgaaggatttggcatattttgcctatttctgtggtagtgtaatttgaggaatacagtgtgt

SEQ ID NO: 503159 - DNA, 120 bp, Artificial Sequence
  ENSG00000163867_46 (sequence is synthesized)
tgttaatagtcactacaggcaaaaaacagtaagagcttgcttttaaattgtggctctgtcatttatctctgtgacttcgggctagatgtttaactttctaagcctccatttctcatcagt

SEQ ID NO: 503160 - DNA, 120 bp, Artificial Sequence
  ENSG00000163867_47 (sequence is synthesized)
aaataatagttgcttcctaggactttaatgagacagtgttagcaaatggcctagcacatagcaagtacttaaaaaatggaatcctgttattattaataataaaaattatatcgtgcgatt

SEQ ID NO: 503161 - DNA, 120 bp, Artificial Sequence
  ENSG00000163867_48 (sequence is synthesized)
tatcacttgtaggcccctattttgtctttggctgtgtttatctgctttgtgtcttgacttaaactatttaaaagtagatcctgctatatggaaatttccaagtaaagaggagagaggatt

SEQ ID NO: 503162 - DNA, 89 bp, Artificial Sequence
  ENSG00000163867_49 (sequence is synthesized)
tagaccgggctcagatgatcctcccacctcagcctttcaaatagctgggaccacaggcgcataccaccatgcccgactaatttttgtat

SEQ ID NO: 503163 - DNA, 71 bp, Artificial Sequence
  ENSG00000163867_50 (sequence is synthesized)
agcctgcctcagcctcctaaagtgctgggactattggtgtgagccatcacatgtggccaggagagaggaat

SEQ ID NO: 503164 - DNA, 120 bp, Artificial Sequence
  ENSG00000163867_51 (sequence is synthesized)
tattggtgtgagccatcacatgtggccaggagagaggaattttaaaatatttatatactctaaattagtttgttgcaaaataccattctaattaatgcttttatgtcattctcatgaaac

SEQ ID NO: 503165 - DNA, 120 bp, Artificial Sequence
  ENSG00000163867_52 (sequence is synthesized)
taatctgaaagagtaaacttagttttctatttttagatattgtttcaacataccaaataccaaaataaaattaaataattttaaagaacataacacaacttatacatccaaatgcctatt

SEQ ID NO: 503166 - DNA, 120 bp, Artificial Sequence
  ENSG00000163867_53 (sequence is synthesized)
gttttcttaaaagtagtcacccccgtcagtgactttttagcataaggttaggagacagattcttatcttttcagcatgcatttgatttttacaaattttcaaaggctgcttgatacctta

SEQ ID NO: 503167 - DNA, 120 bp, Artificial Sequence
  ENSG00000163867_54 (sequence is synthesized)
gctgcttgataccttaatcaggccaatatattagctaattaaattaagtcatactgttaaaacatgatatttataaaattaaaagttaaaaaatagtctaagggtttatcttaagtttta

SEQ ID NO: 503168 - DNA, 120 bp, Artificial Sequence
  ENSG00000163867_55 (sequence is synthesized)
aaaatgttttgagctatgttattgttggaaggtgtggtttttctacggtaaatgttacgatataacactcatttgcatgtgtaaggttcagagtacacttataatttatgtgcacagatt

SEQ ID NO: 503169 - DNA, 120 bp, Artificial Sequence
  ENSG00000163867_56 (sequence is synthesized)
ttcattataaagtcattctctttgatttacatatttttacttgctatttttgtacttattatgccactggcagattcaccttattaagtgaaactctttattgctctgttttcagtagaa

SEQ ID NO: 503170 - DNA, 120 bp, Artificial Sequence
  ENSG00000163867_57 (sequence is synthesized)
aaatcacttttcaaaattaatacttcatctgtgtataagcatattcttttggtttctaagatttgctgtcatatttttaaagttgagttttaaagaattaaaataatttttgttgttgtt

SEQ ID NO: 503171 - DNA, 120 bp, Artificial Sequence
  ENSG00000163867_58 (sequence is synthesized)
caaagatcattcaagatgtgagtttaattgttaatacttttcttgataatgccacttgggcttattttcactttggatatggcattctaatatatctgaatacttttctttttgctggaa

SEQ ID NO: 503172 - DNA, 120 bp, Artificial Sequence
  ENSG00000163867_59 (sequence is synthesized)
ccttcttttccatctggtcaactgaaaaattttagttaaacggcttctggtttgtaagtttaaaataacccaaactgagacaggctctcgctgtcgctgagggtgtagtgcagtggtgcg

SEQ ID NO: 503173 - DNA, 120 bp, Artificial Sequence
  ENSG00000163867_60 (sequence is synthesized)
atgaaaaggagttcttaaagataaagcaactgtttagttggctcttaatggactgttgtttctctgcagggtaaaatgtttctgttttgtggcaagaattgctctgatgaatacaagaag

SEQ ID NO: 503174 - DNA, 120 bp, Artificial Sequence
  ENSG00000163867_61 (sequence is synthesized)
agggacgcgttgacattcactggctagtccaccgctctcagtcggagaccacattgcctcgaaggcgattgtgaagcggggctctgaggggcttgatgccccccacccctcacacggaga

SEQ ID NO: 503175 - DNA, 120 bp, Artificial Sequence
  ENSG00000163867_62 (sequence is synthesized)
ggcggctgcggatatcgccttagggacgcgttgacattcactggctagtccaccgctctcagtcggagaccacattgcctcataagcctgaagaaaaaagaataagcctgagtatgtatt

SEQ ID NO: 503176 - DNA, 120 bp, Artificial Sequence
  ENSG00000163867_63 (sequence is synthesized)
ggattacaagcgtgagccaccgcgccggcctatcatctattcttaagtattttgatacctgttgcctaaattgccctcctgaaaagttacatcaatgtatgctccaaccagcagtgttca

SEQ ID NO: 503177 - DNA, 120 bp, Artificial Sequence
  ENSG00000163867_64 (sequence is synthesized)
caaccagcagtgttcaggaggatccatttctctacaacctcactgacactgagtatcaaaattcagaaaggttgaatatacagtacagtcaatactagtatactcttcatccagattaat

SEQ ID NO: 503178 - DNA, 120 bp, Artificial Sequence
  ENSG00000163867_65 (sequence is synthesized)
gaaatgttaactttttgcaatatttattttctttttttttctggattgtttgaaagtaaaacattatttttctgtctctttttcttccttttctttcttttttttgagatggagtttcac

SEQ ID NO: 503179 - DNA, 120 bp, Artificial Sequence
  ENSG00000163867_66 (sequence is synthesized)
tacaggtgtgagccccatgcctggccttttttttctttttctttaaaaaaattttttgacaccagtgtcactcaccaataaaaaatttattctttttgtttttttttgagacgtagtctc

SEQ ID NO: 503180 - DNA, 120 bp, Artificial Sequence
  ENSG00000163867_67 (sequence is synthesized)
tttgagacgtagtctcaagagtgcagtggtgtgatcatggctctctgcaggctcaacctcctgggctcaggcaatcctcttgctttagctacccaagtagctgggactataggtgtgtgc

SEQ ID NO: 503181 - DNA, 120 bp, Artificial Sequence
  ENSG00000163867_68 (sequence is synthesized)
ttttcttcttctttttttttttttaatgtagagatggagtttcgccatgttgcccgggctggtctctaactccagggctcaagtgacccacccaccttggtgtcccaaagcactgggatt

SEQ ID NO: 503182 - DNA, 120 bp, Artificial Sequence
  ENSG00000163867_69 (sequence is synthesized)
attataggtgtgagccaccctgctcagccaaaaagtttattgttaatttgatgtgtatcatggtcttcagccctaatttcaataacctattgggtgcttgggattacttgtacatgtacc

SEQ ID NO: 503183 - DNA, 120 bp, Artificial Sequence
  ENSG00000163867_70 (sequence is synthesized)
acatcctacagttttattatacctagtgatcaagctttgggcaaaggagaaattcagttttcagtagcatcattggaagtattatgacttgtgcttaaacttttaccagtgcattctttt

SEQ ID NO: 503184 - DNA, 120 bp, Artificial Sequence
  ENSG00000163867_71 (sequence is synthesized)
gataaatagaaatagtaacaaaatatgaattttaaatatgtggggagatacataaagaacattgcttatttgttcttgaaaataacagtgattcaaatatttcattcagatttacctatg

SEQ ID NO: 503185 - DNA, 120 bp, Artificial Sequence
  ENSG00000163870_0 (sequence is synthesized)
gggactgtggccgttttcgcaatttgggctggacgaaaaagacggtcttgctttcccggtcgccgctgtcgggaagggctgcagggtgtccgcgagacccgcggcccggcgagctgaccc

SEQ ID NO: 503186 - DNA, 120 bp, Artificial Sequence
  ENSG00000163870_1 (sequence is synthesized)
cgcctcgcctttcctgcctagccctcattccacggagccggtcgcgcccggtccttgcgcgacgcttcccggcccaggccgcctggtctggcgctggaggccggagtcccgcggcctgtg

SEQ ID NO: 503187 - DNA, 120 bp, Artificial Sequence
  ENSG00000163870_2 (sequence is synthesized)
ggcggatgggcggccggggcggccggggcggccggtcctgagcgcggcccgggctgtcagggctggctgctggcgggatggacaccctggaggaggtgacttgggccaatgggagcacag

SEQ ID NO: 503188 - DNA, 120 bp, Artificial Sequence
  ENSG00000163870_3 (sequence is synthesized)
tgacttgggccaatgggagcacagcgctacccccacccctggcaccaaacatcagtgtgcctcatcgctgcctgctgctgctctacgaagacattggcacctccagggtccggtactggg

SEQ ID NO: 503189 - DNA, 120 bp, Artificial Sequence
  ENSG00000163870_4 (sequence is synthesized)
acctcttgctgctcatccccaatgtgctcttcctcatcttcctgctctggaagcttccatctgctcgggcgaagatccgcatcacctccagccccatttttatcaccttctacatcctgg

SEQ ID NO: 503190 - DNA, 120 bp, Artificial Sequence
  ENSG00000163870_5 (sequence is synthesized)
tgtttgtggtggcgctggtgggcattgcccgggccgtggtatccatgacggtgagcacctcgaacgctgcaactgttgctgataagatcctgtgggagatcacccgcttcttcctgctgg

SEQ ID NO: 503191 - DNA, 120 bp, Artificial Sequence
  ENSG00000163870_6 (sequence is synthesized)
ccatcgagctgagtgtgatcatcctgggcctggcctttggccacctggagagtaagtccagcatcaagcgggtgctggccatcaccacagtgctgtccctggcctactctgtcacccagg

SEQ ID NO: 503192 - DNA, 120 bp, Artificial Sequence
  ENSG00000163870_7 (sequence is synthesized)
ggaccctggagatcctgtaccctgatgcccatctctcagctgaggactttaatatctatggccatgggggccgccagttctggctggtcagctcctgcttcttcttcctggtctactctc

SEQ ID NO: 503193 - DNA, 120 bp, Artificial Sequence
  ENSG00000163870_8 (sequence is synthesized)
tggtggtcatccttcccaagaccccgctgaaggagcgcatctccctgccttctcggaggagcttctacgtgtatgcgggcatcctggcactgctcaacctactgcaggggctggggagtg

SEQ ID NO: 503194 - DNA, 120 bp, Artificial Sequence
  ENSG00000163870_9 (sequence is synthesized)
tgctgctgtgcttcgacatcatcgaggggctctgctgtgtagatgccacaaccttcctgtacttcagcttcttcgctccgctcatctacgtggctttcctccggggcttcttcggctcgg

SEQ ID NO: 503195 - DNA, 120 bp, Artificial Sequence
  ENSG00000163870_10 (sequence is synthesized)
agcccaagatcctcttctcctacaaatgccaagtggacgagacagaggagccagatgtacacctaccccagccctacgctgtggcccggcgggagggcctggaggctgcaggggctgctg

SEQ ID NO: 503196 - DNA, 120 bp, Artificial Sequence
  ENSG00000163870_11 (sequence is synthesized)
gggcctcagctgccagctactcgagcacgcagttcgactctgccggcggggtggcctacctggatgacatcgcttccatgccctgccacactggcagcatcaacagcacagacagcgagc

SEQ ID NO: 503197 - DNA, 120 bp, Artificial Sequence
  ENSG00000163870_12 (sequence is synthesized)
gctggaaggccatcaatgcctgagggcagctgccagggcctgtggaggacaggccagagaggaggccagcaggcccagagtccccaggggaggaggaccaggtcaagggacgttctgtgg

SEQ ID NO: 503198 - DNA, 120 bp, Artificial Sequence
  ENSG00000163870_13 (sequence is synthesized)
gcagtagccctgtgtggccctgttcccaccatgagtctggaggccccacctccctggggctcccaatcccctttgccatctctgctctcactggggaccctcctccccttcccacctgct

SEQ ID NO: 503199 - DNA, 120 bp, Artificial Sequence
  ENSG00000163870_14 (sequence is synthesized)
ctcatactgctcagtgacatggcccaggctttccttccagggccatgcttggcaaggttggctgagggcaccctccttctctgcacccttggcacgagggcagggctggctctcccaatg

SEQ ID NO: 503200 - DNA, 120 bp, Artificial Sequence
  ENSG00000163870_15 (sequence is synthesized)
ctcaaagcatccaccatggtggatggactgaagtgtgtatattttcttgatctattttttaataaaaaggaaaaggagcagaaggtgctaatgtggaggttttgcaggaatactggggct

SEQ ID NO: 503201 - DNA, 120 bp, Artificial Sequence
  ENSG00000163870_16 (sequence is synthesized)
ggttcctttcaggagcctgagggctgggtgaggggctgggaggctcagggggcctctgctcaaccaaggagcagtccccagtgcccaagccctgggctggctgctggggaggtgaagaga

SEQ ID NO: 503202 - DNA, 120 bp, Artificial Sequence
  ENSG00000163870_17 (sequence is synthesized)
aacaggatcccagctgccgctgcccctgcccctgggcccatctgagtaggggggacagacatggagagagaggagaactatgttttgtgagccagcccctctccctttgtcagacacaca

SEQ ID NO: 503203 - DNA, 120 bp, Artificial Sequence
  ENSG00000163870_18 (sequence is synthesized)
ctgttgtcttgggcagccggttctctctgctcagctccattaaaacgcagaatggacttactattgccatctgtaaaatgcggagaagacccatcctgcagggccttttgtaaggattgg

SEQ ID NO: 503204 - DNA, 120 bp, Artificial Sequence
  ENSG00000163870_19 (sequence is synthesized)
aaaacactaagcacgagtggctggcgtacagtaatgaacgataaggatagctcttatttttagcctcaagaatagtgcttggcacatagtaggcccccagcagacaggactcggggactg

SEQ ID NO: 503205 - DNA, 120 bp, Artificial Sequence
  ENSG00000163870_20 (sequence is synthesized)
atgtttgtcataaggatgggtgtggttggctgaaaatgggagtaaatcagagcaaagcactgggatcataaggcatgagtaggggagaggggcccacttgtccctgccactgcccttgta

SEQ ID NO: 503206 - DNA, 120 bp, Artificial Sequence
  ENSG00000163870_21 (sequence is synthesized)
cctgagttcggctttgagctttttggcagccagagtgaaagggagttgctgccagttatgtaatccccagagttggagaggaggagcccatccaggacacagccaactgcatgcttcaga

SEQ ID NO: 503207 - DNA, 120 bp, Artificial Sequence
  ENSG00000163870_22 (sequence is synthesized)
gcctggggaggtctcagccctggctgtggggaccctgaggatcaggctgttgcccgcctccgcgatcagccttttttttttaggggggaatggggtgccgagggcacaagctccaacaca

SEQ ID NO: 503208 - DNA, 120 bp, Artificial Sequence
  ENSG00000163870_23 (sequence is synthesized)
gctcatgtctgtggggccaatgtgtcaggctccctgggagggcctggagggttgatagcggacagggccaacagtacggccagtgagctggactcctgggctgcagggggtactgcaggg

SEQ ID NO: 503209 - DNA, 120 bp, Artificial Sequence
  ENSG00000163870_24 (sequence is synthesized)
tgcccctgaatggcatactttatcggggcctctcagctcatgtaaaagcctggtaatcagggaaggcaagctcacggcattctgagtgagcggggtaagggttggggccagcagggattt

SEQ ID NO: 503210 - DNA, 120 bp, Artificial Sequence
  ENSG00000163870_25 (sequence is synthesized)
gaccatcagatccacatgcagtccaagatggcacagtgtcagccgaagtttgctggctgcagtgaatgagcagagaggcatcaacagaagaaaagagaccatttttataatttttaagtt

SEQ ID NO: 503211 - DNA, 120 bp, Artificial Sequence
  ENSG00000163870_26 (sequence is synthesized)
tgttttttaaaaataggtcatatatgtacatggcaagaaaaaaaaaggttcatgcagtacaggagggtatttggtgaacgataaatctccctgtgtggcactgaattcctctgtccccct

SEQ ID NO: 503212 - DNA, 120 bp, Artificial Sequence
  ENSG00000163870_27 (sequence is synthesized)
cctgaagcacccagggtctccataaccttccagagccatcctgtgttcacaccaacggatgtgtatatcatccctctttctgtaatgctaatgtcctgtagctcactccaatggatcttg

SEQ ID NO: 503213 - DNA, 120 bp, Artificial Sequence
  ENSG00000163870_28 (sequence is synthesized)
gagatcattccatgtcaagtggaggactgcttcacccctgcagctacatatatatggatatatggcaatttataaaccacttcccttttgtttctgaaaaattttgcaacaacaaacaag

SEQ ID NO: 503214 - DNA, 120 bp, Artificial Sequence
  ENSG00000163870_29 (sequence is synthesized)
gcaacatcaacaatccttataaatttgcttttggtaactcatgcaagtagaattgctggagcacacagtcttaattagttttaattactcttattagtcttctgcagagatcaatagttg

SEQ ID NO: 503215 - DNA, 120 bp, Artificial Sequence
  ENSG00000163870_30 (sequence is synthesized)
tcctccaatatatgttgtttttctccattggaagagaatccctgatttttcgctagatacacagctgtctagaataaagactgcattttctagccttccttgcaggtgggttctggccaa

SEQ ID NO: 503216 - DNA, 120 bp, Artificial Sequence
  ENSG00000163870_31 (sequence is synthesized)
gccttgcacatggagatgcttagctgagggggtggctttgttagactatttgcaggtcgtgagatagagcctgagatgggggactgggcccctgcctgggggattgggtcgtgacctgtg

SEQ ID NO: 503217 - DNA, 120 bp, Artificial Sequence
  ENSG00000163870_32 (sequence is synthesized)
tggagccccacactgagctgcagtgggtggggagggtggtttacaggggtgctctgtgcagcccctctgattttcccctgggagtcccaggtccaggggaaggaggacagtggcccaggc

SEQ ID NO: 503218 - DNA, 120 bp, Artificial Sequence
  ENSG00000163870_33 (sequence is synthesized)
gcccaggccgggaggtggagcgcggctgccgccagctggtccactgacaactgctgccagctggaaggcgcgtagggcgagaggtggcgcgtcctcagctttccagtcttcgattccgcc

SEQ ID NO: 503219 - DNA, 120 bp, Artificial Sequence
  ENSG00000163870_34 (sequence is synthesized)
agagcccggaggtgtgcggcccggcgctgtgcgcgtgcgctcgcctgcgctgtggtgggagctggagcggaggtagaagctgaggctccaggggacccgacgacacttgctggctgcgtg

SEQ ID NO: 503220 - DNA, 76 bp, Artificial Sequence
  ENSG00000163870_35 (sequence is synthesized)
tgaggctccaggggacccgacgacacttgctggctgcgtgacctcggtcacaccagggccattttgctgacaagac

SEQ ID NO: 503221 - DNA, 120 bp, Artificial Sequence
  ENSG00000163870_36 (sequence is synthesized)
gagaccagcctgactaacatgcgagaagtgagtcctgaggtccggcccacactgaaggagaggagatcctagcagggctggggattatcaggagccctcccaaaggccactgaagagagc

SEQ ID NO: 503222 - DNA, 120 bp, Artificial Sequence
  ENSG00000163870_37 (sequence is synthesized)
agtcaagatggtggatggggtcagctggctgcccagaggtcatctgataaggactaggagctgttagtggccctggcgatagcagatctgggctggccggtgtgtctggagtcagacact

SEQ ID NO: 503223 - DNA, 120 bp, Artificial Sequence
  ENSG00000163870_38 (sequence is synthesized)
acattgaagtgtgttgacagcataggacagatgtggttggatgttactttggagattcagttacaaaaagactgcagctttgctcactctgagagaaggcagcatccatgtcttgaggac

SEQ ID NO: 503224 - DNA, 120 bp, Artificial Sequence
  ENSG00000163870_39 (sequence is synthesized)
actcaggcagcctgggacaggcttggggagtgaggagctgggaccccagccaacagtcatgctggacttgctccaggacacatcaccttggggtttgctcttcccaggtcagtaggcatc

SEQ ID NO: 503225 - DNA, 120 bp, Artificial Sequence
  ENSG00000163870_40 (sequence is synthesized)
cagcgctggggcagctgcttcaggacatcgccgaggacaagtctcctccccattctggttccaccatctgtagcctgtggctttcatcctcaagggctccatgcgaccgctgcacatcca

SEQ ID NO: 503226 - DNA, 120 bp, Artificial Sequence
  ENSG00000163870_41 (sequence is synthesized)
agctggtagctgggagctggagctgtagagttccaggctgggagctggagagccctgggtgagagggaggcctagaggggccccgggggacacaccaggcttgagggtagtaggtgctgg

SEQ ID NO: 503227 - DNA, 120 bp, Artificial Sequence
  ENSG00000163870_42 (sequence is synthesized)
gctgtgtatgcatacagtgcgcatgcgcacgcacatacatacatgcacttgggcacacacatacagatacacatgcacatgcacacagatatacgcacacccacccacatgtgcatggac

SEQ ID NO: 503228 - DNA, 120 bp, Artificial Sequence
  ENSG00000163872_0 (sequence is synthesized)
ggaacgcgccgggcgggctccaccgcgccgtgtgcttccgcaggttgcgggggtcgctggggccttgtggcggggcagctccgcggggcttcgcccgctctctcacctcgccgtgctctc

SEQ ID NO: 503229 - DNA, 120 bp, Artificial Sequence
  ENSG00000163872_1 (sequence is synthesized)
gcccgctctctcacctcgccgtgctctctcgcggcggccggcggggcccgcgctgcagccggagacccggagaaaggtgaagaactgaatgtcatcatgtctggaatcaagcgaaccatc

SEQ ID NO: 503230 - DNA, 120 bp, Artificial Sequence
  ENSG00000163872_2 (sequence is synthesized)
aaagaaaccgaccctgattacgaggatgtatctgtggcccttccaaataagcggcataaagcaattgagaattcagctcgagatgctgctgtgcagaagattgagactattatcaaagaa

SEQ ID NO: 503231 - DNA, 120 bp, Artificial Sequence
  ENSG00000163872_3 (sequence is synthesized)
cagtttgctcttgaaatgaagaataaggaacatgaaattgaagtcattgaccagcgactgattgaagcaagaaggatgatggataaactgcgtgcctgcattgtagcaaactactatgct

SEQ ID NO: 503232 - DNA, 120 bp, Artificial Sequence
  ENSG00000163872_4 (sequence is synthesized)
tctgcaggtcttctaaaagtttctgagggatcaaagacatgtgatacaatggtttttaatcatcctgctatcaagaaatttttggaatcaccatctaggtcatcatctcctgccaatcag

SEQ ID NO: 503233 - DNA, 120 bp, Artificial Sequence
  ENSG00000163872_5 (sequence is synthesized)
agagcagaaacaccatcagccaatcattcagaaagtgattctttatctcagcacaatgacttcttatctgacaaagataataacagcaatatggatatagaggaaagactctcaaacaac

SEQ ID NO: 503234 - DNA, 120 bp, Artificial Sequence
  ENSG00000163872_6 (sequence is synthesized)
atggagcagagaccaagccgaaatactggaagggatacttctagaattactggctcccataaaacagaacagcggaatgctgatctcacagatgagacttcacgactttttgtaaagaaa

SEQ ID NO: 503235 - DNA, 120 bp, Artificial Sequence
  ENSG00000163872_7 (sequence is synthesized)
acaatagtagtgggcaatgtgtccaagtatatacctccggataagagggaagaaaatgaccagtcaactcataagtggatggtatatgtccgagggtcccgtagagaacccagcattaat

SEQ ID NO: 503236 - DNA, 120 bp, Artificial Sequence
  ENSG00000163872_8 (sequence is synthesized)
cattttgtcaagaaggtttggttcttccttcatcctagctataaaccaaatgaccttgtggaagttagagagcctccttttcacctgaccagaagaggctggggtgagtttcccgtcaga

SEQ ID NO: 503237 - DNA, 120 bp, Artificial Sequence
  ENSG00000163872_9 (sequence is synthesized)
gttcaagttcattttaaggacagccagaacaagcggatagatatcatacataatctgaagctggatagaacttatactggcttgcagactcttggagcagagacggtagtggatgttgaa

SEQ ID NO: 503238 - DNA, 120 bp, Artificial Sequence
  ENSG00000163872_10 (sequence is synthesized)
ctccatcgccattctctcggagaagactgtatctatcctcagtcctcggagtctgacatctctgatgcccctccatctttgcctttgaccattccagccccagtgaaagcttcttcacca

SEQ ID NO: 503239 - DNA, 120 bp, Artificial Sequence
  ENSG00000163872_11 (sequence is synthesized)
ataaagcagtcacatgagccagtacccgatacctctgtggagaaaggattcccagctagcactgaagctgaacgacacactccgttttatgctttgccatcttcattggaaagaacaccc

SEQ ID NO: 503240 - DNA, 120 bp, Artificial Sequence
  ENSG00000163872_12 (sequence is synthesized)
accaaaatgactacatcccagaaagttaccttttgttcccatggcaattcagctttccagccaatagcatcaagctgcaaaattgttccacaaagtcaggttcctaatcctgagtcacct

SEQ ID NO: 503241 - DNA, 120 bp, Artificial Sequence
  ENSG00000163872_13 (sequence is synthesized)
ggaaaatccttccagcccatcaccatgagctgcaagattgtgtcaggttccccaatatcaactccaagcccatcaccattgcctcgaaccccgacttccactccagtccacgtgaagcaa

SEQ ID NO: 503242 - DNA, 120 bp, Artificial Sequence
  ENSG00000163872_14 (sequence is synthesized)
ggcactgccggctctgttattaataatccttatgttatcatggacaagcagccggggcaggtgattggagccaccactcccagtacaggaagtcctacaaacaagatctccacggcttct

SEQ ID NO: 503243 - DNA, 120 bp, Artificial Sequence
  ENSG00000163872_15 (sequence is synthesized)
caggtctcccaaggaacaggttcccctgttcctaaaattcatggaagtagttttgtaacatctactgtcaagcaggaggattctttgtttgcatctatgccacctctttgcccaattggg

SEQ ID NO: 503244 - DNA, 120 bp, Artificial Sequence
  ENSG00000163872_16 (sequence is synthesized)
agtcaccctaaggttcaaagccccaaacctataacaggaggacttggagctttcacaaaagtgatcatcaaacaggaacctggtgaagcccctcacgtgcccgcaacaggagctgccagc

SEQ ID NO: 503245 - DNA, 120 bp, Artificial Sequence
  ENSG00000163872_17 (sequence is synthesized)
cagtcaccactcccgcagtatgtgactgtgaaagggggtcacatgatagctgtgtcccctcaaaaacaggtcataactcctggagaagggattgcccagtcagcaaaggttcagccctcc

SEQ ID NO: 503246 - DNA, 120 bp, Artificial Sequence
  ENSG00000163872_18 (sequence is synthesized)
aaggttgtcggggtaccagttgggtctgctttaccttcaacagtgaagcaggctgtggcgatcagtggtggccagatcctggtagccaaggccagctcttctgtctccaaagcagttggg

SEQ ID NO: 503247 - DNA, 120 bp, Artificial Sequence
  ENSG00000163872_19 (sequence is synthesized)
ccaaagcaagttgtaacccaaggagttgccaaagcaattgtgagtggaggtggaggaaccattgttgctcagccagtgcagaccttaaccaaggcccaggttactgccgctggtcctcag

SEQ ID NO: 503248 - DNA, 120 bp, Artificial Sequence
  ENSG00000163872_20 (sequence is synthesized)
aagagtggatcccagggttcagtaatggcaacgttgcagctaccagccactaatttggccaacttggcaaatttgcctcctggcactaaactctacctaactacaaacagcaagaaccct

SEQ ID NO: 503249 - DNA, 120 bp, Artificial Sequence
  ENSG00000163872_21 (sequence is synthesized)
tcaggaaaaggaaaactgctgctgatccctcaaggagccatcctgcgagctacgaacaatgctaatctccagtctggctcagctgccagtggtgggagtggtgccggaggaggaggagga

SEQ ID NO: 503250 - DNA, 120 bp, Artificial Sequence
  ENSG00000163872_22 (sequence is synthesized)
ggaggaggaggaggcggcagtggcagcggtggaggcggcagcacaggaggaggaggaggaacagcaggaggaggaactcaaagtactgctggccctggagggatatctcagcacctgact

SEQ ID NO: 503251 - DNA, 120 bp, Artificial Sequence
  ENSG00000163872_23 (sequence is synthesized)
tacacatcttacatcctcaagcaaactccccagggcacatttttagttggccagccatcaccccagacttctggaaaacaactcaccactgggtcagtggtccaaggaacactgggagtc

SEQ ID NO: 503252 - DNA, 120 bp, Artificial Sequence
  ENSG00000163872_24 (sequence is synthesized)
agcacatcttctgcacaaggacaacaaacgctaaaagtcatctctggacagaaaaccacattgtttacacaggcagcccatggaggacaggcatctctaatgaaaatatccgatagcacc

SEQ ID NO: 503253 - DNA, 120 bp, Artificial Sequence
  ENSG00000163872_25 (sequence is synthesized)
ttgaagactgtgccagccacctcacagctctcgaagcctggaaccacaatgctgagagtagcaggaggggttatcacaactgccacttcccctgccgtggccctctcagcaaacggtcct

SEQ ID NO: 503254 - DNA, 120 bp, Artificial Sequence
  ENSG00000163872_26 (sequence is synthesized)
gcacaacagtctgaaggaatggctcccgtgtcttcatctacggtcagttctgtaacgaaaacttctgggcagcagcaagtgtgtgtgagccaggccaccgtgggaacctgcaaggctgcc

SEQ ID NO: 503255 - DNA, 120 bp, Artificial Sequence
  ENSG00000163872_27 (sequence is synthesized)
ccatctctgggaaagccacagtatccggactgttaaagattcactccagtcagtccagtccgcagcaggccgtcctgacgattcccagccagctcaaaccactcagcgtaaacacatctg

SEQ ID NO: 503256 - DNA, 120 bp, Artificial Sequence
  ENSG00000163872_28 (sequence is synthesized)
gaggggtgcagacgatcctgatgcctgtgaataaagtggttcagtcattttctaccagcaagccacctgccattctgcctgtagctgccccaactccagttgtccccagctctgctccag

SEQ ID NO: 503257 - DNA, 120 bp, Artificial Sequence
  ENSG00000163872_29 (sequence is synthesized)
cagctgttgcaaaagtgaagactgaaccagaaacacctggaccgagttgcctctctcaggagggtcagacagcagtgaaaacagaagaaagttctgagctgggaaactatgtcattaaga

SEQ ID NO: 503258 - DNA, 120 bp, Artificial Sequence
  ENSG00000163872_30 (sequence is synthesized)
tagaccatttagaaactatccagcaactcctaactgcagtagtaaagaagattccattaatcactgcaaaaagtgaagatgccagctgcttttctgcaaagtctgtggagcagtactatg

SEQ ID NO: 503259 - DNA, 120 bp, Artificial Sequence
  ENSG00000163872_31 (sequence is synthesized)
gctggaacattggaaaaaggagagccgctgagtggcaaagagcaatgacaatgcgaaaagtcttacaagaaatcctggagaagaatccgagatttcaccacctgactcccctcaaaacca

SEQ ID NO: 503260 - DNA, 120 bp, Artificial Sequence
  ENSG00000163872_32 (sequence is synthesized)
agcacatcgctcactggtgccgctgtcatggctacaccccaccggaccctgagagcctgaggaatgacggggactccatcgaggacgtgctgacccagatcgacagcgagcccgagtgcc

SEQ ID NO: 503261 - DNA, 120 bp, Artificial Sequence
  ENSG00000163872_33 (sequence is synthesized)
catcatcattctcctctgctgacaacctctgccgcaaactggaggacctgcaacagttccagaaaagggaacccgagaatgaggaggaggtggacatcctcagcctctccgagccagtga

SEQ ID NO: 503262 - DNA, 120 bp, Artificial Sequence
  ENSG00000163872_34 (sequence is synthesized)
agataaacatcaagaaggagcaggaagagaaacaagaggaagtcaagttctacctgccaccaaccccagggtctgaatttattggggatgtcacacagaagattgggatcaccctgcagc

SEQ ID NO: 503263 - DNA, 120 bp, Artificial Sequence
  ENSG00000163872_35 (sequence is synthesized)
ccgtggcactccacaggaacgtgtatgcgtccgtggtggaggacatgatcctgaaggctacagaacagctggtgaatgatatcctgagacaggctttggcagttggataccagacagctt

SEQ ID NO: 503264 - DNA, 120 bp, Artificial Sequence
  ENSG00000163872_36 (sequence is synthesized)
ctcacaacaggattcccaaagaaattacagtgagtaatattcaccaggccatttgcaacattccttttctggacttcctcacaaacaaacacatgggaatattgaatgaggaccagtgag

SEQ ID NO: 503265 - DNA, 120 bp, Artificial Sequence
  ENSG00000163872_37 (sequence is synthesized)
cggagtgaggtgccctggagaagcaggctttgaaggcacagcgaagctgtaactgaggaccctgctgctcgggaaggaggtggtttccagtgtgactcggcatgtcatggctacccaacc

SEQ ID NO: 503266 - DNA, 120 bp, Artificial Sequence
  ENSG00000163872_38 (sequence is synthesized)
tttgccgctgcctgttcccacgtgtcaccagcacgctgcactccagatgaaatcctcctaggacaggagtttgtttcctgagtgtggagtgaggctgtcagtggatccgtgctttgtcgg

SEQ ID NO: 503267 - DNA, 120 bp, Artificial Sequence
  ENSG00000163872_39 (sequence is synthesized)
ccagcgtttctgcagtctttgtaaaggccccacgagagcgggccaggccgtgtgcctcaggcccttctccctgggtgtgcttaagggggctccttgggcccgcctccccaggaggtagaa

SEQ ID NO: 503268 - DNA, 120 bp, Artificial Sequence
  ENSG00000163872_40 (sequence is synthesized)
aatgagtggcaggctagagatttcacccattttgtgggctggagttaccagtagctccagcagttaccctgaagagagattgggcttcagccttcagcaggtggttctctcccatgcctg

SEQ ID NO: 503269 - DNA, 120 bp, Artificial Sequence
  ENSG00000163872_41 (sequence is synthesized)
gccttggtgtggaggggctgtactctgagcccaagtgagtcagctataggaagaggccatacctagagccaagaaccatgaaggcctgagagacggcagactgagcagaattcctttttt

SEQ ID NO: 503270 - DNA, 120 bp, Artificial Sequence
  ENSG00000163872_42 (sequence is synthesized)
gagcacgagagcattactagaaccattgtcaaagcagtggcaagggacggagaggtcccaacaggagtcaggaagaggtttgattataaccaagaaaactcactatgctaggaatagact

SEQ ID NO: 503271 - DNA, 120 bp, Artificial Sequence
  ENSG00000163872_43 (sequence is synthesized)
gtgtgcaccagtcccagacacttggcagaagtgtagcagcgttacacatgtgtgcgaagcagatcgcaggttccacgccatctgcatggcctgcaggagcttctgctgctgaccccatgc

SEQ ID NO: 503272 - DNA, 120 bp, Artificial Sequence
  ENSG00000163872_44 (sequence is synthesized)
tgagtggccagtggggagcggcgcccggcaggctcttctggggtcgtctgtcctatccgtggattgtatatactcttctctgttaaggagtttttcccaagaagaaaagtatttaaaaga

SEQ ID NO: 503273 - DNA, 120 bp, Artificial Sequence
  ENSG00000163872_45 (sequence is synthesized)
aataccagtgagtgccttaaagttggagaagtaactgcccatgcccagaaataaggatgccagtgcccagaagcagtgagattagtctgtgtccacaagcagaggccccctcgatgggag

SEQ ID NO: 503274 - DNA, 120 bp, Artificial Sequence
  ENSG00000163872_46 (sequence is synthesized)
ggagtggcaggcaggagaaggtggcgctgccaggtgcccgggtctattggaggcgccccatctcagacttcctaacacagcctgtgtggaaggcagaacaaagaatgcatgcccagtcag

SEQ ID NO: 503275 - DNA, 120 bp, Artificial Sequence
  ENSG00000163872_47 (sequence is synthesized)
aaatctgttctattctgctccaggaaaatcggaaacctgtgagtcagagtcagagaaacttacccaagcaacgtaattcctgttttcatgggtcctgtagatgtttgagtcaggaaggta

SEQ ID NO: 503276 - DNA, 82 bp, Artificial Sequence
  ENSG00000163872_48 (sequence is synthesized)
tgttttcatgggtcctgtagatgtttgagtcaggaaggtaaggcggggagtgactgaataaactctgccttttaaattgagc

SEQ ID NO: 503277 - DNA, 120 bp, Artificial Sequence
  ENSG00000163872_49 (sequence is synthesized)
acccaggaggcggaggttgcagtgtgccaagatcataccactgcactccagccctggtgacagaggagaccccgtctcaaaaattgattgatcaattcagcatctgagggctgcaagtac

SEQ ID NO: 503278 - DNA, 120 bp, Artificial Sequence
  ENSG00000163872_50 (sequence is synthesized)
ggctgcaagtacagaaggaatctattctcagcagggcatagggcacgcactggcttaacagtttagtatataaggctcaaatagtctatacctgaactgctataagcaaggtcgataggg

SEQ ID NO: 503279 - DNA, 120 bp, Artificial Sequence
  ENSG00000163872_51 (sequence is synthesized)
aagtggatagattgcttcagcaaagtgaactgtgagatctccaggacagagggagaaagatctgatccaaatgagaacagattggttattgcaggtatcacagcctaaagaaattatctt

SEQ ID NO: 503280 - DNA, 120 bp, Artificial Sequence
  ENSG00000163872_52 (sequence is synthesized)
tttgcaaaagaaatattaaatgatttagcagtctccacgtgtgttaatgtttcaaacgtgtatcataatgtgtataattgtgtaacaaaattgtctacaataaatcttttggtatttgtg

SEQ ID NO: 503281 - DNA, 120 bp, Artificial Sequence
  ENSG00000163872_53 (sequence is synthesized)
ccagcatacggctggcactggtctaccggaaaaactgaatatcaccgagatacacacacacactcacgcatgcagacaacaccccttactgcctttggataagaggctgtggatgttgtt

SEQ ID NO: 503282 - DNA, 120 bp, Artificial Sequence
  ENSG00000163872_54 (sequence is synthesized)
gttgtcattactattattacttcattcatatgtagctccacaccaggccccttgtgtcttgtttggatagagaacaaaaaattaaggctgattatatttttctcttgatttctacctccc

SEQ ID NO: 503283 - DNA, 120 bp, Artificial Sequence
  ENSG00000163872_55 (sequence is synthesized)
tgttaaaattgaccaacttctagtatagggagtacttgttctctactaactgttttatttgaggccctgtgttggatactggagtagaaattgtagaaataaaaggaattattataataa

SEQ ID NO: 503284 - DNA, 120 bp, Artificial Sequence
  ENSG00000163872_56 (sequence is synthesized)
tgaacttaaggtattgagtcaactgaaatcacttgggattgtaaattaatattgatatggcggttaccttataaggtttcagctagagatacagcccatttgcaagggttttagaattca

SEQ ID NO: 503285 - DNA, 120 bp, Artificial Sequence
  ENSG00000163872_57 (sequence is synthesized)
ggtgttttatacttacatcaatccagtaggagatggagtgagtgcttaggacactcttagagccagatgagctcaagggtctgctttgtcatttttagagaacctcatggttgtgaaagc

SEQ ID NO: 503286 - DNA, 120 bp, Artificial Sequence
  ENSG00000163872_58 (sequence is synthesized)
tcactcagctttgctcagaggtttatatcctcctcattacttcacagacacctaggactctgttttattacagggttgaataaatattagctttgcaattaaagataacagtgtccatta

SEQ ID NO: 503287 - DNA, 120 bp, Artificial Sequence
  ENSG00000163872_59 (sequence is synthesized)
tctaaaaatgcttcctgaggtttcctaatttctaaatcaggaagccacttctgaccagctacttttaagtatctcagactgctggggacaatagaaacttagccactctaacatggtaga

SEQ ID NO: 503288 - DNA, 120 bp, Artificial Sequence
  ENSG00000163872_60 (sequence is synthesized)
tggaggcgtgaactgtaataaccctaagatgggtatacagaatttttctcccctagtagcagtcacattgcaaaaagattatattgctattgaattttaaggtgtagattaaatgtctgt

SEQ ID NO: 503289 - DNA, 120 bp, Artificial Sequence
  ENSG00000163872_61 (sequence is synthesized)
aatatgtgcataatcttccattcctgggatcttagtcttgacattttctttttaagcatagaacacccctcctttacaaagaaggtaatctgtggaaggaaagacatgctaatatgatgg

SEQ ID NO: 503290 - DNA, 120 bp, Artificial Sequence
  ENSG00000163872_62 (sequence is synthesized)
ttttaattataattccctcagaacggaatatatccattaagtacatggcatatatatggctatagaaactgctacatgtatttaatttattgccttaatttttttttatctctctcagga

SEQ ID NO: 503291 - DNA, 120 bp, Artificial Sequence
  ENSG00000163872_63 (sequence is synthesized)
cagttagttttttattgttttcactgtgttgatctgtagaaggaatgttttacatttttcatatgtaaatcatagattgttttgtatgcagttaaaactctgtattagcatttggtgttt

SEQ ID NO: 503292 - DNA, 120 bp, Artificial Sequence
  ENSG00000163872_64 (sequence is synthesized)
atgagtgaggaaagcatttagcgtttgcctgcagtgtaccaggtcctgtgcaggttgggtacgttcactgtctcatataatcccagcctcctgtgtgatagctggtgtcatctccactta

SEQ ID NO: 503293 - DNA, 120 bp, Artificial Sequence
  ENSG00000163872_65 (sequence is synthesized)
cagatgaggaaactgaggataagcagggttgaataacttgctcgagatcacagagccacgggtggtgaaacaggatacaaacctggttctgtttgactctaagaccattcatctttcctc

SEQ ID NO: 503294 - DNA, 120 bp, Artificial Sequence
  ENSG00000163872_66 (sequence is synthesized)
tgaaactcagtattgcacagtgtagaaatgcagtttttaagacctcccaaagtgacgtgctgcgtcactgcccatcattagctagattgagtaaattgctgcttagccccagttgttttg

SEQ ID NO: 503295 - DNA, 120 bp, Artificial Sequence
  ENSG00000163872_67 (sequence is synthesized)
acagaatcaatagcccttgctgaggggccagcagcctacggacacaggagcatgctcatgggcaagaccaccatgcacactcagaggggagccacaaggcaacctccacgccactcagat

SEQ ID NO: 503296 - DNA, 120 bp, Artificial Sequence
  ENSG00000163872_68 (sequence is synthesized)
ttgtagggctctgaacacatacaccaggtacagaccacctacttattttttccaactgtaatagcaaagcagtaatctctttctgtagggtaaagtttgggggatcattttgatgtctct

SEQ ID NO: 503297 - DNA, 120 bp, Artificial Sequence
  ENSG00000163872_69 (sequence is synthesized)
aagtttgggggatcattttgatgtctctcagagtaaacttttggtgacagtttcccagcctaacataagaaattcaaacaaaaaaatctctcttatatatgtgtgtgtgtgtgtgtgtgt

SEQ ID NO: 503298 - DNA, 120 bp, Artificial Sequence
  ENSG00000163872_70 (sequence is synthesized)
atatacacacacacatatttttctctctccttaaaaatacagaatgtaagagctggaaggtagttcagaaaccatcttcccagctttctcagtttatagatgagaaaaccgagctgggct

SEQ ID NO: 503299 - DNA, 120 bp, Artificial Sequence
  ENSG00000163872_71 (sequence is synthesized)
tccagcctgggtgacaaagtgagacaccatctaccacaaccaccttgtgagttaatggcgggtccagggctcctagtggagcaccagttccacagactttaatagtctatggcagtgatt

SEQ ID NO: 503300 - DNA, 120 bp, Artificial Sequence
  ENSG00000163872_72 (sequence is synthesized)
accttctctaccaaagaagcaaagtgcccaggaaggtgtgttgctttgagtacacacggcaagacaccttctcttctgaggagacgccctcctgtgttaggctgcatctgagcttgccca

SEQ ID NO: 503301 - DNA, 120 bp, Artificial Sequence
  ENSG00000163872_73 (sequence is synthesized)
gtaaggaacatacatgcgataaagaggtctgaagaagtgactggcttgcctccagcaaatgacgtgtggttggaatcgtaagagctttattcaggctttgctgggtgtgtgcattctagg

SEQ ID NO: 503302 - DNA, 120 bp, Artificial Sequence
  ENSG00000163872_74 (sequence is synthesized)
tgaagatgccagctgcttttctgcaaagtctgtggagcagtactatggctggaacattggaaaaaggagagccgctgaggtaacccacatctgcctgtccactctggctgcctccagaaa

SEQ ID NO: 503303 - DNA, 120 bp, Artificial Sequence
  ENSG00000163872_75 (sequence is synthesized)
ccttgtcttatggaacagggataagattgcagcatatttggttgaaatatttgatggcagaatattttcctcagttaaaaaaaatctcatttttcaaagacctgtatccagctgactttc

SEQ ID NO: 503304 - DNA, 120 bp, Artificial Sequence
  ENSG00000163872_76 (sequence is synthesized)
aggcgtgccttcttttcctgcactggcagaaacatccctcacagtttctaaatttttttctgagtttcagagttttaaatgaactcgagtattgagtccttacagtgggaaggtgctgtg

SEQ ID NO: 503305 - DNA, 120 bp, Artificial Sequence
  ENSG00000163872_77 (sequence is synthesized)
gtgagtttagggaaagctggggtaggaggggagtgggagagcgcaggtggagaccaggtgaagatccttacagtgggaaggtgctgtggtgagtttagggaaagctggggtaggagggga

SEQ ID NO: 503306 - DNA, 120 bp, Artificial Sequence
  ENSG00000163872_78 (sequence is synthesized)
tttttaatggggagtaacacaaccaggtttttttctttaaaaaaaaaaattctaacaggttaggttaggatggtgatttatggttgcatgatacgtagttgtgttaagtggaaggatttg

SEQ ID NO: 503307 - DNA, 120 bp, Artificial Sequence
  ENSG00000163872_79 (sequence is synthesized)
tatcattatggtctattattgaggcctttaattttttcttaaggactttttaatccctagttgcagtggtttcaaacatttggggtaagggatggggttaaatgtgtcccttcttgccag

SEQ ID NO: 503308 - DNA, 80 bp, Artificial Sequence
  ENSG00000163873_0 (sequence is synthesized)
gtgcgagcccgggcgatagcatcggcggcggctggaggaggagcggccggagacgcgtgcagcccgcccgccagagcccg

SEQ ID NO: 503309 - DNA, 80 bp, Artificial Sequence
  ENSG00000163873_1 (sequence is synthesized)
acgcgagtcggagccggagccgagtccgagcggagtccgggcggagcccaggagcctcgctcgcgggcagcccgtgggcg

SEQ ID NO: 503310 - DNA, 80 bp, Artificial Sequence
  ENSG00000163873_2 (sequence is synthesized)
ccagtaagatgtgcgcggcgccgcggggcgccccccacttgcagcggcgctcgggagccgggcggctgggccaggcggcg

SEQ ID NO: 503311 - DNA, 120 bp, Artificial Sequence
  ENSG00000163873_3 (sequence is synthesized)
ggagcccgccacggccgcgccccgggcacgctcggcggcgcccaacgatgaccgctccctggcggcgcctccggagtctggtttgggaatactgggccgggctcctcgtgtgcgccttct

SEQ ID NO: 503312 - DNA, 120 bp, Artificial Sequence
  ENSG00000163873_4 (sequence is synthesized)
ggatcccggactcgcgcgggatgccccacgtcatccggatcggaggaatcttcgagtatgcggacggccccaacgcccaggtcatgaatgccgaggagcatgcctttcgattttctgcca

SEQ ID NO: 503313 - DNA, 120 bp, Artificial Sequence
  ENSG00000163873_5 (sequence is synthesized)
acatcatcaacaggaacaggactctgctgcccaacacaaccttgacctatgacatacagaggattcacttccatgacagcttcgaggcgaccaaaaaggcctgtgaccagctggcactgg

SEQ ID NO: 503314 - DNA, 120 bp, Artificial Sequence
  ENSG00000163873_6 (sequence is synthesized)
gcgtggtggcgatcttcggcccatcacagggctcctgcaccaatgccgtccagtccatctgcaatgccctggaggtgccccacatccagctgcgttggaagcaccacccgctggacaaca

SEQ ID NO: 503315 - DNA, 120 bp, Artificial Sequence
  ENSG00000163873_7 (sequence is synthesized)
aggacaccttctacgtgaacctctaccccgactacgcctcgctcagccatgccatcctcgacctggtccagtacctcaagtggcggtcagccaccgtggtctatgacgacagtacagggc

SEQ ID NO: 503316 - DNA, 120 bp, Artificial Sequence
  ENSG00000163873_8 (sequence is synthesized)
tcatccgactgcaggagctcatcatggccccatcaagatacaacatccgcctgaagatccgtcagctccccatcgactctgacgactcgcgccccttgctcaaggagatgaagcgaggcc

SEQ ID NO: 503317 - DNA, 120 bp, Artificial Sequence
  ENSG00000163873_9 (sequence is synthesized)
gggaattccgcattatcttcgactgcagccacactatggcggcccagatcctcaagcaggccatggccatgggcatgatgactgagtactaccacttcatcttcaccactctggatctct

SEQ ID NO: 503318 - DNA, 120 bp, Artificial Sequence
  ENSG00000163873_10 (sequence is synthesized)
acgctttagacctggagccctaccgctactcaggcgtgaacctgacaggattccggattctcaatgtggacaacccacacgtctcggccattgtggagaagtggtccatggagcggctgc

SEQ ID NO: 503319 - DNA, 120 bp, Artificial Sequence
  ENSG00000163873_11 (sequence is synthesized)
aggcagctccccggtccgagtctggcctgctggatggagtgatgatgactgatgcagccttactgtacgacgccgtccatatcgtgtccgtgtgctaccagcgggcaccacagatgaccg

SEQ ID NO: 503320 - DNA, 120 bp, Artificial Sequence
  ENSG00000163873_12 (sequence is synthesized)
tgaactccctgcagtgccatcggcacaaggcctggcgctttggcggccgcttcatgaacttcatcaaggaggctcaatgggaaggattaactggacgaattgttttcaacaaaactagtg

SEQ ID NO: 503321 - DNA, 120 bp, Artificial Sequence
  ENSG00000163873_13 (sequence is synthesized)
gcttgcggacggattttgatctggacatcatcagcctgaaagaggatggcctggagaaggttggggtgtggagtcctgccgacgggctcaacatcactgaggttgccaaaggccgaggcc

SEQ ID NO: 503322 - DNA, 120 bp, Artificial Sequence
  ENSG00000163873_14 (sequence is synthesized)
ctaatgtcaccgactctctgacaaacagatcactcattgtcaccacagtgctggaggagcccttcgtcatgtttcggaaatcagacaggacgctatacgggaatgaccggttcgagggct

SEQ ID NO: 503323 - DNA, 120 bp, Artificial Sequence
  ENSG00000163873_15 (sequence is synthesized)
actgcatcgacctgctaaaggagctggcccacatccttggtttctcctatgagatccggctggtggaggacggcaagtacggggcacaggatgacaagggccagtggaacggcatggtca

SEQ ID NO: 503324 - DNA, 120 bp, Artificial Sequence
  ENSG00000163873_16 (sequence is synthesized)
aggagctcatcgaccacaaggcagatctggccgtggcccccctgaccatcacccatgttcgagagaaggccatcgacttctccaagcccttcatgacacttggtgtgagcatcctgtatc

SEQ ID NO: 503325 - DNA, 120 bp, Artificial Sequence
  ENSG00000163873_17 (sequence is synthesized)
gaaagcccaatggcaccaaccccagcgtcttctccttcctcaatcccctgtccccagacatctggatgtatgttctcctcgcctacctgggggtcagctgtgtcctcttcgtcatcgcca

SEQ ID NO: 503326 - DNA, 120 bp, Artificial Sequence
  ENSG00000163873_18 (sequence is synthesized)
ggttcagcccttatgagtggtacgatgctcacccctgcaaccctggctccgaggtggtggaaaataacttcactctgcttaacagcttctggtttggaatgggatccctgatgcagcaag

SEQ ID NO: 503327 - DNA, 120 bp, Artificial Sequence
  ENSG00000163873_19 (sequence is synthesized)
ggtctgagctgatgcccaaagccctgtccacacgcatcattggtggcatctggtggttcttcacgctcatcatcatctcttcctacacggccaacctggctgcctttctgaccgtggagc

SEQ ID NO: 503328 - DNA, 120 bp, Artificial Sequence
  ENSG00000163873_20 (sequence is synthesized)
gcatggaatcacccattgactctgctgatgacctggccaagcaaaccaaaatcgagtatggggctgtcaaggatggggccaccatgaccttcttcaagaaatccaagatctccaccttcg

SEQ ID NO: 503329 - DNA, 120 bp, Artificial Sequence
  ENSG00000163873_21 (sequence is synthesized)
agaagatgtgggccttcatgagcagcaagccatcggcgctggtgaagaacaacgaggagggcatccagagggccctgacggccgactacgcgctgctcatggagtccaccaccatcgagt

SEQ ID NO: 503330 - DNA, 120 bp, Artificial Sequence
  ENSG00000163873_22 (sequence is synthesized)
acgtcacgcagaggaactgcaacctcacccagatcgggggcctcattgactccaagggctacggcatcggcacgcccatgggctccccataccgggacaagatcaccatcgccatcctgc

SEQ ID NO: 503331 - DNA, 120 bp, Artificial Sequence
  ENSG00000163873_23 (sequence is synthesized)
agcttcaggaggaggacaagctgcatatcatgaaggagaagtggtggcggggcagcgggtgtcctgaggaggaaaacaaagaggccagtgccctggggatccagaagatcgggggcatct

SEQ ID NO: 503332 - DNA, 120 bp, Artificial Sequence
  ENSG00000163873_24 (sequence is synthesized)
tcattgtcctggccgccgggctggtcctctctgtgctggtggccgtgggcgagtttgtgtacaagctccgcaaaacagcagagagagagcagcgttccttctgcagcaccgtggccgatg

SEQ ID NO: 503333 - DNA, 120 bp, Artificial Sequence
  ENSG00000163873_25 (sequence is synthesized)
agatccgtttctcccttacctgccagcgtcgagtcaagcacaagcctcagcctcccatgatggtcaagactgacgccgtcatcaacatgcacacattcaatgaccgccggcttcccggca

SEQ ID NO: 503334 - DNA, 120 bp, Artificial Sequence
  ENSG00000163873_26 (sequence is synthesized)
aggacagcatggcctgcagcacatccttagcccctgtgttcccctaggcacagctggggtggggacctcaggcctgggggctgggcagaggaaagcaaaggagattggaaggaacgtccc

SEQ ID NO: 503335 - DNA, 120 bp, Artificial Sequence
  ENSG00000163873_27 (sequence is synthesized)
ctgtccccgcactgggcttggggaccagagctgccacctgcctgttgggccaggagcctcctgcccttacctgccaggaagccagcaggctctcaggccagctgcttgggcttcatcctc

SEQ ID NO: 503336 - DNA, 120 bp, Artificial Sequence
  ENSG00000163873_28 (sequence is synthesized)
ctcagatcttctgtgggtttctaaagctgccagccgagatagccaaggccaaaggaagcacatgcctctctcaggccaaactcacctgcccctcaactctcctccagagtcagaagtttc

SEQ ID NO: 503337 - DNA, 120 bp, Artificial Sequence
  ENSG00000163873_29 (sequence is synthesized)
tgccgcagccctgcagagggcacagaaaatggaagacagctcttatattgccatttcttccacaagagcccaggcctcctacagcttgaccgtgaggccagagacacaagccttcggcgc

SEQ ID NO: 503338 - DNA, 120 bp, Artificial Sequence
  ENSG00000163873_30 (sequence is synthesized)
cttaaggatgttctagcatggctgccaatgggagctcatggtgagggatacccatcccatatgcctgggcagaaggaagacttcatccctctggggctgttcacgtggtcctaatcttct

SEQ ID NO: 503339 - DNA, 120 bp, Artificial Sequence
  ENSG00000163873_31 (sequence is synthesized)
gaacttggcgctgcccctggcagcccctgttctggcagagttgaagacagagctacacaggggaaaagaggagtttggggtatgggagagaagagaatgcacaaacagaggccgccattt

SEQ ID NO: 503340 - DNA, 120 bp, Artificial Sequence
  ENSG00000163873_32 (sequence is synthesized)
tggattcttatggacaatgacccagtggttcctaatcctctaggaggtctctaagaatataagtgggggagtggccacagaaaattcttctccactttctagccagaggagagaggaccc

SEQ ID NO: 503341 - DNA, 120 bp, Artificial Sequence
  ENSG00000163873_33 (sequence is synthesized)
cctgaatttctcacaaaggatgcccaaagatgcagccggtatttgaagcccagcagaggaaaagcagattccatggaagtcccaccggctcttgtgccaatggatctcactttcctggtt

SEQ ID NO: 503342 - DNA, 120 bp, Artificial Sequence
  ENSG00000163873_34 (sequence is synthesized)
agcaagctgttgtctaaaccctgttcacatttggaaacctgggctctttgccatcttctcatcaacaactccccattcctggctggttgaccttggcctcactctgtctttttgaaagaa

SEQ ID NO: 503343 - DNA, 120 bp, Artificial Sequence
  ENSG00000163873_35 (sequence is synthesized)
gagttggttgaagtgaaagtcaagttgtccctcctcaaaaaaggagttagtgtcctactacacagactaactttgggctaggtgagggaaaccagaagagaccaaaagaacttctggtct

SEQ ID NO: 503344 - DNA, 120 bp, Artificial Sequence
  ENSG00000163873_36 (sequence is synthesized)
cctggacttaccaaacctagagatgctccccaggaaaagaaagtttccagggacataatatcatagctggcagaggccccaagggtggggaggaagaagctgcctcctggagaattaacc

SEQ ID NO: 503345 - DNA, 120 bp, Artificial Sequence
  ENSG00000163873_37 (sequence is synthesized)
aaagaccccacacagagacatgaggccatcctggccccttgtctgttgtccagagcagctatggcattgtggggcttggggaagacagcagagaagtagcagcaggttgggtaccagcca

SEQ ID NO: 503346 - DNA, 120 bp, Artificial Sequence
  ENSG00000163873_38 (sequence is synthesized)
gggggtggacctatgagttccagcttgctgtgatgaatgctctagaggtctgtgactttaagagtcttggaaaagaatgagacatgaaggattaggaacaaagtgtccttaaagagaaca

SEQ ID NO: 503347 - DNA, 120 bp, Artificial Sequence
  ENSG00000163873_39 (sequence is synthesized)
cagggttaccatggccaaggatggaggggcaggttttgaacaggggagggaggttctggggattctggatgagaactggggcataccagccactcccctcccacctctgtcccatgctgc

SEQ ID NO: 503348 - DNA, 120 bp, Artificial Sequence
  ENSG00000163873_40 (sequence is synthesized)
ttgggaagcccggttagggaagagcttcatttggatctcaagggctttctcatctgggtgaagggcaatctctagcaaagcaggagaccacagtgggctcatgtgataaacactgtccct

SEQ ID NO: 503349 - DNA, 120 bp, Artificial Sequence
  ENSG00000163873_41 (sequence is synthesized)
cctccagactgtgagctgcaggaccaaaccagcaggttcccagaatcctagcagctctgactggctatgtacattggacgagggagaggagggctagacatacaccaaagccccatgcat

SEQ ID NO: 503350 - DNA, 120 bp, Artificial Sequence
  ENSG00000163873_42 (sequence is synthesized)
gtaatgttaggaaaagccatgctgtcataagcttcagggtacagagggcgtgtgcatgtgtgtctgtgtctttgtgtttgtatgtgtgagcttcgggggctggggcacaggacagatctg

SEQ ID NO: 503351 - DNA, 120 bp, Artificial Sequence
  ENSG00000163873_43 (sequence is synthesized)
gacatataacatagtccagggcatgcaataataggtgaatccttggggatctgatgtgtgcatatgcgtgcgtatgtgtatctgagtgaattggggacgagggagacaaatatgtgaagc

SEQ ID NO: 503352 - DNA, 120 bp, Artificial Sequence
  ENSG00000163873_44 (sequence is synthesized)
agcaaggccccatatatgtaaaaacaggagaagccatgtcataatggggccctggtgggtatgcatatgtaagcatgcatgcatgcataggtgtgtgcatgctggtgtgtgtgtgtgcac

SEQ ID NO: 503353 - DNA, 120 bp, Artificial Sequence
  ENSG00000163873_45 (sequence is synthesized)
atgtacactgaatggcataggatggagatcaggatcttacctgcagctagccaaatatgcgtaaaaggagaagccatgtcaccaaggggtccatgtctgagtgcatgtgaacacatgtgt

SEQ ID NO: 503354 - DNA, 120 bp, Artificial Sequence
  ENSG00000163873_46 (sequence is synthesized)
acaggcatgtgtgcacagtggggagcggggggaaggccaggaccagagagtcgtgtgacatgggtcaatgcatgctgtagacaagaagccacgtggagttgaagtttccgagtgtgtggg

SEQ ID NO: 503355 - DNA, 120 bp, Artificial Sequence
  ENSG00000163873_47 (sequence is synthesized)
acacacacatatgttccaggtcacagtggaagcaaagacagacaatcaggaaggccgggcaccagggtctgtttgcacttctgtcatgggagagatcatttgtcacagagaggttccaag

SEQ ID NO: 503356 - DNA, 120 bp, Artificial Sequence
  ENSG00000163873_48 (sequence is synthesized)
gttgcatgggcacacttgccaggagacgggggcacaacccttcaggggctcatgctgctgatgcctttgctgtggacatcatgtcctgtttgaagggaaaactcttttttgtaattccca

SEQ ID NO: 503357 - DNA, 120 bp, Artificial Sequence
  ENSG00000163873_49 (sequence is synthesized)
ggtaacaggattctaatgaaggtatttgccaatttgctgtcagcaaacacaatcattaagcgccgtcttactttgtccagtatagtttcagagcacgtgcctcattcttgctcttgtctc

SEQ ID NO: 503358 - DNA, 120 bp, Artificial Sequence
  ENSG00000163873_50 (sequence is synthesized)
acacatgtgttgtgtgtgtgatgctacatgagcatgttcttcagaggctatgcatatatgtggattgtgacaggaggaagaagaagtggtgagaatttttataaaacgaacaaagaatag

SEQ ID NO: 503359 - DNA, 120 bp, Artificial Sequence
  ENSG00000163873_51 (sequence is synthesized)
tggataaatagaggcagaattcaattcgagaaaccccccaaaatgtaccgactggtctttagactcctgtgtggaagcaggagggcatgctgcctcatctcctctcccaggcaaaccttg

SEQ ID NO: 503360 - DNA, 120 bp, Artificial Sequence
  ENSG00000163873_52 (sequence is synthesized)
cgtcctgatgttcaggtgttgtcggtgtggctgatatttggcttctggccaatatcctgcatttgtcctagagaccagcctagtgttcaaagtgcagtggggaccacagctgcccaagca

SEQ ID NO: 503361 - DNA, 120 bp, Artificial Sequence
  ENSG00000163873_53 (sequence is synthesized)
tgagctctgtctctcccggggcactgaaaatgatgctacatctgtgaggtgggacggagtggggaggtgttttcagtgaggcagatcttgtgtttttttaagtttaggtctgtcctgcca

SEQ ID NO: 503362 - DNA, 120 bp, Artificial Sequence
  ENSG00000163873_54 (sequence is synthesized)
gtgggcatggagctgagctggggcaggtgcatgcgtgtgtgtgtatgtgtgtgtatgcatgtgtagtgtgtgtgcacacacgcaggcactgagaggtgatgggaagcatgaaagcttgct

SEQ ID NO: 503363 - DNA, 120 bp, Artificial Sequence
  ENSG00000163873_55 (sequence is synthesized)
tggatggagcagaagaaggaacctgcctgagcagatgctggactgtccctgcgtggtgccacatgccagccctgaacagaagaatgtccccactgcatccccaaatgcaagtgcctcctc

SEQ ID NO: 503364 - DNA, 120 bp, Artificial Sequence
  ENSG00000163873_56 (sequence is synthesized)
tccacctgctcaagctggccaagttgaggggcagtggtaagaagacaccaaccccaccgcccctgccgaggccctgggactaaggacagtgagccctcccaatcactctccccttgtcct

SEQ ID NO: 503365 - DNA, 120 bp, Artificial Sequence
  ENSG00000163873_57 (sequence is synthesized)
gctgctggtttctctgctctggacagaagaaaatcctgaaagcgttgtcaatgttcaagtggccccatgctgcaagagtctctcgcgaggggtgacgcccccttggccagtgtgctggac

SEQ ID NO: 503366 - DNA, 120 bp, Artificial Sequence
  ENSG00000163873_58 (sequence is synthesized)
tttgagtgtctgaggggtaagagggccaccccctcctcacagccgagactctatctaacctggaagcacactctggctccacccccaacccctgccatgccctaggccctggaagatggg

SEQ ID NO: 503367 - DNA, 120 bp, Artificial Sequence
  ENSG00000163873_59 (sequence is synthesized)
aatcctggcccaggccagggtaaagggccaaacaggttagaagttgctcccctccaccaggcgtgcactcaccaagaacgatcaaaagctccctttctgcctacttttccaggggtactg

SEQ ID NO: 503368 - DNA, 120 bp, Artificial Sequence
  ENSG00000163873_60 (sequence is synthesized)
ggtgtggggggtgggtcacagctcctgcttcatcactcagcatgaagttggtccctccctgagccactcccagctacatgcacaaacatctgaaagtaggctggcctctctggctcacat

SEQ ID NO: 503369 - DNA, 120 bp, Artificial Sequence
  ENSG00000163873_61 (sequence is synthesized)
ctggagtggtcctgtgtggatacccatctgcaaaggggctagaggtttggacaaacagctgcatggacttatcatctgggatgggcccagcctcatggacagatacaagaaatgagccca

SEQ ID NO: 503370 - DNA, 120 bp, Artificial Sequence
  ENSG00000163873_62 (sequence is synthesized)
actctgtgggcaggtctctggattagacacatctgaaagttgcaggtcaagtggacacatctggaagtggcccggctgctggctgccatggaagggccgtgccctctgtccccatggcag

SEQ ID NO: 503371 - DNA, 120 bp, Artificial Sequence
  ENSG00000163873_63 (sequence is synthesized)
tttaaatcaggccttcccttcagtcctggatttgccctggagtaaaaatttcagagctgaggtcatacgtgagtcacaaaacttttaggtagaaggttaatgttctgtacaatatatata

SEQ ID NO: 503372 - DNA, 120 bp, Artificial Sequence
  ENSG00000163873_64 (sequence is synthesized)
tgaatgtaaaatatatatatatactgtatatatatatatatatgcacagtgtatatatgacctgtagcccatgtgtatacaaccctttcctgcacgtctgcacacggagtgtacagaacc

SEQ ID NO: 503373 - DNA, 120 bp, Artificial Sequence
  ENSG00000163873_65 (sequence is synthesized)
cagccagcacgggtgaggaccagatgagagatgggggctgcagcagcaaagtctgggacggaggtctcagagagccccttggggtggcgaaggccctccacacatcagagctccagaccc

SEQ ID NO: 503374 - DNA, 120 bp, Artificial Sequence
  ENSG00000163873_66 (sequence is synthesized)
tgaagaagagggcagagctacatggtgctgccaggtgagtcctgcaccgccagggcctcctgtgggaggggcaggaatggccaacggacctcatctccatccgagcctgtctgaggcagg

SEQ ID NO: 503375 - DNA, 120 bp, Artificial Sequence
  ENSG00000163873_67 (sequence is synthesized)
acagctgggtgtgtctgagaagcaatgtcatgctagtactcagcccctgtgccaatattacattctagttctggggcaattcatcaggagcagaagggctgggaaagagcaggccactcc

SEQ ID NO: 503376 - DNA, 120 bp, Artificial Sequence
  ENSG00000163873_68 (sequence is synthesized)
ccaggcctgttctcacacctgcctgcagaatcacaggtaggtttcaggctccatctaggataccctagaaggcggggctattctaggtagcaaaagcctctgcctctgattctcacccac

SEQ ID NO: 503377 - DNA, 120 bp, Artificial Sequence
  ENSG00000163873_69 (sequence is synthesized)
atgcagaagcagtcacaacttgcacacaacacagctcacaactagggaaagcacttgttaaagagaatgcccccagggcatggccagcatgccgatacagtgttcccatgcccctgttac

SEQ ID NO: 503378 - DNA, 120 bp, Artificial Sequence
  ENSG00000163873_70 (sequence is synthesized)
tgatcctgtcctcctgccttctagaacagtggacctcacatcacctcccagattgtctccattttatggattgaaactctgaggcctccagacatgaagaagcagccatagattcagtca

SEQ ID NO: 503379 - DNA, 120 bp, Artificial Sequence
  ENSG00000163873_71 (sequence is synthesized)
aatgccagccaagggtttgccttgcctcagacaacctccccagccccatttgacccagagaccagctgtcagggagcgacctcagagccagaggggtgaaagatgagaggcaagaaggta

SEQ ID NO: 503380 - DNA, 120 bp, Artificial Sequence
  ENSG00000163873_72 (sequence is synthesized)
gctcctatcctagcacagcccaggctccatctgtctgcctttctctcccctgcggcatcctggcagggcagttggcagagtgccccctccccaggaggctgcagatctctgtccctggct

SEQ ID NO: 503381 - DNA, 120 bp, Artificial Sequence
  ENSG00000163873_73 (sequence is synthesized)
cacccagatcggtctgttctctgcagttccattcctttagcctctttcgcaggtctgagcatctctggagcatgcaggggaggagatatctgaggtgggcttccgtgcagtcagcagcct

SEQ ID NO: 503382 - DNA, 120 bp, Artificial Sequence
  ENSG00000163873_74 (sequence is synthesized)
gccccagcttcagcctcaggcgtcaggctggtctgcactgaactctgggtctgcctctggggccctgaccaagcacgcctgactccagccccatgaggagcatcctgtcttggttccgta

SEQ ID NO: 503383 - DNA, 120 bp, Artificial Sequence
  ENSG00000163873_75 (sequence is synthesized)
gggatcatgggtcctcttaccactgtgcgccaagcccccagcccacctctgcctgggccgacttcctggttgggcctcccatggtaggggcctcagttcccaggctctgggctgagcccc

SEQ ID NO: 503384 - DNA, 120 bp, Artificial Sequence
  ENSG00000163873_76 (sequence is synthesized)
cagggagcaccatgggcctctgagaccctagacctgtcccaccacccagaccagagtgcctggacgccccccactcccactcaacatggttcccacacactggtctctgggccattcagg

SEQ ID NO: 503385 - DNA, 120 bp, Artificial Sequence
  ENSG00000163873_77 (sequence is synthesized)
ggatgccctttgtggacatgcagaatttctatgaatatagttttttgtaaacattttgtaacaatttgggtttcatagtaactgtgttacttgccaatcattctaggctgatgtaaataa

SEQ ID NO: 503386 - DNA, 120 bp, Artificial Sequence
  ENSG00000163873_78 (sequence is synthesized)
atttccaaacaaatctgattattttcctttttaagacactgtgatatatcaaagtgcacagtttgctgtatgaagtaatatggttttaaattttaaataaaatgtttctagaaaacaggg

SEQ ID NO: 503387 - DNA, 120 bp, Artificial Sequence
  ENSG00000163873_79 (sequence is synthesized)
agagcttggagcctgcacaggatgggaaatggagattcgcgctgatttcactcctgtatgtgccaggcacacagtggtgtctcatctcagcctcacaacagctcaccctgcatccagtcg

SEQ ID NO: 503388 - DNA, 120 bp, Artificial Sequence
  ENSG00000163873_80 (sequence is synthesized)
gccagcaagccctgccactctacctctgtcctgacctggcacttttttccatcgccgttgccccaccccaggccaagccccatcacctcctgcctggattatgccgcagccttcaaactg

SEQ ID NO: 503389 - DNA, 120 bp, Artificial Sequence
  ENSG00000163873_81 (sequence is synthesized)
gccctccagcctccatgcttccccaacaccatccacaattcacacagcaactggtaccttgtttaaaacttaattcaaaccatatcattttcctgcataaaaccctccagggtaattgtt

SEQ ID NO: 503390 - DNA, 120 bp, Artificial Sequence
  ENSG00000163873_82 (sequence is synthesized)
ttagagtcagcaggaagttctcagagagcagctggagcgcagcagcgctgctcgctgccacgggcggaagccgctgcgtttttgtgtctcactcccactcactccccaagtccttgatgt

SEQ ID NO: 503391 - DNA, 120 bp, Artificial Sequence
  ENSG00000163873_83 (sequence is synthesized)
ctgagtaggaaccatgctggatggtggaattaagggggtttgacagcccattgcaacctgagtgaggattcgcctctcccaccccagttcccaggcaaaagcctttcccacaagtcaccc

SEQ ID NO: 503392 - DNA, 120 bp, Artificial Sequence
  ENSG00000163873_84 (sequence is synthesized)
gcccagcaggtgctgggagcctgtacacatgccgcattctatagtggcccttccgagagccgtcagccactgccacaccccctgcctggaatcacaccccatcttctctctattccccaa

SEQ ID NO: 503393 - DNA, 120 bp, Artificial Sequence
  ENSG00000163873_85 (sequence is synthesized)
ctgaatagcaccgccttctcctgacctgtttcaaaccaagaagcaactctgggggcctcccatgggctctctgcacctttgagctcatgcgggggcaggaggacagacccaggctgctga

SEQ ID NO: 503394 - DNA, 120 bp, Artificial Sequence
  ENSG00000163874_0 (sequence is synthesized)
aggactcggccccatggagacgccgccggccgccgctggcgcatggcgggtaggagctgtggcgcggggccttccaggagtctgagctatgagtggcccctgtggagagaagcctgtcct

SEQ ID NO: 503395 - DNA, 120 bp, Artificial Sequence
  ENSG00000163874_1 (sequence is synthesized)
ggaagccagccccaccatgagtctgtgggaatttgaggacagccacagccgtcagggcaccccaaggccgggtcaagagctggccgctgaggaggcctcggccctggaactgcagatgaa

SEQ ID NO: 503396 - DNA, 120 bp, Artificial Sequence
  ENSG00000163874_2 (sequence is synthesized)
ggtggacttcttccggaagctgggctattcatccacggagatccacagcgtcctgcagaagctgggcgtccaggcagacaccaacacggtgctgggtgagctggtgaaacacgggacagc

SEQ ID NO: 503397 - DNA, 120 bp, Artificial Sequence
  ENSG00000163874_3 (sequence is synthesized)
caccgagcgggagcgccagacctcaccggacccctgccctcagctccctctagtcccgcggggtggtggcacccctaaggctcccaacctggagcctccactcccagaagaggaaaagga

SEQ ID NO: 503398 - DNA, 120 bp, Artificial Sequence
  ENSG00000163874_4 (sequence is synthesized)
gggcagcgacctgagaccagtggtcatcgatgggagcaacgtggccatgagccatgggaacaaggaggtcttctcctgccggggcatcctgctggcagtgaactggtttctggagcgggg

SEQ ID NO: 503399 - DNA, 120 bp, Artificial Sequence
  ENSG00000163874_5 (sequence is synthesized)
ccacacagacatcacagtgtttgtgccatcctggaggaaggagcagcctcggcccgacgtgcccatcacagaccagcacatcctgcgggaactggagaagaagaagatcctggtgttcac

SEQ ID NO: 503400 - DNA, 120 bp, Artificial Sequence
  ENSG00000163874_6 (sequence is synthesized)
accatcacgacgcgtgggtggcaagcgggtggtgtgctatgacgacagattcattgtgaagctggcctacgagtctgacgggatcgtggtttccaacgacacataccgtgacctccaagg

SEQ ID NO: 503401 - DNA, 120 bp, Artificial Sequence
  ENSG00000163874_7 (sequence is synthesized)
cgagcggcaggagtggaagcgcttcatcgaggagcggctgctcatgtactccttcgtcaatgacaagtttatgccccctgatgacccactgggccggcacgggcccagcctggacaactt

SEQ ID NO: 503402 - DNA, 120 bp, Artificial Sequence
  ENSG00000163874_8 (sequence is synthesized)
cctgcgtaagaagccactcactttggagcacaggaagcagccgtgtccctatggaaggaaatgcacctatgggatcaagtgccgattcttccacccagagcggccaagctgcccccagcg

SEQ ID NO: 503403 - DNA, 120 bp, Artificial Sequence
  ENSG00000163874_9 (sequence is synthesized)
ctctgtggcagatgagctccgtgccaatgctctcctctcaccccccagagccccaagcaaggacaaaaatggccggcggccttcaccttcatcccagtccagctctctgctaacagagag

SEQ ID NO: 503404 - DNA, 120 bp, Artificial Sequence
  ENSG00000163874_10 (sequence is synthesized)
tgagcagtgcagcctggatgggaagaagctgggggcccaggcatccccagggtcccgccaagagggtctaacacagacctatgccccatcaggcaggagcctcgcacctagcgggggcag

SEQ ID NO: 503405 - DNA, 120 bp, Artificial Sequence
  ENSG00000163874_11 (sequence is synthesized)
ggcccacagactggctcccacagacgctggactcactcccgtacgtctcccaggattgcctggactcgggcattggctccctggagagccagatgtcggaactttggggggttcgaggag

SEQ ID NO: 503406 - DNA, 120 bp, Artificial Sequence
  ENSG00000163874_12 (sequence is synthesized)
gaggccctggtgagccgggcccaccccgagccccttacacgggctacagtccctatggatctgagctcccagccaccgcagccttctctgcctttggccgggccatgggtgctggccact

SEQ ID NO: 503407 - DNA, 120 bp, Artificial Sequence
  ENSG00000163874_13 (sequence is synthesized)
tcagtgtccctgccgactacccacccgcgccccctgcctttccacctcgagagtactggtctgaaccatacccactgcccccacccacatcagtccttcaggagcccccagtgcagagcc

SEQ ID NO: 503408 - DNA, 120 bp, Artificial Sequence
  ENSG00000163874_14 (sequence is synthesized)
caggggctggcaggagcccgtggggcagggcaggcagcctggccaaggagcaggccagcgtgtatactaagctgtgtggtgtgtttcccccgcacctggtggaggctgtgatggggcgct

SEQ ID NO: 503409 - DNA, 120 bp, Artificial Sequence
  ENSG00000163874_15 (sequence is synthesized)
tcccacagctcctggacccccagcagctggctgccgagatcctctcctacaagtcccagcaccccagtgagtaagctgcctgtggctggcaagggcagcacccccagcctccaagggccg

SEQ ID NO: 503410 - DNA, 120 bp, Artificial Sequence
  ENSG00000163874_16 (sequence is synthesized)
tcaggctgggctttgggccattgagcagcccattcccagccctgaggcccaccccagaggctggacagagggaggattcaagtcgggaaggaaacccacaaaccaaagatactgtaggat

SEQ ID NO: 503411 - DNA, 120 bp, Artificial Sequence
  ENSG00000163874_17 (sequence is synthesized)
tggttctggcccatgcagcacctctagctgtctgcctcagtgggtcagaagcgatcaccctgttgatacacattgtatctctgtagtttaaggagacgctgccggtaacggcgtcggtcc

SEQ ID NO: 503412 - DNA, 120 bp, Artificial Sequence
  ENSG00000163874_18 (sequence is synthesized)
gtggctgaggcccaaaccgtcttttctctcagagggtggggagggaggtgggggcagcagaggcctgggctgggtgccctgtgcacgccaccccacttccgccctacccctgggacgttg

SEQ ID NO: 503413 - DNA, 120 bp, Artificial Sequence
  ENSG00000163874_19 (sequence is synthesized)
gccttggctggctagttgggcaccgtgtgcctgccctccaagggcctcctctacgccaatgaggcctcatctgtgctctcgctgggcacgtggcttcatgtcagtaagcaagatgcttct

SEQ ID NO: 503414 - DNA, 120 bp, Artificial Sequence
  ENSG00000163874_20 (sequence is synthesized)
taataacccaccttctgccccactctattccttatcctgctgcccctgtaggggtcaagggccctccgtctacaccctcttcttctcctccatcctttattcagagtcatctcgcccttc

SEQ ID NO: 503415 - DNA, 120 bp, Artificial Sequence
  ENSG00000163874_21 (sequence is synthesized)
cccatgggtgggggaacctgtgtttgtttgtgtgcacatgtaaattttaaatattttaagcagaaagtccttacctcctgtaacacatcaataaagtacaatcattgtgagccctttcaa

SEQ ID NO: 503416 - DNA, 120 bp, Artificial Sequence
  ENSG00000163874_22 (sequence is synthesized)
cggccccttctcagcaattagaagtccctgcatggctcccacctccagagagttctttgcaccctctgcaggtttatgccccctgatgacccactgggccggcacgggcccagcctggac

SEQ ID NO: 503417 - DNA, 120 bp, Artificial Sequence
  ENSG00000163874_23 (sequence is synthesized)
aacttcctgcgtaagaagccactcactttggagcacaggaagcagccgtgtccctatggtatggaacccagcctgccctccccggccctcctcactcctgcccttcctctcacctgtctg

SEQ ID NO: 503418 - DNA, 120 bp, Artificial Sequence
  ENSG00000163874_24 (sequence is synthesized)
ttcaggagatggagcctcagggaaagtcccagcggggcctggccatcctggagctgtgggaactggcactgggaatggaggccttggccttgggccccacctgcagagggccagggcctg

SEQ ID NO: 503419 - DNA, 120 bp, Artificial Sequence
  ENSG00000163874_25 (sequence is synthesized)
agccctggggaaaggggaaggggctggtgactccaaaggggaagggactgctcactaccaccaccaaagccagggcaggggtggggtgtgaccacctccctcctcctgctcaggcctagg

SEQ ID NO: 503420 - DNA, 120 bp, Artificial Sequence
  ENSG00000163875_0 (sequence is synthesized)
gcccgcctcagcccaacatggcgatgcacaacaaggcggcgccgccgcagatcccggacacccggcgggagctggcggagctcgtgaagcggaagcaggagctggcggaaacattggcaa

SEQ ID NO: 503421 - DNA, 120 bp, Artificial Sequence
  ENSG00000163875_1 (sequence is synthesized)
atttggagcgacagatctatgcttttgagggaagctacctggaagacactcagatgtatggcaatattattcgtggctgggatcggtatctgaccaaccaaaaaaactccaatagcaaaa

SEQ ID NO: 503422 - DNA, 120 bp, Artificial Sequence
  ENSG00000163875_2 (sequence is synthesized)
atgatcgaaggaaccggaagtttaaggaagctgagcggctcttcagtaaatcctcggttacctcagcagctgcagtaagtgcattggcaggagttcaggaccagctcattgaaaagaggg

SEQ ID NO: 503423 - DNA, 120 bp, Artificial Sequence
  ENSG00000163875_3 (sequence is synthesized)
agccaggaagtgggacggaaagtgacacttctccagacttccacaatcaggaaaatgagcccagccaggaggaccctgaggatctggatggatctgtgcagggagtgaaacctcagaagg

SEQ ID NO: 503424 - DNA, 120 bp, Artificial Sequence
  ENSG00000163875_4 (sequence is synthesized)
ctgcttcttctacttcctcagggagtcaccacagcagccataaaaagcgaaagaataaaaaccggcacagcccgtctggcatgtttgattatgactttgagattgatctgaagttaaaca

SEQ ID NO: 503425 - DNA, 120 bp, Artificial Sequence
  ENSG00000163875_5 (sequence is synthesized)
aaaaaccacgagctgactattagaagacacattagtgcagaagcttccaggctgtagagccctgcttcccttctctgacctcacaaagataaacatccttcacctgagttcgtggccatc

SEQ ID NO: 503426 - DNA, 120 bp, Artificial Sequence
  ENSG00000163875_6 (sequence is synthesized)
cacctctgctctcccagacccagtgcctgtgactttgagtagtttgttctaaatgtggtgacaaacaagtcatttctgtaagacattgggtcttactttatgtcatttttagtaacagaa

SEQ ID NO: 503427 - DNA, 120 bp, Artificial Sequence
  ENSG00000163875_7 (sequence is synthesized)
ctgcaggaagatgaagacaatgttgtaatcccagcaagttgctaactgtgcgtttctcccttcttagaatgaatgtctcccccaaaactggctggcaccagcttcatctgtgataccctt

SEQ ID NO: 503428 - DNA, 120 bp, Artificial Sequence
  ENSG00000163875_8 (sequence is synthesized)
tgtttttctcttgttgtttttatcttattttctttggggtttttttgtaatgcctttgtacagctcatactttcctgctgacatatctgatcatctctttcatgcagttgccaatattca

SEQ ID NO: 503429 - DNA, 120 bp, Artificial Sequence
  ENSG00000163875_9 (sequence is synthesized)
taactgaaaataatctggtttatcataagtaaaatgggaaacttgcctctgttttttgcaaggggaggtaaagagtgtttagtaattacctatcttaaatctttctgagttggtagtaga

SEQ ID NO: 503430 - DNA, 120 bp, Artificial Sequence
  ENSG00000163875_10 (sequence is synthesized)
ttcatgttcaaggaacaggaaaaatggaaaaacataagtttaaatcagttctttttaaataactttttattcttttgtataaataaaatttcacaggcttcaaattctcatgctttactt

SEQ ID NO: 503431 - DNA, 120 bp, Artificial Sequence
  ENSG00000163875_11 (sequence is synthesized)
ttaaacccgagattgttttttcacttatttattcatatcatgccttatggaaatttctttttctgtattttctctctttgctggtattcacctgattaaatattgctctaaaaatcacca

SEQ ID NO: 503432 - DNA, 120 bp, Artificial Sequence
  ENSG00000163875_12 (sequence is synthesized)
tggcatatggaaagtctcaaaattataccaaaagtgataacttatgtcgttcttaagtggagtgaaaggatagcatcagtgagagccagtgttgcccaccaggtctccctttcttggagg

SEQ ID NO: 503433 - DNA, 120 bp, Artificial Sequence
  ENSG00000163875_13 (sequence is synthesized)
gcttgttggggctgaggaatctgctagtaatcgttacctgcctctagtgctgtggtgaacttgcgacagggtctggctgcacattggaatcacctgagaagctttaaaatactcatgcct

SEQ ID NO: 503434 - DNA, 120 bp, Artificial Sequence
  ENSG00000163875_14 (sequence is synthesized)
ggatcccatccctagagactggggtacagcctagttattgggaatttctttaaaagagttcctgggattctgataagaagccaggttgagaaccactacattagaagactgaatggttta

SEQ ID NO: 503435 - DNA, 120 bp, Artificial Sequence
  ENSG00000163875_15 (sequence is synthesized)
atttacatcctatgttatgattggtctaagggataagatttggggtctaacctttcctttcactctagttagtcatagtccttgacttatgcctatatctttgtaagaaatagtatgttt

SEQ ID NO: 503436 - DNA, 120 bp, Artificial Sequence
  ENSG00000163875_16 (sequence is synthesized)
catttgtgatagtattggtagggctgaatatggatggcatctactgtaaaacaagtctaccttgtcagatgtgcaaaagctttcactcttgttctcaaataaacttttgtgggttttttt

SEQ ID NO: 503437 - DNA, 120 bp, Artificial Sequence
  ENSG00000163875_17 (sequence is synthesized)
tcccatgaccattgctgtgaagggaattgcctagaataaaaactctttaggattgctgcagactctttctgttgctgatggcaagaaagtcattaggtccaagtgaacgggctaatttgc

SEQ ID NO: 503438 - DNA, 120 bp, Artificial Sequence
  ENSG00000163875_18 (sequence is synthesized)
tcaaagggaggaattggtgggcattagagtaaccctcaaggaagactccaggacattcttctcactgtttctagtgtagaatagttttattccataaaaaccttgtttcatatggtgaat

SEQ ID NO: 503439 - DNA, 120 bp, Artificial Sequence
  ENSG00000163875_19 (sequence is synthesized)
atggaatacttttagaagaggaaaaggagaaatagaaatggaatctgtgtaatagtatttgaaaaatgccactggtacttattgggaagctgtaaagtgggataaagtcttctgctggta

SEQ ID NO: 503440 - DNA, 120 bp, Artificial Sequence
  ENSG00000163875_20 (sequence is synthesized)
aggagctggcggtgaggggctaggacaggggttgcacggcatggggctccgcgcccgccccgcctccaggccccaagcccggccgcgctaggccgtttgttactccgggggcgcggcgcg

SEQ ID NO: 503441 - DNA, 120 bp, Artificial Sequence
  ENSG00000163875_21 (sequence is synthesized)
agggggacccagtcaccccgtctggactttggaggctggtggggagcgtgttctttttggtactgggagtagatccgttgaatggaggtttttgatagacagggttgtgatgtgtttggg

SEQ ID NO: 503442 - DNA, 120 bp, Artificial Sequence
  ENSG00000163875_22 (sequence is synthesized)
aacatctagaaggtgacaggcgagggagaagaacacattccggagaattcagaattgtgacaggcacccaaggcccaatgcactctggtggctaagctcttcctgcccccgcgtctcggc

SEQ ID NO: 503443 - DNA, 120 bp, Artificial Sequence
  ENSG00000163875_23 (sequence is synthesized)
ttgggcacccgggaggcccctctcacctgaagctgcccttctaggtttccatagcaactggcagcccggtgtcggcggcctctcttgagcctgcggggaggggagcgagttgacgctgaa

SEQ ID NO: 503444 - DNA, 120 bp, Artificial Sequence
  ENSG00000163875_24 (sequence is synthesized)
aggctgctcacctttccctctcctggtagcgataccttttgtgcgtgggagtggacatcgcccaagttctgcgttagcctgggctcttgactcatggtttccgtgaatcctctaaagtat

SEQ ID NO: 503445 - DNA, 120 bp, Artificial Sequence
  ENSG00000163875_25 (sequence is synthesized)
atgcaaaatttcgcgtgtgtgtgtatttttctggagacatgctttatacattcaggggtccatcacccccaaaggtctagactgtcttagtcctaaacggctcctcctccccgtatcttc

SEQ ID NO: 503446 - DNA, 120 bp, Artificial Sequence
  ENSG00000163875_26 (sequence is synthesized)
catctctccacagggtggtttagtgtgggcaagcttgcgtttacgagtctaatatcaggatttcattttggccagacttaagtgtttgcatttaaaaggtatcattcatgtccttgtttt

SEQ ID NO: 503447 - DNA, 120 bp, Artificial Sequence
  ENSG00000163877_0 (sequence is synthesized)
gtcatttcctccagctagaggagctcaactgatctgttttctttcgcccagccaaaatcacagaatgaaggcggtgaagagcgaacgggagcgagggagccggcgaagacaccgggacgg

SEQ ID NO: 503448 - DNA, 120 bp, Artificial Sequence
  ENSG00000163877_1 (sequence is synthesized)
ggacgtggtgctgccggcgggggtggtggtgaagcaggagcgtctcagcccagaagtcgcacctcccgcccaccgccgtccggaccactccggtggtagcccgtctccgccgaccagcga

SEQ ID NO: 503449 - DNA, 120 bp, Artificial Sequence
  ENSG00000163877_2 (sequence is synthesized)
gccggcccgctcgggccaccgcgggaaccgagcccgaggagttagccggtccccacccaaaaagaaaaacaaggcctcagggagaagaagcaagtctcctcgcagtaagagaaaccgaag

SEQ ID NO: 503450 - DNA, 120 bp, Artificial Sequence
  ENSG00000163877_3 (sequence is synthesized)
tcctcaccactcaacagtcaaagtgaagcaggagcgtgaggatcatccccggagaggacgggaggatcggcagcacagggaaccatcagaacaggaacacaggagagctaggaacagtga

SEQ ID NO: 503451 - DNA, 120 bp, Artificial Sequence
  ENSG00000163877_4 (sequence is synthesized)
ccgggacagacaccggggccattcccaccaaaggagaacgtctaacgagaggcctgggagtgggcagggtcagggacgggatcgagacactcagaacctgcaggctcaggaagaagagcg

SEQ ID NO: 503452 - DNA, 120 bp, Artificial Sequence
  ENSG00000163877_5 (sequence is synthesized)
ggagttttataatgccaggcgacgggagcatcgccagaggaatgacgttggtggtggcggcagtgagtctcaggagttggttcctcggcctggtggcaacaacaaagaaaaagaggtgcc

SEQ ID NO: 503453 - DNA, 120 bp, Artificial Sequence
  ENSG00000163877_6 (sequence is synthesized)
cgctaaagaaaaaccaagctttgaactttctggggcacttcttgaggacaccaacactttccggggtgtagtcattaaatatagtgagcccccagaagcacgtatccccaaaaaacggtg

SEQ ID NO: 503454 - DNA, 120 bp, Artificial Sequence
  ENSG00000163877_7 (sequence is synthesized)
gcgtctctacccatttaaaaatgatgaggtgcttccagtcatgtacatacatcgacagagtgcgtacctactgggtcgacaccgccgcattgcagacattccaattgatcacccgtcttg

SEQ ID NO: 503455 - DNA, 120 bp, Artificial Sequence
  ENSG00000163877_8 (sequence is synthesized)
ttcaaagcagcatgcggtctttcaatatcggcttgtggaatatacccgtgctgatggcacagttggccgaagagtgaagccctacatcattgaccttggctcaggcaatggaaccttctt

SEQ ID NO: 503456 - DNA, 120 bp, Artificial Sequence
  ENSG00000163877_9 (sequence is synthesized)
aaacaacaaacgtattgagccacagagatactatgaactaaaagaaaaggatgtactcaaatttggattcagtagcagagaatacgtcttgctccatgagtcgtcggacacttctgaaat

SEQ ID NO: 503457 - DNA, 120 bp, Artificial Sequence
  ENSG00000163877_10 (sequence is synthesized)
agacaggaaagatgacgaggatgaggaggaggaggaagaagtgtctgacagctagcaaactaagaacccaaactattgatacacggtttccttcttggaagtctttgattgactcagaga

SEQ ID NO: 503458 - DNA, 120 bp, Artificial Sequence
  ENSG00000163877_11 (sequence is synthesized)
gcactatggtggtgggtccagcactatggtgctctctgtaatgcctcttactgccttaagtctttcctctgttgctgaccagattgtgttaccatttgaatacactgactaatgtttgtt

SEQ ID NO: 503459 - DNA, 120 bp, Artificial Sequence
  ENSG00000163877_12 (sequence is synthesized)
aaactttttctgtggcaccttggccacatgcctgcaggcatttgttttcagaacagtctcaccaattacaacacaccgtgttttagtagaagtgttgtggttttagttggtgctttcaga

SEQ ID NO: 503460 - DNA, 120 bp, Artificial Sequence
  ENSG00000163877_13 (sequence is synthesized)
actgctgcctaggaaactataaacccttggttaaggggaaatcatggcttgttctctttgtacagttactttatttatataggtgttaagctttgtggaccaggtgtttttcttttgggg

SEQ ID NO: 503461 - DNA, 120 bp, Artificial Sequence
  ENSG00000163877_14 (sequence is synthesized)
cgaacccctgagcagagaatcttactaggctttggttatcaccaaaacaacctccagtatataccaaagctttgacttgtttgagctcttgagcttagaagttgattttgcacttatttt

SEQ ID NO: 503462 - DNA, 120 bp, Artificial Sequence
  ENSG00000163877_15 (sequence is synthesized)
tttggggggtgggaatgtactgcagtcagtaaacattattgactgtttaacttaaacagatgctttatggcacctgctcaagcccgtgactgtacagaaggatcctggttgctaccagtg

SEQ ID NO: 503463 - DNA, 120 bp, Artificial Sequence
  ENSG00000163877_16 (sequence is synthesized)
ggtgctgattcagcatcacaagtgactgaaattggctgtggatctgttctttgtgaaagaattcctgatttctccatggagcatgtacacaacaattttgatcatattaactgtacttca

SEQ ID NO: 503464 - DNA, 120 bp, Artificial Sequence
  ENSG00000163877_17 (sequence is synthesized)
gttttgcatttttattcaaatgttatctctttttttctttgagaaataaactgtcactgatgtgacagcgttctttctttattctaataacatgtatagatctaaagcaggttgtgttgt

SEQ ID NO: 503465 - DNA, 120 bp, Artificial Sequence
  ENSG00000163877_18 (sequence is synthesized)
atatgtgtaagtagcaaagtatttgctgcttacatatagtgtgtatgtatgtatatatgtaaattgtgtgttaaagagctgatactgattttcatatgacaatgttaggcaaaggcctcc

SEQ ID NO: 503466 - DNA, 120 bp, Artificial Sequence
  ENSG00000163877_19 (sequence is synthesized)
ctgcatttgaagagcaggttttcatttatatgtatttttgggataaaaaaataaaatttgtaaatatagccccatttcaaagagtaatgctttcctagcgtagaggaccttgtgttcata

SEQ ID NO: 503467 - DNA, 120 bp, Artificial Sequence
  ENSG00000163877_20 (sequence is synthesized)
ggtctgtttgctgctaatggagccttctgtcagtacttttgagataaaagtaggtagctgttttagagtgttgtggggcaggttatatcgttggcctccaagtcagtggaatagcagatg

SEQ ID NO: 503468 - DNA, 120 bp, Artificial Sequence
  ENSG00000163877_21 (sequence is synthesized)
gtgacatggaggtgggttgtggggaaaggtggtgaagcagctcaatcagtgttactactaattgttcctcttgggttgagacttaggatactattaaatttgattgttttccattgtttt

SEQ ID NO: 503469 - DNA, 120 bp, Artificial Sequence
  ENSG00000163877_22 (sequence is synthesized)
tatacccatgtgtgctcagggctaaagattggctagtgggaggggcagctgactaatgttcattcagaagaagttaaaagatcctttgaaaagtgaacacttaataaggtcattagatga

SEQ ID NO: 503470 - DNA, 71 bp, Artificial Sequence
  ENSG00000163877_23 (sequence is synthesized)
atcctttgaaaagtgaacacttaataaggtcattagatgaaacgtaagttgggccgggcatgggcagatca

SEQ ID NO: 503471 - DNA, 120 bp, Artificial Sequence
  ENSG00000163877_24 (sequence is synthesized)
agcctgggtgacagcgagactctgtctcagaaaaaaaaaaaaaaggtaagttgaagaatgtgttctacattggccactgtaactgctattttcttcattttggtatgtgccatagatcat

SEQ ID NO: 503472 - DNA, 120 bp, Artificial Sequence
  ENSG00000163877_25 (sequence is synthesized)
ttttcttcattttggtatgtgccatagatcatatatatgtgcttgtctgaaaagtaggtttgtttggatgaacttttctcttgatccagactgacggttttctcttgagggtttaagcac

SEQ ID NO: 503473 - DNA, 120 bp, Artificial Sequence
  ENSG00000163877_26 (sequence is synthesized)
taatctggtatcttactctaggatctccttgttcagtctgtgctgcagtagcactactttgtggtagccttgagttttgctacaaacttcatcctggtgggcactgtgatagatgaccac

SEQ ID NO: 503474 - DNA, 120 bp, Artificial Sequence
  ENSG00000163877_27 (sequence is synthesized)
tttgcctacatttttcagtaagaagtcctaattgtttagtcagtttttattttagtagaggaataacgtcctggattaagaaattctttatgccacatatctgagaaggtgggttttttt

SEQ ID NO: 503475 - DNA, 61 bp, Artificial Sequence
  ENSG00000163877_28 (sequence is synthesized)
agctgggactacaggcacctgtcaccaagcctggctaatttatatatataatttttatttt

SEQ ID NO: 503476 - DNA, 90 bp, Artificial Sequence
  ENSG00000163877_29 (sequence is synthesized)
ggcctggcctgagaaggtgtttttttttttttttggtcttgttttcccttacccctttctttgaagaaagggtgtcaaaagacattacct

SEQ ID NO: 503477 - DNA, 120 bp, Artificial Sequence
  ENSG00000163877_30 (sequence is synthesized)
acccctttctttgaagaaagggtgtcaaaagacattacctgcctctaaagccagatatcaccagcagacttcttaaagtggacataatcctagagctttcattctgtttagaagttcatg

SEQ ID NO: 503478 - DNA, 120 bp, Artificial Sequence
  ENSG00000163877_31 (sequence is synthesized)
ttcatcttagccatttggaacttcttcattctctatcttttctccacggtggctgggcttgtctgcaaatcattgtgtcaaaatcaaactattttcaaaacagccctttgcttctgagcc

SEQ ID NO: 503479 - DNA, 120 bp, Artificial Sequence
  ENSG00000163877_32 (sequence is synthesized)
cctcccctaagtcctctgtgggggtccatgattctgcagaggtatgggacagaatcttcagattttaccccttgagtctcttcctagtcatatcctggttccctcattctaatattgaca

SEQ ID NO: 503480 - DNA, 120 bp, Artificial Sequence
  ENSG00000163877_33 (sequence is synthesized)
aaggatgactcattaagtgcaactggttatgtaactttcaaatactttcattgtgtatgtcaggatctgaggaacaaaatgatgtcatttaatcggaatctaaacgtgacacaaacaacg

SEQ ID NO: 503481 - DNA, 120 bp, Artificial Sequence
  ENSG00000163877_34 (sequence is synthesized)
tgccagcaatacctgcttgtgaaataatgttctgagcccacagtgttcctgggtatgtgagtttatatcaagtgaaaaggctgcttaattgacattaaagttttggaatgtaaagcttca

SEQ ID NO: 503482 - DNA, 120 bp, Artificial Sequence
  ENSG00000163877_35 (sequence is synthesized)
gcccagccaaaatcacagaatgaaggcggtgaagagcgaacgggagcgagggagccggtccccacccaaaaagaaaaacaaggcctcagggagaagaagcaagtctcctcgcagtaagag

SEQ ID NO: 503483 - DNA, 120 bp, Artificial Sequence
  ENSG00000163877_36 (sequence is synthesized)
agtaagagaaaccgaagtcctcaccactcaacagtcaaagtgaagcagtccgttttcatgctgttgataaagacatacccgagacccggcgatttacaaaagaaagaggtttaatggact

SEQ ID NO: 503484 - DNA, 65 bp, Artificial Sequence
  ENSG00000163877_37 (sequence is synthesized)
aggctgattttcattgctatctttttcaagaaatcatggtatgtttctccatttcttcacatctt

SEQ ID NO: 503485 - DNA, 120 bp, Artificial Sequence
  ENSG00000163877_38 (sequence is synthesized)
tcaagaaatcatggtatgtttctccatttcttcacatctttaaaaaacatttattttaatgaatttttacagatttcttcttatatgtctttcatgtttcttaagtttatttctaggtat

SEQ ID NO: 503486 - DNA, 120 bp, Artificial Sequence
  ENSG00000163877_39 (sequence is synthesized)
tgaattttttttttaactatggaagtaggatttaaaaacttactattatattttcacttttggcatgagagaaagctagtttctttctttacatatcttgtacctgactacttaactctt

SEQ ID NO: 503487 - DNA, 120 bp, Artificial Sequence
  ENSG00000163877_40 (sequence is synthesized)
agttctattttctgtatattcttccctgtaagtttgcccatagttacctttgttctgaaaaggagggaattatttttccttctcctttctggactaaatagtctcttgtttttagggctg

SEQ ID NO: 503488 - DNA, 120 bp, Artificial Sequence
  ENSG00000163877_41 (sequence is synthesized)
tggacctggacttgtgctattagggctatagttgaatagcagcatgggatatcatctttgtggccttgcgagggaacataaccaccagacataatcttatttctgtgggaaatgttgttc

SEQ ID NO: 503489 - DNA, 120 bp, Artificial Sequence
  ENSG00000163877_42 (sequence is synthesized)
taaatgccaaagtccaaattacaagactttttgcatgcacttcgttcaaaaagaacaagatttgggctgcctttagattgtgcactgcgtttaaattacagaatctgtttgaattttagg

SEQ ID NO: 503490 - DNA, 120 bp, Artificial Sequence
  ENSG00000163877_43 (sequence is synthesized)
agccttttcctatcacagctaaagaggaatgtgtgtgtgtgttgtgtgtgtgcacacatgtgcacgtacgctcgcctacatctctacttgtacctccgatgggcttttctgaaaactggc

SEQ ID NO: 503491 - DNA, 120 bp, Artificial Sequence
  ENSG00000163879_0 (sequence is synthesized)
ggcggtttccatggtgacggcaaacaaggcccacactggacagggcagctgctgggttgctactctcgcctccgccatgattccgcccgcagactctttgctcaagtacgacaccccagt

SEQ ID NO: 503492 - DNA, 120 bp, Artificial Sequence
  ENSG00000163879_1 (sequence is synthesized)
gctggtgagccggaacacggagaaacggagccccaaggctcggctactgaaagtcagcccccagcagcctggaccttcaggttcagccccacagccacccaagaccaagctcccctcaac

SEQ ID NO: 503493 - DNA, 120 bp, Artificial Sequence
  ENSG00000163879_2 (sequence is synthesized)
tccctgtgtcccagatcctacaaagcaggcagaagaaatcttgaatgccatactacccccaagggagtgggtggaagacacgcagctatggatccagcaggtgtccagcacccctagcac

SEQ ID NO: 503494 - DNA, 120 bp, Artificial Sequence
  ENSG00000163879_3 (sequence is synthesized)
caggatggacgtggtgcacctccaggagcagttagacttaaagctgcagcagcggcaggccagggaaacaggcatctgccctgtccgcagggaactctactcacagtgttttgatgagtt

SEQ ID NO: 503495 - DNA, 120 bp, Artificial Sequence
  ENSG00000163879_4 (sequence is synthesized)
gatccgggaggtcaccatcaactgtgcggagagggggctgctgctgctgcgagtccgggacgagatccgcatgaccatcgctgcctaccagaccctgtacgagagcagcgtggcgtttgg

SEQ ID NO: 503496 - DNA, 120 bp, Artificial Sequence
  ENSG00000163879_5 (sequence is synthesized)
catgaggaaggcactgcaggctgagcaggggaagtcagacatggagaggaaaatcgcagaattggagacggaaaagagagacctggagaggcaagtgaacgagcagaaggcaaaatgtga

SEQ ID NO: 503497 - DNA, 120 bp, Artificial Sequence
  ENSG00000163879_6 (sequence is synthesized)
agccactgagaagcgggagagcgagaggcggcaggtggaggagaagaagcacaatgaggagattcagttcctgaagcgaacaaatcagcagctgaaggcccaactggaaggcattattgc

SEQ ID NO: 503498 - DNA, 120 bp, Artificial Sequence
  ENSG00000163879_7 (sequence is synthesized)
accaaagaagtgataatttccacatgattaatttccaacaagacacttgggagttatttactgtgttcctctggcagccaataaaatcatcataagccctttgtaataaaaagctagttt

SEQ ID NO: 503499 - DNA, 120 bp, Artificial Sequence
  ENSG00000163879_8 (sequence is synthesized)
cctgagtgaacaagccataacctcccctaaacaccacctaggtatttgttagaagtcacactattactccaatgtcatcagacacctaaggtctgccagccaggctcctggctgggcaat

SEQ ID NO: 503500 - DNA, 120 bp, Artificial Sequence
  ENSG00000163879_9 (sequence is synthesized)
ggaagatggtgtggccctgttagtctccgtgtgtggcttactagccagccttgggaactgccaactcaaattctaagaaagccactgctttctcatcatcactctataccaatacttatt

SEQ ID NO: 503501 - DNA, 120 bp, Artificial Sequence
  ENSG00000163879_10 (sequence is synthesized)
tctggccaaatgaatctgcttctctgcccctcaaacttttagttcacaattcatcttctaccttaacttgggcttcttgggcctctggccttccttacttaatgtcttcttttccctact

SEQ ID NO: 503502 - DNA, 120 bp, Artificial Sequence
  ENSG00000163879_11 (sequence is synthesized)
tttctaactcactttggagctttggttttctaatgtattatccccacttgccagtcaactggaccccttcctcctcggtttcagactgcctacattaggaaacaatggcagtcaaaccca

SEQ ID NO: 503503 - DNA, 120 bp, Artificial Sequence
  ENSG00000163879_12 (sequence is synthesized)
tggctttggagaaagtaaatgtttgccagaaaggaatactagtcacagtggcctttgtgagttgtctgcaactcagctcttcccccagcacagatctgttccccttatcctgcagaaaat

SEQ ID NO: 503504 - DNA, 120 bp, Artificial Sequence
  ENSG00000163879_13 (sequence is synthesized)
caagccctgactctgcactccccgaagtagtgatgttaattaacaactgaagaggtaactaaatctcacatgcaggtctaatgactaataattggagtacggctgctagacaactgcatt

SEQ ID NO: 503505 - DNA, 120 bp, Artificial Sequence
  ENSG00000163879_14 (sequence is synthesized)
ttagtatttctcttccattctcctggttttgtagacccagaagattgaatgagtgacataaatctttagttcggggcaagccagggtgggctagggtggtaagctggaggacttcatcct

SEQ ID NO: 503506 - DNA, 120 bp, Artificial Sequence
  ENSG00000163879_15 (sequence is synthesized)
tcagttaggctgcacaagtaacattacctaaaaggcactaacatgctcaggttccccagaaagaggcgtaagaagggcctctccttagcagagcttccacctgccatccgtcttgggttc

SEQ ID NO: 503507 - DNA, 120 bp, Artificial Sequence
  ENSG00000163879_16 (sequence is synthesized)
agtgagcttcaaggctcacaatggaagcactgtcatttccccagaaaagctgtgttccctatgctgaacacaccatacacattctcatctggaatctaaggagcagcttttaccctgatc

SEQ ID NO: 503508 - DNA, 120 bp, Artificial Sequence
  ENSG00000163879_17 (sequence is synthesized)
cagtatcctgaggaattttaagcctccactcaaatgacctgcctgtgttgtcatttccatgggaaagaactctttccacgagatctgctagttccaggcctctaagacaggaacgtatgt

SEQ ID NO: 503509 - DNA, 120 bp, Artificial Sequence
  ENSG00000163879_18 (sequence is synthesized)
gccataagtgggtctacttcacagactcaatgaggcagaaattattgtagttttctcctatttcttctgcacccaactttctccttgtatttcaaaggccaggccatgtacactaacgtc

SEQ ID NO: 503510 - DNA, 120 bp, Artificial Sequence
  ENSG00000163879_19 (sequence is synthesized)
cttgaaatttgcagttctgtatgcttctattccaaatcattcattaccaataaaaacgaaataccaccctttccattttatagacctcatcccctatttctgtcagacagttatatgaca

SEQ ID NO: 503511 - DNA, 120 bp, Artificial Sequence
  ENSG00000163879_20 (sequence is synthesized)
gggtgactgtggaacctcttagttcatccaaagtctacctgaagtgctagactttcagactcttatcactgaaatccttaaggttgaggaggctttatttccctagcactggtgaagggc

SEQ ID NO: 503512 - DNA, 120 bp, Artificial Sequence
  ENSG00000163879_21 (sequence is synthesized)
ttcaactgtcaaacctcagaacaaatgcattagggccttagaaatgtcaatggggcaggaagaaaacacaatttctaactgcctgtttttgtataatttaataaaaaccttttaaacatt

SEQ ID NO: 503513 - DNA, 120 bp, Artificial Sequence
  ENSG00000163879_22 (sequence is synthesized)
cagggtacaggtcaaaatggagtttcttgtgtctttcttttcaacgtagacacagtaacagtctgatctctccttcttttccctacaccagccccgcctcttctacaagtcctccagctg

SEQ ID NO: 503514 - DNA, 120 bp, Artificial Sequence
  ENSG00000163879_23 (sequence is synthesized)
ccctacaccagccccgcctcttctacaagtcctccagctgccaaccactatattcttggcaacttgagttcctcaccccttagcagatgtttggagtaaaacgataacttccatctgttt

SEQ ID NO: 503515 - DNA, 120 bp, Artificial Sequence
  ENSG00000163879_24 (sequence is synthesized)
tttcaaagattttctataataagcatgtgctaattttttagtcagaaagattaatgttcagtatttacatccatccatccatccatcaatatttggcccttggtccagaaaaatattgtg

SEQ ID NO: 503516 - DNA, 120 bp, Artificial Sequence
  ENSG00000163879_25 (sequence is synthesized)
atttgttgttaacccacagacacgagagatttaagatgcacctccttgagtgctggtgtcaaatggctgtctcccagcccagtctcattggctcttatggacgccgatctgcaaaccacc

SEQ ID NO: 503517 - DNA, 120 bp, Artificial Sequence
  ENSG00000163879_26 (sequence is synthesized)
tccaaaccctcaggcagctgcagggtctagcaggcttccctatccgtgtgttattatggtttgccctccaggtcagcatttatggggagatagatgggcaagctctagaccctgccattt

SEQ ID NO: 503518 - DNA, 120 bp, Artificial Sequence
  ENSG00000163879_27 (sequence is synthesized)
ccctcaaaccagtgcagccaagggggcacacaggatgtcccagctgctttaaaacagctgccatctttaaacagaaaaagtcaggttttttcgagtagtaaccagtttttacctaaggca

SEQ ID NO: 503519 - DNA, 120 bp, Artificial Sequence
  ENSG00000163879_28 (sequence is synthesized)
ggaagggaggggacccagtgctgtaaacaaaccagagcctcttgtctcctttgctctggccaacccagtcttgctgactgtgctactcacaagtgccaagttcagaggagtgactgcatg

SEQ ID NO: 503520 - DNA, 120 bp, Artificial Sequence
  ENSG00000163879_29 (sequence is synthesized)
gcaaggctctttgggccactgaaggcaccctccctgaggcccttctctgaggccttgcactttgtctccaagcgagaacaccctaatgtccttcccaagaggaagggtgtttgcagtaga

SEQ ID NO: 503521 - DNA, 120 bp, Artificial Sequence
  ENSG00000163879_30 (sequence is synthesized)
gagtggggtttaccgtgacccttggtcccatctcttctgtaaacctcagggccacatgcttatcattccagcactacattctgacctcctaaggtgctctgctgacagtcacgacacctg

SEQ ID NO: 503522 - DNA, 120 bp, Artificial Sequence
  ENSG00000163879_31 (sequence is synthesized)
gacttgcatcacctcagtgagggacccctggttgagtatgatggccagcctggtggtcttggcagagttgtttccgctgtagacgctccatgccaggcactgacctcccactgggtggca

SEQ ID NO: 503523 - DNA, 120 bp, Artificial Sequence
  ENSG00000163879_32 (sequence is synthesized)
gtatataccctggcaatgtcatgtcccatgtcccttccacccaggctcacaccattccattcacctggcgacatcccaggatgactgggcattctctcctcagatcgcagaattggagac

SEQ ID NO: 503524 - DNA, 120 bp, Artificial Sequence
  ENSG00000163879_33 (sequence is synthesized)
tctgttcctggctggggtttcctcccagtatcacagagctcctagaacttacatatggctggatcctggcagggtggtgggagacctcttctcaatctaccctcatttcctgcatgctgt

SEQ ID NO: 503525 - DNA, 120 bp, Artificial Sequence
  ENSG00000163879_34 (sequence is synthesized)
cacccaatctcatggctttagataccacctatgtgctgatggctcccaaatgtgtatttccagccctgtcttctccactaaactccaggaccatatagtcttctgcttcctcattatctt

SEQ ID NO: 503526 - DNA, 120 bp, Artificial Sequence
  ENSG00000163879_35 (sequence is synthesized)
catgaagatatctaatagacatctcaaactcaatatattcaaactaaatcacaatttcttccttccccaatctgctcatcccccgtattctcctttttactagggactcaaaccaccttt

SEQ ID NO: 503527 - DNA, 80 bp, Artificial Sequence
  ENSG00000163882_0 (sequence is synthesized)
gagaggcggcaaggggcgctgggaaggcgcaagcccgcgccggctccctgcggatgcccgggtcggagaggggcgcccgg

SEQ ID NO: 503528 - DNA, 120 bp, Artificial Sequence
  ENSG00000163882_1 (sequence is synthesized)
gaggggcgggtctactggcacgtggaggggccggcccgggttcgcggttccccgtgcccaggcaggaggggctgcagacgcctgagctccgtaggggttggggctgggggctgcggagct

SEQ ID NO: 503529 - DNA, 120 bp, Artificial Sequence
  ENSG00000163882_2 (sequence is synthesized)
gtctacatcggactcctccgggtcagcccgttaggagccgcctcccctctgcccctccgaagagacgagcggcccagacaggcctgggaaggcccctctgccccgtcaggggtgaaaagc

SEQ ID NO: 503530 - DNA, 120 bp, Artificial Sequence
  ENSG00000163882_3 (sequence is synthesized)
aaagctggaaggattcggagagggttggggccgtcttcctcatccttccttttctcggggctcccgtggcgacgtcatggcaaattcccaaactggacggatccggctcgggttacgtcc

SEQ ID NO: 503531 - DNA, 120 bp, Artificial Sequence
  ENSG00000163882_4 (sequence is synthesized)
acggatccggctcgggttacgtccagcagggccgagccggcccaggccggccccggggtcctcggtgccggctggaggggctgggcacctctggggcggggttctgctccacctgccctc

SEQ ID NO: 503532 - DNA, 120 bp, Artificial Sequence
  ENSG00000163882_5 (sequence is synthesized)
cacgcggaccggcggggtagggctagggcccggcttctctgggccaaggatcaaggtccctgcctgggttaggcccccacgcattccagtcttcggaacccggcctctgaagagggcgca

SEQ ID NO: 503533 - DNA, 120 bp, Artificial Sequence
  ENSG00000163882_6 (sequence is synthesized)
gtagggccccagcggagcgcgagaacccgctctacagcctattgcttccccgccctgggcagagccacctggacatgagacccgccctcaatgccgaagcctctcggaagcaatctttcg

SEQ ID NO: 503534 - DNA, 120 bp, Artificial Sequence
  ENSG00000163882_7 (sequence is synthesized)
acggaagttaagtagccccgagcgggaggctgtggcggaagtggtcgcgttaccgcttgtttgtgcgcatgcgccactctcgtctggccgccgcgctttcaggaggtgcttttggttctc

SEQ ID NO: 503535 - DNA, 120 bp, Artificial Sequence
  ENSG00000163882_8 (sequence is synthesized)
tccggtcttgtccacgctagggggtgcacgtactcccaactgtggtcgcgctctcaccccttctgctgctctcgtggccccctcgcgatggcgggcatcctgtttgaggatattttcgat

SEQ ID NO: 503536 - DNA, 120 bp, Artificial Sequence
  ENSG00000163882_9 (sequence is synthesized)
gtgaaggatattgacccggagggcaagaagtttgaccgagtgtctcgactgcattgtgagagtgaatctttcaagatggatctaatcttagatgtaaacattcaaatttaccctgtagac

SEQ ID NO: 503537 - DNA, 120 bp, Artificial Sequence
  ENSG00000163882_10 (sequence is synthesized)
ttgggtgacaagtttcggttggtcatagctagtaccttgtatgaagatggtaccctggatgatggtgaatacaaccccactgatgataggccttccagggctgaccagtttgagtatgta

SEQ ID NO: 503538 - DNA, 120 bp, Artificial Sequence
  ENSG00000163882_11 (sequence is synthesized)
atgtatggaaaagtgtacaggattgagggagatgaaacttctactgaagcagcaacacgcctctctgcgtacgtgtcctatgggggcctgctcatgaggctgcagggggatgccaacaac

SEQ ID NO: 503539 - DNA, 120 bp, Artificial Sequence
  ENSG00000163882_12 (sequence is synthesized)
ctgcatggattcgaggtggactccagagtttatctcctgatgaagaagctagccttctgaacctcgcctgaagccagcctctctgccaagtcactcaggtcatgggcattgttcaagcct

SEQ ID NO: 503540 - DNA, 120 bp, Artificial Sequence
  ENSG00000163882_13 (sequence is synthesized)
gagtggcagccgctcttgctcacctgttgaggaagggctggctcactgtccaccgtggcggcatctttaactggcctccactcaatgggaaactgactcgcctgtgaaagacacagtggg

SEQ ID NO: 503541 - DNA, 120 bp, Artificial Sequence
  ENSG00000163882_14 (sequence is synthesized)
agagctgaaaatgaatcagaagctttatgtatatgatttttaaattaaactttactttttcagactgcccctcccctttttgtaaaaagtccatttactgtaaaatcgttttttccagtt

SEQ ID NO: 503542 - DNA, 120 bp, Artificial Sequence
  ENSG00000163882_15 (sequence is synthesized)
gaagagctggtatccaagggacagggcagtgccaggctgaaggggcacggaggggatccgtgtccaggagaaggcagtggagggggaacgcgcagcactaagctggagggagccacctgg

SEQ ID NO: 503543 - DNA, 120 bp, Artificial Sequence
  ENSG00000163882_16 (sequence is synthesized)
cttctccccagtgtctcgactgcattgtgagagtgaatctttcaagatggatctaatcttagatgtaaacattcaaatttaccctgtagacttgggtaagtattgaatacagacaataat

SEQ ID NO: 503544 - DNA, 120 bp, Artificial Sequence
  ENSG00000163882_17 (sequence is synthesized)
gatatagaaagactcttctaaaattcctggaataaatgatgatcagcagaatctgagtaaccttaaggaaatttctgcacttaagaattcaaacaggccaggcaccgtggctcacacctg

SEQ ID NO: 503545 - DNA, 120 bp, Artificial Sequence
  ENSG00000163882_18 (sequence is synthesized)
atccacctgcctcggcctcccaaaatgtcgggattacaggcatgagccactgcaccggcctacacctctttattttgtcatctatcaataattttctctttgatgtctctttctttgcct

SEQ ID NO: 503546 - DNA, 120 bp, Artificial Sequence
  ENSG00000163882_19 (sequence is synthesized)
gtctctttctttgcctggagactaagatgtttttcaagacggataccagttcttatacatcttggtcactcccctcagcacagtgcctagcatagaaagagaaaacctttggatgattga

SEQ ID NO: 503547 - DNA, 120 bp, Artificial Sequence
  ENSG00000163882_20 (sequence is synthesized)
ataacttgcccagagtcaggttctcagtcatccaggcaggctttgctgctggagtatctttggttgttttctggggattacgttcgcttgccacagtttttctccccttttccttcttgc

SEQ ID NO: 503548 - DNA, 120 bp, Artificial Sequence
  ENSG00000163882_21 (sequence is synthesized)
atatctggttctgattgagcctgaatttctatgagagcagatgagagaccactggatgtagactgggttagattgagtatcctgttgcatacaatcccacactgtaggatctgccttggc

SEQ ID NO: 503549 - DNA, 80 bp, Artificial Sequence
  ENSG00000163884_0 (sequence is synthesized)
gacccgcgggccggcgggcgatcgagccagcgcaggacccgcggctcggcccccggccgccgccggaccgagagtctagc

SEQ ID NO: 503550 - DNA, 120 bp, Artificial Sequence
  ENSG00000163884_1 (sequence is synthesized)
ggccgcaggaccgccggggcctggccgccggtccggcgtgcgccaagttcagccgccaccggcacggccaggccagcatggtggaccacttacttccagtggacgagaacttctcgtcgc

SEQ ID NO: 503551 - DNA, 120 bp, Artificial Sequence
  ENSG00000163884_2 (sequence is synthesized)
caaaatgcccagttgggtatctgggtgataggctggttggccggcgggcatatcacatgctgccctcacccgtctctgaagatgacagcgatgcctccagcccctgctcctgttccagtc

SEQ ID NO: 503552 - DNA, 120 bp, Artificial Sequence
  ENSG00000163884_3 (sequence is synthesized)
ccgactctcaagccctctgctcctgctatggtggaggcctgggcaccgagagccaggacagcatcttggacttcctattgtcccaggccacgctgggcagtggcgggggcagcggcagta

SEQ ID NO: 503553 - DNA, 120 bp, Artificial Sequence
  ENSG00000163884_4 (sequence is synthesized)
gcattggggccagcagtggccccgtggcctgggggccctggcgaagggcagcggcccctgtgaagggggagcatttctgcttgcccgagtttcctttgggtgatcctgatgacgtcccac

SEQ ID NO: 503554 - DNA, 120 bp, Artificial Sequence
  ENSG00000163884_5 (sequence is synthesized)
ggcccttccagcctaccctggaggagattgaagagtttctggaggagaacatggagcctggagtcaaggaggtccctgagggcaacagcaaggacttggatgcctgcagccagctctcag

SEQ ID NO: 503555 - DNA, 120 bp, Artificial Sequence
  ENSG00000163884_6 (sequence is synthesized)
ctgggccacacaagagccacctccatcctgggtccagcgggagagagcgctgttcccctccaccaggtggtgccagtgcaggaggtgcccagggcccaggtgggggccccacgcctgatg

SEQ ID NO: 503556 - DNA, 120 bp, Artificial Sequence
  ENSG00000163884_7 (sequence is synthesized)
gccccatcccagtgttgctgcagatccagcccgtgcctgtgaagcaggaatcgggcacagggcctgcctcccctgggcaagccccagagaatgtcaaggttgcccagctcctggtcaaca

SEQ ID NO: 503557 - DNA, 120 bp, Artificial Sequence
  ENSG00000163884_8 (sequence is synthesized)
tccaggggcagaccttcgcactcgtgccccaggtggtaccctcctccaacttgaacctgccctccaagtttgtgcgcattgcccctgtgcccattgccgccaagcctgttggatcgggac

SEQ ID NO: 503558 - DNA, 120 bp, Artificial Sequence
  ENSG00000163884_9 (sequence is synthesized)
ccctggggcctggccctgccggtctcctcatgggccagaagttccccaagaacccagccgcagaactcatcaaaatgcacaaatgtactttccctggctgcagcaagatgtacaccaaaa

SEQ ID NO: 503559 - DNA, 120 bp, Artificial Sequence
  ENSG00000163884_10 (sequence is synthesized)
ctgcgccggcacacgggtgagaagcccttcgcctgcacctggccaggctgcggctggaggttctcgcgctctgacgagctgtcgcggcacaggcgctcgcactcaggtgtgaagccgtac

SEQ ID NO: 503560 - DNA, 120 bp, Artificial Sequence
  ENSG00000163884_11 (sequence is synthesized)
cagtgtcctgtgtgcgagaagaagttcgcgcggagcgaccacctctccaagcacatcaaggtgcaccgcttcccgcggagcagccgctccgtgcgctccgtgaactgaaagcgccctgaa

SEQ ID NO: 503561 - DNA, 120 bp, Artificial Sequence
  ENSG00000163884_12 (sequence is synthesized)
ccccagcctgtccgtcaccccggatccccaccccatccccatttttttaagcaataatttatttgcctcctccagagggacatggcaatgttaccagcccaccttctgaagcctgggagg

SEQ ID NO: 503562 - DNA, 120 bp, Artificial Sequence
  ENSG00000163884_13 (sequence is synthesized)
tgtgaacccagggcccgccaaccgctgcctttctcgggagtacttagagcctcgaacccgcgtccctgggggctgggccccaggcgcacggggctggaggcaggccttcgtgccttcgtg

SEQ ID NO: 503563 - DNA, 120 bp, Artificial Sequence
  ENSG00000163884_14 (sequence is synthesized)
ccttcgtgccttcccgcggtggccaggcctctgctgcagccgctggttgcaggcagagttttggggacctggcccttctcccactgggctcccccatcctgggccaaggccagaacttta

SEQ ID NO: 503564 - DNA, 120 bp, Artificial Sequence
  ENSG00000163884_15 (sequence is synthesized)
gtgctaggggaagatgaaatgtgcagttttgaaatgttgggtttccagagagagtcatgctggaggagaaggaagtaggccagaagtccagggctgcactgtggtgtgagggtggctttg

SEQ ID NO: 503565 - DNA, 87 bp, Artificial Sequence
  ENSG00000163884_16 (sequence is synthesized)
cagaagtccagggctgcactgtggtgtgagggtggctttgtctaagatgcctgctcagcatgatcaccagagggtgtgggcaggtcc

SEQ ID NO: 503566 - DNA, 120 bp, Artificial Sequence
  ENSG00000163884_17 (sequence is synthesized)
gaaaagcgtcccccactagggggctggcagtgcatgtgcttgagttaaatgtgcagggcagacagagccagaagggcctgtacccaggggctcgtcccctcctccggtttcccagacaaa

SEQ ID NO: 503567 - DNA, 120 bp, Artificial Sequence
  ENSG00000163884_18 (sequence is synthesized)
tccagacaccagcctttagggtggccttgggaggagagggccaggctgtcctgggtgtgagagaactagatagagcctcccaaccctgatttagaaatgcattccttattttgtctagaa

SEQ ID NO: 503568 - DNA, 120 bp, Artificial Sequence
  ENSG00000163884_19 (sequence is synthesized)
attaataaatgaactagcttgttttgacaggtttatttcacatcctatgaatgtatgtaaataaactgtacataggtccatccacataaaatatcttttaataacatatcaacatttgtg

SEQ ID NO: 503569 - DNA, 120 bp, Artificial Sequence
  ENSG00000163884_20 (sequence is synthesized)
taaatttgaaatttaaaaaaatctatgaagctggtgtacatatgttacaattacgtatattttctttggtccttcataaaaatatatttactttgccaataaaaagaaaaagaactcaca

SEQ ID NO: 503570 - DNA, 120 bp, Artificial Sequence
  ENSG00000163884_21 (sequence is synthesized)
aagcttgataaacacccagcctgccctggtcactgagcagggacaaaggttcacagaggtggccccgtcacagctggacactattgactctccttggcaccagacctagcatgtccttgg

SEQ ID NO: 503571 - DNA, 120 bp, Artificial Sequence
  ENSG00000163884_22 (sequence is synthesized)
cttcagaggatgcagctttcccttctcctctctatcaaagttctctgagcccctgctgggcaccagcggccagtccaggcactggggacgcagcagagacatggagtgcactgtctcagg

SEQ ID NO: 503572 - DNA, 120 bp, Artificial Sequence
  ENSG00000163885_0 (sequence is synthesized)
aagagccctgctcctggagctgagaactgcagcgcggaggcttcggagcgagccggggcagtcggggtcggtgaggatctcctttagaagaggagaagccttgcatcaacctcttgggcc

SEQ ID NO: 503573 - DNA, 120 bp, Artificial Sequence
  ENSG00000163885_1 (sequence is synthesized)
tcagccaagatgtctgagataccgtccactatagtctccaagaacatgaccaatgacaagaacagcctggaatccatgaacatcagctcttcttcaagcactgaagagaacccaaagaaa

SEQ ID NO: 503574 - DNA, 120 bp, Artificial Sequence
  ENSG00000163885_2 (sequence is synthesized)
caggcaagaaaaaacgaagaacatggtcctgacccttcagcgaaccctttccacttatctggggatgtggatttcttcttgctcagagatcaggagcggaataaggctctctccgaacgg

SEQ ID NO: 503575 - DNA, 120 bp, Artificial Sequence
  ENSG00000163885_3 (sequence is synthesized)
cagcagcagaagacgatgcgggtgcaccagaagatgacctactcctcgaaagtgtcggctaagcacaccagcctgcggcggcagctgcagctggaggacaagcaggaggacctggaggcg

SEQ ID NO: 503576 - DNA, 120 bp, Artificial Sequence
  ENSG00000163885_4 (sequence is synthesized)
cgcgccgaggccgagcatcagcgcgccttccgcgactacacgacctggaagctcaccttgaccaaagaaaagaatgtggagcctgagaacatgagtggctacattaagcagaagcggcaa

SEQ ID NO: 503577 - DNA, 120 bp, Artificial Sequence
  ENSG00000163885_5 (sequence is synthesized)
atgttcctcctccagtatgccctggatgtcaagcggagagagatccagcggctggagacgctggcgaccaaagaggaggccaggctggagcgggccgagaaatccctggagaaggacgcc

SEQ ID NO: 503578 - DNA, 120 bp, Artificial Sequence
  ENSG00000163885_6 (sequence is synthesized)
gccttgttcgacgagttcgtcagggagaatgactgcagctccgtgcaggccatgagagcggctgagaaggagaccaaagccaagatagagaagatccttgagatccgggacctcaccacc

SEQ ID NO: 503579 - DNA, 120 bp, Artificial Sequence
  ENSG00000163885_7 (sequence is synthesized)
cagattgttaatatcaaaagtgagatctccagatttgaagacactctgaagcattacaaggtctataaggatttcctatacaagctgtcgcccaaggagtggcttgaagaacaggaaaag

SEQ ID NO: 503580 - DNA, 120 bp, Artificial Sequence
  ENSG00000163885_8 (sequence is synthesized)
caaaggaccagggatcaagggcaaggcgagctccatgtgggccaaagagggtcagggtacaaagaagccctggaggtttctgcagacgatgcggctggggcggagcccgtcttacctgag

SEQ ID NO: 503581 - DNA, 120 bp, Artificial Sequence
  ENSG00000163885_9 (sequence is synthesized)
cagcccccagcaaggcagccagcccagcgagtccagcggtggcgactccagagggtcgaactctcccatcccccccacgcaggaggacaccgacagcgatggggaggaaccacagctgta

SEQ ID NO: 503582 - DNA, 120 bp, Artificial Sequence
  ENSG00000163885_10 (sequence is synthesized)
cttcacggagccccagcagctcctggatgtcttccgagagctggaggagcagaacctgtcgctgatccagaacagccaggagacggagaagaccctggaggagctgagccacaccctgaa

SEQ ID NO: 503583 - DNA, 120 bp, Artificial Sequence
  ENSG00000163885_11 (sequence is synthesized)
acacacccagatccgcatggacagggaggtcaaccagctgaagcagtgggtcaccacaatgatgatgtccatcaccaaggaggaggacacagcagctgagctggagctcaaagcccgagt

SEQ ID NO: 503584 - DNA, 120 bp, Artificial Sequence
  ENSG00000163885_12 (sequence is synthesized)
cttccacttcggcgagtacaagggcgatcagcaggataagctgctagagagcctgaactgcaaggtgctggatgtgtaccggcactgcaccggcacccagcaggaggccaacctgggcac

SEQ ID NO: 503585 - DNA, 120 bp, Artificial Sequence
  ENSG00000163885_13 (sequence is synthesized)
cgtgcagatgctgaccatcattgagcaccagctggatgagctgctagagaacctggagcacgtgccccaggtcaagatcgagcaggccgagagggcaaaggagaaggagcggcgcatcag

SEQ ID NO: 503586 - DNA, 120 bp, Artificial Sequence
  ENSG00000163885_14 (sequence is synthesized)
acttcgagaagagaagctccagatgcaaaagatcctacaggaggagcatctgcagcgggcccgggcgcgcgcccaggctgagatcaagaagaagagaggcaggacactggtatgccgctc

SEQ ID NO: 503587 - DNA, 120 bp, Artificial Sequence
  ENSG00000163885_15 (sequence is synthesized)
acgacccccagcccacaggatcaaacaacagtctgagcacacactgatggacaaggaggaggaggagctgctatttttctttacttaatcttcgcagaccatagctgttctggctgaagg

SEQ ID NO: 503588 - DNA, 120 bp, Artificial Sequence
  ENSG00000163885_16 (sequence is synthesized)
cttagcaaagatgttggcagaggaagcagagactgggctgggtctcgagtggcccaactgagtcctctctgtctcctgtgtgctcccttcctcacctgaataaattcatgtctctctgga

SEQ ID NO: 503589 - DNA, 120 bp, Artificial Sequence
  ENSG00000163885_17 (sequence is synthesized)
gcggtggcgactccagagggtgagctgagggcaagctcagagcccagggtgagtcatttcctgtctccatggattgatggaccctgagagaggtggtccctccaggctcggcaaggccac

SEQ ID NO: 503590 - DNA, 120 bp, Artificial Sequence
  ENSG00000163885_18 (sequence is synthesized)
aggtgtcaaaagcatcaaagcacagaacatcagtcacggtcactacgtgggtgaggtggtctcatatggttatcaggacattttcctgatgacaaatctgaatacatttcatacatatca

SEQ ID NO: 503591 - DNA, 120 bp, Artificial Sequence
  ENSG00000163885_19 (sequence is synthesized)
tagcaattatggctccccatttttctgtcctcatccccattcaggtcctggctagaaggcctgtggctattaagtccagctgggtgaaatttcccaggtggggtgtccagagccttactg

SEQ ID NO: 503592 - DNA, 120 bp, Artificial Sequence
  ENSG00000163885_20 (sequence is synthesized)
caagtgagtgctacagcaagaaaggcgcaagtcagacacagtaaggacttcccacgcggccggactctggccatggagaatgtaacatttcaggcagagccttctctctttttgtggaga

SEQ ID NO: 503593 - DNA, 120 bp, Artificial Sequence
  ENSG00000163885_21 (sequence is synthesized)
agccggtggaaggctcctctgcagacctgccaggcccctcctcagcctgggcttcccgctcctgctcacctccctcttcttccagcagaaaagaatgtggagcctgagaacatgagtggc

SEQ ID NO: 503594 - DNA, 120 bp, Artificial Sequence
  ENSG00000163885_22 (sequence is synthesized)
agcgcggaggcttcggagcgagccggggcagtcggggtcgaggcagcccctcctgactgtgactttggacacctcgctgaatctctgcttcctcccctgcaaaaatgaaaattcattcaa

SEQ ID NO: 503595 - DNA, 120 bp, Artificial Sequence
  ENSG00000163885_23 (sequence is synthesized)
catcacattggattggaggcctaccccgctccagaatggcctcagcttagtgaattacagctgcaaagaccttatttccaaacaagatcacattctgagacagtaggggttgggacttca

SEQ ID NO: 503596 - DNA, 120 bp, Artificial Sequence
  ENSG00000163885_24 (sequence is synthesized)
acatacgaattgggatgacacagttcaacccacaacagaccatgaggaaggtgtcaccgtgaagagaacagcctggaatccatgaacatcagctcttcttcaagcactgaagagaaccca

SEQ ID NO: 503597 - DNA, 120 bp, Artificial Sequence
  ENSG00000163885_25 (sequence is synthesized)
ctcccactgcttcctggagtggccacattgcccttctcagaggagcactttcctcaggtccttctcattccagaatagtcaatagctcaccacttactataaaatcagctggaaacctta

SEQ ID NO: 503598 - DNA, 120 bp, Artificial Sequence
  ENSG00000163885_26 (sequence is synthesized)
agccagcttggttgcccccacgcctcatccattgcttcattcttttattcaacaaatgtgtctgcttcttaaacacatatattgtgtctggcaaggataagctgctagagagcctgaact

SEQ ID NO: 503599 - DNA, 120 bp, Artificial Sequence
  ENSG00000163885_27 (sequence is synthesized)
acgacctggaagctcaccttgaccaaagttgccggagctgaaagtaggtgagtacaatacagcaagatattttgagaaagagaccctttgcctaacttttattacagtatattgttataa

SEQ ID NO: 503600 - DNA, 80 bp, Artificial Sequence
  ENSG00000163888_0 (sequence is synthesized)
cgccgcctgcccagcggcccgggaggcggaggcgcgggggaggaggccccgcttggctcctcagccccggatgctgcatg

SEQ ID NO: 503601 - DNA, 120 bp, Artificial Sequence
  ENSG00000163888_1 (sequence is synthesized)
ggccccgcttggctcctcagccccggatgctgcatgacttcatccttccgccggctcccctgctgaggtagggccggtccggcagcaagcccgccgcccgcgccccgccgcagtcccgct

SEQ ID NO: 503602 - DNA, 120 bp, Artificial Sequence
  ENSG00000163888_2 (sequence is synthesized)
cccgccccgcgcccaccccgcgcccgccatgtccgagatcctgccctacagcgaagacaagatgggccgcttcggcgcagaccccgagggctccgacctctccttcagctgccgcctgca

SEQ ID NO: 503603 - DNA, 120 bp, Artificial Sequence
  ENSG00000163888_3 (sequence is synthesized)
ggacaccaactccttcttcgcgggcaaccaggccaagcgaccccccaagctgggccagatcggccgagccaagcgagtggtgatcgaggatgaccggatagacgacgtgctgaaggggat

SEQ ID NO: 503604 - DNA, 120 bp, Artificial Sequence
  ENSG00000163888_4 (sequence is synthesized)
gacgacgtgctgaaggggatgggggagaagccgccgtccggagtgtagacgcgccggctcgggcggcgggctccgggcccagcctcgcagcggccaggagcgcgggccggcgatgcggct

SEQ ID NO: 503605 - DNA, 120 bp, Artificial Sequence
  ENSG00000163888_5 (sequence is synthesized)
gggccgtgccgccgccgccgccaggcactccggagctgtccgcttcagcaccacggcggccgcggtagcggcggcgcggacccgcccggaacccgccgccgcgctcatgcactttaaaac

SEQ ID NO: 503606 - DNA, 120 bp, Artificial Sequence
  ENSG00000163888_6 (sequence is synthesized)
gaacccgccgccgcgctcatgcactttaaaacctcgggccgcagccccaccccgcacaccggaacggacacggagacccgcggcccccagcccccggcccgccccctcccgcacggctcc

SEQ ID NO: 503607 - DNA, 120 bp, Artificial Sequence
  ENSG00000163888_7 (sequence is synthesized)
ccggccagtctggtctgcagaccgggcggccgccggtgtcggaccgcgcgcggccagggatgtttggctgcgtacttgcatgagctttccacccacttgagcccagtcctccgggccgtt

SEQ ID NO: 503608 - DNA, 120 bp, Artificial Sequence
  ENSG00000163888_8 (sequence is synthesized)
cctcgcccccacccctgtctggcgtgaccccagcctcagcctctttctaagggacttcctcagcacatttgtatttttatatccgactctttgtttactggctctgctcatggttcctgc

SEQ ID NO: 503609 - DNA, 120 bp, Artificial Sequence
  ENSG00000163888_9 (sequence is synthesized)
cctcccctcagtctcggccacgctcttctgcgcctggcagataggatgggtgttgaggctgggatgagacaagcccccgacacggttaccaaccacatggccagtctgcccaggcctgac

SEQ ID NO: 503610 - DNA, 120 bp, Artificial Sequence
  ENSG00000163888_10 (sequence is synthesized)
cccaggaggctttctggcagaccccttctccccaaggtatcatcaccttccaagggcccagatccgattttaccttggacccctgcgtcttgcccctgggaacccaaatggggactgctc

SEQ ID NO: 503611 - DNA, 120 bp, Artificial Sequence
  ENSG00000163888_11 (sequence is synthesized)
tgaacctttggatgacatctgtggccccggagatgttctcaacccaggggtgcccttcgtaaatgttcctccatcctcactgtaccaggagtgtgtgaataaacacagaccccctctgtg

SEQ ID NO: 503612 - DNA, 120 bp, Artificial Sequence
  ENSG00000163898_0 (sequence is synthesized)
accacacctctgagtcgtctgagctcactgtgagcaaaatcccacagtggaaactcttaagcctctgcgaagtaaatcattcttgtgaatgtgacacacgatctctccagtttccatatg

SEQ ID NO: 503613 - DNA, 120 bp, Artificial Sequence
  ENSG00000163898_1 (sequence is synthesized)
ttgagattctacttattcatcagtttgttgtgcttgtcaagatcagacgcagaagaaacatgtccttcattcaccaggctgagctttcacagtgcagtggttggtacgggactaaatgtg

SEQ ID NO: 503614 - DNA, 120 bp, Artificial Sequence
  ENSG00000163898_2 (sequence is synthesized)
aggctgatgctctacacaaggaaaaacctgacctgcgcacaaaccatcaactcctcagcttttgggaacttgaatgtgaccaagaaaaccaccttcattgtccatggattcaggccaaca

SEQ ID NO: 503615 - DNA, 120 bp, Artificial Sequence
  ENSG00000163898_3 (sequence is synthesized)
ggctcccctcctgtttggatggatgacttagtaaagggtttgctctctgttgaagacatgaacgtagttgttgttgattggaatcgaggagctacaactttaatatatacccatgcctct

SEQ ID NO: 503616 - DNA, 120 bp, Artificial Sequence
  ENSG00000163898_4 (sequence is synthesized)
agtaagaccagaaaagtagccatggtcttgaaggaatttattgaccagatgttggcagaaggagcttctcttgatgacatttacatgatcggagtaagtctaggagcccacatatctggg

SEQ ID NO: 503617 - DNA, 120 bp, Artificial Sequence
  ENSG00000163898_5 (sequence is synthesized)
tttgttggagagatgtacgatggatggctggggagaattacaggcctcgaccctgcaggccctttattcaacgggaaacctcaccaagacagattagatcccagtgatgcgcagtttgtt

SEQ ID NO: 503618 - DNA, 120 bp, Artificial Sequence
  ENSG00000163898_6 (sequence is synthesized)
gatgtcatccattccgacactgatgcactgggctacaaggagccattaggaaacatagacttctacccaaatggaggattggatcaacctggctgccccaaaacaatattgggaggattt

SEQ ID NO: 503619 - DNA, 120 bp, Artificial Sequence
  ENSG00000163898_7 (sequence is synthesized)
cagtattttaaatgtgaccaccagaggtctgtatacctgtacctgtcttccctgagagagagctgcaccatcactgcgtatccctgtgactcctaccaggattataggaatggcaagtgt

SEQ ID NO: 503620 - DNA, 120 bp, Artificial Sequence
  ENSG00000163898_8 (sequence is synthesized)
gtcagctgcggcacgtcacaaaaagagtcctgtccccttctgggctattatgctgataattggaaagaccatctaagggggaaagatcctccaatgacgaaggcattctttgacacagct

SEQ ID NO: 503621 - DNA, 120 bp, Artificial Sequence
  ENSG00000163898_9 (sequence is synthesized)
gaggagagcccattctgcatgtatcattactttgtggatattataacatggaacaagaatgtaagaagaggggacattaccatcaaattgagagacaaagctggaaacaccacagaatcc

SEQ ID NO: 503622 - DNA, 120 bp, Artificial Sequence
  ENSG00000163898_10 (sequence is synthesized)
aaaatcaatcatgaacccaccacatttcagaaatatcaccaagtgagtctacttgcaagatttaatcaagatctggataaagtggctgcaatttccttgatgttctctacaggatctcta

SEQ ID NO: 503623 - DNA, 120 bp, Artificial Sequence
  ENSG00000163898_11 (sequence is synthesized)
ataggcccaaggtacaagctcaggattctccgaatgaagttaaggtcccttgcccatccggagaggcctcagctgtgtcggtatgatcttgtcctgatggaaaacgttgaaacagtcttc

SEQ ID NO: 503624 - DNA, 120 bp, Artificial Sequence
  ENSG00000163898_12 (sequence is synthesized)
caacctattctttgcccagagttgcagttgtaactgttgccaggacacatggccataaataatagaaagaaagctacaaccacaggctgtttgaaagcttcacctcacctttctgcaagg

SEQ ID NO: 503625 - DNA, 120 bp, Artificial Sequence
  ENSG00000163898_13 (sequence is synthesized)
cagaaaaagtatgaaaaaaaccaaggcttttttcagtagcgtcctatggatgtcacattgtacatcaaacaaccttgtgattataaaacgatcctgggaaggagcccctaactagggcaa

SEQ ID NO: 503626 - DNA, 120 bp, Artificial Sequence
  ENSG00000163898_14 (sequence is synthesized)
gtcagaaatagccaggctcgcagcagcgcagcgctgtgtctgctgtgtcctggggcctcccttgttccgacctgtcaattctgctgcctgtcacgcgggtggttctgcccatcgcggctg

SEQ ID NO: 503627 - DNA, 120 bp, Artificial Sequence
  ENSG00000163898_15 (sequence is synthesized)
cgggtcaagcatcttcaagggaaggacggactggaggcctcaccgtggactcaactctgcattctccgtgccacattcctccagttcccacacgtagaagggaacgaaactgacgtctac

SEQ ID NO: 503628 - DNA, 120 bp, Artificial Sequence
  ENSG00000163898_16 (sequence is synthesized)
gaagggttttttgaaatcccataggtgccacatctatgagatgtttgataaatgtgaatatgcttttacatttgggcttatctaatttgcaataagagagcctctctctatcaacaccag

SEQ ID NO: 503629 - DNA, 120 bp, Artificial Sequence
  ENSG00000163898_17 (sequence is synthesized)
cttctctctcgggctgtttgctcagggaaggcaagaaagccacgtgctggccctctgccttctctaaagtgctgttggagcatggaggagctggaggagatggggatggactgacagcta

SEQ ID NO: 503630 - DNA, 120 bp, Artificial Sequence
  ENSG00000163898_18 (sequence is synthesized)
agagggcggctgctgggactagatagtggatgaagaaagaaggacgaggaagccgtggggcagcctcttcacatggggacaggggatggagcatgaggcaagggaaggaaaagcagagct

SEQ ID NO: 503631 - DNA, 120 bp, Artificial Sequence
  ENSG00000163898_19 (sequence is synthesized)
tatttttcacctaaggtggagaaggatcactttacaggcaacgctcattttaagcaacccttaagaaatgtttatgtttctttattaccaatgtaatctatgattattgaaggaaattta

SEQ ID NO: 503632 - DNA, 120 bp, Artificial Sequence
  ENSG00000163898_20 (sequence is synthesized)
gaaaatgcgtagatacaaaattaaaaaaaaatactgtccacgatcctattagaggtaattaatgttagccttttggaacaaggctgtcacctattttgccaacacgtgaattcaaaacat

SEQ ID NO: 503633 - DNA, 120 bp, Artificial Sequence
  ENSG00000163898_21 (sequence is synthesized)
gaaccggtttgcttttggagaatctgaagactccagtttgaggaatcctttgcttccctggaggtagatgctgtctgcaaatctagaatgacagcaggagtccagtcaagaggtcctgtc

SEQ ID NO: 503634 - DNA, 120 bp, Artificial Sequence
  ENSG00000163898_22 (sequence is synthesized)
aggccaaggccagaaagaagggaggacaatccctggggccagatgcccagtgtgaggggaggcatgatctgtcccatggctgtggccactgcaggaaggtctgtgaaaaggaggtgacag

SEQ ID NO: 503635 - DNA, 120 bp, Artificial Sequence
  ENSG00000163898_23 (sequence is synthesized)
gcccagtcacctcctcttcacccaagtgattgctccttcaactgctatctgtgaaaatagcctttgttatgaagaaattgactctctctctctttttttttttttggagttgcctaggct

SEQ ID NO: 503636 - DNA, 120 bp, Artificial Sequence
  ENSG00000163898_24 (sequence is synthesized)
cacacccggccaaaaatggattctctatgtcataaattaaagaaatctataaatgtattcctgtgtggcacatcttcttacagatttacatttgcagcaaatacagagtctgttttattt

SEQ ID NO: 503637 - DNA, 120 bp, Artificial Sequence
  ENSG00000163898_25 (sequence is synthesized)
aagtgagggatgactgaactctgagtggaacaagctcttggacatgttaccatccttcctcctccttctcacatttcctcagcaattgtggatagagagatcagtgtgctgtaggccctg

SEQ ID NO: 503638 - DNA, 76 bp, Artificial Sequence
  ENSG00000163898_26 (sequence is synthesized)
aggctggtttcaccatcttggccttgaactcctgaccttgtgatccactggccttggcctctcaaagttctgggat

SEQ ID NO: 503639 - DNA, 120 bp, Artificial Sequence
  ENSG00000163898_27 (sequence is synthesized)
aagttctgggattacaggtgtgagccatcgtacccggcagccctggtttcttcttagttttattggtctgtgttttgatcagcacagtcacttttttgttctctttcctggtaagcaggg

SEQ ID NO: 503640 - DNA, 120 bp, Artificial Sequence
  ENSG00000163898_28 (sequence is synthesized)
ctctttcctggtaagcagggagtcaaaacaatagcaagaaaatgccagaaatagaatttctactactttgtaaactctaggctcgtgggtctcctagctctcagtacctggctcactgta

SEQ ID NO: 503641 - DNA, 120 bp, Artificial Sequence
  ENSG00000163898_29 (sequence is synthesized)
ggatgggtagatgggtgaatgaatggataaagaaaggaagtttgttcaccggagaggagatgaatttcagtaagtttcatgtaacagtgatcaggagaaataaaggcagttataactgtg

SEQ ID NO: 503642 - DNA, 120 bp, Artificial Sequence
  ENSG00000163898_30 (sequence is synthesized)
attcttgtgaatgtgacacacgatctctccagtttccatatgttgagattctacttattcatcagtttgttgtgcttgtcaagatcagatgcctctttggatatgaatgaggagtctcct

SEQ ID NO: 503643 - DNA, 120 bp, Artificial Sequence
  ENSG00000163900_0 (sequence is synthesized)
agtccgcccgccgctgcgtcccggagtgcaagtgagcttctcggctgccccgcgggccggggtgcggagccgacatgcgcccgcttctcggcctccttctggtcttcgccggctgcacct

SEQ ID NO: 503644 - DNA, 120 bp, Artificial Sequence
  ENSG00000163900_1 (sequence is synthesized)
tcgccttgtacttgctgtcgacgcgactgccccgcgggcggagactgggctccaccgaggaggctggaggcaggtcgctgtggttcccctccgacctggcagagctgcgggagctctctg

SEQ ID NO: 503645 - DNA, 120 bp, Artificial Sequence
  ENSG00000163900_2 (sequence is synthesized)
aggtccttcgagagtaccggaaggagcaccaggcctacgtgttcctgctcttctgcggcgcctacctctacaaacagggctttgccatccccggctccagcttcctgaatgttttagctg

SEQ ID NO: 503646 - DNA, 120 bp, Artificial Sequence
  ENSG00000163900_3 (sequence is synthesized)
gtgccttgtttgggccatggctggggcttctgctgtgctgtgtgttgacctcggtgggtgccacatgctgctacctgctctccagtatttttggcaaacagttggtggtgtcctactttc

SEQ ID NO: 503647 - DNA, 120 bp, Artificial Sequence
  ENSG00000163900_4 (sequence is synthesized)
ctgataaagtggccctgctgcagagaaaggtggaggagaacagaaacagcttgttttttttcttattgtttttgagacttttccccatgacaccaaactggttcttgaacctctcggccc

SEQ ID NO: 503648 - DNA, 120 bp, Artificial Sequence
  ENSG00000163900_5 (sequence is synthesized)
caattctgaacattcccatcgtgcagttcttcttctcagttcttatcggtttgatcccatataatttcatctgtgtgcagacagggtccatcctgtcaaccctaacctctctggatgctc

SEQ ID NO: 503649 - DNA, 120 bp, Artificial Sequence
  ENSG00000163900_6 (sequence is synthesized)
ttttctcctgggacactgtctttaagctgttggccattgccatggtggcattaattcctggaaccctcattaaaaaatttagtcagaaacatctgcaattgaatgaaacaagtactgcta

SEQ ID NO: 503650 - DNA, 120 bp, Artificial Sequence
  ENSG00000163900_7 (sequence is synthesized)
atcatatacacagtagaaaagacacatgatctggattttctgtttgccacatccctggactcagttgcttatttgtgtaatggatgtggtcctctaaagcccctcattgtttttgattgc

SEQ ID NO: 503651 - DNA, 120 bp, Artificial Sequence
  ENSG00000163900_8 (sequence is synthesized)
cttctataggtgatgtggacactgtgcatcaatgtgcagtgtcttttcagaaaggacactctgctcttgaaggtgtattacatcaggttttcaaaccagccctggtgtagcagacactgc

SEQ ID NO: 503652 - DNA, 64 bp, Artificial Sequence
  ENSG00000163900_9 (sequence is synthesized)
catcaggttttcaaaccagccctggtgtagcagacactgcaacagatgcctcctagaaaatgct

SEQ ID NO: 503653 - DNA, 120 bp, Artificial Sequence
  ENSG00000163900_10 (sequence is synthesized)
aaaaaaaaagagaaaaaaagaaaatgctgtttgtattttgtggtctaataaggagttcgggatagcctgttgtatttgcctcatgccagcccctgagctgccttgggagaagatgctgat

SEQ ID NO: 503654 - DNA, 120 bp, Artificial Sequence
  ENSG00000163900_11 (sequence is synthesized)
gccagcccctgagctgccttgggagaagatgctgattgtccttgtccagagtactgcttttgcagagtgacaggctgctgggacagatgtcctcctgttgcatctttgtggatgtttagt

SEQ ID NO: 503655 - DNA, 120 bp, Artificial Sequence
  ENSG00000163900_12 (sequence is synthesized)
accaatgatgacacgggaactcacatcactgacaccgctcttcatcttctgttagtctcttgaagagcatttttttgtacttctttgctgatgacctacctcttcataagccaagtgaaa

SEQ ID NO: 503656 - DNA, 120 bp, Artificial Sequence
  ENSG00000163900_13 (sequence is synthesized)
caagttgacgaactgcctaggacttccacgtgttgctcacatacatgatgatttctgtcacgctcttgtgttcagacacactgacattaccatgtatgtcagacctccttatgatcgcat

SEQ ID NO: 503657 - DNA, 120 bp, Artificial Sequence
  ENSG00000163900_14 (sequence is synthesized)
gtcctgacagttaagctgattgcaaacagactattaaatatgaatggagcaaacgctgtatgtcatggatatgttctggagaaattcttacccatctggatggggcagggcccttgactc

SEQ ID NO: 503658 - DNA, 120 bp, Artificial Sequence
  ENSG00000163900_15 (sequence is synthesized)
acctgaatcatgaccaggcaaacattttatctgtcctttctgcaggaatccgttctgtgtcatgctaggagaatgggttcagtatatggggccatcaggcagtataccctctgaatgttt

SEQ ID NO: 503659 - DNA, 120 bp, Artificial Sequence
  ENSG00000163900_16 (sequence is synthesized)
ttcattgttgtatttgcttagagtaactaaacaattgtatcttttaatttatcttttaattcaaagaggaaaccttggcttctgataactttgttgtgttgtatcttaatggcctatagc

SEQ ID NO: 503660 - DNA, 120 bp, Artificial Sequence
  ENSG00000163900_17 (sequence is synthesized)
tgtcattacttcctgtagctgcagtacagaattgttacagacctggattaatgcttccaaagacagaaggaccttggcacctaaactgaccagccctgtgatcctgcaccccacaggagt

SEQ ID NO: 503661 - DNA, 120 bp, Artificial Sequence
  ENSG00000163900_18 (sequence is synthesized)
aactcatcaggacttaccagactgctgcttttgggcatcatctgctgggttgatgatttggtttggccaagagtcttgccaagactttaatctatgcctcttgttctacatgaattcttg

SEQ ID NO: 503662 - DNA, 120 bp, Artificial Sequence
  ENSG00000163900_19 (sequence is synthesized)
ggaattactcacgttccataggaagagtgcatccccaggtgatggtttttggttatggtatgatcctttcacaccgaggatttcattgtttaaaacgtgtttctttaaaagaagccttga

SEQ ID NO: 503663 - DNA, 120 bp, Artificial Sequence
  ENSG00000163900_20 (sequence is synthesized)
taacgagagtgggggaaggaggcagcagactttgaagactgtggcctttggtgttctggagtagggggagggaaggagaaacatgttttccacatcatcgcaagtgtgtgccctttgccc

SEQ ID NO: 503664 - DNA, 120 bp, Artificial Sequence
  ENSG00000163900_21 (sequence is synthesized)
cttttcaggatccttagagttgcctccctccctccaccccgacagttttgcaataatgtgccttatcagttgtgagtttacaggtgaagcaatttcccaaataaatggatgtaagtgttc

SEQ ID NO: 503665 - DNA, 120 bp, Artificial Sequence
  ENSG00000163900_22 (sequence is synthesized)
ctgaacattcccatcgtgcagttcttcttctcagttcttatcgaggcaaggtcttgctatgttgctcagactgatcttgaactcctgaccctaaagtgatcctcctgcctcagcctccca

SEQ ID NO: 503666 - DNA, 120 bp, Artificial Sequence
  ENSG00000163900_23 (sequence is synthesized)
aagtgctgggattgcagcttgcccagagacatctgagtcttcacacggcgcacggcacactccttgtcagagagcccatccgagtgtgaggatatgtcaatgggaatctctggcgtctgg

SEQ ID NO: 503667 - DNA, 120 bp, Artificial Sequence
  ENSG00000163900_24 (sequence is synthesized)
gacagcaggtcgtctagcttctctgccaagcggtcttcaagtttatcagctaactcatcaggactgtttgagtggtcactggtatttccctcttctccatcagacacagagaaattctca

SEQ ID NO: 503668 - DNA, 120 bp, Artificial Sequence
  ENSG00000163900_25 (sequence is synthesized)
gagctaaaggttgaatatgactggcagctgctgatacagcgatggggcctagaaccaagaagaaccaggagaacttagtcagaggaacaactgcttttctttccttatctgtcactcata

SEQ ID NO: 503669 - DNA, 120 bp, Artificial Sequence
  ENSG00000163900_26 (sequence is synthesized)
agaggtgatggctctattaaagtgtccagagagaactcatctcacaccaagggcataggagcagccacacttaagatcaactgtccttaaccacagcatcatgatacgctggattaccca

SEQ ID NO: 503670 - DNA, 120 bp, Artificial Sequence
  ENSG00000163900_27 (sequence is synthesized)
agcttcctggtcagtgtcctgccctccctccaaccctgtttccttatctgtaaaatttggatactcccctgtaacctcatgggattgttgtgtggggatgattaaaagtgacagtgggtg

SEQ ID NO: 503671 - DNA, 120 bp, Artificial Sequence
  ENSG00000163900_28 (sequence is synthesized)
tatcggggctggcacacagtggccctcagcacttacggagggattgagcaccgaagtgggagacactgacagcttccttttgtactgcttccctctcccaccccagcctgtttctctcct

SEQ ID NO: 503672 - DNA, 120 bp, Artificial Sequence
  ENSG00000163900_29 (sequence is synthesized)
ctaggctgaggctggacctgctcaaacagtttccttgtcggaaactagaagaaaagcaaacatgtccaagagaggcaggggaggtgtgtggggctcggggtcaggggctgactccttgag

SEQ ID NO: 503673 - DNA, 120 bp, Artificial Sequence
  ENSG00000163900_30 (sequence is synthesized)
gctgccctgtgtctgtcttctgtcttgaactgatccctcttcagggcagagagccagctgctgcttggtgggggctccacatccagacctgagggtgaaccctgactctgcctgctgtgc

SEQ ID NO: 503674 - DNA, 120 bp, Artificial Sequence
  ENSG00000163900_31 (sequence is synthesized)
tcttggggaggatacttaatctctcacctgtagaatggggcaaggatggcatgactcagggatgtagtgaggattacacaggacatgtagtcaagcacttaacacagtgcttagcggctc

SEQ ID NO: 503675 - DNA, 120 bp, Artificial Sequence
  ENSG00000163900_32 (sequence is synthesized)
cccagcttcccacttccaaggcttccttttactttctctcttggatcccatgttttgtcaggatgatgtctaccaaccaaaatgcatttaggaagtattggttcacttttccctttttct

SEQ ID NO: 503676 - DNA, 120 bp, Artificial Sequence
  ENSG00000163900_33 (sequence is synthesized)
taaaccaagacatcttcaaatgtctgctagagctctggtcaacatggaaccccggtattaacatactgcatagatgtaattccagcaaaaagcaaagaaacaagacatcttacatagctt

SEQ ID NO: 503677 - DNA, 120 bp, Artificial Sequence
  ENSG00000163900_34 (sequence is synthesized)
gtgtggtcttaccaagggaaaattcatggtttgtgttcatcttttgaaatagtaaaaataactcgtgagtttcatttctactttcttggagccccagtcattgcagaatctaccacagcc

SEQ ID NO: 503678 - DNA, 120 bp, Artificial Sequence
  ENSG00000163900_35 (sequence is synthesized)
acagatcccatttcattctctcctgccccctgaggcttttatccttatcctcattttcaaggtgaagagactgacggcaggtgtagttcccagccttttcataatttttcattcacctct

SEQ ID NO: 503679 - DNA, 60 bp, Artificial Sequence
  ENSG00000163900_36 (sequence is synthesized)
gtgtagttcccagccttttcataatttttcattcacctctttaaatggcaattgggacct

SEQ ID NO: 503680 - DNA, 87 bp, Artificial Sequence
  ENSG00000163900_37 (sequence is synthesized)
tccgggagtttgaacacaaaaaattttaaaaagtgggtgaatgtggtggtgtgtgcctacagtcctagctgcttgggaggctgaggc

SEQ ID NO: 503681 - DNA, 120 bp, Artificial Sequence
  ENSG00000163900_38 (sequence is synthesized)
agcctgggtgacagagcgagatcctgtttcttaaaaataaataaataacgcaattgggttttagctggaaaaaagcagtgaaggaggagggaacctatgactctcaggctccaagatgac

SEQ ID NO: 503682 - DNA, 120 bp, Artificial Sequence
  ENSG00000163900_39 (sequence is synthesized)
aaggtaaggggaggggtcacatctgagagctgggaccccagacagtcgctacgtgcatggccttgagagaagcgagtggcagggatttcccacagtactcttccacgctgtttcaggagg

SEQ ID NO: 503683 - DNA, 120 bp, Artificial Sequence
  ENSG00000163900_40 (sequence is synthesized)
tcctaggggttcttttgatgtcttcaggagacatagacctgggatcaaatcccagctccatcattaccagctctgtgactttgggcaagttcttgacttctctgatcctcagcatgtcta

SEQ ID NO: 503684 - DNA, 120 bp, Artificial Sequence
  ENSG00000163900_41 (sequence is synthesized)
ttttaaaatgaggaaaacagtctttccctggagggttgttggaagaattgggaacagattatgtaaagtgtctagaacagtgcctggcaccagcaggttttcaacacctggagacccttt

SEQ ID NO: 503685 - DNA, 120 bp, Artificial Sequence
  ENSG00000163900_42 (sequence is synthesized)
ggccacgtgagcatgtgcctgcttctgagaacacaggctcacaaagtgtgacttcaagccttatgatctaaagaaatgattcctgatttcagatctgctcaggcttcaacatgaaaaccc

SEQ ID NO: 503686 - DNA, 120 bp, Artificial Sequence
  ENSG00000163900_43 (sequence is synthesized)
ataaaaatacttttggactaaataaagattgtccattgcatggctgtatgcactaggcactgggattagaagagatggtctgtgtaaagtatacaaattggcccatagtaagtactcagt

SEQ ID NO: 503687 - DNA, 120 bp, Artificial Sequence
  ENSG00000163900_44 (sequence is synthesized)
aaatgctagcaggaagagcagggttggaatgagggtgtgtgtccatgagttttgagtggggacagaagaaaggagcagagcaagggacttcctgtctggtttttggcccctgttttgatt

SEQ ID NO: 503688 - DNA, 120 bp, Artificial Sequence
  ENSG00000163900_45 (sequence is synthesized)
aagttctgccttaggaattgctggcatcagtgtggttccttcctgccttttgacaattgcacaacctgcagcaagctacttaccctcaatggaccacctggctaggaatagagcagtgtt

SEQ ID NO: 503689 - DNA, 120 bp, Artificial Sequence
  ENSG00000163900_46 (sequence is synthesized)
tctcaaagtgtgggctttgggccaccttcatcagattgttagggtcagggggcttgttgagaatctagatttggggcctactccagacctactgaatcagaatcttgggagtggaatctg

SEQ ID NO: 503690 - DNA, 120 bp, Artificial Sequence
  ENSG00000163900_47 (sequence is synthesized)
ggaatatgcattttaatccagttcctagtcagtcattttcaaactgcaaacccagtcattctcaaactgcaaacctattaagaatcgcctgcaaacctattaaaaatcacttggaggccg

SEQ ID NO: 503691 - DNA, 82 bp, Artificial Sequence
  ENSG00000163900_48 (sequence is synthesized)
catcacctgtggagattttaatccctaagctaaggctacaccacacatcaactaaatcatctctggggtaggactcagggat

SEQ ID NO: 503692 - DNA, 120 bp, Artificial Sequence
  ENSG00000163900_49 (sequence is synthesized)
acacatcaactaaatcatctctggggtaggactcagggatcaggatcttttaacattttccaggtgatgcaagtagttagtccctaaaagggattccgctggatcctgagttttgcagtc

SEQ ID NO: 503693 - DNA, 120 bp, Artificial Sequence
  ENSG00000163900_50 (sequence is synthesized)
tactgaattagacgatatctaaagtttctccttgcctttgacaattatatgacctgcagcgagctacttagtctgaacgggctactcgtccagataaggggctgggactagagcagtgtt

SEQ ID NO: 503694 - DNA, 120 bp, Artificial Sequence
  ENSG00000163900_51 (sequence is synthesized)
tcttgaagtatgggccttggaccacctttatcagagtggtaaagtgctaacatcctataaaatcagtgtttgctactttctccatactggaagaaaaccaccctccttaagcctaaggca

SEQ ID NO: 503695 - DNA, 120 bp, Artificial Sequence
  ENSG00000163900_52 (sequence is synthesized)
aggatctcttctcttaaacctcccttagatcctagagggaaagacgattcagggcttctaggtcaaacagagcaaatctgtggttgagcagctgctattcataggagatacctgagagaa

SEQ ID NO: 503696 - DNA, 120 bp, Artificial Sequence
  ENSG00000163900_53 (sequence is synthesized)
atggagatcttaaatagaagcaagatctaccacggccaattttggtcatattggctttcagacaaagtgcctcaggccctcagctagtgggggtttgctgcttctaattacctaggtggc

SEQ ID NO: 503697 - DNA, 120 bp, Artificial Sequence
  ENSG00000163900_54 (sequence is synthesized)
atgaggcttggcaagattctggagaccaggcttcctgtcctctgtctcacaagctgtgtgaccctgaggggtctgggatcttcatctcctgtatacttcctctcctatagaagagaaatg

SEQ ID NO: 503698 - DNA, 120 bp, Artificial Sequence
  ENSG00000163900_55 (sequence is synthesized)
gactatcagagtgttccaaaccaatcggaatctcagggtgggagtggagaaggggcttttaaaatacaggttcctgggcactaccccagaaccaagtacccagaatttctggggtggagc

SEQ ID NO: 503699 - DNA, 120 bp, Artificial Sequence
  ENSG00000163900_56 (sequence is synthesized)
ccaaggatgtggttttttaacaatgtcaccagctgattgttctgcagccagcctgttcagccagccagacttttggaatccagtggatttgatgacatctttgagacagtacagaatgtg

SEQ ID NO: 503700 - DNA, 120 bp, Artificial Sequence
  ENSG00000163900_57 (sequence is synthesized)
aatagtacttcttttaaaaaactgtttgtcaacaatggcacttctctctttactttggctgttgggtactcagaaccaaatttggggcccacttttggcaaacaggtgaaccttatgcat

SEQ ID NO: 503701 - DNA, 120 bp, Artificial Sequence
  ENSG00000163900_58 (sequence is synthesized)
ttttggcaaacaggtgaaccttatgcatttttttactaactgtactccctgatgtcttgtattcttctgcacgcattttgcttttcctatttaaaattttatttatttatttatttattt

SEQ ID NO: 503702 - DNA, 120 bp, Artificial Sequence
  ENSG00000163900_59 (sequence is synthesized)
tgatttggtttggccaagagtcttgccaagactttaatctatgcctcttgttctacatgaattcttgggaattactcacgttccataggaagagtgcatccccagagagggagccggcat

SEQ ID NO: 503703 - DNA, 120 bp, Artificial Sequence
  ENSG00000163900_60 (sequence is synthesized)
cagaaaacaacactgggagctggggactgacagtacaggagaccagaggggagccaggaagtggtcagcaggcagaaaggaaatgagctacaaggaaatggcacttgagtatgaaagatc

SEQ ID NO: 503704 - DNA, 120 bp, Artificial Sequence
  ENSG00000163900_61 (sequence is synthesized)
aacacgttgggtcaaggtagcacatttgccaagaggaagcacatgcccttgaagacattgggtgcaagtatctggtcaccagacttttctaggtcatttccgtaagccacctggacaagc

SEQ ID NO: 503705 - DNA, 120 bp, Artificial Sequence
  ENSG00000163900_62 (sequence is synthesized)
tcacaagttgcctggaattgcttttcttttgctgttctttgtgttctaaaatgttcaatgtcttgctctggctcttctttagtcacttatggccaaaagacctggtcccctgttcaagca

SEQ ID NO: 503706 - DNA, 120 bp, Artificial Sequence
  ENSG00000163900_63 (sequence is synthesized)
gcaataatacctcccggccccacaaattcccaaggatgttgctcttaaattccacttatttctttttttctgttctttcttttatctctttttttttttgcaagaaattattgtctctct

SEQ ID NO: 503707 - DNA, 120 bp, Artificial Sequence
  ENSG00000163900_64 (sequence is synthesized)
atctcatatatagttcactctttgcagtacaaagtgttaaaatgtcaaacaaaaataaatatcaatgttacagtagctagaatattcaataaaatagatccctgccattcttgattgaaa

SEQ ID NO: 503708 - DNA, 120 bp, Artificial Sequence
  ENSG00000163900_65 (sequence is synthesized)
acttatcggactggaatccgggtctggtatccgggcccgcgtccgcacggtctcggacagaagggtggatgggagcccggctccgggcctgactgggacctgtgtggtgctggctgcagg

SEQ ID NO: 503709 - DNA, 120 bp, Artificial Sequence
  ENSG00000163900_66 (sequence is synthesized)
gtgtgcagggcgtcacgccgcggtgcctttggttgggtggatttgccgagggagacgcggcgctgagcctgcccgcgccgttgctttcccagtcccagccctgggccccatttccagccc

SEQ ID NO: 503710 - DNA, 120 bp, Artificial Sequence
  ENSG00000163902_0 (sequence is synthesized)
gcactgctcttcccggtcatggaggcgccagccgccggcttgtttctgctcctgttgcttgggacttgggccccggcgccgggcagcgcctcctccgaggcaccgccgctgatcaatgag

SEQ ID NO: 503711 - DNA, 120 bp, Artificial Sequence
  ENSG00000163902_1 (sequence is synthesized)
gacgtgaagcgcacagtggacctaagcagccacctggctaaggtgacggccgaggtggtcctggcgcacctgggcggcggctccacgtcccgagctacctctttcctgctggctttggag

SEQ ID NO: 503712 - DNA, 120 bp, Artificial Sequence
  ENSG00000163902_2 (sequence is synthesized)
cctgagctcgaggcccggctggcgcacctgggcgtgcaggtaaagggagaagatgaggaagagaacaatttggaagtacgtgaaaccaaaattaagggtaaaagtgggagattcttcaca

SEQ ID NO: 503713 - DNA, 120 bp, Artificial Sequence
  ENSG00000163902_3 (sequence is synthesized)
gtcaagctcccagttgctcttgatcctggggccaagatttcagtcattgtggaaacagtctacacccatgtgcttcatccgtatccaacccagatcacccagtcagagaaacagtttgtg

SEQ ID NO: 503714 - DNA, 120 bp, Artificial Sequence
  ENSG00000163902_4 (sequence is synthesized)
gtgtttgaggggaaccattatttctactctccctatccaacgaagacacaaaccatgcgtgtgaagcttgcctctcgaaatgtggagagctacaccaagctggggaaccccacgcgctct

SEQ ID NO: 503715 - DNA, 120 bp, Artificial Sequence
  ENSG00000163902_5 (sequence is synthesized)
gaggacctactggattatgggcctttcagagatgtgcctgcctatagtcaggatacttttaaagtacattatgagaacaacagccctttcctgaccatcaccagcatgacccgagtcatt

SEQ ID NO: 503716 - DNA, 120 bp, Artificial Sequence
  ENSG00000163902_6 (sequence is synthesized)
gaagtctctcactggggtaatattgctgtggaagaaaatgtggacttaaagcacacaggagctgtgcttaaggggcctttctcacgctatgattaccagagacagccagatagtggaata

SEQ ID NO: 503717 - DNA, 120 bp, Artificial Sequence
  ENSG00000163902_7 (sequence is synthesized)
tcctccatccgttcttttaagaccatccttcctgctgctgcccaggatgtttattaccgggatgagattggcaatgtttctaccagccacctccttattttggatgactctgtagagatg

SEQ ID NO: 503718 - DNA, 120 bp, Artificial Sequence
  ENSG00000163902_8 (sequence is synthesized)
gaaatccggcctcgcttccctctctttggcgggtggaagacccattacatcgttggctacaacctcccaagctatgagtacctctataatttgggtgaccagtatgcactgaagatgagg

SEQ ID NO: 503719 - DNA, 120 bp, Artificial Sequence
  ENSG00000163902_9 (sequence is synthesized)
tggaccatgtgtttgatgaacaagtgatagattctctgactgtgaagatcatcctgcctgaaggagccaagaacattgaaattgatagtccctatgaaatcagccgtgccccagatgagc

SEQ ID NO: 503720 - DNA, 120 bp, Artificial Sequence
  ENSG00000163902_10 (sequence is synthesized)
tgcactacacctatctggacacatttggccgccctgtgattgttgcctacaagaaaaatctggtagaacagcacattcaggacattgtggtccactacacgttcaacaaggtgctcatgc

SEQ ID NO: 503721 - DNA, 120 bp, Artificial Sequence
  ENSG00000163902_11 (sequence is synthesized)
tgcaggagcccctgctggtggtggcggccttctacatcctgttcttcaccgttatcatctatgttcggctggacttctccatcaccaaggatccagccgcagaagccaggatgaaggtag

SEQ ID NO: 503722 - DNA, 120 bp, Artificial Sequence
  ENSG00000163902_12 (sequence is synthesized)
cctgcatcacagagcaggtcttgaccctggtcaacaagagaataggcctttaccgtcactttgacgagaccgtcaataggtacaagcaatcccgggacatctccaccctcaacagtggca

SEQ ID NO: 503723 - DNA, 120 bp, Artificial Sequence
  ENSG00000163902_13 (sequence is synthesized)
agaagagcctggagactgaacacaaggccttgaccagtgagattgcactgctgcagtccaggctgaagacagagggctctgatctgtgcgacagagtgagcgaaatgcagaagctggatg

SEQ ID NO: 503724 - DNA, 120 bp, Artificial Sequence
  ENSG00000163902_14 (sequence is synthesized)
cacaggtcaaggagctggtgctgaagtcggcggtggaggctgagcgcctggtggctggcaagctcaagaaagacacgtacattgagaatgagaagctcatctcaggaaagcgccaggagc

SEQ ID NO: 503725 - DNA, 120 bp, Artificial Sequence
  ENSG00000163902_15 (sequence is synthesized)
tggtcaccaagatcgaccacatcctggatgccctgtagcccctgcccgcatcctccagggggcccagggtgcctgcactttgctgtggcaggcagattgggtggtagtgggaggttgtgc

SEQ ID NO: 503726 - DNA, 120 bp, Artificial Sequence
  ENSG00000163902_16 (sequence is synthesized)
atggaggccagtgaaagctgacatctgtaaaaggccttcaaggaagagaaaccaggccctgcgtcaggcagtgtgagtttgccgtttgtccttaactttctttttttttttttttaaaaa

SEQ ID NO: 503727 - DNA, 120 bp, Artificial Sequence
  ENSG00000163902_17 (sequence is synthesized)
aagaaaactttaaaaaaactcccattaaaaacaaaacatctttgtgttttgaacaaaggaattttcaatatttgattggtattctgttctgaagtctaagatatttttcagcctataaag

SEQ ID NO: 503728 - DNA, 120 bp, Artificial Sequence
  ENSG00000163902_18 (sequence is synthesized)
ccccctgttttatgcccttctaattctgatgtttgggtattgtgtgagtgcatgtgtttttttttttttttttaaagcgtgtgtgaacaaatggaaataaagcagggactgtgaacattt

SEQ ID NO: 503729 - DNA, 120 bp, Artificial Sequence
  ENSG00000163902_19 (sequence is synthesized)
taggattacaggtatcagccactacctggccaccttttttgttttctgtgttatcttcatagttgtctttctttggttgttaagtttaatccttgaattactttgagttcatgtacagca

SEQ ID NO: 503730 - DNA, 120 bp, Artificial Sequence
  ENSG00000163902_20 (sequence is synthesized)
cagggctcaaaccgtccttctccctcagcctcccaaataggtgggactagagtgggagattcttcacagtcaagctcccagttgctcttgatcctggggccaagatttcagtcattgtgg

SEQ ID NO: 503731 - DNA, 120 bp, Artificial Sequence
  ENSG00000163902_21 (sequence is synthesized)
catcttttacaagaaaccttcgctgcaaccgctgcgtcacatcaccgcgtctcccagggacaggaaagcctctccgtgtttggtgaagcttcaggggaagcagtcatcctgtcgtcgcat

SEQ ID NO: 503732 - DNA, 120 bp, Artificial Sequence
  ENSG00000163902_22 (sequence is synthesized)
acggcaaaatcctccattgccgtagccgttcggctgacgtgacaagggaggtgcaggccaacacggcgactccgcgccctctggcggcagtgccggagcagcggcgctgtctttgaccta

SEQ ID NO: 503733 - DNA, 120 bp, Artificial Sequence
  ENSG00000163902_23 (sequence is synthesized)
tccggcattcggcttccgggaccgcttggcggctgtgaatgcagagctggggcgacgtggggctcgcttcctgggactgggtgtaaagggagaagatgaggaagagaacaatttggaagt

SEQ ID NO: 503734 - DNA, 120 bp, Artificial Sequence
  ENSG00000163902_24 (sequence is synthesized)
ccctcagcctcccaaataggtgggactagagatccagctagagaagagctttaggaaaaaaaaaaaagacctgctccatgtacatcagtttagacagttctgtgttgtctagccttttat

SEQ ID NO: 503735 - DNA, 120 bp, Artificial Sequence
  ENSG00000163902_25 (sequence is synthesized)
agcattcatccgtggatgttggggaaggccaacttttactttctcaatctgagcaaaatttcactgttttaaggagcaaaacgagcagaattattggacaggaagaatggtaggagagag

SEQ ID NO: 503736 - DNA, 120 bp, Artificial Sequence
  ENSG00000163902_26 (sequence is synthesized)
actagactgctgcagactcgtagaccttctgcaggcccgtttcactcaccattaggcagggcacaactgctccgagtttcagccactcctcacactggcctgctgtgctctctagggaat

SEQ ID NO: 503737 - DNA, 120 bp, Artificial Sequence
  ENSG00000163902_27 (sequence is synthesized)
cccggttgtgtgttttggggttctgctgttctcaagcccatcagttgccctgtttcttctctctgcgttctccttcacagacactgataacgtgaaggtcttgtggctgtcggtgttttg

SEQ ID NO: 503738 - DNA, 120 bp, Artificial Sequence
  ENSG00000163902_28 (sequence is synthesized)
tgtctacttgctctgtctttatgtgagcccctgtacttctttctctcctgcccatttgatccgttttccacatcattgcttatgcttgcttgatccttcaggtgaccagtatgcactgaa

SEQ ID NO: 503739 - DNA, 120 bp, Artificial Sequence
  ENSG00000163902_29 (sequence is synthesized)
tcagggttgggatcatatgggatcataaactaggagagttgcttaggaagtgcctgctttattacagggttttttttttgtagagaggaggtctagctatgttgcccaggctggtcttga

SEQ ID NO: 503740 - DNA, 89 bp, Artificial Sequence
  ENSG00000163902_30 (sequence is synthesized)
tctgtcctagaggatttttttttttttcttgagacagggtctgttgcccaggctccattactgtggtgccatgttgactcactgcaacc

SEQ ID NO: 503741 - DNA, 120 bp, Artificial Sequence
  ENSG00000163902_31 (sequence is synthesized)
aggctccattactgtggtgccatgttgactcactgcaacctccacctccagggctcaaaccgtccttctccctcagcctcccaaataggtgggactagaggtatgtaccaccacacttgg

SEQ ID NO: 503742 - DNA, 120 bp, Artificial Sequence
  ENSG00000163904_0 (sequence is synthesized)
acaaatcagcgaccgaactctggcggtggtggttaagacggcgaaggcggcagcggcggcgacagctctggggtttgcgtctcggggtgtgtcggccgccgctgctgcttgggcctggta

SEQ ID NO: 503743 - DNA, 120 bp, Artificial Sequence
  ENSG00000163904_1 (sequence is synthesized)
tgtacagatggctggttaggattctcggcaccattttccgtttctgcgaccggtcggtgccccctgcccgggccctcctgaagaggcggcgctcagacagcactctgttttctacagtgg

SEQ ID NO: 503744 - DNA, 120 bp, Artificial Sequence
  ENSG00000163904_2 (sequence is synthesized)
acactgatgaaataccagccaaaagaccaagattagattgctttattcaccaagtgaaaaacagtctctacaatgctgccagcttatttggattcccattccagctgaccacaaagccca

SEQ ID NO: 503745 - DNA, 120 bp, Artificial Sequence
  ENSG00000163904_3 (sequence is synthesized)
tggtaacttctgcttgtaatggaacacggaatgtggccccttcaggagaggtattttcgaactcttcatcttgtgaactgacaggttctggatcctggaacaacatgctgaaactgggta

SEQ ID NO: 503746 - DNA, 120 bp, Artificial Sequence
  ENSG00000163904_4 (sequence is synthesized)
ataaatctcctaatggaataagtgactatccaaagatcagagtgacagttacccgagatcagccacgcagagtcctgccttcctttggttttactttgaactcagaaggctgtaatagaa

SEQ ID NO: 503747 - DNA, 120 bp, Artificial Sequence
  ENSG00000163904_5 (sequence is synthesized)
gaccaggtggccgtcgccatagcaaaggtaatccagagagttctttaatgtggaaacctcaggaacaggctgtaacagagatgatttctgaagagagtggcaagggtctgaggcgtcccc

SEQ ID NO: 503748 - DNA, 120 bp, Artificial Sequence
  ENSG00000163904_6 (sequence is synthesized)
attgtactgtggaggagggtgttcaaaaagaggaaagagagaagtaccgaaagttattggaacgacttaaagaaagtggtcatggaaactctgtctgtcctgtaacttcaaattatcaca

SEQ ID NO: 503749 - DNA, 120 bp, Artificial Sequence
  ENSG00000163904_7 (sequence is synthesized)
gttctcaaagaagtcagatggacacattaaagaccaaaggctggggggaagagcaaaatcacggagtcaaaacaactcagtttgttccaaaacaatatagacttgttgaaacaaggggac

SEQ ID NO: 503750 - DNA, 120 bp, Artificial Sequence
  ENSG00000163904_8 (sequence is synthesized)
ctctatgttcattgagaagtgaaaagaggtgttcaaaggggaaaattactgatacagagacgatggtcggaatcagatttgaaaatgaaagtaggaggggataccaactggagcctgacc

SEQ ID NO: 503751 - DNA, 120 bp, Artificial Sequence
  ENSG00000163904_9 (sequence is synthesized)
tatcagaagaagtgtcggcccgactccgcctgggcagtggaagcaatggcttactcaggaggaaagtgtcaataattgagacaaaggaaaagaattgctcaggcaaagagagggacagaa

SEQ ID NO: 503752 - DNA, 120 bp, Artificial Sequence
  ENSG00000163904_10 (sequence is synthesized)
gaacggacgatctccttgaacttacagaggacatggaaaaggaaatcagtaatgccctaggccatggcccacaggatgaaatcctaagtagtgctttcaaattgcgaattactcgaggag

SEQ ID NO: 503753 - DNA, 120 bp, Artificial Sequence
  ENSG00000163904_11 (sequence is synthesized)
atattcagacattaaagaactatcactggctcaatgatgaagtcattaatttttacatgaatcttctggtggaaagaaataaaaagcaaggctatccagcacttcatgtattcagtactt

SEQ ID NO: 503754 - DNA, 120 bp, Artificial Sequence
  ENSG00000163904_12 (sequence is synthesized)
tcttctatcctaaattaaagtctgggggttaccaagcagtgaaacgatggaccaaaggggtaaatctctttgaacaagaaattattctggtgcctattcatcggaaggtacattggagcc

SEQ ID NO: 503755 - DNA, 120 bp, Artificial Sequence
  ENSG00000163904_13 (sequence is synthesized)
tggtggtgattgacctaagaaaaaagtgtcttaaatatctggattctatgggacaaaagggccacaggatctgtgagattctccttcagtatttacaggatgaaagtaagaccaaaagaa

SEQ ID NO: 503756 - DNA, 120 bp, Artificial Sequence
  ENSG00000163904_14 (sequence is synthesized)
atagtgatctgaatcttttagagtggacccatcacagcatgaaaccacacgagattcctcaacagctgaatgggagtgattgtggaatgtttacttgtaaatatgcagattatatttcta

SEQ ID NO: 503757 - DNA, 120 bp, Artificial Sequence
  ENSG00000163904_15 (sequence is synthesized)
gggacaaacctatcacatttactcagcaccagatgcctctcttccggaagaagatggtgtgggaaatccttcatcagcagttgctgtgagaaaactttgcctggtccctctagctgctgg

SEQ ID NO: 503758 - DNA, 120 bp, Artificial Sequence
  ENSG00000163904_16 (sequence is synthesized)
tggttctttcacagacatttccatatacctcatgcattgtgggttaaaaagtccctgcatcacttctgttctcacaggtactgagctgtcaaaagtgcatgaaggcctctcactgtactc

SEQ ID NO: 503759 - DNA, 120 bp, Artificial Sequence
  ENSG00000163904_17 (sequence is synthesized)
tagtcctgacttggggtgcagagggctgcttgcaatcctgtttgtaaggctgtgcctgctcagagctttggactgttcaacccacacaagaacaaacgctaactaatattttttttaaga

SEQ ID NO: 503760 - DNA, 120 bp, Artificial Sequence
  ENSG00000163904_18 (sequence is synthesized)
gattcttttccctatgaatgtgggaaatgcaggatttattctgtgaattgtttgtttctgtgtgtttgttcagcgtattcattcactcactcgtttgcaaacataatgggcagtggtcat

SEQ ID NO: 503761 - DNA, 120 bp, Artificial Sequence
  ENSG00000163904_19 (sequence is synthesized)
ttactgctgctcttttacagttagctctaaattacttgtttgaactatttatttctgaaaggaatgttactcaagctgccactccctgctgaagagcaggagggaactctcactgggggc

SEQ ID NO: 503762 - DNA, 120 bp, Artificial Sequence
  ENSG00000163904_20 (sequence is synthesized)
ggaaggaagtggagctggagcagtaactgccaacatgaagctggagggtttgggattttttttgtttttgtttttttgaggctcaaaaaatgctgggagaaatgaaaatgctgtgggata

SEQ ID NO: 503763 - DNA, 120 bp, Artificial Sequence
  ENSG00000163904_21 (sequence is synthesized)
gggctcctgttgcctttcagaggaagtctgacactacagcgttggcacagtgccgtgaacagtggaactgtgcccaagggactctgattatccaagcatcttccgaagagtgttgtggtc

SEQ ID NO: 503764 - DNA, 120 bp, Artificial Sequence
  ENSG00000163904_22 (sequence is synthesized)
accttaaagagacttccccttctggaaatgtggtgacttggcttagtcttcaaactggattcatggatttgaagtaactgtaaaccctaaatcttcattttcatcccagatctggttgag

SEQ ID NO: 503765 - DNA, 120 bp, Artificial Sequence
  ENSG00000163904_23 (sequence is synthesized)
ctcagagtttttgttttctatatattaagtctaaattaagttttctactcattaagactaacatctccccactccatccccactgaaatttgtggaagaaaatttagtacttggctctga

SEQ ID NO: 503766 - DNA, 120 bp, Artificial Sequence
  ENSG00000163904_24 (sequence is synthesized)
ggttgccagttatacaataatctattttgcatatgaaagtttgtatttaacttttttgttcattaaaaaccttactgatatggttataacttcagacagtttagagttggtcagaacata

SEQ ID NO: 503767 - DNA, 120 bp, Artificial Sequence
  ENSG00000163904_25 (sequence is synthesized)
ttttgcaagatctagtgcctagtgttgcttttctgatgtaataaaaggtggtctggcagaacctaaaaaagtatatgctgaaatgatttctaaccctctccctacttaaacctcccagac

SEQ ID NO: 503768 - DNA, 120 bp, Artificial Sequence
  ENSG00000163904_26 (sequence is synthesized)
ttgttctggttcataaaagcaagaggtaaaactggaaaaattgtgcacgtgttacctatgaatctacacgcctgccatttgcagtgctccggctgctggtcccagaggtatactggttac

SEQ ID NO: 503769 - DNA, 120 bp, Artificial Sequence
  ENSG00000163904_27 (sequence is synthesized)
agctattgcagccagttccctgagacttgtaaaactcctggtttaggacatggggcctgtggtgtggatggaaaatgctgggcctactggatggtcagccagaggccatgtggtgggtga

SEQ ID NO: 503770 - DNA, 90 bp, Artificial Sequence
  ENSG00000163904_28 (sequence is synthesized)
ggcctactggatggtcagccagaggccatgtggtgggtgatgactgaagcgggagcaggttgtaccacacctcttctcccctccccctcc

SEQ ID NO: 503771 - DNA, 86 bp, Artificial Sequence
  ENSG00000163904_29 (sequence is synthesized)
ccccctccccctccctccccctccctctctccctaacacccaccctccccctttcccccaccctccccccttctcccctttcccca

SEQ ID NO: 503772 - DNA, 120 bp, Artificial Sequence
  ENSG00000163904_30 (sequence is synthesized)
ctttctctgggctcctggcattgtgccagtgagtgctgggaccaggtaatgagcacagccaaaaaggccagaggttcactaggtcagcatcataccaaacgcctggctttcaccaggcat

SEQ ID NO: 503773 - DNA, 120 bp, Artificial Sequence
  ENSG00000163904_31 (sequence is synthesized)
cagtgtgcttcacttgagagtttggtaccatggttaagatcgagtccatgctaggtaagtcctgttaggaatgtcagtttgtattccgcccacgtgaatgatgctgagcttaatgtatta

SEQ ID NO: 503774 - DNA, 120 bp, Artificial Sequence
  ENSG00000163904_32 (sequence is synthesized)
ttttgaggggcttcttcagagcagttctcactgagctttccattaacctacactcttccggacggctcttaaaacttgcaggacataatgaaattgggaagagcagagtgttgaagtcta

SEQ ID NO: 503775 - DNA, 120 bp, Artificial Sequence
  ENSG00000163904_33 (sequence is synthesized)
tagcatggccttctgcttgaccctgagttcctgaattgaatgtgggagaccacaggccatacttctctaggcactcacatgtctcccttggcataaggaaacatgttagtaatatagttt

SEQ ID NO: 503776 - DNA, 120 bp, Artificial Sequence
  ENSG00000163904_34 (sequence is synthesized)
tttagatccaaacagtttatttggatctaaaagtttaagtgttcagttgaaaaacagctattgattttattagtagcaaattatcaccattaaagccagtggttttttttttgttttttt

SEQ ID NO: 503777 - DNA, 75 bp, Artificial Sequence
  ENSG00000163904_35 (sequence is synthesized)
tcatgagccacctcacccagcctgtttttgagacggagtttcacttttgtcgcccaggctggagtgcaatggcgc

SEQ ID NO: 503778 - DNA, 120 bp, Artificial Sequence
  ENSG00000163904_36 (sequence is synthesized)
gtgtttttaaaatagtttagggggttgagaaaagatgcagtgagccattattctcctttagcaggtagtctcttaaaaattgatgtggattttaaaaatataccattgagaacacgtatc

SEQ ID NO: 503779 - DNA, 120 bp, Artificial Sequence
  ENSG00000163904_37 (sequence is synthesized)
tttctcaaacttgaccttgaacagagctggatgggggtgggagggaaacagatttggggcatatggaagatattcttgggagccccatattctacctcagttaccgaaggctattagaac

SEQ ID NO: 503780 - DNA, 120 bp, Artificial Sequence
  ENSG00000163904_38 (sequence is synthesized)
ctctgaatttttcctcctctgaaatcctaagcacaacttcagaaaaccatgtctgatagcggatgtcttcctgctgtgaggagctgcttgatgtggggaccaaggtgtgggtgtgggcgg

SEQ ID NO: 503781 - DNA, 120 bp, Artificial Sequence
  ENSG00000163904_39 (sequence is synthesized)
aatgtatcctagtagaaacagtgaacctcagatatgaataaataagcaagagaccgaaagttaagtgtgtgacaacctcagtactgtagttaagctacattctttaaattagcttttgtg

SEQ ID NO: 503782 - DNA, 120 bp, Artificial Sequence
  ENSG00000163904_40 (sequence is synthesized)
aactgattgggaacctaatctcttttgtaactgtttgagaaaaactctgaagcacctgatattcaaacaaacttatggtacttactaactcatttgtaaattggcgatgtagctggctgt

SEQ ID NO: 503783 - DNA, 120 bp, Artificial Sequence
  ENSG00000163904_41 (sequence is synthesized)
ctggctgtagtattgctttgataatttttttcttttaatttacctaatatatataaggaaggggtttggatatattaaaataggtgttaattttatctatttaccaataaattcatctct

SEQ ID NO: 503784 - DNA, 120 bp, Artificial Sequence
  ENSG00000163904_42 (sequence is synthesized)
cagggtgaagtagattcataacatggctctggattattattcctaagctgctagatagtagcaactattttgtgagctgaaattttattatattccttatataacaatttccttatactt

SEQ ID NO: 503785 - DNA, 120 bp, Artificial Sequence
  ENSG00000163904_43 (sequence is synthesized)
ctccacttactgtccactaaatgacagcttaccagataagcagatatcactcagtttatagtaaagattatatttaaacagcaaagatatgtatgcatttttttaggcaacttagtatat

SEQ ID NO: 503786 - DNA, 120 bp, Artificial Sequence
  ENSG00000163904_44 (sequence is synthesized)
agggaggctagtgtctttggaattcactgtagcatttcaatgtagaggaatgtcttgatgttgtggaaactctgtaagctgaaattctaactatattattcatcgatgaaggaaacattt

SEQ ID NO: 503787 - DNA, 120 bp, Artificial Sequence
  ENSG00000163904_45 (sequence is synthesized)
aagtgtaagtaaaaatcctagttacatttgatacctgtttacttatgtaacttatgttttggtgcccatgaaaagcaagaaaaagtatatatatataactttgattgttaattctgttgt

SEQ ID NO: 503788 - DNA, 74 bp, Artificial Sequence
  ENSG00000163904_46 (sequence is synthesized)
aaaagtatatatatataactttgattgttaattctgttgtttttctttaaaaaagcagcaagccagccagtaga

SEQ ID NO: 503789 - DNA, 120 bp, Artificial Sequence
  ENSG00000163904_47 (sequence is synthesized)
catgaataaagtgggctggagagcagtggcccatctaaatgggatagccctacatatagattgtggattcagttgatcaaaggaggctagattatttttaaaaaatgtataaagttagta

SEQ ID NO: 503790 - DNA, 120 bp, Artificial Sequence
  ENSG00000163904_48 (sequence is synthesized)
attaattcaaagaaatattaaaaacatagtgctggcaaataaaacacacctatggtttacatttggccttttaattataaatttaatgtgctggtacttatctaacatgctttcttttat

SEQ ID NO: 503791 - DNA, 120 bp, Artificial Sequence
  ENSG00000163904_49 (sequence is synthesized)
taatttgatataatagtgtaatcaatcacccctatttggagaagcttgctggacagagataatgcatattaatggtagactttgcttttgtatctgatctccctcactttttgtgtttct

SEQ ID NO: 503792 - DNA, 120 bp, Artificial Sequence
  ENSG00000163904_50 (sequence is synthesized)
ataaggatcttcttggagaactggggcatctgattggaacacctgcgaaagcttaagcgatgaggttgtgcccctcttgcagtacaaggctgcaaattatccaagccaagggcagaaatc

SEQ ID NO: 503793 - DNA, 120 bp, Artificial Sequence
  ENSG00000163904_51 (sequence is synthesized)
tcaatgtccttgttactccatatggccttgggattctcccatggccctccagtaaagcgctgctaggtcccggaaaggctgtggcagtggtggggttggggttaaggataatcccactcc

SEQ ID NO: 503794 - DNA, 120 bp, Artificial Sequence
  ENSG00000163909_0 (sequence is synthesized)
aggcagcctgcgttcgccatgaagcgacccaaggagccgagcggctccgacggggagtccgacggacccatcgacgtgggccaagagggccagctgagccagatggccaggccgctgtcc

SEQ ID NO: 503795 - DNA, 120 bp, Artificial Sequence
  ENSG00000163909_1 (sequence is synthesized)
acccccagctcttcgcagatgcaagccaggaagaaacacagagggatcatagagaaacggcgtcgagaccgcatcaacagtagcctttctgaattgcgacgcttggtccccactgccttt

SEQ ID NO: 503796 - DNA, 120 bp, Artificial Sequence
  ENSG00000163909_2 (sequence is synthesized)
gagaaacagggctcttccaagctggagaaagccgaggtcttgcagatgacggtggatcacttgaaaatgctccatgccactggtgggacaggattctttgatgcccgagccctggcagtt

SEQ ID NO: 503797 - DNA, 120 bp, Artificial Sequence
  ENSG00000163909_3 (sequence is synthesized)
gacttccggagcattggttttcgggagtgcctcactgaggtcatcaggtacctgggggtccttgaagggcccagcagccgtgcagaccccgtccggattcgccttctctcccacctcaac

SEQ ID NO: 503798 - DNA, 120 bp, Artificial Sequence
  ENSG00000163909_4 (sequence is synthesized)
agctacgcagccgagatggagccttcgcccacgcccactggccctttggccttccctgcctggccctggtctttcttccatagctgtccagggctgccagccctgagcaaccagctcgcc

SEQ ID NO: 503799 - DNA, 120 bp, Artificial Sequence
  ENSG00000163909_5 (sequence is synthesized)
atcctgggaagagtgcccagccctgtcctccccggtgtctcctctcctgcttaccccatcccagccctccgaaccgctccccttcgcagagccacaggcatcatcctgccagcccggagg

SEQ ID NO: 503800 - DNA, 120 bp, Artificial Sequence
  ENSG00000163909_6 (sequence is synthesized)
aatgtgctgcccagtcgaggggcatcttccacccggagggcccgccccctagagaggccagcgacccctgtgcctgtcgcccccagcagcagggctgccaggagcagccacatcgctccc

SEQ ID NO: 503801 - DNA, 120 bp, Artificial Sequence
  ENSG00000163909_7 (sequence is synthesized)
ctcctgcagtcttcctccccaacaccccctggtcctacagggtcggctgcttacgtggctgttcccacccccaactcatcctccccagggccagctgggaggccagcgggagccatgctc

SEQ ID NO: 503802 - DNA, 120 bp, Artificial Sequence
  ENSG00000163909_8 (sequence is synthesized)
taccactcctgggtctctgaaatcactgaaatcggggctttctgagctgccccttcaccaccccgccccaaggaataaggaaggttcttttaccaggagcccaaaaaagggcactgcctt

SEQ ID NO: 503803 - DNA, 120 bp, Artificial Sequence
  ENSG00000163909_9 (sequence is synthesized)
ttctgctttgcttcatggactggctcatatgtgaaggcacgttctccagccatcagaggccccctcctcctccaacccatctctccttctcactgttatcccagcttatccacccagctc

SEQ ID NO: 503804 - DNA, 120 bp, Artificial Sequence
  ENSG00000163909_10 (sequence is synthesized)
tcctggagctgttctggtctcagaggcttggttccatttctcacctgaacagatgagtcctgggagagaccctcagagatccgcccagacccctctcctgccctctgcacaccagcagca

SEQ ID NO: 503805 - DNA, 120 bp, Artificial Sequence
  ENSG00000163909_11 (sequence is synthesized)
ggcatgaaccttgggtctgggaaaaagctttaacctgcagggcaccaggacccaaggcaggctgttccttggggcggtcagaccccagtcaggagcaatgactgactggctgcagccttc

SEQ ID NO: 503806 - DNA, 120 bp, Artificial Sequence
  ENSG00000163909_12 (sequence is synthesized)
ccacgccaagaggctggaacatagtgtctgcctcgcttcctggagatagtaactgagcaggggctacaaagaggtctcctgggaaccctgtctgccccttcccacctgtccttgggccac

SEQ ID NO: 503807 - DNA, 120 bp, Artificial Sequence
  ENSG00000163909_13 (sequence is synthesized)
accatcacactgaaccacaggacagaccctttctccaccacagccaaggcctggagactgggggcccagcagagcctgctcccaccctcctcccagcagcagacacccaccctctcactg

SEQ ID NO: 503808 - DNA, 120 bp, Artificial Sequence
  ENSG00000163909_14 (sequence is synthesized)
actaacaggtccctgcacacagctggcctggtaaacccagctgggaggtttctaggcagcagcaaaactctgtgacagggtgtcctcacaccaggccttggacagctctcccagacagga

SEQ ID NO: 503809 - DNA, 120 bp, Artificial Sequence
  ENSG00000163909_15 (sequence is synthesized)
gccagggttgagcaatggagagcccagcccccacgtcttacagtcgccatcctccaggcgtgtggtccctccccattgggtgcacagtgcagaggggccgtggccccatgtgatggtgcg

SEQ ID NO: 503810 - DNA, 120 bp, Artificial Sequence
  ENSG00000163909_16 (sequence is synthesized)
gcaaggaggggcaagagaaaggatgattcgaggcaccttggcccttcaaggtcatgcagtgggtcgagcgcctgagatcctgttcaccaggactccacagagctggctctgctcagaagc

SEQ ID NO: 503811 - DNA, 120 bp, Artificial Sequence
  ENSG00000163909_17 (sequence is synthesized)
catttcattccccggctccaccctaggccactttttctaacagaggaaacaaatggtccagcagtcgttcccagcagaacagcggagcctggactgacacccagtgggaccagtgttgcc

SEQ ID NO: 503812 - DNA, 120 bp, Artificial Sequence
  ENSG00000163909_18 (sequence is synthesized)
acaccagttgataaaatgcagaaacccttctgtactcgttggtaaatatctactcccccaagtgactccaggtgccccccaccgcctggcacttcccccaggactcctacgatctggtta

SEQ ID NO: 503813 - DNA, 120 bp, Artificial Sequence
  ENSG00000163909_19 (sequence is synthesized)
ctgcctggccgatccaaggctgtggagtcccagagccagcagttcactggtgctcattccacactggttagatacttcagttgtcacccctgggaagattctcccacctcctccctttga

SEQ ID NO: 503814 - DNA, 120 bp, Artificial Sequence
  ENSG00000163909_20 (sequence is synthesized)
tggaaccaccctccccagaggctgcattgaggagactccacagactgaaaagtgagtttgcagaaaccttggggaaaagggccctttcaaagaagtggataagagggaggagatcattga

SEQ ID NO: 503815 - DNA, 120 bp, Artificial Sequence
  ENSG00000163909_21 (sequence is synthesized)
gtgacccagaaagctcttttgaaaagacagactcctcaaggagagataaagaggaaagcacctctttcattttttagtgtgagctaattccatcagactgctgtcctcctggacccatct

SEQ ID NO: 503816 - DNA, 120 bp, Artificial Sequence
  ENSG00000163909_22 (sequence is synthesized)
gagatgtgcagtagcaaggagaggggggatcattttagagagtgggtcattggcagggagtgctccggagggaggcagaggggagactgtggtagaaggaagacagaactcacacatgct

SEQ ID NO: 503817 - DNA, 120 bp, Artificial Sequence
  ENSG00000163909_23 (sequence is synthesized)
cccaggattggggacagggacagaggaggtaacagaaggcaaaggccagtttccccgttatcatgaaggggcccactcaggacaggaacaaggacaactcctcctcctcctcctcctctc

SEQ ID NO: 503818 - DNA, 120 bp, Artificial Sequence
  ENSG00000163909_24 (sequence is synthesized)
ctgctgctcctgggataccaggtcagtgatgtagtcttgcagtttggcaacttcctagcctgagaatccctagtggggctgtgggaaacacatttccacgttgcaagcatgcaactccaa

SEQ ID NO: 503819 - DNA, 120 bp, Artificial Sequence
  ENSG00000163909_25 (sequence is synthesized)
agaatctgtgatgccactgaaatgagatgggaatgatccagctctttcagcatcttggttgaacttgctttcattgtccctgggatattgtggaaggaaaggtgactgtgtgatctgatt

SEQ ID NO: 503820 - DNA, 120 bp, Artificial Sequence
  ENSG00000163909_26 (sequence is synthesized)
ctgtggtcaaggacttgcatcttgtgtttctatccccaagccttcctggtgtctccaactcctaccccattgcatgggttgttgcggacatccaataaagatttttttagtgcttctgga

SEQ ID NO: 503821 - DNA, 120 bp, Artificial Sequence
  ENSG00000163909_27 (sequence is synthesized)
aacttccagtagattctacttctaaactatctctggagtccatccacttctgtctgcacccacagccatcctggccaggccacatcacctcccccagatcactgccctggcctcagaaag

SEQ ID NO: 503822 - DNA, 120 bp, Artificial Sequence
  ENSG00000163909_28 (sequence is synthesized)
gtcttccctcttgctttgtcaatcagttctcagtagcagcagagagaaattgaaagctgcaggtcatatcgtatcatctttagtttgaaaacctcactctcttaccctattgttctaaag

SEQ ID NO: 503823 - DNA, 120 bp, Artificial Sequence
  ENSG00000163909_29 (sequence is synthesized)
gtcttcttttggtcccaacctcatttccagcctcatttcttgccagtcccagacttgctccctgagcttctgccacctgcccttccttcatttcctcgacattccagccttgttcccacc

SEQ ID NO: 503824 - DNA, 120 bp, Artificial Sequence
  ENSG00000163909_30 (sequence is synthesized)
tccagcactttgcatatgctgttccctttgccaagaatgctcttcccctaccctgtgcatggctgagttctgcagaccctcaggccttggcttcaacgttgcctcgtccaagaggccttc

SEQ ID NO: 503825 - DNA, 120 bp, Artificial Sequence
  ENSG00000163909_31 (sequence is synthesized)
ctcgactactttacttgtggagttcctctatcacaaggcctctgttctttcccttcatggagaatttgccactgcatatccatttgtgtaatttacttgttggttgactgtgcctcccac

SEQ ID NO: 503826 - DNA, 120 bp, Artificial Sequence
  ENSG00000163909_32 (sequence is synthesized)
tcgagtgtaagctcatgaggccaggtgccatgcctggttcagtctccactctgtacccagcattgagcacagggcctggtccatagttggcgttcaataaatacttgttgaagaagtgaa

SEQ ID NO: 503827 - DNA, 120 bp, Artificial Sequence
  ENSG00000163913_0 (sequence is synthesized)
ttttctggctttccctttcggacatgcgcgctcggagcaaggcgccctcgcactcagcttaccgcgcatgtacgttgccaggggtaacgcaggtagccaaagtggcttgtggagtggcga

SEQ ID NO: 503828 - DNA, 120 bp, Artificial Sequence
  ENSG00000163913_1 (sequence is synthesized)
ccgttagtgaggcggttgctgagacagacgctgaggcgggtaggaggagcccgagccgtaagggaagccgtgatgagggccgtgttgacgtggagagataaagccgagcactgtataaat

SEQ ID NO: 503829 - DNA, 120 bp, Artificial Sequence
  ENSG00000163913_2 (sequence is synthesized)
gacatcgcatttaagcctgatggaactcaactgattttggctgccggaagcagattactggtttatgacacctctgatggcaccttacttcagcccctcaagggacacaaagacactgtg

SEQ ID NO: 503830 - DNA, 120 bp, Artificial Sequence
  ENSG00000163913_3 (sequence is synthesized)
tactgtgtggcatatgcgaaggatggcaagcgctttgcttctggatcagctgacaaaagcgttattatctggacatcaaaactggaaggcattctgaagtacacatcttggtctgtgatg

SEQ ID NO: 503831 - DNA, 120 bp, Artificial Sequence
  ENSG00000163913_4 (sequence is synthesized)
tcttcattgcacctccatcttccatttctgggcctccacaaaacagtaagagtaacagccacagataaagcacctaaaggccaaggtgggaggattgattgcttgaggccaagcgttcaa

SEQ ID NO: 503832 - DNA, 120 bp, Artificial Sequence
  ENSG00000163913_5 (sequence is synthesized)
aaccaacctggccaaaagcacaatgatgctatacaatgtgtctcctacaatcctattactcatcaactggcatcttgttcctccagtgactttgggttgtggtctcctgaacagaagtct

SEQ ID NO: 503833 - DNA, 120 bp, Artificial Sequence
  ENSG00000163913_6 (sequence is synthesized)
gtctccaaacacaaatcaagcagcaagatcatctgctgcagctggacaaatgatggtcagtacctggcgctggggatgttcaatgggatcatcagcatacggaacaaaaatggcgaggag

SEQ ID NO: 503834 - DNA, 120 bp, Artificial Sequence
  ENSG00000163913_7 (sequence is synthesized)
aaagtaaagatcgagcggccggggggctccctctcgccaatatggtccatctgctggaacccttcaagccgatgggagagtttctggatgaacagagagaatgaggatgccgaggatgtc

SEQ ID NO: 503835 - DNA, 120 bp, Artificial Sequence
  ENSG00000163913_8 (sequence is synthesized)
attgtcaacagatatattcaggaaatcccttccactctgaagtcagcagtgtacagtagtcagggtagtgaggcagaggaggaagaaccagaggaagaggacgacagtcccagggacgac

SEQ ID NO: 503836 - DNA, 120 bp, Artificial Sequence
  ENSG00000163913_9 (sequence is synthesized)
aacttagaggaacgtaatgacatcctggctgtggctgactggggacagaaagtttccttctaccagctgagtggaaaacagattggaaaggatcgggcactgaactttgacccctgctgc

SEQ ID NO: 503837 - DNA, 120 bp, Artificial Sequence
  ENSG00000163913_10 (sequence is synthesized)
atcagctactttactaaaggcgagtacattttgctggggggttcagacaagcaagtatctcttttcaccaaggatggagtgcggcttgggactgttggggagcagaactcctgggtgtgg

SEQ ID NO: 503838 - DNA, 120 bp, Artificial Sequence
  ENSG00000163913_11 (sequence is synthesized)
acgtgtcaagcgaaaccggattccaactatgtggtggtcggctgccaggacggcaccatttccttctaccagcttattttcagcacagtccatgggctttacaaggaccgctatgcctac

SEQ ID NO: 503839 - DNA, 120 bp, Artificial Sequence
  ENSG00000163913_12 (sequence is synthesized)
agggatagcatgactgacgtcattgtgcagcacctgatcactgagcagaaagttcggattaaatgcaaagagcttgtcaagaagattgccatctacagaaatcgattggctatccaactg

SEQ ID NO: 503840 - DNA, 120 bp, Artificial Sequence
  ENSG00000163913_13 (sequence is synthesized)
ccagagaaaatcctcatctatgagttgtattcagaggacttatcagacatgcattaccgggtaaaggagaagattatcaagaagtttgagtgcaacctcctggtggtgtgtgccaatcac

SEQ ID NO: 503841 - DNA, 120 bp, Artificial Sequence
  ENSG00000163913_14 (sequence is synthesized)
atcatcctgtgccaggagaaacggctgcagtgcctgtccttcagcggagtgaaggagcgggagtggcagatggagtctctcattcgttacatcaaggtgatcggtggccctcctggaaga

SEQ ID NO: 503842 - DNA, 120 bp, Artificial Sequence
  ENSG00000163913_15 (sequence is synthesized)
gaaggcctcttagtggggctgaagaatggacagatcctgaagatcttcgtggacaatctctttgctatcgtcctgctgaagcaggccacagctgtgcgctgcttggacatgagtgcctcc

SEQ ID NO: 503843 - DNA, 120 bp, Artificial Sequence
  ENSG00000163913_16 (sequence is synthesized)
cgtaagaagctggccgtggtagatgaaaatgacacttgcctggtgtatgacatcgacaccaaggagctgctttttcaggaaccaaacgccaacagtgtagcttggaacacccagtgtgag

SEQ ID NO: 503844 - DNA, 120 bp, Artificial Sequence
  ENSG00000163913_17 (sequence is synthesized)
gctgcagggctttgtggtcggctacaatggctccaagatcttctgcctccatgtcttctccatttctgccgtggaggtgccgcagtccgctcccatgtaccagtacctggataggaaact

SEQ ID NO: 503845 - DNA, 120 bp, Artificial Sequence
  ENSG00000163913_18 (sequence is synthesized)
gttcaaggaagcctaccagattgcttgcttgggtgtcacagacactgattggcgtgaactggccatggaagcgctagaaggtttagattttgaaacagcaaagaaggccttcatcagagt

SEQ ID NO: 503846 - DNA, 120 bp, Artificial Sequence
  ENSG00000163913_19 (sequence is synthesized)
acaagacctccgatatttagagctcatcagcagcattgaggagaggaagaagcggggagagaccaacaatgacctgtttctggcagatgtgttttcctaccaggggaagttccatgaggc

SEQ ID NO: 503847 - DNA, 120 bp, Artificial Sequence
  ENSG00000163913_20 (sequence is synthesized)
cgccaaactgtacaagaggagtgggcacgagaacctcgcgcttgaaatgtacaccgacctctgcatgtttgagtatgccaaggatttccttggatctggagaccccaaagaaacaaagat

SEQ ID NO: 503848 - DNA, 120 bp, Artificial Sequence
  ENSG00000163913_21 (sequence is synthesized)
gctaatcaccaaacaggctgactgggccagaaatatcaaggagcccaaagccgccgtggagatgtacatctcagcaggagagcacgtcaaggccatcgagatctgtggtgaccatggctg

SEQ ID NO: 503849 - DNA, 120 bp, Artificial Sequence
  ENSG00000163913_22 (sequence is synthesized)
ggttgacatgttgatcgacatcgcccgcaaactggacaaggctgagcgcgagcccctgctgctgtgcgctacctacctcaagaagctggacagccctggctatgctgctgagacctacct

SEQ ID NO: 503850 - DNA, 120 bp, Artificial Sequence
  ENSG00000163913_23 (sequence is synthesized)
gaagatgggtgacctcaagtccctggtgcagctgcacgtggagacccagcgctgggatgaggcctttgctttgggtgagaagcatcctgagtttaaggatgacatctacatgccgtatgc

SEQ ID NO: 503851 - DNA, 120 bp, Artificial Sequence
  ENSG00000163913_24 (sequence is synthesized)
tcagtggctagcagagaacgatcgctttgaggaagcccagaaagcgttccacaaggctgggcgacagagagaagcggtccaggtgctggagcagctcacaaacaatgccgtggcggagag

SEQ ID NO: 503852 - DNA, 120 bp, Artificial Sequence
  ENSG00000163913_25 (sequence is synthesized)
caggtttaatgatgctgcctattattactggatgctgtccatgcagtgcctcgatatagctcaagatcctgcccagaaggacacaatgcttggcaagttctaccacttccagcgtttggc

SEQ ID NO: 503853 - DNA, 120 bp, Artificial Sequence
  ENSG00000163913_26 (sequence is synthesized)
agagctgtaccatggttaccatgccatccatcgccacacggaagatccgttcagtgtccatcgtcctgaaactcttttcaacatctccaggttcctgctgcacagcctgcccaaggacac

SEQ ID NO: 503854 - DNA, 120 bp, Artificial Sequence
  ENSG00000163913_27 (sequence is synthesized)
cccctcgggcatctctaaagtgaaaatactcttcaccttggccaagcagagcaaggccctcggtgcctacaggctggcccggcacgcctatgacaagctgcgtggcctgtacatccctgc

SEQ ID NO: 503855 - DNA, 120 bp, Artificial Sequence
  ENSG00000163913_28 (sequence is synthesized)
cagattccaaaagtccattgagctgggtaccctgaccatccgcgccaagcccttccacgacagtgaggagttggtgcccttgtgctaccgctgctccaccaacaacccgctgctcaacaa

SEQ ID NO: 503856 - DNA, 120 bp, Artificial Sequence
  ENSG00000163913_29 (sequence is synthesized)
cctgggcaacgtctgcatcaactgccgccagcccttcatcttctccgcctcttcctacgacgtgctacacctggttgagttctacctggaggaagggatcactgatgaagaagccatctc

SEQ ID NO: 503857 - DNA, 120 bp, Artificial Sequence
  ENSG00000163913_30 (sequence is synthesized)
cctcatcgacctggaggtgctgagacccaagcgggatgacagacagctagagattgcaaacaacagctcccagattctgcggctagtggagaccaaggactccatcggagatgaggaccc

SEQ ID NO: 503858 - DNA, 120 bp, Artificial Sequence
  ENSG00000163913_31 (sequence is synthesized)
gttcacagctaagctgagctttgagcaaggtggctcagagttcgtgccagtggtggtgagccggctggtgctgcgctccatgagccgccgggatgtcctcatcaagcgatggcccccacc

SEQ ID NO: 503859 - DNA, 120 bp, Artificial Sequence
  ENSG00000163913_32 (sequence is synthesized)
cctgaggtggcaatacttccgctcactgctgcctgacgcctccattaccatgtgcccctcctgcttccagatgttccattctgaggactatgagttgctggtgcttcagcatggctgctg

SEQ ID NO: 503860 - DNA, 120 bp, Artificial Sequence
  ENSG00000163913_33 (sequence is synthesized)
cccctactgccgcaggtgcaaggatgaccctggcccatgaccagcatcctggggacggcctgcaccctctgcccgccttggggtctgctgggctgtgaaggagaataaagagttaaactg

SEQ ID NO: 503861 - DNA, 120 bp, Artificial Sequence
  ENSG00000163913_34 (sequence is synthesized)
gaaggatggaaatgaaagctcttcagtagcttgtttgggtcatgcagctggtcagtgagatctctaggaattctgacccagagactctgagcccaaagcttatgcttttcatcaccatca

SEQ ID NO: 503862 - DNA, 120 bp, Artificial Sequence
  ENSG00000163913_35 (sequence is synthesized)
ggggggccttgtgtaaccacggaattcctatttatggcatttcatgccttgtaaatagcaccaggagatgaggaagagaatgtacatatattttctaaggaaaaaaatctgttactttca

SEQ ID NO: 503863 - DNA, 120 bp, Artificial Sequence
  ENSG00000163913_36 (sequence is synthesized)
gatgcagaggcagagaggcctgtgttcaccatgggatgacacaggagaaaaggctggccagctctccctgtcttcccaactccctctaaagttggcgagaaaaagcccttaattgtattg

SEQ ID NO: 503864 - DNA, 120 bp, Artificial Sequence
  ENSG00000163913_37 (sequence is synthesized)
aactattcatgggcactcacagcaaggcaaccccatcttgtaggagggcatctgtccccagggcagggatcaggagagctgtttccagaggcttccagggtaacttggagcaaatcactt

SEQ ID NO: 503865 - DNA, 120 bp, Artificial Sequence
  ENSG00000163913_38 (sequence is synthesized)
acctttcttggactcagtccctggaagaagaggccattccagaccgcttcctcccacgaactcattcattgtgtcagcaaacgtagactggggttctgctgagggaggccgatacaaccc

SEQ ID NO: 503866 - DNA, 120 bp, Artificial Sequence
  ENSG00000163913_39 (sequence is synthesized)
accactgcccacggctgtgcacggctttgctgtgggaacaggcctgtaactgcggcacaacctgcgatctggacaaagggcagaggaagctgagactctttcccctggggtgggggcttg

SEQ ID NO: 503867 - DNA, 64 bp, Artificial Sequence
  ENSG00000163913_40 (sequence is synthesized)
caccaccatgccaggcacaatgatgctatacaatgtgtctcctacaatcctattactcatcaac

SEQ ID NO: 503868 - DNA, 120 bp, Artificial Sequence
  ENSG00000163913_41 (sequence is synthesized)
tggcttctcctctcccttgaggccatctcatgccttcttgcctggcctgggttccgtttgaagagagacagctgcagctccctctaggctctgtgccccctgctcaagcctggccatgcc

SEQ ID NO: 503869 - DNA, 120 bp, Artificial Sequence
  ENSG00000163913_42 (sequence is synthesized)
agctcccctgtgcttccctgtccacctcctgttctccccgcagtccacctggcgcccgctcacagcccccggccccggcctcagccctcagcctggcctcccttgctccttgccctcccc

SEQ ID NO: 503870 - DNA, 120 bp, Artificial Sequence
  ENSG00000163913_43 (sequence is synthesized)
ccaggttcctgctgcacagcctgcccaaggacaccccctcgggcatctctaaagtgtatcctttctcttatccctcctccgtcccaccaccgttcttgtctaatggccccaagaaattcc

SEQ ID NO: 503871 - DNA, 120 bp, Artificial Sequence
  ENSG00000163913_44 (sequence is synthesized)
ttccagagcactttcctggcagaaccttcctctctcagcaaccctcagggaagacagagaactcaccctcccgctgctgtttggctatagaggctcagcagggaggcccaggggcccagg

SEQ ID NO: 503872 - DNA, 120 bp, Artificial Sequence
  ENSG00000163913_45 (sequence is synthesized)
ccaagagaagatgagttttcagggctctctgagctgaacccagcagtgggtctctggccaacacactgtcccaatccctcctagaacccacagatgagggtgtgactgaaatggaagaag

SEQ ID NO: 503873 - DNA, 120 bp, Artificial Sequence
  ENSG00000163913_46 (sequence is synthesized)
caccaggccttcaggcttggaaccttgggcacttctccagactggggaggagggagtgtttgttcagcccaggtatacatagcaccttctgtgccccaagccctgggccaggcaccaggt

SEQ ID NO: 503874 - DNA, 120 bp, Artificial Sequence
  ENSG00000163913_47 (sequence is synthesized)
ggcaaagctgccatcaaagagggaggtcacaagttagggtctggtttggtggatgtgtgctgtgtctgagggtggaatgaagctgaggtcagggccatggtcagggaagtttacctggag

SEQ ID NO: 503875 - DNA, 120 bp, Artificial Sequence
  ENSG00000163913_48 (sequence is synthesized)
gaggagatgtccatcatgcaagctgaggcagccagggaagatggccaagtggatgttccaggggaggacccagcatatggagaggcaagcaaggcatgtgggagagggtgaggggaccct

SEQ ID NO: 503876 - DNA, 120 bp, Artificial Sequence
  ENSG00000163913_49 (sequence is synthesized)
gggtgggaggggccggagaggcagcaggacccaaggcctgagagcctacctttgggttttcctctcttctgtagccatcgagggccacagtggtaccataagcagagcaggtgcctgaag

SEQ ID NO: 503877 - DNA, 120 bp, Artificial Sequence
  ENSG00000163913_50 (sequence is synthesized)
ggcctgtgcagccagatactggatcattaccaggcaatgatccagatttttaaggtcttggatgtcaggagacataattgtccctgttcttttctaaatctcactgtactctcagctcct

SEQ ID NO: 503878 - DNA, 120 bp, Artificial Sequence
  ENSG00000163913_51 (sequence is synthesized)
tcccagccgcagccccaccttccctctgtaaggaaaacccactccactggagaagacccagagctccttgttgtaagaattggcctcgctagaggattccaggcccattatgtacatttc

SEQ ID NO: 503879 - DNA, 120 bp, Artificial Sequence
  ENSG00000163913_52 (sequence is synthesized)
aggggaaataccctcaaatcaaggggtgccttcctggagtcagacctctgctgcatgcgtctccgtctttccccgtaggagcagtcagggctatgcctgtgggggctgagcacctgtact

SEQ ID NO: 503880 - DNA, 120 bp, Artificial Sequence
  ENSG00000163913_53 (sequence is synthesized)
catcctttccagcaagttctgtttgagtcaacagcttgatagaacctctaccctgagccttaccctgtgccatcccctggggacctggaaatggctcctgacagtccctgactttgagga

SEQ ID NO: 503881 - DNA, 120 bp, Artificial Sequence
  ENSG00000163913_54 (sequence is synthesized)
tgcgggaggaagggcaggagggcctgggggcagccaacatcggaggtgacctgagaggagagcacaaaggctcgtcagcctctggctgaggagcttcaagggggccccagagcacaggct

SEQ ID NO: 503882 - DNA, 120 bp, Artificial Sequence
  ENSG00000163913_55 (sequence is synthesized)
gccgctcagaaactgcccaccaggccctcggggaagggtgtgcagacagagtggggtacacccaggggcctcagagcagggttgagggtggctccccagggagtctggaccaggccccac

SEQ ID NO: 503883 - DNA, 120 bp, Artificial Sequence
  ENSG00000163913_56 (sequence is synthesized)
ctggcagggtgagagcagagtgccctttgtgccaggcatcctaggagggcctggctggcaggtttggtgaggcaggaagagccattttggcctagtcagggtataagatgagccatcagc

SEQ ID NO: 503884 - DNA, 120 bp, Artificial Sequence
  ENSG00000163913_57 (sequence is synthesized)
aggcccagagatgctaagcaaggttaaagtattaatggaaactacgctgtttttatctttggaaaaattcctgggccttgccatccgagaagtacactcacctctcacaagcgcacagag

SEQ ID NO: 503885 - DNA, 120 bp, Artificial Sequence
  ENSG00000163913_58 (sequence is synthesized)
ccttcctcacggtctttcctctgccttcccggcaccagcacaagctgtgttccagcctggggctcactccaaggacaggcagtgccagctcctgggcctggtgttgcccctgctgtcctt

SEQ ID NO: 503886 - DNA, 120 bp, Artificial Sequence
  ENSG00000163913_59 (sequence is synthesized)
gttctgattcctgatgtcctgtcctggaataactgaaaatctgggctaaaaatgctaaaatgcattcagaatatggtgattttatcctgagagagttaatactacttctctaccttcaat

SEQ ID NO: 503887 - DNA, 120 bp, Artificial Sequence
  ENSG00000163913_60 (sequence is synthesized)
ttctccatttctgccgtggaggtgccgcaggtaactgggggtgcctgtccactcttagcactggcaaggctgacaagaccagggaagctgggccctttgctggtgctttggggagagagt

SEQ ID NO: 503888 - DNA, 120 bp, Artificial Sequence
  ENSG00000163913_61 (sequence is synthesized)
agcaaggagagaagaatggcagctgtgaggtcgtgggaggcagtctgggcctggaacctgccgccctgtctccactccttgcaacctgtgtgactgggggcaaacagctcaacctccctg

SEQ ID NO: 503889 - DNA, 120 bp, Artificial Sequence
  ENSG00000163913_62 (sequence is synthesized)
tataaatgacatcgcatttaagcctgatggaactcaactgattttggctgccggaagcagattactggcaagcgctttgcttctggatcagctgacaaaagcgttattatctggacatca

SEQ ID NO: 503890 - DNA, 120 bp, Artificial Sequence
  ENSG00000163913_63 (sequence is synthesized)
ccacacctctgtgcccaggtggctctgcctttaccccaggcctggccccagagctgactcttactctagaaacctctgccctttctggaaccaggctgtagttctccagcaaatctaccc

SEQ ID NO: 503891 - DNA, 120 bp, Artificial Sequence
  ENSG00000163913_64 (sequence is synthesized)
cacactcccaacccacattccttcaacccagccagcttccttctttcacacatcctccctcaagctcagagcaaggacttggttcagacagacctgggttcacatcccggctccaccctc

SEQ ID NO: 503892 - DNA, 120 bp, Artificial Sequence
  ENSG00000163913_65 (sequence is synthesized)
tcctagctctgtctccatctttctgcaccttgggttccccctttcccacaggtagttgtgaggctaaatgagccagtatagtccacgtgctccgcacggtgcccggagcatggtaaatgg

SEQ ID NO: 503893 - DNA, 120 bp, Artificial Sequence
  ENSG00000163913_66 (sequence is synthesized)
ctggctaatggtggcagcggccactgtcattcctgccaggggaaaagtgccgttgagcgctgcctgtgcaggtgtcttgggcacggggacccaagtgacagggcttgggtatttcggcag

SEQ ID NO: 503894 - DNA, 120 bp, Artificial Sequence
  ENSG00000163913_67 (sequence is synthesized)
gcctttatcctgcttccccatggcatggagctcctgggcccggcgccccttccctgcctgcccacccgggtggcctttcctcttggcagccaggccccaggggcctgaagccagagtcca

SEQ ID NO: 503895 - DNA, 120 bp, Artificial Sequence
  ENSG00000163913_68 (sequence is synthesized)
agctgacaaaagcgttattatctggacatcaaaactggaaggcattctgaagtacacggttgtggtctcctgaacagaagtctgtctccaaacacaaatcaagcagcaagatcatctgct

SEQ ID NO: 503896 - DNA, 120 bp, Artificial Sequence
  ENSG00000163913_69 (sequence is synthesized)
cttttgatgagtccttttccctgcacagagcttctggtgaaggtggtgggagttgttcttgcagagcacatgggattccaacggcctggcagtgggccaggatcttgttgccatggtgac

SEQ ID NO: 503897 - DNA, 120 bp, Artificial Sequence
  ENSG00000163913_70 (sequence is synthesized)
ggagtacaagttgcaagttcagaagacagtgaagttgctaagacttcagtttggtcattcaatctagcaagtatttattgaggtcatctatgttccaggcactgttcaaggtgcttgagt

SEQ ID NO: 503898 - DNA, 120 bp, Artificial Sequence
  ENSG00000163913_71 (sequence is synthesized)
tttcatccagtttcccccagtggatccatcttatgtaactattatacaatatcaagaccaggaaactgagactggcacaaagtgtgtatattatatagttctgttgttttatcgcatgtg

SEQ ID NO: 503899 - DNA, 120 bp, Artificial Sequence
  ENSG00000163913_72 (sequence is synthesized)
tagattgccatcagcgtgacacagaactaagccatcaccatgcagttaccacttagtgtcatatctactcaccttacctccagttatctccaaaccctggtaaccacaaatctgttctcc

SEQ ID NO: 503900 - DNA, 120 bp, Artificial Sequence
  ENSG00000163913_73 (sequence is synthesized)
cagcataaaatcctggagatccatctaagttgttgtatgtttcaattatttgttcctttttattgctgggtagtattccaaccaatccatcttcttttatattattgtgcattgaagggt

SEQ ID NO: 503901 - DNA, 120 bp, Artificial Sequence
  ENSG00000163914_0 (sequence is synthesized)
agagtcatccagctggagccctgagtggctgagctcaggccttcgcagcattcttgggtgggagcagccacgggtcagccacaagggccacagccatgaatggcacagaaggccctaact

SEQ ID NO: 503902 - DNA, 120 bp, Artificial Sequence
  ENSG00000163914_1 (sequence is synthesized)
tctacgtgcccttctccaatgcgacgggtgtggtacgcagccccttcgagtacccacagtactacctggctgagccatggcagttctccatgctggccgcctacatgtttctgctgatcg

SEQ ID NO: 503903 - DNA, 120 bp, Artificial Sequence
  ENSG00000163914_2 (sequence is synthesized)
tgctgggcttccccatcaacttcctcacgctctacgtcaccgtccagcacaagaagctgcgcacgcctctcaactacatcctgctcaacctagccgtggctgacctcttcatggtcctag

SEQ ID NO: 503904 - DNA, 120 bp, Artificial Sequence
  ENSG00000163914_3 (sequence is synthesized)
gtggcttcaccagcaccctctacacctctctgcatggatacttcgtcttcgggcccacaggatgcaatttggagggcttctttgccaccctgggcggtgaaattgccctgtggtccttgg

SEQ ID NO: 503905 - DNA, 120 bp, Artificial Sequence
  ENSG00000163914_4 (sequence is synthesized)
tggtcctggccatcgagcggtacgtggtggtgtgtaagcccatgagcaacttccgcttcggggagaaccatgccatcatgggcgttgccttcacctgggtcatggcgctggcctgcgccg

SEQ ID NO: 503906 - DNA, 120 bp, Artificial Sequence
  ENSG00000163914_5 (sequence is synthesized)
cacccccactcgccggctggtccaggtacatccccgagggcctgcagtgctcgtgtggaatcgactactacacgctcaagccggaggtcaacaacgagtcttttgtcatctacatgttcg

SEQ ID NO: 503907 - DNA, 120 bp, Artificial Sequence
  ENSG00000163914_6 (sequence is synthesized)
tggtccacttcaccatccccatgattatcatctttttctgctatgggcagctcgtcttcaccgtcaaggaggccgctgcccagcagcaggagtcagccaccacacagaaggcagagaagg

SEQ ID NO: 503908 - DNA, 120 bp, Artificial Sequence
  ENSG00000163914_7 (sequence is synthesized)
aggtcacccgcatggtcatcatcatggtcatcgctttcctgatctgctgggtgccctacgccagcgtggcattctacatcttcacccaccagggctccaacttcggtcccatcttcatga

SEQ ID NO: 503909 - DNA, 120 bp, Artificial Sequence
  ENSG00000163914_8 (sequence is synthesized)
ccatcccagcgttctttgccaagagcgccgccatctacaaccctgtcatctatatcatgatgaacaagcagttccggaactgcatgctcaccaccatctgctgcggcaagaacccactgg

SEQ ID NO: 503910 - DNA, 120 bp, Artificial Sequence
  ENSG00000163914_9 (sequence is synthesized)
gtgacgatgaggcctctgctaccgtgtccaagacggagacgagccaggtggccccggcctaagacctgcctaggactctgtggccgactataggcgtctcccatcccctacaccttcccc

SEQ ID NO: 503911 - DNA, 120 bp, Artificial Sequence
  ENSG00000163914_10 (sequence is synthesized)
cagccacagccatcccaccaggagcagcgcctgtgcagaatgaacgaagtcacataggctccttaattttttttttttttttaagaaataattaatgaggctcctcactcacctgggaca

SEQ ID NO: 503912 - DNA, 120 bp, Artificial Sequence
  ENSG00000163914_11 (sequence is synthesized)
agggacatccaccaagacctactgatctggagtcccacgttccccaaggccagcgggatgtgtgcccctcctcctcccaactcatctttcaggaacacgaggattcttgctttctggaaa

SEQ ID NO: 503913 - DNA, 120 bp, Artificial Sequence
  ENSG00000163914_12 (sequence is synthesized)
agtgtcccagcttagggataagtgtctagcacagaatggggcacacagtaggtgcttaataaatgctggatggatgcaggaaggaatggaggaatgaatgggaagggagaacatatctat

SEQ ID NO: 503914 - DNA, 120 bp, Artificial Sequence
  ENSG00000163914_13 (sequence is synthesized)
cctctcagaccctcgcagcagcagcaactcatacttggctaatgatatggagcagttgtttttccctccctgggcctcactttcttctcctataaaatggaaatcccagatccctggtcc

SEQ ID NO: 503915 - DNA, 120 bp, Artificial Sequence
  ENSG00000163914_14 (sequence is synthesized)
tgccgacacgcagctactgagaagaccaaaagaggtgtgtgtgtgtctatgtgtgtgtttcagcactttgtaaatagcaagaagctgtacagattctagttaatgttgtgaataacatca

SEQ ID NO: 503916 - DNA, 120 bp, Artificial Sequence
  ENSG00000163914_15 (sequence is synthesized)
attaatgtaactagttaattactatgattatcacctcctgatagtgaacattttgagattgggcattcagatgatggggtttcacccaaccttggggcaggtttttaaaaattagctagg

SEQ ID NO: 503917 - DNA, 120 bp, Artificial Sequence
  ENSG00000163914_16 (sequence is synthesized)
catcaaggccagaccagggctgggggttgggctgtaggcagggacagtcacaggaatgcagaatgcagtcatcagacctgaaaaaacaacactgggggagggggacggtgaaggccaagt

SEQ ID NO: 503918 - DNA, 120 bp, Artificial Sequence
  ENSG00000163914_17 (sequence is synthesized)
tcccaatgagggtgagattgggcctggggtctcacccctagtgtggggccccaggtcccgtgcctccccttcccaatgtggcctatggagagacaggcctttctctcagcctctggaagc

SEQ ID NO: 503919 - DNA, 120 bp, Artificial Sequence
  ENSG00000163914_18 (sequence is synthesized)
cacctgctcttttgctctagcacctgggtcccagcatctagagcatggagcctctagaagccatgctcacccgcccacatttaattaacagctgagtccctgatgtcatccttatctcga

SEQ ID NO: 503920 - DNA, 120 bp, Artificial Sequence
  ENSG00000163914_19 (sequence is synthesized)
agagcttagaaacaaagagtgggaaattccactgggcctaccttccttggggatgttcatgggccccagtttccagtttcccttgccagacaagcccatcttcagcagttgctagtccat

SEQ ID NO: 503921 - DNA, 120 bp, Artificial Sequence
  ENSG00000163914_20 (sequence is synthesized)
tctccattctggagaatctgctccaaaaagctggccacatctctgaggtgtcagaattaagctgcctcagtaactgctcccccttctccatataagcaaagccagaagctctagctttac

SEQ ID NO: 503922 - DNA, 120 bp, Artificial Sequence
  ENSG00000163914_21 (sequence is synthesized)
ccagctctgcctggagactaaggcaaattgggccattaaaagctcagctcctatgttggtattaacggtggtgggttttgttgctttcacactctatccacaggatagattgaaactgcc

SEQ ID NO: 503923 - DNA, 120 bp, Artificial Sequence
  ENSG00000163914_22 (sequence is synthesized)
agcttccacctgatccctgaccctgggatggctggattgagcaatgagcagagccaagcagcacagagtcccctggggctagaggtggaggaggcagtcctgggaatgggaaaaacccca

SEQ ID NO: 503924 - DNA, 120 bp, Artificial Sequence
  ENSG00000163918_0 (sequence is synthesized)
accggcgtattcccgccctgcttttcgcccgccgttccgtggcgggaactgaggcgactgtggggacatcagtgatcgtaagtctcctgggcccgttattctcagattaggtgacggagc

SEQ ID NO: 503925 - DNA, 120 bp, Artificial Sequence
  ENSG00000163918_1 (sequence is synthesized)
taagacttcgagaccatctcgtcctttttgtatcgcggaaacctgaggaacgagccggcggcggtgacctgcacgagaagccaggctaactgggtgaagtaccatgcaagcatttcttaa

SEQ ID NO: 503926 - DNA, 120 bp, Artificial Sequence
  ENSG00000163918_2 (sequence is synthesized)
aggtacatccatcagtactaaacccccgctgaccaaggatcgaggagtagctgccagtgcgggaagtagcggagagaacaagaaagccaaacccgttccctgggtggaaaaatatcgccc

SEQ ID NO: 503927 - DNA, 120 bp, Artificial Sequence
  ENSG00000163918_3 (sequence is synthesized)
aaaatgtgtggatgaagttgctttccaggaagaagtggttgcagtgctgaaaaaatctttagaaggagcagatcttcctaatctcttgttttacggaccacctggaactggaaaaacatc

SEQ ID NO: 503928 - DNA, 120 bp, Artificial Sequence
  ENSG00000163918_4 (sequence is synthesized)
cactattttggcagcagctagagaactctttgggcctgaacttttccgattaagagttcttgagttaaatgcatctgatgaacgtggaatacaagtagttcgagagaaagtgaaaaattt

SEQ ID NO: 503929 - DNA, 120 bp, Artificial Sequence
  ENSG00000163918_5 (sequence is synthesized)
attctggatgaagcagattctatgacctcagctgctcaggcagctttaagacgtaccatggagaaggagtcgaaaaccacccgattctgtcttatctgtaactatgtcagtcgaataatt

SEQ ID NO: 503930 - DNA, 120 bp, Artificial Sequence
  ENSG00000163918_6 (sequence is synthesized)
gaacccctgacctctagatgttcaaaattccgcttcaagcctctgtcagataaaattcaacagcagcgattactagacattgccaagaaggaaaatgtcaaaattagtgatgagggaata

SEQ ID NO: 503931 - DNA, 120 bp, Artificial Sequence
  ENSG00000163918_7 (sequence is synthesized)
gcttatcttgttaaagtgtcagaaggagacttaagaaaagccattacatttcttcaaagcgctactcgattaacaggtggaaaggagatcacagagaaagtgattacagacattgccggg

SEQ ID NO: 503932 - DNA, 120 bp, Artificial Sequence
  ENSG00000163918_8 (sequence is synthesized)
gtaataccagctgagaaaattgatggagtatttgctgcctgtcagagtggctcttttgacaaactagaagctgtggtcaaggatttaatagatgagggtcatgcagcaactcagctcgtc

SEQ ID NO: 503933 - DNA, 120 bp, Artificial Sequence
  ENSG00000163918_9 (sequence is synthesized)
aatcaactccatgatgtggttgtagaaaataacttatctgataaacagaagtctattatcacagaaaaacttgccgaagttgacaaatgcctagcagatggtgctgatgaacatttgcaa

SEQ ID NO: 503934 - DNA, 120 bp, Artificial Sequence
  ENSG00000163918_10 (sequence is synthesized)
ctcatcagcctttgtgcaactgtgatgcagcagttatctcagaattgttaacgtgaatatatctggatggggggttttgtaaataatgaagttgtaataaaaataaaatgaccaaaagca

SEQ ID NO: 503935 - DNA, 120 bp, Artificial Sequence
  ENSG00000163918_11 (sequence is synthesized)
cgcgctcacgtctgaagtgggagcaatgcaccgggacagggacacctcctaggccatgcctgttccagtccagttctgcctgaaagtccggctggctcatcacctgcctaaataaaaccg

SEQ ID NO: 503936 - DNA, 120 bp, Artificial Sequence
  ENSG00000163918_12 (sequence is synthesized)
tatacgggcaaactccctccgcaagcagcgcgccccagcaccggaagtgacgcgttacgtgcccgcgtattcctaccggcgtattcccgccctgcttttcgcccgccgttccgtggcggg

SEQ ID NO: 503937 - DNA, 120 bp, Artificial Sequence
  ENSG00000163918_13 (sequence is synthesized)
tttgtggcttttaggaaattttcatccaacaaatactgggtgtttagcaagtgccaagtactgcactaggaagtataagggaataacctgggagtatcagagtgtttgaggtgaggagat

SEQ ID NO: 503938 - DNA, 120 bp, Artificial Sequence
  ENSG00000163918_14 (sequence is synthesized)
agtgtttgaggtgaggagatagcactgacttttcagtttgtcaggcatgtaacagacatttcaggaaagaaaaggacactttcagttgttagtttttttgtttttttttttttgagacag

SEQ ID NO: 503939 - DNA, 77 bp, Artificial Sequence
  ENSG00000163918_15 (sequence is synthesized)
tcgcccaggctggagtgcagtgacgcaataccgactcactgcaacctccacctcccgcctcaccctcccaagtatat

SEQ ID NO: 503940 - DNA, 120 bp, Artificial Sequence
  ENSG00000163918_16 (sequence is synthesized)
agatttctaagtggggctcaggaattataatagatgtccacagctgcatggtcttctctctccacaacacgcagacactattagaagtaaaagccacgtgtcctcaagagggcaaggcaa

SEQ ID NO: 503941 - DNA, 120 bp, Artificial Sequence
  ENSG00000163918_17 (sequence is synthesized)
agcatcttcagatgtctctgcccttaaagcacacgcgttctgctctgcgacgaagcaggacaaggaggacagggacctgcacctccggaggcccgcacctacgaagatagcgggctcggg

SEQ ID NO: 503942 - DNA, 120 bp, Artificial Sequence
  ENSG00000163918_18 (sequence is synthesized)
cctttttctttaatttttgtgggtataacagattcgagcaatgcagaaaggaagtaaaacattatttcactctttcagaatgtgtttggttacggtaaaaacaagtggggtttccaccta

SEQ ID NO: 503943 - DNA, 120 bp, Artificial Sequence
  ENSG00000163918_19 (sequence is synthesized)
tttccgattatgaaaaagtttctcatttcattgctgatgtttaagaatggtcattggtattttagtagaaggaacacttgagagttttctgtggctactataatatactaaataacctct

SEQ ID NO: 503944 - DNA, 120 bp, Artificial Sequence
  ENSG00000163918_20 (sequence is synthesized)
tcctttattatgtaacatctttgcacaaggctaagtttattttcgggctgtactttctcataatggttccccaccaccacccccgctttcctatggtgctgattcgcaataaaagtttca

SEQ ID NO: 503945 - DNA, 120 bp, Artificial Sequence
  ENSG00000163918_21 (sequence is synthesized)
tttgtatcgcggaaacctgaggaacgagccggcggcggtgacctgcacgagaagccaggctaactgagtcccccaccttcccttccccacagaaagtctctgaagggtgaagtaccatgc

SEQ ID NO: 503946 - DNA, 120 bp, Artificial Sequence
  ENSG00000163918_22 (sequence is synthesized)
taatagatgagggtcatgcagcaactcagctcgtcaatcaactccatgatgtggttgtagaaaataacttatctgataaacagaagtctattatcacagaaaaacttgccgtaagtaggt

SEQ ID NO: 503947 - DNA, 120 bp, Artificial Sequence
  ENSG00000163923_0 (sequence is synthesized)
gcggtcttagcatccggcgcgcggcggttgaattgctgcgcccagcgaggcaaccgcctccgaacgccaggtgggggcgaggcgtctcggagtctcagagacaccaaggcccctgcgaca

SEQ ID NO: 503948 - DNA, 120 bp, Artificial Sequence
  ENSG00000163923_1 (sequence is synthesized)
aggtggctgcagctaggccgggggcgtcaggacgacggagcgggttcgggtcggtgacacgcagacctgagggagctgggcccgccttttccgcccgcgccccaggcccttgcagatcga

SEQ ID NO: 503949 - DNA, 120 bp, Artificial Sequence
  ENSG00000163923_2 (sequence is synthesized)
gatttgcgtcctagagtgggaaaaaagcagaggccagggcgccgattttatttggagagaagcaagcatctttgcctctttggagtaggaaattcagacttgaaaaagtggtgtgtggtt

SEQ ID NO: 503950 - DNA, 120 bp, Artificial Sequence
  ENSG00000163923_3 (sequence is synthesized)
tctcgccatgtcttctcacaagactttcaccattaagcgattcctggccaagaaacaaaagcaaaatcgtcccatcccccagtggattcagatgaaacctggtagtaaaatcaggtacaa

SEQ ID NO: 503951 - DNA, 120 bp, Artificial Sequence
  ENSG00000163923_4 (sequence is synthesized)
ctccaaaaggaggcattggagaagaaccaagctgggtctataaggaattgcacatgagatggcacacatatttatgctgtatcaagttcacgatcatcttacgatatcaagctgaaaatg

SEQ ID NO: 503952 - DNA, 120 bp, Artificial Sequence
  ENSG00000163923_5 (sequence is synthesized)
tcaccactacctggacagttgcacatgttttactgggaatatttttttctgtttttctgtatgctctgtgctagtagggtggattcagtaataaatatgtgaaagcttttgtttcaaaaa

SEQ ID NO: 503953 - DNA, 120 bp, Artificial Sequence
  ENSG00000163930_0 (sequence is synthesized)
cccgttgtctgtgtgtgggactgaggggccccgggggcggtgggggctcccggtgggggcagcggtggggagggagggcctggacatggcgctgaggggccgccccgcgggaagatgaat

SEQ ID NO: 503954 - DNA, 120 bp, Artificial Sequence
  ENSG00000163930_1 (sequence is synthesized)
ccgcgggaagatgaataagggctggctggagctggagagcgacccaggcctcttcaccctgctcgtggaagatttcggtgtcaagggggtgcaagtggaggagatctacgaccttcagag

SEQ ID NO: 503955 - DNA, 120 bp, Artificial Sequence
  ENSG00000163930_2 (sequence is synthesized)
caaatgtcagggccctgtatatggatttatcttcctgttcaaatggatcgaagagcgccggtcccggcgaaaggtctctaccttggtggatgatacgtccgtgattgatgatgatattgt

SEQ ID NO: 503956 - DNA, 120 bp, Artificial Sequence
  ENSG00000163930_3 (sequence is synthesized)
gaataacatgttctttgcccaccagctgatacccaactcttgtgcaactcatgccttgctgagcgtgctcctgaactgcagcagcgtggacctgggacccaccctgagtcgcatgaagga

SEQ ID NO: 503957 - DNA, 120 bp, Artificial Sequence
  ENSG00000163930_4 (sequence is synthesized)
cttcaccaagggtttcagccctgagagcaaaggatatgcgattggcaatgccccggagttggccaaggcccataatagccatgccaggcccgagccacgccacctccctgagaagcagaa

SEQ ID NO: 503958 - DNA, 120 bp, Artificial Sequence
  ENSG00000163930_5 (sequence is synthesized)
tggccttagtgcagtgcggaccatggaggcgttccactttgtcagctatgtgcctatcacaggccggctctttgagctggatgggctgaaggtctaccccattgaccatgggccctgggg

SEQ ID NO: 503959 - DNA, 120 bp, Artificial Sequence
  ENSG00000163930_6 (sequence is synthesized)
ggaggacgaggagtggacagacaaggcccggcgggtcatcatggagcgtatcggcctcgccactgcaggggagccctaccacgacatccgcttcaacctgatggcagtggtgcccgaccg

SEQ ID NO: 503960 - DNA, 120 bp, Artificial Sequence
  ENSG00000163930_7 (sequence is synthesized)
caggatcaagtatgaggccaggctgcatgtgctgaaggtgaaccgtcagacagtactagaggctctgcagcagctgataagagtaacacagccagagctgattcagacccacaagtctca

SEQ ID NO: 503961 - DNA, 120 bp, Artificial Sequence
  ENSG00000163930_8 (sequence is synthesized)
agagtcacagctgcctgaggagtccaagtcagccagcaacaagtccccgctggtgctggaagcaaacagggcccctgcagcctctgagggcaaccacacagatggtgcagaggaggcggc

SEQ ID NO: 503962 - DNA, 120 bp, Artificial Sequence
  ENSG00000163930_9 (sequence is synthesized)
tggttcatgcgcacaagccccatcccacagccctcccaacaaacccaagctagtggtgaagcctccaggcagcagcctcaatggggttcaccccaaccccactcccattgtccagcggct

SEQ ID NO: 503963 - DNA, 120 bp, Artificial Sequence
  ENSG00000163930_10 (sequence is synthesized)
gccggcctttctagacaatcacaattatgccaagtcccccatgcaggaggaagaagacctggcggcaggtgtgggccgcagccgagttccagtccgcccaccccagcagtactcagatga

SEQ ID NO: 503964 - DNA, 120 bp, Artificial Sequence
  ENSG00000163930_11 (sequence is synthesized)
tgaggatgactatgaggatgacgaggaggatgacgtgcagaacaccaactctgcccttaggtataaggggaagggaacagggaagccaggggcattgagcggttctgctgatgggcaact

SEQ ID NO: 503965 - DNA, 120 bp, Artificial Sequence
  ENSG00000163930_12 (sequence is synthesized)
gtcagtgctgcagcccaacaccatcaacgtcttggctgagaagctcaaagagtcccagaaggacctctcaattcctctgtccatcaagactagcagcggggctgggagtccggctgtggc

SEQ ID NO: 503966 - DNA, 120 bp, Artificial Sequence
  ENSG00000163930_13 (sequence is synthesized)
agtgcccacacactcgcagccctcacccacccccagcaatgagagtacagacacggcctctgagatcggcagtgctttcaactcgccactgcgctcgcctatccgctcagccaacccgac

SEQ ID NO: 503967 - DNA, 120 bp, Artificial Sequence
  ENSG00000163930_14 (sequence is synthesized)
gcggccctccagccctgtcacctcccacatctccaaggtgctttttggagaggatgacagcctgctgcgtgttgactgcatacgctacaaccgtgctgtccgtgatctgggtcctgtcat

SEQ ID NO: 503968 - DNA, 120 bp, Artificial Sequence
  ENSG00000163930_15 (sequence is synthesized)
cagcacaggcctgctgcacctggctgaggatggggtgctgagtcccctggcgctgacagagggtgggaagggttcctcgccctccatcagaccaatccaaggcagccaggggtccagcag

SEQ ID NO: 503969 - DNA, 120 bp, Artificial Sequence
  ENSG00000163930_16 (sequence is synthesized)
cccagtggagaaggaggtcgtggaagccacggacagcagagagaagacggggatggtgaggcctggcgagcccttgagtggggagaaatactcacccaaggagctgctggcactgctgaa

SEQ ID NO: 503970 - DNA, 120 bp, Artificial Sequence
  ENSG00000163930_17 (sequence is synthesized)
gtgtgtggaggctgagattgcaaactatgaggcgtgcctcaaggaggaggtagagaagaggaagaagttcaagattgatgaccagagaaggacccacaactacgatgagttcatctgcac

SEQ ID NO: 503971 - DNA, 120 bp, Artificial Sequence
  ENSG00000163930_18 (sequence is synthesized)
ctttatctccatgctggctcaggaaggcatgctggccaacctagtggagcagaacatctccgtgcggcggcgccaaggggtcagcatcggccggctccacaagcagcggaagcctgaccg

SEQ ID NO: 503972 - DNA, 120 bp, Artificial Sequence
  ENSG00000163930_19 (sequence is synthesized)
gcggaaacgctctcgcccctacaaggccaagcgccagtgaggactgctggccctgactctgcagcccactcttgccgtgtggccctcaccagggtccttccctgccccacttcccctttt

SEQ ID NO: 503973 - DNA, 120 bp, Artificial Sequence
  ENSG00000163930_20 (sequence is synthesized)
cccagtattactgaatagtcccagctggagagtccaggccctgggaatgggaggaaccaggccacattccttccatcgtgccctgaggcctgacacggcagatcagccccatagtgctca

SEQ ID NO: 503974 - DNA, 120 bp, Artificial Sequence
  ENSG00000163930_21 (sequence is synthesized)
ggaggcagcatctggagttggggcacagcgaggtactgcagcttcctccacagccggctgtggagcagcaggacctggcccttctgcctgggcagcagaatatatattttacctatcaga

SEQ ID NO: 503975 - DNA, 120 bp, Artificial Sequence
  ENSG00000163930_22 (sequence is synthesized)
gacatctatttttctgggctccaacccaacatgccaccatgttgacataagttcctacctgactatgctttctctcctaggagctgtcctggtgggcccaggtccttgtatcatgccacg

SEQ ID NO: 503976 - DNA, 120 bp, Artificial Sequence
  ENSG00000163930_23 (sequence is synthesized)
gtcccaactacagggtcctagctgggggcctgggtgggccctgggctctgggccctgctgctctagccccagccaccagcctgtccctgttgtaaggaagccaggtcttctctcttcatt

SEQ ID NO: 503977 - DNA, 120 bp, Artificial Sequence
  ENSG00000163930_24 (sequence is synthesized)
cctcttaggagagtgccaaactcagggacccagcactgggctgggttgggagtagggtgtcccagtggggttggggtgagcaggctgctgggatcccatggcctgagcagagcatgtggg

SEQ ID NO: 503978 - DNA, 120 bp, Artificial Sequence
  ENSG00000163930_25 (sequence is synthesized)
aactgttcagtggcctgtgaactgtcttccttgttctagccaggctgttcaagactgctctccatagcaaggttctagggctcttcgccttcagtgttgtggccctagctatgggcctaa

SEQ ID NO: 503979 - DNA, 120 bp, Artificial Sequence
  ENSG00000163930_26 (sequence is synthesized)
attgggctctaggtctctgtccctggcgcttgaggctcagaagagcctctgtccagcccctcagtattaccatgtctccctctcaggggtagcagagacagggttgcttataggaagctg

SEQ ID NO: 503980 - DNA, 120 bp, Artificial Sequence
  ENSG00000163930_27 (sequence is synthesized)
gcaccactcagctcttcctgctactccagtttcctcagcctctgcaaggcactcagggtgggggacagcaggatcaagacaacccgttggagcccctgtgttccagaggacctgatgcca

SEQ ID NO: 503981 - DNA, 120 bp, Artificial Sequence
  ENSG00000163930_28 (sequence is synthesized)
aggggtaatgggcccagcagtgcctctggagcccaggccccaacacagccccatggcctctgccagatggctttgaaaaaggtgatccaagcaggcccctttatctgtacatagtgactg

SEQ ID NO: 503982 - DNA, 120 bp, Artificial Sequence
  ENSG00000163930_29 (sequence is synthesized)
agtggggggtgctggcaagtgtggcagctgcctctgggctgagcacagcttgacccctctagcccctgtaaatactggatcaatgaatgaataaaactctcctaagaatctcctgagaaa

SEQ ID NO: 503983 - DNA, 120 bp, Artificial Sequence
  ENSG00000163930_30 (sequence is synthesized)
ctcgccactgcagggtaagggccctgtgcctgccctgttctactctctggagctgtacctactttgggagggacagagagtatccaggtgatttgtaaattgcaaggccatatggtgaat

SEQ ID NO: 503984 - DNA, 120 bp, Artificial Sequence
  ENSG00000163930_31 (sequence is synthesized)
aggggcaggcctcagtggagccttaggcagcccaggtctgctggttcacttccagataggcccctcatacagcttgttggaaggtaccagctcaggtgcctggcatgtatggctagtcgc

SEQ ID NO: 503985 - DNA, 120 bp, Artificial Sequence
  ENSG00000163930_32 (sequence is synthesized)
tgcctgcctgttggggtggggcctatacctacagctgcaggtgtgactgcagggagccctgccaggatatctgcctcaacctgatggcggggccggggcgggagctgctctcacggctgc

SEQ ID NO: 503986 - DNA, 120 bp, Artificial Sequence
  ENSG00000163930_33 (sequence is synthesized)
cccaggtgccaagttcttgattggaactttggtgtgaagattggtggctggagccatgtgccagaagactttctgggttgggtggtggcaggggccttgataggcatggactcgctgctc

SEQ ID NO: 503987 - DNA, 120 bp, Artificial Sequence
  ENSG00000163930_34 (sequence is synthesized)
ttcccccgtcagaaggtagagggagagcagtccttccctaaagaaaggcacctgtaaagggccgctgttaccacaggcccctgggcccttctctgtaatgtacactccctttcttgtttt

SEQ ID NO: 503988 - DNA, 120 bp, Artificial Sequence
  ENSG00000163930_35 (sequence is synthesized)
tttttttttttttttttcttcctgcttcttttttcccatctcattctttgccctgtctcattgcgggatcatgacttagagcttgctgactcccattgcaccagctggctgggctgttct

SEQ ID NO: 503989 - DNA, 120 bp, Artificial Sequence
  ENSG00000163930_36 (sequence is synthesized)
tgcaccagctggctgggctgttcttctctgggaagtgctggttcacagggccggggagactgtgagcttttcttggagatcctactggaggtcctgcctgtgttcttgccctgtctcaga

SEQ ID NO: 503990 - DNA, 120 bp, Artificial Sequence
  ENSG00000163931_0 (sequence is synthesized)
gggagcagccgctatctctgtgtgtccgcgtgtgcgcccggtccccgcctgccgcaccatggagagctaccacaagcctgaccagcagaagctgcaggccttgaaggacacggccaaccg

SEQ ID NO: 503991 - DNA, 120 bp, Artificial Sequence
  ENSG00000163931_1 (sequence is synthesized)
cctacgtatcagctccatccaggccaccactgcggcgggctctggccaccccacgtcatgctgcagcgccgcagagatcatggctgtcctctttttccacaccatgcgctacaagtccca

SEQ ID NO: 503992 - DNA, 120 bp, Artificial Sequence
  ENSG00000163931_2 (sequence is synthesized)
ggacccccggaatccgcacaatgaccgctttgtgctctccaagggccatgcagctcccatcctctacgcggtctgggctgaagctggtttcctggccgaggcggagctgctgaacctgag

SEQ ID NO: 503993 - DNA, 120 bp, Artificial Sequence
  ENSG00000163931_3 (sequence is synthesized)
gaagatcagctccgacttggacgggcacccggtcccgaaacaagctttcaccgacgtggccactggctccctgggccagggcctcggggccgcttgtgggatggcctacaccggcaaata

SEQ ID NO: 503994 - DNA, 120 bp, Artificial Sequence
  ENSG00000163931_4 (sequence is synthesized)
cttcgacaaggccagctaccgagtctattgcttgctgggagacggggagctgtcagagggctctgtatgggaggccatggccttcgccagcatctataagctggacaaccttgtggccat

SEQ ID NO: 503995 - DNA, 120 bp, Artificial Sequence
  ENSG00000163931_5 (sequence is synthesized)
tctagacatcaatcgcctgggccagagtgacccggccccactgcagcaccagatggacatctaccagaagcggtgcgaggccttcggttggcatgccatcatcgtggatggacacagcgt

SEQ ID NO: 503996 - DNA, 120 bp, Artificial Sequence
  ENSG00000163931_6 (sequence is synthesized)
ggaggagctgtgcaaggcctttggccaggccaagcaccagccaacagccatcattgccaagaccttcaagggccgagggatcacgggggtagaagataaggagtcttggcatgggaagcc

SEQ ID NO: 503997 - DNA, 120 bp, Artificial Sequence
  ENSG00000163931_7 (sequence is synthesized)
cctccccaaaaacatggctgagcagatcatccaggagatctacagccagatccagagcaaaaagaagatcctggcaacccctccacaggaggacgcaccctcagtggacattgccaacat

SEQ ID NO: 503998 - DNA, 120 bp, Artificial Sequence
  ENSG00000163931_8 (sequence is synthesized)
ccgcatgcccagcctgcccagctacaaagttggggacaagatagccacccgcaaggcctacgggcaggcactggccaagctgggccatgccagtgaccgcatcatcgccctggatgggga

SEQ ID NO: 503999 - DNA, 120 bp, Artificial Sequence
  ENSG00000163931_9 (sequence is synthesized)
caccaaaaattccaccttctcggagatcttcaaaaaggagcacccggaccgcttcatcgagtgctacattgctgagcagaacatggtgagcatcgcggtgggctgtgccacccgcaacag

SEQ ID NO: 504000 - DNA, 120 bp, Artificial Sequence
  ENSG00000163931_10 (sequence is synthesized)
gacggtgcccttctgcagcacttttgcagccttcttcacgcgggcctttgaccagattcgcatggccgccatctccgagagcaacatcaacctctgcggctcccactgcggcgtttccat

SEQ ID NO: 504001 - DNA, 120 bp, Artificial Sequence
  ENSG00000163931_11 (sequence is synthesized)
tcttttacccaagtgatggcgttgctacagagaaggcagtggaactagccgccaatacaaagggtatctgcttcatccggaccagccgcccagaaaatgccatcatctataacaacaatg

SEQ ID NO: 504002 - DNA, 120 bp, Artificial Sequence
  ENSG00000163931_12 (sequence is synthesized)
aggacttccaggtcggacaagccaaggtggtcctgaagagcaaggatgaccaggtgaccgttatcggggctggggtgaccctgcacgaggccttggccgctgccgaactgctgaagaaag

SEQ ID NO: 504003 - DNA, 120 bp, Artificial Sequence
  ENSG00000163931_13 (sequence is synthesized)
aaaagatcaacatccgcgtgctggaccccttcaccatcaagcccctggacagaaaactcattctcgacagcgctcgtgccaccaagggcaggatcctcaccgtggaggaccattattatg

SEQ ID NO: 504004 - DNA, 120 bp, Artificial Sequence
  ENSG00000163931_14 (sequence is synthesized)
aaggtggcattggtgaggctgtgtccagtgcagtagtgggcgagcctggcatcactgtcacccacctggcagttaaccgggtaccaagaagtgggaagccggctgagctgctgaagatgt

SEQ ID NO: 504005 - DNA, 120 bp, Artificial Sequence
  ENSG00000163931_15 (sequence is synthesized)
ttggtatcgacagggatgccattgcacaagctgtgaggggcctcatcaccaaggcctagggcggccagtgcaggttctggggaagaagcgtggagggtgcgctagggaggctggtgtcct

SEQ ID NO: 504006 - DNA, 120 bp, Artificial Sequence
  ENSG00000163931_16 (sequence is synthesized)
tggtcctgggccaggacctgggtgtcccaagtccccttggaatcacctgcaactgccctcaacctccagaactatcgctgcctcccattcatcaccaggtgacatttgactgcaacctgc

SEQ ID NO: 504007 - DNA, 120 bp, Artificial Sequence
  ENSG00000163931_17 (sequence is synthesized)
cttctagctgagaggctgagacctacatccctcattgtgacctcagtccacctggccctgagcgggctggggaactgcctcagtctggaagctgaccaggcactctcagggccgccccac

SEQ ID NO: 504008 - DNA, 120 bp, Artificial Sequence
  ENSG00000163931_18 (sequence is synthesized)
ctcccccaagtccccacagccttgcagtcaggtctcctgggatagggaggttcacttgcttgttgtccctcgtccttgtcatatccttttaactaggcatctcagagaagcagagacagg

SEQ ID NO: 504009 - DNA, 120 bp, Artificial Sequence
  ENSG00000163931_19 (sequence is synthesized)
gcagccttcgtcctgggggaaaagggaccctcaggatggcatgagaggtcctcaatcccaagtgtggaactgtccccctcaacttgttaaaatgcagatttctgggtcttgccaatgggg

SEQ ID NO: 504010 - DNA, 120 bp, Artificial Sequence
  ENSG00000163931_20 (sequence is synthesized)
cctgggactccatgtgacaactggcccaggagcttctgatgtcacacagaattctgcagtcccaagctccagccccgacctgctctgctgttcctaggtgactgccctcacactgctgac

SEQ ID NO: 504011 - DNA, 120 bp, Artificial Sequence
  ENSG00000163931_21 (sequence is synthesized)
cacagtggatttctccccctgctgctcgggctcagctggggtcagccctgcttataaggtcaactgtgcaaaaccttatactggccaagaacaaactagtgctgggggaggagggctggg

SEQ ID NO: 504012 - DNA, 120 bp, Artificial Sequence
  ENSG00000163931_22 (sequence is synthesized)
tgccccggccactggtggagtccccaggaaatcctcagagctgttgcgaggatgagacacatttgtggacacgtccacctgtcctcctgaccgtctggagagaataaacctgtcaaagcc

SEQ ID NO: 504013 - DNA, 120 bp, Artificial Sequence
  ENSG00000163931_23 (sequence is synthesized)
gcacaagctgtgaggggcctcatcaccaaggcctagggcgggtatgaagtgtggggcgggggtctatacattcctgagattctgggaaaggtgctcaaagatgtactgagaggaggggta

SEQ ID NO: 504014 - DNA, 120 bp, Artificial Sequence
  ENSG00000163931_24 (sequence is synthesized)
gctgaagctgggaccttaagcaccatctaaaggtccctttctttagcatttgactcacaatttcaaactctaggcatttggacttaatggctcaggatatgtgggccaggcccagtttta

SEQ ID NO: 504015 - DNA, 120 bp, Artificial Sequence
  ENSG00000163931_25 (sequence is synthesized)
agtgagtttccttgttttcgtggttgtggcatggtggctctcggagcttccacacaccatctcacgtcagctcgctttgttcttgaggaaggagggttcttgagggatgggggcttgctc

SEQ ID NO: 504016 - DNA, 120 bp, Artificial Sequence
  ENSG00000163931_26 (sequence is synthesized)
ggtaaagctaaaggatgtatagctgcggagaggtttgaacctcagtttggtggccacgtcctgtgcccagccccgcccagcctggggaggaggaacaggctcctggtgaaatgggagata

SEQ ID NO: 504017 - DNA, 120 bp, Artificial Sequence
  ENSG00000163931_27 (sequence is synthesized)
gggtttccagatgccccccttcggccttgattggttacaaattcagggtcaaagggcacaaagcagggaggtcaatctgcatgggtgtcagccagaggggctccacctcaaagcctccac

SEQ ID NO: 504018 - DNA, 120 bp, Artificial Sequence
  ENSG00000163931_28 (sequence is synthesized)
cggtgttgccaaacacaagctgctctgcacaggggcccagcattggctgaggaggctgtggaggggagggagcagggcaggtgccgtgcaaggctttgagactcaggtcaggcctccagg

SEQ ID NO: 504019 - DNA, 120 bp, Artificial Sequence
  ENSG00000163931_29 (sequence is synthesized)
actgcgttttgcggatgaacccatgcctgtgactacactaagtaacaggatgcttggggttaccttgcagtagcacagcatacgcaggcctgtgttccctgatgactgacctcagaaagg

SEQ ID NO: 504020 - DNA, 120 bp, Artificial Sequence
  ENSG00000163931_30 (sequence is synthesized)
gagaggaggaagggaggaaataatctctgttggacaggcgaggaaactgagccacagggtcctcaccccacaggcctccccaaggccacatctatctggggactcagagtacaaccccag

SEQ ID NO: 504021 - DNA, 120 bp, Artificial Sequence
  ENSG00000163931_31 (sequence is synthesized)
ctcaagccagattcctgaagtcctggctccaccgctaacttgctttgtggcgtgggtcacgttacttactccaccttcggtgtctcagttgatttgtctgtacaatggggccagctcagc

SEQ ID NO: 504022 - DNA, 120 bp, Artificial Sequence
  ENSG00000163931_32 (sequence is synthesized)
acccaagcatggcgtggtgaggcttcagtgggctaatatgggtagtggttggcatggcactcagtttgagaagtgctatttttattcttatgtcaaaaagagtccccaaaaggatagctt

SEQ ID NO: 504023 - DNA, 120 bp, Artificial Sequence
  ENSG00000163931_33 (sequence is synthesized)
ttcaagagaaagggtgctctgccccagctccttcctgtatatttgactccatggttcatttcaaaaacatttccagcaccacatccagcatctgtggagtgatcaaatgtgttccccaaa

SEQ ID NO: 504024 - DNA, 120 bp, Artificial Sequence
  ENSG00000163931_34 (sequence is synthesized)
taagaattgggccaaaaaattcatcaagaatctaatagcagacagattccaaacccagtgcgctgaccccagaacagctttcagtaggaaatgagcagatcaggaatgaaagagacaata

SEQ ID NO: 504025 - DNA, 120 bp, Artificial Sequence
  ENSG00000163931_35 (sequence is synthesized)
aaggaactgagctctggattacttaagaggaggaggaaaacctgttcagaggcaaacaaaaggaagtaaaataatgtgaaaaagaaaaggatttaaaaaacccaaactggaaacaggaat

SEQ ID NO: 504026 - DNA, 120 bp, Artificial Sequence
  ENSG00000163931_36 (sequence is synthesized)
gttgcaagctttctactactccagctgaggccgcagttgtggggtggagcctgggcagaccccagctgccaaggcagacctttccctggaaggctcctcggtgttgtggcccctgggaat

SEQ ID NO: 504027 - DNA, 120 bp, Artificial Sequence
  ENSG00000163931_37 (sequence is synthesized)
tcccactggcccacccagccagtcccaaggcctcctccaacctctggttcacagcggggtctgtcccctgcagcaggtggctcaagcctattcacccacccttcctcactttcctctcat

SEQ ID NO: 504028 - DNA, 120 bp, Artificial Sequence
  ENSG00000163931_38 (sequence is synthesized)
tccaacaacccccatttttctagatcttattagccagatccctgttgtcctagacctctgtttcttaacaaccagtacttcttcctgagctcctgacgtcttccttcatgccattttctc

SEQ ID NO: 504029 - DNA, 120 bp, Artificial Sequence
  ENSG00000163931_39 (sequence is synthesized)
ttggggtgtggcttgtggtaggctgcaggaacctggtgacactgttgcccctcgagtgtaaatgccatctgttctgcatatccatgcgtggctgctcctttacccagaatgcaggctcct

SEQ ID NO: 504030 - DNA, 120 bp, Artificial Sequence
  ENSG00000163931_40 (sequence is synthesized)
cccgcacatccagggaaacagcccttgctgctcactgagctcaccaggctccagggaaggggagcgggagatgctgtgactcagtgacccctgtggctgagccaggatttaaactcagat

SEQ ID NO: 504031 - DNA, 120 bp, Artificial Sequence
  ENSG00000163931_41 (sequence is synthesized)
ccgtctggcctctgccggtgggggcatgtacaggcaggaggagaggagggacttggagggtctgtgggtgagaggaaggtcgtggagtgaggcagcccccgtgccccaccctggctggtg

SEQ ID NO: 504032 - DNA, 120 bp, Artificial Sequence
  ENSG00000163931_42 (sequence is synthesized)
cctttcagagctgcagctgtgtgtgctctgccagctccggccacctgctccagctgaagggccgacacagagccaggcagggcccggagagaactgttccctccaggaggtgagtggggt

SEQ ID NO: 504033 - DNA, 120 bp, Artificial Sequence
  ENSG00000163931_43 (sequence is synthesized)
actcctcaagcaatggcagatgctgagcaaggcctgtgtgggccaagagccttggggggtttggaacctgggttctgccccaggccggagaatgaggcaggcgtaagtcactccctggca

SEQ ID NO: 504034 - DNA, 120 bp, Artificial Sequence
  ENSG00000163931_44 (sequence is synthesized)
cccaggtgtgggcttcagattcctaggcctgggatggcctcacccattttaaagatgggaaaatgagactacaagtggtcagggacttgcccggggacagaggaagtctatggcacgagg

SEQ ID NO: 504035 - DNA, 120 bp, Artificial Sequence
  ENSG00000163931_45 (sequence is synthesized)
ggggctgatcccagggcctgggtcggcttccctgccaaatgcccctggctgcccacctgcctgctctcaggggttgtggcttgttctgcccatgtagactcaggtatatgaggatgttct

SEQ ID NO: 504036 - DNA, 120 bp, Artificial Sequence
  ENSG00000163931_46 (sequence is synthesized)
gagtgggggtttggcagtgctgggaggtgtctgggagggggtggatgtcgaggaaagggctctgggatattgtcatggctttggtgctgctgcctggcactgccctctggtgttaaaaat

SEQ ID NO: 504037 - DNA, 120 bp, Artificial Sequence
  ENSG00000163931_47 (sequence is synthesized)
gggcaggatctggaccacttgcagcttcttgggggctcctgctagtctttcgggctgctgggtgctacctgggagttcagtctgttcttggctctggccagactctagtgactactgagg

SEQ ID NO: 504038 - DNA, 120 bp, Artificial Sequence
  ENSG00000163931_48 (sequence is synthesized)
tgacctccagggagagggatattcagccttcctggccgcacacaacaaggtgccatggggtgggcatgcctaggtgcttatagactcctctgctgctcacagatgcattgggtgaccctg

SEQ ID NO: 504039 - DNA, 120 bp, Artificial Sequence
  ENSG00000163931_49 (sequence is synthesized)
acacctctacctgtgtgtgaccctgcaggcggggttgtggggaggaagagaatggacacattggtgaagggatggggcagtgggcccagaaacacacacctgcccacgtctggcccctcc

SEQ ID NO: 504040 - DNA, 120 bp, Artificial Sequence
  ENSG00000163931_50 (sequence is synthesized)
tttcccactcagctgtgagctcccaaaggaccaggcagtagacagtgagtggtgggcacgtaggagtccatcctattcactgcgaccctcctttcctggcccccgtgcctggctgggctc

SEQ ID NO: 504041 - DNA, 120 bp, Artificial Sequence
  ENSG00000163931_51 (sequence is synthesized)
tgcctgtctgggatgatgccattcctcccttgccctcggcaggtagagggccagtctcctggagcagcctcctggccctctgggagcttctgtcttacccattcctctgtcctcccgtgt

SEQ ID NO: 504042 - DNA, 120 bp, Artificial Sequence
  ENSG00000163931_52 (sequence is synthesized)
ggagaaggggcctccaaagtcatcaactgagcggccactgcatgctaggtcttggggttctttctttcgttctttctgttctttcttgaagagctcacagctagagagaaagcatttcat

SEQ ID NO: 504043 - DNA, 120 bp, Artificial Sequence
  ENSG00000163931_53 (sequence is synthesized)
ttcattaaataatgatagcaattatagccatcctttgagcacttgttctgtctggcatgttgctaagtcctggggctgcagtgcccacagtccctaccctatgactctaaagtcgagacc

SEQ ID NO: 504044 - DNA, 120 bp, Artificial Sequence
  ENSG00000163931_54 (sequence is synthesized)
cccccagcatggtggccagatcagtggcctggagcctgccagctgggctggaatcactcagccaggcactagttaaggaagtaagttattcactgtcaccatgcctgttttcctatctgt

SEQ ID NO: 504045 - DNA, 120 bp, Artificial Sequence
  ENSG00000163931_55 (sequence is synthesized)
aaaatggagatactagccccttgccctcagagctctcctgagggttacatgcatgtgacttggtattctattattattactgcgagctcacagtgttggctagtggtttgtaggggagac

SEQ ID NO: 504046 - DNA, 120 bp, Artificial Sequence
  ENSG00000163931_56 (sequence is synthesized)
aggcattggcctctcctgcaatagaatcacacagcagatgtcatgttttagcacgaaagagggggcaggtgtggcatcttccagaaagtggcttcagagtgggtaggaattgattagcag

SEQ ID NO: 504047 - DNA, 120 bp, Artificial Sequence
  ENSG00000163931_57 (sequence is synthesized)
agaggagagtgaagggaggccggaggagggtcaggcaggagcaagatggggctggaggagccagaggagtccatccccaggcagggggagacccaggggggtgagctttaagcagggcct

SEQ ID NO: 504048 - DNA, 120 bp, Artificial Sequence
  ENSG00000163931_58 (sequence is synthesized)
ggcaagcgtgggtttgtccttctgagaaggtgcctctgctgctggggccgcacgtgggcctctgatcactctgcgggctgcagctccccaacgtcaccacatcaagcctcaccttccatc

SEQ ID NO: 504049 - DNA, 120 bp, Artificial Sequence
  ENSG00000163931_59 (sequence is synthesized)
aggccagacacctggggtgttttctctcgcattccctttgtcttcaaggttgtgggaggatgagggaaggcgctcagggcctgcacgctccgctctgggttcttggatactgcgggcaac

SEQ ID NO: 504050 - DNA, 120 bp, Artificial Sequence
  ENSG00000163931_60 (sequence is synthesized)
acagctggaccagatgccccagtgcaaggggttggcaagcatgagctcagccatgggaacgaggtggcaagtggttctccctgggacagggacaggcccgcaggctgagctcttagctac

SEQ ID NO: 504051 - DNA, 120 bp, Artificial Sequence
  ENSG00000163931_61 (sequence is synthesized)
ctgggcaagggacagggccagagagccgagcgttggacgtgcctcttctatctgagccccaggagggcagctgtggcccagaacacccagagctgtccctcagagcagctgggacgtggt

SEQ ID NO: 504052 - DNA, 120 bp, Artificial Sequence
  ENSG00000163931_62 (sequence is synthesized)
ctcttaaaaggcctcaggcttggcctggggacctagctaactcacagctgctgatgagctctgtggagctcctgctgcccaggaagctggtgaggattccaacctcgctgctaaatggtg

SEQ ID NO: 504053 - DNA, 120 bp, Artificial Sequence
  ENSG00000163931_63 (sequence is synthesized)
gatggtggcgtccctgaggtagtgtagggtggaagctatggtgcagcttgggaagcaatgcagaatttctggtatttgtgagtccttcacacagcaggctccctaagtacacaccagcct

SEQ ID NO: 504054 - DNA, 120 bp, Artificial Sequence
  ENSG00000163931_64 (sequence is synthesized)
ctctaagtaggaggccccagtgggagagatgggctttgactctggggtcaaatgtagataattggactatggacagtggctggctggtcaccaacaatggtgtttgaaacaaacatttag

SEQ ID NO: 504055 - DNA, 77 bp, Artificial Sequence
  ENSG00000163931_65 (sequence is synthesized)
tggctggtcaccaacaatggtgtttgaaacaaacatttagaggccatatttgggcttataaaaatagttctgggccg

SEQ ID NO: 504056 - DNA, 120 bp, Artificial Sequence
  ENSG00000163931_66 (sequence is synthesized)
gcctgggcaacatggtgatacctgtctgtctctttaaaataaaaaaaatcaatgagttatgtgatgggctcatggctacaggtggagaaaggcagtgcatatgcagcctcctccatcctt

SEQ ID NO: 504057 - DNA, 120 bp, Artificial Sequence
  ENSG00000163931_67 (sequence is synthesized)
agagaaggcagtggaactagccgccaatacaaaggtaggttgcatggctgttctttctcctgctggcagccatcacttcccaagggaaacagaagaggaggccagagctggtcacttgct

SEQ ID NO: 504058 - DNA, 120 bp, Artificial Sequence
  ENSG00000163931_68 (sequence is synthesized)
gccccagggggtgtttcctgaccttgcccctggtgttcgtgtagcttgtggaagttagacaagaaaaaacgaaatacacaccccacttactgccacgtggcagacattgtcaactgattg

SEQ ID NO: 504059 - DNA, 120 bp, Artificial Sequence
  ENSG00000163931_69 (sequence is synthesized)
ccagtctgtctctgctgagaatcctggcagccctggccggtccagcggttgacacctctccaccctcctgagttgggttctccaagacaggcaaggatgagctgagccctgtggtccagg

SEQ ID NO: 504060 - DNA, 120 bp, Artificial Sequence
  ENSG00000163931_70 (sequence is synthesized)
gctctccaaggtaagagcccagctgcccactgccagccacaccttgcctgggactagggtcacacgggccctggaatggtgagtggtctttgaggagacctggctgggcccacctctccc

SEQ ID NO: 504061 - DNA, 120 bp, Artificial Sequence
  ENSG00000163931_71 (sequence is synthesized)
aggtgccttctccctgctcgtcctggcctctccctcagtgtcctgctctgtgctgacccagctggctaaggaatacaggactgaattgatgggttgctctgccatggagcccaggtacat

SEQ ID NO: 504062 - DNA, 80 bp, Artificial Sequence
  ENSG00000163932_0 (sequence is synthesized)
gcacttccgtgtgccgcggcgccggagcccgaggcggctgtagcccacatctcccgagcgacccccggcgcccgcccgcc

SEQ ID NO: 504063 - DNA, 120 bp, Artificial Sequence
  ENSG00000163932_1 (sequence is synthesized)
cgccggggagcggcgcccccgccgctgccgccgcgacccttggcgcctgcccctgcaacgggaggtctgcagggaactggccaggcaagggggcaggcccgtttctcctggtggttggtg

SEQ ID NO: 504064 - DNA, 120 bp, Artificial Sequence
  ENSG00000163932_2 (sequence is synthesized)
gcaagggggcaggcccgtttctcctggtggttggtgcgttgtagcagcagcgggagccaggactaaggacaagcaggagctgggagccccagccccactgcaggccccaccatggcgccg

SEQ ID NO: 504065 - DNA, 120 bp, Artificial Sequence
  ENSG00000163932_3 (sequence is synthesized)
ttcctgcgcatcgccttcaactcctatgagctgggctccctgcaggccgaggacgaggcgaaccagcccttctgtgccgtgaagatgaaggaggcgctcagcacagagcgtgggaaaaca

SEQ ID NO: 504066 - DNA, 120 bp, Artificial Sequence
  ENSG00000163932_4 (sequence is synthesized)
ctggtgcagaagaagccgaccatgtatcctgagtggaagtcgacgttcgatgcccacatctatgaggggcgcgtcatccagattgtgctaatgcgggcagcagaggagccagtgtctgag

SEQ ID NO: 504067 - DNA, 120 bp, Artificial Sequence
  ENSG00000163932_5 (sequence is synthesized)
gtgaccgtgggtgtgtcggtgctggccgagcgctgcaagaagaacaatggcaaggctgagttctggctggacctgcagcctcaggccaaggtgttgatgtctgttcagtatttcctggag

SEQ ID NO: 504068 - DNA, 120 bp, Artificial Sequence
  ENSG00000163932_6 (sequence is synthesized)
gacgtggattgcaaacagtctatgcgcagtgaggacgaggccaagttcccaacgatgaaccgccgcggagccatcaaacaggccaaaatccactacatcaagaaccatgagtttatcgcc

SEQ ID NO: 504069 - DNA, 120 bp, Artificial Sequence
  ENSG00000163932_7 (sequence is synthesized)
accttctttgggcaacccaccttctgttctgtgtgcaaagactttgtctggggcctcaacaagcaaggctacaaatgcaggcaatgtaacgctgccatccacaagaaatgcatcgacaag

SEQ ID NO: 504070 - DNA, 120 bp, Artificial Sequence
  ENSG00000163932_8 (sequence is synthesized)
atcatcggcagatgcactggcaccgcggccaacagccgggacactatattccagaaagaacgcttcaacatcgacatgccgcaccgcttcaaggttcacaactacatgagccccaccttc

SEQ ID NO: 504071 - DNA, 120 bp, Artificial Sequence
  ENSG00000163932_9 (sequence is synthesized)
tgtgaccactgcggcagcctgctctggggactggtgaagcagggattaaagtgtgaagactgcggcatgaatgtgcaccataaatgccgggagaaggtggccaacctctgcggcatcaac

SEQ ID NO: 504072 - DNA, 120 bp, Artificial Sequence
  ENSG00000163932_10 (sequence is synthesized)
cagaagcttttggctgaggccttgaaccaagtcacccagagagcctcccggagatcagactcagcctcctcagagcctgttgggatatatcagggtttcgagaagaagaccggagttgct

SEQ ID NO: 504073 - DNA, 120 bp, Artificial Sequence
  ENSG00000163932_11 (sequence is synthesized)
acttcatcttccacaaggtcctgggcaaaggcagcttcgggaaggtgctgcttggagagctgaagggcagaggagagtactttgccatcaaggccctcaagaaggatgtggtcctgatcg

SEQ ID NO: 504074 - DNA, 120 bp, Artificial Sequence
  ENSG00000163932_12 (sequence is synthesized)
acgacgacgtggagtgcaccatggttgagaagcgggtgctgacacttgccgcagagaatccctttctcacccacctcatctgcaccttccagaccaaggaccacctgttctttgtgatgg

SEQ ID NO: 504075 - DNA, 120 bp, Artificial Sequence
  ENSG00000163932_13 (sequence is synthesized)
agttcctcaacgggggggacctgatgtaccacatccaggacaaaggccgctttgaactctaccgtgccacgttttatgccgctgagataatgtgtggactgcagtttctacacagcaagg

SEQ ID NO: 504076 - DNA, 120 bp, Artificial Sequence
  ENSG00000163932_14 (sequence is synthesized)
gcatcatttacagggacctcaaactggacaatgtgctgctggaccgggatggccacatcaagattgccgactttgggatgtgcaaagagaacatattcggggagagccgggccagcacct

SEQ ID NO: 504077 - DNA, 120 bp, Artificial Sequence
  ENSG00000163932_15 (sequence is synthesized)
tctgcggcacccctgactatatcgcccctgagatcctacagggcctgaagtacacattctctgtggactggtggtctttcggggtccttctgtacgagatgctcattggccagtccccct

SEQ ID NO: 504078 - DNA, 120 bp, Artificial Sequence
  ENSG00000163932_16 (sequence is synthesized)
tccatggtgatgatgaggatgaactcttcgagtccatccgtgtggacacgccacattatccccgctggatcaccaaggagtccaaggacatcctggagaagctctttgaaagggaaccaa

SEQ ID NO: 504079 - DNA, 120 bp, Artificial Sequence
  ENSG00000163932_17 (sequence is synthesized)
ccaagaggctgggagtgaccggaaacatcaaaatccaccccttcttcaagaccataaactggactctgctggaaaagcggaggttggagccacctttcaggcccaaagtgaagtcaccca

SEQ ID NO: 504080 - DNA, 120 bp, Artificial Sequence
  ENSG00000163932_18 (sequence is synthesized)
gagactacagtaactttgaccaggagttcctgaacgagaaggcgcgcctctcctacagcgacaagaacctcatcgactccatggaccagtctgcattcgctggcttctcctttgtgaacc

SEQ ID NO: 504081 - DNA, 120 bp, Artificial Sequence
  ENSG00000163932_19 (sequence is synthesized)
ccaaattcgagcacctcctggaagattgaggttcctggacagatcaggctagccctgccctccacccacacctgcccgctccccacgataagcaccagtgggactgtggtgacttctgct

SEQ ID NO: 504082 - DNA, 120 bp, Artificial Sequence
  ENSG00000163932_20 (sequence is synthesized)
gctggccccgcccctgcccccagagcgtccttggctgccgtctggccgggctctcatggtacttcctctgtgaactgtgtgtgaatctgcttttcctctgccttcggagggaaattgtaa

SEQ ID NO: 504083 - DNA, 120 bp, Artificial Sequence
  ENSG00000163932_21 (sequence is synthesized)
atcctgtgtttcattacttgaatgtagttatctattgaaaatatatattatatacatagacatatatatatatataataggctgtatatattgctcagtagagaaaaaccatgggggact

SEQ ID NO: 504084 - DNA, 120 bp, Artificial Sequence
  ENSG00000163932_22 (sequence is synthesized)
ggtgatatgttgatctttttcaaaaaaatatatatatgacaaaaaaaaaaaaaaaggagcacaagctgtttgaaccaccaggtttatttgtgtgtctaaataaacaccaaatagtaccaa

SEQ ID NO: 504085 - DNA, 120 bp, Artificial Sequence
  ENSG00000163932_23 (sequence is synthesized)
gtccgcgcgcgccggggagcggcgcccccgccgctgccgccgcgacccttggcgcctgcccctgcaacgggagtttttttcagacagagtgtcactttattgaccaggctggagtgcagt

SEQ ID NO: 504086 - DNA, 120 bp, Artificial Sequence
  ENSG00000163932_24 (sequence is synthesized)
gcaaggctacaaatgcaggcactgcggcatgaatgtgcaccataaatgccgggagaaggtggccaacctctgcggcatcaaccagaagcttttggctgaggccttgaaccaagtcaccca

SEQ ID NO: 504087 - DNA, 120 bp, Artificial Sequence
  ENSG00000163932_25 (sequence is synthesized)
aaggattagggagtcctgagccccaggctgctctgctcagtcttggaaggcctcacgcaacccccttcacaaagcctgcccgattgtgtcctcaagggacaatttatagcatgcaatgac

SEQ ID NO: 504088 - DNA, 120 bp, Artificial Sequence
  ENSG00000163932_26 (sequence is synthesized)
agtgcggagggcaggtctgtctggggagatgaaacgacctgtgcgattacaggagattcctactttcctcgcccccagtcctcaaggtcttctcagaggttcccactaggaggccggctg

SEQ ID NO: 504089 - DNA, 120 bp, Artificial Sequence
  ENSG00000163933_0 (sequence is synthesized)
ggcatttcctggtgtctgagcctggcgcggaggctatgggcagccaggaggtgctgggccacgcggcccggctggcctcctccggtctcctcctgcaggtgttgtttcggttgatcacct

SEQ ID NO: 504090 - DNA, 120 bp, Artificial Sequence
  ENSG00000163933_1 (sequence is synthesized)
ttgtcttgaatgcatttattcttcgcttcctgtcaaaggaaatcgttggcgtagtaaatgtaagactaacgctgctttactcaaccaccctcttcctggccagagaggccttccgcagag

SEQ ID NO: 504091 - DNA, 120 bp, Artificial Sequence
  ENSG00000163933_2 (sequence is synthesized)
catgtctcagtgggggcacccagcgagactggagccagaccctcaacctgctgtggctaacagtccccctgggtgtgttttggtccttattcctgggctggatctggttgcagctgcttg

SEQ ID NO: 504092 - DNA, 120 bp, Artificial Sequence
  ENSG00000163933_3 (sequence is synthesized)
aagtgcctgatcctaatgttgtccctcactatgcaactggagtggtgctgtttggtctctcggcagtggtggagcttctaggagagcccttttgggtcttggcacaagcacatatgtttg

SEQ ID NO: 504093 - DNA, 120 bp, Artificial Sequence
  ENSG00000163933_4 (sequence is synthesized)
tgaagctcaaggtgattgcagagagcctgtcggtaattcttaagagcgttctgacagcttttctcgtgctgtggttgcctcactggggattgtacattttctctttggcccagcttttct

SEQ ID NO: 504094 - DNA, 120 bp, Artificial Sequence
  ENSG00000163933_5 (sequence is synthesized)
ataccacagttctggtgctctgctatgttatttatttcacaaagttactgggttccccagaatcaaccaagcttcaaactcttcctgtctccagaataacagatctgttacccaatatta

SEQ ID NO: 504095 - DNA, 120 bp, Artificial Sequence
  ENSG00000163933_6 (sequence is synthesized)
caagaaatggagcgtttataaactggaaagaggctaaactgacttggagttttttcaaacagtctttcttgaaacagattttgacagaaggcgagcgatatgtgatgacatttttgaatg

SEQ ID NO: 504096 - DNA, 120 bp, Artificial Sequence
  ENSG00000163933_7 (sequence is synthesized)
tattgaactttggtgatcagggtgtgtatgatatagtgaataatcttggctcccttgtggccagattaattttccagccaatagaggaaagtttttatatattttttgctaaggtgctgg

SEQ ID NO: 504097 - DNA, 120 bp, Artificial Sequence
  ENSG00000163933_8 (sequence is synthesized)
agaggggaaaggatgccacacttcagaagcaggaggacgttgctgtggctgctgcagtcttggagtccctgctcaagctggccctgctggccggcctgaccatcactgtttttggctttg

SEQ ID NO: 504098 - DNA, 120 bp, Artificial Sequence
  ENSG00000163933_9 (sequence is synthesized)
cctattctcagctggctctggatatctacggagggaccatgcttagctcaggatccggtcctgttttgctgcgttcctactgtctctatgttctcctgcttgccatcaatggagtgacag

SEQ ID NO: 504099 - DNA, 120 bp, Artificial Sequence
  ENSG00000163933_10 (sequence is synthesized)
agtgtttcacatttgctgccatgagcaaagaggaggtcgacaggtacaattttgtgatgctggccctgtcctcctcattcctggtgttatcctatctcttgacccgttggtgtggcagcg

SEQ ID NO: 504100 - DNA, 120 bp, Artificial Sequence
  ENSG00000163933_11 (sequence is synthesized)
tgggcttcatcttggccaactgctttaacatgggcattcggatcacgcagagcctttgcttcatccaccgctactaccgaaggagcccccacaggcccctggctggcctgcacctatcgc

SEQ ID NO: 504101 - DNA, 120 bp, Artificial Sequence
  ENSG00000163933_12 (sequence is synthesized)
cagtcctgctcgggacatttgccctcagtggtggggttactgctgtttcggaggtattcctctgctgtgagcagggctggccagccagactggcacacattgctgtgggggccttctgtc

SEQ ID NO: 504102 - DNA, 120 bp, Artificial Sequence
  ENSG00000163933_13 (sequence is synthesized)
tgggagcaactctcgggacagcattcctcacagagaccaagctgatccatttcctcaggactcagttaggtgtgcccagacgcactgacaaaatgacatgacttcagggaagcctggaca

SEQ ID NO: 504103 - DNA, 120 bp, Artificial Sequence
  ENSG00000163933_14 (sequence is synthesized)
cccgaggcacctggaccagctatgggtagttctgtgggtggaacacattctgtgtaagagccccactgagggctctgcagcggagtgacagcaaccccagagatgaggcaccagagagtg

SEQ ID NO: 504104 - DNA, 120 bp, Artificial Sequence
  ENSG00000163933_15 (sequence is synthesized)
ccactgcatgagacacctgtgaccattcgaagtctgaaatgcggggggggagtttcatttttaagtgaagaccaaaagccctttaaaaataatagttttttatcattttatagtaatcag

SEQ ID NO: 504105 - DNA, 120 bp, Artificial Sequence
  ENSG00000163933_16 (sequence is synthesized)
cattttctcttttactaatatactcattccttttgcgtatgattggcctttggagctacatgctccaacaaactatatcttaattgttaactgttaataattatctggcccagaaaaaga

SEQ ID NO: 504106 - DNA, 120 bp, Artificial Sequence
  ENSG00000163933_17 (sequence is synthesized)
gatgcagtgattttacccttcacaggaatattgaacttcttctgtaaaagagagagagaaacctctctctctcatgcaccacatggaaacagagtgtggccctgaagttgtggctttctt

SEQ ID NO: 504107 - DNA, 120 bp, Artificial Sequence
  ENSG00000163933_18 (sequence is synthesized)
tgtgtcaaaactgtggtctgagtttttagagaaggaaaaatgctactcagtgagaaatccaagaaatgaaaccaggaaggttttcagatcacatttcccagagtgagttcgggagaatct

SEQ ID NO: 504108 - DNA, 120 bp, Artificial Sequence
  ENSG00000163933_19 (sequence is synthesized)
tgcctgtcgtgatcacactgttccccgccgccccaggtcagcacatacttgacccagagtgggctctcaggatttgttgattgaagggtgggtgaaagctggctggagactcctggcctg

SEQ ID NO: 504109 - DNA, 120 bp, Artificial Sequence
  ENSG00000163933_20 (sequence is synthesized)
gccacctgcaagaggcggactttgaagaaaactgtgatccagttgagccactttgtccctgaggggaatgctgctttgcagctttctgtaacttctcacatgggaattgcactggtgaca

SEQ ID NO: 504110 - DNA, 120 bp, Artificial Sequence
  ENSG00000163933_21 (sequence is synthesized)
acaaggcaaactctatatggctagtattactgagtcaggtccctcccgttgacccattaattccagcattgatcaatacaaccaaattccagccccaggacaagagtggcaggcatgggg

SEQ ID NO: 504111 - DNA, 120 bp, Artificial Sequence
  ENSG00000163933_22 (sequence is synthesized)
gcctggtactccaggctacagtgtgagcccaggtgttctgcaccttgcagcctgcacactgcaggtgaaatcatgagcagtgttctggagtgtgaagtgtttttatttttttgttaatgt

SEQ ID NO: 504112 - DNA, 120 bp, Artificial Sequence
  ENSG00000163933_23 (sequence is synthesized)
attaattccttttagatattaacccccctcagaactatatgcacaaactataacttggatgttaataatcctgtcactcagtgccccaaaccttctgtgtctacacctagagagagggcc

SEQ ID NO: 504113 - DNA, 120 bp, Artificial Sequence
  ENSG00000163933_24 (sequence is synthesized)
agtaagggcaactcctatcatgcattaaaatgcatgtatttaaatctgcttgcccagagccagtacccaggggctaaggattaagacctgtcagtacaccaagactggggcccagtcacc

SEQ ID NO: 504114 - DNA, 120 bp, Artificial Sequence
  ENSG00000163933_25 (sequence is synthesized)
tggcaggtttttatctactcagagggagaatgctttgcactaagtgggagaaaagcagctaaatgcaaggtgtcctgagcaattagaggacctccaaagcatggcctcagtcatgccttc

SEQ ID NO: 504115 - DNA, 120 bp, Artificial Sequence
  ENSG00000163933_26 (sequence is synthesized)
atcgggcaaggtcaggccagctcagaaaaatggatggtcccatagggtcaagtggagcacacacggaaggcagtcctccttccctcccatgtcctttctctgtccctggcatccacagaa

SEQ ID NO: 504116 - DNA, 120 bp, Artificial Sequence
  ENSG00000163933_27 (sequence is synthesized)
agggaccttcagtcctcatgagctgcttctctgcagctgctgatcaccctcccggaaccctgcacctatcccgtgcccacctgaccccagactcaagcatgatcctcattctacctgcct

SEQ ID NO: 504117 - DNA, 120 bp, Artificial Sequence
  ENSG00000163933_28 (sequence is synthesized)
cggaatcacctggattgcaagtcagaacatggcttcccaggacccactccaggccttcagggtctgtgtctcccaggaggagggctctgagattggcttttctggcaagcccacgtggct

SEQ ID NO: 504118 - DNA, 120 bp, Artificial Sequence
  ENSG00000163933_29 (sequence is synthesized)
ttgatgccaccaaggttggcatgccccattgtcttccttcgtgacaggcccaggaccatcatgctcatgctcacagtgcctgttctctgctccaggaacagagctgctgctctacaagca

SEQ ID NO: 504119 - DNA, 120 bp, Artificial Sequence
  ENSG00000163933_30 (sequence is synthesized)
gccttgtgactccggggtctctgggagcaggactccccaggcttgtgctctctcagcttgagagaggctctatgtctgaaggcagtgctcactctctcatccctcccctgctgttcgccc

SEQ ID NO: 504120 - DNA, 120 bp, Artificial Sequence
  ENSG00000163933_31 (sequence is synthesized)
agtgctgctgtcagggccagctcctcttgaaagacagccagccgcaaaggcagcccagggcttcttccggtgtcctgcttccctgtatctagggagagttgtacatgtggctgcgtgttt

SEQ ID NO: 504121 - DNA, 120 bp, Artificial Sequence
  ENSG00000163933_32 (sequence is synthesized)
tcccaggactagccctgccgcctgggctgtcagcactttggcagcaggtcctctgtggttctctgcctctggtgcctccctaaagctcagctggacctgaccaggcctctggcatttccc

SEQ ID NO: 504122 - DNA, 120 bp, Artificial Sequence
  ENSG00000163933_33 (sequence is synthesized)
ctgctggaccccctagagccacagctgtgcctcagggagcttgcatacatgtgggccagcctgcctcactttacccaagtggatttggggagcagaaatcatacttttggctttcaatac

SEQ ID NO: 504123 - DNA, 120 bp, Artificial Sequence
  ENSG00000163933_34 (sequence is synthesized)
cacttatagtgaggctacttctccatggaaacaagtctctgaggcacaacctttatgaaaggaaggagcattcgttggtgagaagaacagtatcgctgacttcctgtgctcctctggcca

SEQ ID NO: 504124 - DNA, 120 bp, Artificial Sequence
  ENSG00000163933_35 (sequence is synthesized)
caggtaactgttggtcacttcagatttggcttggggtctctcagtgaggagctgctgctgtgctgtttaatgcttacctgatggcaacttctggctctggaaccgctactctgccctgtt

SEQ ID NO: 504125 - DNA, 89 bp, Artificial Sequence
  ENSG00000163933_36 (sequence is synthesized)
atggcaacttctggctctggaaccgctactctgccctgttcccagccacttcccaacctgattcaagcagggcccctccttcctcctgt

SEQ ID NO: 504126 - DNA, 90 bp, Artificial Sequence
  ENSG00000163933_37 (sequence is synthesized)
aggcgtgagccaccgctcctggcctattcttttcttttcagagacaaggtctcactctctcctctcgcccaggctggagtgcagtggtgt

SEQ ID NO: 504127 - DNA, 85 bp, Artificial Sequence
  ENSG00000163933_38 (sequence is synthesized)
tgctacctcacccagctaatttctaatttttttttgtagagactggatctcactgttgccttgaactcctgggctcaagtgatcc

SEQ ID NO: 504128 - DNA, 120 bp, Artificial Sequence
  ENSG00000163933_39 (sequence is synthesized)
caaagtgctgggattccagaccagccattttttttccttaatcatgcattcctgttgctagtttcacatcagtcccctggtttaataagaaataaaatattttcttcacacttttgaaaa

SEQ ID NO: 504129 - DNA, 120 bp, Artificial Sequence
  ENSG00000163933_40 (sequence is synthesized)
ggattttttctgatttcccaacataaatagaagagtcacgaaattcaagaacttgtgcacacacagttgttatctgtgtcagtgtagggaaaactgtctggtggcaggggctgtgggact

SEQ ID NO: 504130 - DNA, 120 bp, Artificial Sequence
  ENSG00000163933_41 (sequence is synthesized)
gttcccctcgttcaactccagacacacactcaaggtataggcaggggcgttggcgccaggacaatcagcttccccagcctcacttggagaagttattaggacttctccttgctgttggct

SEQ ID NO: 504131 - DNA, 120 bp, Artificial Sequence
  ENSG00000163933_42 (sequence is synthesized)
ttcctctcgggcctagaatgtgttttgccaagcgcttccctgtgctccctctggggtgagggaggaaggcagagggcagacggtaatgagtctccacttggtactaaacacatctgaaga

SEQ ID NO: 504132 - DNA, 120 bp, Artificial Sequence
  ENSG00000163935_0 (sequence is synthesized)
atattggaatgagtcggagcgcggagcgccgccgccgcctccgccggagcgcgggtggaggggggcggggagagctgccggccgccccgctccgccgaacccagcaggaaggagggcgcg

SEQ ID NO: 504133 - DNA, 120 bp, Artificial Sequence
  ENSG00000163935_1 (sequence is synthesized)
agcgggcgagcgcgggcagcacgggaggaaaaagcttccgcgcgggggagcgaaaagacggaaagaaagaaagaaaacgagcgcgagagggggaaaagcgagcgatcgagcgagcgcgcg

SEQ ID NO: 504134 - DNA, 120 bp, Artificial Sequence
  ENSG00000163935_2 (sequence is synthesized)
cgcgaaaactccgggcagcactttcatttggacccgtggatacccattgaacagatgcttgaaacctgcaagtaatcttcagatcctagcagaaccataggcctttcctttgttttggga

SEQ ID NO: 504135 - DNA, 120 bp, Artificial Sequence
  ENSG00000163935_3 (sequence is synthesized)
ggatatagcctgcctatatgctgtggaaatgaacggggagcagcagcttgatgcagatgccggctctggtatggaagaggtagaattaagctgggaagattatctagaagaaacagggtc

SEQ ID NO: 504136 - DNA, 120 bp, Artificial Sequence
  ENSG00000163935_4 (sequence is synthesized)
cacagcagttccctatgggtcttttaaacatgtggacacacgtttgcaaaatggatttgctcctgggatgaagctggaggtggctgtgagaacagatcctgagacctactgggttgccac

SEQ ID NO: 504137 - DNA, 120 bp, Artificial Sequence
  ENSG00000163935_5 (sequence is synthesized)
cgttatcactacctgtgagcagttgctccttctccgctatgatggctatggggaggatcggagagcagatttctggtgtgacatcaggaaggctgatctctaccccattgggtggtgtga

SEQ ID NO: 504138 - DNA, 120 bp, Artificial Sequence
  ENSG00000163935_6 (sequence is synthesized)
gcagaataagaagacccttgaagccccagaaggcatcagagataaagtatctgactgggatgagtttctgcggcagaccctgataggagcatgtagtcctcctgttccgctgctagaggg

SEQ ID NO: 504139 - DNA, 120 bp, Artificial Sequence
  ENSG00000163935_7 (sequence is synthesized)
cctccgtaatgggaggaatcctttagatctcattgctccaggatccagactagaatgtcaagctttccaggactctttaagcacttggattgttactgtagtagaaaacattggaggaag

SEQ ID NO: 504140 - DNA, 120 bp, Artificial Sequence
  ENSG00000163935_8 (sequence is synthesized)
gctgaagctacgttatgaaggacttgaaagttctgacaattatgaacattggttgtattacttggatccatttcttcatcacgttggttgggctgctcaacagggatatgagcttcagcc

SEQ ID NO: 504141 - DNA, 120 bp, Artificial Sequence
  ENSG00000163935_9 (sequence is synthesized)
cccttcagccattagacatctaaaaaatgaagctgagtggcaagagattttggccaaagtgaaagaggaagaggaagagccattaccatcttacttatttaaggacaaacaagttattgg

SEQ ID NO: 504142 - DNA, 120 bp, Artificial Sequence
  ENSG00000163935_10 (sequence is synthesized)
cattcatacattctctgtaaacatgaaattggaagctgtagacccctggtctccttttgggatctctcctgctacagttgttaaggtttttgatgagaagtactttctggtggaaatgga

SEQ ID NO: 504143 - DNA, 120 bp, Artificial Sequence
  ENSG00000163935_11 (sequence is synthesized)
tgacttgcgtcctgagaaccacgcacggcgatcctttgtgtgccacgccgacagtcctggcatcttccctgtgcagtggagtctgaagaatggcctacacatcagcccccctccaggcta

SEQ ID NO: 504144 - DNA, 120 bp, Artificial Sequence
  ENSG00000163935_12 (sequence is synthesized)
cccaagccaggactttgactgggctgactacctcaaacagtgtggtgctgaagctgctccccagaggtgcttccctccgttaatttctgaacatgaatttaaggagaacatgaagctcga

SEQ ID NO: 504145 - DNA, 120 bp, Artificial Sequence
  ENSG00000163935_13 (sequence is synthesized)
ggcggtgaaccccattctccctgaagaagtgtgtgttgctaccatcactgcagtgagaggctcctacctgtggctccagctggagggttctaagaagcctatacctgaatgtattgtgag

SEQ ID NO: 504146 - DNA, 120 bp, Artificial Sequence
  ENSG00000163935_14 (sequence is synthesized)
tgtggaatccatggatatatttcctttgggctggtgtgaaaccaacggccaccccctcagcactcctcgccgagcacgagtatataaacagaggaaaattgcagtggttcagccagaaaa

SEQ ID NO: 504147 - DNA, 120 bp, Artificial Sequence
  ENSG00000163935_15 (sequence is synthesized)
acaagtaccatcctcgaggactgtccacgagggcctgaggaatcaggagctgaactccacagagtcagttatgattaatggaaaatattgctgtccaaagatatacttcaaccaccgttg

SEQ ID NO: 504148 - DNA, 120 bp, Artificial Sequence
  ENSG00000163935_16 (sequence is synthesized)
cttctcagggccatatcttaacaaaggaagaattgctgagctgcctcaatgtgtaggacctgggaactgtgttctggtccttagagaggtcctcactttacttatcaatgcagcctacaa

SEQ ID NO: 504149 - DNA, 120 bp, Artificial Sequence
  ENSG00000163935_17 (sequence is synthesized)
acccagccgtgtccttcgggagctccagctggacaaagactctgtgtggcacggatgtggggaagtcctaaaagccaaatataaaggaaagagttatcgggctactgttgagatagtgaa

SEQ ID NO: 504150 - DNA, 120 bp, Artificial Sequence
  ENSG00000163935_18 (sequence is synthesized)
tacttacaaagaccaaatacacacactattacggaaagaagaaaaataaaagaattgggaggccacctggtgggcatagtaacttagcttgtgccctgaaaaaagccagtaagaggagaa

SEQ ID NO: 504151 - DNA, 120 bp, Artificial Sequence
  ENSG00000163935_19 (sequence is synthesized)
agaggcggaaaaatgtttttgttcataagaagaaacgctcctctgcatctgttgataataccccagcgggctctccccagggaagtgggggtgaagatgaggatgacccagatgaagggg

SEQ ID NO: 504152 - DNA, 120 bp, Artificial Sequence
  ENSG00000163935_20 (sequence is synthesized)
atgatgattccctaagtgaaggcagtacatccgagcagcaggatgagctacaggaagaatcagaaatgtcagaaaaaaagtcatgctcctcttctcccacccaaagtgagatatccacat

SEQ ID NO: 504153 - DNA, 120 bp, Artificial Sequence
  ENSG00000163935_21 (sequence is synthesized)
cgctgcctccagatagacaaaggagaaaaagggagcttcgcaccttttcattttctgacgatgaaaataaacctccttcaccaaaggaaataaggatcgaagttgctgaaaggcttcacc

SEQ ID NO: 504154 - DNA, 120 bp, Artificial Sequence
  ENSG00000163935_22 (sequence is synthesized)
tggacagtaaccccttgaagtggagtgtggcagacgttgtgcggttcatcagatccactgactgtgctccattagcaagaatattcctagaccaggaaattgatgggcaggccctgttgc

SEQ ID NO: 504155 - DNA, 120 bp, Artificial Sequence
  ENSG00000163935_23 (sequence is synthesized)
tccttacccttcccactgttcaagaatgcatggacttaaaattgggccctgccatcaaactttgccatcacatagagaggatcaagtttgctttttatgagcagtttgccaactgagaag

SEQ ID NO: 504156 - DNA, 120 bp, Artificial Sequence
  ENSG00000163935_24 (sequence is synthesized)
gacaaccaaagtgagctggatctttgaagcacaaatgcagcaaatccttcaccctgctttataagtggagctggaatagtcctggggctctggggcctgcaggtatcagcttgctctctt

SEQ ID NO: 504157 - DNA, 120 bp, Artificial Sequence
  ENSG00000163935_25 (sequence is synthesized)
tgcactttcggggaaggaggactcacagtgaggaagcaaaaactgtgcacagaagtggatcacctgctggtggaaatgtggacatctcttgttcagcagatggcagtttttaaaaaataa

SEQ ID NO: 504158 - DNA, 120 bp, Artificial Sequence
  ENSG00000163935_26 (sequence is synthesized)
aggttgtgaggaaaagacttatataagaagaaaagcatttccagtggtgtggcctgaaaacaaagaataacctaggctgctggaaagcacccttttggttgttttcattctgttccctcc

SEQ ID NO: 504159 - DNA, 120 bp, Artificial Sequence
  ENSG00000163935_27 (sequence is synthesized)
cattgtagattgaactttgttctctgctttctttttcttggaaagagaggacttagctttaagtcagcactgatttgggactgttcctaaggcatatcagtgcttcattgtcattgtgtt

SEQ ID NO: 504160 - DNA, 120 bp, Artificial Sequence
  ENSG00000163935_28 (sequence is synthesized)
tttaaactttttaaaattaaaacagttcattttggggatgattatgtggctctagggttttgaatgtatagtcacactttgatcattttaaaatcgattcttaggagttcctttgtttac

SEQ ID NO: 504161 - DNA, 120 bp, Artificial Sequence
  ENSG00000163935_29 (sequence is synthesized)
tacctctgttgataattgagcttacagccatgtatgaggttttttgtatgatgccatttttaagctacataaacactaaaattatgacagaatttggagggggggaaactgtttgctttc

SEQ ID NO: 504162 - DNA, 120 bp, Artificial Sequence
  ENSG00000163935_30 (sequence is synthesized)
ttaaaaacattatatggggcacttacaccagttccttaactgacctgatctgagaactctactgttactgttctccatcttgacccagccgaggctgcctgtgttaagtaacatcaccaa

SEQ ID NO: 504163 - DNA, 120 bp, Artificial Sequence
  ENSG00000163935_31 (sequence is synthesized)
gactgttagtatttctgtttaattgccctcttcctattcattctcagagggacttcagtgacttttattttgtgtttacttttctctagagttgtttgtctacctctgtttcatttctaa

SEQ ID NO: 504164 - DNA, 120 bp, Artificial Sequence
  ENSG00000163935_32 (sequence is synthesized)
ggtctttactttgggtgaaaatcagtaagtgttccatggacccacagcgaagcccatttgtccttctttccaggtgtctccagtgtagaagcacagcacagaaaacatgttttggagggt

SEQ ID NO: 504165 - DNA, 120 bp, Artificial Sequence
  ENSG00000163935_33 (sequence is synthesized)
aacgcagagcatggagtttctgttagcagtgtcctcagtggcaggataaatactgagatgtggttaaggattctggaaacctctttgcctagccacacttagacttttttcagctaatcc

SEQ ID NO: 504166 - DNA, 120 bp, Artificial Sequence
  ENSG00000163935_34 (sequence is synthesized)
tttaaattgaatataatctttagtccgaggattcccatttaaacaactcagtattcttttaagtgtgtcttttagcccagctcaagttaacatgaaactccaggtgaattttcacttact

SEQ ID NO: 504167 - DNA, 120 bp, Artificial Sequence
  ENSG00000163935_35 (sequence is synthesized)
attccattgctagctattatagaataatagcgtttgctgcactattctagtcatgaggagtgaggaaaaacatacataggttgtctcccttaaatggtttgctttgctgaatttttttta

SEQ ID NO: 504168 - DNA, 120 bp, Artificial Sequence
  ENSG00000163935_36 (sequence is synthesized)
tcctaatcacctgcaaatttataacccaatcattcttcctcaagatttgaaaatgttttaatcctgcaaactgggtgaattctaaacagctctacaaatataaggaaatattacagcaaa

SEQ ID NO: 504169 - DNA, 80 bp, Artificial Sequence
  ENSG00000163935_37 (sequence is synthesized)
ggagggcccgggcggtcgctgcgcggtggcggagcgtctagtggccgccgcaaccggtggctccgggccgccgttgtgaa

SEQ ID NO: 504170 - DNA, 120 bp, Artificial Sequence
  ENSG00000163935_38 (sequence is synthesized)
ccgctggaccccgcgccgacccggcagcgccccgacctgccgctcgggaggtccgcgaccgtttcgatttctgttcctaaagtccgattttggacgctgaaaaggaggctgtggaggggc

SEQ ID NO: 504171 - DNA, 120 bp, Artificial Sequence
  ENSG00000163935_39 (sequence is synthesized)
aaatattctccactgaagcaaatgctgcaacaatttgcatttccttcaccaatgtcgtcttgtgccttttcttgttcctactgtaaaggagatgggttagatgttcactttcatttggac

SEQ ID NO: 504172 - DNA, 120 bp, Artificial Sequence
  ENSG00000163935_40 (sequence is synthesized)
aaacgggcgcagtgcccgcggcggcggcacgcgcgcatctgggatccggccgcttctccgctcatgccatcttgtccgagccagtcacgtgcgggcgacagcggcgcgcttcgccgggcc

SEQ ID NO: 504173 - DNA, 120 bp, Artificial Sequence
  ENSG00000163935_41 (sequence is synthesized)
gccgggccggtactccaggtccgacccgcgaacccctctgggatccccgccgctctgtctacaacccgagaaacgaagtctcactgtgttgtccaggctggtctcaagctcctgggctca

SEQ ID NO: 504174 - DNA, 120 bp, Artificial Sequence
  ENSG00000163935_42 (sequence is synthesized)
tatatgtattacataacacagagctaacatttagtgtttagtattattaatacccacatgagtatgaacttttgtaatatgtttggctgtgccaaggagaaagcacatatatatgtgtgc

SEQ ID NO: 504175 - DNA, 120 bp, Artificial Sequence
  ENSG00000163938_0 (sequence is synthesized)
agttcacacgtggcgccagcggaggcaggttgatgtgtttgtgcttccttctacagccaatatgaaaaggcctaagttaaagaaagcaagtaaacgcatgacctgccataagcggtataa

SEQ ID NO: 504176 - DNA, 120 bp, Artificial Sequence
  ENSG00000163938_1 (sequence is synthesized)
aatccaaaaaaaggttcgagaacatcatcgaaaattaagaaaggaggctaaaaagcggggtcacaagaagcctaggaaagacccaggagttccaaacagtgctccctttaaggaggctct

SEQ ID NO: 504177 - DNA, 120 bp, Artificial Sequence
  ENSG00000163938_2 (sequence is synthesized)
tcttagggaagctgagctaaggaaacagaggcttgaagaactaaaacagcagcagaaacttgacaggcagaaggaactagaaaagaaaagaaaacttgaaactaatcctgatattaagcc

SEQ ID NO: 504178 - DNA, 120 bp, Artificial Sequence
  ENSG00000163938_3 (sequence is synthesized)
atcaaatgtggaacctatggaaaaggagtttgggctttgcaaaactgagaacaaagccaagtcgggcaaacagaattcaaagaagctgtactgccaagaacttaaaaaggtgattgaagc

SEQ ID NO: 504179 - DNA, 120 bp, Artificial Sequence
  ENSG00000163938_4 (sequence is synthesized)
ctccgatgttgtcctagaggtgttggatgccagagatcctcttggttgcagatgtcctcaggtagaagaggccattgtccagagtggacagaaaaagctggtacttatattaaataaatc

SEQ ID NO: 504180 - DNA, 120 bp, Artificial Sequence
  ENSG00000163938_5 (sequence is synthesized)
agatctggtaccaaaggagaatttggagagctggctaaattatttgaagaaagaattgccaacagtggtgttcagagcctcaacaaaaccaaaggataaagggaagataaccaagcgtgt

SEQ ID NO: 504181 - DNA, 120 bp, Artificial Sequence
  ENSG00000163938_6 (sequence is synthesized)
gaaggcaaagaagaatgctgctccattcagaagtgaagtctgctttgggaaagagggcctttggaaacttcttggaggttttcaggaaacttgcagcaaagccattcgggttggagtaat

SEQ ID NO: 504182 - DNA, 120 bp, Artificial Sequence
  ENSG00000163938_7 (sequence is synthesized)
tggtttcccaaatgtggggaaaagcagcattatcaatagcttaaaacaagaacagatgtgtaatgttggtgtatccatggggcttacaaggagcatgcaagttgtccccttggacaaaca

SEQ ID NO: 504183 - DNA, 120 bp, Artificial Sequence
  ENSG00000163938_8 (sequence is synthesized)
gatagtccgagcttcatcgtatctccacttaattcctcctctgcgcttgctctgcgaagtccagcaagtattgaagtagtaaaaccgatggaggctgccagtgccatcctttcccaggct

SEQ ID NO: 504184 - DNA, 120 bp, Artificial Sequence
  ENSG00000163938_9 (sequence is synthesized)
gatgctcgacaggtagtactgaaatatactgtcccaggctacaggaattctctggaattttttactgtgcttgctcagagaagaggtatgcaccaaaaaggtggaatcccaaatgttgaa

SEQ ID NO: 504185 - DNA, 120 bp, Artificial Sequence
  ENSG00000163938_10 (sequence is synthesized)
ggtgctgccaaactgctgtggtctgagtggacaggtgcctcattagcttactattgccatccccctacatcttggactcctcctccatattttaatgagagtattgtggtagacatgaaa

SEQ ID NO: 504186 - DNA, 120 bp, Artificial Sequence
  ENSG00000163938_11 (sequence is synthesized)
agcggcttcaatctggaagaactggaaaagaacaatgcacagagcataagagccatcaagggccctcatttggccaatagcatccttttccagtcttccggtctgacaaatggaataata

SEQ ID NO: 504187 - DNA, 120 bp, Artificial Sequence
  ENSG00000163938_12 (sequence is synthesized)
gaagaaaaggacatacatgaagaattgccaaaacggaaagaaaggaagcaggaggagagggaggatgacaaagacagtgaccaggaaactgttgatgaagaagttgatgaaaacagctca

SEQ ID NO: 504188 - DNA, 120 bp, Artificial Sequence
  ENSG00000163938_13 (sequence is synthesized)
ggcatgtttgctgcagaagagacaggggaggcactgtctgaggagactacagcaggtgaacagtctacaaggtcttttatcttggataaaatcattgaagaggatgatgcttatgacttc

SEQ ID NO: 504189 - DNA, 120 bp, Artificial Sequence
  ENSG00000163938_14 (sequence is synthesized)
agtacagattatgtgtaacagaacaatggctttttatgattttttttttaacattttaagcagactgctaaactgttctctgtataagttatggtatgcatgagctgtgtaaattttgtg

SEQ ID NO: 504190 - DNA, 120 bp, Artificial Sequence
  ENSG00000163938_15 (sequence is synthesized)
aatatgtattatattaaaaccaggcaacttggaatccctaaattctgtaaaaagacaattcatctcattgtgagtggaagtagttatctggaataaaaaaagaagatacctattgaaaaa

SEQ ID NO: 504191 - DNA, 120 bp, Artificial Sequence
  ENSG00000163938_16 (sequence is synthesized)
gctcgtcagtggcttcagttcacacgtggcgccagcggaggcaggttgatgtgtttgtgcttccttctacagccaatatgaaaaggcctagtaagtggggtcgggaggcgggcgtggagg

SEQ ID NO: 504192 - DNA, 120 bp, Artificial Sequence
  ENSG00000163938_17 (sequence is synthesized)
gtgaagacatgagatccaactctgagctcaccctgttgctaaatggataatgccagtactctcttgtggaaggtattaccagaacaagggatgtagttctgatcattttctccttgataa

SEQ ID NO: 504193 - DNA, 120 bp, Artificial Sequence
  ENSG00000163938_18 (sequence is synthesized)
ctgcaacctggaccacccaggctcaagcagtcttaccacctcagtctccaagtagctgggactacagaagcacaccatcacgcctggctaattttttttagcagacacgggctttcacta

SEQ ID NO: 504194 - DNA, 120 bp, Artificial Sequence
  ENSG00000163938_19 (sequence is synthesized)
ctacggctacggctttgtctctgctggtatgggggtgggagcctacgcgtaggccttggccctatttcctggtagaaccgagagttggaagtccctacggcgatcatgttaaccgcgcgg

SEQ ID NO: 504195 - DNA, 120 bp, Artificial Sequence
  ENSG00000163938_20 (sequence is synthesized)
gctcattctgcggaacgaagccgggcagagggtggggaagactaggctagattttcgtaaggaagcagcgtctgagccaggtttgaggcccaatattttctttccgtggccacgtgcaga

SEQ ID NO: 504196 - DNA, 120 bp, Artificial Sequence
  ENSG00000163938_21 (sequence is synthesized)
agtgcttgagagagctgtaccaaacacattgctaaactgattttgccctgttcctttgcgggaaagtctgggttaatgtgatttggttttgggaaatggcattggatagactgaccatgg

SEQ ID NO: 504197 - DNA, 120 bp, Artificial Sequence
  ENSG00000163938_22 (sequence is synthesized)
aatgtgattctttcagattttggttgaaatatgatgagtgtacaaaatcttgatttaagtgaatgaaaaattacaagatccaactctgatttcagccagagatcatctgaaaggcaatgt

SEQ ID NO: 504198 - DNA, 120 bp, Artificial Sequence
  ENSG00000163938_23 (sequence is synthesized)
gacaccagcagctgaatgattagaacaggagaacactggttgccagcagtatggaaagaaaggttggggatctccaggaaacagaaagaaggagcaaaagaatcacatttgaaaatcctg

SEQ ID NO: 504199 - DNA, 120 bp, Artificial Sequence
  ENSG00000163939_0 (sequence is synthesized)
tccatgggttccaagagaagaagagctacctccccttccagcagtgtcagcggggactttgatgatgggcaccattctgtgtcaacaccaggcccaagcaggaaaaggaggagactttcc

SEQ ID NO: 504200 - DNA, 120 bp, Artificial Sequence
  ENSG00000163939_1 (sequence is synthesized)
aatcttccaactgtagatcctattgccgtgtgccatgaactctataataccatccgagactataaggatgaacagggcagacttctctgtgagctcttcattagggcaccaaagcgaaga

SEQ ID NO: 504201 - DNA, 120 bp, Artificial Sequence
  ENSG00000163939_2 (sequence is synthesized)
aatcaaccagactattatgaagtggtttctcagcccattgacttgatgaaaatccaacagaaactaaaaatggaagagtatgatgatgttaatttgctgactgctgacttccagcttctt

SEQ ID NO: 504202 - DNA, 120 bp, Artificial Sequence
  ENSG00000163939_3 (sequence is synthesized)
tttaacaatgcaaagtcctattataagccagattctcctgaatataaagccgcttgcaaactctgggatttgtaccttcgaacaagaaatgagtttgttcagaaaggagaagcagatgac

SEQ ID NO: 504203 - DNA, 120 bp, Artificial Sequence
  ENSG00000163939_4 (sequence is synthesized)
gaagatgatgatgaagatgggcaagacaatcagggcacagtgactgaaggatcttctccagcttacttgaaggagatcctggagcagcttcttgaagccatagttgtagctacaaatcca

SEQ ID NO: 504204 - DNA, 120 bp, Artificial Sequence
  ENSG00000163939_5 (sequence is synthesized)
tcaggacgtctcattagcgaactttttcagaaactgccttctaaagtgcaatatccagattattatgcaataattaaggagcctatagatctcaagaccattgcccagaggatacagaat

SEQ ID NO: 504205 - DNA, 120 bp, Artificial Sequence
  ENSG00000163939_6 (sequence is synthesized)
ggaagctacaaaagtattcatgcaatggccaaagatatagatctcctcgcaaaaaatgccaaaacttataatgagcctggctctcaagtattcaaggatgcaaattcaattaaaaaaata

SEQ ID NO: 504206 - DNA, 120 bp, Artificial Sequence
  ENSG00000163939_7 (sequence is synthesized)
ttttatatgaaaaaggctgaaattgaacatcatgaaatggctaagtcaagtcttcgaatgaggactccatccaacttggctgcagccagactgacaggtccttcacacagtaaaggcagc

SEQ ID NO: 504207 - DNA, 120 bp, Artificial Sequence
  ENSG00000163939_8 (sequence is synthesized)
cttggtgaagagagaaatcccactagcaagtattaccgtaataaaagagcagtacaaggaggtcgtttatcagcaattacaatggcacttcaatatggctcagaaagtgaagaagatgct

SEQ ID NO: 504208 - DNA, 120 bp, Artificial Sequence
  ENSG00000163939_9 (sequence is synthesized)
gctttagctgctgcacgctatgaagagggagagtcagaagcagaaagcatcacttcctttatggatgtttcaaatcctttttatcagctttatgacacagttaggagttgtcggaataac

SEQ ID NO: 504209 - DNA, 120 bp, Artificial Sequence
  ENSG00000163939_10 (sequence is synthesized)
caagggcagctaatagctgaacctttttaccatttgccttcaaagaaaaaataccctgattattaccagcaaattaaaatgcccatatcactacaacagatccgaacaaaactgaagaat

SEQ ID NO: 504210 - DNA, 120 bp, Artificial Sequence
  ENSG00000163939_11 (sequence is synthesized)
caagaatatgaaactttagatcatttggagtgtgatctgaatttaatgtttgaaaatgccaaacgctataatgtgcccaattcagccatctacaagcgagttctaaaattgcagcaagtt

SEQ ID NO: 504211 - DNA, 120 bp, Artificial Sequence
  ENSG00000163939_12 (sequence is synthesized)
atgcaggcaaagaagaaagagcttgccaggagagacgatatcgaggacggagacagcatgatctcttcagccacctctgatactggtagtgccaaaagaaaaagtaaaaagaacataaga

SEQ ID NO: 504212 - DNA, 120 bp, Artificial Sequence
  ENSG00000163939_13 (sequence is synthesized)
aagcagcgaatgaaaatcttattcaatgttgttcttgaagctcgagagccaggttcaggcagaagactttgtgacctatttatggttaaaccatccaaaaaggactatcctgattattat

SEQ ID NO: 504213 - DNA, 120 bp, Artificial Sequence
  ENSG00000163939_14 (sequence is synthesized)
aaaatcatcttggagccaatggacttgaaaataattgagcataacatccgcaatgacaaatatgctggtgaagagggaatgatagaagacatgaagctgatgttccggaatgccaggcac

SEQ ID NO: 504214 - DNA, 120 bp, Artificial Sequence
  ENSG00000163939_15 (sequence is synthesized)
tataatgaggagggctcccaggtttataatgatgcacatatcctggagaagttactcaaggagaaaaggaaagagctgggcccactgcctgatgatgatgacatggcttctcccaaactc

SEQ ID NO: 504215 - DNA, 120 bp, Artificial Sequence
  ENSG00000163939_16 (sequence is synthesized)
aagctgagtaggaagagtggcatttctcctaaaaaatcaaaatacatgactccaatgcagcagaaactaaatgaggtctatgaagctgtaaagaactatactgataagaggggtcgccgc

SEQ ID NO: 504216 - DNA, 120 bp, Artificial Sequence
  ENSG00000163939_17 (sequence is synthesized)
ctcagtgccatatttctgaggcttccctctagatctgagttgcctgactactatctgactattaaaaagcccatggacatggaaaaaattcgaagtcacatgatggccaacaagtaccaa

SEQ ID NO: 504217 - DNA, 120 bp, Artificial Sequence
  ENSG00000163939_18 (sequence is synthesized)
gatattgactctatggttgaggactttgtcatgatgtttaataatgcctgtacatacaatgagccggagtctttgatctacaaagatgctcttgttctacacaaagtcctgcttgaaaca

SEQ ID NO: 504218 - DNA, 120 bp, Artificial Sequence
  ENSG00000163939_19 (sequence is synthesized)
cgcagagacctggagggagatgaggactctcatgtcccaaatgtgactttgctgattcaagagcttatccacaatctttttgtgtcagtcatgagtcatcaggatgatgagggaagatgc

SEQ ID NO: 504219 - DNA, 120 bp, Artificial Sequence
  ENSG00000163939_20 (sequence is synthesized)
ctgctgtggatcccaactttcctaacaaaccaccccttacatttgacataattaggaagaatgttgaaaataatcgctaccgtcggcttgatttatttcaagagcatatgtttgaagtat

SEQ ID NO: 504220 - DNA, 120 bp, Artificial Sequence
  ENSG00000163939_21 (sequence is synthesized)
tggaacgagcaagaaggatgaatcggacagattcagaaatatatgaagatgcagtagaacttcagcagttttttattaaaattcgtgatgaactctgcaaaaatggagagattcttcttt

SEQ ID NO: 504221 - DNA, 120 bp, Artificial Sequence
  ENSG00000163939_22 (sequence is synthesized)
caccggcactcagctataccacaaaacatttgcataatgatgtggagaaagagagaaaggaaaaattgccaaaagaaatagaggaagataaactaaaacgagaagaagaaaaaagagaag

SEQ ID NO: 504222 - DNA, 120 bp, Artificial Sequence
  ENSG00000163939_23 (sequence is synthesized)
ctgaaaagagtgaagattcctctggtgctgcaggcctctcaggcttacatcgcacatacagccaggactgtagctttaaaaacagcatgtaccatgttggagattacgtctatgtggaac

SEQ ID NO: 504223 - DNA, 120 bp, Artificial Sequence
  ENSG00000163939_24 (sequence is synthesized)
ctgcagaggccaacctacaaccacatatcgtctgtattgaaagactgtgggaggattcagctggtgaaaaatggttgtatggctgttggttttaccgaccaaatgaaacattccacctgg

SEQ ID NO: 504224 - DNA, 120 bp, Artificial Sequence
  ENSG00000163939_25 (sequence is synthesized)
ctacacgaaaatttctagaaaaagaagtttttaagagtgactattacaacaaagttccagttagtaaaattctaggcaagtgtgtggtcatgtttgtcaaggaatactttaagttatgcc

SEQ ID NO: 504225 - DNA, 120 bp, Artificial Sequence
  ENSG00000163939_26 (sequence is synthesized)
cagaaaacttccgagatgaggatgtttttgtctgtgaatcacggtattctgccaaaaccaaatcttttaagaaaattaaactgtggaccatgcccatcagctcagtcaggtttgtccctc

SEQ ID NO: 504226 - DNA, 120 bp, Artificial Sequence
  ENSG00000163939_27 (sequence is synthesized)
gggatgtgcctctgcctgtggttcgcgtggcctctgtatttgcaaatgcagataaaggtgatgatgagaagaatacagacaactcagaggacagtcgagctgaagacaattttaacttgg

SEQ ID NO: 504227 - DNA, 120 bp, Artificial Sequence
  ENSG00000163939_28 (sequence is synthesized)
aaaaggaaaaagaagatgtccctgtggaaatgtccaatggtgaaccaggttgccactactttgagcagctccattacaatgacatgtggctgaaggttggcgactgtgtcttcatcaagt

SEQ ID NO: 504228 - DNA, 120 bp, Artificial Sequence
  ENSG00000163939_29 (sequence is synthesized)
cccatggcctggtgcgtcctcgtgtgggcagaattgaaaaagtatgggttcgagatggagctgcatatttttatggccccatcttcattcacccagaagaaacagagcatgagcccacaa

SEQ ID NO: 504229 - DNA, 120 bp, Artificial Sequence
  ENSG00000163939_30 (sequence is synthesized)
aaatgttctacaaaaaagaagtatttctgagtaatctggaagaaacctgccccatgacatgtattctcggaaagtgtgctgtgttgtcattcaaggacttcctctcctgcaggccaactg

SEQ ID NO: 504230 - DNA, 120 bp, Artificial Sequence
  ENSG00000163939_31 (sequence is synthesized)
aaataccagaaaatgacattctgctttgtgagagccgctacaatgagagcgacaagcagatgaagaaattcaaaggattgaagaggttttcactctctgctaaagtggtagatgatgaaa

SEQ ID NO: 504231 - DNA, 120 bp, Artificial Sequence
  ENSG00000163939_32 (sequence is synthesized)
tttactacttcagaaaaccaattgttcctcagaaggagccatcacctttgctggaaaagaagatccagttgctagaagctaaatttgccgagttagaaggtggagatgatgatattgaag

SEQ ID NO: 504232 - DNA, 120 bp, Artificial Sequence
  ENSG00000163939_33 (sequence is synthesized)
agatgggagaagaagatagtgaggtcattgaacctccttctctacctcagcttcagacccccctggccagtgagctggacctcatgccctacacacccccacagtctaccccaaagtctg

SEQ ID NO: 504233 - DNA, 120 bp, Artificial Sequence
  ENSG00000163939_34 (sequence is synthesized)
ccaaaggcagtgcaaagaaggaaggctccaaacggaaaatcaacatgagtggctacatcctgttcagcagtgagatgagggctgtgattaaggcccaacacccagactactctttcgggg

SEQ ID NO: 504234 - DNA, 120 bp, Artificial Sequence
  ENSG00000163939_35 (sequence is synthesized)
agctcagccgcctggtggggacagaatggagaaatcttgagacagccaagaaagcagaatatgaaggtgtgatgaaccaaggagtggcccctatggtagggactccagcaccaggtggaa

SEQ ID NO: 504235 - DNA, 120 bp, Artificial Sequence
  ENSG00000163939_36 (sequence is synthesized)
gtccatatggacaacaggtgggagttttggggcctccagggcagcaggcaccacctccatatcccggcccacatccagctggaccccctgtcatacagcagccaacaacacccatgtttg

SEQ ID NO: 504236 - DNA, 120 bp, Artificial Sequence
  ENSG00000163939_37 (sequence is synthesized)
tagctcccccaccaaagacccagcggcttcttcactcagaggcctacctgaaatacattgaaggactcagtgcggagtccaacagcattagcaagtgggatcagacactggcagctcgaa

SEQ ID NO: 504237 - DNA, 120 bp, Artificial Sequence
  ENSG00000163939_38 (sequence is synthesized)
gacgcgacgtccatttgtcgaaagaacaggagagccgcctaccctctcactggctgaaaagcaaaggggcccacaccaccatggcagatgccctctggcgccttcgagatttgatgctcc

SEQ ID NO: 504238 - DNA, 120 bp, Artificial Sequence
  ENSG00000163939_39 (sequence is synthesized)
gggacaccctcaacattcgccaagcatacaacctagaaaatgtttaatcacatcattacgtttcttttatatagaagcataaagagttgtggatcagtagccattttagttactgggggt

SEQ ID NO: 504239 - DNA, 120 bp, Artificial Sequence
  ENSG00000163939_40 (sequence is synthesized)
ttgctgagcagcaggagagagagcgagcagcacagcaacagcagccgagtgcttctccccgagcaggcacccctgtgggggctctcatgggggtggtgccaccaccaacaccaatgggga

SEQ ID NO: 504240 - DNA, 120 bp, Artificial Sequence
  ENSG00000163939_41 (sequence is synthesized)
tgctcaatcagcagttgacacctgttgcaggcatgatgggtggctatccgccaggccttccacctttgcagggcccagttgatggccttgttagcatgggcagcatgcagccacttcacc

SEQ ID NO: 504241 - DNA, 120 bp, Artificial Sequence
  ENSG00000163939_42 (sequence is synthesized)
ctggggggcctccaccccaccatcttccgccaggtgtgcctggcctcccgggcatcccaccaccgggtgtgatgaaccaaggagtggcccctatggtagggactccagcaccaggtggaa

SEQ ID NO: 504242 - DNA, 120 bp, Artificial Sequence
  ENSG00000163939_43 (sequence is synthesized)
tttatcaaatacacaaagatttttttgcatatgtttccttcgtttaaaaccagtttcataattggttgtatatgtagacttggagttttatctttttacttgttgccatggaactgaaac

SEQ ID NO: 504243 - DNA, 120 bp, Artificial Sequence
  ENSG00000163939_44 (sequence is synthesized)
cattagaggtttttgtcttggcttggggtttttgttttcttggttttgggtttttttatatatatatataaaagaacaaaatgaaaaaaaacacacacacacaagagtttacagattagt

SEQ ID NO: 504244 - DNA, 120 bp, Artificial Sequence
  ENSG00000163939_45 (sequence is synthesized)
ttaaattgataatgaaatgtgaagtttgtcctagtttacatcttagagaggggagtatacttgtgtttgtttcatgtgcctgaatatcttaagccactttctgcaaaagctgtttcttac

SEQ ID NO: 504245 - DNA, 120 bp, Artificial Sequence
  ENSG00000163939_46 (sequence is synthesized)
agatgaagtgctttctttgaaaggtggttatttaggttttagatgtttaatagacacagcacatttgctctattaactcagaggctcactacagaaatatgtaatcagtgctgtgcatct

SEQ ID NO: 504246 - DNA, 120 bp, Artificial Sequence
  ENSG00000163939_47 (sequence is synthesized)
gtctgcagctaatgtacctcctggacaccaggaggggaaaaagcactttttcaattgtgctgagttagacatctgtgagttagactatggtgtcagtgatttttgcagaacacgtgcaca

SEQ ID NO: 504247 - DNA, 120 bp, Artificial Sequence
  ENSG00000163939_48 (sequence is synthesized)
accctgaggtatgtttaatctaggcaggtacgtttaaggatattttgatctatttataatgaattcacaatttatgcctataaatttcagatgatttaaaattttaaacctgttacattg

SEQ ID NO: 504248 - DNA, 120 bp, Artificial Sequence
  ENSG00000163939_49 (sequence is synthesized)
aaaaacattgaagttcgtcttgaagaaagcattaaggtatgcatggaggtgatttatttttaaacataacacctaacctaacatgggtaagagagtatggaactagatatgagctgtata

SEQ ID NO: 504249 - DNA, 120 bp, Artificial Sequence
  ENSG00000163939_50 (sequence is synthesized)
agaagcataattgtgaacaagtagattgattgccttcatatacaagtatgttttagtattccttatttccttattatcagatgtattttttcttttaagtttcaatgttgttataattct

SEQ ID NO: 504250 - DNA, 120 bp, Artificial Sequence
  ENSG00000163939_51 (sequence is synthesized)
caaccagaaatttaatactttctaaaatattttttaaatttagcttgtgcttttgaattacaggagaagggaatcataatttaataaaacgcttactagaaagaccattacagatcccaa

SEQ ID NO: 504251 - DNA, 120 bp, Artificial Sequence
  ENSG00000163939_52 (sequence is synthesized)
acacttgggtttggtgaccctgtctttcttatatgaccctacaataaacatttgaaggcagcataggatggcagacagtaggaacattgtttcacttggcggcatgtttttgaaacctgc

SEQ ID NO: 504252 - DNA, 120 bp, Artificial Sequence
  ENSG00000163939_53 (sequence is synthesized)
tttatagtaactgggtgattgccattgtggtagagcttccactgctgtttataatctgagagagttaatctcagaggatgcttttttccttttaatctgctatgaatcagtacccagatg

SEQ ID NO: 504253 - DNA, 120 bp, Artificial Sequence
  ENSG00000163939_54 (sequence is synthesized)
tttaattactgtacttattaaatcatgagggcaaaagagtgtagaatggaaaaaagtctcttgtatctagatactttaaatatgggaggccctttaacttaattgcctttagtcaaccac

SEQ ID NO: 504254 - DNA, 120 bp, Artificial Sequence
  ENSG00000163939_55 (sequence is synthesized)
tggatttgaatttgcatcaagtattttaaataatattgaatttaaaaaaatgtattgcagtagtgtgtcagtaccttattgttaaagtgagtcagataaatcttcaattcctggctattt

SEQ ID NO: 504255 - DNA, 120 bp, Artificial Sequence
  ENSG00000163939_56 (sequence is synthesized)
gggcaattgaatcatcatggactgtataatgcaatcagattattttgtttctagacatccttgaattacaccaaagaacatgaaatttagttgtggttaaattatttatttatttcatgc

SEQ ID NO: 504256 - DNA, 120 bp, Artificial Sequence
  ENSG00000163939_57 (sequence is synthesized)
attcattttatttcccttaaggtctggatgagacttctttggggagcctctaaaaaaatttttcactgggggccacgtgggtcattagaagccagagctctcctccaggctccttcccag

SEQ ID NO: 504257 - DNA, 120 bp, Artificial Sequence
  ENSG00000163939_58 (sequence is synthesized)
tgcctagaggtgctataggaaacatagatccagccaggggcttccctaaagcagtgcagcaccggcccagggcatcactagacaggccctaattaagttttttttaaaaagcctgtgtat

SEQ ID NO: 504258 - DNA, 120 bp, Artificial Sequence
  ENSG00000163939_59 (sequence is synthesized)
ttattttagaatcatgtttttctgtatattaacttgggggatatcgttaatatttaggatataagatttgaggtcagccatcttcaaaaaagaaaaaaaaattgactcaagaaagtacaa

SEQ ID NO: 504259 - DNA, 120 bp, Artificial Sequence
  ENSG00000163939_60 (sequence is synthesized)
gtaaactatacacctttttttcataagttttaggaactgtagtaatgtggcttagaaagtataatggcctaaatgttttcaaaatgtaagttcctgtggagaagaattgtttatattgca

SEQ ID NO: 504260 - DNA, 120 bp, Artificial Sequence
  ENSG00000163939_61 (sequence is synthesized)
aacggggggactgaggggaacctgtaggtttaaaacagtatgtttgtcagccaactgatttaaaaggcctttaactgttttggttgttgttttttttttaagccactctccccttcctat

SEQ ID NO: 504261 - DNA, 120 bp, Artificial Sequence
  ENSG00000163939_62 (sequence is synthesized)
gaggaagaattgagaggggcacctatttctgtaaaatccccaaattggtgttgatgattttgagcttgaatgttttcatacctgattaaaacttggtttattctaatttctgtatcatat

SEQ ID NO: 504262 - DNA, 120 bp, Artificial Sequence
  ENSG00000163939_63 (sequence is synthesized)
catctgaggtttacgtggtaactagtcttataacatgtatgtatcttttttttgttgttcatctaaagctttttaatccaaataaatacagagtttgcaaagtgatttggattaaccagg

SEQ ID NO: 504263 - DNA, 120 bp, Artificial Sequence
  ENSG00000163939_64 (sequence is synthesized)
ggccggaggagcaatagcagcagccgtggcggccacggggcggggcgcggcggtcggtgaccgcggccggggctgcaggcggcggagcggctggcttgccaacacttggtgtcacatgtg

SEQ ID NO: 504264 - DNA, 120 bp, Artificial Sequence
  ENSG00000163939_65 (sequence is synthesized)
cacatgtgagcctcccacatgtattcactctccattccagctctgtgattgaactctgctcttattgactagggggcagttgggcaggcatgcctcattcctggaattgacagtcattcc

SEQ ID NO: 504265 - DNA, 120 bp, Artificial Sequence
  ENSG00000163939_66 (sequence is synthesized)
cggatgggcccagtagccttgtcgcacctgccggcagggacaaaggcgcactacgggtcggaaactccccgcgctcctctttcccgctcgtcgcggggcagcttcaaagctgtcaacgtt

SEQ ID NO: 504266 - DNA, 120 bp, Artificial Sequence
  ENSG00000163939_67 (sequence is synthesized)
gaaggatgaatcggtatgttttcaaagccatttttattttgaggatatgtgctatttaatacaaaacagatgaaagaatattgctttgatgtactatttccacttacatacatgatttgt

SEQ ID NO: 504267 - DNA, 120 bp, Artificial Sequence
  ENSG00000163939_68 (sequence is synthesized)
agttggtagcatgctattctgaattctaatcagccagaacttcttaagagtgagtatattctgtgggggagagaaggcacaccactaagtcatctagtttaaggccagtgaggaggaaga

SEQ ID NO: 504268 - DNA, 120 bp, Artificial Sequence
  ENSG00000163939_69 (sequence is synthesized)
cttagccaaacaggaagaaggaaactataacagaaagaaatttacactttcaaaactgtacattataatttaaaagtaaatcaggccaagtgcattggttcacgcctgtaatcccagcat

SEQ ID NO: 504269 - DNA, 88 bp, Artificial Sequence
  ENSG00000163939_70 (sequence is synthesized)
ccacgccactctactccagcctgggcaacagagtgagtctctgtctcaaaaaaacaaaaaatttttttaaagtaaatctaagagctaa

SEQ ID NO: 504270 - DNA, 120 bp, Artificial Sequence
  ENSG00000163939_71 (sequence is synthesized)
aaaaaacaaaaaatttttttaaagtaaatctaagagctaattatttgacaagtccaattagataaactgccaactatctaataatgggaaaagaaaggggttaaacttcgacacaaaatg

SEQ ID NO: 504271 - DNA, 63 bp, Artificial Sequence
  ENSG00000163939_72 (sequence is synthesized)
cgtgctattgcaggtggaagaaatgtaaagactgtatatttctgctaataaatttgaaaacct

SEQ ID NO: 504272 - DNA, 120 bp, Artificial Sequence
  ENSG00000163945_0 (sequence is synthesized)
cggccgcgtcagcggtaggtggggctgtggttacgctgccgggcgggggtcgcgccggttcggtccccggggctctgcgggcgccgggcagagacctgcggccagggcgtgtcccgtgtg

SEQ ID NO: 504273 - DNA, 80 bp, Artificial Sequence
  ENSG00000163945_1 (sequence is synthesized)
ggccctgggccgagtgacaggccgcagccccccgagcaccgtcgaagccggcgcgcccgcccggtgcagccgctgtgcga

SEQ ID NO: 504274 - DNA, 120 bp, Artificial Sequence
  ENSG00000163945_2 (sequence is synthesized)
gagcgaccccgcggtccaagcctcgcgtggccctgccgggccccttctttccccgagtagggcgcagcttcccagcctccgccccggcctcgcctggcgcttccttccgggtccttcggc

SEQ ID NO: 504275 - DNA, 120 bp, Artificial Sequence
  ENSG00000163945_3 (sequence is synthesized)
ctttccctggcggtgcggcaggccctcgcctcatcccaccaggcacgccgcggtgctcggccctgggtatccgggcaggctgcctccgttagggccgcccctgctctccggacgcgactt

SEQ ID NO: 504276 - DNA, 120 bp, Artificial Sequence
  ENSG00000163945_4 (sequence is synthesized)
ttcattggtctcagaatttcttggctcctcttggcctctgcagccttgctggaggctgccctgcggaatctgaatatggatcagaaactttcgaagttggtagaagagctcacaacttca

SEQ ID NO: 504277 - DNA, 120 bp, Artificial Sequence
  ENSG00000163945_5 (sequence is synthesized)
ggagaaccccgactaaatcctgagaaaatgaaggaactgaagaaaatttgcaagtcttcagaggagcagctgagccgcgcctaccgcctgctgatagcacagctgacccaggagcacgcc

SEQ ID NO: 504278 - DNA, 120 bp, Artificial Sequence
  ENSG00000163945_6 (sequence is synthesized)
gagatccgtctctcagccttccagattgtggaggaactcttcgtcaggtctcaccagttccggatgctggttgtttccaacttccaggagttcctggagctcacgctgggcacagacccc

SEQ ID NO: 504279 - DNA, 120 bp, Artificial Sequence
  ENSG00000163945_7 (sequence is synthesized)
gcacagcctctgccgccccccagggaggcggcacagaggctgaggcaggcgaccacccgggccgtggaagggtggaatgagaagtttggggaggcctacaagaagcttgccttgggctac

SEQ ID NO: 504280 - DNA, 120 bp, Artificial Sequence
  ENSG00000163945_8 (sequence is synthesized)
cacttcttaagacacaacaaaaaggtggattttcaagacacgaatgctcggagtctggcagaaaggaagagagaagaggagaagcagaagcacttggataaaatttatcaagaaagagcc

SEQ ID NO: 504281 - DNA, 120 bp, Artificial Sequence
  ENSG00000163945_9 (sequence is synthesized)
agccaggcggagagggagatgcaagaaatgtctggagaaattgaatcctgcttgacggaggtagagagctgctttaggctgctggtgccttttgactttgacccgaacccggagacggaa

SEQ ID NO: 504282 - DNA, 120 bp, Artificial Sequence
  ENSG00000163945_10 (sequence is synthesized)
tcccttggcatggcttctggcatgtccgatgcccttcgctcctcctgcgcgggccaggtgggcccctgccggtctggcacccctgacccccgggacggggagcagccctgctgcagtaga

SEQ ID NO: 504283 - DNA, 120 bp, Artificial Sequence
  ENSG00000163945_11 (sequence is synthesized)
gacctgcctgcctctgcaggccaccccagagcgggcggcggggcacagccatcccagacagccacaggtgacccctcagatgaggacgaggacagcgacctcgaggagtttgtgcggagc

SEQ ID NO: 504284 - DNA, 120 bp, Artificial Sequence
  ENSG00000163945_12 (sequence is synthesized)
cacgggctgggctcgcacaagtacacgctggatgtggagctctgctcagagggcctgaaggtgcaggagaacgaggacaaccttgctctcatccacgccgcccgcgacacactcaagctc

SEQ ID NO: 504285 - DNA, 120 bp, Artificial Sequence
  ENSG00000163945_13 (sequence is synthesized)
atccggaacaagttcctgccggctgtgtgctcgtggatccagcgcttcacccgcgtcgggacccacggtggatgtttaaagcgtgccattgacctgaaggctgaattggagctcgtactg

SEQ ID NO: 504286 - DNA, 120 bp, Artificial Sequence
  ENSG00000163945_14 (sequence is synthesized)
agaaaatacaaggagctggacatcgagcctgagggaggggaaaggcgcaggacagaagccctgggggatgcggaggaagatgaggacgatgaggactttgtggaggtccctgagaaggag

SEQ ID NO: 504287 - DNA, 120 bp, Artificial Sequence
  ENSG00000163945_15 (sequence is synthesized)
gggtatgagccacacatccccgaccacttgcggcctgagtatgggctggaggcagcaccagagaaagacacagttgtgcggtgcttgcggacgaggacgaggatggacgaggaggtgtcg

SEQ ID NO: 504288 - DNA, 120 bp, Artificial Sequence
  ENSG00000163945_16 (sequence is synthesized)
gaccccacctctgcggctgctcagctgcggcagctccgggaccacttgcctccaccctcatctgccagcccctccagagcgttgccagagccacaggaggcccagaagctggcagcagag

SEQ ID NO: 504289 - DNA, 120 bp, Artificial Sequence
  ENSG00000163945_17 (sequence is synthesized)
cgggcccgggcgcctgtggtgccctacggcgtggacctgcactactggggccaggagctccccacagccgggaagattgtcaagtctgactcccagcaccgcttctggaagcccagcgag

SEQ ID NO: 504290 - DNA, 120 bp, Artificial Sequence
  ENSG00000163945_18 (sequence is synthesized)
gtggaggaggaagtggtcaatgccgacatctccgagatgctccggagccgccacatcacttttgccgggaagtttgagcctgtgcagcactggtgccgtgccccgaggccagacggccgg

SEQ ID NO: 504291 - DNA, 120 bp, Artificial Sequence
  ENSG00000163945_19 (sequence is synthesized)
gctcgtgagcagcggcggcagctgcagaagcaggagcgcccggaatggcaggaccctgagttgatgagagacgtggaagcagccacagggcaggatctcggctcatccaggtacagcggg

SEQ ID NO: 504292 - DNA, 120 bp, Artificial Sequence
  ENSG00000163945_20 (sequence is synthesized)
aaaggcagggggaagaagaggaggtaccccagcctcaccaacctgaaggctcaggctgataccgcccgcgctcgcattgggagaaaagtcttcgccaaggcagctgtgcggagggtagtg

SEQ ID NO: 504293 - DNA, 120 bp, Artificial Sequence
  ENSG00000163945_21 (sequence is synthesized)
gcagccatgaaccggatggaccagaagaagcacgagaagttttcaaaccagtttaactacgcactgaactagagagcggggcccagtgcactggccatcagcactttctccctctgccag

SEQ ID NO: 504294 - DNA, 120 bp, Artificial Sequence
  ENSG00000163945_22 (sequence is synthesized)
tgtctcaggacagcagagtgggcgtgggtctgggcagtaaccatgctttgtctattactgtgtttgatgtaaagaaatggtgtgttgcaatgccctgaaggtacggccgctctgctgcta

SEQ ID NO: 504295 - DNA, 120 bp, Artificial Sequence
  ENSG00000163945_23 (sequence is synthesized)
cagggttcggcatcgtctggtgatgggtctggcctcgcagaagaggccctcgggcctggagatgtgaacacaggcagcgaccctgttccagagggcttctgcgagtcctcgtgagaccag

SEQ ID NO: 504296 - DNA, 120 bp, Artificial Sequence
  ENSG00000163945_24 (sequence is synthesized)
tgcttgtcgtggtgtggggttcagcacggacggaatgtgtgtgcagctcagccttcagagcgtgcattccccagccaggaggcgaccactcagaggaactctgggaaacccacttttgtg

SEQ ID NO: 504297 - DNA, 120 bp, Artificial Sequence
  ENSG00000163945_25 (sequence is synthesized)
caaatgctgtttttaacacaaacacaaaggctagtgaaccgttcagtcatctgctttctgtttctggatgtgccttttcatacatgtgtcctcttgtccctggcttcttacacttggcgt

SEQ ID NO: 504298 - DNA, 120 bp, Artificial Sequence
  ENSG00000163945_26 (sequence is synthesized)
tgtttttaaggtttatccatgcagttcccctccaatgtataaaacaaaggaggtgaaaacctgtccatgcggaagcttgtgcacccatgttcacagcagcattggagaaggataccgaac

SEQ ID NO: 504299 - DNA, 120 bp, Artificial Sequence
  ENSG00000163945_27 (sequence is synthesized)
atcttctcgtgggcttactggccatttgtgtatctcctttggagaggagtctattcaaacctcttgcctatttttaattgaatgatttatcttgagttgtaacagttgttttttttgttt

SEQ ID NO: 504300 - DNA, 120 bp, Artificial Sequence
  ENSG00000163945_28 (sequence is synthesized)
tgagttgtaacagttgttttttttgtttttccttttagagatgggcttttgctcttacccaggctgagtgcagtggcagaatcatagctcagtgcagcctcaaactcctgggctcaagcc

SEQ ID NO: 504301 - DNA, 85 bp, Artificial Sequence
  ENSG00000163945_29 (sequence is synthesized)
cacctggctaattttttaaacggtgatctcgaactcctagcctcaagcgatcctcctgcttcggtctcccaaagtgttgggatta

SEQ ID NO: 504302 - DNA, 120 bp, Artificial Sequence
  ENSG00000163945_30 (sequence is synthesized)
attacaggcatgagccaccactcctggccaggagtttatatgtatactgtggatactagatcctcatgtgatttgcaaaaactttatttatttatttatttatttttgaaatggaatctt

SEQ ID NO: 504303 - DNA, 65 bp, Artificial Sequence
  ENSG00000163945_31 (sequence is synthesized)
accacctcctgggttcaagcgattcgcctgcgtcagcgtcctgagtagctgggactacaggcgcg

SEQ ID NO: 504304 - DNA, 120 bp, Artificial Sequence
  ENSG00000163945_32 (sequence is synthesized)
gattacaggtgtgagccaccgcactcagctgatttgcaaaaactttcttccatactgttgtttcactttctggatagtgtcctctgaagcacaaaagttaattttgatgaagtacagcaa

SEQ ID NO: 504305 - DNA, 120 bp, Artificial Sequence
  ENSG00000163945_33 (sequence is synthesized)
tgatgaagtacagcaatttatctgtttttttcttttgttgcttatgcttttgctgtcacatttcagaagccatcacctaatccaagatcacagagatttacacctagtttctaataagca

SEQ ID NO: 504306 - DNA, 120 bp, Artificial Sequence
  ENSG00000163945_34 (sequence is synthesized)
ttttataatttcagctcttatgtgtagatctttgatccattgtgaattaagttttgtgtgtggtgtaagagcccacattcttttgcatgtggatatccagttgtcccagcaccatttgtt

SEQ ID NO: 504307 - DNA, 120 bp, Artificial Sequence
  ENSG00000163945_35 (sequence is synthesized)
gaaaacattatttttccccattgaattatcttcgcaccattattgataatcagttgaccaaaaatgtacaggcttatttctgggcacttgactctattccattgacctgtttaaccttat

SEQ ID NO: 504308 - DNA, 120 bp, Artificial Sequence
  ENSG00000163945_36 (sequence is synthesized)
gccagtgccacagtgccttgatcagtgctgctttgttgtgagaagttttactttgttctgcttcaaggctgttttgactcttctgcatctcttgcatttccaaatgaattttaggatcca

SEQ ID NO: 504309 - DNA, 120 bp, Artificial Sequence
  ENSG00000163945_37 (sequence is synthesized)
ctcatcagtttcttcaaaaaaaaaaaaaaagcagctgagatttttgataggaattacattaaatctagagattgctttggaatgtattaccgtcttaatattaaatcttctgagtcatga

SEQ ID NO: 504310 - DNA, 120 bp, Artificial Sequence
  ENSG00000163945_38 (sequence is synthesized)
tcttggctcctcttggcctctgcagccttgctggaggctgccctgcggaatctgagtgaataagggaaacagcaacagtcacgttggggaaaagctgattcggacagcgccactggttcc

SEQ ID NO: 504311 - DNA, 120 bp, Artificial Sequence
  ENSG00000163945_39 (sequence is synthesized)
gtggttttaacatagactctaaacagcccccagcacaggggcagtgcagaggtggtgtgattttggggaacaagaacagccttggagacgatcttaaatgcagtccaaccgtggctgatg

SEQ ID NO: 504312 - DNA, 120 bp, Artificial Sequence
  ENSG00000163945_40 (sequence is synthesized)
ttggagccctaagcaggggaaaaagctccacaagaaataggaatttccagggctctgcccaccgggagctgtgttcatacacagggtctgggggttgatttgtattggggtgtttttcca

SEQ ID NO: 504313 - DNA, 120 bp, Artificial Sequence
  ENSG00000163945_41 (sequence is synthesized)
gtggcctttccaagcggctgccacctcaggcttgggtgctggggagggctccaggctgcctacatctcaccaccggagcctgagctgccggggctatgggcacagggtgccgggcagtct

SEQ ID NO: 504314 - DNA, 120 bp, Artificial Sequence
  ENSG00000163945_42 (sequence is synthesized)
gggctctcgctgctgcccagcttctttccagcctggcgaatccatctgctcaggctggcacttctgcaaagcccggcagcacagtgtgtgaacagcgtggccacaaggcgggactgccgg

SEQ ID NO: 504315 - DNA, 120 bp, Artificial Sequence
  ENSG00000163945_43 (sequence is synthesized)
accccccgacgcacgccatgttctggcagagcgtggcctgagctgctgctccgggcctcaccctcgcccgtgaggagcagatagcaggcacccacctcgggactgttggaagatggaaca

SEQ ID NO: 504316 - DNA, 120 bp, Artificial Sequence
  ENSG00000163945_44 (sequence is synthesized)
ggagctgcgtgtgaggggaggctttggtgttaagccacagtgttcttttctaagataataaaacacttccttctcacagcatcaggtttgggattcccgggggcaggcatgggcgtctgg

SEQ ID NO: 504317 - DNA, 120 bp, Artificial Sequence
  ENSG00000163945_45 (sequence is synthesized)
caggttcccctcaggctagagcagccttccttgcatggtctgcctctccggggcctgtgggagacgccagtcggcgccctcttgtgacctctgtgtgcttctccccagagggcctgaagg

SEQ ID NO: 504318 - DNA, 120 bp, Artificial Sequence
  ENSG00000163945_46 (sequence is synthesized)
agttcctgccggctgtgtgctcgtggatccaggtgtgccagggaccccccgggccagtggacctggcatgtgcctcccagcaggacagcttcccaggtcctgcccggccggcccctgagc

SEQ ID NO: 504319 - DNA, 120 bp, Artificial Sequence
  ENSG00000163945_47 (sequence is synthesized)
tgttcgcacccccgtttcgcagcgcttcacccgcgtcgggacccacggtggatgtttaaagcgtgccattgacctgaaggctgaattggagctcgtactgagaaaatacaaggagctgga

SEQ ID NO: 504320 - DNA, 120 bp, Artificial Sequence
  ENSG00000163945_48 (sequence is synthesized)
ggcctgagtgggctcgggtgggaggcgccttcacagcactcagaccaggcttcccccaggcttgtgggtggtacatccacagccttgcttgggtggggcaggggcgctggtgggggctgt

SEQ ID NO: 504321 - DNA, 120 bp, Artificial Sequence
  ENSG00000163945_49 (sequence is synthesized)
ggagaggctgcctggggcccctggcacagggctggacccatcccgtatgccagccacccaaggcaccttagcccttggagctcagggtgaggctgttttcccgtggatcagccaggggca

SEQ ID NO: 504322 - DNA, 120 bp, Artificial Sequence
  ENSG00000163945_50 (sequence is synthesized)
gtctcatggggacactgaagcccatggcaggagctggctcttcgccacagctgtgtggcccagacccctccctacagaaaggatctggggtgaccacaggcaaaaccctgcctcgagggg

SEQ ID NO: 504323 - DNA, 120 bp, Artificial Sequence
  ENSG00000163945_51 (sequence is synthesized)
cccccacagcagcgcctggcagccccacaggggccgcagctgagcggcagcttcaccacattgtggcctcaggccctgctggctccacagctccacaccctcgtgggtcgcagcagctga

SEQ ID NO: 504324 - DNA, 120 bp, Artificial Sequence
  ENSG00000163945_52 (sequence is synthesized)
gctggtcagcacagcacacctcatcctgctccccggaatgcctgcctggcccgtgccccccctgctgcagccctccagggcagctgtgcggagggtagtggcagccatgaaccggatgga

SEQ ID NO: 504325 - DNA, 120 bp, Artificial Sequence
  ENSG00000163945_53 (sequence is synthesized)
gacggagccatccccacgtccctgtggctctcaggacgccctcctctgaggggcgcgtgattccagtgccctttccatgggaagattgttccacgggacgacgaaggacggccgctcgac

SEQ ID NO: 504326 - DNA, 120 bp, Artificial Sequence
  ENSG00000163945_54 (sequence is synthesized)
ctgctgggtcacctcccaccgcgtggcccccccgtgtgagggtgttcgaggggggccatctgagcgccaagatattccagggacttggggcctccaggggctcccctgctttgagttccc

SEQ ID NO: 504327 - DNA, 120 bp, Artificial Sequence
  ENSG00000163945_55 (sequence is synthesized)
ctgggggaccacccagcctttccccggggaggggcagtgccagccagcaggggcagcaggcaggtctgctcaggaacgccccccagcattccccaggataagaggggctcgaccgccagg

SEQ ID NO: 504328 - DNA, 120 bp, Artificial Sequence
  ENSG00000163945_56 (sequence is synthesized)
caccgccatcctcgcttcctgggggagccatgccaggacacaggccttggctggtgcagagtgagcccctcgtctctcccttgcctggctgtacccccaggtcagtgcctgcgtatttct

SEQ ID NO: 504329 - DNA, 120 bp, Artificial Sequence
  ENSG00000163945_57 (sequence is synthesized)
gcagcggtgacttcagggagggcgatgactgcaaaggcgggcagaacgggggtccacgcgtcagccccagcagagcccagccccagcatgtcttctctgagcactggctctgggaggctg

SEQ ID NO: 504330 - DNA, 120 bp, Artificial Sequence
  ENSG00000163945_58 (sequence is synthesized)
gcctggtgtctctgcagcccagcatgggcctgtgtgactggtgaggacttggcagggccagagtgcgaagcccaccagcccggcgtccctgcgtgcagtctgtcagctggggcaccagcc

SEQ ID NO: 504331 - DNA, 120 bp, Artificial Sequence
  ENSG00000163945_59 (sequence is synthesized)
actcgcacggccttgtgtttctgtcttcatattgccttgttctcgcctaagaaaatccagaatgcttgtttagaagccacctgaggctgttgactccctcccaaatctgtgtcaagtccc

SEQ ID NO: 504332 - DNA, 120 bp, Artificial Sequence
  ENSG00000163945_60 (sequence is synthesized)
tgctggtgcaggtttgtctggtagcaccagtgaggtggcccccacccatcgccatcccagaaaccctcccttggacacacctggaaggtgctaagtgcaccgggcagaggaggcccctcc

SEQ ID NO: 504333 - DNA, 120 bp, Artificial Sequence
  ENSG00000163945_61 (sequence is synthesized)
ctcctgcgaggccgctccccgggaggccaagggggaggctgccctcatcctggagtgcgggaggccacgggagaagtgccaaggtggggctggggccaccttcaccgcgcagaaccaccc

SEQ ID NO: 504334 - DNA, 120 bp, Artificial Sequence
  ENSG00000163945_62 (sequence is synthesized)
ggacctggggcggccctttctaagcctgtctgtctcgggccagggccaaggggcccgtcgcccatctgtctctgaaggtggcacccacaggcagtctgtcagtgtccgagggcagcagtt

SEQ ID NO: 504335 - DNA, 120 bp, Artificial Sequence
  ENSG00000163945_63 (sequence is synthesized)
gccccaggaccagtgcctaactttggtgatgccgccactgggagcccaggcccctggcggaagcctcccaggtcacatcttgccttgtttccccacagggcagctgtgcggagggtagtg

SEQ ID NO: 504336 - DNA, 120 bp, Artificial Sequence
  ENSG00000163946_0 (sequence is synthesized)
aggccggcgcgatggcgactgctgtggagacggaggcctgtcagccgacggatgcgagttgggaaagtggcggcggcggagacgacgagatgaagcaggcgcttccggagcttgagtcct

SEQ ID NO: 504337 - DNA, 120 bp, Artificial Sequence
  ENSG00000163946_1 (sequence is synthesized)
cccaacaaaatggcggcggcggcggcctcaacatcgctgagcccagcggcggcgctgggcgtgaggagaacgcgggggccgaggccgcccagagcctcagccacgagcagcctcaggact

SEQ ID NO: 504338 - DNA, 120 bp, Artificial Sequence
  ENSG00000163946_2 (sequence is synthesized)
cctctgaggcgggcgcggccgccctgcccagaggccccgaagagcccgaaaggcctgttaggaggagttttcagatccccaggaagagcagagaaaagaaagcacttttccagccattaa

SEQ ID NO: 504339 - DNA, 120 bp, Artificial Sequence
  ENSG00000163946_3 (sequence is synthesized)
ctccaggctctcgagaatttgaagatgttgtaaatattctccattcttcttaccttgaaccaacctcagtaacaaattttaactacagacgtgcttgcttggtacacaatgagcttttgg

SEQ ID NO: 504340 - DNA, 120 bp, Artificial Sequence
  ENSG00000163946_4 (sequence is synthesized)
aaaaggagtttacagaaaagcgaagagaactgaagtttgatggtcgtttagataaggaactttcagaatcctatgcatttctgatggttgatcgataccaggttcaaaccatatgtgaaa

SEQ ID NO: 504341 - DNA, 120 bp, Artificial Sequence
  ENSG00000163946_5 (sequence is synthesized)
aaggattacatgtgggtcagtccaaaataacaattcttggcagtccttccatgggtgtctatctttctaggtatgctgatttattacaagcgaatcctttggacacgggggcaatgggtg

SEQ ID NO: 504342 - DNA, 120 bp, Artificial Sequence
  ENSG00000163946_6 (sequence is synthesized)
atgttgttatttttaaaataatgaagggtaaaataaagagtatatatgaccccatgggtgtaaaaagtttggaatctatgttaaataagagtgctttggaccccacaccaaagcatgaat

SEQ ID NO: 504343 - DNA, 120 bp, Artificial Sequence
  ENSG00000163946_7 (sequence is synthesized)
gtcacgtgtcaaagaatgccaatcgaattacatcacttttggcttacagagcctatgagcttactcagtattatttttatgagtatggctttgatgagctaaggcgaagaccaagacacg

SEQ ID NO: 504344 - DNA, 120 bp, Artificial Sequence
  ENSG00000163946_8 (sequence is synthesized)
tttgtccatatgcagttgtgtcttttacttacaaagatgatatacaaactccgaagtttgtaccttcatcaagatctaacagctttaatacagatagaaacatagataaatataactata

SEQ ID NO: 504345 - DNA, 120 bp, Artificial Sequence
  ENSG00000163946_9 (sequence is synthesized)
ccttgtggaaaggacagcttttaaataaaggaaaacttttgtgttatatttctctgaggtcagccactcgtgcttttttgcctatcaaactacctgagaaattagatgttgaaacagtta

SEQ ID NO: 504346 - DNA, 120 bp, Artificial Sequence
  ENSG00000163946_10 (sequence is synthesized)
tgagtattgatcatctgaaacagaaaatccctccagcactgttttataaggaaacatacttaggtccaaatgaagttttgaagaatggaatgtattgcagcctttatgaagttgtggaaa

SEQ ID NO: 504347 - DNA, 120 bp, Artificial Sequence
  ENSG00000163946_11 (sequence is synthesized)
agacaagaattggaagtaacatggagagtttactgcaaaaactagacagagaaaaacttgttcttgttaaacctttgggagaccgaggatacctttttcttctctccccttatcagatgg

SEQ ID NO: 504348 - DNA, 120 bp, Artificial Sequence
  ENSG00000163946_12 (sequence is synthesized)
ttcctccatatgaatatcagactgccaagtctcgagtcctacatgctttgtttctatttcaagaacctagaagcatagttacttcacaaaaaggttcaaccaatgcagcaccacaggaga

SEQ ID NO: 504349 - DNA, 120 bp, Artificial Sequence
  ENSG00000163946_13 (sequence is synthesized)
ggcatgagagcatgccagatgtattaaaaatagctcagtttttacaattttctttgattcagtgtcgaaaggaattcaaaaatataagcgccataaattttcattctgttgttgaaaagt

SEQ ID NO: 504350 - DNA, 120 bp, Artificial Sequence
  ENSG00000163946_14 (sequence is synthesized)
atgtaagtgaattttttaagcgaggttttggttcaggtaaacgagagtttattatgtttccatatgattcacgattagatgataaaaaattcttatactcagctcccagaaataaatccc

SEQ ID NO: 504351 - DNA, 120 bp, Artificial Sequence
  ENSG00000163946_15 (sequence is synthesized)
atattgatacttgtttgcatgcctatatttttcggcctgaagtgtatcagttacctatttgtaaattaaaagaactatttgaagaaaatagaaaacttcagcagtttagtccactttcag

SEQ ID NO: 504352 - DNA, 120 bp, Artificial Sequence
  ENSG00000163946_16 (sequence is synthesized)
attatgaaggtcaagaagaagaaatgaatggtacaaaaatgaaatttggaaaacgaaataactcaagaggtgaagccattatatctggaaagcaaagatcatctcattctttggattatg

SEQ ID NO: 504353 - DNA, 120 bp, Artificial Sequence
  ENSG00000163946_17 (sequence is synthesized)
ataaggatagagtcaaagaattgattaatttaattcagtgtaggaaaaagagtgtgggtggggactcagacacagaagatatgagaagcaaaactgtcttgaagaggaagcttgaggatc

SEQ ID NO: 504354 - DNA, 120 bp, Artificial Sequence
  ENSG00000163946_18 (sequence is synthesized)
tacctgaaaatatgagaaagctcgccaaaaccagtaatttatctgaaaattgccatctgtatgaagagtctccacagcctattggctcacttggacatgatgctgacttgaggcggcagc

SEQ ID NO: 504355 - DNA, 120 bp, Artificial Sequence
  ENSG00000163946_19 (sequence is synthesized)
agcaggatacctgtaactccggcattgctgacatccataggctgtttaattggttatcagaaacactagcaaatgcgcgccattctgatgcatctctgacagacacagtcaacaaagcct

SEQ ID NO: 504356 - DNA, 120 bp, Artificial Sequence
  ENSG00000163946_20 (sequence is synthesized)
taggattgagcactgatgatgcctatgaagagctgaggcaaaaacatgagtatgagttgaactctaccccagataagaaagactatgagcagcctacttgtgcaaaagttgaaaatgcac

SEQ ID NO: 504357 - DNA, 120 bp, Artificial Sequence
  ENSG00000163946_21 (sequence is synthesized)
agtttaagggtactcagagcttattactagaagttgatgcaacatctaagtattctgttgctatttctaccagcgaagtgggcactgaccataagctacatttgaaagaagatccaaatt

SEQ ID NO: 504358 - DNA, 120 bp, Artificial Sequence
  ENSG00000163946_22 (sequence is synthesized)
taattagcgtgaataattttgaagattgcagtttgtgtcccagtgttcccattgaacatggatttcgtagacaacagtctaagtcaaataatgttgaagagactgaaatacattggaaac

SEQ ID NO: 504359 - DNA, 120 bp, Artificial Sequence
  ENSG00000163946_23 (sequence is synthesized)
aaatcaccagaagaacaactggtgtgtgtgccaccacaggaggcctttcctaacgacccccgggtaataaatagacagagaagttctgattaccagtttccatcctctccatttacagac

SEQ ID NO: 504360 - DNA, 120 bp, Artificial Sequence
  ENSG00000163946_24 (sequence is synthesized)
acactaaagggcaccactgaggatgacgtgttgacaggtcaggtggaggagcagtgtgtgccagcagcagaggcagagccgcctgcagtgagcgaaaccacagagaggacagtgttagga

SEQ ID NO: 504361 - DNA, 120 bp, Artificial Sequence
  ENSG00000163946_25 (sequence is synthesized)
gagtacaatctcttttctaggaagatagaagagattttgaagcaaaagaatgtttcatatgtcagtacagtttccacacctatcttttcaacacaagagaagatgaaacggctttccgag

SEQ ID NO: 504362 - DNA, 120 bp, Artificial Sequence
  ENSG00000163946_26 (sequence is synthesized)
ttcatatattctaagacttccaaagctggtgtgcaggagtttgtagatggtttgcatgagaagctaaatactattattattaaagcatcagccaagggtgggaatttgccaccagtcagt

SEQ ID NO: 504363 - DNA, 120 bp, Artificial Sequence
  ENSG00000163946_27 (sequence is synthesized)
cctaacgattctggtgctaagatagcatcgaatcctctggaaaggcatgtcataccagtttcctcaagtgacttcaacaataaacatctccttgagccactgtgtagtgatcctttgaaa

SEQ ID NO: 504364 - DNA, 120 bp, Artificial Sequence
  ENSG00000163946_28 (sequence is synthesized)
gataccaactctgatgagcagcattccacttcggctttaactgaagtagaaatgaaccagcctcaacatgccacagagttaatggtgacttctgatcatattgtacctggtgatatggcc

SEQ ID NO: 504365 - DNA, 120 bp, Artificial Sequence
  ENSG00000163946_29 (sequence is synthesized)
cgggaaccagtagaagaaacaacaaaatcccccagtgatgtaaacatttctgctcaaccagctctttcaaattttataagccagttagaacctgaagtatttaatagtttggttaaaatc

SEQ ID NO: 504366 - DNA, 120 bp, Artificial Sequence
  ENSG00000163946_30 (sequence is synthesized)
atgaaagacgtccagaaaaatactgtgaaattttatattcatgaagaagaagagagtgtgctctgtaaagaaataaaggaatatcttatcaaattaggcaatacagaatgtcatcctgaa

SEQ ID NO: 504367 - DNA, 120 bp, Artificial Sequence
  ENSG00000163946_31 (sequence is synthesized)
cagtttttggaaagaagatcaaaattagataaactattgattattattcaaaatgaagacattgcaggtttcattcacaagatacctggcttggtgactttaaagaagctcccctgtgtt

SEQ ID NO: 504368 - DNA, 120 bp, Artificial Sequence
  ENSG00000163946_32 (sequence is synthesized)
agttttgctggtgttgatagcctggatgatgttaaaaatcatacatacaatgaattatttgtatctggaggttttatcgtatctgatgaatcaattctaaacccagaggttgtcacagtt

SEQ ID NO: 504369 - DNA, 120 bp, Artificial Sequence
  ENSG00000163946_33 (sequence is synthesized)
gagaaccttaaaaattttttgacattccttgaggaacttagtactccagaaggaaaatggcaatggaaagtccactgtaaatttcagaagaaactaaaggaactaggcagattgaatgct

SEQ ID NO: 504370 - DNA, 120 bp, Artificial Sequence
  ENSG00000163946_34 (sequence is synthesized)
aaagctctaagtctgttgacgcttctgaatgtctatcagaagaaacatctggttgaaattttgtcataccacaattgtgattcacaaactcgaaatgctccagaattggattgccttatc

SEQ ID NO: 504371 - DNA, 120 bp, Artificial Sequence
  ENSG00000163946_35 (sequence is synthesized)
agacttcaggctcagaacatacagcaacgacacatagtctttttaacagagaagaacatcaagatgctttccagttatacagataatggaatagtggttgcaactgctgaagacttcatg

SEQ ID NO: 504372 - DNA, 120 bp, Artificial Sequence
  ENSG00000163946_36 (sequence is synthesized)
caaaactttaaaaatcttgtgggctatcacaattcaatcacagaagaaaaccttccacagcttggtgctaatgagaatcttgagtcgcagtcagatgctgttttgacattaacccctttg

SEQ ID NO: 504373 - DNA, 120 bp, Artificial Sequence
  ENSG00000163946_37 (sequence is synthesized)
gagctgggagttgggatttcccaacattaaacgtgaacacatttcgcagaagcttttagcatcggattatctggacattcacatctagtgtgagtgttgtgactaagtgaacttgtggca

SEQ ID NO: 504374 - DNA, 120 bp, Artificial Sequence
  ENSG00000163946_38 (sequence is synthesized)
gaagaccaagctttaagggattgtggacttgcagaccctgacgcgttatattgtgtgagtagtgtataattttaaaacttaaacaaactgtgtatttcaatagaggaggactttttgttt

SEQ ID NO: 504375 - DNA, 120 bp, Artificial Sequence
  ENSG00000163946_39 (sequence is synthesized)
tttaaatgtagctcttttagaaaacgatgaaaaggatgaagaggatatgtctctggattcaggggatgaaatctcacatatagaagtatgcagcaattttcattcagaaatatgggagaa

SEQ ID NO: 504376 - DNA, 120 bp, Artificial Sequence
  ENSG00000163946_40 (sequence is synthesized)
agagaccaaaggatcacgtggaacagatcaaaaaaagaatactcaaattgagttgcaatcgtctcctgatgtgcaaaacagtttattagaagataagacttaccttgattctgaagagag

SEQ ID NO: 504377 - DNA, 120 bp, Artificial Sequence
  ENSG00000163946_41 (sequence is synthesized)
aacttctattgatatagtatgctctgaaggagagaacagcaattcaacagaacaagattcatatagtaactttcaggtttatcatagtcaattaaatatgtcccatcagtttagtcattt

SEQ ID NO: 504378 - DNA, 120 bp, Artificial Sequence
  ENSG00000163946_42 (sequence is synthesized)
taatgttctcactcatcagacatttttggggacaccatatgccctttcatcaagtcagtctcaagaaaatgagaattacttcttatctgcttatactgaaagcttggatagagataaatc

SEQ ID NO: 504379 - DNA, 120 bp, Artificial Sequence
  ENSG00000163946_43 (sequence is synthesized)
tccacctcccttaagttgggggaaaagtgattcttccaggccatattcacaagagaaataactgtagtaactttttttttaagagattgttgtggactttgtttattaacaatttatatt

SEQ ID NO: 504380 - DNA, 120 bp, Artificial Sequence
  ENSG00000163946_44 (sequence is synthesized)
tcattctctaaacaaaaggttcttgttctttctcaaatgttttttcttttatttaaatcatgatggcctgtaacagttgaagcatctaaaaattgaaataaatatatatttttaacatat

SEQ ID NO: 504381 - DNA, 120 bp, Artificial Sequence
  ENSG00000163946_45 (sequence is synthesized)
attgtacttgaattatctcatgttggcacttctaagttttactttttgtatgttacctgtacttaggcttcaaattgaagcctgttttatgtgtaaaatcagatgcttgcaggaggacgg

SEQ ID NO: 504382 - DNA, 120 bp, Artificial Sequence
  ENSG00000163946_46 (sequence is synthesized)
agaagaactgcccgagggaggagcggctccgaggaccgggcagcgcatttggggtgcccgctacagggccccccaagaggctgccaggtcgggagcgcagcctgaggccacggggggaag

SEQ ID NO: 504383 - DNA, 120 bp, Artificial Sequence
  ENSG00000163946_47 (sequence is synthesized)
aatgactgttaatttctttgcctcctctttgattccatctcttgacctctatatcatttcaaaggagcattgagtgaacatccatccttgtaccttgaatattccatgaatgctcctgct

SEQ ID NO: 504384 - DNA, 120 bp, Artificial Sequence
  ENSG00000163946_48 (sequence is synthesized)
tcagggcctctgcatttgctgttctctcactttccccagtaagctgcataattcattctacatttcttcacgtatttccttatgattgaggtttctctgttttttttttttacctctata

SEQ ID NO: 504385 - DNA, 120 bp, Artificial Sequence
  ENSG00000163946_49 (sequence is synthesized)
ctcttatgtctctttttatagcactgaaaaccatcatgatctgttatatatcattgttttctgtcttcctcattagatttatgtaggttggaactttgttctgtttatctctataatcct

SEQ ID NO: 504386 - DNA, 120 bp, Artificial Sequence
  ENSG00000163946_50 (sequence is synthesized)
attacctagaactgtgcctggtaaataagagcttagtatgtatttactgaatgatgaattaatatatttatatattgaggctgtgtcttctaatgtcagcaaaataattgacaagagact

SEQ ID NO: 504387 - DNA, 120 bp, Artificial Sequence
  ENSG00000163946_51 (sequence is synthesized)
ttggtggacactgttctctcttggttaatatttttggaaaaaacaactcccttaaatttgggtaaatgtggtaatttgagcgaagtaagtacttctgttttctctaagtagacttggatt

SEQ ID NO: 504388 - DNA, 120 bp, Artificial Sequence
  ENSG00000163946_52 (sequence is synthesized)
tactagactttgtaatgagtaatttctttgttcttcctacctggaggaaggacttaactgtagtatgccattaaaaattgcacttatatcatcttacatgttaatttttatgattatact

SEQ ID NO: 504389 - DNA, 120 bp, Artificial Sequence
  ENSG00000163946_53 (sequence is synthesized)
tgtcacctgatataaagtacttttgttgaagtgaattattttgatgtaggcttttgtatactgtgtttacacaggtataagtcagtaatagcagtgttaatatttacaggattttggctc

SEQ ID NO: 504390 - DNA, 120 bp, Artificial Sequence
  ENSG00000163946_54 (sequence is synthesized)
gatacctcaagatttatctaacagtgcagtttcatttagataataaactatgtacataggacacattttttatctctaggcttagtcatgtaaaaactgcctattgctaaaattctggta

SEQ ID NO: 504391 - DNA, 120 bp, Artificial Sequence
  ENSG00000163946_55 (sequence is synthesized)
actttttgagagtattggataattttcagtacctgcgcaatccttgatttaatgaaattaaattttttatttcaaaagataggcttctgtttatcaaaggcgttgaacaatttgattttt

SEQ ID NO: 504392 - DNA, 120 bp, Artificial Sequence
  ENSG00000163946_56 (sequence is synthesized)
aaattagttttagcaaaatggaagtataatgggaatatatttttgaggtggtcttagtagtaattaccatttgttgaacacattaatgctatactagacagatacagtggagatagcttt

SEQ ID NO: 504393 - DNA, 120 bp, Artificial Sequence
  ENSG00000163946_57 (sequence is synthesized)
caaacccgtatctattcctaactactgcctctaatactaattactaacttgttactaatgctaacttttaaaaatgtttttgaaaattgcaatttctacaaataaatgtcatagtgcaaa

SEQ ID NO: 504394 - DNA, 120 bp, Artificial Sequence
  ENSG00000163946_58 (sequence is synthesized)
taaatgtcaggatttagagaaggagcctaaactgaatttgtgttatttcagtaaaagttatggagttatgggtctagacgtgttaataagttagacagaactttggcactttagaacaaa

SEQ ID NO: 504395 - DNA, 120 bp, Artificial Sequence
  ENSG00000163946_59 (sequence is synthesized)
tgcatgagtggtatttcagttcctaagttacataaaaagtgtgaaagaacactgtgaggtcccagcaacgccagactatattaaggtaagtagaaagtgtttttatagggcttcaatacc

SEQ ID NO: 504396 - DNA, 120 bp, Artificial Sequence
  ENSG00000163946_60 (sequence is synthesized)
caggtggtgacagagcagaagaaccggtttttttttttttttttttactactaagcttttacaaaagaagtatctgttttattgtatagaacaagtacagcattttactacatagtatac

SEQ ID NO: 504397 - DNA, 120 bp, Artificial Sequence
  ENSG00000163946_61 (sequence is synthesized)
aagtttttaatgagcatttaaaaaaataagtaaatctaggctatttgaaaaatacagttgagccagtgagcacattttataatttggaagacacaaatcaaatgtgaaggatttgatttt

SEQ ID NO: 504398 - DNA, 120 bp, Artificial Sequence
  ENSG00000163946_62 (sequence is synthesized)
ctacatttaaaatgaagaaccaaaactctcttcttgattttcagctaaaggcaggagactactttccaactccttttgcttctggagaaggccctgaaatcacattgatatatgtttgtt

SEQ ID NO: 504399 - DNA, 120 bp, Artificial Sequence
  ENSG00000163946_63 (sequence is synthesized)
agtaaaatgtgcacacctgacttgcaatgttgtgttaaactagaattatattcacttggaaaacatatcgcttaggataaaattttgtcattcaaaaattttttcagaaatgcttgtact

SEQ ID NO: 504400 - DNA, 120 bp, Artificial Sequence
  ENSG00000163946_64 (sequence is synthesized)
agaccacctcatttggatatatagctatcacatttgtaagattctgtttttagcataaaaatcaatagggatgaaaattttcttagaactcaagactccataactatgggggtaaatgaa

SEQ ID NO: 504401 - DNA, 120 bp, Artificial Sequence
  ENSG00000163946_65 (sequence is synthesized)
taactatgggggtaaatgaagtcatcccttctcccccagtccacccccaagtgctcttagatactgaaggagtctcccttaacatacagtgttttttttttgttgttgttgttttgtttt

SEQ ID NO: 504402 - DNA, 63 bp, Artificial Sequence
  ENSG00000163946_66 (sequence is synthesized)
gagtctcgctctgtcgcccaagctggagtacagtggtgcaaatggctgggactacaggcaccc

SEQ ID NO: 504403 - DNA, 120 bp, Artificial Sequence
  ENSG00000163946_67 (sequence is synthesized)
ctgggattacaggcttgagccactgctcctggccaacatccagtattttatcttgactgtcctaaccttaccttagatgctaacagaagggtcctgctgaaataacactgggtgctatat

SEQ ID NO: 504404 - DNA, 120 bp, Artificial Sequence
  ENSG00000163946_68 (sequence is synthesized)
tgatgggtaaatgtgtacatcctattccttcctctttatctcacaatttttgtctccactaagcaagaagtaaactaacacttcgtcactctaaagaaataacttatgtaaaactcttag

SEQ ID NO: 504405 - DNA, 120 bp, Artificial Sequence
  ENSG00000163946_69 (sequence is synthesized)
taaccctgtttgtcttcaaatgagtaaatagaccaaagtggggggacaattttctagttctgtagagggaaaaacatctgagtcaacattttgaaatgcagagggtattggtacatgacg

SEQ ID NO: 504406 - DNA, 77 bp, Artificial Sequence
  ENSG00000163946_70 (sequence is synthesized)
caggaggatcactcgagcccaggaatttaagaccagcttgggcaacacagcaagactctgtctcttacaaaaaaaaa

SEQ ID NO: 504407 - DNA, 88 bp, Artificial Sequence
  ENSG00000163946_71 (sequence is synthesized)
tggtatggtggtgcgagcctagtgccatccatgtattcaggaggctgaggtgggagggtggcttgagcctgggaggtcaaggctgcag

SEQ ID NO: 504408 - DNA, 120 bp, Artificial Sequence
  ENSG00000163946_72 (sequence is synthesized)
gtatatagtgaatcaaaactaactacagccattctttttaaagcccaagggatggagcaaaggtgtaaggatgttacctgtttgttttaatcagagagcaaaaagaagtcacaatagttt

SEQ ID NO: 504409 - DNA, 120 bp, Artificial Sequence
  ENSG00000163946_73 (sequence is synthesized)
gggagaaaaagtagtatggtgagtaaggttatgcgtataatttcatactgaatttattactatttgggatgtacgtcaatgttctaacaaacactgccaacacgtcaattttttaaaaag

SEQ ID NO: 504410 - DNA, 120 bp, Artificial Sequence
  ENSG00000163946_74 (sequence is synthesized)
cgtgggccacattgctaagaatttgttaaagcataactgtattttttgttttagggccttattgatgttttgccgttccaatgtatgcatttttttactcaataaacttgtcttaatttt

SEQ ID NO: 504411 - DNA, 120 bp, Artificial Sequence
  ENSG00000163946_75 (sequence is synthesized)
acgcattttataaaaaacaatttggggatgtttccattgtaagttactaattttgtgattattcaacagtattctttacaattacagacttttttgatatataagtggaatacatgattt

SEQ ID NO: 504412 - DNA, 120 bp, Artificial Sequence
  ENSG00000163946_76 (sequence is synthesized)
aatggggcaaaatgtttattgtttgtaatttgtttttcaaatgtactcagttttttctctgaccagtcctattttcttcccctagaatgtgcttgataataatacttttctgtttattta

SEQ ID NO: 504413 - DNA, 120 bp, Artificial Sequence
  ENSG00000163947_0 (sequence is synthesized)
cactcggctccggagcccagtcgagtcctgcccggctagaagccggctgtcggtctccgtgtcgccgccgccgcccggcatcgtggagctggggcccccttttgcctgggagttttgtag

SEQ ID NO: 504414 - DNA, 120 bp, Artificial Sequence
  ENSG00000163947_1 (sequence is synthesized)
tcgcctagggtcagcggtgacatcccaaagggcaggcccggcagccgccatggtggccaaggattaccccttctacctcacggtcaagagagcgaactgcagcctggagctacccccggc

SEQ ID NO: 504415 - DNA, 120 bp, Artificial Sequence
  ENSG00000163947_2 (sequence is synthesized)
cagcggtccggccaaggacgctgaggagcctagtaataaacgggtcaaacccctttcccgagtcacgtcgctagcaaacctcatcccgcccgtgaaggccacgccattaaagcgcttcag

SEQ ID NO: 504416 - DNA, 120 bp, Artificial Sequence
  ENSG00000163947_3 (sequence is synthesized)
tcaaaccctgcagcgctccattagcttccgcagtgagagccgccctgacatcctcgccccccgaccctggtccagaaatgccgccccctcgagcacgaaacggagagatagcaagctgtg

SEQ ID NO: 504417 - DNA, 120 bp, Artificial Sequence
  ENSG00000163947_4 (sequence is synthesized)
gagtgagaccttcgatgtgtgcgtcaatcagatgcttacatccaaggaaatcaaacgtcaggaggcgatctttgagctttcccaaggagaagaagacttgatagaagacttgaaattagc

SEQ ID NO: 504418 - DNA, 120 bp, Artificial Sequence
  ENSG00000163947_5 (sequence is synthesized)
aaaaaaggcctatcatgaccccatgctgaaactctccataatgacagaacaagagttgaatcaaatttttggaacactggactctctaattcctctacatgaagagctccttagtcagct

SEQ ID NO: 504419 - DNA, 120 bp, Artificial Sequence
  ENSG00000163947_6 (sequence is synthesized)
tcgagatgttaggaagcctgatggctcgactgaacatgttggtcccatcctcgtgggctggctcccttgcctcagctcctatgatagctactgcagcaatcaagtagccgccaaagctct

SEQ ID NO: 504420 - DNA, 120 bp, Artificial Sequence
  ENSG00000163947_7 (sequence is synthesized)
gctggaccacaaaaagcaagatcaccgagtccaggatttcctacagcgatgtttagaatccccctttagccgcaaactagatctctggaatttcctcgatattccaagaagccgcctggt

SEQ ID NO: 504421 - DNA, 120 bp, Artificial Sequence
  ENSG00000163947_8 (sequence is synthesized)
aaaataccctctgcttctccgagaaatcttgaggcacacaccaaatgataatccagatcagcagcacttggaagaagctataaatatcattcagggaattgtggcagaaatcaacaccaa

SEQ ID NO: 504422 - DNA, 120 bp, Artificial Sequence
  ENSG00000163947_9 (sequence is synthesized)
gactggtgaatctgaatgccgctattataaagagcggcttctttacttggaagaaggccagaaagactccctgatcgacagctctcgagtcttgtgttgtcatggtgaactgaagaacaa

SEQ ID NO: 504423 - DNA, 120 bp, Artificial Sequence
  ENSG00000163947_10 (sequence is synthesized)
tcggggcgtgaaactgcatgttttcctgttccaagaagtgcttgtgatcactcgagccgtcacccacaatgagcagctttgctaccagctgtaccgtcagccaatccccgtgaaagacct

SEQ ID NO: 504424 - DNA, 120 bp, Artificial Sequence
  ENSG00000163947_11 (sequence is synthesized)
cctgctggaagacctccaggatggagaagtgaggctgggtggctccctgcgaggggcattcagcaacaatgagagaattaaaaacttcttcagagtcagtttcaaaaatggatcccaaag

SEQ ID NO: 504425 - DNA, 120 bp, Artificial Sequence
  ENSG00000163947_12 (sequence is synthesized)
tcagacccactcgctacaagccaatgacactttcaacaaacagcagtggcttaactgtattcgtcaagccaaagaaacagttttgtgtgctgccgggcaagctggggtgcttgactccga

SEQ ID NO: 504426 - DNA, 120 bp, Artificial Sequence
  ENSG00000163947_13 (sequence is synthesized)
gggatcgttcctaaatcccaccaccgggagcagagagctacagggagaaacaaaacttgagcagatggaccaatcggacagtgagtcagactgtagtatggacacgagtgaggtcagcct

SEQ ID NO: 504427 - DNA, 120 bp, Artificial Sequence
  ENSG00000163947_14 (sequence is synthesized)
cgactgtgagcgcatggaacagacagactcttcctgtggaaacagcaggcacggtgaaagtaacgtctgacagaagcatgtgcacttcgggaagcaggcctgcatcttacctgtacagta

SEQ ID NO: 504428 - DNA, 120 bp, Artificial Sequence
  ENSG00000163947_15 (sequence is synthesized)
tgcattccacagatggaacggtttggagaagcactttttcatacttttgtgaaagtatacatgttggcccagtctctcgtatctgtacctttgtccctagtactgtaactgccaatctgt

SEQ ID NO: 504429 - DNA, 120 bp, Artificial Sequence
  ENSG00000163947_16 (sequence is synthesized)
ctgtgtaagctggaatctgtggcaactattaccctgtgttgtatttcccaagtgtctggatggatggagaggtactcaaacaagttactttcagttgtcctgctggattttaaaaaaata

SEQ ID NO: 504430 - DNA, 120 bp, Artificial Sequence
  ENSG00000163947_17 (sequence is synthesized)
gaaaaagaatctcaaaactactgttttacatagattgtttgaagagtccttcctcttgtgcttctgtaccactttcccagctcttagatgtggtagctaaaggcacggaatttagacggc

SEQ ID NO: 504431 - DNA, 120 bp, Artificial Sequence
  ENSG00000163947_18 (sequence is synthesized)
cttgtaaatagggcatgaggaactcatctgtgtattgggatggtattagagagagaatcaggaaagaccaactcatgaagtgaacttggtttgatcttactcaactagaaagcttgaaaa

SEQ ID NO: 504432 - DNA, 120 bp, Artificial Sequence
  ENSG00000163947_19 (sequence is synthesized)
catccctggggattctgaaggcttaattttgcaaaggaggatgcattgtctgaactttgcaacttcatccagtgcaagtttgatgcaagaatgtattaggacataaaatagaggctgacc

SEQ ID NO: 504433 - DNA, 120 bp, Artificial Sequence
  ENSG00000163947_20 (sequence is synthesized)
ttaaaagggccaggacagaagcggctgccagctctgaatctttaactgaaatgcacatggcaccaggaggtgtctctcatagttggttgctagcctaaaacatcagaatagaacccaaag

SEQ ID NO: 504434 - DNA, 120 bp, Artificial Sequence
  ENSG00000163947_21 (sequence is synthesized)
ggcttaggaaggcctgccaggataacaagaaggccctgtattcattgtgtttcatctgcctaggcctactcattattttagagaatgaatgaagcaacaaggaagagagaccatgactct

SEQ ID NO: 504435 - DNA, 120 bp, Artificial Sequence
  ENSG00000163947_22 (sequence is synthesized)
atcgatgacactgtttatagaaacacaggagaggaagaatttggaatgaaaagcacttcgtcagaaccttctgtgggagccattgagagaaaagcatggtccagtgccttctgagaaagg

SEQ ID NO: 504436 - DNA, 120 bp, Artificial Sequence
  ENSG00000163947_23 (sequence is synthesized)
ccagagctttgggctttcctgctctgcttttgggtcgtcaatttgccatctctggttctgtgctataatcagaattgtaattatgttctccagaggccaatttcattaactctgattaat

SEQ ID NO: 504437 - DNA, 120 bp, Artificial Sequence
  ENSG00000163947_24 (sequence is synthesized)
tagaatcagctagccagattagtaacctctttgtccagccttgatttacagtgcagggtaaagtgcagaccttaaaaacagctaagtacctagaagagctccctgcaagtgtaaatatta

SEQ ID NO: 504438 - DNA, 120 bp, Artificial Sequence
  ENSG00000163947_25 (sequence is synthesized)
aggatgacctgtgcaaaattatacccacaccagcactagtggtaattattctaaattattgccaaaaagttttttttaatctgtctttcaagtttacagaaaagaaagcagtaaatgcat

SEQ ID NO: 504439 - DNA, 120 bp, Artificial Sequence
  ENSG00000163947_26 (sequence is synthesized)
tgatgtcattttattatgtacatatatcatgtgcattcaagctgtgtgacaagatatatcaatataaaaacaaggtatatactttattattttttgaaaacaaggatattgtgatcaatt

SEQ ID NO: 504440 - DNA, 120 bp, Artificial Sequence
  ENSG00000163947_27 (sequence is synthesized)
ttaccctgtaaaacatatttctgtatttataggtcttaaacatgatgaattttttctattacaagtttatttaaaactgctttctcaagtcgttattgatacagcaagtgaacctgctgc

SEQ ID NO: 504441 - DNA, 120 bp, Artificial Sequence
  ENSG00000163947_28 (sequence is synthesized)
agacagaagcagaggaaagccaagaacagcctttattggtgaagaaaagaatgaatgattctttgtaggcgccatcagccacttttagaagccatcagccagtgtgttgggaaaagaggt

SEQ ID NO: 504442 - DNA, 120 bp, Artificial Sequence
  ENSG00000163947_29 (sequence is synthesized)
ttgtcaagtgttggcctatgggaaggtggtcaatgaatgttttgatgaaatgaatgtttttgtataatggccttaaacttttctggaagtatttcaaataaattacattattaagtcatc

SEQ ID NO: 504443 - DNA, 120 bp, Artificial Sequence
  ENSG00000163947_30 (sequence is synthesized)
atgcagcccaagtggcggggaggagttccttcagggaaactatgctcagccctgttcagagaatcctgtgcacagggctccactgcagttaggagccggtgagtccgggtggatgaggtc

SEQ ID NO: 504444 - DNA, 120 bp, Artificial Sequence
  ENSG00000163947_31 (sequence is synthesized)
agagcgccccatggtgtggtgctgcctctttgtccgttcgcagcgaaaacggaaacagagcacccaagatgaagatgctgttagcctttgcagtctcgacataagtgagcctagtaataa

SEQ ID NO: 504445 - DNA, 120 bp, Artificial Sequence
  ENSG00000163947_32 (sequence is synthesized)
agtaacaatgggggagaaggggcagtttctagaaggagaaggaggcactggagcagatacaaataattcctgcctacaaaattcttccctatctgtcctcctatcataaaagtgtcagct

SEQ ID NO: 504446 - DNA, 120 bp, Artificial Sequence
  ENSG00000163947_33 (sequence is synthesized)
ttcatgactgacgatgcatctacaaggactggagttgaacttcaagcaagagactcacagacaaaggcgccctgggccagtggcacacactagctttatcaaagagactcagggacaagt

SEQ ID NO: 504447 - DNA, 120 bp, Artificial Sequence
  ENSG00000163947_34 (sequence is synthesized)
acgcctggtctgtactgcggtttgccaattagctggatgaacagctggctaatttctgttttatctcttgggcagaagacacatgaggctagaataggttatcttcaacggggagccgag

SEQ ID NO: 504448 - DNA, 120 bp, Artificial Sequence
  ENSG00000163947_35 (sequence is synthesized)
actttcttctccagccccgcggggcacccgcaggtcagcgtcgcgtcgggcgctgctggtggcggctcacagggccgcgggtcacttcgcggcgggggagccgggctcagggcgctccgg

SEQ ID NO: 504449 - DNA, 120 bp, Artificial Sequence
  ENSG00000163947_36 (sequence is synthesized)
gcggcgggcgccgtcccagcctgcctgaggcccttgtcccggcggctgcatcttgtaaaccgagcagccagaaaatcccgagataggacaccagggtggaggacgccaaggggttaaggt

SEQ ID NO: 504450 - DNA, 120 bp, Artificial Sequence
  ENSG00000163947_37 (sequence is synthesized)
aggagcccatctggtgagctgagagttagtgaggggcccaagagaatggggcttgctctgccctgtgctttagatggaccatgtttgatagaaatatttgtcctgttatacttcatgtaa

SEQ ID NO: 504451 - DNA, 120 bp, Artificial Sequence
  ENSG00000163947_38 (sequence is synthesized)
ccatgtttccctctcctaaagcctggaatttcagagggttcttccagggatcaccccagaagaaaacagctgatacttacatctttgctccaggatctgctttaggggaactccaaacta

SEQ ID NO: 504452 - DNA, 120 bp, Artificial Sequence
  ENSG00000163947_39 (sequence is synthesized)
acagcagcgaaaacggaaacagagcacccaagatgaagatgctgttagcctttgcagtctcgacataagtgagcctagtaataaacgggtcaaacccctttcccgagtcacgtcgctagc

SEQ ID NO: 504453 - DNA, 120 bp, Artificial Sequence
  ENSG00000163947_40 (sequence is synthesized)
aggagcccatctggtgagctgagagttagtgaggggcccaagagaatggggcttgctctgccctgtgctttagatggaccatgtttgatagaaatatttggcctaaacggcagcggcaaa

SEQ ID NO: 504454 - DNA, 120 bp, Artificial Sequence
  ENSG00000163947_41 (sequence is synthesized)
atagtaacaatgggggagaaggggcagtttctagaaggagaaggaggcactggagcagatacaaataattcctgcctacaaaattcttccctatctgtcctcctatcataaaagcgaaaa

SEQ ID NO: 504455 - DNA, 120 bp, Artificial Sequence
  ENSG00000163947_42 (sequence is synthesized)
ttttccagcctggagaggccgaaccagcgcgggggtcgaggtttattgtgtgcatccaccaaggagaatgtaggattcaagaggacagaggtgtgttgtcctgttgactactgactcctg

SEQ ID NO: 504456 - DNA, 120 bp, Artificial Sequence
  ENSG00000163947_43 (sequence is synthesized)
ctccatggcatacagcgggtgcacaataactgtcctgagtgaatgaacacccattgactgaagtgaggagacctgagcctgccatactgagtctatggacagttccacagcaatgaatca

SEQ ID NO: 504457 - DNA, 120 bp, Artificial Sequence
  ENSG00000163947_44 (sequence is synthesized)
gcagaagagctgtcagatctttcccttcagcacttaaatcattgtcacgcaatggctttcatcttgggagattcatcctctgcattttggaactgagccttcctagtgttctgagagttt

SEQ ID NO: 504458 - DNA, 120 bp, Artificial Sequence
  ENSG00000163947_45 (sequence is synthesized)
tctgctgtctgttcagcttagcacgctaagaagctggagaggtacccagcagcctggttgcattctccgtcttggaaaagtatttaactgctttgagaaatcatggaatcgtttctggcc

SEQ ID NO: 504459 - DNA, 120 bp, Artificial Sequence
  ENSG00000163947_46 (sequence is synthesized)
acattgtgagattgtattgaattttctttttaagtttttaaatttttatatgcaaatgctggaaagcttggagacagtctatttcaaagaaggctgttgatttctgagactggcaggggc

SEQ ID NO: 504460 - DNA, 120 bp, Artificial Sequence
  ENSG00000163947_47 (sequence is synthesized)
ataaaatgacatgagagtgtctcagcaggattccaaattcacgaaagatttttccaggcacctactatgttcagaacggggatgcagaaatatcctggagaatctgaagttctgccttaa

SEQ ID NO: 504461 - DNA, 120 bp, Artificial Sequence
  ENSG00000163947_48 (sequence is synthesized)
ccctcgaaactttgaaagcaatggctgaaaaggaaagatgaatacctagaggctccctctggaaatgattgaggtttgccaccacaattggctactttggctttgcccatcaaaatttgg

SEQ ID NO: 504462 - DNA, 120 bp, Artificial Sequence
  ENSG00000163947_49 (sequence is synthesized)
agcccaggggagccgccgccgcagccgccgccgccgcggtgagttttccagcctggagaggccgaaccagcgcgggggtcgaggcctaaacggcagcggcaaaacaactttcccatgttt

SEQ ID NO: 504463 - DNA, 120 bp, Artificial Sequence
  ENSG00000163947_50 (sequence is synthesized)
agcccaggggagccgccgccgcagccgccgccgccgcggtgagttttccagcctggagaggccgaaccagcgcgggggtcgaggagacctgagcctgccatactgagtctatggacagtt

SEQ ID NO: 504464 - DNA, 120 bp, Artificial Sequence
  ENSG00000163947_51 (sequence is synthesized)
actggtttttcaggctattgagaaagtctgatttatgtggctgaagtatggtgttattgacccccccaccttcgactcctaagattccagaacaaactgagaattcatgcctaaacggca

SEQ ID NO: 504465 - DNA, 120 bp, Artificial Sequence
  ENSG00000163947_52 (sequence is synthesized)
ggtagtttggagggagtgggcagctggtggaaagagaaaagccacggtcttgaagtcaaactgcatttgtatgctatttcatcacttcctgattatgtactttgtttagtccctgtgatt

SEQ ID NO: 504466 - DNA, 120 bp, Artificial Sequence
  ENSG00000163947_53 (sequence is synthesized)
ctcagtttctcatctccaaaatggaaatgcataggtacctccttcataagattgttataaggatttagtaagataatctaagtgaaactgtctgcacatagttagtgctccttaagttcc

SEQ ID NO: 504467 - DNA, 120 bp, Artificial Sequence
  ENSG00000163947_54 (sequence is synthesized)
ctttctctgtctttttccattggataaaaacatgcttaataccagatagtccctacatggatgccagttgcgttatggtgggttttgcagctgaactggtaaacttgtccctaaagagac

SEQ ID NO: 504468 - DNA, 120 bp, Artificial Sequence
  ENSG00000163947_55 (sequence is synthesized)
ataagaatggtcaactggaatgtggattcatctgtaacattactcagtgggcctaatttaagacttaataaacaaattaactaaaagaagccaagatagcaatatctatcgagtatctaa

SEQ ID NO: 504469 - DNA, 120 bp, Artificial Sequence
  ENSG00000163947_56 (sequence is synthesized)
catgatactcggtgaaacaagcaggtaacttccttcccctatggagcttgcattgtgatggaggagaaagatgataaacaaatgaatactccaggtgttgttaagaaaacttaaaacccg

SEQ ID NO: 504470 - DNA, 120 bp, Artificial Sequence
  ENSG00000163950_0 (sequence is synthesized)
agagctcgtgagcgccggcgcggggacgcgggtttctgcctcaggccctgccctgctctactctgcgctctctgcccgcgccgccgccgcctcagcctcggccctgcgctgcgcgcccgg

SEQ ID NO: 504471 - DNA, 120 bp, Artificial Sequence
  ENSG00000163950_1 (sequence is synthesized)
cccgtgctgccatggcctgccgcccgcgaagcccgccgaggcatcagagccgctgcgacggtgacgccagcccgccgtcccccgcgcgatggagcctgggacggaagcgcagagccgacg

SEQ ID NO: 504472 - DNA, 120 bp, Artificial Sequence
  ENSG00000163950_2 (sequence is synthesized)
gcaggcgctggaggcccgaagacgccgaggaggcagagcaccgcggcgccgagcgcagacccgagagctttaccactcctgaaggccctaaaccccgttccagatgctctgactgggcaa

SEQ ID NO: 504473 - DNA, 120 bp, Artificial Sequence
  ENSG00000163950_3 (sequence is synthesized)
gtgcagttgaagaagatgaaatgaggaccagagttaacaaagaaatggcaagatataaaaggaaactcctcatcaatgactttggaagagagagaaaatcatcatcaggaagttctgatt

SEQ ID NO: 504474 - DNA, 120 bp, Artificial Sequence
  ENSG00000163950_4 (sequence is synthesized)
caaaggagtctatgtctactgtgccggctgactttgagacagatgaaagtgtcctaatgaggagacagaagcagatcaactatgggaagaacacaattgcctacgatcgttatattaaag

SEQ ID NO: 504475 - DNA, 120 bp, Artificial Sequence
  ENSG00000163950_5 (sequence is synthesized)
aagtcccaagacaccttcgacaacctggcattcatcccaagacccctaataaatttaagaagtatagtcgacgttcatgggaccagcaaatcaaactctggaaggtggctctgcattttt

SEQ ID NO: 504476 - DNA, 120 bp, Artificial Sequence
  ENSG00000163950_6 (sequence is synthesized)
gggatcctccagcggaagaaggatgtgatttgcaagaaatacaccctgtagaccttgaatctgcagaaagcagctccgagccccagaccagctctcaggatgactttgatgtgtactctg

SEQ ID NO: 504477 - DNA, 120 bp, Artificial Sequence
  ENSG00000163950_7 (sequence is synthesized)
caaggtgagacacatggacagtcaagtggaggatgagtttgatttggaagcttgtttaactgaacccttgagagacttctcagccatgagctaactgccccctggcggccaggaagagaa

SEQ ID NO: 504478 - DNA, 120 bp, Artificial Sequence
  ENSG00000163950_8 (sequence is synthesized)
acagctcctccccgactaggtggaaggctggccaggcaccaagcatgtgtgtgcacttgtacctggtggtttctctgttagcagtccattagctcatgctgaattatttttgccttactt

SEQ ID NO: 504479 - DNA, 120 bp, Artificial Sequence
  ENSG00000163950_9 (sequence is synthesized)
tcttaagaaacattaattttatgtatagtgagtatattttgcatgttttaaattgtaaatggagctaagtccaagaaagtacttgaagctctcttccagcgagcttaattgcgtaatccc

SEQ ID NO: 504480 - DNA, 120 bp, Artificial Sequence
  ENSG00000163950_10 (sequence is synthesized)
tgttgtcctccagggtaagctgacacgtctacataactggttttccacaggcatcttcagttattgcttgtcaggtggactgttttggatttaaccatgtaatccatgggaccaattgag

SEQ ID NO: 504481 - DNA, 120 bp, Artificial Sequence
  ENSG00000163950_11 (sequence is synthesized)
agtcagctacttttataggcatcaaagtattctcagacacctttaatatctttatggaaacttaatttttggccttttatcaatatgtcataacagcattctgaagtcagacattgttaa

SEQ ID NO: 504482 - DNA, 120 bp, Artificial Sequence
  ENSG00000163950_12 (sequence is synthesized)
attgagctattaaactaatgagttttatgtaagttatatggtcttaatttggtacttgtaaatagcactagttagactctttagaatactccaagagttagggcagcagagtggagcgat

SEQ ID NO: 504483 - DNA, 120 bp, Artificial Sequence
  ENSG00000163950_13 (sequence is synthesized)
ttagaaagaacattttaaaacaatcagttaatttaccatgtaaaattgctgtaaatgataatgtgtacagattttctgttcaaatattcaattgtaaacttcttgttaagactgttacgt

SEQ ID NO: 504484 - DNA, 120 bp, Artificial Sequence
  ENSG00000163950_14 (sequence is synthesized)
ttctattgcttttgtatgggatattgcaaaaataaaaaggaaagaaccctctttcactgactggggctgttgccaggtgggccagctgccgtgagagctgacatgtttggagggtcagaa

SEQ ID NO: 504485 - DNA, 120 bp, Artificial Sequence
  ENSG00000163956_0 (sequence is synthesized)
gcagaggaagatggcgccgcggagggtcaggtcgtttctgcgcgggctcccggcgctgctactgctgctgctcttcctcgggccctggcccgctgcgagccacggcggcaagtactcgcg

SEQ ID NO: 504486 - DNA, 120 bp, Artificial Sequence
  ENSG00000163956_1 (sequence is synthesized)
ggagaagaaccagcccaagccgtccccgaaacgcgagtccggagaggagttccgcatggagaagttgaaccagctgtgggagaaggcccagcgactgcatcttcctcccgtgaggctggc

SEQ ID NO: 504487 - DNA, 120 bp, Artificial Sequence
  ENSG00000163956_2 (sequence is synthesized)
cgagctccacgctgatctgaagatacaggagagggacgaactcgcctggaagaaactaaagcttgacggcttggacgaagatggggagaaggaagcgagactcatacgcaacctcaatgt

SEQ ID NO: 504488 - DNA, 120 bp, Artificial Sequence
  ENSG00000163956_3 (sequence is synthesized)
catcttggccaagtatggtctggacggaaagaaggacgctcggcaggtgaccagcaactccctcagtggcacccaggaagacgggctggatgaccccaggctggaaaagctgtggcacaa

SEQ ID NO: 504489 - DNA, 120 bp, Artificial Sequence
  ENSG00000163956_4 (sequence is synthesized)
ggcgaagacctctgggaaattctccggcgaagaactggacaagctctggcgggagttcctgcatcacaaagagaaagttcacgagtacaacgtcctgctggagaccctgagcaggaccga

SEQ ID NO: 504490 - DNA, 120 bp, Artificial Sequence
  ENSG00000163956_5 (sequence is synthesized)
agaaatccacgagaacgtcattagcccctcggacctgagcgacatcaagggcagcgtcctgcacagcaggcacacggagctgaaggagaagctgcgcagcatcaaccagggcctggaccg

SEQ ID NO: 504491 - DNA, 120 bp, Artificial Sequence
  ENSG00000163956_6 (sequence is synthesized)
cctgcgcagggtcagccaccagggctacagcactgaggctgagttcgaggagcccagggtgattgacctgtgggacctggcgcagtccgccaacctcacggacaaggagctggaggcgtt

SEQ ID NO: 504492 - DNA, 120 bp, Artificial Sequence
  ENSG00000163956_7 (sequence is synthesized)
ccgggaggagctcaagcacttcgaagccaaaatcgagaagcacaaccactaccagaagcagctggagattgcgcacgagaagctgaggcacgcagagagcgtgggcgacggcgagcgtgt

SEQ ID NO: 504493 - DNA, 120 bp, Artificial Sequence
  ENSG00000163956_8 (sequence is synthesized)
gagccgcagccgcgagaagcacgccctgctggaggggcggaccaaggagctgggctacacggtgaagaagcatctgcaggacctgtccggcaggatctccagagctcggcacaacgaact

SEQ ID NO: 504494 - DNA, 120 bp, Artificial Sequence
  ENSG00000163956_9 (sequence is synthesized)
ctgaaggcattggggagcccagcccggcagggaagaggccagcgtgaaggacctgggctcttggccgtggcatttccgtggacagcccgccgtcagggtggctggggctggcacgggtgt

SEQ ID NO: 504495 - DNA, 120 bp, Artificial Sequence
  ENSG00000163956_10 (sequence is synthesized)
cgaggcaggaaggattgtttctggtgactgcagccgctgccgtcgcgacacagggcttggtggtggtagcatttgggtctgagatcggcccagctctgactgaaggggcttggcttccac

SEQ ID NO: 504496 - DNA, 120 bp, Artificial Sequence
  ENSG00000163956_11 (sequence is synthesized)
tcagcatcagcgtggcagtcaccaccccagtgaggacctcgatgtccagctgctgtcaggtctgatagtcctctgctaaaacaacacgatttacataaaaaatcttacacatctgccacc

SEQ ID NO: 504497 - DNA, 120 bp, Artificial Sequence
  ENSG00000163956_12 (sequence is synthesized)
ggaaataccatgcacagagtccttaaaaaatagagtgcagtatttaaaccacccgcttgttggctggtcactaagtgtcctggtggctggggccggagccagtgctcttgaagggatcgc

SEQ ID NO: 504498 - DNA, 120 bp, Artificial Sequence
  ENSG00000163956_13 (sequence is synthesized)
gtcatagccagcttcccctctgggccctgtgggtctttgcagccaacctccttttcccgtgagacggcccggcctgatttaaagccaagagcgcttgagttgagtttgaggggaagatgt

SEQ ID NO: 504499 - DNA, 120 bp, Artificial Sequence
  ENSG00000163956_14 (sequence is synthesized)
ggagcgtgtggttctgtggacagtcagagactgtggcctgggggcagcgtctttcaactctcacctctgcagctcagggacctcgggagacctcaccaaacctgcagggcctccgtgtcc

SEQ ID NO: 504500 - DNA, 120 bp, Artificial Sequence
  ENSG00000163956_15 (sequence is synthesized)
ctaagtgtgctgtgtaaatgccccatctcatgggggagagacagccacggaggccttcctctgaccatagctgatggactggcggttgctcaggtccggctccgagaatgttcctgtgtc

SEQ ID NO: 504501 - DNA, 120 bp, Artificial Sequence
  ENSG00000163956_16 (sequence is synthesized)
tgagcctggaagaggctcgggtctggctccaggcgtggttcccttcccgtgtctgagcctggaagaggctcgggtccggctccgagcgtggttcccttcccgtgtctgagcctggaagag

SEQ ID NO: 504502 - DNA, 120 bp, Artificial Sequence
  ENSG00000163956_17 (sequence is synthesized)
gctcgggtccggctccgagcgtggttcccttcccgtgtctgagcctggaagaggctcgggtccggctccgagcgtggttcccttcccgtgtctgagcctggaagaggctcgggtccggct

SEQ ID NO: 504503 - DNA, 120 bp, Artificial Sequence
  ENSG00000163956_18 (sequence is synthesized)
ccgagcgtggttcccttcccgtgtctgagcctggaagaggctcgggtccggctctgggcgtggttcccttcccgtgtctgagcctggaagaggctcgggtccggctctgggcgtggttcc

SEQ ID NO: 504504 - DNA, 120 bp, Artificial Sequence
  ENSG00000163956_19 (sequence is synthesized)
cgtgtctgagcctggaagaggctcgggtccgggtccagctccgagcgtggttcccgtgtttgaacctggaagaggctccaccaggcgtattgtgttttgactgcagctggatcttggctt

SEQ ID NO: 504505 - DNA, 120 bp, Artificial Sequence
  ENSG00000163956_20 (sequence is synthesized)
gactgttgagatctgccaaacatccgctaagctatcatttctgagaaaggtcaaggctagaggcagcatgtcgggagttggcgcatcagggttggaagggccccagggtacagcatgtgg

SEQ ID NO: 504506 - DNA, 120 bp, Artificial Sequence
  ENSG00000163956_21 (sequence is synthesized)
gtgcctgttcctttgtggacttgtgtgtgtgtggctggtggggcggggggtggattctggttcttttttttcccattatcctgagagccttaaggtactcagtgtgttggtgagactcag

SEQ ID NO: 504507 - DNA, 120 bp, Artificial Sequence
  ENSG00000163956_22 (sequence is synthesized)
ccctgtcatctagcagaagtgtgttccttttcattgctgtatagtattccattgcatgactgtcctgtgctctgattttaatgcactttattgtgggtggatatttgagttgcttccttt

SEQ ID NO: 504508 - DNA, 120 bp, Artificial Sequence
  ENSG00000163956_23 (sequence is synthesized)
ctggggtaataacactcacttggaaatagctgtggtgaacactcgtgtgggggtgggggtgggggccaactctaggagcacctaatggatcttacgaagcgtgttgtccaagtatagaga

SEQ ID NO: 504509 - DNA, 120 bp, Artificial Sequence
  ENSG00000163956_24 (sequence is synthesized)
tgattccaaagtggttggactgtgtttctttctcccagctgggtggaaggagaacactagtggattgctgagacttggtgctcggtatttttaattatggacagcctggctggcgttttg

SEQ ID NO: 504510 - DNA, 120 bp, Artificial Sequence
  ENSG00000163956_25 (sequence is synthesized)
tggtgtctaattgcggagtagcgtgtcttactgtataatggcctcttttgtatgtgggagaccatggtgttgaggggaggcagttacacaaaaaacccagataccgagtgttagttccat

SEQ ID NO: 504511 - DNA, 120 bp, Artificial Sequence
  ENSG00000163956_26 (sequence is synthesized)
gggtgtggctggtcatggtgcgcactcacgaaggatgtaggtgatgccctccactccgcagagccagtcccacaggggtacccattctgactcctaccaccgcagctccctacctcccgc

SEQ ID NO: 504512 - DNA, 120 bp, Artificial Sequence
  ENSG00000163956_27 (sequence is synthesized)
ctgccatgggttccacgtgcatggctctgggcagtctgtgtctttgcgtgcgtctgtgtatgtctgcgtgtatctgcttacattcgctcagcatctgagattcacccaggcttttgcgtg

SEQ ID NO: 504513 - DNA, 120 bp, Artificial Sequence
  ENSG00000163956_28 (sequence is synthesized)
gatcagcggcagactcctgattgccgcgtggcggcctgttgtgtgggtgtgtgccgcgtgtgtatccagtccctactcaggagtgtacgtttccagtgtgggttgcagtcaggatccatt

SEQ ID NO: 504514 - DNA, 120 bp, Artificial Sequence
  ENSG00000163956_29 (sequence is synthesized)
tctcccttaactttcagattatttgctgcataggcttttttctcctaatttggcgcctttgtcagaaatcaactgacctacctgtgtgggtctgtttctgtttgtccttacgctcttgcc

SEQ ID NO: 504515 - DNA, 86 bp, Artificial Sequence
  ENSG00000163956_30 (sequence is synthesized)
cccttgacctcccatactccagcaatcccctcgcctcagtctcctgagtagtagctgcgaccacaggcgtgtgtcaccacacccgg

SEQ ID NO: 504516 - DNA, 86 bp, Artificial Sequence
  ENSG00000163956_31 (sequence is synthesized)
cgagacggggttttactatgttgcccaggcaggtcttgatctgggctcaagtgatgctcctgtctcagcctcccaaactactggga

SEQ ID NO: 504517 - DNA, 120 bp, Artificial Sequence
  ENSG00000163956_32 (sequence is synthesized)
tcaagtgatgctcctgtctcagcctcccaaactactgggattacaggttgtaggtgtgagccatggtgcccggccgccacactgtcttggctacagttgggtttataataaaccctgaat

SEQ ID NO: 504518 - DNA, 120 bp, Artificial Sequence
  ENSG00000163956_33 (sequence is synthesized)
cgaggtgatgtgcattttccaactcttctttttaaagattcttgtggctgtttatgtccttggtgtttccatatatgttttacaatcagtgtctcaatttctaccaaaaaaacatgcctt

SEQ ID NO: 504519 - DNA, 120 bp, Artificial Sequence
  ENSG00000163956_34 (sequence is synthesized)
ctggaatttcaatagcaattcccttgaacgcatttttgaataccttttctgaatgtcttgaatacatgttgggaagaatcggtgtcttaacagtctccagtgtccacgcgttgactgccg

SEQ ID NO: 504520 - DNA, 73 bp, Artificial Sequence
  ENSG00000163956_35 (sequence is synthesized)
gccgtgtgtgactccagtcggcgtctcaacagtctcccagtctccagtgtccacgcgttgactgccgtgtgtg

SEQ ID NO: 504521 - DNA, 73 bp, Artificial Sequence
  ENSG00000163956_36 (sequence is synthesized)
gccgtgtgtgactccagtcggcgtctcaacagtctcccagtctccggtgtccacgcgttgactgccgtgtgtg

SEQ ID NO: 504522 - DNA, 73 bp, Artificial Sequence
  ENSG00000163956_37 (sequence is synthesized)
ccgtgtgtgactccagtcggcgtctcaacagtctcccagtctccggtgtccacgcgttgactgccgtgtgtga

SEQ ID NO: 504523 - DNA, 120 bp, Artificial Sequence
  ENSG00000163956_38 (sequence is synthesized)
gtgtgtgactccagtcggcgtctcaacagtctccggtgtccatgcgttgactgccatgtatgactccaggtattgagttcatcttcaacttctcccaacaatgaactggagttttctgtg

SEQ ID NO: 504524 - DNA, 120 bp, Artificial Sequence
  ENSG00000163956_39 (sequence is synthesized)
tgtgcatgtgtctggcatgttttcctttagatctagtcctaggtgttcgatatgctattgaggactgtgtatttttatttcatttgtcacctgtgcgtggtgctttaatcctgtgcccta

SEQ ID NO: 504525 - DNA, 120 bp, Artificial Sequence
  ENSG00000163956_40 (sequence is synthesized)
aactcccgccttggccatggcggtgtttctgtggactcgtggggtttccgtgtgcacacgcgtgtcctctgtctgacagtggctttgcttccccttgtcagtctgtgcctcggcttctca

SEQ ID NO: 504526 - DNA, 120 bp, Artificial Sequence
  ENSG00000163956_41 (sequence is synthesized)
tggtgaggtgagccggcgctcgctaatcttattcccagtctcggtgaacatgggctcagtctctcccggctcagtgttgggtttgcactggtgcacttacaggcagaagagcttcctcat

SEQ ID NO: 504527 - DNA, 120 bp, Artificial Sequence
  ENSG00000163956_42 (sequence is synthesized)
ttgctgagggcttttcctgaatccgtgttgaatgtggtcagctgcctttcctgcacctagtgagatgctcatgaggtcacttccttaccgcattactgtagtgaattacgctgactttca

SEQ ID NO: 504528 - DNA, 120 bp, Artificial Sequence
  ENSG00000163956_43 (sequence is synthesized)
tatgccaagatgacctggcatttccaggtaagtccctgtggccatggtgcattggccttttctctgcatggccagatgagatttgctcataccgggctaaggacctcctgtgtaggaatg

SEQ ID NO: 504529 - DNA, 120 bp, Artificial Sequence
  ENSG00000163956_44 (sequence is synthesized)
ctcttgagggacactgggcttggatgttcattgtcttgtcatgtgatgtgtctgtcatggtttgatattgcattaagtgggcctcctgaaacaagttctgccatagtttgtataggattg

SEQ ID NO: 504530 - DNA, 120 bp, Artificial Sequence
  ENSG00000163956_45 (sequence is synthesized)
gcattatttgtttcatagagatgtgatgggtgaggccatctatgcctgccattttctttttgcttaggtttttcattaagaacttgatttttaaaaatagacatgaggcctggcatggtg

SEQ ID NO: 504531 - DNA, 120 bp, Artificial Sequence
  ENSG00000163956_46 (sequence is synthesized)
acagagcgaggctctgtctcaaaaaaaaagacatgaggcttttggattttctgtttcttcctttgtcatttttttaaagataggtttgtcgcagaatttcatctaagttatcaaaacaat

SEQ ID NO: 504532 - DNA, 120 bp, Artificial Sequence
  ENSG00000163956_47 (sequence is synthesized)
aaaacaatttacataaatcattcacagtatcctctgtgcagtgatgtccattctcattcctgctctgggccatttgtgttttcttttccccctgatcagactagctaagagtttatcatt

SEQ ID NO: 504533 - DNA, 120 bp, Artificial Sequence
  ENSG00000163956_48 (sequence is synthesized)
tttacagatattttccccaaagaaacctacttttgggtccattgattttttttttctattgttttctttttcattgacttttgctcttttcttatgaatttcctttcttctacctatttt

SEQ ID NO: 504534 - DNA, 120 bp, Artificial Sequence
  ENSG00000163956_49 (sequence is synthesized)
gtgttcaatttgctgtccttgttttaggttcttttgatagaggcttagatcattgatgaagaatatgaaagaatgggataatacagttaaaaacttggtctacttatgcccattagagaa

SEQ ID NO: 504535 - DNA, 120 bp, Artificial Sequence
  ENSG00000163956_50 (sequence is synthesized)
aacattcttaagcacgcatggaatcttttaaaaatggacgaggtactaggacccaaagcaaatgtcagtaattcgcagatgataatgtataaatatatgatatgtaggtaaataatacaa

SEQ ID NO: 504536 - DNA, 120 bp, Artificial Sequence
  ENSG00000163956_51 (sequence is synthesized)
atcacattctttggccagagtgcaattgaggaggaaatcagtaacaaaaagacaattaaatccatttgattcttttgttttcgttttgtagtaacttgcacttccctggtgccagaggca

SEQ ID NO: 504537 - DNA, 120 bp, Artificial Sequence
  ENSG00000163956_52 (sequence is synthesized)
tgacacctttttgtctgctcttggccatttgggtggcgtctttgggaagggcctacttaattcttttgcctatttaaaaaactgggtcttggaaatcttgtctttttttttgagtcagga

SEQ ID NO: 504538 - DNA, 62 bp, Artificial Sequence
  ENSG00000163956_53 (sequence is synthesized)
actgggtcttggaaatcttgtctttttttttgagtcaggatctttctcgcacaggctgcctc

SEQ ID NO: 504539 - DNA, 90 bp, Artificial Sequence
  ENSG00000163956_54 (sequence is synthesized)
agagactggagtcctggtctcaagtgattcacctgcctccacctcgcggagtgccaggattacaggtggcgggagccgccacacccagcc

SEQ ID NO: 504540 - DNA, 120 bp, Artificial Sequence
  ENSG00000163956_55 (sequence is synthesized)
gtgccaggattacaggtggcgggagccgccacacccagcctggtcttagcgttattcccaggtctaggtgtgagtccttcctcagatatgtgttgtgaataatttccgatcctctggctt

SEQ ID NO: 504541 - DNA, 120 bp, Artificial Sequence
  ENSG00000163956_56 (sequence is synthesized)
gctattttactttcttaatggttatcttttggaaagcaaaggtttccagtttgatgaaatctaatttttattttttatttttccgttctagtggtctttctattttctcatcaaattgag

SEQ ID NO: 504542 - DNA, 120 bp, Artificial Sequence
  ENSG00000163956_57 (sequence is synthesized)
ggtctttctattttctcatcaaattgagactttggggaaactacacagcagcaaaccaggatatatcctcttaaaaacagctcgagccggccgggtgcggtggctcatgcctggaatccc

SEQ ID NO: 504543 - DNA, 81 bp, Artificial Sequence
  ENSG00000163956_58 (sequence is synthesized)
gacaagagcaagacttcgcctcaaaaaaaaaaaaaaacccagcttgagccaagtgtgggtggctcccgcctggaatcccag

SEQ ID NO: 504544 - DNA, 65 bp, Artificial Sequence
  ENSG00000163956_59 (sequence is synthesized)
acaagagcaagacttcgcctcaaaaaaaaaaaaaaacccagcttgagccaagtgtgggtggctcc

SEQ ID NO: 504545 - DNA, 120 bp, Artificial Sequence
  ENSG00000163956_60 (sequence is synthesized)
tctactaaaaatacaaaaattaaccaggagtggtggcagcatctgcctataatcccagctactcgggagcctaaggcacgagaatcacttgaagctgggagacagagtttgcagtgagcc

SEQ ID NO: 504546 - DNA, 120 bp, Artificial Sequence
  ENSG00000163956_61 (sequence is synthesized)
gcaagactctgtctcaaaaaaaaaaagcttgaaaatttaaaaatatctcaataattatgagatgcagtgattttttttttacttccctaagctgggtttccaggtatctctaggttcagc

SEQ ID NO: 504547 - DNA, 120 bp, Artificial Sequence
  ENSG00000163956_62 (sequence is synthesized)
ccctaagctgggtttccaggtatctctaggttcagctcctccggggctggaagtacatgaagggcagcattgcccaccttgaccagagcaggctcggagcagggcagtggaagagctggt

SEQ ID NO: 504548 - DNA, 120 bp, Artificial Sequence
  ENSG00000163956_63 (sequence is synthesized)
cccagctcagcccagcctgctgggtcagcatccatctgaaaggtcatctctacccaggaacttgatggcttccagctccaccctaacagaaacctccccagcatcttgccgagttgtaat

SEQ ID NO: 504549 - DNA, 120 bp, Artificial Sequence
  ENSG00000163956_64 (sequence is synthesized)
ccagggtggtggtatagacggtcttggggtagctggtatagacggtcttggcgtagctggtatagacggtcttggggtagctggtatagacggtcttggggtagctggtatagacggtct

SEQ ID NO: 504550 - DNA, 120 bp, Artificial Sequence
  ENSG00000163956_65 (sequence is synthesized)
tggggtagctggtatagacgggcttggggtagctggtagtggtgctcaggaggcgtgtgggctgctggtgcagctggaagcgcacctcagccatggtgttgtgccaggtgtggttgggga

SEQ ID NO: 504551 - DNA, 120 bp, Artificial Sequence
  ENSG00000163956_66 (sequence is synthesized)
tgcaggggacgttccggccgcaggaggcccctgccaggcacaggcagctgcgcggtgtggaagaagtgccgctcggagtcatgcttgacaaggaagtacaccttactcctctcagtggtg

SEQ ID NO: 504552 - DNA, 120 bp, Artificial Sequence
  ENSG00000163956_67 (sequence is synthesized)
aggggtcaaaccactccttcccagcgatggggccagcagcctggcgagggctaggcaccggggagggatgctggatttggagctggggggaaggggtcaccctgcattgggctccagtgc

SEQ ID NO: 504553 - DNA, 120 bp, Artificial Sequence
  ENSG00000163956_68 (sequence is synthesized)
tccgggtgccatgcctgctcccccaccactgccaccgcagccgctgcgggacaccaggggctggggctgaagagcagcctcgagctgggctgtccaggacacggtcgcccttcttcctcg

SEQ ID NO: 504554 - DNA, 120 bp, Artificial Sequence
  ENSG00000163956_69 (sequence is synthesized)
tgtccgtgagctcaggcacaacctgcagcttagccagcccactatggctgcgtgcgtggcaggacccgggccaccatggctgcgtgcatggtagggcacatgattattttagcctctggt

SEQ ID NO: 504555 - DNA, 120 bp, Artificial Sequence
  ENSG00000163956_70 (sequence is synthesized)
atcactaaccatccctaaagtctccaatggtctgttcctgtctttccctctggttcacttgtggggtcatgttgtcttctgttctttgttatttatttttttcttgagacggagtcttgc

SEQ ID NO: 504556 - DNA, 70 bp, Artificial Sequence
  ENSG00000163956_71 (sequence is synthesized)
acctgccaccatacccagctaatttttctgtgtgtgtgattgctcaggctgcagtgcaatggcgcaatct

SEQ ID NO: 504557 - DNA, 85 bp, Artificial Sequence
  ENSG00000163956_72 (sequence is synthesized)
aaattcctgacctcaagtgatgtgcccacctctctgtgcccggcctgaactgttaagtgtttgtgaagaattatttgggggccta

SEQ ID NO: 504558 - DNA, 120 bp, Artificial Sequence
  ENSG00000163956_73 (sequence is synthesized)
tgaactgttaagtgtttgtgaagaattatttgggggcctatttgagagctgttatatggatcatcctcctggagagggttcttaagcctctgagaccgggtttggggctgaggctttctg

SEQ ID NO: 504559 - DNA, 120 bp, Artificial Sequence
  ENSG00000163956_74 (sequence is synthesized)
acccacacaagtcatgctgacccctgaagggccgcaggccagatcttgccaggtgagcactttccccgctcacattcaggatagggcgagggggttggtaccgattcaccctcagggcct

SEQ ID NO: 504560 - DNA, 120 bp, Artificial Sequence
  ENSG00000163956_75 (sequence is synthesized)
agatttgggggcttcagcttgctgcagataggtgctcccttcactctcacctgaggctgggctggagcctggtgtctgccccaccctgctggtcagccccctaggacctgagccccgtaa

SEQ ID NO: 504561 - DNA, 120 bp, Artificial Sequence
  ENSG00000163956_76 (sequence is synthesized)
gcctggactggccacgccctggggcagcagcactgggtgcttggcgctcacgaccttcctgggcccctgggtccctcacttctcccttgtttctaccttcctggcttgtcagattcccac

SEQ ID NO: 504562 - DNA, 120 bp, Artificial Sequence
  ENSG00000163956_77 (sequence is synthesized)
agctcttaaggagaaattcagtatttactgcagcatgtgttttcagtgtgatggttcatctaggtaccctagcctgtcattgctggagttggaaatctctgttgtctgctgttgttttgt

SEQ ID NO: 504563 - DNA, 120 bp, Artificial Sequence
  ENSG00000163956_78 (sequence is synthesized)
gaaacaagcgcgtgaggttataagtttccctcaacgtaccacactaaccacatttccctaagttttgatgtgtagtgttttcactgccattcagttcaaaatattttctcatttcaagta

SEQ ID NO: 504564 - DNA, 120 bp, Artificial Sequence
  ENSG00000163956_79 (sequence is synthesized)
cgggactgttggttcccgagggtggggccgtctctggttgtgttttggggacaagcaggcaggtgcttgtagcgacgggaacctgggcctgtggacgcagcggagaccctcggcgcgctc

SEQ ID NO: 504565 - DNA, 120 bp, Artificial Sequence
  ENSG00000163956_80 (sequence is synthesized)
agtctacccacgggtggtcacaggcctcgctcccaggagctgctccgtgaaggtcactcgccgtccccagccttgtacctggagactagcagagggcagtggcggcagcgggcctgggag

SEQ ID NO: 504566 - DNA, 120 bp, Artificial Sequence
  ENSG00000163956_81 (sequence is synthesized)
cagcccttcccagcgtctccccagcctcagcagcacggcccctcccgtgctgctgttggccaagaacagagaccactcgtcaaacatagctccgtctccatctcatgccacccacaccgt

SEQ ID NO: 504567 - DNA, 120 bp, Artificial Sequence
  ENSG00000163956_82 (sequence is synthesized)
gttggagcggggcccaggggtcggaggcggaggggggcgcagccggggcacctgtgccctacgcgccctgtccttggcacagcctcccccaagtgtcaggtggggcgccccgaccccttc

SEQ ID NO: 504568 - DNA, 120 bp, Artificial Sequence
  ENSG00000163956_83 (sequence is synthesized)
ggtttgtttggctcctcccaggagcccgaatgtttgactttcacgagcacaacatcctgctggagaccctgagcaggaccgaagggaaacggcctgtgcctgcgtctggacctggctgaa

SEQ ID NO: 504569 - DNA, 120 bp, Artificial Sequence
  ENSG00000163956_84 (sequence is synthesized)
cttgcaggtgcccccacccgaggtcctggcagcctctgcacacaggccacgtccatcctctgcctcctgcttcagaggcagccagggcgggctgtggcgcttcccaggctctgatggagg

SEQ ID NO: 504570 - DNA, 120 bp, Artificial Sequence
  ENSG00000163956_85 (sequence is synthesized)
cagtttcttccttaaccactcggtgaacctgcttgcgttttccttctcatctgcgtgggaactcgtgtttcaggggcggggccaggctctggagggaggggctttggttcttttgtccgt

SEQ ID NO: 504571 - DNA, 120 bp, Artificial Sequence
  ENSG00000163958_0 (sequence is synthesized)
gccgtggccatggagctctggaagctgggctgggggaggaagcctggtggctctgacctcccctggaggcgaaggaggcccagccatgacactcttaacggatgccacgccgctggtgaa

SEQ ID NO: 504572 - DNA, 120 bp, Artificial Sequence
  ENSG00000163958_1 (sequence is synthesized)
ggagccccatcccctgcctctggtcccacgtccctggttcctccctagcctctttgctgccttcaatgtggtgctgctggtctttttcagtggcctcttcttcgcattcccttgcaggtg

SEQ ID NO: 504573 - DNA, 120 bp, Artificial Sequence
  ENSG00000163958_2 (sequence is synthesized)
gctggctcagaacggggagtgggcctttcctgttatcacaggctccctctttgtccttaccttcttcagtcttgtttcactcaacttctcagaccctggcatcttacatcaaggctccgc

SEQ ID NO: 504574 - DNA, 120 bp, Artificial Sequence
  ENSG00000163958_3 (sequence is synthesized)
tgagcagggccccttgacggtgcacgtggtgtgggtgaaccacggggccttccgcctgcaatggtgtccaaagtgctgcttccaccgcccgccccggacttaccactgcccctggtgcaa

SEQ ID NO: 504575 - DNA, 120 bp, Artificial Sequence
  ENSG00000163958_4 (sequence is synthesized)
catctgtgtggaggactttgaccaccactgcaagtgggtcaataactgcatcggtcaccgcaacttccgcttcttcatgctgcttgtcctgtccctgtgcctctactcgggcgccatgct

SEQ ID NO: 504576 - DNA, 120 bp, Artificial Sequence
  ENSG00000163958_5 (sequence is synthesized)
gtccctcctgctgctgatccaggcactgtccgtgagctcggccgaccgcacctacaagggcaagtgcagacaccttcagggatacaaccccttcgaccagggctgtgccagcaactggta

SEQ ID NO: 504577 - DNA, 120 bp, Artificial Sequence
  ENSG00000163958_6 (sequence is synthesized)
tttaacaatttgtgcaccactgggacccaagtacatggctgaagctgtccagctgcagagagtggtggggcctgactggacatccatgccgaatctgcaccctccaatgtccccctctgc

SEQ ID NO: 504578 - DNA, 120 bp, Artificial Sequence
  ENSG00000163958_7 (sequence is synthesized)
tctcaaccccccagccccaacctctgggtccctacaaagcagggaagggacccccggggcgtggtgaggctgcagctctccaggagttccacacgggcccagtgctgcccctgctgctgc

SEQ ID NO: 504579 - DNA, 120 bp, Artificial Sequence
  ENSG00000163958_8 (sequence is synthesized)
aggagcccccaggcgaggttcggccttcctctcgcccctgtgcacccggagatgcccacagcaccagcacctgagctcacctccgaacccgcctcctgaacccgcctcctgaacctgcct

SEQ ID NO: 504580 - DNA, 120 bp, Artificial Sequence
  ENSG00000163958_9 (sequence is synthesized)
ccttacctcccacttcctgagccctgagtggaagcctttctgtgccttgccctttgcccactcccctggtgggactgccaagaccctcaatgcccattaaatactcttgcctgcctctta

SEQ ID NO: 504581 - DNA, 120 bp, Artificial Sequence
  ENSG00000163958_10 (sequence is synthesized)
cttttacatgctttaaataccttaaagtaggcagaatctcaaatagtgcaaggatgcgtattgccctatggcaacagtgagtggcgacagtgagctgttatggagctgtccagacttttc

SEQ ID NO: 504582 - DNA, 120 bp, Artificial Sequence
  ENSG00000163958_11 (sequence is synthesized)
gcggggacatgggacacaggggagttggtggtgggcagagatgctgctgggccactttcagtgacaaaacatgacagcaaaggctcttgaagtcagtgcagacaccttcagggatacaac

SEQ ID NO: 504583 - DNA, 120 bp, Artificial Sequence
  ENSG00000163958_12 (sequence is synthesized)
ggctgggtgtgaagctgttttcaggactgctaaaggccaagggtggcagtaactcccagccacccttggtcactcatgtgttctccacctgcacctgtcctgggaggctggccgttgcct

SEQ ID NO: 504584 - DNA, 120 bp, Artificial Sequence
  ENSG00000163958_13 (sequence is synthesized)
gcagaggtgctgacatgcacagggcatccgcatctgtcctgggctgggtcaggccaggggaggagaggcagccctctgtcccacccctgggctcgctaacacgagatacccaagcccctc

SEQ ID NO: 504585 - DNA, 120 bp, Artificial Sequence
  ENSG00000163958_14 (sequence is synthesized)
aggctggctgcccgcctggtctgggaggccttgcctgtcctcgcctgggtgtccaagttggagggtctcctggctctgagtgaccatctctctcgagagcacggcttgcataggtttaca

SEQ ID NO: 504586 - DNA, 120 bp, Artificial Sequence
  ENSG00000163958_15 (sequence is synthesized)
ggctgggcaagggtgttactgttactgtcatcttcatcgaatggatgagaaagtggaggtccagagatggtttacgttctgcccagagttacagtaggatgtgtctcacagaaggccagg

SEQ ID NO: 504587 - DNA, 120 bp, Artificial Sequence
  ENSG00000163958_16 (sequence is synthesized)
gggccgtgtgcttcccaagctgaggcgggcaggggagccggaccagggaggacggtggcccctgcatctggcctgctgctccccagttccacacgggcccagtgctgcccctgctgctgc

SEQ ID NO: 504588 - DNA, 120 bp, Artificial Sequence
  ENSG00000163959_0 (sequence is synthesized)
gagatagaaagttggcccgggaagctcaaggagggagagcggcagaggggaagactctgcaattctgcttgccccccaccccggcccaggcaagccaccctgcccccggcccccacctgc

SEQ ID NO: 504589 - DNA, 120 bp, Artificial Sequence
  ENSG00000163959_1 (sequence is synthesized)
ccgccccgcctgcccttcctcaccccggtgcctgcgggattgctggagagaacgcggcgatggagccgggcaggacccagataaagcttgaccccaggtacacagcagatcttctggagg

SEQ ID NO: 504590 - DNA, 120 bp, Artificial Sequence
  ENSG00000163959_2 (sequence is synthesized)
tgctgaagaccaattacggcatcccctccgcctgcttctctcagcctcccacagcagcccaactcctgagagccctgggccctgtggaacttgccctcactagcatcctgaccttgctgg

SEQ ID NO: 504591 - DNA, 120 bp, Artificial Sequence
  ENSG00000163959_3 (sequence is synthesized)
cgctgggctccattgccatcttcctggaggatgccgtctacctgtacaagaacaccctttgccccatcaagaggcggactctgctctggaagagctcggcacccacggtggtgtctgtgc

SEQ ID NO: 504592 - DNA, 120 bp, Artificial Sequence
  ENSG00000163959_4 (sequence is synthesized)
tgtgctgctttggtctctggatccctcgttccctggtgctggtggaaatgaccatcacctcgttttatgccgtgtgcttttacctgctgatgctggtcatggtggaaggctttgggggga

SEQ ID NO: 504593 - DNA, 120 bp, Artificial Sequence
  ENSG00000163959_5 (sequence is synthesized)
cagctgctgatgttgggccctttccaatacgccttcttgaagataacgctgaccctggtgggcctgtttctcgtccccgacggcatctatgacccagcagacatttctgaggggagcaca

SEQ ID NO: 504594 - DNA, 120 bp, Artificial Sequence
  ENSG00000163959_6 (sequence is synthesized)
gctctatggatcaacactttccttggcgtgtccacactgctggctctctggaccctgggcatcatttcccgtcaagccaggctacacctgggtgagcagaacatgggagccaaatttgct

SEQ ID NO: 504595 - DNA, 120 bp, Artificial Sequence
  ENSG00000163959_7 (sequence is synthesized)
ctgttccaggttctcctcatcctgactgccctacagccctccatcttctcagtcttggccaacggtgggcagattgcttgttcgcctccctattcctctaaaaccaggtctcaagtgatg

SEQ ID NO: 504596 - DNA, 120 bp, Artificial Sequence
  ENSG00000163959_8 (sequence is synthesized)
aattgccacctcctcatactggagacttttctaatgactgtgctgacacgaatgtactaccgaaggaaagaccacaaggttgggtatgaaactttctcttctccagacctggacttgaac

SEQ ID NO: 504597 - DNA, 120 bp, Artificial Sequence
  ENSG00000163959_9 (sequence is synthesized)
ctcaaagcctaaggtggatggcttggacaatgaaaggatgctgtactcattagaatacaagattcctttactgtccctcaaccttgaccaaatgggaagcattcccccttgtcaacacaa

SEQ ID NO: 504598 - DNA, 120 bp, Artificial Sequence
  ENSG00000163959_10 (sequence is synthesized)
gctggcagatacatttgactctacagatgaaggtgaacaatgttagaataaaattgctttggatcttgcctggaaggtgttttaagttttgtaataaacaagatgatgtctgaaaatgtg

SEQ ID NO: 504599 - DNA, 120 bp, Artificial Sequence
  ENSG00000163959_11 (sequence is synthesized)
ttgcctctgtccatgtcactattaacccttcaaggttgtatattgctggctaggtgcgacagctcatgcctgctatcccagcactttgggagcctgaggcgggaggatcacttgagccca

SEQ ID NO: 504600 - DNA, 120 bp, Artificial Sequence
  ENSG00000163959_12 (sequence is synthesized)
agattgcgccactgtactctggcctggatgactgagtgtgactctatctcaaaaaaagaaaaagaaaagtactctcaaaatttccagatcataaagagaaaagggattatgtttagaatt

SEQ ID NO: 504601 - DNA, 120 bp, Artificial Sequence
  ENSG00000163959_13 (sequence is synthesized)
tttaaacacctgatttttatgggaaaaataaagctatagtaagtaaattaacaagagctagggtttatctgcctagataaatcatatttagatgtaatcattttatccattcttatagca

SEQ ID NO: 504602 - DNA, 120 bp, Artificial Sequence
  ENSG00000163959_14 (sequence is synthesized)
agtctgaaattccccttctcccagtcctgtgggccgtctcctctccctcgcccctcttgggtcacacacccagaacgcccagccctagctctgctcctcagtaagccccacctctccctg

SEQ ID NO: 504603 - DNA, 120 bp, Artificial Sequence
  ENSG00000163959_15 (sequence is synthesized)
aggtttgcaggccgacctccccttgcagttaggatcctctgcttggaaggctgtgcagtgtttgcattctaagggctgcggagacagctggagatctgctcagcccaccagccgcctcat

SEQ ID NO: 504604 - DNA, 120 bp, Artificial Sequence
  ENSG00000163959_16 (sequence is synthesized)
ccttgctccccgctacagtgttgccacttgaagagcttccttcagtggttcctcagagtgtgggggaaagtctcattccacagggtcacactcagctccacccttacgctgaggcttttg

SEQ ID NO: 504605 - DNA, 120 bp, Artificial Sequence
  ENSG00000163959_17 (sequence is synthesized)
agtgctttttccagctggcaacgtttaaggaacgctgcctcgaatgtgtaggttttgcctcctgtgtccttgccgcaaaaggcttccggagcctcagggtctccctcccgccctcacctg

SEQ ID NO: 504606 - DNA, 120 bp, Artificial Sequence
  ENSG00000163959_18 (sequence is synthesized)
ttcagaagggatcttcgggaaatcccaacagaggctttaaggaaactatgacctctctgatcacacagaagagaagtgaaaccccacagcttgaggccagccctgagggccaacccagga

SEQ ID NO: 504607 - DNA, 120 bp, Artificial Sequence
  ENSG00000163959_19 (sequence is synthesized)
agccatgggttcagtcctcagctcctgggagaggaatgggaatggttaaaaaacagaagcccatgttgattgaacacacataagaaatggactgtatgccagcctcagagcacagaagta

SEQ ID NO: 504608 - DNA, 120 bp, Artificial Sequence
  ENSG00000163959_20 (sequence is synthesized)
gacagccaacttccggttctggctctaccattaacccgctgtgttatttatgacaatttcgtatccctaagtcctgatttggggataaactggagaaagtgttgctcaactcccgtgccc

SEQ ID NO: 504609 - DNA, 82 bp, Artificial Sequence
  ENSG00000163959_21 (sequence is synthesized)
ccatgtcactattaacccttcaaggttgtatattgctggctaggtgcgacagctcatgcctgctatcccagcactttgggag

SEQ ID NO: 504610 - DNA, 120 bp, Artificial Sequence
  ENSG00000163959_22 (sequence is synthesized)
gctgcagtgagcaatggttgtgccatacactccagcctgggtgatacagccagaccctgcctctggaaaaaaaagaaagcttactgagctttcctaaagcagatgaaaagaagagtatat

SEQ ID NO: 504611 - DNA, 120 bp, Artificial Sequence
  ENSG00000163959_23 (sequence is synthesized)
agtattgtgtctggcataagaaaaggagaacttggtgaggtgaaatagcaccagcccagagtcttgaagaagccaggggccctggagaacagatggaaggtgacctttccctgacaggtg

SEQ ID NO: 504612 - DNA, 120 bp, Artificial Sequence
  ENSG00000163959_24 (sequence is synthesized)
tcctgacactgtggtcatggagcttgatttctaaggagagagtcagcacgtggaagcaaaggcaccgagagtccaagtaaaagtcccaaatccataaaatgcaccacacaggtcaaaaca

SEQ ID NO: 504613 - DNA, 120 bp, Artificial Sequence
  ENSG00000163959_25 (sequence is synthesized)
tctctactaaaaacactaattagccagggaagaatgttctgaagagggacagaggtcaaggtgataaggctgttgctttagaaaggaaggtgtttcctatgcttttgcctttacattctg

SEQ ID NO: 504614 - DNA, 67 bp, Artificial Sequence
  ENSG00000163959_26 (sequence is synthesized)
gtgggattacagcaacggtgaggccagatgaggtctaccagtatttgtcaaagtgtctgctatcctc

SEQ ID NO: 504615 - DNA, 120 bp, Artificial Sequence
  ENSG00000163959_27 (sequence is synthesized)
atgaggtctaccagtatttgtcaaagtgtctgctatcctccgaccactatcagccctgggccctgtggaacttgccctcactagcatcctgaccttgctggcgctgggctccattgccat

SEQ ID NO: 504616 - DNA, 120 bp, Artificial Sequence
  ENSG00000163959_28 (sequence is synthesized)
caagccaggctacacctgggtgagcagaacatgggagccaaatttgctctgttccagcagcaacatggctgaacatctgcagctgccctgagatcccctacagtgaggaagcacagctca

SEQ ID NO: 504617 - DNA, 120 bp, Artificial Sequence
  ENSG00000163959_29 (sequence is synthesized)
ctcacctgcctccttgatgtgcttataaacatcatcactgccagcagatgaataaggaatatcatcatgggctacaaaatcaatctgaaaataaggaaacatcattaaaacccatgataa

SEQ ID NO: 504618 - DNA, 120 bp, Artificial Sequence
  ENSG00000163959_30 (sequence is synthesized)
ctgccattcagaaagacccagtcaatgttctcaggcccagaaaaaggacaataggcagaggccaggcctcagtggacttcatatctctctttgctttgctcataaattctacaatctatt

SEQ ID NO: 504619 - DNA, 120 bp, Artificial Sequence
  ENSG00000163959_31 (sequence is synthesized)
tttatggagtatacatatgaagttagccagctgcttttgtagctatttctcctagtctgctagaactgttaccctcactctgtataccagtcatcttgctgtggtcaatagggccagagg

SEQ ID NO: 504620 - DNA, 120 bp, Artificial Sequence
  ENSG00000163959_32 (sequence is synthesized)
gtttgctggtgaaccggttagtgggtggagcctaggaaagaaggaaatctccctgtcctgggtctggaaggatttggtcaaataagggtttctaaaagtatgagaaaggccaggcacggt

SEQ ID NO: 504621 - DNA, 120 bp, Artificial Sequence
  ENSG00000163959_33 (sequence is synthesized)
agtgggagaccaagagggttcccagcactctcaacattctgcttttttcctctgtccccatccacttaacctggttggtgtttatgacagcagccgagcctcagcccaggagccctgtga

SEQ ID NO: 504622 - DNA, 120 bp, Artificial Sequence
  ENSG00000163959_34 (sequence is synthesized)
agccctgctctagctgcctccggtgacaggcacttccaacagcaaaccccacccccaccccgacatgtgctggggaaccgggagttcctgcccctgagaggctgatgttgttggagaaaa

SEQ ID NO: 504623 - DNA, 120 bp, Artificial Sequence
  ENSG00000163959_35 (sequence is synthesized)
tatgacctggagaaacacatgggaagaaagttctttaggctccgataaaaattgacacgaggccaagcaaatttcccagacaaggctttattaggggcttccgttccaccacgggggaga

SEQ ID NO: 504624 - DNA, 120 bp, Artificial Sequence
  ENSG00000163960_0 (sequence is synthesized)
gttgttcggcggcggcggcggcggtaagatggctgcccacgggggctccgcggcgtcctcggcgctgaaggggttaattcaacagttcaccaccattaccggtgcaagtgaaagtgtagg

SEQ ID NO: 504625 - DNA, 120 bp, Artificial Sequence
  ENSG00000163960_1 (sequence is synthesized)
aaaacatatgcttgaagcgtgcaacaataatctggaaatggcagtcactatgtttttggatggtggaggaatcgctgaagagcccagtaccagttcagcaagtgtctctactgtcagacc

SEQ ID NO: 504626 - DNA, 120 bp, Artificial Sequence
  ENSG00000163960_2 (sequence is synthesized)
acacacagaagaagaagttcgtgccccaattcctcaaaagcaggaaatactggtggaaccagaaccattatttggtgctcctaaaagacgacggcctgcacgttcaatttttgatggttt

SEQ ID NO: 504627 - DNA, 120 bp, Artificial Sequence
  ENSG00000163960_3 (sequence is synthesized)
ccgggattttcagactgaaactattcggcaagaacaagaattaagaaatggaggagctatcgataagaaattaactacccttgcagatctattccggccacccattgatttgatgcataa

SEQ ID NO: 504628 - DNA, 120 bp, Artificial Sequence
  ENSG00000163960_4 (sequence is synthesized)
aggcagctttgaaacagccaaagagtgtggccagatgcaaaataagtggctgatgataaacattcaaaatgttcaagactttgcatgtcagtgcctcaaccgcgatgtgtggagcaacga

SEQ ID NO: 504629 - DNA, 120 bp, Artificial Sequence
  ENSG00000163960_5 (sequence is synthesized)
agctgtgaagaatattatccgggaacatttcattttctggcaggtttatcatgacagtgaggaaggtcagagatacatacagttttataagttaggggatttcccctatgtttccatatt

SEQ ID NO: 504630 - DNA, 120 bp, Artificial Sequence
  ENSG00000163960_6 (sequence is synthesized)
ggacccacggacaggtcagaagctagtagaatggcaccagttagatgtatcttctttcttggaccaagtgacgggatttctgggtgaacatggacaactggatggactttctagcagtcc

SEQ ID NO: 504631 - DNA, 120 bp, Artificial Sequence
  ENSG00000163960_7 (sequence is synthesized)
ccccaaaaaatgtgcccgttcagagagccttatagatgcaagtgaagacagccagctagaagctgccatcagagcctccttacaagaaacacattttgattcaacacagacaaaacagga

SEQ ID NO: 504632 - DNA, 120 bp, Artificial Sequence
  ENSG00000163960_8 (sequence is synthesized)
tagccgctcagatgaagaatctgaatctgaacttttttctggcagtgaggagttcatatccgtttgtggctctgatgaagaagaagaggtagagaatcttgccaagtccagaaagtctcc

SEQ ID NO: 504633 - DNA, 120 bp, Artificial Sequence
  ENSG00000163960_9 (sequence is synthesized)
ccacaaagatttggggcatagaaaagaggagaatagaaggccgctgactgagccaccagtcagaactgatcctggaacagccacaaaccaccaaggattgccagctgtggattcagagat

SEQ ID NO: 504634 - DNA, 120 bp, Artificial Sequence
  ENSG00000163960_10 (sequence is synthesized)
actggagatgccacctgaaaaagcagatggagtagtggaggggatagatgtaaatggaccaaaagcacagctgatgttgcggtatccagatggaaaaagggaacagatcactcttccaga

SEQ ID NO: 504635 - DNA, 120 bp, Artificial Sequence
  ENSG00000163960_11 (sequence is synthesized)
gcaagctaaactgctagctttggtgaagcacgtgcagtctaaaggatacccaaatgaacgttttgaacttctcaccaactttcctcgaaggaaattatctcatctggactatgatattac

SEQ ID NO: 504636 - DNA, 120 bp, Artificial Sequence
  ENSG00000163960_12 (sequence is synthesized)
attgcaagaggcaggcctttgtcctcaagagactgtctttgtacaggaaagaaattaacaccatggcttgacctctctcagcttaccccttttttcccttttcctgtgagatacatgtca

SEQ ID NO: 504637 - DNA, 120 bp, Artificial Sequence
  ENSG00000163960_13 (sequence is synthesized)
ctaagtatgcattttggctcataggaccacagagccaaagttgggcaagcaagtcaccttccttctcttatttcttgatctctcctataatcagtctctttctccccctttgtttctttc

SEQ ID NO: 504638 - DNA, 120 bp, Artificial Sequence
  ENSG00000163960_14 (sequence is synthesized)
tcctcttctgttttctcgctccccactccgtacccttctgcctccccctccccccacacttttctttcttacctaatctggtgaccaaactgaagtgtaaggataagacctctcctagta

SEQ ID NO: 504639 - DNA, 120 bp, Artificial Sequence
  ENSG00000163960_15 (sequence is synthesized)
ctagcagcaggaattgtgtgttccagtaagtggtctcttgcacggcacttttttgggatcaaatgttaacgttactccccagactcttcgggcaaaggaatggctagattcagagtaaga

SEQ ID NO: 504640 - DNA, 120 bp, Artificial Sequence
  ENSG00000163960_16 (sequence is synthesized)
acaaccctcccttttttgtaagtccccgtgtttagcagggagaagaaattctctaacatgggtttggttttgttgtgttcttcatgtggaaatgtcgcttaacaaaatatccaggctttt

SEQ ID NO: 504641 - DNA, 120 bp, Artificial Sequence
  ENSG00000163960_17 (sequence is synthesized)
gtttacgtggaaaaagcatcccttgtaatgattgctcatcatacttaaaaacctttttcaaaggattttcatgttcccagctataaggactatttccatgacatgtgttattggcagaat

SEQ ID NO: 504642 - DNA, 120 bp, Artificial Sequence
  ENSG00000163960_18 (sequence is synthesized)
gagtgttaaatatggagcatatagcatggggtgactttcattgtcctaacctgagacagttttccttattactctgtattgatcctgctagtccaagaatggacatgaagtgaacctatc

SEQ ID NO: 504643 - DNA, 120 bp, Artificial Sequence
  ENSG00000163960_19 (sequence is synthesized)
gtggtgactgggataggaaggtgcttgctatttttgccagcacagcatattagttcctttggagccctccattgtctgagtctgcagtgatctgtaggaaggcagctggtcaataatcat

SEQ ID NO: 504644 - DNA, 120 bp, Artificial Sequence
  ENSG00000163960_20 (sequence is synthesized)
gtagtacaatggcttggaattgtaaccactatggttattgattgtcctgtgttgtttcaggcatacttaggtatgtccctggggaaaaagaaaaccattcagctgagagttgctaaccat

SEQ ID NO: 504645 - DNA, 120 bp, Artificial Sequence
  ENSG00000163960_21 (sequence is synthesized)
gttcttttggttagaaataatggttcattttttgcccctggttggaatagtctctaaaaggctctggtgactgaattgaacatgagtccgcatgctgttttctttcaaaaggtatcaaaa

SEQ ID NO: 504646 - DNA, 120 bp, Artificial Sequence
  ENSG00000163960_22 (sequence is synthesized)
cggaaagcctctctaaggggaagacctttcaactccattcagaagacaacatttagtaaggaggatggcggaggttactagtaattttcagatgtcttgggctttttctgccaacaaaac

SEQ ID NO: 504647 - DNA, 120 bp, Artificial Sequence
  ENSG00000163960_23 (sequence is synthesized)
ccaaaatcaaattagagttggtgaaagctttcttcagtgtttttagaagaggccatcttgaatctgtagaataccatttacacatcaacttcaccctatgctcatttcgtattttgagct

SEQ ID NO: 504648 - DNA, 120 bp, Artificial Sequence
  ENSG00000163960_24 (sequence is synthesized)
taaatggagtcctctgaagggggggtagtcgtgattctggtggcaaaactagaacttttaacttgtaaaatgaaaaatattaaatggacctttttgtcagttgaggatttagattgattc

SEQ ID NO: 504649 - DNA, 120 bp, Artificial Sequence
  ENSG00000163960_25 (sequence is synthesized)
ttttatctgaggagcgtatgttcctcagatgttgcgtagagacctttaggttttcatctactttaagattgctctcttggcaattaggggatttgggaaaagaagaaaaaaagatgccat

SEQ ID NO: 504650 - DNA, 120 bp, Artificial Sequence
  ENSG00000163960_26 (sequence is synthesized)
gtgttgctagtacacagttataggatatggtttctaatggttgaattttgaggaactctccctaaagaatgagttttatatctcctcaaggaaatcatggaaaaatctgtttattcttca

SEQ ID NO: 504651 - DNA, 120 bp, Artificial Sequence
  ENSG00000163960_27 (sequence is synthesized)
aatcatggaaaaatctgtttattcttcagtgagtccttttgaattaatgttcttaaatttttttctaagtctgtgtaagtgcttatgtataagtatataattgtataaatatttataaat

SEQ ID NO: 504652 - DNA, 120 bp, Artificial Sequence
  ENSG00000163960_28 (sequence is synthesized)
accttgagtcaaagttctgtctttagattggtgactgagtaatacttacactttggtgttttttcttaggttcttgaggcttacttaactagcagcttctgatttattgagtgaaagatg

SEQ ID NO: 504653 - DNA, 120 bp, Artificial Sequence
  ENSG00000163960_29 (sequence is synthesized)
gttttcatgttaattcctcagttgcatctctgaacttggataacatacttgccgtttgaaaaatagagctgtatactgtcaaaggtgcactggagggtaaaacatttgttggtagtagac

SEQ ID NO: 504654 - DNA, 120 bp, Artificial Sequence
  ENSG00000163960_30 (sequence is synthesized)
aagctcagaaatccaaaaattcagggagggcacagggtaagaagagaggtttgctcagctttgtgctctgatggcacccatctgtactccagcaaagtcatagctgaagcccaaatcgct

SEQ ID NO: 504655 - DNA, 120 bp, Artificial Sequence
  ENSG00000163960_31 (sequence is synthesized)
caaacgtgtgaagtcaatcatttttcctatagggctctgtttccttttctttaccttctagcttctcttgataaaacagttgggagaactgccaacgtgttcatcagtgagagggtgtgg

SEQ ID NO: 504656 - DNA, 120 bp, Artificial Sequence
  ENSG00000163960_32 (sequence is synthesized)
ttctttccgatatgttcagcacgtgcatattcatttatgagaaaccaaagtaacttcttcaactcgggttactgtgggatgattaagtagatataaagtgatttaaaagacagcatggta

SEQ ID NO: 504657 - DNA, 120 bp, Artificial Sequence
  ENSG00000163960_33 (sequence is synthesized)
ctttcactcagcttaacatgcagctgggatgtctacaatacaagatgtggtgggttttattttattttattttgaggcaggagtgtaattatcttagggttgatataaaggcccatggga

SEQ ID NO: 504658 - DNA, 120 bp, Artificial Sequence
  ENSG00000163960_34 (sequence is synthesized)
agagttacggattgtacatgggaagaatccataaggagtattgccttgctcaagaatttaatccgctgacagtatgcttcttccagtttgccttacttcctctgcaagtttctttgctcc

SEQ ID NO: 504659 - DNA, 120 bp, Artificial Sequence
  ENSG00000163960_35 (sequence is synthesized)
ttagggcagaggttttattgaatagattaaatgaggtcagtaagattagttaaaaatagtcattccttgtgggtgttggacacagcttgaaaggagtgtttaaaaaaaaaaagctaggga

SEQ ID NO: 504660 - DNA, 120 bp, Artificial Sequence
  ENSG00000163960_36 (sequence is synthesized)
taaaaaaaaaaagctagggaggaaaagaacaagaaagatagacttcgagagtgataagagaaaaatacagggagatggaatggaaactaccaggaaggccgggcgcggtggctcatgcct

SEQ ID NO: 504661 - DNA, 64 bp, Artificial Sequence
  ENSG00000163960_37 (sequence is synthesized)
gacaaagcgacactccatctcaaatttaaaaaaaaaaaagaagaagaagaagaaaactagtggg

SEQ ID NO: 504662 - DNA, 120 bp, Artificial Sequence
  ENSG00000163960_38 (sequence is synthesized)
tttaaaaaaaaaaaagaagaagaagaagaaaactagtgggaaaaaagtgagaggaatacttttttgaaattggtatcggaaggaactggagaagagaaaacaacagtgccaaatgagaaa

SEQ ID NO: 504663 - DNA, 120 bp, Artificial Sequence
  ENSG00000163960_39 (sequence is synthesized)
agaacaggaaacttaatactaattggcatgcaccagatacttttgtgtacatttgcctcttcaatctcccgaagaatcgtacaaaatgtatactttcttcccatgttaagaaaacaggta

SEQ ID NO: 504664 - DNA, 120 bp, Artificial Sequence
  ENSG00000163960_40 (sequence is synthesized)
tagagaacttattcaggactcatagctagtgagtggcaaatcagaattggaatccagagtccatgctgtggtctccttcagcaagagaatcaagctacccagatgattctcttctcattg

SEQ ID NO: 504665 - DNA, 120 bp, Artificial Sequence
  ENSG00000163960_41 (sequence is synthesized)
tttggctttgtaaagtgtcacttagttttgttcccataaatatagaggaagtagttgggttaaagttgtgggatttgcactatgcctatacatttttatttatgccattattttgagagg

SEQ ID NO: 504666 - DNA, 120 bp, Artificial Sequence
  ENSG00000163960_42 (sequence is synthesized)
tgccaagaataaatgaaaagggtaaaaaaacaattttttctttttttaaacatttttcagaaaagatacaattaccttttttaataggtgagcgccaccacgcccggctaatttttgcat

SEQ ID NO: 504667 - DNA, 61 bp, Artificial Sequence
  ENSG00000163960_43 (sequence is synthesized)
gatctcgtgtctacaattctgttttctgtgtcccatccataccagattattgaaccctctg

SEQ ID NO: 504668 - DNA, 120 bp, Artificial Sequence
  ENSG00000163960_44 (sequence is synthesized)
ttttctgtgtcccatccataccagattattgaaccctctgtgtgtatgtttttaaatcttgtatataattctacttccttgacttacaagtcaacaattagctattgagttctttataga

SEQ ID NO: 504669 - DNA, 80 bp, Artificial Sequence
  ENSG00000163960_45 (sequence is synthesized)
gacttacaagtcaacaattagctattgagttctttatagaagttggaagtattttgaaatctgagatctaatttttggga

SEQ ID NO: 504670 - DNA, 86 bp, Artificial Sequence
  ENSG00000163960_46 (sequence is synthesized)
cactccattaataaataagatatgattcctgcctgttttatccagttagagagacacactacacatgaaataattggagagcatgt

SEQ ID NO: 504671 - DNA, 120 bp, Artificial Sequence
  ENSG00000163960_47 (sequence is synthesized)
tagagagacacactacacatgaaataattggagagcatgtaaatgtttacctattagttcaaacttagaaaaagggaagaatatgttttagttagcaaagtcttaaacaagactgaagtg

SEQ ID NO: 504672 - DNA, 120 bp, Artificial Sequence
  ENSG00000163960_48 (sequence is synthesized)
gcaagcactgtagctcacgttttcttttgactcacctttttctttagctccaccttttgtaacttctagatttggggcatgaagttctgccactaaggcataaccagtacccaagtagga

SEQ ID NO: 504673 - DNA, 120 bp, Artificial Sequence
  ENSG00000163960_49 (sequence is synthesized)
aaggattattgatccctggagtaaagattcctagcttgcggggatctcactattgatcccccggagtaaagattcctagctcgcaggaatcttacttgcacacttagggaaaataccaga

SEQ ID NO: 504674 - DNA, 120 bp, Artificial Sequence
  ENSG00000163960_50 (sequence is synthesized)
gggagccactagcaaccgaaaaatgaaggaaagatttaatttctctacccaggtacaaatccaatgcatagtatagtatatgttatatgcagaaagggcactggaggtgtgagagccctt

SEQ ID NO: 504675 - DNA, 120 bp, Artificial Sequence
  ENSG00000163960_51 (sequence is synthesized)
tgggtaacagctctgctagttgttaccttcacacttctctttcttcttaatctctggtttctcgtctgaaaaatgagataattggactagattaatagttctcagccttttctagaacaa

SEQ ID NO: 504676 - DNA, 120 bp, Artificial Sequence
  ENSG00000163960_52 (sequence is synthesized)
caaattagattatctctgaagtccttttccaaaatttcatgcttccagtctctccccgtgattgcgtattatccctaggctaattaaaagtgtgctggttaatcagtttctttacttttt

SEQ ID NO: 504677 - DNA, 120 bp, Artificial Sequence
  ENSG00000163960_53 (sequence is synthesized)
ttttctctcttttttttattctgtgttcaggtatcatttgaccaacaacttgctcttaatcttactgcgatgactgaaatctccaaagaggagagtatagtagttataggtctagtaata

SEQ ID NO: 504678 - DNA, 120 bp, Artificial Sequence
  ENSG00000163960_54 (sequence is synthesized)
ataatcttgtaaacaattcattattttttaaaacttaatgctgtgtgcctaatcagtgttgagtatgactaaaatgtaaatgagaaccaaatatgacactaacgctggcactaaatttta

SEQ ID NO: 504679 - DNA, 120 bp, Artificial Sequence
  ENSG00000163960_55 (sequence is synthesized)
tttttacttgtgtacttaaagtactttactggcctgttgggaaattgatttgtataagattcacacctggttttggcagaaacagctttttaaagatacaattaggctgacttaaaaatg

SEQ ID NO: 504680 - DNA, 120 bp, Artificial Sequence
  ENSG00000163960_56 (sequence is synthesized)
ttttttattccacagaatgtatctttattatgtcattcttaccgtctctctgccttttttgaccatcatgtaactacgcagtagtaaatcatggggtgcaggctgatgaattagtagtct

SEQ ID NO: 504681 - DNA, 120 bp, Artificial Sequence
  ENSG00000163960_57 (sequence is synthesized)
ttgtaaaactaaaatgtaatgagcataggaagagacagctcttctggtgaacatggcagttttccggtaataccagccttgatgaataggctaaagacagctgtgtactatggacattca

SEQ ID NO: 504682 - DNA, 120 bp, Artificial Sequence
  ENSG00000163960_58 (sequence is synthesized)
acttcactggattgcctggcttagcttttcagttattgtcttgccgtgaaacatggtgttgcactgtacacattttagaatagtggcaagaatgttctttagaactgcagataacccaac

SEQ ID NO: 504683 - DNA, 120 bp, Artificial Sequence
  ENSG00000163960_59 (sequence is synthesized)
agagaataccataccaatatatcggtttctcctgttacatagagatttggtatttcagtgatggttatggtttttgactcacctgtgtgtcagtcctgctagagagacagtatagaatca

SEQ ID NO: 504684 - DNA, 120 bp, Artificial Sequence
  ENSG00000163960_60 (sequence is synthesized)
agaatttcttgatgtctttttaaaaatagagattataatggccttgctagttgtcctgtgaagtgacagacccttaattagaaatcttttaatcctgctttccattttacttctccacca

SEQ ID NO: 504685 - DNA, 120 bp, Artificial Sequence
  ENSG00000163960_61 (sequence is synthesized)
accatttatttttaacattcattctctgaaaatagttatgatttttagtgtaattggctatgtttaagaaattccatttcaaagtcttaatatgtaacaatcttcattttttataaaatt

SEQ ID NO: 504686 - DNA, 120 bp, Artificial Sequence
  ENSG00000163960_62 (sequence is synthesized)
gacatttttgaggcaaacttacttttatagctcattttctccctagttaaggagaattctctggtttcatatagagaatggctagctctgtgataccccaccctctttgtggcctaccag

SEQ ID NO: 504687 - DNA, 120 bp, Artificial Sequence
  ENSG00000163960_63 (sequence is synthesized)
ttgctgttgtgttgcttaaaattgcagatattctcataaacatgatgatttttggcacaggcctttctttgctattgatttcaaaataaagttgggcaatccaatttgaactactttaat

SEQ ID NO: 504688 - DNA, 120 bp, Artificial Sequence
  ENSG00000163960_64 (sequence is synthesized)
aaacataatttagcattcctgtaatgagaaagtattttcaaaagataaccagatttatttctaggattagagatggcaaataccaatgatagtatttttcccaagagcaatcacagatta

SEQ ID NO: 504689 - DNA, 120 bp, Artificial Sequence
  ENSG00000163960_65 (sequence is synthesized)
atctataaatatgagaagtcgcattattgtacttaattctttggcaacaaacagcaagtttttattgtttaattgtatttcctctctagagatcacaatactctgggtattttatatccc

SEQ ID NO: 504690 - DNA, 120 bp, Artificial Sequence
  ENSG00000163960_66 (sequence is synthesized)
ttctaaaggtcatttgggttttcaaatgggaagaatagtcaagctaagctggactaaacctaagtaatattttttctcatcaaaagaagttattaatctaactgggttagcatgagtcat

SEQ ID NO: 504691 - DNA, 120 bp, Artificial Sequence
  ENSG00000163960_67 (sequence is synthesized)
tcattttttagacatgataaatgggaaacatatcaaatcattagataaattctgacctggaattgaattccccctttcttaaaatctttttaatttgcttttttcatagactcagtatgg

SEQ ID NO: 504692 - DNA, 120 bp, Artificial Sequence
  ENSG00000163960_68 (sequence is synthesized)
aactcttaactgataagggagagattcttgatctggaaccgttccctgccattctccttttttctctctatctaggtagctggttccatagtgcccgtcacgagggtccatttcagtttg

SEQ ID NO: 504693 - DNA, 120 bp, Artificial Sequence
  ENSG00000163960_69 (sequence is synthesized)
atgacattagactgcttacactcagctggatgccttgctgtttgcagcaacatgattttacagtatgcttttctcaaagctttgcattcttaatggagatatcaaatggtgtaattccaa

SEQ ID NO: 504694 - DNA, 120 bp, Artificial Sequence
  ENSG00000163960_70 (sequence is synthesized)
atataaatatgtttatgacactaatcatatgcttttaacaataactttttgataacttattgccctgtaagttaaaccttacacggagtgactgttgccatcagaaaatcccctttcacc

SEQ ID NO: 504695 - DNA, 120 bp, Artificial Sequence
  ENSG00000163960_71 (sequence is synthesized)
tgctagagagagtgaaagtagtgcgtggcctccacttttcagttaacgagtagcaagcttctagtaggggctgcttatctgacccatgtggggtcttgggccttgttactttcctgggtt

SEQ ID NO: 504696 - DNA, 120 bp, Artificial Sequence
  ENSG00000163960_72 (sequence is synthesized)
cgtcccttcagctggaaaggctgttgaaaacacttgccaggaaacagtaaagctgtgagagaatcttctagtcttagatatagagaaatgagtaccagttgatgctaacacgatacttag

SEQ ID NO: 504697 - DNA, 120 bp, Artificial Sequence
  ENSG00000163960_73 (sequence is synthesized)
actttgaggggcttccatccaagctttggcatgaatctgttagacacggttttcttcactcctctgataatctttttttccagaatggttttttgttgttgttgttgttaacaaattcta

SEQ ID NO: 504698 - DNA, 120 bp, Artificial Sequence
  ENSG00000163960_74 (sequence is synthesized)
ttgttttgttttgttttgttttgtttgcccttcaggaaagtcctttttcgagtaggtattgattgttccctggaaactctcagcagtgtctgtgcaggctctgtgcatgctttgtatgag

SEQ ID NO: 504699 - DNA, 120 bp, Artificial Sequence
  ENSG00000163960_75 (sequence is synthesized)
tctgtgcaggctctgtgcatgctttgtatgagttcggcttgaacaatgcatttgaagtcacctgggatgtccagttctggcatgtcttcattgattgtgtttttaaacatgtttcatgtt

SEQ ID NO: 504700 - DNA, 120 bp, Artificial Sequence
  ENSG00000163960_76 (sequence is synthesized)
tcatgtcattttccaaacctcactttacatcttactcagagaagttaatcaaggaatgaaatttctagggggatagggatgatgagggtgggttgggggcttgagtgaagtcaacttggg

SEQ ID NO: 504701 - DNA, 120 bp, Artificial Sequence
  ENSG00000163960_77 (sequence is synthesized)
gtatttgctttaaagtgttttctaaagcagttcctaacagtatttagagattccctgggatgtttgtggctcaacttattctggacaaagtgtgtgtgggggtggtcttactgagatttg

SEQ ID NO: 504702 - DNA, 120 bp, Artificial Sequence
  ENSG00000163960_78 (sequence is synthesized)
cattcttaatgcaggacaggctctaaatttcatctgtactctaaatttgtgattgaatccaagaagataacagagacagtgctcctgttgtaatgtttctggcaagtgctccctaaaatg

SEQ ID NO: 504703 - DNA, 120 bp, Artificial Sequence
  ENSG00000163960_79 (sequence is synthesized)
cacatcgaattctgttttctgggccttttctccaatggtgctaggagataccgttgatttctgcagctcttctcagtggtgggaagaagtctttgggattgttgagcaaggggcagctgg

SEQ ID NO: 504704 - DNA, 120 bp, Artificial Sequence
  ENSG00000163960_80 (sequence is synthesized)
accatccactaaatttttttgttcaagacacattagagaccctcctgtatatctagtaagtcataataaaggtgcttgggaaagccttaaatttgaagacacatggaggcggtagaaaat

SEQ ID NO: 504705 - DNA, 120 bp, Artificial Sequence
  ENSG00000163960_81 (sequence is synthesized)
taaacttgtaagaggagaaaaacatgccattaggtaacgcagagttgtaactactggctaagactcaatggaacttccacttgctctaaaaccagggaaatcttagataactgggtgtga

SEQ ID NO: 504706 - DNA, 120 bp, Artificial Sequence
  ENSG00000163960_82 (sequence is synthesized)
tctacctatagatctacctagtctataggtaataatttccagaaggaggatcttgctgtcagttggggatcctctggtttggtctgtaccaaattgtgaatactcttgctgtgttgtacc

SEQ ID NO: 504707 - DNA, 120 bp, Artificial Sequence
  ENSG00000163960_83 (sequence is synthesized)
cagttgctttatattaatactgcaacttgaaacggggagggtggggggacaatggggtgggggagggaagggagtgggacgataagtcttttgaagacatcagctcactgtgctgagaga

SEQ ID NO: 504708 - DNA, 120 bp, Artificial Sequence
  ENSG00000163960_84 (sequence is synthesized)
gggaccaaactcaaggaaacctctgatctatacattcaactgctgcatttttttataaatacatgtaaatgtcctgttgtaatatttgatcttggaaataaaaacaaaaacttttcagta

SEQ ID NO: 504709 - DNA, 81 bp, Artificial Sequence
  ENSG00000163960_85 (sequence is synthesized)
agtgaggaggcagaggaaatgttcagaacgtaacagaaaggtgcaagtgaaagtgtaggaaaacatatgcttgaagcgtgc

SEQ ID NO: 504710 - DNA, 120 bp, Artificial Sequence
  ENSG00000163960_86 (sequence is synthesized)
aatactggtggaaccagaaccattatttggtgttcggcaagaacaagaattaagaaatggaggagctatcgataagaaattaactacccttgcagatctattccggccacccattgattt

SEQ ID NO: 504711 - DNA, 120 bp, Artificial Sequence
  ENSG00000163960_87 (sequence is synthesized)
ctaattgttttgttttgtggagacagggcattgctgtttgccctggctgctatggaactgatctcaagcaagcttcctgcctgccttggccttggccttggcccatattggagttacggg

SEQ ID NO: 504712 - DNA, 120 bp, Artificial Sequence
  ENSG00000163960_88 (sequence is synthesized)
cgtgagccaccacacctggccgctttcttcctttttttatctctgaattggtgtacagtaaggacgacactgagaatgactttttacagttaggaagtcattcttacctttcattattag

SEQ ID NO: 504713 - DNA, 120 bp, Artificial Sequence
  ENSG00000163960_89 (sequence is synthesized)
acgttataacttgaaatgggtctttagaaactattttcttaagacagtattgatttaaatcacagttcaggtgtgggctcaggtccctaatattccctttcaggttgtctgtaaagttaa

SEQ ID NO: 504714 - DNA, 120 bp, Artificial Sequence
  ENSG00000163960_90 (sequence is synthesized)
aacaacttacgtaataatactaagggttttttttttttcccaagatggggtcttgctgtgttgccccaggctggagtgcagtggttgctcacaggcgtgatcccactagtgatcagcaca

SEQ ID NO: 504715 - DNA, 120 bp, Artificial Sequence
  ENSG00000163960_91 (sequence is synthesized)
gttgttgttcggcggcggcggcggcggtaagatggctgcccacgggggctccgcggcgtcctcggcgctgaaggggttaattcaacagttcaccaccattaccggccaaagagtgtggcc

SEQ ID NO: 504716 - DNA, 120 bp, Artificial Sequence
  ENSG00000163961_0 (sequence is synthesized)
gcttgtccggtggctgctgcgctgccgcaacgaatagggtttctggctgcgtaggagggacgggggcgcggagctctgggaaactgcgccaggcgcccgaaaggtgaacacgggagtcgc

SEQ ID NO: 504717 - DNA, 120 bp, Artificial Sequence
  ENSG00000163961_1 (sequence is synthesized)
gcgtctcccccgcagcagcggtaaagcggaagttatgctgcagccggagcccgggcttcctcccggagccgcgtcccggggcccggctgccccgagctgagcggagcatcctttccgggt

SEQ ID NO: 504718 - DNA, 120 bp, Artificial Sequence
  ENSG00000163961_2 (sequence is synthesized)
gaggggaggagaggacttggcgcgttcccctcgctgccccgggagccgcagccgcggtgttcatgccgcggagcagccaggctcctccgacgaaaacctgcatttatttgctggcgggac

SEQ ID NO: 504719 - DNA, 120 bp, Artificial Sequence
  ENSG00000163961_3 (sequence is synthesized)
gtttgccttgaaaatggacaaagacgccgccctccggggtattcctgtttgcctgaccctgagagcgcctttttgcttcaagacgtgttggatgctcctgttctccgaattctgatacgc

SEQ ID NO: 504720 - DNA, 120 bp, Artificial Sequence
  ENSG00000163961_4 (sequence is synthesized)
ttctgggcataatactgaaacacaaaactgcttttgctctctctgtggttggccgaaaataggattctttttcgtgcaggtgtcgttgtttagtcggctttactaacatattgaaatggc

SEQ ID NO: 504721 - DNA, 120 bp, Artificial Sequence
  ENSG00000163961_5 (sequence is synthesized)
tctacccaaagacgccatcccctcgctgtccgagtgccagtgcgggatctgcatggaaatcctcgtggagcccgtcaccctcccgtgtaaccacacgctgtgtaaaccgtgcttccagtc

SEQ ID NO: 504722 - DNA, 120 bp, Artificial Sequence
  ENSG00000163961_6 (sequence is synthesized)
gaccgtcgaaaaggcgagtttatgctgtcccttctgtcgccgccgggtatcgtcgtggactcggtaccatacccgaagaaattctctcgtcaacgtggaactgtggacgataattcaaaa

SEQ ID NO: 504723 - DNA, 120 bp, Artificial Sequence
  ENSG00000163961_7 (sequence is synthesized)
acactatcccagggagtgcaagcttagagcgtctggccaagaatcagaggaagtggctgatgactatcagccagttcgtctgctcagtaaacctggggaactgagaagagaatatgaaga

SEQ ID NO: 504724 - DNA, 120 bp, Artificial Sequence
  ENSG00000163961_8 (sequence is synthesized)
ggaaataagcaaggtggcggcagagcgacgggccagcgaggaagaagaaaacaaagccagtgaagaatacatacagaggttgttggcagaggaggaagaagaggaaaaaagacaggcaga

SEQ ID NO: 504725 - DNA, 120 bp, Artificial Sequence
  ENSG00000163961_9 (sequence is synthesized)
aaaaaggcgaagagcgatggaagaacaactgaaaagtgatgaggaactggcaagaaagctaagcattgatattaacaatttctgtgagggaagtatctcggcttctcccttgaattccag

SEQ ID NO: 504726 - DNA, 120 bp, Artificial Sequence
  ENSG00000163961_10 (sequence is synthesized)
aaaatctgatccagttacacccaagtctgaaaagaaaagtaagaacaaacaaagaaacactggagatattcagaagtatttgacaccgaaatctcagtttgggtcagcctcacactctga

SEQ ID NO: 504727 - DNA, 120 bp, Artificial Sequence
  ENSG00000163961_11 (sequence is synthesized)
agctgtacaagaagtcaggaaagactccgtatctaaggacattgacagtagtgataggaaaagcccaacagggcaagacacagaaatagaagatatgccgacactttctccacagatatc

SEQ ID NO: 504728 - DNA, 120 bp, Artificial Sequence
  ENSG00000163961_12 (sequence is synthesized)
ccttggagttggagaacaaggtgcagattcttcaatagagtcccctatgccatggttatgtgcctgtggtgccgaatggtaccatgaaggaaacgtcaaaacaagaccaagcaatcatgg

SEQ ID NO: 504729 - DNA, 120 bp, Artificial Sequence
  ENSG00000163961_13 (sequence is synthesized)
gaaagagttatgtgtcttaagtcacgagcgacctaaaaccagagttccctactcgaaagaaactgcagttatgccttgtggcagaacagaaagtgggtgcgcccccacatcaggggtgac

SEQ ID NO: 504730 - DNA, 120 bp, Artificial Sequence
  ENSG00000163961_14 (sequence is synthesized)
acagacaaatggaaacaacacaggtgagacagaaaatgaagagtcgtgcctactgatcagtaaggagatttccaaaagaaaaaaccaagaatcttcctttgaagcagtcaaggatccatg

SEQ ID NO: 504731 - DNA, 120 bp, Artificial Sequence
  ENSG00000163961_15 (sequence is synthesized)
cttttctgcaaaaagaagaaaagtgtcccccgaatcttccccagatcaagaggaaacagaaataaactttacccaaaaactgatagatttggagcatctactgtttgagagacataaaca

SEQ ID NO: 504732 - DNA, 120 bp, Artificial Sequence
  ENSG00000163961_16 (sequence is synthesized)
agaagaacaggacaggttattggcattacaacttcagaaggaggtggataaagagcaaatggtgccaaaccggcaaaaaggatccccagatgagtatcacttacgcgctacatcctcccc

SEQ ID NO: 504733 - DNA, 120 bp, Artificial Sequence
  ENSG00000163961_17 (sequence is synthesized)
tccagacaaagtgctaaatggacagaggaagaatcccaaagatgggaacttcaaaaggcaaactcacacaaagcatccaacaccagagagaggctcaagggacaaaaataggcaagtgtc

SEQ ID NO: 504734 - DNA, 120 bp, Artificial Sequence
  ENSG00000163961_18 (sequence is synthesized)
tttaaagatgcagttgaagcagtcagttaatagaagaaagatgccaaattctactagagatcactgtaaggtatccaaaagtgctcactccctacagcctagcatttcacagaaaagtgt

SEQ ID NO: 504735 - DNA, 120 bp, Artificial Sequence
  ENSG00000163961_19 (sequence is synthesized)
ttttcagatgtttcagagatgcacaaagtaaggcctggtaaagggagtgctttgtgatctagtaaagctggaatgtgaagctctttcctatcatggaatcttcatccatgtgtcattcat

SEQ ID NO: 504736 - DNA, 120 bp, Artificial Sequence
  ENSG00000163961_20 (sequence is synthesized)
gctgctctctaggcacactcattgtccttaatgaaggtctgtgtgattgtaaggactgcatagacacatgagcttctgcacagctcagcggtaagcaggggtcccctgtcgtttcccttc

SEQ ID NO: 504737 - DNA, 120 bp, Artificial Sequence
  ENSG00000163961_21 (sequence is synthesized)
ttaataacagatgtgtattaagctttacaattcttagagatatcttaagctttggccaactccaggaaatcttcaagtgccattgtctttccaaaaactgcatgttttatggcctttgct

SEQ ID NO: 504738 - DNA, 120 bp, Artificial Sequence
  ENSG00000163961_22 (sequence is synthesized)
agggtttaaaatccattttcttgctattgtccaatgtttacagagtactcaaaaggttttcctaaagtaatctaatttccatctccaatttaattcaattttcagcattgtagcatttcc

SEQ ID NO: 504739 - DNA, 120 bp, Artificial Sequence
  ENSG00000163961_23 (sequence is synthesized)
aattttcagcattgtagcatttcctttggtgtttgttttttttttttagacggagtttcaaaatttggattcatattcatatgtgggaaatcccagattttttttttttttttttttttt

SEQ ID NO: 504740 - DNA, 73 bp, Artificial Sequence
  ENSG00000163961_24 (sequence is synthesized)
tgcctcagcctcccgagtagctgggatcataggcatgtgccactacacccagctacccagctaattttttttt

SEQ ID NO: 504741 - DNA, 120 bp, Artificial Sequence
  ENSG00000163961_25 (sequence is synthesized)
tataggcgtgagccaccacgcccggcctgtttcctttggtttaaagtggattcgaatcagtgttaaatcagaaaatcagggttttctaggaaattgggaattagttgccagaaaggaaac

SEQ ID NO: 504742 - DNA, 120 bp, Artificial Sequence
  ENSG00000163961_26 (sequence is synthesized)
ttagttgccagaaaggaaactgaactatgcagaaggagttaagagctgggatgaggctggatggggtgactgacagtccagatcattgaaacagattgggtcgtcggaaactggtccaga

SEQ ID NO: 504743 - DNA, 120 bp, Artificial Sequence
  ENSG00000163961_27 (sequence is synthesized)
tgaggctggatggggtgactgacagtctggatcattgaaactgattaggtcgtcagaaacgggtccagacgaggatgaggctgaggctggatggggtgactgacagtctggatcattgaa

SEQ ID NO: 504744 - DNA, 120 bp, Artificial Sequence
  ENSG00000163961_28 (sequence is synthesized)
actgattgggtggttggtcagaaacgggtccagatgaggatgaggctgaggctggatggggtgactgacagtctggatcattgaaactgattgggtggttggtcagaaacgggtccagat

SEQ ID NO: 504745 - DNA, 120 bp, Artificial Sequence
  ENSG00000163961_29 (sequence is synthesized)
gaggatgaggctggatggggtgactgacagtctggatcattgaaactgattgggtcgtcagaaactggtccagatgaggctgggtggggtgactgacagtttggatcattgaaactgatt

SEQ ID NO: 504746 - DNA, 120 bp, Artificial Sequence
  ENSG00000163961_30 (sequence is synthesized)
gggtggtcagaaactggtccagatgaggatgtggctggatggggtgactgacagtctggatcattgaaactgattgggtggtcagaaactggtccagatgaggatgtggctggatggggt

SEQ ID NO: 504747 - DNA, 120 bp, Artificial Sequence
  ENSG00000163961_31 (sequence is synthesized)
gactgacagtctggatcattgaaactgattgggtggtgagaaatgggtccagatgaggatgaggctggatggggtgactgacagtctggatcattgaaactgattgggtggtgagaaatg

SEQ ID NO: 504748 - DNA, 120 bp, Artificial Sequence
  ENSG00000163961_32 (sequence is synthesized)
ggtccagatgaggatgaggctggatggggtgactgacagtctggatcattgaaactggtccactatgacgcagcaggggcagtttggcagagcatcctcttcccttgtccttgtgaaaga

SEQ ID NO: 504749 - DNA, 120 bp, Artificial Sequence
  ENSG00000163961_33 (sequence is synthesized)
acacaggaaacatttgggttttacagcttttcacaccctactatcaggcatcagaatcaaaattagttactaaattgggtgaatttttggaaacctgcatttctatgcatctgctattcc

SEQ ID NO: 504750 - DNA, 120 bp, Artificial Sequence
  ENSG00000163961_34 (sequence is synthesized)
agaaaaaaatgggaatgtattacaggagagttacctcacagtgtcttatgttgtggaacctgaaacataaccacgtgttttcttatatgatcatttgtgttgatactgcttttatttgag

SEQ ID NO: 504751 - DNA, 120 bp, Artificial Sequence
  ENSG00000163961_35 (sequence is synthesized)
tttatgaacagaaatagaaagtatggtgcttgggttttgccctttcttactcctgaaagttaaatcagaagacactgatttcattttgtgaaatttagctcagagactattgatcttttg

SEQ ID NO: 504752 - DNA, 120 bp, Artificial Sequence
  ENSG00000163961_36 (sequence is synthesized)
tttcattaatatgaacaactattagtaaaaaatagctttaacagcatttctgctgatatctagtaatctattcttttaatgtgaaaataagataaaatgtcctggagctaattctagctt

SEQ ID NO: 504753 - DNA, 120 bp, Artificial Sequence
  ENSG00000163961_37 (sequence is synthesized)
aaatttgccagtatttctgtatgtcattaagtttttttcctctaaggttggtaatagaattttgttaatctttgcatacctgatggcatctatgtcaatgctgattgggtaattataaat

SEQ ID NO: 504754 - DNA, 120 bp, Artificial Sequence
  ENSG00000163961_38 (sequence is synthesized)
tctgtgctaatttaaaacttaatttgcctcttaaggtgattgtcctctgagtaatgattgtagttaaatgaagtatagcttgcaactatactatcacatgggtcgttaagtaaaaataaa

SEQ ID NO: 504755 - DNA, 120 bp, Artificial Sequence
  ENSG00000163961_39 (sequence is synthesized)
taaaccaaatttgtctgagacaggctaagatcaatcttctcatcaaaccaatttttctctaagagcaatttcactttcagttttagggtggacattcttgaatgcctcaaattaaacgtt

SEQ ID NO: 504756 - DNA, 120 bp, Artificial Sequence
  ENSG00000163961_40 (sequence is synthesized)
atctatttaatcttcctggaatagtctgtgaccaaaaaggagggtgtgatatatttaggtgtaaatatatcacatatatggtgtgatatatttgggatttatatattcagctcattctct

SEQ ID NO: 504757 - DNA, 120 bp, Artificial Sequence
  ENSG00000163961_41 (sequence is synthesized)
gtgaagaagtcttcctgactaaaattggtttcaagataaactaatttctgttagtatttctactctgcctaccatgtatgcctttttgttagaaactaataaatgtatcagtcactagca

SEQ ID NO: 504758 - DNA, 120 bp, Artificial Sequence
  ENSG00000163961_42 (sequence is synthesized)
ggtactggtcctttttcctctcatttttgtggaaaggatatgcaaacactgaatttctcagggagtactaaggctgtgcagaggctgagaatctgaaaaataaaatactaaaaataaaaa

SEQ ID NO: 504759 - DNA, 120 bp, Artificial Sequence
  ENSG00000163964_0 (sequence is synthesized)
gggggccggggctgcaggcagctgggaaccgcgggcgctaggcgcgcgcacccagcactcggtcccagccgataaatctggggcagcgcgcggtaggagctgcgggcggccaggcccctt

SEQ ID NO: 504760 - DNA, 80 bp, Artificial Sequence
  ENSG00000163964_1 (sequence is synthesized)
cctgcgtccgcacctggccccgcgcgcccctctcgggcgtccggcttccggcgtcctggcggctcgggtggcggcggttc

SEQ ID NO: 504761 - DNA, 120 bp, Artificial Sequence
  ENSG00000163964_2 (sequence is synthesized)
cacgcgcgggcccgccgcggccttcaccgccgcgcgctctgacgccggcataagggccatgtgttctgaaattattttgaggcaagaagttttgaaagatggtttccacagagacctttt

SEQ ID NO: 504762 - DNA, 120 bp, Artificial Sequence
  ENSG00000163964_3 (sequence is synthesized)
aatcaaagtgaagtttggggaaagcattgaggacttgcacacctgccgtctcttaattaaacaggacattcctgcaggactttatgtggatccgtatgagttggcttcattacgagagag

SEQ ID NO: 504763 - DNA, 120 bp, Artificial Sequence
  ENSG00000163964_4 (sequence is synthesized)
aaacataacagaggcagtgatggtttcagaaaattttgatatagaggcccctaactatttgtccaaggagtctgaagttctcatttatgccagacgagattcacagtgcattgactgttt

SEQ ID NO: 504764 - DNA, 120 bp, Artificial Sequence
  ENSG00000163964_5 (sequence is synthesized)
tcaagcctttttgcctgtgcactgccgctatcatcggccgcacagtgaagatggagaagcctcgattgtggtcaataacccagatttgttgatgttttgtgaccaagagttcccgatttt

SEQ ID NO: 504765 - DNA, 120 bp, Artificial Sequence
  ENSG00000163964_6 (sequence is synthesized)
gaaatgctgggctcactcagaagtggcagccccttgtgctttggagaatgaggatatctgccaatggaacaagatgaagtataaatcagtatataagaatgtgattctacaagttccagt

SEQ ID NO: 504766 - DNA, 120 bp, Artificial Sequence
  ENSG00000163964_7 (sequence is synthesized)
gggactgactgtacatacctctctagtatgttctgtgactctgctcattacaatcctgtgctctacattgatccttgtagcagttttcaaatatggccatttttccctataagttttatg

SEQ ID NO: 504767 - DNA, 120 bp, Artificial Sequence
  ENSG00000163964_8 (sequence is synthesized)
tagttaaatgcttcctagaaacctaaataagatctattaatttctgacgagaggtgttcttctagaattaattacttttatcttttgtcttcatttgtggccaaaattatgtttactaga

SEQ ID NO: 504768 - DNA, 120 bp, Artificial Sequence
  ENSG00000163964_9 (sequence is synthesized)
ggaaatttgggatcattctcagctaattccaaaatgtagtgctctattgcatggatccttggtaatcctcaagcatcagatgccataaggggaaacttaattctgctaaattaatgttta

SEQ ID NO: 504769 - DNA, 120 bp, Artificial Sequence
  ENSG00000163964_10 (sequence is synthesized)
ttttgtgagaagtgactttatcttcatttggggtagaaaaattatttctttatgtagtagagacaaattattctcattttgcaagtactttcaatttaagctacaaattgagaaaaccgt

SEQ ID NO: 504770 - DNA, 88 bp, Artificial Sequence
  ENSG00000163964_11 (sequence is synthesized)
caaaagttagctggggctggtggtgggcatctgtagtcccagctaattggaagggtgaggcgccagagagccaagatcgcaccactgc

SEQ ID NO: 504771 - DNA, 120 bp, Artificial Sequence
  ENSG00000163964_12 (sequence is synthesized)
gaaaaacaaaaaagaagaataaaataatttggatgaaaatcatgtttatttaaatagtaatgtcatgagactattaaagatgtgccagagtttcaatgaaaatcattaaagtaggacagc

SEQ ID NO: 504772 - DNA, 120 bp, Artificial Sequence
  ENSG00000163964_13 (sequence is synthesized)
taagaaattaatattaatatcaaaattattgataatcttaaattattgattattccttaacgcactccattctccttttacattttatcatgtttcttttgaatatatgaattggcaaag

SEQ ID NO: 504773 - DNA, 120 bp, Artificial Sequence
  ENSG00000163964_14 (sequence is synthesized)
gacttgatgaaactgagtactaagatttggtacagagtatgtcaggaagacaactcagattgccattttaaataaagttgtacatgaacaataattggaatcatcaggtaatttttttaa

SEQ ID NO: 504774 - DNA, 120 bp, Artificial Sequence
  ENSG00000163964_15 (sequence is synthesized)
ttaaacaaaggttcttcatttactgttatgattggaaaaaaattagaaaataaagtaagtgccataggctaattaaaaaataaaaccttggccgggcgcggtggcttacgcctataatcc

SEQ ID NO: 504775 - DNA, 120 bp, Artificial Sequence
  ENSG00000163964_16 (sequence is synthesized)
aaaaaaaaaaaaaaaaagtaaataaaaccttagggcaagcatgttccaaaacagaagacatcaaaccagggtgtgttggcattatttattttatgtagagtattgagatgtgataaacct

SEQ ID NO: 504776 - DNA, 120 bp, Artificial Sequence
  ENSG00000163964_17 (sequence is synthesized)
tattgagatgtgataaacctttgtatatgccatcactgctccatttcctaaagtattttggtgttttcatgggactacatcttgtataatttgacatgtatgacctgactagtcctaaca

SEQ ID NO: 504777 - DNA, 120 bp, Artificial Sequence
  ENSG00000163964_18 (sequence is synthesized)
gttctttttaaacgtgtatttgagacttaaatattggaaaaggtaacccagtgccataaagcagaaacagtgacctttaaaatgactaaaatttcaacccagtatagtttcatacctatt

SEQ ID NO: 504778 - DNA, 120 bp, Artificial Sequence
  ENSG00000163964_19 (sequence is synthesized)
tcatgctttctcgtaagaaagaatttcatgttttagaaacatttctttcactatgggattaataatatgacactgaaatggaattatatatgtcagctacaattcaggcattgttttggg

SEQ ID NO: 504779 - DNA, 120 bp, Artificial Sequence
  ENSG00000163964_20 (sequence is synthesized)
atatggttagattgacaggcaacgttttggaatatggttagacggggagggaacacggtactgtttaacatcttaagagtatgtgggggtatgtgtatacagaatgtttttgtttttgct

SEQ ID NO: 504780 - DNA, 120 bp, Artificial Sequence
  ENSG00000163964_21 (sequence is synthesized)
catcacaaccaggtttcatcagtatttaaaatatttaagattgtggcttggaatgtggttcagccatttactcacttatacaaatattcagaagtgtaataaaaatgtgaatgaagaaaa

SEQ ID NO: 504781 - DNA, 120 bp, Artificial Sequence
  ENSG00000163964_22 (sequence is synthesized)
gtggggacccggcgcgggacctagatcagtagggcgagccggaggaggtcagacactagagccgtgtgccctccttccctcccgtgcgctttgctctgcggcggatcccgggtctccggg

SEQ ID NO: 504782 - DNA, 120 bp, Artificial Sequence
  ENSG00000163964_23 (sequence is synthesized)
agagtcgggctcgggccctgcggttcccaggctggactggccgccctgttactaaagttctgagaaggaaagtcagccgtcaagcgtcttgggatgctcttgagctgcacgaagcttctg

SEQ ID NO: 504783 - DNA, 120 bp, Artificial Sequence
  ENSG00000163964_24 (sequence is synthesized)
atcaccaaggggccaggcaaggccttagcgccctgtgaggcctgagaatccccaaactgaatgtaggactccgtggcaaactgctagttgttcgtgcaagtagtagttggcaaactgctt

SEQ ID NO: 504784 - DNA, 120 bp, Artificial Sequence
  ENSG00000163964_25 (sequence is synthesized)
aataaagggcataagggccatgtgttctgaaattattttgaggcaagaagttttgaaagatggtttccacagttgattctaaatgaccaagctgtttccaaaaaagaaattatcttcaaa

SEQ ID NO: 504785 - DNA, 120 bp, Artificial Sequence
  ENSG00000163964_26 (sequence is synthesized)
taacagaggagaagacttcatggcggcggctatggttgccttctgataattgaaggatccctagtggaataaggaacgaatttattgcagacattgtaagcaagaacaactggtaaatgt

SEQ ID NO: 504786 - DNA, 120 bp, Artificial Sequence
  ENSG00000163964_27 (sequence is synthesized)
acagcaaggaggtagcccagccccgcgttcggctgctctcgaggaggccggagcccccggagacgatgcgccccgcgcagccgcctgcgcctgcgggagccggctgcccttgagatggag

SEQ ID NO: 504787 - DNA, 120 bp, Artificial Sequence
  ENSG00000163964_28 (sequence is synthesized)
ttgctgcctctttggctctgcctgggttttcacttcctgaccgtgggctggaggaacagaagcggaacagccacagcagcctcccaaggagtctgcaagttggcataagggccatgtgtt

SEQ ID NO: 504788 - DNA, 120 bp, Artificial Sequence
  ENSG00000163964_29 (sequence is synthesized)
tcttgacctaggtggtagttacaagggtatttatttgccttataataattcactaaactatgtatttgagtagatttttatgtgtgtgctttaatttacaataaaaaagttaaaaagaaa

SEQ ID NO: 504789 - DNA, 120 bp, Artificial Sequence
  ENSG00000163975_0 (sequence is synthesized)
gcacttaaggagctcgggccagcgcgagggggagcagggaggaagcccggctgctgcggacctcctcggacccggacccagccccagcccggccccagccagccccgacggcgccatgcg

SEQ ID NO: 504790 - DNA, 120 bp, Artificial Sequence
  ENSG00000163975_1 (sequence is synthesized)
gggtccgagcggggctctgtggctgctcctggctctgcgcaccgtgctcggtggcatggaggtgcggtggtgcgccacctcggacccagagcagcacaagtgcggcaacatgagcgaggc

SEQ ID NO: 504791 - DNA, 120 bp, Artificial Sequence
  ENSG00000163975_2 (sequence is synthesized)
cttccgggaagcgggcatccagccctccctcctctgcgtccggggcacctccgccgaccactgcgtccagctcatcgcggcccaggaggctgacgccatcactctggatggaggagccat

SEQ ID NO: 504792 - DNA, 120 bp, Artificial Sequence
  ENSG00000163975_3 (sequence is synthesized)
ctatgaggcgggaaaggagcacggcctgaagccggtggtgggcgaagtgtacgatcaagaggtcggtacctcctattacgccgtggctgtggtcaggaggagctcccatgtgaccattga

SEQ ID NO: 504793 - DNA, 120 bp, Artificial Sequence
  ENSG00000163975_4 (sequence is synthesized)
caccctgaaaggcgtgaagtcctgccacacgggcatcaatcgcacagtgggctggaacgtgcccgtgggctacctggtggagagcggccgcctctcggtgatgggctgcgatgtactcaa

SEQ ID NO: 504794 - DNA, 120 bp, Artificial Sequence
  ENSG00000163975_5 (sequence is synthesized)
agctgtcagcgactattttgggggcagctgcgtcccgggggcaggagagaccagttactctgagtccctctgtcgcctctgcaggggtgacagctctggggaaggggtgtgtgacaagag

SEQ ID NO: 504795 - DNA, 120 bp, Artificial Sequence
  ENSG00000163975_6 (sequence is synthesized)
ccccctggagagatactacgactacagcggggccttccggtgcctggcggaaggggcaggggacgtggcttttgtgaagcacagcacggtactggagaacacggatgggaagacgcttcc

SEQ ID NO: 504796 - DNA, 120 bp, Artificial Sequence
  ENSG00000163975_7 (sequence is synthesized)
ctcctggggccaggccctgctgtcacaggacttcgagctgctgtgccgggatggtagccgggccgatgtcaccgagtggaggcagtgccatctggcccgggtgcctgctcacgccgtggt

SEQ ID NO: 504797 - DNA, 120 bp, Artificial Sequence
  ENSG00000163975_8 (sequence is synthesized)
ggtccgggccgacacagatgggggcctcatcttccggctgctcaacgaaggccagcgtctgttcagccacgagggcagcagcttccagatgttcagctctgaggcctatggccagaagga

SEQ ID NO: 504798 - DNA, 120 bp, Artificial Sequence
  ENSG00000163975_9 (sequence is synthesized)
tctactcttcaaagactctacctcggagcttgtgcccatcgccacacagacctatgaggcgtggctgggccatgagtacctgcacgccatgaagggtctgctctgtgaccccaaccggct

SEQ ID NO: 504799 - DNA, 120 bp, Artificial Sequence
  ENSG00000163975_10 (sequence is synthesized)
gcccccctacctgcgctggtgtgtgctctccactcccgagatccagaagtgtggagacatggccgtggccttccgccggcagcggctcaagccagagatccagtgcgtgtcagccaagtc

SEQ ID NO: 504800 - DNA, 120 bp, Artificial Sequence
  ENSG00000163975_11 (sequence is synthesized)
cccccaacactgcatggagcggatccaggctgagcaggtcgacgctgtgaccctgagtggcgaggacatttacacggcggggaagacgtacggcctggttcccgcagccggggagcacta

SEQ ID NO: 504801 - DNA, 120 bp, Artificial Sequence
  ENSG00000163975_12 (sequence is synthesized)
tgccccggaagacagcagcaactcgtactacgtggtggccgtggtgagacgggacagctcccacgccttcaccttggatgagcttcggggcaagcgctcctgccacgccggtttcggcag

SEQ ID NO: 504802 - DNA, 120 bp, Artificial Sequence
  ENSG00000163975_13 (sequence is synthesized)
ccctgcaggctgggatgtccccgtgggtgcccttattcagagaggcttcatccggcccaaggactgtgacgtcctcacagcagtgagcgagttcttcaatgccagctgcgtgcccgtgaa

SEQ ID NO: 504803 - DNA, 120 bp, Artificial Sequence
  ENSG00000163975_14 (sequence is synthesized)
caaccccaagaactacccctcctcgctgtgtgcactgtgcgtgggggacgagcagggccgcaacaagtgtgtgggcaacagccaggagcggtattacggctaccgcggcgccttcaggtg

SEQ ID NO: 504804 - DNA, 120 bp, Artificial Sequence
  ENSG00000163975_15 (sequence is synthesized)
cctggtggagaatgcgggtgacgttgccttcgtcaggcacacaaccgtctttgacaacacaaacggccacaattccgagccctgggctgctgagctcaggtcagaggactatgaactgct

SEQ ID NO: 504805 - DNA, 120 bp, Artificial Sequence
  ENSG00000163975_16 (sequence is synthesized)
cccaacggggcccgagccgaggtgtcccagtttgcagcctgcaacctggcacagataccaccccacgccgtgatggtccggcccgacaccaacatcttcaccgtgtatggactgctggac

SEQ ID NO: 504806 - DNA, 120 bp, Artificial Sequence
  ENSG00000163975_17 (sequence is synthesized)
aaggcccaggacctgtttggagacgaccacaataagaacgggttcaaaatgttcgactcctccaactatcatggccaagacctgcttttcaaggatgccaccgtccgggcggtgcctgtc

SEQ ID NO: 504807 - DNA, 120 bp, Artificial Sequence
  ENSG00000163975_18 (sequence is synthesized)
ggagagaaaaccacctaccgcggctggctggggctggactacgtggcggcgctggaagggatgtcgtctcagcagtgctcgggcgcagcggccccggcgcccggggcgcccctgctcccg

SEQ ID NO: 504808 - DNA, 120 bp, Artificial Sequence
  ENSG00000163975_19 (sequence is synthesized)
gccctcgccgcccgcctgctcccgcccgccctctgagcccggccgccccgccccagagctccgatgcccgcccggggagtttccgcggcggcttcgcgctggaatccagaaggaagctcg

SEQ ID NO: 504809 - DNA, 120 bp, Artificial Sequence
  ENSG00000163975_20 (sequence is synthesized)
cggcttcgcgctggaatccagaaggaagctcgcgaaggccgggcccggcgtgggcgggagcaggcgcctccccgggagccccgccgcccacgggcgccacctggcgctgctacctgaggc

SEQ ID NO: 504810 - DNA, 80 bp, Artificial Sequence
  ENSG00000163975_21 (sequence is synthesized)
gcccttcccgccaaccgccgcctcccgccacctggagccgcgcgggccgcgccggaggaggccggttgcccaggaaaccg

SEQ ID NO: 504811 - DNA, 80 bp, Artificial Sequence
  ENSG00000163975_22 (sequence is synthesized)
gcctacacccgcaggccgcggccaggccgtcccaggaggccccggcgccaacgggacccggcgcgtgggacagcggcctc

SEQ ID NO: 504812 - DNA, 120 bp, Artificial Sequence
  ENSG00000163975_23 (sequence is synthesized)
gtgggacagcggcctctgctggcggcggcgggagggaggccggaccggggcgacggggagaagccttcgcccgcgggaccgtgtccggggtgggggctccagttcctccgaccgcccgtg

SEQ ID NO: 504813 - DNA, 120 bp, Artificial Sequence
  ENSG00000163975_24 (sequence is synthesized)
ctccagttcctccgaccgcccgtgcgctgggagggaggccgagcccggggaacgccgcgtgccctgcctcgtcccccactgtggccgcgccagctccatcccgggccagccgcgtccacg

SEQ ID NO: 504814 - DNA, 120 bp, Artificial Sequence
  ENSG00000163975_25 (sequence is synthesized)
ccctcccgagtctcctcaggctctcgcctcccctacccccgtgggatgcccaccgcccgcacccacgcccgagcctggcggcagcagccgccccccgcctgaagggagccggaggtgacc

SEQ ID NO: 504815 - DNA, 120 bp, Artificial Sequence
  ENSG00000163975_26 (sequence is synthesized)
gacccaggccgcgggctcccgaggcccctgaagggctgcgcgtggggacccgccatgcttctgggttccgaacgggggtgagctccgtctcctcacccggccccgcacccgctgggcctg

SEQ ID NO: 504816 - DNA, 120 bp, Artificial Sequence
  ENSG00000163975_27 (sequence is synthesized)
gggacccctcactccccgtgcccgcccctccgcgaggcagcagaaagcgcccggccggggcctctctctactccatcttgccacagttgtctgagaagccagaaaaagtttccagaactg

SEQ ID NO: 504817 - DNA, 120 bp, Artificial Sequence
  ENSG00000163975_28 (sequence is synthesized)
gcagcccttaaaaaaaatgaagaggaagagaagaaatgggagcaggcagccctcgtcagcagaccgggagccgcgtgggcgcggagccatttgcattccggtctgcgggggctcggggat

SEQ ID NO: 504818 - DNA, 120 bp, Artificial Sequence
  ENSG00000163975_29 (sequence is synthesized)
gctggtgacaggcccggttcccggtggctcgcccccacctgcgggcgtcgggaaggatcccttccatctctcagccgcagaggaggccctggcagcgccccggctgtagccatgcaaccc

SEQ ID NO: 504819 - DNA, 120 bp, Artificial Sequence
  ENSG00000163975_30 (sequence is synthesized)
cgaggagtcccgggcaccttcaccccaccgggaggggccacaaggacctgggcctcggccaccaagctttgtcccctctcgctgtggggggctagtgattctcctccgacctgacgattg

SEQ ID NO: 504820 - DNA, 120 bp, Artificial Sequence
  ENSG00000163975_31 (sequence is synthesized)
cttggttttttcaaaagggagttttgtgcggtgagaagtgtgtttctgtgtggctaactctgggctagcgtgccgtggccattgaaggtgtggcctgcgtgggtgcagtgtaagtgacgc

SEQ ID NO: 504821 - DNA, 120 bp, Artificial Sequence
  ENSG00000163975_32 (sequence is synthesized)
tggattgtcaggtggcagcaggggacccctgctgtgtcagtgctaatgaaacatgttggttggtttctaaaataaagccaaacaagccagcacatgcagaggcttggaccctgatagaaa

SEQ ID NO: 504822 - DNA, 120 bp, Artificial Sequence
  ENSG00000163975_33 (sequence is synthesized)
gctctttctcccgagcccccgcgggagaagattcagagggactgaccggcaggcgcgggagtccgcccgggggtttctggcacatgcagggatggaggtggagacggaggccgggtcccc

SEQ ID NO: 504823 - DNA, 120 bp, Artificial Sequence
  ENSG00000163975_34 (sequence is synthesized)
gtcggcgccccggggagtcagggcccgggatggtgggacgggaggcgggacctcggggagcggctcgcggggatcgcgggcggcgaccgccgaggggatggagttcgtggcaccgctgtg

SEQ ID NO: 504824 - DNA, 120 bp, Artificial Sequence
  ENSG00000163975_35 (sequence is synthesized)
tgtggccgcaggcgacgcactcatcaatgcaaacgatgaagccaccgccacccccgccccgtctgaactttgcagtttcccgcctgggtggtggggggcttggagcgctgcggaggggag

SEQ ID NO: 504825 - DNA, 120 bp, Artificial Sequence
  ENSG00000163975_36 (sequence is synthesized)
ggcagttcgacttcccaggcctccgccaggagtggggaggggagggctgtggcggaagcttcagtctcggcccttgggctggtggggctgccacgggagggtgacctggtttcgggcgga

SEQ ID NO: 504826 - DNA, 120 bp, Artificial Sequence
  ENSG00000163975_37 (sequence is synthesized)
gtcatgcgtttccctccctcctgcacaggcctctggcagtgctggctggggcagggtgaatggcagaggagctcaggcctgaaagtcatcggccccaaggggctccagcaccccttcctc

SEQ ID NO: 504827 - DNA, 120 bp, Artificial Sequence
  ENSG00000163975_38 (sequence is synthesized)
tgggcccctagcctgggagctctcggggactctgacccggtcagatcctgaggcataagcagaagtccactgaggatgtgggtgtctcaggctctctacaagggggtttactttcaacac

SEQ ID NO: 504828 - DNA, 120 bp, Artificial Sequence
  ENSG00000163975_39 (sequence is synthesized)
agaaggtggggtttttatctgctctctcagaagatgaagcaggctcagagaggcttgaacctaccctgatgggtcctcagcctcccctctgtgcctgccgtcttcccttggcagggcctg

SEQ ID NO: 504829 - DNA, 120 bp, Artificial Sequence
  ENSG00000163975_40 (sequence is synthesized)
gcactgtgcccaccgagggtggctttgcagccagcatcatcgcagacactccccgaggggacagggctcctggagggcagcccacccacagccccctcacctcactctcccgtcccagtt

SEQ ID NO: 504830 - DNA, 120 bp, Artificial Sequence
  ENSG00000163975_41 (sequence is synthesized)
catgaggaaggcccagggacactgctgggtgagggaacctacacgagcaccctcttcgggaggcctggagaggggaagaagcttccacttccagggcctgccgagactccctagccagtg

SEQ ID NO: 504831 - DNA, 120 bp, Artificial Sequence
  ENSG00000163975_42 (sequence is synthesized)
ctcccaccaggtgggggtagctgagaagcgacctgtagaccctcccattcctccataaagggccgggttctgagccattccatttgccagcagccgtgctcctggtcagagaggccctga

SEQ ID NO: 504832 - DNA, 120 bp, Artificial Sequence
  ENSG00000163975_43 (sequence is synthesized)
gcacaggaataccagcccttcccctgtctctgcgcctagtgcctccctgtgggagggcagggctgccctagaggactggctgtccaggcgaatgggctcacacagaactgctggagccac

SEQ ID NO: 504833 - DNA, 120 bp, Artificial Sequence
  ENSG00000163975_44 (sequence is synthesized)
ctggaagtcagctctccaggctgcccttgctgggcctggcctgagctggccatcagccctgtccacagagcagtcctggagtcccagccagaagaacgccctaaggctctctcaaattcc

SEQ ID NO: 504834 - DNA, 120 bp, Artificial Sequence
  ENSG00000163975_45 (sequence is synthesized)
ccagggacaggagctccagggacacagagagctgccccaagtctgctcttgcccgcagggagcccagcagccccctagcctgtgcccactcagctcttactgcgggctgtcccgggcctg

SEQ ID NO: 504835 - DNA, 120 bp, Artificial Sequence
  ENSG00000163975_46 (sequence is synthesized)
gcgtggtgccgggcacggtgctgtgtgcgtaactgccttgggtgagcaaggcgtccttaatgccgagccacctgcactctcagggcctcccttcagaagcccggctccgggtagggaggt

SEQ ID NO: 504836 - DNA, 120 bp, Artificial Sequence
  ENSG00000163975_47 (sequence is synthesized)
gctgtctggcagcggcacagctcagcagacccagcccttccccttcccatgacttctgtgaccttggccaacctccacttcccagactgtataatggggatagtaacacctgcgctgtca

SEQ ID NO: 504837 - DNA, 120 bp, Artificial Sequence
  ENSG00000163975_48 (sequence is synthesized)
cccagactaaatgagccaggccgtgtgcccacctgacatgtggtatgtgctggaaagtgtgagttcctttgcccagtccccgcatcacacatgggacctgcctccagctcagccagctcc

SEQ ID NO: 504838 - DNA, 120 bp, Artificial Sequence
  ENSG00000163975_49 (sequence is synthesized)
tgtgtctcccccgccacctctgcttggccggtgcctggcctccatcacagtccagcgcaactgtcacctcctccaaggtgctccctgagcccctccctctctggagcagggcctctcttg

SEQ ID NO: 504839 - DNA, 120 bp, Artificial Sequence
  ENSG00000163975_50 (sequence is synthesized)
cccgcacccacatggcctctgcaagcctctgcctgctcagtctcgttagtcctcagaggagggtccagtcttcccctgtgtctaccctctggaactccacacagcatctcgcttggagaa

SEQ ID NO: 504840 - DNA, 120 bp, Artificial Sequence
  ENSG00000163975_51 (sequence is synthesized)
agcactggctggttccttgttgaattaatggccatcaaatgacacacggcacagtccaaccctgcacacccatcagccagaaacagctctgcctccgaggccccacgcacctcttcctct

SEQ ID NO: 504841 - DNA, 120 bp, Artificial Sequence
  ENSG00000163975_52 (sequence is synthesized)
ttaattaactcgacacctctactgagcacctgctacccgctggtcataagcatgcagcagtaaacgaagagaccttcctgcccccacagagcagagagtaaataaacacacccaaaacaa

SEQ ID NO: 504842 - DNA, 120 bp, Artificial Sequence
  ENSG00000163975_53 (sequence is synthesized)
ttatccccattctacaggactgggaaatgaggctgtgagagtgaggaactgaggaacttgctgggatttgaacaaaggcaaagtcagccccaaagggtggtggtggcaagtctccaccag

SEQ ID NO: 504843 - DNA, 120 bp, Artificial Sequence
  ENSG00000163975_54 (sequence is synthesized)
gccaggctgggaagcctgtgctgccacaggcctgactggactgcctgcctgcagtctccaggacattggaaccaaagtccaggtgcaattgcctttatcgcgtctgctgcagttctccac

SEQ ID NO: 504844 - DNA, 120 bp, Artificial Sequence
  ENSG00000163975_55 (sequence is synthesized)
aatcatctcaaggacaccggccagttggcccccaggagcaggaggctggtcagcgtttgtcagagcagggctcatcactgataacaaaagtgctggccacgccagtgctggaggcaggct

SEQ ID NO: 504845 - DNA, 120 bp, Artificial Sequence
  ENSG00000163975_56 (sequence is synthesized)
aacacggatggtgagtgggggaggggcacgggcccagaggagcagggagtcaggccaggccggcttggggcagggaccctagatggcagagttgggatcaaacgccctagtgcagtgctg

SEQ ID NO: 504846 - DNA, 120 bp, Artificial Sequence
  ENSG00000163975_57 (sequence is synthesized)
cacgaaggcaaacatggaccagatctgaggaggaagaaggcgagtgccctgcacacgaggaagcacgtaggacgatgcgctctagtgctgggcaagcctggaaatgggctcccgttcaca

SEQ ID NO: 504847 - DNA, 120 bp, Artificial Sequence
  ENSG00000163975_58 (sequence is synthesized)
ggccccaggacgagtctgacaaaggagaatttggaaaacgggcaaagagtagggatatgttgggttaagaatcagctctttcaaacttggggttttttttgagatgggggtctcaccatg

SEQ ID NO: 504848 - DNA, 87 bp, Artificial Sequence
  ENSG00000163975_59 (sequence is synthesized)
tcgcatgcacctggcagctttttcaaagtgttgatggtaatctgaggcaatctaagggagtcattttttaagtgactttatacagaa

SEQ ID NO: 504849 - DNA, 120 bp, Artificial Sequence
  ENSG00000163975_60 (sequence is synthesized)
caatctaagggagtcattttttaagtgactttatacagaaagattggtaagagccaaggggtagaagtggcataaatgtctaaagcagggaagtgacaggactttcattgttcttggctg

SEQ ID NO: 504850 - DNA, 120 bp, Artificial Sequence
  ENSG00000163975_61 (sequence is synthesized)
aggagaagcgggagtggctgatggaagcacctaaatgatgcctttgtctgtgggaaggcaaatgatgccccagagctctaaccaaaggttttgcagccgccgaaaaacaggaaagttggg

SEQ ID NO: 504851 - DNA, 120 bp, Artificial Sequence
  ENSG00000163975_62 (sequence is synthesized)
aagcgggggtaggactacactgaatcattaacagtgctgtaaactaccatgtggccattaacaatgacctttagggagttttcctaaacgatcactctggtgcgggtgtttggttttgtt

SEQ ID NO: 504852 - DNA, 120 bp, Artificial Sequence
  ENSG00000163975_63 (sequence is synthesized)
ttaaaatagctttgcagtgaaagctttcatgaccatacaaattatcttttttcttcctatttccttgtagaggtttttttcctccttgtcttaaggtcataaaaatattgttatgtggga

SEQ ID NO: 504853 - DNA, 120 bp, Artificial Sequence
  ENSG00000163975_64 (sequence is synthesized)
gcgagggagactcacttgtcactgcgcaccgttttctgctatctgatttttttactatgatatctgagtcctgcaaaatcaatgattagtattttttttttaacattattaggaaaacaa

SEQ ID NO: 504854 - DNA, 120 bp, Artificial Sequence
  ENSG00000163975_65 (sequence is synthesized)
ggtgaatccctggcctgggaaagggggagagccctgggctctggttgggctcctgggacagatgagaaggacagcacagccctctggggcttggggtggggccccaggccatctggtagg

SEQ ID NO: 504855 - DNA, 120 bp, Artificial Sequence
  ENSG00000163982_0 (sequence is synthesized)
cagacttggcgcgggtgtctcgaagatgctcgagggcctggggtcgcccgcctcgccccgggcagctgcaagcgcctcggtcgcagggtcgtcggggccagcggcctgctcgcctccctc

SEQ ID NO: 504856 - DNA, 120 bp, Artificial Sequence
  ENSG00000163982_1 (sequence is synthesized)
gtcctcggccccgaggtccccggaatccccggccccccggcggggcggtgtgcgcgccagcgtcccacagaaactggccgagatgctgagcagccagtatgggctgatcgtgttcgtggc

SEQ ID NO: 504857 - DNA, 120 bp, Artificial Sequence
  ENSG00000163982_2 (sequence is synthesized)
ggggctgctgctgctgctggcctgggccgtgcacgccgcgggcgtgagcaagagcgacctgctgtgcttcctgacggcgctcatgctgctgcagctgctgtggatgctgtggtacgtggg

SEQ ID NO: 504858 - DNA, 120 bp, Artificial Sequence
  ENSG00000163982_3 (sequence is synthesized)
ccgcagctccgcgcaccgccgcctcttccgcctcaaggacacgcacgcgggtgccggctggctgcgcggtagtatcacattgtttgcagtcattaccgtcatcctgggatgccttaaaat

SEQ ID NO: 504859 - DNA, 120 bp, Artificial Sequence
  ENSG00000163982_4 (sequence is synthesized)
tggatacttcattggattttcagaatgtttatcagccactgaaggagttttcccagtcacccattcagtgcatactttgttgcaggtatattttctttgggggcatgcaaaggatattat

SEQ ID NO: 504860 - DNA, 120 bp, Artificial Sequence
  ENSG00000163982_5 (sequence is synthesized)
ccagtctttcaaaacactggaaaggtttggagtgatccactcggtgttcaccaacctgcttctgtgggccaatggcgtcctcaatgagtcaaagcaccaactcaatgagcacaaggaacg

SEQ ID NO: 504861 - DNA, 120 bp, Artificial Sequence
  ENSG00000163982_6 (sequence is synthesized)
gctcatcactctgggttttgggaacataacaacagttttagatgaccacacaccgcagtgtaactgcacgcccccaactctgtgcactgccatctcccacgggatctactacctctaccc

SEQ ID NO: 504862 - DNA, 120 bp, Artificial Sequence
  ENSG00000163982_7 (sequence is synthesized)
cgcaaagttgacagccatcagcaccagaagatgcagttcaagtctgatggggtcatggtgggcgcagtcctgggcctgaccgtgctggccgccaccattgctgtggtggtggtatacctg

SEQ ID NO: 504863 - DNA, 120 bp, Artificial Sequence
  ENSG00000163982_8 (sequence is synthesized)
attcatattgggcgctccaagaccaagagcgagtcggcactcatcatgttctacctgtatgccatcaccctgctgatgcttatgggggctgcggggctggctggaatccggatttacagg

SEQ ID NO: 504864 - DNA, 120 bp, Artificial Sequence
  ENSG00000163982_9 (sequence is synthesized)
atagacgagaagtcactggatgagtccaaaaatccggcccgcaaactggactcggacctcttggtgggcactgcctcgggctcctggcttatctcctggggctcaatcttggccatcctc

SEQ ID NO: 504865 - DNA, 120 bp, Artificial Sequence
  ENSG00000163982_10 (sequence is synthesized)
tgtgctgagggccacccccgctacacctggtacaacctgccctactccatcctggcgatcgtggagaagtacatccagaacctcttcatctttgaatccattcaccgagagcctgaaaaa

SEQ ID NO: 504866 - DNA, 120 bp, Artificial Sequence
  ENSG00000163982_11 (sequence is synthesized)
ctctctgaggacatccaaacccttcgggtggtcacagtctgcaatggcaacaccatgccccttgcttcttcctgccccaagagtggaggtgtggccagagatgtggctccccagggcaag

SEQ ID NO: 504867 - DNA, 120 bp, Artificial Sequence
  ENSG00000163982_12 (sequence is synthesized)
gacatgccaccagcagccaatggaaatgtgtgcatgagagaaagccatgacaaggaggaggagaagcaggaggagagcagctggggagggagcccaagcccagtccgccttccccgtttc

SEQ ID NO: 504868 - DNA, 120 bp, Artificial Sequence
  ENSG00000163982_13 (sequence is synthesized)
ttacagggcaacgccaagagaaaagtcctgaggaatattgcagccttcttgttcctctgcaatatttcgctttggatacctcccgcctttggctgtcgacctgagtatgacaatggattg

SEQ ID NO: 504869 - DNA, 120 bp, Artificial Sequence
  ENSG00000163982_14 (sequence is synthesized)
gaggagattgtctttggctttgaaccctggataattgtggtcaacctggccatgcctttttctattttctatcgaatgcacgcagctgcctccctctttgaggtctattgtaagatatag

SEQ ID NO: 504870 - DNA, 120 bp, Artificial Sequence
  ENSG00000163993_0 (sequence is synthesized)
acattttctcggccctgccagcccccaggaggaaggtgggtctgaatctagcaccatgacggaactagagacagccatgggcatgatcatagacgtcttttcccgatattcgggcagcga

SEQ ID NO: 504871 - DNA, 120 bp, Artificial Sequence
  ENSG00000163993_1 (sequence is synthesized)
ggacctggacgccaatggagatgcccaggtggacttcagtgagttcatagtgttcgtggctgcaatcacgtctgcctgtcacaagtactttgagaaggcaggactcaaatgatgccctgg

SEQ ID NO: 504872 - DNA, 120 bp, Artificial Sequence
  ENSG00000163993_2 (sequence is synthesized)
agatgtcacagattcctggcagagccatggtcccaggcttcccaaaagtgtttgttggcaattattcccctaggctgagcctgctcatgtacctctgattaataaatgcttatgaaatga

SEQ ID NO: 504873 - DNA, 120 bp, Artificial Sequence
  ENSG00000163995_0 (sequence is synthesized)
cggagccggcgggcgggcggaggatagcgcgggcgcggcacctgcgggcccgagggtctggctgtcgcagcgccgggccgccccgactccgagcggctgctgagatgagtgcagtgtcgc

SEQ ID NO: 504874 - DNA, 120 bp, Artificial Sequence
  ENSG00000163995_1 (sequence is synthesized)
tgagatgagtgcagtgtcgcagccccaggctgctcccagcccgctggagaagtcgcccagcacggcgatcctgtgcaacacgtgtgggaatgtgtgcaagggcgaggtgctgcgggtgca

SEQ ID NO: 504875 - DNA, 120 bp, Artificial Sequence
  ENSG00000163995_2 (sequence is synthesized)
ggacaagtacttccacatcaagtgcttcgtctgtaaagcatgtggctgcgacctggccgagggcggcttcttcgtgcggcagggcgagtacatctgcacgctggactaccagaggctcta

SEQ ID NO: 504876 - DNA, 120 bp, Artificial Sequence
  ENSG00000163995_3 (sequence is synthesized)
cggcacccgctgcttcagctgcgaccagttcattgagggtgaggtggtgtcggcgctgggcaagacctaccaccccgactgcttcgtgtgtgccgtctgccggctgcccttcccccccgg

SEQ ID NO: 504877 - DNA, 120 bp, Artificial Sequence
  ENSG00000163995_4 (sequence is synthesized)
ggaccgagtgaccttcaacgggaaggaatgcatgtgccagaagtgttccctgcccgtatcggtgggcagcagcgcgcacctgtcccagggcctccgaagttgtgggggctgcggcacaga

SEQ ID NO: 504878 - DNA, 120 bp, Artificial Sequence
  ENSG00000163995_5 (sequence is synthesized)
aatcaagaatggccaggccctggtagccttggacaagcactggcacttgggctgttttaagtgcaagagctgtgggaagctcctgaatgccgagtacatcagcaaggatgggctgcccta

SEQ ID NO: 504879 - DNA, 120 bp, Artificial Sequence
  ENSG00000163995_6 (sequence is synthesized)
ctgcgaagctgactatcacgccaagttcggcatccgctgtgacagctgtgagaaatacatcacggggcgcgtgctggaggccggagagaagcactaccacccttcctgcgcgctatgtgt

SEQ ID NO: 504880 - DNA, 120 bp, Artificial Sequence
  ENSG00000163995_7 (sequence is synthesized)
caggtgcggccagatgtttgcagaaggcgaagagatgtatcttcaaggttcctccatctggcatccggcgtgtcgacaagcagccagaactgaagacagaaacaaggaaaccagaacttc

SEQ ID NO: 504881 - DNA, 120 bp, Artificial Sequence
  ENSG00000163995_8 (sequence is synthesized)
ctcagagagcatcatttctgtccctgcttccagcacctcagggtctccgagccgtgtgatttatgccaagcttggtggtgagatcctggactacagggacttggcagcccttcctaaaag

SEQ ID NO: 504882 - DNA, 120 bp, Artificial Sequence
  ENSG00000163995_9 (sequence is synthesized)
taaggccatctatgacatcgaccgccccgacatgatctcctactcaccctacatcagccactctgcaggggacaggcagagctacggcgagggggatcaggatgaccggtcctacaagca

SEQ ID NO: 504883 - DNA, 120 bp, Artificial Sequence
  ENSG00000163995_10 (sequence is synthesized)
gtgtcggacctccagcccaagctccactgggtcggttagcctcgggcgctacactccgacctcacggtcaccacagcactacagccgtccagctggtactgtgagtgtgggtaccagtag

SEQ ID NO: 504884 - DNA, 120 bp, Artificial Sequence
  ENSG00000163995_11 (sequence is synthesized)
ctgcctctccctgtcccaacacccaagccctacatccgtgttcagacatcattacatcccctacttccgaggcagtgaaagtggccggagcacccccagcctctccgtgctctctgacag

SEQ ID NO: 504885 - DNA, 120 bp, Artificial Sequence
  ENSG00000163995_12 (sequence is synthesized)
caagccgcccccctccacctaccagcaggcacctcgccacttccacgtcccagacactggcgtaaaagataacatctataggaaaccccctatctacagacagcatgctgccaggcgatc

SEQ ID NO: 504886 - DNA, 120 bp, Artificial Sequence
  ENSG00000163995_13 (sequence is synthesized)
ggatggggaggatggaagcttggaccaggataacaggaagcagaagagcagctggctgatgctcaagggggatgcagacacaaggaccaattctccagacctggacacccagtccttgtc

SEQ ID NO: 504887 - DNA, 120 bp, Artificial Sequence
  ENSG00000163995_14 (sequence is synthesized)
ccacagcagcgggaccgacagagaccctctccaaaggatggcaggggacagctttcactcacgattcccctattccaaatctgaccctctcccaggacatggaaagaatggcttggacca

SEQ ID NO: 504888 - DNA, 120 bp, Artificial Sequence
  ENSG00000163995_15 (sequence is synthesized)
atgccaatctggccccctgtggagcagacccggatgccagctggggcatgcgagaatacaagatctatccgtatgactccctcatcgtcacaaaccgaattcgcgtgaaactgcccaaag

SEQ ID NO: 504889 - DNA, 120 bp, Artificial Sequence
  ENSG00000163995_16 (sequence is synthesized)
acgtggaccggacgagactggagagacacttgtcgcccgaggagttccaggaagtgtttgggatgagcatcgaggagtttgaccgcctggccctctggaagaggaatgaccttaagaaga

SEQ ID NO: 504890 - DNA, 120 bp, Artificial Sequence
  ENSG00000163995_17 (sequence is synthesized)
aagcccttttgttctgacggctgccagcctgccccactggtgtgtgccgggcgccgaggccaggggcccctggcgagaaccgcacacacccctcccacacaccttgctctggcttctctg

SEQ ID NO: 504891 - DNA, 120 bp, Artificial Sequence
  ENSG00000163995_18 (sequence is synthesized)
tgtccatggggtgggcgggagggggtcccccagcaggtgcggcccctgcacctgccggcgacactcctgccggtagtttagggccgagacggctagcttcacgccacccttccccgctgt

SEQ ID NO: 504892 - DNA, 120 bp, Artificial Sequence
  ENSG00000163995_19 (sequence is synthesized)
ggcttggtgtcagggagaggctgtagagtggctgtgtcgggcatcagatggagcacacaggtggctgcagcccagcccaccttcccagcgttctcgaggtgccctggccccggtgctggg

SEQ ID NO: 504893 - DNA, 120 bp, Artificial Sequence
  ENSG00000163995_20 (sequence is synthesized)
cacgtgggggacagaggtggccgggacgtgagctgtgaggcttgttgatgatggttgctgacaccatcatcgggggtgggcacacggcccttcggagcctgggcagcctggcctcacagg

SEQ ID NO: 504894 - DNA, 120 bp, Artificial Sequence
  ENSG00000163995_21 (sequence is synthesized)
cagactcgcagacggggcagtgagcgtctgggacagtgccaagagtggggtgtgtgatttttgcaggcgtctgtgatgggtctctttagggacaaatgtcaacaagggacaagacagggc

SEQ ID NO: 504895 - DNA, 120 bp, Artificial Sequence
  ENSG00000163995_22 (sequence is synthesized)
accttccgccagcgcccctccatgcgctgcgttcctcctccagatcgacccctagatgcctacacaatatctttaaagtaacacagaagtttttattttattaaaaagtatagcctactt

SEQ ID NO: 504896 - DNA, 120 bp, Artificial Sequence
  ENSG00000163995_23 (sequence is synthesized)
aaacgcgagatgacatatatagagtttaattttacggtccctccgcaggggagcggcctccagccttattctccaccgctcggatctgtgtggtttcagtctgttcttggtgtggtcctc

SEQ ID NO: 504897 - DNA, 120 bp, Artificial Sequence
  ENSG00000163995_24 (sequence is synthesized)
atacacagagctccctgtctagtttcttttctttttcttttttctttttctcgtcacacaggtaaccttaaagacagacccctctaaagaacgctttgtaaatacatgtgaggtatagcc

SEQ ID NO: 504898 - DNA, 120 bp, Artificial Sequence
  ENSG00000163995_25 (sequence is synthesized)
accactgttttccttgctgttatttttccaagtcttggggagaaaacatcctcctctgatggccaaagccctggaatcaagggtttccacgtaccctgcctaatacccgacgtagctctt

SEQ ID NO: 504899 - DNA, 120 bp, Artificial Sequence
  ENSG00000163995_26 (sequence is synthesized)
gatgcaccgtccttgtgctgtggctggcggtgtctcagcctgaaacataaaccccacatgccccaggagcgatgtgctccctgaaacagacaaccacacgctgttggggagagaaggatg

SEQ ID NO: 504900 - DNA, 120 bp, Artificial Sequence
  ENSG00000163995_27 (sequence is synthesized)
gagataggatggagataggatggagatgtggctcttctcatctttgaagccagcagggcatcccggagcaggaggctggccgggctccccaagcgaaggcgttggtgtctgtcattaggt

SEQ ID NO: 504901 - DNA, 120 bp, Artificial Sequence
  ENSG00000163995_28 (sequence is synthesized)
gtgtgttagggtgcagcaccggccgtcacaggatgctgataagcgcgctgagaggtggatgaaacaccaaagtctgtttccccgtccgcagtgggtgttgcctctttgtgtgtgtcccga

SEQ ID NO: 504902 - DNA, 120 bp, Artificial Sequence
  ENSG00000163995_29 (sequence is synthesized)
tgttcctgcctgtgagtcggccttactccgtttccttagcgcccatgacacgccaagtcccgtttcgcactcggcttctcacccgcccagctcggctagggagggggagtttttagcacc

SEQ ID NO: 504903 - DNA, 120 bp, Artificial Sequence
  ENSG00000163995_30 (sequence is synthesized)
taatatgcttcctgccattgcgcaatctgagcctgagcaactggaaacccccatttctcattagtgcaatgtcatatctgatcccaggaagcctggaaaataaaagacgatgcattataa

SEQ ID NO: 504904 - DNA, 120 bp, Artificial Sequence
  ENSG00000163995_31 (sequence is synthesized)
gacagagaccctctccaaaggatggcaggggacagctttcactcacgtgagtggttcttttgaagaaggagccgtgatgtgcacaaaatgcctcgcggcaaagaggccccagaactcaga

SEQ ID NO: 504905 - DNA, 120 bp, Artificial Sequence
  ENSG00000163995_32 (sequence is synthesized)
gctatccccctacatctaagccttgcctgttaaaaagcatgaaagcaaagcccacaaatctaaggaccgaccggaaggaaatatggggcttttgcagtttgccggcttcccaagaactgt

SEQ ID NO: 504906 - DNA, 120 bp, Artificial Sequence
  ENSG00000163995_33 (sequence is synthesized)
ccccgagccagtgtgctaacgagggccacgcctgcatgtcccctcacagatttccaaggtgtgcaagaatgcagaaacccagacctgctcctgggctgtttaggagaaaggcgtccgggc

SEQ ID NO: 504907 - DNA, 120 bp, Artificial Sequence
  ENSG00000163995_34 (sequence is synthesized)
tgccgggtggaagtcagggcctgttccctccagagcagacatgggcatggtccggctgatgagtgcagacttggagttggtgatgggcaccatccctgtcccctgtgactcatcctgaac

SEQ ID NO: 504908 - DNA, 120 bp, Artificial Sequence
  ENSG00000163995_35 (sequence is synthesized)
gaggcacagcctcaggcttcatagagagacagtgatggtgtctgcctgaccctaggggtgttttgaagactgaatcaggagtgattttcaaatgtagagaaaactccagataatgctgtt

SEQ ID NO: 504909 - DNA, 120 bp, Artificial Sequence
  ENSG00000163995_36 (sequence is synthesized)
tgcttccggccgctgtaaatcataggtgaaaaccagtagcaagtgctcactcagtgcctcccagaagcggtctgcgggtctcagctgggctgggggcagttttcattgggcaaggcttgg

SEQ ID NO: 504910 - DNA, 120 bp, Artificial Sequence
  ENSG00000163995_37 (sequence is synthesized)
gcttagcttcgaagcaggggctgggagaggatggatgggggtgtgagagcagaagaaagacctggctttgcagtgaggcagtcccaagttcaaatctgagctcaccactgacccgtcgtg

SEQ ID NO: 504911 - DNA, 120 bp, Artificial Sequence
  ENSG00000163995_38 (sequence is synthesized)
tgatgggcgccaggtgttaggagactggaactgggtatgtgtgtggcattcggccggccatagtagctgctcagtaaacagaaactgtttctcatcctcatcctcatcctcatgcctgca

SEQ ID NO: 504912 - DNA, 120 bp, Artificial Sequence
  ENSG00000163995_39 (sequence is synthesized)
aactgtaaaccgtcctacttaacaatgaaagtagaaaagtgtttcaatgtgacaggaaagagtgaagacacagaagcttggaaatgatgatgtgttaaagaatcactttaaacaaagaaa

SEQ ID NO: 504913 - DNA, 120 bp, Artificial Sequence
  ENSG00000163995_40 (sequence is synthesized)
aggttttttccaggagaccctgctgctcagtgctgtaaacagccatggtggctcctttcttcttgcatcaggcagttacaagcatgggccaagcttggtggtgagatcctggactacagg

SEQ ID NO: 504914 - DNA, 120 bp, Artificial Sequence
  ENSG00000163995_41 (sequence is synthesized)
gagcaggcttggcgttgatttgcctctgtgagtggggagagcagggctttgtattttcacgctgaaaatcactgtctctcctggaagaaggagaaacaggtagccgttgagagtaacgag

SEQ ID NO: 504915 - DNA, 120 bp, Artificial Sequence
  ENSG00000163995_42 (sequence is synthesized)
atgttagtgtattcggaacggaactgctcagtcttcaattttggccttatcttgtcaaggtcctgtagcccaatcccaaatttccaagctctctggcctggtatcagtcttgtccttggt

SEQ ID NO: 504916 - DNA, 120 bp, Artificial Sequence
  ENSG00000163995_43 (sequence is synthesized)
agaaggggagctgccgccgccgcggtggcactgcctgatgctcggcccagtgtgccggtgccccgctgggtgacagtggactcccagggcgcagcaggagcaggtgacagactgttggct

SEQ ID NO: 504917 - DNA, 120 bp, Artificial Sequence
  ENSG00000163995_44 (sequence is synthesized)
gaaggtgagggtgtccaccctcgcaggcacacgttccagggagcacggcactcaagcagggccgtcagactgggctctggtgcccagaagctgtgcaggccggagagaagcactaccacc

SEQ ID NO: 504918 - DNA, 120 bp, Artificial Sequence
  ENSG00000163995_45 (sequence is synthesized)
ctactcttttcttatcttctgcagctggcaaaattttactcaatggcttttaaaggacaattttgatcattttagtgctttaatcctattctgagcagctaatttttagattctcaagga

SEQ ID NO: 504919 - DNA, 120 bp, Artificial Sequence
  ENSG00000163995_46 (sequence is synthesized)
aaacagcatgtttatatacaaggataattaggaagaggggcctttgttttggcgaatttgcagttggttggattcaaacaccagccaggatgcagaggcgcagatggagtgagcccccta

SEQ ID NO: 504920 - DNA, 120 bp, Artificial Sequence
  ENSG00000163995_47 (sequence is synthesized)
aggtgttcttagttcaccgcccagccctctgccctcagcaatgtcgctcctctgccttgggactctggacagacttcaactcagggttggattagcaagtccttggacacagtctgggaa

SEQ ID NO: 504921 - DNA, 120 bp, Artificial Sequence
  ENSG00000163995_48 (sequence is synthesized)
cgtggatgaggcccacactccttcccctgggcaggggatctgggctgctccaccagacaggagagatggggctcgctgcaaataagcttttcatgcttgaaatattctactttgctttcc

SEQ ID NO: 504922 - DNA, 120 bp, Artificial Sequence
  ENSG00000163995_49 (sequence is synthesized)
atgtattctcggtgaccttctgctcagttctttggtgccagcatacacttgcttcgtgaggtgaccctgtggtttcctcccccaacagatctatccgtatgactccctcatcgtcacaaa

SEQ ID NO: 504923 - DNA, 120 bp, Artificial Sequence
  ENSG00000164002_0 (sequence is synthesized)
ttttttgcgagtggcgggccgactgtgtagtccgctccggcagcgcgctctgcccggcttcctcagtctcctcgccgggagcgtccgggagcagctccgaggccgcggcgaaaccagcct

SEQ ID NO: 504924 - DNA, 120 bp, Artificial Sequence
  ENSG00000164002_1 (sequence is synthesized)
tgtcatttcagcattctggccttccctatgaggaggaagatcaacgaagtcacagggcccttctagcccaatccagagctgtaccatggcagagacaagagaagaggagacagtgtcagc

SEQ ID NO: 504925 - DNA, 120 bp, Artificial Sequence
  ENSG00000164002_2 (sequence is synthesized)
agaagcctcagggttctcagacttgagtgactcagagttcctggagtttctggacctagaagatgcccaagagtcaaaggctttagttaacatgcctggcccatcttctgaatcccttgg

SEQ ID NO: 504926 - DNA, 120 bp, Artificial Sequence
  ENSG00000164002_3 (sequence is synthesized)
gaaggatgacaaacccataagcttacaaaactggaaaagaggattggatatattatcacccatggagagattccaccttaaatatttatatgtcactgacctggctactcagaactggtg

SEQ ID NO: 504927 - DNA, 120 bp, Artificial Sequence
  ENSG00000164002_4 (sequence is synthesized)
tgaactgcaaacagcatatgggaaggagcttcctggtttcttggcacctgagaaggcagctgtgttggacactggtgccagcatacacctagctagagaactagaacttcatgatcttgt

SEQ ID NO: 504928 - DNA, 120 bp, Artificial Sequence
  ENSG00000164002_5 (sequence is synthesized)
gactgtcccagtcaccactaaagaagatgcttgggcaattaagtttctgaacatacttttgctgattcctaccctgcagtcagaagggcacatcagagagtttccagtgtttggggaagg

SEQ ID NO: 504929 - DNA, 120 bp, Artificial Sequence
  ENSG00000164002_6 (sequence is synthesized)
ggagggtgtacttcttgttggagtgattgatgagctgcactatacagccaagggggaactggagctggcggaactcaagacacgcaggcgccctatgctccctctggaagctcagaagaa

SEQ ID NO: 504930 - DNA, 120 bp, Artificial Sequence
  ENSG00000164002_7 (sequence is synthesized)
gaaagactgttttcaagtcagcctatacaaatatatctttgatgccatggtacaaggaaaagtgacccctgctagcctaatccaccacacaaagttgtgtctagaaaagccactggggcc

SEQ ID NO: 504931 - DNA, 120 bp, Artificial Sequence
  ENSG00000164002_8 (sequence is synthesized)
atcagtgctgaggcatgcccagcagggaggcttctctgtgaagtctttgggtgacctcatggaacttgtcttcttgtctctaacactgtcagacctcccagttattgatatcttgaagat

SEQ ID NO: 504932 - DNA, 120 bp, Artificial Sequence
  ENSG00000164002_9 (sequence is synthesized)
agagaaggaggtgagagccaaggtgcagcattatatggcctactggatgggccaccgagagccccagggagttgacgtggaggaggcttggaagtgccggacgtgtacctatgcagacat

SEQ ID NO: 504933 - DNA, 120 bp, Artificial Sequence
  ENSG00000164002_10 (sequence is synthesized)
ttgtgagtggagaaagggcagtggagtgctcagctctacactggcgccccaagtcaaaaaagccaaatgaatagaaggtatgctttcaagaatgttgatccttcctgctcctgttgtacc

SEQ ID NO: 504934 - DNA, 120 bp, Artificial Sequence
  ENSG00000164002_11 (sequence is synthesized)
taagcaaaagaggaccagtctctgagcttggcttttatggagagtgttcttattttggttcttttttttatttccacaacctctaaccacattcagtccaggaccaaggctcagggatga

SEQ ID NO: 504935 - DNA, 120 bp, Artificial Sequence
  ENSG00000164002_12 (sequence is synthesized)
gtgggagagatgggttatactgtccctggagcttcatcatgattgcctgagaagacagatgctcatcatggctggaatgaaggtatccttcagtaaactttgctttcctaagaaaattct

SEQ ID NO: 504936 - DNA, 120 bp, Artificial Sequence
  ENSG00000164002_13 (sequence is synthesized)
tcagtttctgataagtcatccctatttttatcttgatcaaggctttctacagttacataataaaatgaaatgctgtccaggacagttgaactgatggttttttcataactgcagtccttc

SEQ ID NO: 504937 - DNA, 120 bp, Artificial Sequence
  ENSG00000164002_14 (sequence is synthesized)
aaagatgaccaccatatatagttgtgtacgtgttattccaagcctttaaatatatacataaacatattttggaatcagaatgagcagaccaaaacataaacaataaatattctcaaagag

SEQ ID NO: 504938 - DNA, 120 bp, Artificial Sequence
  ENSG00000164002_15 (sequence is synthesized)
aacataaacaataaatattctcaaagagacaagggaagatgaagtagaaacaggaagtcataaatattagatacgaaaaacataatacatggctgggtgcggtggcacatgcctgtaatc

SEQ ID NO: 504939 - DNA, 120 bp, Artificial Sequence
  ENSG00000164002_16 (sequence is synthesized)
gggactgggctctgggcggcttttttgcgagtggcgggccgactgtgtagtccgctccggcagcgcgctctgcccggcttcctcagtctcctcgccgggagcgtccgggagcagctccga

SEQ ID NO: 504940 - DNA, 120 bp, Artificial Sequence
  ENSG00000164002_17 (sequence is synthesized)
ggccgcggcgaaaccagggagcagggattggatcaagtcattgcatctagagtacgggggaacgaagaaatcatggagagagtttgccccaggagagaggcgagcgttatgtaacctagg

SEQ ID NO: 504941 - DNA, 120 bp, Artificial Sequence
  ENSG00000164002_18 (sequence is synthesized)
ggcgaaaccaggtggagtccgaggttcggaggagtatcagaggttaggggaaggccggagaatgggctgggaggctgcgtttcggagcttagggttctgtccctgcgatcgccgcgtctc

SEQ ID NO: 504942 - DNA, 120 bp, Artificial Sequence
  ENSG00000164002_19 (sequence is synthesized)
cctcccttggtgggcgcggctcccgggaagcggctcgtctcgtctcccctcacaggccgggttcccgttctggaccttcgccctcggaacacagtgctgttggccgggactccttcccga

SEQ ID NO: 504943 - DNA, 120 bp, Artificial Sequence
  ENSG00000164002_20 (sequence is synthesized)
ggtggacggctccctgttcttattcctggctctgccagaactgtaggaagtgctcagtacactttagggcatgcatggcactccctgggagacagtgctttagggccagaggaaagatct

SEQ ID NO: 504944 - DNA, 120 bp, Artificial Sequence
  ENSG00000164002_21 (sequence is synthesized)
tccctgaaggcaaacgcccgcggagcccacaagtccgggccgcactgaacaagtcaggatgttgccatcggcaattctgcagaaggcagtaacccatctgagagaaagagccgctgtcat

SEQ ID NO: 504945 - DNA, 120 bp, Artificial Sequence
  ENSG00000164002_22 (sequence is synthesized)
tgtgagaggagaaaacacccaacgtgagggaatggtcaggtaagaaaggaccagaagttccggttctaccatagcaaggacctaagttgctaatttaggttctttaatgcagacctggtc

SEQ ID NO: 504946 - DNA, 120 bp, Artificial Sequence
  ENSG00000164002_23 (sequence is synthesized)
cgggccgactgtgtagtccgctccggcagcgcgctctgcccggcttcctcagtctcctcgccgggagcgtccgggagcagctccgaggccgcggcgaaaccagggcccttctagcccaat

SEQ ID NO: 504947 - DNA, 120 bp, Artificial Sequence
  ENSG00000164002_24 (sequence is synthesized)
cgctctgcccggcttcctcagtctcctcgccgggagcgtccgggagcagctccgaggccgcggcgaaaccaggtggagtccgagggcccttctagcccaatccagagctgtaccatggca

SEQ ID NO: 504948 - DNA, 120 bp, Artificial Sequence
  ENSG00000164007_0 (sequence is synthesized)
actgcctttgctccagccgctgccgccgcaccacctctccttctctgcctctgaccctccttctcgctgctccccctgcccagctgctcctcccacctggccatgaccaaagcccctgct

SEQ ID NO: 504949 - DNA, 120 bp, Artificial Sequence
  ENSG00000164007_1 (sequence is synthesized)
ggcaccctggcccagctctgagtcctgggaccctcggtcctctctcctgggccatggccaactcaggcctccagctcctgggctacttcttggccctgggtggctgggtgggcatcattg

SEQ ID NO: 504950 - DNA, 120 bp, Artificial Sequence
  ENSG00000164007_2 (sequence is synthesized)
ctagcacagccctgccacagtggaagcagtcttcctacgcaggcgacgccatcatcactgccgtgggcctctatgaagggctctggatgtcctgcgcctcccagagcactgggcaagtgc

SEQ ID NO: 504951 - DNA, 120 bp, Artificial Sequence
  ENSG00000164007_3 (sequence is synthesized)
agtgcaagctctacgactcgctgctcgccctggacggtcacatccaatcagcgcgggccctgatggtggtggccgtgctcctgggcttcgtggccatggtcctcagcgtagttggcatga

SEQ ID NO: 504952 - DNA, 120 bp, Artificial Sequence
  ENSG00000164007_4 (sequence is synthesized)
agtgtacgcgggtgggagacagcaaccccattgccaagggccgtgttgccatcgccgggggagccctcttcatcctggcaggcctctgcactttgactgctgtctcgtggtatgccaccc

SEQ ID NO: 504953 - DNA, 120 bp, Artificial Sequence
  ENSG00000164007_5 (sequence is synthesized)
tggtgacccaggagttcttcaacccaagcacacctgtcaatgccaggtatgaatttggcccagccctgttcgtgggctgggcctcagctggcctggccgtgctgggcggctccttcctct

SEQ ID NO: 504954 - DNA, 120 bp, Artificial Sequence
  ENSG00000164007_6 (sequence is synthesized)
gctgcacatgcccggagccagagagacccaacagcagcccacagccctatcggcctggaccctctgctgctgcccgagaaccagttgttaaattgcccgcctccgccaagggccccctgg

SEQ ID NO: 504955 - DNA, 120 bp, Artificial Sequence
  ENSG00000164007_7 (sequence is synthesized)
gtgtgtaatgtccagtccccagccaggctctgtcccctgccatacctagactgtgtgtttcatatttttttggaaagagaagtgaacatccagccccaatcatggtatcattcggtctgt

SEQ ID NO: 504956 - DNA, 120 bp, Artificial Sequence
  ENSG00000164007_8 (sequence is synthesized)
cctcagcgtggcttggacggggcctgtgtcagagtggtcagtgctgacccctggggctcttgggcagaaagatgaggagacagaggtccagggtgggttacatagcacatccagggctaa

SEQ ID NO: 504957 - DNA, 120 bp, Artificial Sequence
  ENSG00000164007_9 (sequence is synthesized)
gcaagaaataattcagaggtcctaccctctgtctagggacccccctcccaagcctggccttggccttggcacaaagtcctccttgataggagatcccactcactcctggaggctgcccct

SEQ ID NO: 504958 - DNA, 120 bp, Artificial Sequence
  ENSG00000164007_10 (sequence is synthesized)
gaggcttggcccagctctaggagcagtccccagggtcagggagcccctggtgtggaaagaggccccaaggtagtaaaccctgcccctgttactgtgctccagagacctcctaagggaagg

SEQ ID NO: 504959 - DNA, 120 bp, Artificial Sequence
  ENSG00000164007_11 (sequence is synthesized)
gaaaagggaatgtggggagggcgttaggagcttgcaggcattaggactgtcctgagcaaggtctgcagcccccagctctgctcaccccgaatcctgccccttgtttccacacctaccatt

SEQ ID NO: 504960 - DNA, 120 bp, Artificial Sequence
  ENSG00000164007_12 (sequence is synthesized)
cctcctctcctgatccccagcatccagctgaggtccaaggtctttgtcctagaatcagagtggggaggggacagcctggggctgcccagagactgtgggtggagctgcctgctgcactca

SEQ ID NO: 504961 - DNA, 120 bp, Artificial Sequence
  ENSG00000164007_13 (sequence is synthesized)
gcagtgcggtcagagaagggcttttggtcttgaagtccaggtaccatccccccttagcatacagggggaagggcctgagaggaatgtaaggaaaccagcccagatcagtcccaaggccag

SEQ ID NO: 504962 - DNA, 120 bp, Artificial Sequence
  ENSG00000164007_14 (sequence is synthesized)
agtcctttgtcctacatctccctgaaccagagtgtgccctgcccctcatgctcagacctctcccaccccaaaccctctcccgggactcagtctccctggccactgcgtatcaggcttctg

SEQ ID NO: 504963 - DNA, 120 bp, Artificial Sequence
  ENSG00000164007_15 (sequence is synthesized)
gggaaagcatccatcacagaacctccccttccctgccacgcaccttccttggccagctccattctggcctcctccaccacctgccttgtgaccacatctcccaccacgtccccagatctc

SEQ ID NO: 504964 - DNA, 120 bp, Artificial Sequence
  ENSG00000164007_16 (sequence is synthesized)
aagaacgcagctcagcttctccttcgagcttgactctgagagggaaagtgacggaaaccaagtcagatgagatgactgccatgtacactgcagtcaagggcagggaggggaggaatgaca

SEQ ID NO: 504965 - DNA, 120 bp, Artificial Sequence
  ENSG00000164007_17 (sequence is synthesized)
caaatggcagggagctgctgggggactgacccctcggcgcctggcctggccggtgctgcacatccaccggggcacaacagggacttgtccagcctctggtcagaggatgtggccacctga

SEQ ID NO: 504966 - DNA, 120 bp, Artificial Sequence
  ENSG00000164007_18 (sequence is synthesized)
ccctaaataggttccccagagtcctgcccctctaatgaatgagaactgcaggagtttctcctctgggtgcctgaagctatagtgcaatggttcccaaccctgcatgcacattcgaatcac

SEQ ID NO: 504967 - DNA, 120 bp, Artificial Sequence
  ENSG00000164007_19 (sequence is synthesized)
ctgggggcacaatgcctaggctccaaccccagacactcttatttcattggtctgggtggacctggcatcagaagtcatgtagctcctcaggggactgtagtgtgtggtcagcactgaggg

SEQ ID NO: 504968 - DNA, 120 bp, Artificial Sequence
  ENSG00000164007_20 (sequence is synthesized)
cagcactgagggctcctctatgaggcctcaagcccaggtgactctgtgaggtctgcagagggagaaaagaacccacaagggaagaggtggaggtcaggcacggtggctcacgcttgtaat

SEQ ID NO: 504969 - DNA, 120 bp, Artificial Sequence
  ENSG00000164007_21 (sequence is synthesized)
ggcccccttgcccagcatccagccagcctcgcagcaccctgggcagggccactggggcataggatgggcataggtgctctgagcagcttgtcctcaacacaagcacccaccctgcaatct

SEQ ID NO: 504970 - DNA, 120 bp, Artificial Sequence
  ENSG00000164007_22 (sequence is synthesized)
gagacccagatcctcagagagacaccagaggcaggacccagcccccaggcatacacacagatgcaggtccaggcacggtcttgtctgcacagcctggtgggcaccagcatgcatccctgg

SEQ ID NO: 504971 - DNA, 120 bp, Artificial Sequence
  ENSG00000164007_23 (sequence is synthesized)
agacaggccctcaggcaccagcccggctgtttactcactgaagagctgcttgggtgtctgctacgtgctgggccctagagatagagcagtggccaagacgtaccttagtacccaggtcct

SEQ ID NO: 504972 - DNA, 120 bp, Artificial Sequence
  ENSG00000164007_24 (sequence is synthesized)
tggggtgagcagaaaccttcaccctccccagtcccatgggctcctcacagcaaccccacaagggcagtgccgggatgctgaacgttcacacaaggacagggagggtctgagtttaggtct

SEQ ID NO: 504973 - DNA, 120 bp, Artificial Sequence
  ENSG00000164007_25 (sequence is synthesized)
caggttcttccagtgcgcccagggctgggggccacctacacagatggtgaggtcggaccatggcgcccctgcccccgggaatgggccccaggcagggctgctgtgagggccaaggtctgg

SEQ ID NO: 504974 - DNA, 120 bp, Artificial Sequence
  ENSG00000164007_26 (sequence is synthesized)
ccacgctggccagtacccatgtccgggcctgaatgcacagcccctgcccccgaccccacagctcactccactaaccagctctctctcttttgactttcagaccagttgttaaattgcccg

SEQ ID NO: 504975 - DNA, 120 bp, Artificial Sequence
  ENSG00000164008_0 (sequence is synthesized)
gcctttatgcgcaggctcttcctactcgcacagcccagggagtggggaggataaggcgctgtcatggaggacgccgccgcgccggggcggaccgagggggtccttgaaaggcaaggagcg

SEQ ID NO: 504976 - DNA, 120 bp, Artificial Sequence
  ENSG00000164008_1 (sequence is synthesized)
ccgccagctgcaggccagggaggagccctggtggagctcaccccgacccccggcggcctggccctggtgagcccctaccacacccaccgggccggggaccccttagacctcgtggcgctc

SEQ ID NO: 504977 - DNA, 120 bp, Artificial Sequence
  ENSG00000164008_2 (sequence is synthesized)
gcagagcaggtgcagaaggctgatgaattcatccgagcaaatgccaccaacaagctgacagtcatagctgagcaaatccaacatttgcaagaacaagccaggaaggtactggaagatgct

SEQ ID NO: 504978 - DNA, 120 bp, Artificial Sequence
  ENSG00000164008_3 (sequence is synthesized)
cacagagatgccaacctgcaccatgtagcttgtaatatagtgaaaaaacctggcaacatttactatctctataaacgggagagtggtcagcagtatttttccatcatttctccaaaggaa

SEQ ID NO: 504979 - DNA, 120 bp, Artificial Sequence
  ENSG00000164008_4 (sequence is synthesized)
tgggggacaagttgtccacatgacttccttggtgcctacaaactacagcatgacttgtcctggactccgtatgaggacattgagaagcaagatgctaaaatcagcatgatggacacgttg

SEQ ID NO: 504980 - DNA, 120 bp, Artificial Sequence
  ENSG00000164008_5 (sequence is synthesized)
ctaagccagtcagtggccctgcctccgtgcactgaacccaacttccagggactgactcactgagagtgggctttgacaaacagctctcacaggacctggctgtcaacctccttgttgccc

SEQ ID NO: 504981 - DNA, 120 bp, Artificial Sequence
  ENSG00000164008_6 (sequence is synthesized)
ccactgttgccttgagaattgaagacatgtaggtgactcacaaacttcttggaaagagaccctgtgtgaatgtaaatgctgtcattatgacttttaattgggatgggaataatcattgag

SEQ ID NO: 504982 - DNA, 120 bp, Artificial Sequence
  ENSG00000164008_7 (sequence is synthesized)
acagagtcactgtctttcgggatcctctttggaccacagatacccaagtcagtcagtttcagagtattggccagtgtactttccttcttcctctccatcacttcttcccttaagttaaag

SEQ ID NO: 504983 - DNA, 120 bp, Artificial Sequence
  ENSG00000164008_8 (sequence is synthesized)
tgttagagaagaccttcttcccataaaaaggttggtggatcgttttccagagagaactgttttcagtcttttatatatatatatatatatatataactggtagtatttaacattggggtt

SEQ ID NO: 504984 - DNA, 120 bp, Artificial Sequence
  ENSG00000164008_9 (sequence is synthesized)
atttaacattggggttgaggctgtctcacagttggtgcaactccagtttaaaattcatctgggaacgagaatgttgagtaatggagggtgatttaaaaaacaacaacaacaacaaaaaaa

SEQ ID NO: 504985 - DNA, 120 bp, Artificial Sequence
  ENSG00000164008_10 (sequence is synthesized)
ctggaccagagagtgtgtgattctgggatttctgtgctgttgatgaggtttgtcttgccccttttgctctctctgccttgctagagtgacagaatctgaggcagcaaaggccaggtttgg

SEQ ID NO: 504986 - DNA, 120 bp, Artificial Sequence
  ENSG00000164008_11 (sequence is synthesized)
ggagagtcaactttgaaactcacaaattttagacttggaagagacattggatgctgccactaatcattatagagtccactgtgtagtctcccaagttggaaatcccaggctcagccacct

SEQ ID NO: 504987 - DNA, 120 bp, Artificial Sequence
  ENSG00000164008_12 (sequence is synthesized)
gcagcagaacaaacccatttaaatggctacttaacactgtggaagagagtaaggcagtagagtgagaagcaagaaaaacagccaaattgttgactgtgagttaactcagattgaaatcca

SEQ ID NO: 504988 - DNA, 120 bp, Artificial Sequence
  ENSG00000164008_13 (sequence is synthesized)
ttttgaccagaattattcaagaacttaacagggttttggcaaaattactgtagttcttattctgactaggctcttgtaggactctaccttctttcctatctgtttggtggaattagctaa

SEQ ID NO: 504989 - DNA, 120 bp, Artificial Sequence
  ENSG00000164008_14 (sequence is synthesized)
gtttatggattatttcgcatggctataatctattgcaatatgctgtaaaaggagggagagatgtgtacttgaactgacaattggccaaatttctctctgggaatgatgttcctgatgctg

SEQ ID NO: 504990 - DNA, 120 bp, Artificial Sequence
  ENSG00000164008_15 (sequence is synthesized)
atctgtttggtaataccctccccgggccgccccccgattcatggtctttcctcataaactgcatttcttgtgagctgtaagaggtctacctaaggcctagcacaggatggggctagaatc

SEQ ID NO: 504991 - DNA, 120 bp, Artificial Sequence
  ENSG00000164008_16 (sequence is synthesized)
taacaaactcactccgatgatacttggttgctcggttcacatgggaatgctctttggactcagctgcagaggtcttttgctcaggtgctgcagagccggatggaagagacattagtggta

SEQ ID NO: 504992 - DNA, 120 bp, Artificial Sequence
  ENSG00000164008_17 (sequence is synthesized)
gagtagtggattctgactacagaaagtttcccaggttttcagaaggttctgacctgcatgatgatgacacattttgaataggtgctttattagttacagataaacaaattactgcaaact

SEQ ID NO: 504993 - DNA, 120 bp, Artificial Sequence
  ENSG00000164008_18 (sequence is synthesized)
taatggtttaaagcaacacctatttatttcagagcttacaggttaggagttcaggcaccatttcattgagtcctctgcttcacagtttctctgaaaccctggaaggctgaaatcaagtta

SEQ ID NO: 504994 - DNA, 90 bp, Artificial Sequence
  ENSG00000164008_19 (sequence is synthesized)
ttagcagaatttcttttctttcgtattgccaggcctgagtacagtggctcaatctcagcttaccgcaacctccgcctcctggttcaagtg

SEQ ID NO: 504995 - DNA, 120 bp, Artificial Sequence
  ENSG00000164008_20 (sequence is synthesized)
cacctgcctcagcctcccacagtgctggcgtttgagccaccatacctggcctgttggcagaatttcaattccacaagggttgctggcttccggggttccactagctgactgttggctgga

SEQ ID NO: 504996 - DNA, 120 bp, Artificial Sequence
  ENSG00000164008_21 (sequence is synthesized)
tggaggttgccctcacttccttgccacacgagcctctataacatggcagctttcttaagcaaagtaaacaaggattagagtctgctagccagatggaagttacagtctcatgtagtctga

SEQ ID NO: 504997 - DNA, 120 bp, Artificial Sequence
  ENSG00000164008_22 (sequence is synthesized)
tcacagaagtgacatttcatcacctttgccgtaatcttttggttggaagcaagtcactaggctagcccatattcaagggagggagttatacaaaggcatgtataccagaaggcagacatc

SEQ ID NO: 504998 - DNA, 120 bp, Artificial Sequence
  ENSG00000164008_23 (sequence is synthesized)
attgaatcattgaacagatcctagaatctatctgccacagtgctcagttgagaagaagaaaggaaaattctaggtaaaaaaggcaatattactaagtggttaagtgtgatgatgtcaaag

SEQ ID NO: 504999 - DNA, 120 bp, Artificial Sequence
  ENSG00000164008_24 (sequence is synthesized)
tcacagatctgcacttgactgtcaactctgacaagacagcctcccagctggcatccctgcttccccctctgtcccctctccaatccattctgcatgcagtcatcagcttgatcatttgaa

SEQ ID NO: 505000 - DNA, 120 bp, Artificial Sequence
  ENSG00000164008_25 (sequence is synthesized)
aatgccaaatctccctcactcttgacatttcctaacctaaagagtgggagagtagtgattgaaaagagagaaactgccttctgttcagtaagatgtactccctgcactgaccaccaaggg

SEQ ID NO: 505001 - DNA, 120 bp, Artificial Sequence
  ENSG00000164008_26 (sequence is synthesized)
gtgtcattgctctttcctggttaagccagttaccacacttgggaagggctagtggcaatgtgaggtgatttggggcacctcagaatgggaaactaggacccagtgattatatacagtaat

SEQ ID NO: 505002 - DNA, 120 bp, Artificial Sequence
  ENSG00000164008_27 (sequence is synthesized)
cacttttcatttacccatccatctgttcacctgataatttcattagtgttaagtgccttctaggttccaggttctggtgaataatggagctgaataagaaatcacaatttccagggagct

SEQ ID NO: 505003 - DNA, 120 bp, Artificial Sequence
  ENSG00000164008_28 (sequence is synthesized)
cacagtatagtagggaaggaaacaagttaacaattacaagatgctctaagaaggggtgtgatagaggtacgcatggaatactatggagctccggggaggggttccttactgagcttggag

SEQ ID NO: 505004 - DNA, 120 bp, Artificial Sequence
  ENSG00000164008_29 (sequence is synthesized)
aatttgggaagacacttggaggagctgatgcctgcttggtgttgaaaaccatacaagttagaactttctggaggctccaattgccctttcataggaagtttgtcttttgggggttggggt

SEQ ID NO: 505005 - DNA, 120 bp, Artificial Sequence
  ENSG00000164008_30 (sequence is synthesized)
agggttcatttttggatggagtttatttgtgaatgaagaaagtgacaaccatttaagccatatcaaccaaagcagtcctggcaatgaggaggggtggagtgagatatgtcctggctagaa

SEQ ID NO: 505006 - DNA, 120 bp, Artificial Sequence
  ENSG00000164008_31 (sequence is synthesized)
aatccttgtgtttaaaagctaggagatagttgaagacagggaggaaaaaacattccagacaaaaaataacatggaagggacattgaccagaattgacacgacatttggggaatcgcagcc

SEQ ID NO: 505007 - DNA, 120 bp, Artificial Sequence
  ENSG00000164008_32 (sequence is synthesized)
agttaaacaggagaatatggactggggaatatgagagaagaactaatggaaggatttggggaggctggtaatattggcagcagagtttgggtagagggaagacaggagattccatcccta

SEQ ID NO: 505008 - DNA, 120 bp, Artificial Sequence
  ENSG00000164008_33 (sequence is synthesized)
atcaaggcaagggatgatgggagtctgaattaagcagtagtagaatgagagggcctgtatttcaccaattacaaggtgtacttcccccccccccccccccacattttggtgtctgtcaaa

SEQ ID NO: 505009 - DNA, 120 bp, Artificial Sequence
  ENSG00000164008_34 (sequence is synthesized)
gtgtctgtcaaacttggacacttctaaaagtcaatggcatgtcacagtttaagtggcattttttctttcttagagctacataaaagaatcataacaagctgggcgcagtggctcacgcct

SEQ ID NO: 505010 - DNA, 120 bp, Artificial Sequence
  ENSG00000164008_35 (sequence is synthesized)
atctcaaaaaaaaaaaaaaaagaatcataacatagcatcttacatttgatgaagcatggcacattgaaagtacaatcgattgccatcttgttaataaaatgtcagagggattagaggaaa

SEQ ID NO: 505011 - DNA, 79 bp, Artificial Sequence
  ENSG00000164008_36 (sequence is synthesized)
aaaattagccgggcatggtggcagacgcccgtaattccagctactcatgaggctgaggctggagattgtgccacttcac

SEQ ID NO: 505012 - DNA, 120 bp, Artificial Sequence
  ENSG00000164008_37 (sequence is synthesized)
gcaggaggaaaaatggattggttggaggagaggatatattcagtatatttggtagcaggagagagaaagagagaaggcatgctggagaaccaaagaagttcagtgtaactgcagttcata

SEQ ID NO: 505013 - DNA, 120 bp, Artificial Sequence
  ENSG00000164008_38 (sequence is synthesized)
gcgaaggggtggaaagctatgggaaatagaagagagcacttaactctgtggcgtggagtcatgtcagggtggccttctcatgacagtgctatctgagtggggcctcggatgagtgggagg

SEQ ID NO: 505014 - DNA, 120 bp, Artificial Sequence
  ENSG00000164008_39 (sequence is synthesized)
gaatgggaaaaatattttaggcagaagcaaaatattaacataaccctgggatcaagataagaacatcatagaagtcttttcctctttcaacccacagtttagttttttctcacctgtagg

SEQ ID NO: 505015 - DNA, 120 bp, Artificial Sequence
  ENSG00000164010_0 (sequence is synthesized)
cagagagagccctggcctctcatatttcataaaatatgaacttttcccggcccacatccctaggccttcctgatgcgcttgcctgctccctggtctctctgcatggggaaggagtgttcc

SEQ ID NO: 505016 - DNA, 120 bp, Artificial Sequence
  ENSG00000164010_1 (sequence is synthesized)
cagcttgcaaactccagctttgcctgtgagaggaacaagcgtccctgatccagaaggtgttcggatggagatggcgagttctgctggctcctggctctctggctgcctcatccctctcgt

SEQ ID NO: 505017 - DNA, 120 bp, Artificial Sequence
  ENSG00000164010_2 (sequence is synthesized)
cttcctccggctgtctgtgcatgtgtcaggccacgcaggggatgccggcaagttccacgtggccctactagggggcacagccgagctgctctgccctctctccctctggcccgggacggt

SEQ ID NO: 505018 - DNA, 120 bp, Artificial Sequence
  ENSG00000164010_3 (sequence is synthesized)
acccaaggaggtgaggtggctgcggtccccattcccgcagcgctcccaggctgttcacatattccgggatgggaaggaccaggatgaagatctgatgccggaatataaggggaggacggt

SEQ ID NO: 505019 - DNA, 120 bp, Artificial Sequence
  ENSG00000164010_4 (sequence is synthesized)
gctagtgagagatgcccaagagggaagtgtcactctgcagatccttgacgtgcgccttgaggaccaagggtcttaccgatgtctgatccaagttggaaatctgagtaaagaggacaccgt

SEQ ID NO: 505020 - DNA, 120 bp, Artificial Sequence
  ENSG00000164010_5 (sequence is synthesized)
gatcctgcaggttgcagccccatctgtggggagtctctccccctcagcagtggctctggctgtgatcctgcctgtcctggtacttctcatcatggtgtgcctttgccttatctggaagca

SEQ ID NO: 505021 - DNA, 120 bp, Artificial Sequence
  ENSG00000164010_6 (sequence is synthesized)
aagaagagcaaaagaaaagcttctctatgaacatgtgacggaggtggacaatcttctttcagaccatgctaaagaaaaaggaaaactccataaagctgtcaagaaactccggagtgaact

SEQ ID NO: 505022 - DNA, 120 bp, Artificial Sequence
  ENSG00000164010_7 (sequence is synthesized)
gaagttgaaaagagctgcagcaaactcaggctggagaagagcccggttgcattttgtggcagtgaccctggacccagacacagcacatcccaaactcatcctttctgaggaccaaagatg

SEQ ID NO: 505023 - DNA, 120 bp, Artificial Sequence
  ENSG00000164010_8 (sequence is synthesized)
tgtaaggcttggagacagacggcagcctgtacctgacaacccccagagatttgatttcgttgtcagcatcctaggctctgagtacttcacgactggctgccactactgggaggtgtatgt

SEQ ID NO: 505024 - DNA, 120 bp, Artificial Sequence
  ENSG00000164010_9 (sequence is synthesized)
gggagacaagaccaaatggattcttggagtatgtagtgagtcagtgagcaggaaggggaaggttactgcctcacctgccaatggacactggcttctgcgacagagtcgtgggaatgagta

SEQ ID NO: 505025 - DNA, 120 bp, Artificial Sequence
  ENSG00000164010_10 (sequence is synthesized)
tgaagctctcacatccccgcagacctccttccgccttaaagagcctccacggtgtgtggggattttcctggactatgaagcaggagtcatctctttctacaatgtgaccaacaagtccca

SEQ ID NO: 505026 - DNA, 120 bp, Artificial Sequence
  ENSG00000164010_11 (sequence is synthesized)
catctttactttcacccacaatttctctggcccccttcgccctttctttgaaccttgccttcatgatggaggaaaaaacacagcacctctagtcatttgttcagaactacacaaatcaga

SEQ ID NO: 505027 - DNA, 120 bp, Artificial Sequence
  ENSG00000164010_12 (sequence is synthesized)
ggaatcaattgtccccaggccagaagggaaaggccatgctaatggagatgtgtccctcaaggtgaactcttctttactacccccgaaggccccagagctgaaggatataatcctgtcctt

SEQ ID NO: 505028 - DNA, 120 bp, Artificial Sequence
  ENSG00000164010_13 (sequence is synthesized)
gccccctgaccttggcccagcccttcaggagctcaaggctccttctttttagggatatgccacattacctgctcccatcaccatccagcccagcaccctggacttcagtcgcctggccca

SEQ ID NO: 505029 - DNA, 120 bp, Artificial Sequence
  ENSG00000164010_14 (sequence is synthesized)
ttatggaacgtctcttcaccttaacccaaatccagacccttttgtggtttctatttgtaccacttttctcccaggcctcagttctgaagcttacctttcttctaaggaattgaagctccc

SEQ ID NO: 505030 - DNA, 120 bp, Artificial Sequence
  ENSG00000164010_15 (sequence is synthesized)
agtgacctggagggaggattcctggaaaccaaacaatcagtttaggtgcaggtggagatgttgaatatgtgttaccaagatacagcacaggttcagggaaaagagttcgctactccaggg

SEQ ID NO: 505031 - DNA, 120 bp, Artificial Sequence
  ENSG00000164010_16 (sequence is synthesized)
gttatttagaagacactttctctgcctcatcctgccctcaagctttagtcaagaagttatggcccccagtccctgacttcttacttatcccattgaggactgcctttctctctctcagtt

SEQ ID NO: 505032 - DNA, 120 bp, Artificial Sequence
  ENSG00000164010_17 (sequence is synthesized)
ctggcctctgccccccaaagtcagctctctaaaagcaagcatgttttagaccactcactctttccctctttcttcaggaatgaattgggaaaggctgatgagtaaaacataccatccttt

SEQ ID NO: 505033 - DNA, 120 bp, Artificial Sequence
  ENSG00000164010_18 (sequence is synthesized)
tctattttcttgatgctgtttacaacatagtttggtgatatccagagctaatgtacatgctttcaaaagctaatctgcctgttgatggtaactaggtacagcgactttaaatacagttgc

SEQ ID NO: 505034 - DNA, 120 bp, Artificial Sequence
  ENSG00000164010_19 (sequence is synthesized)
tataatcctgaaaagccccaggagcacatcagggagctgggaaacacagttgcagagaactcagctgtatgttgccctctgaccttggcccagaccttcagaggctcagtctgttgagtc

SEQ ID NO: 505035 - DNA, 120 bp, Artificial Sequence
  ENSG00000164010_20 (sequence is synthesized)
tgttgtgactgtcttatgaatcaatctgttgtgccaaccctttctgagattcagagaggtccagctagaaaaagtggcagttttaaccaccaacgtagaagcttttttttccccacaaga

SEQ ID NO: 505036 - DNA, 120 bp, Artificial Sequence
  ENSG00000164010_21 (sequence is synthesized)
ccattgtactgcaatacttgagtatttgtgtagcaaacagcctcttaggttggagagtattgatttcaaataggaagttggtagactaggtgtgaggatgaaataatgaccttgattttt

SEQ ID NO: 505037 - DNA, 120 bp, Artificial Sequence
  ENSG00000164010_22 (sequence is synthesized)
gggtgtgtattgcagaagcctcgtcgctttcaagtcacatcatatatgcgatctggcctaaccatggagatattggttatcagtttgcagatgaatacacagttctatccaacagaaact

SEQ ID NO: 505038 - DNA, 120 bp, Artificial Sequence
  ENSG00000164010_23 (sequence is synthesized)
gtatctttctgtttgtcagaagttctccgttagttcctgtattagtcaaggttttccagagaaacagaatcaatatatattggggcaggggggcggtggttattataaggaattggctca

SEQ ID NO: 505039 - DNA, 120 bp, Artificial Sequence
  ENSG00000164010_24 (sequence is synthesized)
cgtgattatggaggcggttaaatcccaagatctgcaggataagtcagcaagatggagtcccatgagagctgatggtttagttccagtctgatggcagcaggcttgacgccaaggaagaga

SEQ ID NO: 505040 - DNA, 120 bp, Artificial Sequence
  ENSG00000164010_25 (sequence is synthesized)
tgatgtttaattcaagtccgaaggcaaggaaaaagctgatggtcctgtccaaaggctattaggcaggaagaattctcttagggcagagttagctcttttgttctattcaggccttcaact

SEQ ID NO: 505041 - DNA, 120 bp, Artificial Sequence
  ENSG00000164010_26 (sequence is synthesized)
gattcagcaaggcccgcccacatttgggaggacagtctgcattactcagtctactgatttgaatgttaatgtcattgagaaacaccctcacaggaacactcagaataatgtttgaccaaa

SEQ ID NO: 505042 - DNA, 120 bp, Artificial Sequence
  ENSG00000164010_27 (sequence is synthesized)
tagctgggcatcttgtgacccagttaagtggatacataagattaactatcacagtgactcagtggaattttttgtttgcttttgtacagttttaaaataaaagtttggtatttgtgtttt

SEQ ID NO: 505043 - DNA, 120 bp, Artificial Sequence
  ENSG00000164010_28 (sequence is synthesized)
ctcttccctctcctggaggaaaatggcggtcgctggagccgccgaccaagaggcttgggagtctgtacctttcccgaccgggccactggaagttggagcctccgccgagtcgcagacaac

SEQ ID NO: 505044 - DNA, 120 bp, Artificial Sequence
  ENSG00000164010_29 (sequence is synthesized)
gcctccgggaggctactaggttttagagggtgagatccgaatcctggaattggaattgctcagaattcgaattccgaggctcaatttcttaattcgaaaagtggggattgatgattgcca

SEQ ID NO: 505045 - DNA, 120 bp, Artificial Sequence
  ENSG00000164010_30 (sequence is synthesized)
tacagagaacattcacgttcaactgattaccgaggagatgtaaattaaaatagctggctgtaattttccaggccttcctgatgcgcttgcctgctccctggtctctctgcatggggaagg

SEQ ID NO: 505046 - DNA, 120 bp, Artificial Sequence
  ENSG00000164010_31 (sequence is synthesized)
agtgttcccagcttgcaaactccagctttgcctgtgagaggaacaagcgtccctgatccagaagttcggatggagatggcgagttctgctggctcctggctctctggctgcctcatccct

SEQ ID NO: 505047 - DNA, 120 bp, Artificial Sequence
  ENSG00000164010_32 (sequence is synthesized)
gaaactgttggtagatttatataatggtctactatatagcagtgaatgaatatcctagtgctctgtgaaacaacctggattaatttcagtgtcttaatttgtacacccccagaacagagt

SEQ ID NO: 505048 - DNA, 120 bp, Artificial Sequence
  ENSG00000164010_33 (sequence is synthesized)
gtgaggtgtgagacaagtacttcagttcaagagtgtatttaggaggtaatcccaggaagcagaaatgggaatgagcaaaaaaggaagaaaagtcaataaaaggtgcagtacggagctact

SEQ ID NO: 505049 - DNA, 120 bp, Artificial Sequence
  ENSG00000164010_34 (sequence is synthesized)
ctatgaaccaccgtgctcactcccattgggaacactcagaggaatcatgtcgaatacagctcagagctgaaggccttcctgatgcgcttgcctgctccctggtctctctgcatggggaag

SEQ ID NO: 505050 - DNA, 120 bp, Artificial Sequence
  ENSG00000164010_35 (sequence is synthesized)
ggagggacctcactgccttgatctgttatttatcaagagtcaaactggaaaaggctgtcagggaaacctccaggctgcatcttgggcaaagattggcttgaaacaggcatttcccaagcc

SEQ ID NO: 505051 - DNA, 120 bp, Artificial Sequence
  ENSG00000164010_36 (sequence is synthesized)
tggccttggacaccaactgtaaaaaaaaggccattactggtgtttccttggttagttctgggtataagttctggatcctcactcatctcatctgcactgacatcctcactcacggcattt

SEQ ID NO: 505052 - DNA, 120 bp, Artificial Sequence
  ENSG00000164010_37 (sequence is synthesized)
agagacttaacacgccagcctctgtgtgagcatttacctctttcaaccctcaccataatcccacaaggaggcacagttcttttacccattttgaagatgaagaaacacagtctcagagaa

SEQ ID NO: 505053 - DNA, 120 bp, Artificial Sequence
  ENSG00000164010_38 (sequence is synthesized)
gttcggtcacagtatcacaaggaggtaagtagcagagctgggattggagccccggcctttgtgatcccagagcaccagcaataccgtctcggcctcggctcctgggttataccctctgtc

SEQ ID NO: 505054 - DNA, 120 bp, Artificial Sequence
  ENSG00000164010_39 (sequence is synthesized)
ctgtctgtgcatgtgtcaggtaggagtttctgatcctctttccctgcctggtacatgtgatattggcgtccccagaataaggaagcttggctggaaacattatgtcttttggggttctgt

SEQ ID NO: 505055 - DNA, 120 bp, Artificial Sequence
  ENSG00000164010_40 (sequence is synthesized)
tcccccggccctggcaatcctttccagagtccttcctgggctctgtccgtccccgggatatcctcttcctcatcccttcccaagctttctcctgccgtccctcccagttggccttgtctc

SEQ ID NO: 505056 - DNA, 120 bp, Artificial Sequence
  ENSG00000164010_41 (sequence is synthesized)
gaaaatggcggtcgctggagccgccgaccaagaggcttgggagtctgtacctttcccgaccgggccactggaagttggagcctccgccgagtcgcagacaacgcctccgggagggagtgt

SEQ ID NO: 505057 - DNA, 120 bp, Artificial Sequence
  ENSG00000164010_42 (sequence is synthesized)
ttcacttcctggggcagaagggagggggtactggtaattcaagccatggggactggggctttcttggctctcaaaggcctcttttctcaagtattctctgctcctctttcctgcacaact

SEQ ID NO: 505058 - DNA, 120 bp, Artificial Sequence
  ENSG00000164010_43 (sequence is synthesized)
attatttagtctttaaatgaaaaacgtttcaccaggaagagatagatgcatctcccataggtgaagccatctggaagtcccttttatcacccaggcatgacatttccttagatggggtcc

SEQ ID NO: 505059 - DNA, 120 bp, Artificial Sequence
  ENSG00000164010_44 (sequence is synthesized)
aggaggacaggatccttattaaactgaatatgctggagcagtacttctccatcatttcatgtgtgaggacctctttttaacattaaaaaaaaatctggccaggtgcagtggctcatgcct

SEQ ID NO: 505060 - DNA, 120 bp, Artificial Sequence
  ENSG00000164010_45 (sequence is synthesized)
gagcgaaactccatctcaaaataaaaataaaaataaatctgtagacatgtgacatatctatgcattaattattacattgagaaaatatacatgatcacaaagtccaatactcagtgatag

SEQ ID NO: 505061 - DNA, 120 bp, Artificial Sequence
  ENSG00000164011_0 (sequence is synthesized)
cgctgtccctgatcgagcggcgggagcgagggcctggacgtagtgtcttcaacagttgtaacagcagctgccatttgctgaatgacagcatgtgtcacacactctgctgagtattacagg

SEQ ID NO: 505062 - DNA, 120 bp, Artificial Sequence
  ENSG00000164011_1 (sequence is synthesized)
catttttttctaatacaaagtcttgtagtgtggaaatacttgcagacttgaaggaattatcagtctttcattttctatcatcagtgtcctatgatagtttgtgcttccctccctcatccc

SEQ ID NO: 505063 - DNA, 120 bp, Artificial Sequence
  ENSG00000164011_2 (sequence is synthesized)
tttgttcatgtcactctgttcaccaacccactctgctgaaatgtcgttatttcttcaaggcccggaggaaatgctaccactctcatcagagggttcagagatgggcagtgagaaggagca

SEQ ID NO: 505064 - DNA, 120 bp, Artificial Sequence
  ENSG00000164011_3 (sequence is synthesized)
gagtccagaaccacacctgcctgaggaaggggaagggggtaagccttggagagtggatgactcagagggttcttggatcccacctggggagaaggagcatgggcaagagagcctgtcgga

SEQ ID NO: 505065 - DNA, 120 bp, Artificial Sequence
  ENSG00000164011_4 (sequence is synthesized)
tgaactgcaagaaactcatccaaaaaagccatggcagaaagtcactgtccgggctcgagagctaggggaccccattgctcatccaaggcatgaggcagatgagaagccctttatatgtgc

SEQ ID NO: 505066 - DNA, 120 bp, Artificial Sequence
  ENSG00000164011_5 (sequence is synthesized)
ccagtgtggcaaaaccttcaataatacctccaacctgagaacacaccagcggatccacactggtgagaagccttacaagtgttctgaatgtggcaagagcttctcgagaagctccaaccg

SEQ ID NO: 505067 - DNA, 120 bp, Artificial Sequence
  ENSG00000164011_6 (sequence is synthesized)
catccggcacgagcggatccacctggaagagaaacactacaaatgccccaagtgccaggagagctttcggcggcgctcagacctcaccacgcaccagcaagatcacctaggcaagcggcc

SEQ ID NO: 505068 - DNA, 120 bp, Artificial Sequence
  ENSG00000164011_7 (sequence is synthesized)
accggacccacctggagccagcaccctacatctgctgtgagtgtgggaagagcttcagcaacagctccagctttggcgtgcatcaccgcacccacacaggtgagagaccttatgagtgca

SEQ ID NO: 505069 - DNA, 120 bp, Artificial Sequence
  ENSG00000164011_8 (sequence is synthesized)
ctgagtgtgggcggaccttcagcgatatctccaactttggagcacaccagcggacccacagaggggagaagccctaccggtgcactgtgtgtgggaaacacttctcccggagctcgaatc

SEQ ID NO: 505070 - DNA, 120 bp, Artificial Sequence
  ENSG00000164011_9 (sequence is synthesized)
tcatccgccaccagaaaactcacttgggcgaacaggctgggaaagattccagctgaaggagagccccatttagagtgagggagagagagtgagagaccctaacctattggaggaagatct

SEQ ID NO: 505071 - DNA, 120 bp, Artificial Sequence
  ENSG00000164011_10 (sequence is synthesized)
tcagcatcttttgctgctaccttgacctcaagcccttcatcccactttggagaatggttttgtatagcctctgaagtcaggatctcaggaagtcctgaggagggactctggaataaaaac

SEQ ID NO: 505072 - DNA, 120 bp, Artificial Sequence
  ENSG00000164011_11 (sequence is synthesized)
ccttgcctctttccaggccaatttctcgtgttggaaagtcagaagacccagtcttggctttactttcttggggtgaaagagaaatagggtaggctcagaacatgctcatgttattaaggc

SEQ ID NO: 505073 - DNA, 120 bp, Artificial Sequence
  ENSG00000164011_12 (sequence is synthesized)
agcagtccccctggcctttgaggaagtacttatgagatgggtgtcactgtctgaaggttctccaaattgtctgtgaactgcttaggtaggagtgcactgcagtttcctgctagttcccac

SEQ ID NO: 505074 - DNA, 120 bp, Artificial Sequence
  ENSG00000164011_13 (sequence is synthesized)
ctgttgtgccccaactttgcttctagatctctggggtgggaggagtgaccttctcaatggaaggggcctccttggtctggagaagagatctgaggtcccaccttagaaatgaaagggaaa

SEQ ID NO: 505075 - DNA, 120 bp, Artificial Sequence
  ENSG00000164011_14 (sequence is synthesized)
ccctcagggagccatgacccagggaccttcacactcccccatgtttgttacttgttatccctcccccaacctgcctctgttttccccagagtgattagcagtaaaacccttcaatgaaaa

SEQ ID NO: 505076 - DNA, 120 bp, Artificial Sequence
  ENSG00000164022_0 (sequence is synthesized)
agtgacagagcgattactaagcctacggttcccaaacgactcaggtgaacctgatttacaggaaaggcgggctgtagctagggatggagacagtacctatcagcaagcggctccacagct

SEQ ID NO: 505077 - DNA, 120 bp, Artificial Sequence
  ENSG00000164022_1 (sequence is synthesized)
cggttctctatctattctgaagacatgcggggccactcactgctcctgatagtcctctacctcccacagaccccacccactacgacacggaaaactggattacccaaatacctgcctctg

SEQ ID NO: 505078 - DNA, 120 bp, Artificial Sequence
  ENSG00000164022_2 (sequence is synthesized)
agtctggggacgcaggcaagcacaaagacaagggggatggagcttctacacagggccccagcgctgtcgctgtggctgctgctgccgctacggcttagtgcaccagacgctgcatttcag

SEQ ID NO: 505079 - DNA, 120 bp, Artificial Sequence
  ENSG00000164022_3 (sequence is synthesized)
gtgctcctacaaaagaggccactcctggaacgccgggagctcagacgctgccctttgctcgcgagccaagtcagccaaggttaaccttcgcggaacccggcgaggagcgcaagcctggcc

SEQ ID NO: 505080 - DNA, 120 bp, Artificial Sequence
  ENSG00000164022_4 (sequence is synthesized)
ttccccaaacacagatccgagcttttcaccctctaccctcccctcagcctggccttttcttccgccctcacagccaccgcgacccaacgctgaggaaagaccccgacttgtggtgtcctt

SEQ ID NO: 505081 - DNA, 120 bp, Artificial Sequence
  ENSG00000164022_5 (sequence is synthesized)
ccccttgcccaaactggccacgaaaggacatatagcgagagagaaagaggattttctgccgtctcttggcaaaaatggcaaataatgatgctgttctgaagagactggagcagaagggtg

SEQ ID NO: 505082 - DNA, 120 bp, Artificial Sequence
  ENSG00000164022_6 (sequence is synthesized)
cagaggcagatcaaatcattgaatatcttaagcagcaagtttctctacttaaggagaaagcaattttgcaggcaactttgagggaagagaagaaacttcgagttgaaaatgctaaactga

SEQ ID NO: 505083 - DNA, 120 bp, Artificial Sequence
  ENSG00000164022_7 (sequence is synthesized)
agaaagaaattgaagaactgaaacaagagctaattcaggcagaaattcaaaatggagtgaagcaaataccatttccatctggtactccactgcacgctaattctatggtttctgaaaatg

SEQ ID NO: 505084 - DNA, 120 bp, Artificial Sequence
  ENSG00000164022_8 (sequence is synthesized)
tgatacagtctacagcagtaacaaccgtatcttctggtaccaaagaacagataaaaggaggaacaggagacgaaaagaaagcgaaagagaaaattgaaaagaaaggagagaagaaggaga

SEQ ID NO: 505085 - DNA, 120 bp, Artificial Sequence
  ENSG00000164022_9 (sequence is synthesized)
aaaaacagcaatcaatagctggaagtgccgactctaagccaatagatgtttcccgtctggatcttcgaattggttgcatcataactgctagaaaacaccctgatgcagattctttgtatg

SEQ ID NO: 505086 - DNA, 120 bp, Artificial Sequence
  ENSG00000164022_10 (sequence is synthesized)
atgtcggagaaatagccccaaggacagttgtcagtggcctggtgaatcatgttcctcttgaacagatgcaaaatcggatggtgattttactttgtaacctgaaacctgcaaagatgaggg

SEQ ID NO: 505087 - DNA, 120 bp, Artificial Sequence
  ENSG00000164022_11 (sequence is synthesized)
gagtattatctcaagcaatggtcatgtgtgctagttcaccagagaaaattgaaatcttggctcctccaaatgggtctgttcctggagacagaattacttttgatgctttcccaggagagc

SEQ ID NO: 505088 - DNA, 120 bp, Artificial Sequence
  ENSG00000164022_12 (sequence is synthesized)
ctgacaaggagctgaatcctaagaagaagatttgggagcagatccagcctgatcttcacactaatgatgagtgtgtggctacatacaaaggagttccctttgaggtgaaagggaagggag

SEQ ID NO: 505089 - DNA, 120 bp, Artificial Sequence
  ENSG00000164022_13 (sequence is synthesized)
tatgtagggctcaaaccatgagcaacagtggaatcaaataaaatgcttccactaccaaaagacattagagaaaaccttaaaagtaataaagagaaatatatttgtcacttatacctaaaa

SEQ ID NO: 505090 - DNA, 120 bp, Artificial Sequence
  ENSG00000164022_14 (sequence is synthesized)
tatgagtggctcatttttgcattactctcttctagacttgactagtcatttacttggtatatattgttttcattgattggggaaacactagatttttacctcggtttttgatcatttata

SEQ ID NO: 505091 - DNA, 120 bp, Artificial Sequence
  ENSG00000164022_15 (sequence is synthesized)
atggagagaggaagttgcctatgttttgtaataatttattttttagcaggaatattgattagcagcttttttttctttatacacatagataactaactagattaatgtttagtttcttat

SEQ ID NO: 505092 - DNA, 120 bp, Artificial Sequence
  ENSG00000164022_16 (sequence is synthesized)
ttgtaggcacaggatgcatgaaatttcaagctctgggattttttgtatattgtgtatctgtatcaaaaatatcctctccttttcaaaaatgacaggttggaaaatgtttgtcagacttat

SEQ ID NO: 505093 - DNA, 120 bp, Artificial Sequence
  ENSG00000164022_17 (sequence is synthesized)
taactggtcatattataataatactgataatgaccaactgctcattctgaaagccaaacataaaagctaggagaagtggcatctgaacatttttgctttgctgccagagtaaccctgact

SEQ ID NO: 505094 - DNA, 120 bp, Artificial Sequence
  ENSG00000164022_18 (sequence is synthesized)
aataatacaataacagcaatttttttaaaaaactgagatttcctactggcttgaagtttttctatttagcaaaataattagtaataagttttgactaggtctaaagaatgaacacattgt

SEQ ID NO: 505095 - DNA, 120 bp, Artificial Sequence
  ENSG00000164022_19 (sequence is synthesized)
aaacagttgccacagtagtttctaataaattgatcataaaagcagctatcctttttttttttaattctagcttctttttaaagattatttgggtacctaataaaggataatttatatctt

SEQ ID NO: 505096 - DNA, 120 bp, Artificial Sequence
  ENSG00000164022_20 (sequence is synthesized)
tgatattttgctttttcatgtgtcatcatactgtcagtatattaaaagaaattacagcctaaaacttaacatataccatacatatatattaaggtgtcaaatagctattctcactcatct

SEQ ID NO: 505097 - DNA, 120 bp, Artificial Sequence
  ENSG00000164022_21 (sequence is synthesized)
tacaaatattgtaagagcaataaaaattaattgaggaattataagcctacaggtcatcagccttgaggtgattactgatgatttgggcttacacacatgtcagcaagatagggagtgtgg

SEQ ID NO: 505098 - DNA, 120 bp, Artificial Sequence
  ENSG00000164022_22 (sequence is synthesized)
ataggggagggctggtagctaacaaggggcctcacagagaaatattagtgactttaaccaggtttcagaatctgggccttacctttacaggttcaacaaaagaatggcatcaatagaggc

SEQ ID NO: 505099 - DNA, 120 bp, Artificial Sequence
  ENSG00000164022_23 (sequence is synthesized)
agaagtatagacattgttttaaaaatacacacatgcacacacacacaaaacattttagcattatagctgtctgaatccttcaataagaaggagaggcacacacaaatacacacactcaca

SEQ ID NO: 505100 - DNA, 120 bp, Artificial Sequence
  ENSG00000164022_24 (sequence is synthesized)
caaaactcaacaaccataaaacaaccctgcatgttataaaaggcagaattaaattttatttatttaaatccatggaactctggtaggccaggatatattatagtaccattatcaatgtga

SEQ ID NO: 505101 - DNA, 120 bp, Artificial Sequence
  ENSG00000164022_25 (sequence is synthesized)
tattctgaaaatatgaactgagcgtcattaacaattgttggtacctaaacacaaaatgaatttcaaaagttactttgttctcaagatatgtcattcttttgggaataaatacttctggtg

SEQ ID NO: 505102 - DNA, 120 bp, Artificial Sequence
  ENSG00000164022_26 (sequence is synthesized)
gtcctttctcactgctatagtacgcgggtggctggacctacatgcttcctgctgtggctgtctcggaacccgtggtcctccgcttcatgattttctgccgtctcttggcaaaaatggcaa

SEQ ID NO: 505103 - DNA, 120 bp, Artificial Sequence
  ENSG00000164022_27 (sequence is synthesized)
actttctcctactgctcaagggggtgttacactttgacgactgactaaacctcgagggccagaaacaaaccaaagcaaaattctgcctccaaggattttctgccgtctcttggcaaaaat

SEQ ID NO: 505104 - DNA, 77 bp, Artificial Sequence
  ENSG00000164022_28 (sequence is synthesized)
gtggtcctccgcttcattctgccgagttcctgggattgcaggaagtgaggagcgtctttgcctggccgcccatcgtc

SEQ ID NO: 505105 - DNA, 79 bp, Artificial Sequence
  ENSG00000164022_29 (sequence is synthesized)
tcttcccggccgtcatcctctgggatgtggggagcatctctgccccgtcgccccgtctgagatgtgaagagcgcctctg

SEQ ID NO: 505106 - DNA, 83 bp, Artificial Sequence
  ENSG00000164022_30 (sequence is synthesized)
gcttcctgctgtggctgtctcggaacccgtggtcctccgcttcattctgccgagttcctgggattgcaggtgcgcgccgccac

SEQ ID NO: 505107 - DNA, 120 bp, Artificial Sequence
  ENSG00000164022_31 (sequence is synthesized)
tgaaatactgtaccccagatcaaattatctaatgttttgttagtgaaacctaaactgatgattaaatcgttcatcaaacctagagataataaaaactattggtcttttgttaaaagccca

SEQ ID NO: 505108 - DNA, 72 bp, Artificial Sequence
  ENSG00000164022_32 (sequence is synthesized)
ttcctgctgtggctgtctcggaacccgtggtcctccgcttcatccgaggctggactgtactgccaccatctg

SEQ ID NO: 505109 - DNA, 120 bp, Artificial Sequence
  ENSG00000164022_33 (sequence is synthesized)
caacagggagtagtaaagtgtctgtctgtcttacttaaagacattcacatcagttatttccaacactgttagccctggaaaagaaagctatccctgaactttgtcaggctagtttgtgat

SEQ ID NO: 505110 - DNA, 120 bp, Artificial Sequence
  ENSG00000164022_34 (sequence is synthesized)
ccctagaaaagattagtgattaagaccaaaccctgaagaacagcatcattaatgggacagattaaaaaaaaaaggagccctgaaaggaggtgacaaggaagtaggaggtgaaatcaggta

SEQ ID NO: 505111 - DNA, 120 bp, Artificial Sequence
  ENSG00000164022_35 (sequence is synthesized)
ggtgacaaggaagtaggaggtgaaatcaggtacaagtaattttttaaattaagaaaagtatagccctctccctctccctctccctctccgcaccgtctccctctgatgccgagccgaggc

SEQ ID NO: 505112 - DNA, 120 bp, Artificial Sequence
  ENSG00000164022_36 (sequence is synthesized)
gtggtcctccgcttcatgtgagtgacgtcgtggcgggtcactcactcggggatcgccgattgcgatcgtaggggtcttccttctctaacttgcctccaggagagaggacctggcctgcgc

SEQ ID NO: 505113 - DNA, 120 bp, Artificial Sequence
  ENSG00000164022_37 (sequence is synthesized)
tgctaatgggtagtccgttcgcagcaggaccagccctggcctaaggaaacaggaaagagtttgagacttccttctaaaggagccacgtttgagaaatgggatgcaggcctaagttaagaa

SEQ ID NO: 505114 - DNA, 120 bp, Artificial Sequence
  ENSG00000164022_38 (sequence is synthesized)
tgctacagaaaaatatcgatccctaagcgtatttactgttatgtgaatgtgtgtgtcaaaggacttaggtgctttgggggagaggagggtgaagacaggaatttattcattgagcgaata

SEQ ID NO: 505115 - DNA, 120 bp, Artificial Sequence
  ENSG00000164022_39 (sequence is synthesized)
gttattaagcgcccactctattccagacaccgttctaggcattaggtgaacagcagtgaacaaaacagacggaaatctgtgtctacttgtagctcacattttagagaggaaggcacatac

SEQ ID NO: 505116 - DNA, 120 bp, Artificial Sequence
  ENSG00000164022_40 (sequence is synthesized)
taagcaaagtaattagaaacatactgtattttaggtcgtgatagtcctgaagagaaacgtaaagcagggaagaagggtataaagtgacacaggaaggtcttgctgaaaagatgactttta

SEQ ID NO: 505117 - DNA, 120 bp, Artificial Sequence
  ENSG00000164022_41 (sequence is synthesized)
agtaaagggctgacagaagtgggagatttaaccacgcgaatatcttgggaaagtgcagtcagacagagggaccagccattgcagaggtcatgaagcagaaacgtgctagaatagcaagga

SEQ ID NO: 505118 - DNA, 120 bp, Artificial Sequence
  ENSG00000164022_42 (sequence is synthesized)
ggcctgtagggcagagttgagtgaagggtttagtccttcactggagattaaatcaaggcgagcaggtcatgaagatcttgaggacatctaacttttattctaaatgaaataggactttgg

SEQ ID NO: 505119 - DNA, 120 bp, Artificial Sequence
  ENSG00000164022_43 (sequence is synthesized)
agcgttttgagcagtagagtgatgggctctgacttccttttaagagggtcactctttaaggaaaatacacagaggaggacgtggtaggagaaaggagaccaataagaagagttttgcaat

SEQ ID NO: 505120 - DNA, 120 bp, Artificial Sequence
  ENSG00000164022_44 (sequence is synthesized)
aatccagaggaagcataatggtggtttgactatgggtggtaagaaatggccagttatattcttgatgcacttaatttggatatgtaagagtattatagatgacagggttaattttattta

SEQ ID NO: 505121 - DNA, 120 bp, Artificial Sequence
  ENSG00000164022_45 (sequence is synthesized)
attaggctttggaggacacttgaaaaatgaattccagtgtgagtttcagagtggcaaacacaagttaaaatcatggctttgctatgtggtacttgaagggattcagataagtcatgtaat

SEQ ID NO: 505122 - DNA, 120 bp, Artificial Sequence
  ENSG00000164022_46 (sequence is synthesized)
tttcctggatctgtctataaaatggaaatcacatctgtcaagattgcaaaggttagggtatattataggtatttaatgacaaggtatgtaatgggtctagtctgcaaatcttaaccaggt

SEQ ID NO: 505123 - DNA, 120 bp, Artificial Sequence
  ENSG00000164022_47 (sequence is synthesized)
aaaagatggccttattgtgaggtaagagggtcatgggaggccaaggcatactcctttttaaattttatggactctgtactggggaggaaagtttttgtgttaatgacgatggtatttaga

SEQ ID NO: 505124 - DNA, 120 bp, Artificial Sequence
  ENSG00000164022_48 (sequence is synthesized)
aatgcatggactggcctctcatagctgtccaccctatagtcattccttatagccatcctttaaaccctccaggaccccctatgtcctcatcagtaaagggaaagcaggctgtctggtaag

SEQ ID NO: 505125 - DNA, 120 bp, Artificial Sequence
  ENSG00000164022_49 (sequence is synthesized)
ggaaataggaacttccataaaaaagcaattttagatattctttttataggttttggcaaaggttgataaaagacctagggaattactgctggttgctgcgcttacatattttgagtgtct

SEQ ID NO: 505126 - DNA, 120 bp, Artificial Sequence
  ENSG00000164022_50 (sequence is synthesized)
tcagatgcattgttctcagtgtatttaattttcttctttaaattctgacttttgacacatatgatttaaatcctagcaggaattttcacctagtgctaaaaggtaccacattgctttaca

SEQ ID NO: 505127 - DNA, 120 bp, Artificial Sequence
  ENSG00000164022_51 (sequence is synthesized)
ctataataaggacggtctttcagtgtggggtattttatgtatactataatatttttacatatccagtaattagattgtgtagcaaatcagggaaagaagttggaaggcaagaataggaat

SEQ ID NO: 505128 - DNA, 120 bp, Artificial Sequence
  ENSG00000164022_52 (sequence is synthesized)
gaagggaggagaagaaaggaagaaaatgattaaaattactatattccatcaattctgagatacacatttttctcttacttaacatctctgaaatagggatgtatttttaagttgttgaca

SEQ ID NO: 505129 - DNA, 120 bp, Artificial Sequence
  ENSG00000164022_53 (sequence is synthesized)
tctttaaatcactgtagatgaattggcagttgtgagatatttgtcattgcccacacttacacccacttagtcataacttaatcttgtcattatttcagttgagttatatatgcactattg

SEQ ID NO: 505130 - DNA, 120 bp, Artificial Sequence
  ENSG00000164022_54 (sequence is synthesized)
gcatatagttgttgagtgtaatttcccttttaaagatcatttagaagattatgattagcattagaatgaaaagttactgtgtatgtggggaaacaaagggtgatacaagataaaaatcca

SEQ ID NO: 505131 - DNA, 120 bp, Artificial Sequence
  ENSG00000164022_55 (sequence is synthesized)
gggttaaatttaaaagaagtctgtcaataaataatataggatgtgtctaagtaataagaaagcattgggtcagttgattcaatagtgttttttttcataatgtacataaaataatagagc

SEQ ID NO: 505132 - DNA, 120 bp, Artificial Sequence
  ENSG00000164022_56 (sequence is synthesized)
ttcttgggattgaagccattttacaattgatggcattttagatttcttgtatagtatttaaagcttccaacaaaaatgtaaatttttacctactgtaattctgaaatagggaaattagag

SEQ ID NO: 505133 - DNA, 120 bp, Artificial Sequence
  ENSG00000164022_57 (sequence is synthesized)
tgagtagagacactttcaaatttgtgtagcgttcctatatagcataagaattctaaaattaaaagtctgcctgtaaaactttgatttcaaagtagtaacttacttatgtttgattcccaa

SEQ ID NO: 505134 - DNA, 120 bp, Artificial Sequence
  ENSG00000164022_58 (sequence is synthesized)
tgttgtcatcgtggggcagagattttgctttttcaaaaagattgcaggcaatttagatggtgtgggtggggaggactactgaggaaattgctcagtaaacaaaaatgatagtgaagatct

SEQ ID NO: 505135 - DNA, 120 bp, Artificial Sequence
  ENSG00000164022_59 (sequence is synthesized)
cagaatctcaaaaatcatcttttgtgtgtgtattttaatgattaagatgtactataaattcatgtacagtatttgggattctgcattagaggcatcgtatgattaatggctttttaggtt

SEQ ID NO: 505136 - DNA, 120 bp, Artificial Sequence
  ENSG00000164022_60 (sequence is synthesized)
tgatgaagtatgataattaacattgagaaggacaaaattaatgtgaagggacagaatgatttagataatatgtttcaaaagcttttgtcctaaaaaatgcattattaccattttaattta

SEQ ID NO: 505137 - DNA, 120 bp, Artificial Sequence
  ENSG00000164022_61 (sequence is synthesized)
gtaaaggaaaaagaaaaggtcttgatcctcaccaaacacaattaacatacttggtctacagttttctgtgcttctctcttcataaatgttttatattttcaattactgtgcatgtcattc

SEQ ID NO: 505138 - DNA, 120 bp, Artificial Sequence
  ENSG00000164022_62 (sequence is synthesized)
ttatatctattttaatctcacagtcttaatttttttacattttagtccagagacttaaactagcatttcctaaactgttttagagaatactagttcaaataaatgttaatagctgttcct

SEQ ID NO: 505139 - DNA, 120 bp, Artificial Sequence
  ENSG00000164022_63 (sequence is synthesized)
gtgttaggattctgtcattaaatatattggaaaatgcttcgtaattatatcctttagagaaattatagctagagcattaaaagagctaactgcagcatcagacagacctgagtttcaatc

SEQ ID NO: 505140 - DNA, 120 bp, Artificial Sequence
  ENSG00000164022_64 (sequence is synthesized)
ctcgtttactatgtattacatgaggcaaattaattttaattcaagttttcttctctgtataatggagattattacagtattcgaaattgacttgtgtaaagcatttagccagccatagcg

SEQ ID NO: 505141 - DNA, 120 bp, Artificial Sequence
  ENSG00000164022_65 (sequence is synthesized)
catgttctacaaatatatgtagttgttattatcatctatgagaaactttatacatattagaaactctgaggatttaaaattttgaaggttgacttatactcaatgtaaaattgaaaaatc

SEQ ID NO: 505142 - DNA, 120 bp, Artificial Sequence
  ENSG00000164022_66 (sequence is synthesized)
acaggggagtaattagcatagagattaatgaaatgagcactgggttgaatggtaaaagatttgtttgagctttaagcagtattgttgttaaactatcactgtgccctaagcgtaacatta

SEQ ID NO: 505143 - DNA, 120 bp, Artificial Sequence
  ENSG00000164022_67 (sequence is synthesized)
ttttaaaaatgtcttcaactgtgtttcccccatttgtctgaaagcttagttagttcaaagaacatgtttatttttgttctctactataaacccagcacatgacacaaaatcagggagtgt

SEQ ID NO: 505144 - DNA, 120 bp, Artificial Sequence
  ENSG00000164023_0 (sequence is synthesized)
agctaccttataaagaccatctgtacatccactgtgaaatggagtttcaaaatcacaagcttctttcccacatgaacataagactaggagcacatatggaagagtaaagttgaagggaat

SEQ ID NO: 505145 - DNA, 120 bp, Artificial Sequence
  ENSG00000164023_1 (sequence is synthesized)
ttggatgatgatttggcaagatgctgtgggatagtaacatctttttgagggaagaattggcttcctttcttgaaagtggtgaaggtacagcatatagctgcatggaagaaacagtaatcg

SEQ ID NO: 505146 - DNA, 120 bp, Artificial Sequence
  ENSG00000164023_2 (sequence is synthesized)
gatggctaccttctacattttgtattaggaaacaaagtccattgtaagagtccatgttgatcttggaaatagaaggattgaaaaaagctaaatttccacaaagaacaagaacttgaccat

SEQ ID NO: 505147 - DNA, 120 bp, Artificial Sequence
  ENSG00000164023_3 (sequence is synthesized)
ctcctttttgatctgaagactaggggacaatggatatcatagagacagcaaaacttgaagaacatttggaaaatcaacccagtgatcctacgaacacttatgcaagacccgctgaacctg

SEQ ID NO: 505148 - DNA, 120 bp, Artificial Sequence
  ENSG00000164023_4 (sequence is synthesized)
ttgaagaagaaaacaaaaatggcaatggtaaacccaagagcttatccagtgggctgcgaaaaggcaccaaaaagtacccggactatatccaaattgctatgcccactgaatcaaggaaca

SEQ ID NO: 505149 - DNA, 120 bp, Artificial Sequence
  ENSG00000164023_5 (sequence is synthesized)
aatttccactagagtggtggaaaacgggcattgccttcatatatgcagttttcaacctcgtcttgacaaccgtcatgatcacagttgtacatgagagggtccctcccaaggagcttagcc

SEQ ID NO: 505150 - DNA, 120 bp, Artificial Sequence
  ENSG00000164023_6 (sequence is synthesized)
ctccactcccagacaagttttttgattacattgatagggtgaaatgggcattttctgtatcagaaataaatgggattatattagttggattatggatcacccagtggctgtttctgagat

SEQ ID NO: 505151 - DNA, 120 bp, Artificial Sequence
  ENSG00000164023_7 (sequence is synthesized)
ctgtgcctggaatgcatttccagtgtgctccaaagctcaatggagactctcaggcaaaagttcaacggattctacgattgatttctggtggtggattgtccataactggatcacatatct

SEQ ID NO: 505152 - DNA, 120 bp, Artificial Sequence
  ENSG00000164023_8 (sequence is synthesized)
tatgtggagacttcctcttcagcggtcacacggttacgctgacactgacttatttgttcatcaaagaatattcgcctcgtcacttctggtggtatcatttaatctgctggctgctgagtg

SEQ ID NO: 505153 - DNA, 120 bp, Artificial Sequence
  ENSG00000164023_9 (sequence is synthesized)
ctgccgggatcatctgcattcttgtagcacacgaacactacactatcgatgtgatcattgcttattatatcacaacacgactgttttggtggtaccattcaatggccaatgaaaagaact

SEQ ID NO: 505154 - DNA, 120 bp, Artificial Sequence
  ENSG00000164023_10 (sequence is synthesized)
tgaaggtctcttcacagactaatttcttatctcgagcatggtggttccccatcttttatttttttgagaaaaatgtacaaggctcaattccttgctgcttctcctggccgctgtcttggc

SEQ ID NO: 505155 - DNA, 120 bp, Artificial Sequence
  ENSG00000164023_11 (sequence is synthesized)
ctcctggctgcttcaaatcatcatgcaaaaagtattcacgggttcagaagattggtgaagacaatgagaaatcgacctgaggagcaaaacaaaggcatcagctcttacaccaaaagagtt

SEQ ID NO: 505156 - DNA, 120 bp, Artificial Sequence
  ENSG00000164023_12 (sequence is synthesized)
aacgctgtaaccaaaggtatagttttgttttttattttaggagaactgactggtaaatgaagaaatggaccaaattttgtgtaaacgattagaaagatgaacaaagtattgccctttgac

SEQ ID NO: 505157 - DNA, 120 bp, Artificial Sequence
  ENSG00000164023_13 (sequence is synthesized)
tggttttcttcttcatcctgagaaagatacattctcttgcagctcttcattcattggtgacaagcccccaccccgggactttactaatgagcttgttaaagaggtgccaaagaacatatt

SEQ ID NO: 505158 - DNA, 120 bp, Artificial Sequence
  ENSG00000164023_14 (sequence is synthesized)
cctcctttctttattctttctccaccaaaaccctctacttcagaattttttcaggatatttttcagcccaaggtcagaagaatgtgttaatattttaaataaaatatctggacatctaca

SEQ ID NO: 505159 - DNA, 120 bp, Artificial Sequence
  ENSG00000164023_15 (sequence is synthesized)
agattgatctctgttgccgctcagggaggtcagctccaggccctcagcctttcggccgggagccaaactgccctgcctgccaagcccctccttctctgcaccttaaacagccgcgagggg

SEQ ID NO: 505160 - DNA, 120 bp, Artificial Sequence
  ENSG00000164023_16 (sequence is synthesized)
agagtcggctgggattttcttcttaagaagtcgcgcaggtttttcgagctccactctgcgccaggagagccacggcagcaggaacgggcactgctgccaccgggccgacggagctgcatc

SEQ ID NO: 505161 - DNA, 120 bp, Artificial Sequence
  ENSG00000164023_17 (sequence is synthesized)
ttgggtgaattttgtttctaccctgtcacggggaaagttcgggttgagtccaggagtgcacactgctgctgccacccaatgcgctacatatcacttttttttgttttgttttgttttgtt

SEQ ID NO: 505162 - DNA, 120 bp, Artificial Sequence
  ENSG00000164023_18 (sequence is synthesized)
atcttaaaaaggaaagctgatccaagtaaacacgaaagtatttgacacaccccacagattttacatgtgtgtaaatgtttcactttaaaatctctatgacagatacacaggaaacatgag

SEQ ID NO: 505163 - DNA, 120 bp, Artificial Sequence
  ENSG00000164023_19 (sequence is synthesized)
atggtttctgctaatgagtggcccttgagtacacacttagatgctgtctgccctgtaaatttggatctggtgccccagggcagtcaactcttctagcacaggctgaaaacacgtgtgtgt

SEQ ID NO: 505164 - DNA, 120 bp, Artificial Sequence
  ENSG00000164023_20 (sequence is synthesized)
caactgaggttcacaccacttggggaatgagcctgttttctttccaggtcaggccctggtgtgagatcaattttagggctcctaattggagcacagaaatgtatttggtcaaatttcatt

SEQ ID NO: 505165 - DNA, 120 bp, Artificial Sequence
  ENSG00000164023_21 (sequence is synthesized)
gaaggtgatttcttcctttttctgttgtactttatggaaaaaccaagatggaacctgaaagttaatgtatccttgcttttagcaagagactcagtttcttataactagtcctaaggacat

SEQ ID NO: 505166 - DNA, 120 bp, Artificial Sequence
  ENSG00000164023_22 (sequence is synthesized)
atgccgcaattgagtaattttacttttaccctatgaaaataacatggtgctgcactataatatactctcggaatcagtgtgttagttacagctatacagtgaagggggataactgtttct

SEQ ID NO: 505167 - DNA, 120 bp, Artificial Sequence
  ENSG00000164023_23 (sequence is synthesized)
aaatttctttaaggtgatgccaaaaaatggattaaaaaatctgatcagatttaatgttaccagatttagtgcattatttaatgctattggatcttttggataattcttggcttaatttct

SEQ ID NO: 505168 - DNA, 120 bp, Artificial Sequence
  ENSG00000164023_24 (sequence is synthesized)
tttaaaaccttagaaaagttttaaggttgcaaagttatcaacactggggcagagggtggagaggccaatgcgggtagaaggaggcagttatgtttatattgaaggtgaaatttttctttc

SEQ ID NO: 505169 - DNA, 120 bp, Artificial Sequence
  ENSG00000164023_25 (sequence is synthesized)
atttagaatggaaaacatccccaaatgtatcattataaactagtcagccttgactacacaaaattgacctttaagttgcttgagaaaaacacaatgcaaatcgttcagaagggtcaacat

SEQ ID NO: 505170 - DNA, 120 bp, Artificial Sequence
  ENSG00000164023_26 (sequence is synthesized)
cctttggtgctaaaatcttgtgtatgttttcagaatggctttttctgtatgttatagaataatcactaaaggaaaggtagttgaatttaaagtcatgaagcaagactctttaattcagtt

SEQ ID NO: 505171 - DNA, 120 bp, Artificial Sequence
  ENSG00000164023_27 (sequence is synthesized)
attttaaacaagaattaaaaccccaaacatccttggcaggctttgaagcacacagaattttctagtatttcttattaaatacaccaataataaacatatacttagtttacctgatgagtt

SEQ ID NO: 505172 - DNA, 120 bp, Artificial Sequence
  ENSG00000164023_28 (sequence is synthesized)
tagacataattctatataatgttcgcttatattcatttattaactagcaacacttgtgcaagaacaaggtattctgcttgaaaacactgatttttaagttcctgttgcccgattgtaaag

SEQ ID NO: 505173 - DNA, 120 bp, Artificial Sequence
  ENSG00000164023_29 (sequence is synthesized)
aaaatcatctgacacagaagcctggattttgctctcctaacactggtgttttccttgagcctctaattcaaataaaacaaactgatacaccttacagccttattcatctgtgtctggata

SEQ ID NO: 505174 - DNA, 120 bp, Artificial Sequence
  ENSG00000164023_30 (sequence is synthesized)
actcacttttcatctattgaataagaaaaagtgtttaaacttaataaaataaaaaattgtgcaccaattactacagatccttgaaacagtaagccttggattttagtcaagtaatccagt

SEQ ID NO: 505175 - DNA, 120 bp, Artificial Sequence
  ENSG00000164023_31 (sequence is synthesized)
ttttttttaatttaaaaaaaaccatcaccttttaaagaactttaaaaacacctgtgatgccaatgtggacattgccgctgccatgtctttacacgcatgtgtcgtatagctctgtcatcg

SEQ ID NO: 505176 - DNA, 120 bp, Artificial Sequence
  ENSG00000164023_32 (sequence is synthesized)
agttgaggaagtccatggtttgcaaataagggtgggggaatcaaaatttcaagatggaaaaataaaacaaatagtaaaacccatttacatgtaggaaagaaaagttgagcttcaacccaa

SEQ ID NO: 505177 - DNA, 120 bp, Artificial Sequence
  ENSG00000164023_33 (sequence is synthesized)
tgtgccactttgatataaaacaagtatgatatatatataaactgaagatataaaacaagtatgatcttgcctttgaaatcataaatgtttggggtacctgttctttgccagttaagatac

SEQ ID NO: 505178 - DNA, 120 bp, Artificial Sequence
  ENSG00000164023_34 (sequence is synthesized)
atatcttattatctttgtttttttcaagtctatgctcctgtttgaagcttttcctgtaatttaggttgtctgtgaaatacctataacatataattcctatagagtatgccacattttttt

SEQ ID NO: 505179 - DNA, 120 bp, Artificial Sequence
  ENSG00000164023_35 (sequence is synthesized)
tctaactcatttcaaatgaaattctctcagattctagtttttgagcttgtccactagatctgaaaataaagcatcctttcctgagtccacttgaactaattgtgaatttgttacttaatt

SEQ ID NO: 505180 - DNA, 120 bp, Artificial Sequence
  ENSG00000164023_36 (sequence is synthesized)
tactggcatcttgggaaacaagttttgctgtggcaggaaggctgttttgagagtgagcgttgagtctactctggtttgtggatgacattgcattagggttatttcctgtattaccagtgc

SEQ ID NO: 505181 - DNA, 120 bp, Artificial Sequence
  ENSG00000164023_37 (sequence is synthesized)
ccccttgtggcaatatactttatgacttggaatgcaaacaccacttttaaaagcctgttttcaagtttttgaaaggcatttgttttctgttgtttgccaataatctgaaagtatcatgtg

SEQ ID NO: 505182 - DNA, 120 bp, Artificial Sequence
  ENSG00000164023_38 (sequence is synthesized)
aaaggaattattttaaaagcattttaaacctttcccaaaggtaaaatgtgctcagattataggcacttgtaattctaaccttgtatccatttgatcaaagaaaatttgtagaacattttt

SEQ ID NO: 505183 - DNA, 120 bp, Artificial Sequence
  ENSG00000164023_39 (sequence is synthesized)
acctctcatgatcacaatcattagtgtctccctttataacgacctatgttttgtttactttgaaacaccaaatttgttgtcttggttttttttacatgacagaactcatgcagtttcttt

SEQ ID NO: 505184 - DNA, 120 bp, Artificial Sequence
  ENSG00000164023_40 (sequence is synthesized)
tttagttgaaagttcacatcttgccccttgaatagtttgaacatttctttcttaattcttttttgtttttgttttgcactgtaaaactgatgaaaactttaagccaatcttaatgcacta

SEQ ID NO: 505185 - DNA, 120 bp, Artificial Sequence
  ENSG00000164023_41 (sequence is synthesized)
gcctctgtagtgtaaggaagtgtgagaaggagtttcttaatgagtttacacgtttaaatcaagcatattataagttatatgccatgtgttgaaggcttttctatttatatatataaagat

SEQ ID NO: 505186 - DNA, 120 bp, Artificial Sequence
  ENSG00000164023_42 (sequence is synthesized)
ttttagtatttgtttttagtgtccttgtgttgcaataatttaactcctttgactcagttgctgaaaatatttcttctattaagaagtgctcttgacttcaacacccaaacactgaaaatc

SEQ ID NO: 505187 - DNA, 120 bp, Artificial Sequence
  ENSG00000164023_43 (sequence is synthesized)
atgtcaatgttacccaaagataagtttttatacagatacacaccttataagttctgatttattttcttactcattatgctgtgttctaaataaatcatgaatgagaagagtgctttattg

SEQ ID NO: 505188 - DNA, 120 bp, Artificial Sequence
  ENSG00000164023_44 (sequence is synthesized)
tgaaattatttaaaactgtcctttaaaagaaaaagaggaaacgatgaacaaaaactaatctaattgccaagttagaattcattatttaatttacctcctatgcaatgattaatgctgcaa

SEQ ID NO: 505189 - DNA, 120 bp, Artificial Sequence
  ENSG00000164023_45 (sequence is synthesized)
aatgtatggttatgttaccgtatattcacaaaagaaatattattacaaggtttcagaggtagccaattgcattcttttggaaatttactgtactgtttcaatgtgttaagtgccttgttg

SEQ ID NO: 505190 - DNA, 120 bp, Artificial Sequence
  ENSG00000164023_46 (sequence is synthesized)
ccttgttgtaaagtaaaattttaagtctagattcattattttcctgacatatatttttcattatgatatctactgtatgctattgtgatagttttatgaaatgcttacattttaatcaaa

SEQ ID NO: 505191 - DNA, 120 bp, Artificial Sequence
  ENSG00000164023_47 (sequence is synthesized)
tttcagaagctcttttttcctacccaccagtaccttaatcattggtttatcacattggattcaaattcaggttccttttttgataaagaggaaatttgttttccatgcttgtgattttgt

SEQ ID NO: 505192 - DNA, 120 bp, Artificial Sequence
  ENSG00000164023_48 (sequence is synthesized)
gtttgtaaacatttcaggaggaatttaggagtgtaactatagtttatacttctataatgttgtcttacatttacatttttaagtgcctaattgttaaaactgatttatgtttctcttcta

SEQ ID NO: 505193 - DNA, 120 bp, Artificial Sequence
  ENSG00000164023_49 (sequence is synthesized)
aagaggatatgtgtacttggtttctaatctctttggttttgctttttaaaaaatgcaagagcctatactttgtatttacctaataaaccacagtgacatcaacagtcttttcaaaattaa

SEQ ID NO: 505194 - DNA, 120 bp, Artificial Sequence
  ENSG00000164023_50 (sequence is synthesized)
aggcaaggctgctaaagagagacaggaaatggctgtgttagtgcttcggacctccgttagaagtagcagttcatggtgttgaaggtttgttgttgaaaataccttcctgaggcacctctt

SEQ ID NO: 505195 - DNA, 120 bp, Artificial Sequence
  ENSG00000164023_51 (sequence is synthesized)
cattgtgcttattcttcccacaacattgtgccaagacactgtcaagcctgggcctgtcaaagcctgggatgtcaaaggcctgggtctttctcatcctgctgtaatgtattgatagctggg

SEQ ID NO: 505196 - DNA, 80 bp, Artificial Sequence
  ENSG00000164023_52 (sequence is synthesized)
cgcggtcaacactgagcgccgcgccgtgggccgagtggggcggggagacccagccctcggcgcgcacggagcctggccgg

SEQ ID NO: 505197 - DNA, 120 bp, Artificial Sequence
  ENSG00000164023_53 (sequence is synthesized)
tgctgcagcgccgccgagtgcggcctcgggggcggcggccgcgggagggacccggagagctgcttcccctagtcaggccgcggcgtgggagggcgagaccccgagcaaactttctagcgg

SEQ ID NO: 505198 - DNA, 120 bp, Artificial Sequence
  ENSG00000164023_54 (sequence is synthesized)
gacgcccggggctggtcgcggcggctgcggcagcgggctccatcccctggcaaatccccttcccgggagcaagtgccttcagctgggagtgtctggagccctggccaccagcggagctgc

SEQ ID NO: 505199 - DNA, 120 bp, Artificial Sequence
  ENSG00000164023_55 (sequence is synthesized)
gagcagtgtatccagggagaggactaattacgaggtttgaaaacctcatcaggtggctggtttctgtagcaggactaaaagactgctctcctaaattgagaacagctggggctgtgtgct

SEQ ID NO: 505200 - DNA, 120 bp, Artificial Sequence
  ENSG00000164023_56 (sequence is synthesized)
tttcaaatgccatacaggtttattttcttactgtgtgccatttgggaccaacagagcaacggctagttttaccaagagattatatttgaatgatacctgatttggtatttcatttaaagt

SEQ ID NO: 505201 - DNA, 120 bp, Artificial Sequence
  ENSG00000164023_57 (sequence is synthesized)
gggaatgttttatagtttctattggcaataacagtgtaaaattgctgagaatcaaaatattgctagccacaatgccattccttctgacccccttaccctacacatacccctggagaaata

SEQ ID NO: 505202 - DNA, 120 bp, Artificial Sequence
  ENSG00000164023_58 (sequence is synthesized)
atataaatttaaaacctgaaattactcctgctttcccatttccccccttattttcatagaccaccaccttttcttttgatccctactatctttctttccagtgggaaagtggctccttta

SEQ ID NO: 505203 - DNA, 120 bp, Artificial Sequence
  ENSG00000164024_0 (sequence is synthesized)
ctcggtgaggcgctcttccagcgggcaggcagcatggcggccgtggagacgcgggtgtgcgagacagacggctgcagcagtgaggccaagctccagtgtcccacttgcatcaagctgggc

SEQ ID NO: 505204 - DNA, 120 bp, Artificial Sequence
  ENSG00000164024_1 (sequence is synthesized)
atccagggctcgtacttctgctcgcaggaatgttttaaaggaagttgggctactcacaagttactacataagaaagcaaaagatgaaaaggcgaagcgagaagtgtcttcctggactgtg

SEQ ID NO: 505205 - DNA, 120 bp, Artificial Sequence
  ENSG00000164024_2 (sequence is synthesized)
gaaggtgatattaatactgacccatgggcaggttatcgatatactggtaaactcagaccacattatccactgatgccaacaaggccagtgccaagttatattcaaagaccagattatgct

SEQ ID NO: 505206 - DNA, 120 bp, Artificial Sequence
  ENSG00000164024_3 (sequence is synthesized)
gatcatcccttaggaatgtctgaatctgaacaggctcttaaaggtacttctcagattaaattactctcatctgaagatatagaagggatgcgacttgtatgtaggcttgctagagaagtt

SEQ ID NO: 505207 - DNA, 120 bp, Artificial Sequence
  ENSG00000164024_4 (sequence is synthesized)
ttggatgttgctgccggcatgattaaaccaggtgtaactactgaagaaatagatcacgctgtacacttagcatgtattgcaagaaattgctacccttctcccctgaattattataatttc

SEQ ID NO: 505208 - DNA, 120 bp, Artificial Sequence
  ENSG00000164024_5 (sequence is synthesized)
ccaaagtcttgttgtacctcagtgaatgaagtcatttgccatggaataccagacagaaggcccttacaagaaggtgacattgttaatgtggatatcactctttatcgcaatggttatcat

SEQ ID NO: 505209 - DNA, 120 bp, Artificial Sequence
  ENSG00000164024_6 (sequence is synthesized)
ggggacctgaatgagacattttttgttggagaagtggatgatggagcacggaaacttgttcagaccacatatgagtgcctgatgcaagccattgatgcagtgaagcctggtgttcggtac

SEQ ID NO: 505210 - DNA, 120 bp, Artificial Sequence
  ENSG00000164024_7 (sequence is synthesized)
agagaattgggaaacattatccagaagcatgcccaagcaaatgggttttcagttgttcgaagctattgtgggcatggaatccacaagctttttcatacagctcccaatgtaccccactat

SEQ ID NO: 505211 - DNA, 120 bp, Artificial Sequence
  ENSG00000164024_8 (sequence is synthesized)
gctaaaaataaagcagttggagtgatgaagtcgggccatgtatttacaattgagccaatgatttgtgaaggcggatggcaggatgaaacctggccagatggttggactgcggtgacaaga

SEQ ID NO: 505212 - DNA, 120 bp, Artificial Sequence
  ENSG00000164024_9 (sequence is synthesized)
gacggaaagcggtctgctcagtttgagcacaccctcctggtcacagacactggctgtgaaatcctaacccggcgacttgacagtgcacggcctcacttcatgtctcaattttaatttctc

SEQ ID NO: 505213 - DNA, 120 bp, Artificial Sequence
  ENSG00000164024_10 (sequence is synthesized)
ccaagatggcacatctcagtaccttcttactgtgctatgcattttattgagagtacagaaaggaagaggaacctttttttaatcacttgttttgttttgactatagataagaaaggacta

SEQ ID NO: 505214 - DNA, 120 bp, Artificial Sequence
  ENSG00000164024_11 (sequence is synthesized)
gctgagaagaataaaggaaacattgctcaactcttcagccccctccccctgcacacctgttttctcatttgccctttgagcacttttacttaaacttgcttgtagttgcttttatcactg

SEQ ID NO: 505215 - DNA, 120 bp, Artificial Sequence
  ENSG00000164024_12 (sequence is synthesized)
ccgcaaaacagccatcaagagccatctgctttccaggtgaacattggaaatgagaatctttgaaacttagcaatatgtgttgcaccagattttttaaattatatatatggaaatatatat

SEQ ID NO: 505216 - DNA, 120 bp, Artificial Sequence
  ENSG00000164024_13 (sequence is synthesized)
gtatacattttaagttctgtatacataattaccaaacactatgtgacctggagtttgtgttgtttctgctctgacaggtttatatgttcttacaaatggatccatagtttgcagtgattt

SEQ ID NO: 505217 - DNA, 120 bp, Artificial Sequence
  ENSG00000164024_14 (sequence is synthesized)
aattcctggttgggatttggcctcccctctcccccatgctaattatttacccttgtaattgtgcatagggaagcactcacccaatgagactttctccaatgtggactctgtgtgtcagtg

SEQ ID NO: 505218 - DNA, 120 bp, Artificial Sequence
  ENSG00000164024_15 (sequence is synthesized)
aatgaatgtagtaaaattcactttggaaggttatcaggcttttaaaaatctagtttatggcaaaaatagccattttccaagtggtggctgactgttgcagggaatgagaatttcataata

SEQ ID NO: 505219 - DNA, 120 bp, Artificial Sequence
  ENSG00000164024_16 (sequence is synthesized)
cactgctatttcagacctctgtttggtcagaaatggaaaagaaaaagccccctttcttcccttttctgttttacttcaagggcataccttggaggtgctcagagaagcgtgaagtttgca

SEQ ID NO: 505220 - DNA, 120 bp, Artificial Sequence
  ENSG00000164024_17 (sequence is synthesized)
ctatggtggaggatggggaaagagttctaaagtgtctccagctgtgaacccaggaggtcaagtgggctattaaaatctaacgttgagtaaatgtgatagtgatgagaaaggaattttgtg

SEQ ID NO: 505221 - DNA, 120 bp, Artificial Sequence
  ENSG00000164024_18 (sequence is synthesized)
tactgtaaccttgcagtagagatgcagctgtccttcgtgtgtggaaacacacctctcctttacatagttgggaacctcattagaaatgacctcagctgccccatatctacgttcctttca

SEQ ID NO: 505222 - DNA, 120 bp, Artificial Sequence
  ENSG00000164024_19 (sequence is synthesized)
gcagttgtccaagtaggagtgtatccagtgaagacatatcaaatcacaaagtcattgtcattagagtgtacttgattactgggcatccttgtaatataatttcataccactgacacatta

SEQ ID NO: 505223 - DNA, 120 bp, Artificial Sequence
  ENSG00000164024_20 (sequence is synthesized)
tacttgtaagagaacatctttcccagagtgcctcagaccttattgctttaaaatataataatgttttcattacttttattatttgaatgatttagtaaagttgactgaatctggtataga

SEQ ID NO: 505224 - DNA, 120 bp, Artificial Sequence
  ENSG00000164024_21 (sequence is synthesized)
ctttgggagtatgtgtgtgaagtttttatcaaactgtaatatttgtgaatggaatgccttgcaatatgaatgttaatataatgtgtaaagggagattaaaaagtttgaatgattatccta

SEQ ID NO: 505225 - DNA, 120 bp, Artificial Sequence
  ENSG00000164024_22 (sequence is synthesized)
acactcttggctatgcgcttgtcacggaactccacccatccctctgtgtagtccttgctgtggtactgcttttttccctcccacggctgctgctgccttctttttgcatctcacaaacca

SEQ ID NO: 505226 - DNA, 120 bp, Artificial Sequence
  ENSG00000164024_23 (sequence is synthesized)
gtcctcagcctgaaagaacgcatctgacctcaccataggcactgagaaggttgcggacatgtaggggctggaagtgtggtgggatatggcccaggtacacaatacctggcactacccgct

SEQ ID NO: 505227 - DNA, 120 bp, Artificial Sequence
  ENSG00000164024_24 (sequence is synthesized)
ctccgtgttgactgacacgagcagcacgacctaatttcattacttctaatgactgcatagattcatttgcatggttaaatcacaatttaacctattttatattgatgtatatctaaattc

SEQ ID NO: 505228 - DNA, 120 bp, Artificial Sequence
  ENSG00000164024_25 (sequence is synthesized)
tactgagacacccagcgaagataggtaatttgcaacacaggaacagggaatgtctgaatctgaacaggctcttaaaggtacttctcagattaaattactctcatctgaagatatagaagg

SEQ ID NO: 505229 - DNA, 120 bp, Artificial Sequence
  ENSG00000164024_26 (sequence is synthesized)
atccagggctcgtacttctgctcgcagcaacgtggaaggaaccagaggctgttattctaagtgaagtaactctggaatggaaaaccaagtaccaggtcgtctcgcttacaagtaggagct

SEQ ID NO: 505230 - DNA, 120 bp, Artificial Sequence
  ENSG00000164024_27 (sequence is synthesized)
tcaagctgggcatccagggctcgtacttctgctcgcaggaatgttttaaaggaagttgggctactcacaagttactacataagaaagcaaagagaaggtgttatgtaatgtcttaaactg

SEQ ID NO: 505231 - DNA, 120 bp, Artificial Sequence
  ENSG00000164024_28 (sequence is synthesized)
gctccaccaaactttgtgaccatgggttattctaagtctcacctccaagatgctggaatcataggtttgtgtgaggattaaataaagaaatccatgagaagtgcttagcatgtgtaccat

SEQ ID NO: 505232 - DNA, 120 bp, Artificial Sequence
  ENSG00000164024_29 (sequence is synthesized)
atcccttagaattttcctggctattcttgcatgtttgtttttccatgtgaaatttagaatcagcttgtctggttctcaaaattatcctgttgacatttttttattgggatagtattaaat

SEQ ID NO: 505233 - DNA, 120 bp, Artificial Sequence
  ENSG00000164024_30 (sequence is synthesized)
gatgttgaaaatgtttttttttaaaaatctaacctagaccatcccaaatcatgaattactgttgtgtgaaacagtgagactactgtttttatgccacaggtttataattatgcaaataaa

SEQ ID NO: 505234 - DNA, 120 bp, Artificial Sequence
  ENSG00000164024_31 (sequence is synthesized)
ggggcctcccttgccctcaggagtccctgaccagggaagatccctccatgctctctgagggtggcggggctccaaagatcctggccaggagtgctttgttggagtgggccttgtcctagg

SEQ ID NO: 505235 - DNA, 120 bp, Artificial Sequence
  ENSG00000164031_0 (sequence is synthesized)
gcccttcttagctgcgctgccggaggaaacggaagaaggagcaagctatggaggggaacagggatgaggctgagaaatgtgtcgagatcgcccgggaggccctgaacgccggcaaccgcg

SEQ ID NO: 505236 - DNA, 120 bp, Artificial Sequence
  ENSG00000164031_1 (sequence is synthesized)
agaaggcccagcgcttcctgcagaaggccgagaagctctacccactgccctcggcccgcgcactattggaaataattatgaaaaatggaagcacggctggaaatagccctcattgccgaa

SEQ ID NO: 505237 - DNA, 120 bp, Artificial Sequence
  ENSG00000164031_2 (sequence is synthesized)
aaccatcaggtagtggcgatcaaagcaagcctaattgcacaaaggacagcacatctggtagtggtgaaggtggaaaaggctataccaaagaccaagtagatggagttctcagcataaaca

SEQ ID NO: 505238 - DNA, 120 bp, Artificial Sequence
  ENSG00000164031_3 (sequence is synthesized)
aatgtaaaaattactatgaagtacttggagttacgaaagatgctggtgatgaagatttgaaaaaagcttatagaaagcttgctttgaagtttcatccagacaaaaaccatgcacctggag

SEQ ID NO: 505239 - DNA, 120 bp, Artificial Sequence
  ENSG00000164031_4 (sequence is synthesized)
caacagatgcttttaaaaagattggaaatgcttatgctgttttaagtaatccagaaaagcgaaaacagtatgacctcacgggcaatgaagaacaagcatgtaaccaccaaaacaatggca

SEQ ID NO: 505240 - DNA, 120 bp, Artificial Sequence
  ENSG00000164031_5 (sequence is synthesized)
gatttaatttccatagaggttgtgaagctgatataactccagaagacttgtttaatatattttttgggggtggatttccttcaggtagtgtacattctttttcaaatggaagagctggtt

SEQ ID NO: 505241 - DNA, 120 bp, Artificial Sequence
  ENSG00000164031_6 (sequence is synthesized)
atagccaacaacatcagcatcgacatagtggacatgaaagagaagaggaaagaggagatggaggtttttctgtgtttatccagctgatgcccataattgtattgatcctcgtgtcattat

SEQ ID NO: 505242 - DNA, 120 bp, Artificial Sequence
  ENSG00000164031_7 (sequence is synthesized)
taagccagttgatggtctctaatcctccttattccttatatcccagatctggaactgggcaaactattaaaatgcaaacagaaaacttgggtgttgtttattatgtcaacaaggacttca

SEQ ID NO: 505243 - DNA, 120 bp, Artificial Sequence
  ENSG00000164031_8 (sequence is synthesized)
aaaatgaatataaaggaatgttattacaaaaggtagaaaagagtgtggaggaagattatgtgactaatattcgaaataactgctggaaagaaagacaacaaaaaacagatatgcagtatg

SEQ ID NO: 505244 - DNA, 120 bp, Artificial Sequence
  ENSG00000164031_9 (sequence is synthesized)
cagcaaaagtataccgtgatgatcgactccgaaggaaggcagatgccttgagcatggacaactgtaaagaattagagcggcttaccagtctttataaaggaggatgaactggaattttta

SEQ ID NO: 505245 - DNA, 120 bp, Artificial Sequence
  ENSG00000164031_10 (sequence is synthesized)
tttataccttttagcgtactctttattttttctgtaagtaagtttggtttcatcatgagggatgaaggaaaagatttgatactgaaaactaaactgaatagttggttcctgaaatcttgg

SEQ ID NO: 505246 - DNA, 120 bp, Artificial Sequence
  ENSG00000164031_11 (sequence is synthesized)
actgtttatgacctactggctcctttaaatagtaactgaaaactaaaatggaatattttagttaacgcttctacaagtattttcattttaaaagcttacatgattcctaactaaagtgtc

SEQ ID NO: 505247 - DNA, 120 bp, Artificial Sequence
  ENSG00000164031_12 (sequence is synthesized)
atgagaaaggattatcacacctgtagcaatttccagttttagtgattctccattttttcccttgtcatgtaaatatttatggaatgatcattttgtgtacatacaggttactgctttttt

SEQ ID NO: 505248 - DNA, 120 bp, Artificial Sequence
  ENSG00000164031_13 (sequence is synthesized)
atttaaattcttttagtgtttagctccatgagacacttcagtttaaattgatggaataaatgttatatgacacatttacattttccttatcaaggtgtcaaatatgtggactttaaacaa

SEQ ID NO: 505249 - DNA, 120 bp, Artificial Sequence
  ENSG00000164031_14 (sequence is synthesized)
tgaaactttttcaaaaagaaaaaacaaaaactttaactttgtgtaaaatcttatagtattatcagcttagagggaattgatatttttaatattgccgttatattccaaaatatatattga

SEQ ID NO: 505250 - DNA, 120 bp, Artificial Sequence
  ENSG00000164031_15 (sequence is synthesized)
gataaatgaactggtgtagaatatcagtttgctatttagttttatgaattactatacatatacatgcatagaaatgaaatgctatactgataaattttaaagaaaatatgaggaaatggc

SEQ ID NO: 505251 - DNA, 120 bp, Artificial Sequence
  ENSG00000164031_16 (sequence is synthesized)
tataaatattaaactaaaagggtcttcaacagtaaagtgcagttatgtcatttaaaattccaatactttaaaggccaccaaattttgatgtatatgtccttgaagggctgctaaaattta

SEQ ID NO: 505252 - DNA, 120 bp, Artificial Sequence
  ENSG00000164031_17 (sequence is synthesized)
tgaagaggactcacattttcccccatagaaatttgcagtttcttggtgatcatttaagcaggatccaaagaagttcctttacaaataagtaataagaaaaatgagtactaaaatacagct

SEQ ID NO: 505253 - DNA, 120 bp, Artificial Sequence
  ENSG00000164031_18 (sequence is synthesized)
ttgtgccttttaaccctatgccaactcctaaacatataagtagattacagtatacttatctgatcagagcatgatctgtttggccacatgcaagtgtgagcagaaatagagcagcacgta

SEQ ID NO: 505254 - DNA, 120 bp, Artificial Sequence
  ENSG00000164031_19 (sequence is synthesized)
gaatagtaacttaaagcaagtcatcctttaaaaattctgagctaaaatctatttaccattgagtaattgaattaatcccataggaataagctccttgtaagtaaatccatgatatgaatt

SEQ ID NO: 505255 - DNA, 120 bp, Artificial Sequence
  ENSG00000164031_20 (sequence is synthesized)
agaaaaaaaaaacagctggaaattgaagtttttgatgcctgtatactggatatgaaactatttgatttctagtcttctgtgtttagcagttgtaatattttaatgattttgcttcatact

SEQ ID NO: 505256 - DNA, 120 bp, Artificial Sequence
  ENSG00000164031_21 (sequence is synthesized)
cggttaatggaacataaacatatctttgatacttctttgtgagtgagagaatgctagatagggtggctttgttctttgtttaagttttttttcctgaatgtagttaatttatggcatctg

SEQ ID NO: 505257 - DNA, 120 bp, Artificial Sequence
  ENSG00000164031_22 (sequence is synthesized)
ttgaataaaactgctaaaatgacctcttaaaaatgttctgttgtatccccttttccaggtgaatcaatagaaatgcctgattgaattagtaggttaaactaaacaacatactgtcatagg

SEQ ID NO: 505258 - DNA, 120 bp, Artificial Sequence
  ENSG00000164031_23 (sequence is synthesized)
aaaactggagagcttaaccaacttgctcttagaaatgttaccttaaaaaaaaaaaaaaagcagtgcttaagagaaaatacaattttaattattttgttgagcctgcagagtaagttttta

SEQ ID NO: 505259 - DNA, 120 bp, Artificial Sequence
  ENSG00000164031_24 (sequence is synthesized)
ctatttatttttctaattttaatggcaaatttacactattatggctgataattctgtgaacttaccttcttgttgactgattctttttcccttaatcccagctttaaggagataggtgaa

SEQ ID NO: 505260 - DNA, 120 bp, Artificial Sequence
  ENSG00000164031_25 (sequence is synthesized)
gttattgtacaaagttaagtgataccataaagtatatattataaagtcatacatggcttttggacagtattatatttcagttgcagtgctgcattccattaaatttcataaaatgctagg

SEQ ID NO: 505261 - DNA, 120 bp, Artificial Sequence
  ENSG00000164031_26 (sequence is synthesized)
gaaaatgtgtttgataaaattttctgcagtgagaaatgacagactgagtgcctgacaatttaagccacatatgaagtatgcaagtaaagattcagtccttaatgtcatctatatcatggt

SEQ ID NO: 505262 - DNA, 120 bp, Artificial Sequence
  ENSG00000164031_27 (sequence is synthesized)
ataaaagctcaacaagtatcttataatttggagttaactttataaagtaagaagagtttggatatcttgataaaagattttcatgtttgctgctttttttataataaaaatcccaacatt

SEQ ID NO: 505263 - DNA, 120 bp, Artificial Sequence
  ENSG00000164031_28 (sequence is synthesized)
ttgccatcttatgtttagctacatgaacttcgcaatttcatcggctcattctaatgaccacctaaaagtcctcaatctttgaatattgctttattagctcctctaactggtattctaaca

SEQ ID NO: 505264 - DNA, 120 bp, Artificial Sequence
  ENSG00000164031_29 (sequence is synthesized)
gtttagcagcacttatatttattaatgctttacatttttacccctttttgtgtaaacacaaatacacccatgcatatacacacaaacattattgtccttgtgagggtttgggggaaatga

SEQ ID NO: 505265 - DNA, 120 bp, Artificial Sequence
  ENSG00000164031_30 (sequence is synthesized)
aaaatagtacctttctcctcttcttttgattccttagttcccaaatagactggtgctagtcatttagtcatctgtaaatttcgaaatgtagtttgattaaatgtgaactgaattctcagc

SEQ ID NO: 505266 - DNA, 120 bp, Artificial Sequence
  ENSG00000164031_31 (sequence is synthesized)
aatgaaaaatgtcaagttgaattcatctaataagtgaaaataatatattttgtaaacagattacatttgaacacctaaataagtatttgtttcataatcattacatgcttgtttatgatt

SEQ ID NO: 505267 - DNA, 120 bp, Artificial Sequence
  ENSG00000164031_32 (sequence is synthesized)
tacaaagatttggtagagaaaagtacagtccttaaggcatatatatgccaatgcattaaactactcagcttttgtgccagctcaggtgttcataggaacaggaatgtggaataccagctt

SEQ ID NO: 505268 - DNA, 120 bp, Artificial Sequence
  ENSG00000164031_33 (sequence is synthesized)
tttactttaattatacttttatgctgaatttttcttccagttaaacctttaattacactagtatgtaaagtagttactgagaaaaataagtttttgatttcccttctgttgatctgtaac

SEQ ID NO: 505269 - DNA, 120 bp, Artificial Sequence
  ENSG00000164031_34 (sequence is synthesized)
atttttaaatgaagctatttaacacatgacatgctaatgttacttaatggattcctatgtatttcattaaaaaaaagtctcccacctgtgttaagacagctaaatatttcttgatgttgg

SEQ ID NO: 505270 - DNA, 120 bp, Artificial Sequence
  ENSG00000164031_35 (sequence is synthesized)
cttgaggaccaagtgagccatcttgccagttaagcaagttttatatcagaggaccaaatggttaagaagagaatttgtacatttcttgagcttccccatgtgaagcttgggttcagtact

SEQ ID NO: 505271 - DNA, 120 bp, Artificial Sequence
  ENSG00000164031_36 (sequence is synthesized)
atcctattactatccatcttcataatgagtgaagcaaactgaaagggaattcataatcttttttcttatctgaacagaaaaactaatgaaaatcaacaataaatctttattttaattttc

SEQ ID NO: 505272 - DNA, 120 bp, Artificial Sequence
  ENSG00000164031_37 (sequence is synthesized)
attcaacagctgaaaaaccatgtctgttgaccacattggaccattgcctagttaaaatccataaaattccctataaaccaatgaaaagaaacttgtctggcaataatttccaacatttta

SEQ ID NO: 505273 - DNA, 120 bp, Artificial Sequence
  ENSG00000164031_38 (sequence is synthesized)
aattctaatttttagttacaaagaaaaaggatagaatgaggcttttcaaggaattcttgctcatcccttcaattatttggcaggtaaaacagtcctagaattcagcttcctttttggttt

SEQ ID NO: 505274 - DNA, 120 bp, Artificial Sequence
  ENSG00000164031_39 (sequence is synthesized)
tattactattaaatagatactttcatataaatggaaacacttttcctcaaaacattaattcaaaacatactccttatattaaggattatagcaccatattttttgtatattccctatgtg

SEQ ID NO: 505275 - DNA, 120 bp, Artificial Sequence
  ENSG00000164031_40 (sequence is synthesized)
taactttttcctgttggtatgtgatatttttcatttaatatgactatctgctggtgttggggccaatagatttgtgaatattctgtggatgtgtctatgtataggtgtatatatatatat

SEQ ID NO: 505276 - DNA, 120 bp, Artificial Sequence
  ENSG00000164031_41 (sequence is synthesized)
atatatttttttttttttttcccagctaattacctcaaatgtgtgattgtttaatatataccacactatgtttgcacagagcagggcttccattagcagtggatatttttatgtctgact

SEQ ID NO: 505277 - DNA, 120 bp, Artificial Sequence
  ENSG00000164031_42 (sequence is synthesized)
ttgaaaatcagtcaacacaatttcattggtgtgaattatttgttgctctttttcatattttaatggagagattcctattataaggcccatgcttcaaacataattatatctttctatatc

SEQ ID NO: 505278 - DNA, 120 bp, Artificial Sequence
  ENSG00000164031_43 (sequence is synthesized)
cagccatctggaaatacataggggtaagaagtatttcttgaaatgtccttgtttagtaagttagtaaaaactgggatgactagttgccaagatgtcttgtaactgcatagcagatgacac

SEQ ID NO: 505279 - DNA, 120 bp, Artificial Sequence
  ENSG00000164031_44 (sequence is synthesized)
ctggcatggcaagtctcattcacttcagcacaacactctgtacatttcagtctgatattctactttgccatttaaggacaccattaaaatcatagagattttcagtgacattggagtatt

SEQ ID NO: 505280 - DNA, 120 bp, Artificial Sequence
  ENSG00000164031_45 (sequence is synthesized)
gtaattattactttcaaaaaattatttttaataggatgattaaaccaatgagaagaaacacacataaatgatattttgcagtttatctgtattaagaaatgcttcttgccaatttctagt

SEQ ID NO: 505281 - DNA, 120 bp, Artificial Sequence
  ENSG00000164031_46 (sequence is synthesized)
tttagtttttggattgctacataagactttctttccatttactttatgtgtttttaaaagctgcaggtaatttttaaggtttgatggaattataatggaagccttgtataagttaaatga

SEQ ID NO: 505282 - DNA, 120 bp, Artificial Sequence
  ENSG00000164031_47 (sequence is synthesized)
aattggtaaaggagagcttactttgtctataatgcattcaggattaaaaattagatttcaaaatgaaatgtctgatttgtaaaatatttaatgttatatcagacttacataaaattttct

SEQ ID NO: 505283 - DNA, 120 bp, Artificial Sequence
  ENSG00000164031_48 (sequence is synthesized)
gtgagaactcaaatgcatttgatttttaatgaatgttctgaatgaaatatgaatttttgtctttcagtctctgtagtttatctcaatatattaataaaaaggtctgttctcactgtaaaa

SEQ ID NO: 505284 - DNA, 120 bp, Artificial Sequence
  ENSG00000164031_49 (sequence is synthesized)
ttggaacattgatatgggatggtggacctgtacctaacacacaagagtgatacagataaattatctttggcataacggggatggccgggtgcagtggtttatgcctataatcccagcact

SEQ ID NO: 505285 - DNA, 120 bp, Artificial Sequence
  ENSG00000164031_50 (sequence is synthesized)
ttggaaggctgagatgggaggatcatttgaggcccgaatttcaagactagcctcagccccaacataacaagaccccatctatatcaaaaataaataaatattgacatttaaaccatagaa

SEQ ID NO: 505286 - DNA, 120 bp, Artificial Sequence
  ENSG00000164031_51 (sequence is synthesized)
ttttcaaatggaagagctggttatagccaacaacatcagcatcgacatagtggacatgaaagagaagaggaaagaggagatcaatttaattacatgaagtggaaaggtaaatggaaagag

SEQ ID NO: 505287 - DNA, 120 bp, Artificial Sequence
  ENSG00000164031_52 (sequence is synthesized)
cactagactagaaattaaaaggcctggcccccagctttgccactcatcagctcccatcttctaccctcaaatccaagggaggtttttctgtgtttatccagctgatgcccataattgtat

SEQ ID NO: 505288 - DNA, 120 bp, Artificial Sequence
  ENSG00000164031_53 (sequence is synthesized)
tagaattcactttacggcgtttcagaatattaagttctgcttttggactggtgcatttagagaccagcacaagcaagagtctggaaaatcctttaaaacttcagtattaactggttatac

SEQ ID NO: 505289 - DNA, 120 bp, Artificial Sequence
  ENSG00000164031_54 (sequence is synthesized)
ccgaaggcaaacaaatgcagtttggcttcacaaaagcaacattccagttctgatacagtctcaagtaacttttctaggcacatatgcatgctttcttgtttaccaggaacaaatagggtg

SEQ ID NO: 505290 - DNA, 120 bp, Artificial Sequence
  ENSG00000164031_55 (sequence is synthesized)
atgattatgcatgagcttctagcgtattgtcatctggttctaaatgaactaaaagcaaaatatagtttttttgagtttttaaggtacaagagactgtgtggaatttggatatttaagaaa

SEQ ID NO: 505291 - DNA, 120 bp, Artificial Sequence
  ENSG00000164031_56 (sequence is synthesized)
tagctccccagtgttcttttatttctattaaactttgcccagttttttcattttatatatgtagttttagctaatgttatttttttctttttaaaaattaatatctttcctcttgcctac

SEQ ID NO: 505292 - DNA, 120 bp, Artificial Sequence
  ENSG00000164031_57 (sequence is synthesized)
agcctaattgcacaaaggacagcacatctggtagtggtgaaggtggaaaaggctataccaaagaccaagtagatggagttctcagccttgaaagaaaaagaagagtagtccaaggtgtgg

SEQ ID NO: 505293 - DNA, 120 bp, Artificial Sequence
  ENSG00000164031_58 (sequence is synthesized)
tagaaataaggaaggaagagcattgatgcctctttgttctggggatttttctgaagaaagccatgttatcttgttggttagcacgattatgcaaacaagttgctcagtgacaatttggct

SEQ ID NO: 505294 - DNA, 120 bp, Artificial Sequence
  ENSG00000164031_59 (sequence is synthesized)
ttaatgtactttttgatgttataacacctgaaaaaagtgaaatataacattagaagaatagacatcaaggaattgaactctgggtgtgtcttatgcttcatattctttataaaactggtc

SEQ ID NO: 505295 - DNA, 120 bp, Artificial Sequence
  ENSG00000164031_60 (sequence is synthesized)
tgtaaagtaccaactctatagaatattctattttttaaagtaacctcaagttacaaagctttttccaaataatttttttaagaaaaattattgcagctttttcacacaatatgttgttta

SEQ ID NO: 505296 - DNA, 120 bp, Artificial Sequence
  ENSG00000164031_61 (sequence is synthesized)
tgtagcaatattaaaagaggatgaagaattgttttattttacatagatgaaaatgggagaatttcatgagaggaatattgagtgtaatagcaacattttcaatttcctacttatattagt

SEQ ID NO: 505297 - DNA, 120 bp, Artificial Sequence
  ENSG00000164031_62 (sequence is synthesized)
gaaggatttttttctatttatattctttttgaagggctatctttatatatatgcagacactataatgtcctttcgcagaaatgttagagttgaaaagttatacactgggttttgggtatc

SEQ ID NO: 505298 - DNA, 120 bp, Artificial Sequence
  ENSG00000164031_63 (sequence is synthesized)
tggctttaattttataagtaaaaggttttctggaaatgaaatgaaactttgagtttgaaacactagagaaaagtctgttttgtttcctgctaaagcttatggaagctgtattgatgttgt

SEQ ID NO: 505299 - DNA, 120 bp, Artificial Sequence
  ENSG00000164031_64 (sequence is synthesized)
gctgatattactttgctagggaaactaaagattaaggattttgaacagagattaattcaagaattctcatggagagtgaatcataatatagtgaactaactcaagtgaagagtagttaaa

SEQ ID NO: 505300 - DNA, 120 bp, Artificial Sequence
  ENSG00000164031_65 (sequence is synthesized)
attagttaggttaagtctttctcatttgtcctttcttgtctgtttctcttttaattttatttcttttttcacctttttaccccattctcaactttttatttaccataatttgtaattgaa

SEQ ID NO: 505301 - DNA, 120 bp, Artificial Sequence
  ENSG00000164031_66 (sequence is synthesized)
gtgtattttgagatacaggttttatttattaaggaaagtgatttgttaccatatcttaattttaaaatcaaatacccatatatttatattttgcatttgtccctatatatttaaatgcta

SEQ ID NO: 505302 - DNA, 120 bp, Artificial Sequence
  ENSG00000164031_67 (sequence is synthesized)
gcatttgtccctatatatttaaatgctaaagcttgattgtaacattttatttgagagtgattacaatgagaaaaaacgattctctgactgagtgtggtggctcacgcctgtaatcctagc

SEQ ID NO: 505303 - DNA, 80 bp, Artificial Sequence
  ENSG00000164031_68 (sequence is synthesized)
gcctggccaacatggcaaaacctcatttctactaaaaatagaaaaagtagccgggcgtggtgaaggaatcacttgaactc

SEQ ID NO: 505304 - DNA, 66 bp, Artificial Sequence
  ENSG00000164031_69 (sequence is synthesized)
ttctcaaacaaacaaacaaacaaacaaaaaaggattccttaatcatggtaaagccatggtagagta

SEQ ID NO: 505305 - DNA, 120 bp, Artificial Sequence
  ENSG00000164031_70 (sequence is synthesized)
aaaaaggattccttaatcatggtaaagccatggtagagtatttgattagtatgaatggtagtgaagcactttgagaatataaataatgctgctaaccatttttatacttatagtactgtg

SEQ ID NO: 505306 - DNA, 120 bp, Artificial Sequence
  ENSG00000164031_71 (sequence is synthesized)
tcagaggtagctgaataagtgaaagaagtgaataagtaagagacttacttttgaatttattttgtaaaaaacgtttattagtaagcagtgtgcttgaaacacgtttctggaaaccacatc

SEQ ID NO: 505307 - DNA, 120 bp, Artificial Sequence
  ENSG00000164031_72 (sequence is synthesized)
accacatcctaaaacaaattgtatttgcttataggatttaatttatgttgggagaacatattctcaatgaaggattcaaagaaagttaaatgtattttatatatatatatttaagaatat

SEQ ID NO: 505308 - DNA, 120 bp, Artificial Sequence
  ENSG00000164031_73 (sequence is synthesized)
ctatatatttgaaagtttaccaaaaaactatggttgaaagttttgaaaaagaagactctcctaaatctggtgttattttaaaaagtctgtttcttcatttcctctaccctagccttgaaa

SEQ ID NO: 505309 - DNA, 120 bp, Artificial Sequence
  ENSG00000164031_74 (sequence is synthesized)
gaaaaagaagagtagtccaaggtgtggtagaaataaggaaggaagagcattgatgcctctttgttctggtattgattatatatatatgtggggtggggttggttttgtgtgtatgtgggt

SEQ ID NO: 505310 - DNA, 120 bp, Artificial Sequence
  ENSG00000164031_75 (sequence is synthesized)
ggttgtgtgtgtggttctccaaagcccagaggaactggctgtaggcaaggagacaccttgagaatggaagaatgaaagatgatgctgagtgtagatacactctgtatgtggccagagaca

SEQ ID NO: 505311 - DNA, 120 bp, Artificial Sequence
  ENSG00000164031_76 (sequence is synthesized)
tacagacatacaggtggagacataaaaggtggaaggaatttttctgttttctctgtcaaattggagatgaggctgtcttctgagagttagaagaaaagagatgaggttgaaagcttaaga

SEQ ID NO: 505312 - DNA, 120 bp, Artificial Sequence
  ENSG00000164031_77 (sequence is synthesized)
gagtggtaaaagtatggaatatttgcagaggagaaaagcaaagggaatgaagtattgctgatttagttttaaggcccagccacatttgggaccatgaattctttaagagtggaagaaata

SEQ ID NO: 505313 - DNA, 120 bp, Artificial Sequence
  ENSG00000164031_78 (sequence is synthesized)
gcttagtagtatacctgtattagagattggtcctctggtcaataatctcattatacctttttaattaaatgtaatttttttttcttttggggactaaatatgattggaacagtctctaag

SEQ ID NO: 505314 - DNA, 120 bp, Artificial Sequence
  ENSG00000164031_79 (sequence is synthesized)
agaatccccaagttttcaaaatactttagtctgtactttatgtgagtttcttagctgaatataccttttctcttatattagccttcataagtgttgctttagtgagggtacagatcacca

SEQ ID NO: 505315 - DNA, 120 bp, Artificial Sequence
  ENSG00000164031_80 (sequence is synthesized)
aaaactttacaagatcagtgtgaaattattaactggagtatcattgtatttatcaattagaaacactgtacaactgttaattatggggatttgaatttaagatttgatttaagcttccgt

SEQ ID NO: 505316 - DNA, 120 bp, Artificial Sequence
  ENSG00000164031_81 (sequence is synthesized)
ccgttctttcagaagaaatcatttcgctaaacttataaaataagtaattctttttctcaggaataaataaatgtttccttaaacactagttaaatttggagtatatttaaataattagct

SEQ ID NO: 505317 - DNA, 120 bp, Artificial Sequence
  ENSG00000164031_82 (sequence is synthesized)
agcacacatgaaaaaaagagaatcgaaaaatgaccttcctctcccaccaactatgcttccatgcacataagagaagatataaagtctggaccaggcagagttttcccattgttgagctcc

SEQ ID NO: 505318 - DNA, 120 bp, Artificial Sequence
  ENSG00000164031_83 (sequence is synthesized)
acacagatccttttggccttgttgtacattatttccttccaagataggtaatgggttactcctttttaatttcttttaattcttcagtgaggcaggagaaggttttactcttttagaaag

SEQ ID NO: 505319 - DNA, 120 bp, Artificial Sequence
  ENSG00000164031_84 (sequence is synthesized)
cagcagattgtaaaaagtgtgacaaacacatgtagctgatgaaaaggagcatgatgaacaacagtatgaatgaaaataattatatgaatgataatttctcattcaggtgtgaaaacttag

SEQ ID NO: 505320 - DNA, 120 bp, Artificial Sequence
  ENSG00000164031_85 (sequence is synthesized)
gtgaatgggtatatttggagcattacttcaaatacatagtcttcaggctgtccattggtgatgatgactgtaacttctggcttctcaagaatttcttctctaatatatgatgaaaaattt

SEQ ID NO: 505321 - DNA, 120 bp, Artificial Sequence
  ENSG00000164031_86 (sequence is synthesized)
agtgcagaggagatatggtggagctggatacagctaagagttagtgaaataactgtttttcatgtctggcccccccttttttttttgtttgtctgtggcaattcttagctttatgaccct

SEQ ID NO: 505322 - DNA, 120 bp, Artificial Sequence
  ENSG00000164031_87 (sequence is synthesized)
atctagagcactgcaaattttcacctactttgtctacagtatccagctgtctttttaagttgaccaggcttttgtgctcagtaattataaacaagacaatttagaggcttaatctggaac

SEQ ID NO: 505323 - DNA, 120 bp, Artificial Sequence
  ENSG00000164031_88 (sequence is synthesized)
ataattaaacatcctacacactcaaaccaagtagtaatggctttaggattgttcagtgtttaatttaccttttattttttgcattcaggtagtgtctgccatattcgtacctctccacct

SEQ ID NO: 505324 - DNA, 120 bp, Artificial Sequence
  ENSG00000164031_89 (sequence is synthesized)
tgtctcacagtctgtttcacttctattaactgcttctcttctattccaaatgatttttagtactaactacattttcatgacagcattcatcacatttgatctgaacgtgactttttagat

SEQ ID NO: 505325 - DNA, 120 bp, Artificial Sequence
  ENSG00000164031_90 (sequence is synthesized)
cctcaccatttctgctctcaaattgaaagtcatttgtccatccatccaacatatatggtgaacaaaacataatccctgccttcaaagaatctgtgatctagaagtgttatcagacaagta

SEQ ID NO: 505326 - DNA, 120 bp, Artificial Sequence
  ENSG00000164031_91 (sequence is synthesized)
aagaggcaactgtagtacactttggtaattgttgggataaggctaagttcagaggatgtggggaggatataagaggggcagcaaacctagtcctgaggaatttggattcttaggaaaagg

SEQ ID NO: 505327 - DNA, 120 bp, Artificial Sequence
  ENSG00000164031_92 (sequence is synthesized)
aagagctaagtcagggtccggagaagttgtagaaactagctaaccaagaagagaggcagagaaggtgtgctcagcaccaaaagcaattgcaaagatctaggaggtaagagagtcagcttc

SEQ ID NO: 505328 - DNA, 120 bp, Artificial Sequence
  ENSG00000164031_93 (sequence is synthesized)
aatactgatggtaagaaagaaataggaagatgataggtcactttgaagtctgaagggtatccttttttctgtattccagttctgagacagcaagattttcaagtcagataaacagatttg

SEQ ID NO: 505329 - DNA, 120 bp, Artificial Sequence
  ENSG00000164031_94 (sequence is synthesized)
aattcttaactgtgaggccttcctttattacttatttgaaatagaaggcctgcccttcctttctctgtttctattagcttctttatttttctccagatatttatcaccatatgatgtaca

SEQ ID NO: 505330 - DNA, 120 bp, Artificial Sequence
  ENSG00000164031_95 (sequence is synthesized)
ttatattttacttatatatttgtttattgcttgtttttctcccaattgtaaatttaatgtgattttgactgttttattcaccactgtagcatctgaaattgtgcctaacagaaagtaaat

SEQ ID NO: 505331 - DNA, 120 bp, Artificial Sequence
  ENSG00000164031_96 (sequence is synthesized)
ggttagtaaatttttgttgaagaaataagtccttattctcatctgttacttggttatgtgaatttaggcaatttacttaaccattcaaagattggtttccttattggttaaataggaata

SEQ ID NO: 505332 - DNA, 120 bp, Artificial Sequence
  ENSG00000164031_97 (sequence is synthesized)
atatctaccaaatgaggagtaaatgagataatttgtgtaaaataatcagtataataaaattctacaattctttatgtgaaatctttgtgaccaaatgcaatttggaattcagaattcttc

SEQ ID NO: 505333 - DNA, 120 bp, Artificial Sequence
  ENSG00000164031_98 (sequence is synthesized)
atattttagaaaggtactaatatagtcggctctccacatctatgggttctgcatctgtggatttaaccaactttgaattgaaagtatttggtgaaaaataacaatacaacaataaaaaat

SEQ ID NO: 505334 - DNA, 120 bp, Artificial Sequence
  ENSG00000164031_99 (sequence is synthesized)
aatacaaattaaacaaccaatatagtgtaacaaccatttacgtagcatttacattgtcttaggtactatttataacctagagattatttaaagtacatgggaagatgtgtaaaggttgta

SEQ ID NO: 505335 - DNA, 120 bp, Artificial Sequence
  ENSG00000164031_100 (sequence is synthesized)
tgtaaatactgtaccattttatatcagggatttgagcatctgtagattttggtattcaaggagggaggatcctggaactaatcccctgtggataccaagggatgacagtgtattttatat

SEQ ID NO: 505336 - DNA, 120 bp, Artificial Sequence
  ENSG00000164031_101 (sequence is synthesized)
tatacatcttagagtctagggcagcagtccataacaaatagtaacatttctacagcaaaacatacaggtattcacacttaaatgggataaatgaagattctgtagtagcttcacatcttt

SEQ ID NO: 505337 - DNA, 120 bp, Artificial Sequence
  ENSG00000164031_102 (sequence is synthesized)
tcggtcagatttttgcctagaggcaaaatctacagttgaattcagttttttatgcagtcaaattagttatagaataactttgatttttcagagctttatggatattggaacattgatatg

SEQ ID NO: 505338 - DNA, 120 bp, Artificial Sequence
  ENSG00000164031_103 (sequence is synthesized)
ggatggtggacctgtacctaacacacagtaggtattttataaatgccccccatttcctttttttctatcacatagcttctaaacatttctaggagaatgagtctctacacaggtgggatc

SEQ ID NO: 505339 - DNA, 120 bp, Artificial Sequence
  ENSG00000164031_104 (sequence is synthesized)
attctctttttttgtttacagatatatgtcaaatgcctagaacactgtctgggcatagttagtattcaataaatattattgactaaataaaggaaatgtcatgtttttggaataaaattg

SEQ ID NO: 505340 - DNA, 120 bp, Artificial Sequence
  ENSG00000164031_105 (sequence is synthesized)
atgtatgttaatgtttttaagtatctaaagtagaaaaatccaattttaatttctgtaaatttgtacaattttatattactttccctttttacccccaagttcatataacaaatgatagat

SEQ ID NO: 505341 - DNA, 120 bp, Artificial Sequence
  ENSG00000164031_106 (sequence is synthesized)
gccttcattatataaagaaagctaaggctcatttacttcaaaaatatttactgagatccttttgtgtgccaagcactgtgataactaataggtgtaatagtaaaaaaaaaaaaaaaaaaa

SEQ ID NO: 505342 - DNA, 120 bp, Artificial Sequence
  ENSG00000164032_0 (sequence is synthesized)
gcagtttgaatcgcggtgcgacgaaggagtaggtggtgggatctcaccgtgggtccgattagccttttctctgccttgcttgcttgagcttcagcggaattcgaaatggctggcggtaag

SEQ ID NO: 505343 - DNA, 120 bp, Artificial Sequence
  ENSG00000164032_1 (sequence is synthesized)
gctggaaaggactccggaaaggccaagacaaaggcggtttcccgctcgcagagagccggcttgcagttcccagtgggccgtattcatcgacacctaaaatctaggacgaccagtcatgga

SEQ ID NO: 505344 - DNA, 120 bp, Artificial Sequence
  ENSG00000164032_2 (sequence is synthesized)
cgtgtgggcgcgactgccgctgtgtacagcgcagccatcctggagtacctcaccgcagaggtacttgaactggcaggaaatgcatcaaaagacttaaaggtaaagcgtattacccctcgt

SEQ ID NO: 505345 - DNA, 120 bp, Artificial Sequence
  ENSG00000164032_3 (sequence is synthesized)
tgaagaattggattctctcatcaaggctacaattgctggtggtggtgtcattccacacatccacaaatctctgattgggaagaaaggacaacagaagactgtctaaaggatgcctggatt

SEQ ID NO: 505346 - DNA, 120 bp, Artificial Sequence
  ENSG00000164032_4 (sequence is synthesized)
ccttgttatctcaggactctaaatactctaacagctgtccagtgttggtgattccagtggactgtatctctgtgaaaaacacaattttgcctttttgtaattctatttgagcaagttgga

SEQ ID NO: 505347 - DNA, 120 bp, Artificial Sequence
  ENSG00000164032_5 (sequence is synthesized)
agtttaattagctttccaaccaaccaaatttctgcattcgagtcttaaccatatttaagtgttactgtggcttcaaagaagctattgattctgaagtagtgggttttgattgagttgact

SEQ ID NO: 505348 - DNA, 120 bp, Artificial Sequence
  ENSG00000164032_6 (sequence is synthesized)
gtttttaaaaaactgtttggattttaattgtgatgcagaagttatagtaacaaacatttggttttgtacagacattatttccactctggtggataagttcaataaaggtcatatcccaaa

SEQ ID NO: 505349 - DNA, 120 bp, Artificial Sequence
  ENSG00000164032_7 (sequence is synthesized)
cccgctcgcagagagccggcttgcaggtcagtagttgttcgtgcagtctgggagtcatgatgtttttctttgcatttccttttttgttattcatcgctctcgatgggcgttttgtgtatg

SEQ ID NO: 505350 - DNA, 120 bp, Artificial Sequence
  ENSG00000164032_8 (sequence is synthesized)
cgtgggtgatgcggtgtcgcgacttgggctgcccatacgataaatatgggggggaggaatcacgtgtttcgatgtcgggacgcgttgctgcgcccgtgccccttgctttggcgcgcatat

SEQ ID NO: 505351 - DNA, 120 bp, Artificial Sequence
  ENSG00000164032_9 (sequence is synthesized)
gaggaaagtgatgcaagaaaactcccaggccctgaacgcggcgagaggcctaagagaacgctagagggagctggtgttcaacaaggatcctactgagcttgagttctctgctcttggaat

SEQ ID NO: 505352 - DNA, 120 bp, Artificial Sequence
  ENSG00000164032_10 (sequence is synthesized)
ggaacgattccagttggtagatctgcgtttgtgagggttttattctgttctctgaatcttggccaaaggaaagttggaaggcaactgacagattctgccttttaggtacttgaactggca

SEQ ID NO: 505353 - DNA, 120 bp, Artificial Sequence
  ENSG00000164032_11 (sequence is synthesized)
ttaacttctaacattttaaaaaatttcttcagaggaaggaattttttgctgcttttaattagtttttccaggagaggaaatttaagtatattttcaatgatggaagtatggttgtatcat

SEQ ID NO: 505354 - DNA, 120 bp, Artificial Sequence
  ENSG00000164032_12 (sequence is synthesized)
gaaatttgatttatatgtataactcaatgaatttttacttcatacttgagctgcatgtttttaaagatacctttcaagttgaacagtatacactttcttggtttcaaatactgtgatttt

SEQ ID NO: 505355 - DNA, 120 bp, Artificial Sequence
  ENSG00000164032_13 (sequence is synthesized)
gacaggatttagaagagtggggggaggtgttttgtcggctgctagcggagcagcctcggatctcgcggcgggcggcgacggttgggtggcgcgcgcagcgccgctgggggccggcgggcg

SEQ ID NO: 505356 - DNA, 80 bp, Artificial Sequence
  ENSG00000164032_14 (sequence is synthesized)
cggagaccccggcagggtgcggggacgcgctcgcggcgggacgcgccgcggtgggggatgggcgcgccgccttggtaatt

SEQ ID NO: 505357 - DNA, 120 bp, Artificial Sequence
  ENSG00000164035_0 (sequence is synthesized)
acattcactacaccttttccatttgctaataaggccctgccaggctgggagggaattgtccctgcctgcttctggagaaagaagatattgacaccatctacgggcaccatggaactgctt

SEQ ID NO: 505358 - DNA, 120 bp, Artificial Sequence
  ENSG00000164035_1 (sequence is synthesized)
caagtgaccattctttttcttctgcccagtatttgcagcagtaacagcacaggtgttttagaggcagctaataattcacttgttgttactacaacaaaaccatctataacaacaccaaac

SEQ ID NO: 505359 - DNA, 120 bp, Artificial Sequence
  ENSG00000164035_2 (sequence is synthesized)
acagaatcattacagaaaaatgttgtcacaccaacaactggaacaactcctaaaggaacaatcaccaatgaattacttaaaatgtctctgatgtcaacagctacttttttaacaagtaaa

SEQ ID NO: 505360 - DNA, 120 bp, Artificial Sequence
  ENSG00000164035_3 (sequence is synthesized)
gatgaaggattgaaagccacaaccactgatgtcaggaagaatgactccatcatttcaaacgtaacagtaacaagtgttacacttccaaatgctgtttcaacattacaaagttccaaaccc

SEQ ID NO: 505361 - DNA, 120 bp, Artificial Sequence
  ENSG00000164035_4 (sequence is synthesized)
aagactgaaactcagagttcaattaaaacaacagaaataccaggtagtgttctacaaccagatgcatcaccttctaaaactggtacattaacctcaataccagttacaattccagaaaac

SEQ ID NO: 505362 - DNA, 120 bp, Artificial Sequence
  ENSG00000164035_5 (sequence is synthesized)
acctcacagtctcaagtaataggcactgagggtggaaaaaatgcaagcacttcagcaaccagccggtcttattccagtattattttgccggtggttattgctttgattgtaataacactt

SEQ ID NO: 505363 - DNA, 120 bp, Artificial Sequence
  ENSG00000164035_6 (sequence is synthesized)
tcagtatttgttctggtgggtttgtaccgaatgtgctggaaggcagatccgggcacaccagaaaatggaaatgatcaacctcagtctgataaagagagcgtgaagcttcttaccgttaag

SEQ ID NO: 505364 - DNA, 120 bp, Artificial Sequence
  ENSG00000164035_7 (sequence is synthesized)
acaatttctcatgagtctggtgagcactctgcacaaggaaaaaccaagaactgacagcttgaggaattctctccacacctaggcaataattacgcttaatcttcagcttctatgcaccaa

SEQ ID NO: 505365 - DNA, 120 bp, Artificial Sequence
  ENSG00000164035_8 (sequence is synthesized)
gcgtggaaaaggagaaagtcctgcagaatcaatcccgacttccatacctgctgctggactgtaccagacgtctgtcccagtaaagtgatgtccagctgacatgcaataatttgatggaat

SEQ ID NO: 505366 - DNA, 120 bp, Artificial Sequence
  ENSG00000164035_9 (sequence is synthesized)
caaaaagaaccccggggctctcctgttctctcacatttaaaaattccattactccatttacaggagcgttcctaggaaaaggaattttaggaggagaatttgtgagcagtgaatctgaca

SEQ ID NO: 505367 - DNA, 120 bp, Artificial Sequence
  ENSG00000164035_10 (sequence is synthesized)
gcccaggaggtgggctcgctgataggcatgactttccttaatgtttaaagttttccgggccaagaatttttatccatgaagactttcctacttttctcagtgttcttatattacctactg

SEQ ID NO: 505368 - DNA, 120 bp, Artificial Sequence
  ENSG00000164035_11 (sequence is synthesized)
ttagtatttattgtttaccactatgttaatgcagggaaaagttgcacgtgtattattaaatattaggtagaaatcataccatgctactttgtacatataagtattttattcctgctttcg

SEQ ID NO: 505369 - DNA, 120 bp, Artificial Sequence
  ENSG00000164035_12 (sequence is synthesized)
tgttacttttaataaataactactgtactcaatactctaaaaatactataacatgactgtgaaaatggcaatgttattgtcttcctataattatgaatatttttggatggattattagaa

SEQ ID NO: 505370 - DNA, 120 bp, Artificial Sequence
  ENSG00000164035_13 (sequence is synthesized)
tacatgaactcactaatgaaaggcatttgtaataagtcagaaagggacatacgattcacatatcagactgttagggggagagtaatttatcagttctttggtctttctatttgtcattca

SEQ ID NO: 505371 - DNA, 120 bp, Artificial Sequence
  ENSG00000164035_14 (sequence is synthesized)
tactatgtgatgaagatgtaagtgcaagggcatttataacactatactgcattcattaagataataggatcatgatttttcattaactcatttgattgatattatctccatgcatttttt

SEQ ID NO: 505372 - DNA, 120 bp, Artificial Sequence
  ENSG00000164035_15 (sequence is synthesized)
atttcttttagaaatgtaattatttgctctagcaatcattgctaacctctagtttgtagaaaatcaacactttataaatacataattatgatattatttttcattgtatcactgttctaa

SEQ ID NO: 505373 - DNA, 120 bp, Artificial Sequence
  ENSG00000164035_16 (sequence is synthesized)
catatgattatagctgccactccatcaggagcaaattcttctgttaaaagctaactgatcaaccttgaccacttttttgacatgtgagatcaaagtgtcaagttggctgaggttttttgg

SEQ ID NO: 505374 - DNA, 120 bp, Artificial Sequence
  ENSG00000164035_17 (sequence is synthesized)
aaagctttagaactaataagctgctggtggcagctttgtaacgtatgattatctaagctgattttgatgctaaattatcttagtgatctaaggggcagtttagtgaagatggaatcttgt

SEQ ID NO: 505375 - DNA, 120 bp, Artificial Sequence
  ENSG00000164035_18 (sequence is synthesized)
atttaaaatagccttttaaaatttgttttgtggtgatgtattttgacaacttccatctttaggagttatataatcaccttgattttagtttcctgatgtttggactatttataatcaagg

SEQ ID NO: 505376 - DNA, 120 bp, Artificial Sequence
  ENSG00000164035_19 (sequence is synthesized)
acaccaagcaagcataagcatatctatatttctgactggtgtctctttgagaaggatgggaagtagaaaaaaaaaaaagaaagaaaggaaaggaagagaggagagaagaaggcagggatc

SEQ ID NO: 505377 - DNA, 120 bp, Artificial Sequence
  ENSG00000164035_20 (sequence is synthesized)
tccactatgtatgttttcactttagaactgttgagcccatgcttaattttaatctagaagtctttaaatggtgagacagtgactggagcatgccaatcagagagcatttgtcttcagaaa

SEQ ID NO: 505378 - DNA, 83 bp, Artificial Sequence
  ENSG00000164035_21 (sequence is synthesized)
gactggagcatgccaatcagagagcatttgtcttcagaaaaaaaaaaaatctgagtttgagactagcctggccaacatgttgg

SEQ ID NO: 505379 - DNA, 120 bp, Artificial Sequence
  ENSG00000164035_22 (sequence is synthesized)
ggaaaaaaaagaaagaaagaaagtcccagcacacctagataatttaccgagctcttcagcaaaaaccatgttacatacagcatattccaaagaaatgaactcttctgcaatttaaattat

SEQ ID NO: 505380 - DNA, 120 bp, Artificial Sequence
  ENSG00000164035_23 (sequence is synthesized)
aagtaatatgttattttggatcctagagaaaccattttctctacatttcatgagcatggttagaaaagagtttacaagaattaggaagagggaacaattttaatggtcagaaaagaataa

SEQ ID NO: 505381 - DNA, 120 bp, Artificial Sequence
  ENSG00000164035_24 (sequence is synthesized)
aatttattctagttcaagaagtgcacacaaagaatatgcattaatctaacaactatgagattaaatctttcaaaaaggtcaaaggaggattgagaagtttacagagatgtccacggcatt

SEQ ID NO: 505382 - DNA, 120 bp, Artificial Sequence
  ENSG00000164035_25 (sequence is synthesized)
ttatatcaatctcaaaggtaaggtctgcatttttataaaccaacttaaacttctgttgagataggatattttgttttcaagccaaaattaccattaatcaaatatgttttaattatctga

SEQ ID NO: 505383 - DNA, 120 bp, Artificial Sequence
  ENSG00000164035_26 (sequence is synthesized)
tttagatgatctactttttatgcctggcttactgtaagttttttattctgatacacagttcaaacatcattgcaacaaagaagtgcctgtatttagatcaaaggcaagactttctatgtg

SEQ ID NO: 505384 - DNA, 120 bp, Artificial Sequence
  ENSG00000164035_27 (sequence is synthesized)
tttgttttgcataataatatgaatataatttaagtctatcaatagtcaaaacataaacaaaagctaattaactggcactgttgtcacctgagactaagtggatgttgttggctgacatac

SEQ ID NO: 505385 - DNA, 120 bp, Artificial Sequence
  ENSG00000164035_28 (sequence is synthesized)
aggctcagccagcagagaaagaattctgaattccccttgctgaactgaactattctgttacatatggttgacaaatctgtgtgttatttcttttctacctaccatatttaaatttatgag

SEQ ID NO: 505386 - DNA, 120 bp, Artificial Sequence
  ENSG00000164035_29 (sequence is synthesized)
tatcaaccgaggacatagtcaaaccttcgatgatgaacattcctgattttttgcctgattattctctgttgagctctacttgtggtcattcaagattttatgatgttgaaaggaaaagtg

SEQ ID NO: 505387 - DNA, 120 bp, Artificial Sequence
  ENSG00000164035_30 (sequence is synthesized)
aatatgacctttaaaaattgtattttgggtgatgatagtctcaccactataaaactgtcaattattgcctaatgttaaagatatccatcattgtgattaattaaacctataatgagtatt

SEQ ID NO: 505388 - DNA, 120 bp, Artificial Sequence
  ENSG00000164035_31 (sequence is synthesized)
cttaatggagaattcttaatggatggattatcccctgatcttttctttaaaatttctctgcacacacaggacttctcattttccaataaatgggtgtactctgccccaatttctagggaa

SEQ ID NO: 505389 - DNA, 120 bp, Artificial Sequence
  ENSG00000164035_32 (sequence is synthesized)
tttggctttgggaagtgctttggagctttttctcactccaaccactgagctagttgttgccagttgtcactttttgtcgcacatcacaatcagatcaagaaatggtttgtcgtgtagaat

SEQ ID NO: 505390 - DNA, 120 bp, Artificial Sequence
  ENSG00000164035_33 (sequence is synthesized)
actgaaactcagagttcaattaaaacaacagaaataccaggtattattttgccggtggttattgctttgattgtaataacactttcagtatttgttctggtgggtttgtaccgaatgtgc

SEQ ID NO: 505391 - DNA, 120 bp, Artificial Sequence
  ENSG00000164035_34 (sequence is synthesized)
ctgcccagtatttgcagcagtaacagcacaggatttgaaattcctcaaccaaactggctataatatataaaatgactccttatactaaagtccacaatctaaaaatatctcattactatg

SEQ ID NO: 505392 - DNA, 120 bp, Artificial Sequence
  ENSG00000164035_35 (sequence is synthesized)
agacattcattctcagccaggatggtagatgctgagaaaaaggagcactgcattatgtcacctgcctcatatgaagcttctttataatcttcagtaaggaggagctacaatctactaaga

SEQ ID NO: 505393 - DNA, 120 bp, Artificial Sequence
  ENSG00000164035_36 (sequence is synthesized)
gaggtccagtttgttcaagaacctgtccatttgctcatatgaccaagatatacttgtcataagtgctggttactttccggaaagataaagtttgggatcaagaagctcaagtttgagacc

SEQ ID NO: 505394 - DNA, 87 bp, Artificial Sequence
  ENSG00000164035_37 (sequence is synthesized)
aaaggaaacactaaaaacaggaaaatatgtgtaatatctgcagaatggaagatatgtaattcactgagcagctgaagaattaaatca

SEQ ID NO: 505395 - DNA, 85 bp, Artificial Sequence
  ENSG00000164035_38 (sequence is synthesized)
catagctgggattacaggtgttttagaggcagctaataattcacttgttgttactacaacaaaaccatctataacaacaccaaac

SEQ ID NO: 505396 - DNA, 120 bp, Artificial Sequence
  ENSG00000164035_39 (sequence is synthesized)
cagaaataccaggctaaaaattggcaggcactagaggaaaaacagcaaaacaagacaaaaacagtgcatccagtcagagaagactgatgcagttctgggaagagatttttttccctctgc

SEQ ID NO: 505397 - DNA, 120 bp, Artificial Sequence
  ENSG00000164035_40 (sequence is synthesized)
ttcacagattgactatcaaggagaagtcagagttgaagaattgggaagcagccaaattgtcagttctctttaaggagggactgaaggatccttcattttgtttaaataaattttatttac

SEQ ID NO: 505398 - DNA, 120 bp, Artificial Sequence
  ENSG00000164035_41 (sequence is synthesized)
ttttcttctgcccagtatttgcagcagtaacagcacagttacataagagcaaaacatgtgtgtgcctagtcactatcacaccctgtcaaaagcagagagcagctggagctgaggtatgta

SEQ ID NO: 505399 - DNA, 120 bp, Artificial Sequence
  ENSG00000164037_0 (sequence is synthesized)
gctttcgcgtcaccaccctgcccacctgggtggcgcgtggcttacgcaacggtcactgggctcctgggccgctcccgggccagcgagggctgcgaaagaagttgtagcatgcataccaca

SEQ ID NO: 505400 - DNA, 120 bp, Artificial Sequence
  ENSG00000164037_1 (sequence is synthesized)
gaatcaaaaaatgaacatttggaggatgaaaacttccaaacatctacaactcctcagagtctcattgatcctaataatactgcacaggaagaaactaaaactgtcttatcagatacagaa

SEQ ID NO: 505401 - DNA, 120 bp, Artificial Sequence
  ENSG00000164037_2 (sequence is synthesized)
gaaataaaaccacagacaaaaaaggagacatacatttcttgtcctctaagaggagtattgaatgtaattattacaaatggagttatactgtttgtgatatggtgtatgacctggtcaatc

SEQ ID NO: 505402 - DNA, 120 bp, Artificial Sequence
  ENSG00000164037_3 (sequence is synthesized)
ttaggctctgaagctctccctggtggaaatttatttgggttgttcattattttttatagtgccattattgggggaaaaattttacaactcattagaatacctttagtgcctccacttcca

SEQ ID NO: 505403 - DNA, 120 bp, Artificial Sequence
  ENSG00000164037_4 (sequence is synthesized)
cctcttcttgggatgttactggctggttttacgattaggaatgttccattcatcaatgaacatgtccatgttcctaacacatggtcttcaattttaagaagcattgcccttaccattatt

SEQ ID NO: 505404 - DNA, 120 bp, Artificial Sequence
  ENSG00000164037_5 (sequence is synthesized)
ctaataagagctgggcttggactcgatccacaggctttgaggcatttgaaggtcgtttgtttcagattggctgtaggtccatgccttatggaggcaagtgcagctgctgttttttcacac

SEQ ID NO: 505405 - DNA, 120 bp, Artificial Sequence
  ENSG00000164037_6 (sequence is synthesized)
ttcattatgaaatttccctggcaatgggcatttctattaggttttgttctaggtgctgtctctcctgctgttgttgtcccttacatgatggtgctgcaagaaaatggatatggtgttgag

SEQ ID NO: 505406 - DNA, 120 bp, Artificial Sequence
  ENSG00000164037_7 (sequence is synthesized)
attctggctatcactggattcaatacatgcttgagcatagtcttttcctcaggtggtatacttaataacgccatagcctctataaggaacgtatgtattagtctgctggcaggaattgtt

SEQ ID NO: 505407 - DNA, 120 bp, Artificial Sequence
  ENSG00000164037_8 (sequence is synthesized)
ttgggattttttgttcgatattttccaagtgaagaccagaaaaaacttacattgaagagaggattccttgttttgactatgtgtgtttctgccgtcttaggcagccaacgtattggttta

SEQ ID NO: 505408 - DNA, 120 bp, Artificial Sequence
  ENSG00000164037_9 (sequence is synthesized)
catggatctggaggattatgcacactagtgttgagtttcattgcagggacaaaatggtcccaagaaaagatgaaagtccaaaagattattacgactgtatgggatatttttcaaccactt

SEQ ID NO: 505409 - DNA, 120 bp, Artificial Sequence
  ENSG00000164037_10 (sequence is synthesized)
ctttttggtttagttggagcagaagtatctgtttcatcgcttgaatcaaatattgttggcatatctgttgccactctaagtttggcattatgtgttcgaattttaaccacatatctattg

SEQ ID NO: 505410 - DNA, 120 bp, Artificial Sequence
  ENSG00000164037_11 (sequence is synthesized)
atgtgctttgctggttttagttttaaggagaaaatatttattgctttagcatggatgcccaaagctacagtacaggctgtgttaggtcctctggctctagaaacagcaagagtctccgca

SEQ ID NO: 505411 - DNA, 120 bp, Artificial Sequence
  ENSG00000164037_12 (sequence is synthesized)
ccccacttggaaccatatgcgaaggatgtgatgacagtagcatttttagccatcttgatcacagctccaaatggagctctacttatgggcattctggggcctaaaatgcttacacgccat

SEQ ID NO: 505412 - DNA, 120 bp, Artificial Sequence
  ENSG00000164037_13 (sequence is synthesized)
tatgatccaagcaaaataaaactgcagttgtcaacattagaacatcattaaaaagtttacctgtcatcatctgcctgcttcttttaatgaattatttcacatgacagaagaattttaaag

SEQ ID NO: 505413 - DNA, 120 bp, Artificial Sequence
  ENSG00000164037_14 (sequence is synthesized)
tagaaatatgtggggactgtacagagaatccaggatttagtaaacatgtgatttcagtacagggcttttcttggactttttactccaaagttaatttaataaaaataatattaaatggaa

SEQ ID NO: 505414 - DNA, 120 bp, Artificial Sequence
  ENSG00000164037_15 (sequence is synthesized)
atggacgaactgcaaggtagccaagaagtgcgagtacaccaaggaaaggcaataaccgaagccattctgaaactaaacatgtagatgtgtcagaatctgcagtgctcttggaaaagaatt

SEQ ID NO: 505415 - DNA, 120 bp, Artificial Sequence
  ENSG00000164037_16 (sequence is synthesized)
caaaatagcatgtctagtttcatccttgagcttattctttgttactttttacattaattcctttttaatggatccataaaactgtgaataaataacacaataaagccagctctaccaaag

SEQ ID NO: 505416 - DNA, 120 bp, Artificial Sequence
  ENSG00000164037_17 (sequence is synthesized)
gtgattctcctccctcagcctcccgagtacctgggaccacaggtggtatacttaataacgccatagcctctataaggaacgtatgtattagtctgctggcaggaattgttttgggatttt

SEQ ID NO: 505417 - DNA, 120 bp, Artificial Sequence
  ENSG00000164037_18 (sequence is synthesized)
ttattgctttagcatggatgcccaaagctacagtacagagatgagatctcaccacgttgcccaagctggtatggtactcctgagatcaagtactccacccacctcagcctcccaaagtgc

SEQ ID NO: 505418 - DNA, 120 bp, Artificial Sequence
  ENSG00000164037_19 (sequence is synthesized)
acctgggtggcgcgtggcttacgcaacggtcactgggctcctgggccgctcccgggccagcgagggctgcgaaagaagttgtagaaatcaaaggtaatttgaggcttcagctctgtgcag

SEQ ID NO: 505419 - DNA, 120 bp, Artificial Sequence
  ENSG00000164037_20 (sequence is synthesized)
agtgcaaggaaccaaagatgcaaagttgggagtcaccagcatatggaaaactacctagggcaagtgtgctcaccgataacattgcagtgactagtgtaaagcagaggaaaagaagccaac

SEQ ID NO: 505420 - DNA, 120 bp, Artificial Sequence
  ENSG00000164037_21 (sequence is synthesized)
aaaaaatatgaaattcaaaaatatttaagaaaattataaatacatttatttttatttacaatatatctttggctacaacgaccttcttcagaaacacatgttgatacagtgtcatatttt

SEQ ID NO: 505421 - DNA, 120 bp, Artificial Sequence
  ENSG00000164037_22 (sequence is synthesized)
catattgctcttcctttacactgggtgctcttttttttttataaaccaaggacagccctgaatatattccctgagttatctgaagaaataaatataagatttctttcctgagggaacata

SEQ ID NO: 505422 - DNA, 120 bp, Artificial Sequence
  ENSG00000164038_0 (sequence is synthesized)
gaagatgcgcgaatcgggaaccccagagcgcggtggctagaccgggctccgccgcctcccccacagcccctttcctaatcgttcagacggagcctggtcgacttcgccggagactgccag

SEQ ID NO: 505423 - DNA, 120 bp, Artificial Sequence
  ENSG00000164038_1 (sequence is synthesized)
atctcgttcctcttccctgtgtcatcttcttaattataaataatgggggatgaagataaaagaattacatatgaagattcagaaccatccacaggaatgaattacacgccctccatgcat

SEQ ID NO: 505424 - DNA, 120 bp, Artificial Sequence
  ENSG00000164038_2 (sequence is synthesized)
caagaagcacaggaggagacagttatgaagctcaaaggtatagatgcaaatgaaccaacagaaggaagtattcttttgaaaagcagtgaaaaaaagctacaagaaacaccaactgaagca

SEQ ID NO: 505425 - DNA, 120 bp, Artificial Sequence
  ENSG00000164038_3 (sequence is synthesized)
aatcacgtacaaagactgagacaaatgctggcttgccctccacatggtttactggacagggtcataacaaatgttaccatcattgttcttctgtgggctgtagtttggtcaattactggc

SEQ ID NO: 505426 - DNA, 120 bp, Artificial Sequence
  ENSG00000164038_4 (sequence is synthesized)
agtgaatgtcttcctggaggaaacctatttggaattataatcctattctattgtgccatcattggtggtaaacttttggggcttattaagttacctacattgcctccactgccttctctt

SEQ ID NO: 505427 - DNA, 120 bp, Artificial Sequence
  ENSG00000164038_5 (sequence is synthesized)
cttggcatgctgcttgcagggtttctcatcagaaatatcccagtcatcaacgataatgtgcagatcaagcacaagtggtcttcctctttgagaagcatagccctgtctatcattctggtt

SEQ ID NO: 505428 - DNA, 120 bp, Artificial Sequence
  ENSG00000164038_6 (sequence is synthesized)
cgtgctggccttggtctggattcaaaggccctgaagaagttaaagggcgtttgtgtaagactgtccatgggtccctgtattgtggaggcgtgcacatctgctcttcttgcccattacctg

SEQ ID NO: 505429 - DNA, 120 bp, Artificial Sequence
  ENSG00000164038_7 (sequence is synthesized)
ctgggtttaccatggcaatggggatttatactgggttttgttttaggtgctgtatctccagctgttgtggtgccttcaatgctccttttgcagggaggaggctatggtgttgagaagggt

SEQ ID NO: 505430 - DNA, 120 bp, Artificial Sequence
  ENSG00000164038_8 (sequence is synthesized)
gtcccaaccttgctcatggcagctggcagcttcgatgacattctggccatcactggcttcaacacatgcttgggcatagccttttccacaggctctactgtctttaatgtcctcagagga

SEQ ID NO: 505431 - DNA, 120 bp, Artificial Sequence
  ENSG00000164038_9 (sequence is synthesized)
tgtggcaactggatctgttcttggatttttcattcagtactttccaagccgtgaccaggacaaacttgtgtgtaagagaacattccttgtgttggggttgtctgtgctagctgtgttcag

SEQ ID NO: 505432 - DNA, 120 bp, Artificial Sequence
  ENSG00000164038_10 (sequence is synthesized)
cagtgtgcattttggtttccctggatcaggaggactgtgcacgttggtcatggctttccttgcaggcatgggatggaccagcgaaaaggcagaggttgaaaagataattgcagttgcctg

SEQ ID NO: 505433 - DNA, 120 bp, Artificial Sequence
  ENSG00000164038_11 (sequence is synthesized)
ggacatttttcagccccttctttttggactaattggagcagaggtatctattgcatctctcagaccagaaactgtaggcctttgtgttgccaccgtaggcattgcagtattgatacgaat

SEQ ID NO: 505434 - DNA, 120 bp, Artificial Sequence
  ENSG00000164038_12 (sequence is synthesized)
tttgactacatttctgatggtgtgttttgctggttttaacttaaaagaaaagatatttatttcttttgcatggcttccaaaggccacagttcaggctgcaataggatctgtggctttgga

SEQ ID NO: 505435 - DNA, 120 bp, Artificial Sequence
  ENSG00000164038_13 (sequence is synthesized)
cacagcaaggtcacatggagagaaacaattagaagactatggaatggatgtgttgacagtggcatttttgtccatcctcatcacagccccaattggaagtctgcttattggtttactggg

SEQ ID NO: 505436 - DNA, 120 bp, Artificial Sequence
  ENSG00000164038_14 (sequence is synthesized)
ccccaggcttctgcagaaagttgaacatcaaaataaagatgaagaagttcaaggagagacttctgtgcaagtttagaggaagcgcggattctattactggaaactttgggactgaaaggc

SEQ ID NO: 505437 - DNA, 120 bp, Artificial Sequence
  ENSG00000164038_15 (sequence is synthesized)
caaagcttctgggcccaccatcaacgcagctccgctttcatttctttcacatacaactttccacataagatttcatgcggaaaaaaaaaaaaaactcacaaaggttttatactgataaca

SEQ ID NO: 505438 - DNA, 120 bp, Artificial Sequence
  ENSG00000164038_16 (sequence is synthesized)
gtatattaagtgtttactttgtacacagcgtctttgttccagacacttgccatgtctcatttattctcacaccaccaccacagcgtcctttacagatgagaagacaacctcagggagacg

SEQ ID NO: 505439 - DNA, 120 bp, Artificial Sequence
  ENSG00000164038_17 (sequence is synthesized)
atgtatttgcctaggtcccatagctagcaagtgacagcgctgcagtttaagctcaggccgtcttggggagagaccgtgctcttctaccattgcactttaagctgactttaggggaaacac

SEQ ID NO: 505440 - DNA, 120 bp, Artificial Sequence
  ENSG00000164038_18 (sequence is synthesized)
aatctgagttttgacaagtttacttctggcacatgcagtcccgagcactgctttttggctaaaatgcccagtgatgtcaactctgtccctggatttctacaacccgatgagtcaatattc

SEQ ID NO: 505441 - DNA, 120 bp, Artificial Sequence
  ENSG00000164038_19 (sequence is synthesized)
atctccgggaagactcggcgcctgggtccgcgctctctgggtaagctttccgggaagctttcccgggagctcgctggtcctggccccagaagcctgcggacccgcccagggaggataagc

SEQ ID NO: 505442 - DNA, 120 bp, Artificial Sequence
  ENSG00000164038_20 (sequence is synthesized)
agctgaaagaccgcgcggtgccgctccgaggccccgggacgtgggcccatggtcggcctggcgccacctttccgggggaagccacgcgcaccaggcatcgcacgcggctctgcacccgcg

SEQ ID NO: 505443 - DNA, 120 bp, Artificial Sequence
  ENSG00000164038_21 (sequence is synthesized)
ccgccggacctgaaacccggcggagggcacacggggctgccgctgcgggccccggaccaacccatgcttactccggagcctgtaccggcgccgacgggtcggacctccctgcgcggtgtc

SEQ ID NO: 505444 - DNA, 120 bp, Artificial Sequence
  ENSG00000164038_22 (sequence is synthesized)
ttttttcaagatgcatattgaaatatgtaatgtttaagcttaaaatgtaatagaaccaaaagtgtagctgtttctttaaacagcatttttagcccttgctctttccatgtgggtggtaat

SEQ ID NO: 505445 - DNA, 120 bp, Artificial Sequence
  ENSG00000164038_23 (sequence is synthesized)
gatctatatcaccaaccttaatctctctgccttttttttcaaacaccccttcatcatccatcttaatttgcataaggacatatctactttaatgtactaccacagtttacagttaatgtg

SEQ ID NO: 505446 - DNA, 120 bp, Artificial Sequence
  ENSG00000164038_24 (sequence is synthesized)
ggaaagaccagcttcagtatcctcttcagctaggattgccctaacttttaactttcacagtttcctgattcatatttgcccaggctctgatgccttgaattggttttggctctctttttt

SEQ ID NO: 505447 - DNA, 120 bp, Artificial Sequence
  ENSG00000164038_25 (sequence is synthesized)
ggatctgtttttgttgttaaacatcataatgcagtctctcattaatttttaccatcatttaccctgataatctgcctcttctccatttctccttcccttactacctttctttgaattact

SEQ ID NO: 505448 - DNA, 120 bp, Artificial Sequence
  ENSG00000164038_26 (sequence is synthesized)
gtaactgattggtcccaccaaaattttaaagtacatgaagtatcttcattggttcatcctcttgccccctccagatgtcaaaaaactttatcctgccccctagctgaccacccaggttcc

SEQ ID NO: 505449 - DNA, 120 bp, Artificial Sequence
  ENSG00000164038_27 (sequence is synthesized)
tttatttcagtggcccatgtgagtctaccttcccctaaggagtgccctaatccagccctttttttgtttcttatgacccatatctttaggctcttcccatttctaggtgggagataggta

SEQ ID NO: 505450 - DNA, 120 bp, Artificial Sequence
  ENSG00000164038_28 (sequence is synthesized)
agtttcaaatctatgccagtcttatgaatattacattagggtaatgtgctataatgaagaaataaaaaatacagtgcttaaaagaaaataaaattctatttctgtctaatgaaactggct

SEQ ID NO: 505451 - DNA, 83 bp, Artificial Sequence
  ENSG00000164038_29 (sequence is synthesized)
gctctgccattccctagcttaggacatggcttaacctatttatgccagaggttgcaaaaatttttgggatataaataactccc

SEQ ID NO: 505452 - DNA, 120 bp, Artificial Sequence
  ENSG00000164038_30 (sequence is synthesized)
gggttaaaaatggatctctaccatatctccattctatctctcaaggaaaatgcaagtatagcaatttatttttgaggaagtgatgtggaagttggacacatctcttttcctacatttatt

SEQ ID NO: 505453 - DNA, 120 bp, Artificial Sequence
  ENSG00000164038_31 (sequence is synthesized)
ggtattgatcatatccggctgtgaggcagctaagtgttgtctctagctaagcattcacactcctaggaggaacggaacatcagattttcggggccagagcttccactgtgttggatgtta

SEQ ID NO: 505454 - DNA, 120 bp, Artificial Sequence
  ENSG00000164038_32 (sequence is synthesized)
ccatcattcagtagcatattcttacatgcaaacaaaagcttttgaaagacattgccttaaaccaaaagagtgacttctatggcagggatttcagaaattgtgacttgccagcagagaaaa

SEQ ID NO: 505455 - DNA, 120 bp, Artificial Sequence
  ENSG00000164038_33 (sequence is synthesized)
tattagaagaaagacttacctgcataggtcatattttatcctactttgtaacaggccatctctgcttttgtgtatcactcataagttcctcttcactctaggtcatcttctgtgtagtta

SEQ ID NO: 505456 - DNA, 120 bp, Artificial Sequence
  ENSG00000164038_34 (sequence is synthesized)
ctgaaataatcacattcacatacagtttacagtttttatcatgttatctgtgtacctgaagtgtttattacatacttgtcatatcctatctaaactcctcgacctagaattcaaagttca

SEQ ID NO: 505457 - DNA, 120 bp, Artificial Sequence
  ENSG00000164038_35 (sequence is synthesized)
ttttaatcttgaagtagatattaaatatgtattagatgaatgaattatgaatatcctaatcccaccaagctgatctgcataaataaagcctgtccattcctctcttcattagacttctgt

SEQ ID NO: 505458 - DNA, 120 bp, Artificial Sequence
  ENSG00000164038_36 (sequence is synthesized)
tcgagccctatccaccatggctttcacctctattcaaaactagtttaatattcacttcttctaaatagccttcaattttatgtcaactttgctttggttaccctatggtgctgtattcct

SEQ ID NO: 505459 - DNA, 120 bp, Artificial Sequence
  ENSG00000164038_37 (sequence is synthesized)
ttaatgtttatgctcttgatttggacttgattaatttataccaaaggtcagataagtgttttgaactgaacttcattggttaggtgcactttgctgggagcaccataaacttaatgatca

SEQ ID NO: 505460 - DNA, 120 bp, Artificial Sequence
  ENSG00000164038_38 (sequence is synthesized)
tctggtcctctatttttgcaggctctaaaagtagatgcatccaaaaaatacttactgaaagcttttgagatccaggcacatcatcaagaataatattgtccctgtccttaaggatttaac

SEQ ID NO: 505461 - DNA, 120 bp, Artificial Sequence
  ENSG00000164038_39 (sequence is synthesized)
agtccaatagagaaaacagacagttaaacaagacattgcaaaacaatatgataagtgctattatgcaggaactacagggctgctagggagctcatggcaggagcactcaatcaatccaag

SEQ ID NO: 505462 - DNA, 120 bp, Artificial Sequence
  ENSG00000164038_40 (sequence is synthesized)
ggtggtggagtttaggcacagcttcccagagaaagtagggcattggctgagggaagattaggacttagccagcaaaagggatgtaagaccaaaaagtgttacacttcatgctgtttccca

SEQ ID NO: 505463 - DNA, 120 bp, Artificial Sequence
  ENSG00000164038_41 (sequence is synthesized)
ggtcatcagtggcattttctccaagtaacaggcttggaatatttattaacttatacataatacagttagtataactaaatcagaatgctattgaatatgtttagggcccctaggaaaatt

SEQ ID NO: 505464 - DNA, 120 bp, Artificial Sequence
  ENSG00000164038_42 (sequence is synthesized)
agaaatggaagtccacagagtacagaaatgattgaagggcacctgaagccactgccaatacctgttttcattttgaggtcatgcagcaaactcttttctacctctaagagggtagccacc

SEQ ID NO: 505465 - DNA, 120 bp, Artificial Sequence
  ENSG00000164038_43 (sequence is synthesized)
atctaaatctctgtgactgcccagtgctggctttttgacttcctctattggatctctgaaatttgtgcctattcctggaagctctttgtaggaatttattaattgctataagactatgtt

SEQ ID NO: 505466 - DNA, 120 bp, Artificial Sequence
  ENSG00000164038_44 (sequence is synthesized)
gctgttatatatcatggagatggtgaggtcaagaatgacagaggctgaccattcagcagggctcaccatgtgaaggccggggtttgtcaccacattgaaagccacatctcttgacttggt

SEQ ID NO: 505467 - DNA, 120 bp, Artificial Sequence
  ENSG00000164038_45 (sequence is synthesized)
tggtgaacttagggttaacctgatagagtactgaccaactcaacctatcccctcttaaaccacagatagaaacaattactctaacttttgggtcccttatacatacttatgtcagagcac

SEQ ID NO: 505468 - DNA, 120 bp, Artificial Sequence
  ENSG00000164038_46 (sequence is synthesized)
atgtaacactttttttcactttatttacatgtttgtctcttattaaatcagctccctatgggtaggaaccttgtcttaattatccttgaatcctcagcatttttcacagggcatggaaca

SEQ ID NO: 505469 - DNA, 120 bp, Artificial Sequence
  ENSG00000164038_47 (sequence is synthesized)
cagtagacatttaataaacatttactgactaaatctgagaggaagaggatcctctctcaatatcagaaaactacttgccacacgacagttcggatcttagtccacttagtctatcttagt

SEQ ID NO: 505470 - DNA, 120 bp, Artificial Sequence
  ENSG00000164038_48 (sequence is synthesized)
cagcttgggctgctataacaaaataccatacactgggtggcttacacaacagaaacttacttctattaaaggttggaagttcgagatcaggatgccagcattgttgggctctggtgaagt

SEQ ID NO: 505471 - DNA, 120 bp, Artificial Sequence
  ENSG00000164038_49 (sequence is synthesized)
ctctctccctggcttgccaatggccacattctcaccctctcactcatgtgtcatcacttgatgccgagagagagcaagcaagctctctggtgtctcttcttataagggtactctaatcac

SEQ ID NO: 505472 - DNA, 120 bp, Artificial Sequence
  ENSG00000164038_50 (sequence is synthesized)
agcatgagggccctaccctcatgacctcatccaaatctaattgccttcccaaatcctcatatctaaatacatcacattggaagttaaggcttcaacatatgaatgtgtggggaaggacat

SEQ ID NO: 505473 - DNA, 120 bp, Artificial Sequence
  ENSG00000164038_51 (sequence is synthesized)
aattcagtccctgaaagaagtgtcatatttccaaggacagtatatttctgtctggtattaactcccaatcaccttgattgatcttgatgtcctcaaaatttcctcaggtaaacatttgca

SEQ ID NO: 505474 - DNA, 120 bp, Artificial Sequence
  ENSG00000164038_52 (sequence is synthesized)
aatgatctcatccactacattctttaaaaatagtatttttttctgattataaagtaacacattttcattgcaaaaaatttagaacacagaaaaatacaaacaagaaaactgaaactaata

SEQ ID NO: 505475 - DNA, 120 bp, Artificial Sequence
  ENSG00000164038_53 (sequence is synthesized)
taaacatgtattttatttttctttaaaattgtactgcagttttgggggatgtattattttcagaaagatatatcatcaactgaatttgttgggtgaaaggcaacataagtatttcatatt

SEQ ID NO: 505476 - DNA, 120 bp, Artificial Sequence
  ENSG00000164038_54 (sequence is synthesized)
tggcttttatgatgctatgtagattgaagaatttttttgtatataatgaatgctaagccttcatgtttatattcagatattcattttgcaatgaataaaacagacaaatccctgccttca

SEQ ID NO: 505477 - DNA, 120 bp, Artificial Sequence
  ENSG00000164038_55 (sequence is synthesized)
tggaatggatttggtctttgaaggaagccaaaggttattctgccatcaatttgataaatatatggaagttcagattgatttatgccctatttttcttcagaaatgaattgtgtgcatatg

SEQ ID NO: 505478 - DNA, 120 bp, Artificial Sequence
  ENSG00000164038_56 (sequence is synthesized)
tgtgtctgtgctgtgtatgctgggggaatatgtgataaagcagaaaaaagaagagatttgaaaattatctataaaggcaaattaggtttttttaagaagacagtattcttttattgagac

SEQ ID NO: 505479 - DNA, 120 bp, Artificial Sequence
  ENSG00000164038_57 (sequence is synthesized)
agacttaaaatttattttattttttacattgatagataaaattgtatgtatttaccatgtgcaacatgatgttttgaagtatgtatacatactggaatgactaattttagctaattaaca

SEQ ID NO: 505480 - DNA, 120 bp, Artificial Sequence
  ENSG00000164038_58 (sequence is synthesized)
cttgcttgaaaagcggtgattaagattggcacttgcttacaggagtgaaaaacagctgagaagacacttctaagaggtacagctaaaaggtggaggactgatagacaacttagaggttgg

SEQ ID NO: 505481 - DNA, 120 bp, Artificial Sequence
  ENSG00000164038_59 (sequence is synthesized)
atacaagagaatgcataatagaattttcttatagatatcagaaaatgcaacatagatgttacagcataatttaaatattctaacttcaaaacatagtttatgtgttaataggcgctaact

SEQ ID NO: 505482 - DNA, 120 bp, Artificial Sequence
  ENSG00000164038_60 (sequence is synthesized)
cttacagttagcacctactattcaaactgttgaagaagtcgtggtcttttgcctacacctgattcaatgcctgttaaagagataccggattccacctaacgtctgcacaaaggataataa

SEQ ID NO: 505483 - DNA, 120 bp, Artificial Sequence
  ENSG00000164038_61 (sequence is synthesized)
gagaggaatgtaaagaagtgcctaggcctcctgttttattgttttgttttgttattaatcttcattttcttttggaatctgcctaagagttatggcaactgatgatgagaaactaagact

SEQ ID NO: 505484 - DNA, 120 bp, Artificial Sequence
  ENSG00000164038_62 (sequence is synthesized)
accaatgttaagagttgtgaacagatgtgtgtacagcacaaccaaggcagccgtgattggcctcacaaaatctgtggctgcagatttcatccagcagggcatcaggtgcaactgtgtgtg

SEQ ID NO: 505485 - DNA, 120 bp, Artificial Sequence
  ENSG00000164038_63 (sequence is synthesized)
aataggttcatcacaaaagaggacctgagagacaagaatgaatggtttctgactggtggagaaatttgaggataatctcccttgcttgaaaagcggtgattaagattggcacttgcttac

SEQ ID NO: 505486 - DNA, 120 bp, Artificial Sequence
  ENSG00000164038_64 (sequence is synthesized)
aaagcctgaagacaactgttcaaaataattaaacttaaataattaaaataatgccatatggaaaatatggaaacgttacaaattttgagatgagatatataatcataactcaattaagtg

SEQ ID NO: 505487 - DNA, 120 bp, Artificial Sequence
  ENSG00000164038_65 (sequence is synthesized)
gatctctgtggggatcttccatagacagcattcactgtgggtaaataacattcattctcatatcaacagtgtaacagaaatgcattctgtcaccagctctttaaaaatctttgcaaattg

SEQ ID NO: 505488 - DNA, 120 bp, Artificial Sequence
  ENSG00000164039_0 (sequence is synthesized)
agtttgttgctcaaaccgagttctggagaacgccatcagctcgctgcttaaaattaaaccacaggttccattatgggtcgacttgatgggaaagtcatcatcctgacggccgctgctcag

SEQ ID NO: 505489 - DNA, 120 bp, Artificial Sequence
  ENSG00000164039_1 (sequence is synthesized)
gggattggccaagcagctgccttagcttttgcaagagaaggtgccaaagtcatagccacagacattaatgagtccaaacttcaggaactggaaaagtacccgggtattcaaactcgtgtc

SEQ ID NO: 505490 - DNA, 120 bp, Artificial Sequence
  ENSG00000164039_2 (sequence is synthesized)
cttgatgtcacaaagaagaaacaaattgatcagtttgccaatgaagttgagagacttgatgttctctttaatgttgctggttttgtccatcatggaactgtcctggattgtgaggagaaa

SEQ ID NO: 505491 - DNA, 120 bp, Artificial Sequence
  ENSG00000164039_3 (sequence is synthesized)
gactgggacttctcgatgaatctcaatgtgcgcagcatgtacctgatgatcaaggcattccttcctaaaatgcttgctcagaaatctggcaatattatcaacatgtcttctgtggcttcc

SEQ ID NO: 505492 - DNA, 120 bp, Artificial Sequence
  ENSG00000164039_4 (sequence is synthesized)
agcgtcaaaggagttgtgaacagatgtgtgtacagcacaaccaaggcagccgtgattggcctcacaaaatctgtggctgcagatttcatccagcagggcatcaggtgcaactgtgtgtgc

SEQ ID NO: 505493 - DNA, 120 bp, Artificial Sequence
  ENSG00000164039_5 (sequence is synthesized)
ccaggaacagttgatacgccatctctacaagaaagaatacaagccagaggaaatcctgaagaggcacggaatgatttcctgaagagacaaaagacgggaagattcgcaactgcagaagaa

SEQ ID NO: 505494 - DNA, 120 bp, Artificial Sequence
  ENSG00000164039_6 (sequence is synthesized)
atagccatgctctgcgtgtatttggcttctgatgaatctgcttatgtaactggtaaccctgtcatcattgatggaggctggagcttgtgattttaggatctccatggtgggaaggaaggc

SEQ ID NO: 505495 - DNA, 120 bp, Artificial Sequence
  ENSG00000164039_7 (sequence is synthesized)
aggcccttcctatccacagtgaacctggttacgaagaaaactcaccaatcatctccttcctgttaatcacatgttaatgaaaataagctctttttaatgatgtcactgtttgcaagagtc

SEQ ID NO: 505496 - DNA, 120 bp, Artificial Sequence
  ENSG00000164039_8 (sequence is synthesized)
tgattctttaagtatattaatctctttgtaatctcttctgaaatcattgtaaagaaataaaaatattgaactcatagcaggagaatagtttttaaaataaatctcgatttgttagcatct

SEQ ID NO: 505497 - DNA, 120 bp, Artificial Sequence
  ENSG00000164039_9 (sequence is synthesized)
gtcttagtcactttgggctgctataacaaattaccatagatggagtgtcatagacaacaaacatttatttttcagtctggaggctaggaagtgcaagataaaggtgccagcagatatagt

SEQ ID NO: 505498 - DNA, 120 bp, Artificial Sequence
  ENSG00000164039_10 (sequence is synthesized)
ttctggttagggcccacttcctggtttgcagatggtcctcttcttgctgtatcctcacatagcaagagcagagaaaaaaagcgagcgctcatgtgtctttttataaggacactaatcctg

SEQ ID NO: 505499 - DNA, 120 bp, Artificial Sequence
  ENSG00000164039_11 (sequence is synthesized)
ttcatgagggcactacccttatgacctgattacctcccaaaggccccacctcctaatgtatcatattgcaggttaggatgtcaacacatgactctggggtgatacaaataggccattgca

SEQ ID NO: 505500 - DNA, 120 bp, Artificial Sequence
  ENSG00000164039_12 (sequence is synthesized)
gaagtttttgtttttttgtgggggagatgggggttaaggaagaagatagtaatttcaggactaggcatggtagctcatgcctataattcctgcactttgggaggccaaggcaggaggatc

SEQ ID NO: 505501 - DNA, 86 bp, Artificial Sequence
  ENSG00000164039_13 (sequence is synthesized)
ttgggaggccaaggcaggaggatcacttgcggccaggagttcaggaccagcatggttaacagaggctaaggcaggaggattataat

SEQ ID NO: 505502 - DNA, 120 bp, Artificial Sequence
  ENSG00000164039_14 (sequence is synthesized)
caagaccctgtacctaaataataataataatttccacttcatttttcaatattcaaatatttttatataattctgcattgttctgtatgtagatcctaattttaaaattttacaccatca

SEQ ID NO: 505503 - DNA, 120 bp, Artificial Sequence
  ENSG00000164039_15 (sequence is synthesized)
taaatgaacaaaggtaggaaggagtttggcttcaatagcttacagtaaaaggagtaaaggagttcagcctcaaaacgatattgttgacctgttatgttatgaaaaataatccagtgttta

SEQ ID NO: 505504 - DNA, 120 bp, Artificial Sequence
  ENSG00000164039_16 (sequence is synthesized)
tacttaacggatgccatcccttattatttactattttcttagtctaactaaacaatctttattaaaataagcaatgatatttgacatgggcctaagaaatatatagttagctaacaatat

SEQ ID NO: 505505 - DNA, 120 bp, Artificial Sequence
  ENSG00000164039_17 (sequence is synthesized)
tgtcagttagagggatttcttttctaaattaagtacagatttcttcaccaaactccaggataacagaaaagaggacataaaatttggacatagtttctggataaataaatgtaaatttaa

SEQ ID NO: 505506 - DNA, 120 bp, Artificial Sequence
  ENSG00000164039_18 (sequence is synthesized)
atataaattatgtaacaggaaacaaacgaaattaaagaaaataaatttttcaagaaaagtaaatttatggatgttaattctgtaacattgtcagggcaaagttttttgtttttattttaa

SEQ ID NO: 505507 - DNA, 120 bp, Artificial Sequence
  ENSG00000164039_19 (sequence is synthesized)
tttaagggttttatgtttgttttttacttgttgcaacctcaaatgaccaaatggtatgatgcacactgagatactcaataaatgtgcagtgattcttagccttttttcctagaactttaa

SEQ ID NO: 505508 - DNA, 120 bp, Artificial Sequence
  ENSG00000164039_20 (sequence is synthesized)
tattaacatggaaaattctgaaatggacaacaaaaagataacactttgtgtatggggaagaatatcatgcagttgatgacggtacattaaaattcacacaaaaggacattttgactagca

SEQ ID NO: 505509 - DNA, 120 bp, Artificial Sequence
  ENSG00000164039_21 (sequence is synthesized)
ttcagaaagagtccattgattataagattatctatgaggttttggaccgggcactacactaccgaattatggctaactttggtttgtgatctagaccaagtcacccaatctatcttggat

SEQ ID NO: 505510 - DNA, 120 bp, Artificial Sequence
  ENSG00000164039_22 (sequence is synthesized)
tttagttttctggtttatgaaattaaggagttaagctaaatgacttgggtttcttttcgtgtatcataatcaaaatgctgtaacttctctagtgaattcatagaacactgactcttacaa

SEQ ID NO: 505511 - DNA, 120 bp, Artificial Sequence
  ENSG00000164039_23 (sequence is synthesized)
gtatgtcatgaaatactttatgctgtgagcaggtatacatgtataatatatgtatagctatgaacaaataaattttaaataaatgcacaacgaattctacaaaatgggctccaacattaa

SEQ ID NO: 505512 - DNA, 120 bp, Artificial Sequence
  ENSG00000164039_24 (sequence is synthesized)
aaaggtgggtctgtctccttccgaggactgcgatgctcatacacgcacatcattaagagctctgcgtttgggaacaggcatagcagagattataatttcaagtattgaaatgatttcaaa

SEQ ID NO: 505513 - DNA, 120 bp, Artificial Sequence
  ENSG00000164039_25 (sequence is synthesized)
actgcttttttcaaaattggtattaagttccttaaccacagatcttttgctctcgatgtgagccagtggtaaaattaaattaaaatgtggggtatttttgccctcccttttattctttct

SEQ ID NO: 505514 - DNA, 120 bp, Artificial Sequence
  ENSG00000164039_26 (sequence is synthesized)
aatggacatggaaatgaacatcaaactgggagaaagaaccatttaacatttaattaatttaaaatagtgtattgagcaccggtatgtgctctggccataaaagaattcacagtccaaaac

SEQ ID NO: 505515 - DNA, 120 bp, Artificial Sequence
  ENSG00000164039_27 (sequence is synthesized)
taggagcaaggcagcaaacatcatcttctccagtgtgatgatatataacagaggtttgtacaaagcgctgtcaaaatacagggaaataactgcctgtgagtttgtggaatgcttcacaaa

SEQ ID NO: 505516 - DNA, 120 bp, Artificial Sequence
  ENSG00000164039_28 (sequence is synthesized)
tgatctgagccatcagcaagaagtcaagttgaaggacaaggacagcagtacaaaatgtggattatgtcacaatctggcatagttggatctgtgagtttaaaatgaaatagttactgctga

SEQ ID NO: 505517 - DNA, 120 bp, Artificial Sequence
  ENSG00000164039_29 (sequence is synthesized)
gataccatttcttctctttgcaaggatacacatattcaacatacacaagagaggaatgtaaagaagtgcctaggcctcctgttttattgttttgttttgttattaatcttcattttcttt

SEQ ID NO: 505518 - DNA, 120 bp, Artificial Sequence
  ENSG00000164039_30 (sequence is synthesized)
tggaatctgcctaagagttatggcaactgatgatgagaaactaagactaccaatgttaagtaagttcagcatttcaattaagtctcaattaagttgtgcctatactgatattatttccct

SEQ ID NO: 505519 - DNA, 120 bp, Artificial Sequence
  ENSG00000164039_31 (sequence is synthesized)
agatccagaaactgactctattgaaggaaaaaaatctgatatcaatctttttaaaaggggaggaatgtgggagaaagcatgaaaatggctactgggaaaacttatttgtgttacctttct

SEQ ID NO: 505520 - DNA, 120 bp, Artificial Sequence
  ENSG00000164039_32 (sequence is synthesized)
tctttaatgttgctgggtaattcataactttttagtttcactttccttacagaaagttttctatgactttcattcaaagaattttcataatgtggcaaaatcattcattgtgaaccatga

SEQ ID NO: 505521 - DNA, 120 bp, Artificial Sequence
  ENSG00000164039_33 (sequence is synthesized)
catattccttgggaaatatggctagattttacacagcattttcattacacataaaattcagcaggtaagacagccttagagtttgacatgatctggggcaaatgaggtctactcaagaca

SEQ ID NO: 505522 - DNA, 120 bp, Artificial Sequence
  ENSG00000164039_34 (sequence is synthesized)
ggcagtggaatgatcatagctcactgcatcctaaaactcctgggctcaagtggtcctcttgcctcagccttcaaagtagctgaggctgcagttttgtccatcatggaactgtcctggatt

SEQ ID NO: 505523 - DNA, 120 bp, Artificial Sequence
  ENSG00000164039_35 (sequence is synthesized)
gttgctcaaaccgagttctggagaacgccatcagctcgctgcttaaactggaaacaaaagtctcaacttccaacctctttgcagctaggagtggccaagtagcatagatctggtgaatga

SEQ ID NO: 505524 - DNA, 120 bp, Artificial Sequence
  ENSG00000164039_36 (sequence is synthesized)
agaacgccatcagctcgctgcttaaagccgtgtttgctctcattttctcaaagaaatctgttttagtttgagattacagtttatcaaatgttaaggctttgaccccaaaatctggtccca

SEQ ID NO: 505525 - DNA, 120 bp, Artificial Sequence
  ENSG00000164039_37 (sequence is synthesized)
gaaagacaggaaggccagctaagaggaggttttcagagtgcatagaaaggctgctctgtgcttcggcatttgttctggaagtgcttcttcggttggcaaagattcctagcaaaacctttg

SEQ ID NO: 505526 - DNA, 120 bp, Artificial Sequence
  ENSG00000164039_38 (sequence is synthesized)
actggaggctttacagggccatacacccaatatcactaatgacagtgttgtaaaatagcttttgtgcaccatgcttaggattcaaggaggataaagtatatctttctaaagttatacttt

SEQ ID NO: 505527 - DNA, 120 bp, Artificial Sequence
  ENSG00000164039_39 (sequence is synthesized)
agaaactgtcattccatgttgaaatgataaacattccatgtttatcttttgtgtaagaagtaaaaaagcaaaaattcattgcatcaaagtaggtcaggcactgttaaagccaagcttccc

SEQ ID NO: 505528 - DNA, 120 bp, Artificial Sequence
  ENSG00000164039_40 (sequence is synthesized)
catcgcctaaaaaatgtggacaaactcagaggaagtcagtgattataagctgatccctggagccagttcttacataattgtgttagtctgctcctccaagaagcagactccaagatagaa

SEQ ID NO: 505529 - DNA, 120 bp, Artificial Sequence
  ENSG00000164039_41 (sequence is synthesized)
ttaaatatgcatggattttattaggggaaatgctgttgtgagagagaatgaggagagaactaggtaaggctgtgagagccatcagacctcgatgcaagtccacccgcgagggaggaaaag

SEQ ID NO: 505530 - DNA, 120 bp, Artificial Sequence
  ENSG00000164040_0 (sequence is synthesized)
actttttcacactagaatttcaaggtgtgagaggctaaaagacgtccaagtacatgaaacagaacctgcaaataagagtgaatgacgaatagaaagaccacctcaacctgtccacttccc

SEQ ID NO: 505531 - DNA, 120 bp, Artificial Sequence
  ENSG00000164040_1 (sequence is synthesized)
tacggccgcagaagttatgattcaaggaataatgagactctaaatcctttaaaattctacaagagcagcctttgccaaacccagcggggagtggctgctcggtgccagcgcgaggagcac

SEQ ID NO: 505532 - DNA, 120 bp, Artificial Sequence
  ENSG00000164040_2 (sequence is synthesized)
gtagactgccgatgccagagaagcccggtgcgggttccgtgctttctctccgttccaggaagaccccagctcgtggccaaatcttcttgccgcttcccggtctgcgcgcctacgctgccg

SEQ ID NO: 505533 - DNA, 120 bp, Artificial Sequence
  ENSG00000164040_3 (sequence is synthesized)
gtttcccgacaaaagcgacggcgccctggtgaaaagcagacgcccctcatcggtttgcgccttgcagctcaactatgccccagcctcccacaagccacctgcccgcgtcctccgccaggc

SEQ ID NO: 505534 - DNA, 120 bp, Artificial Sequence
  ENSG00000164040_4 (sequence is synthesized)
gtccagcccggacctgcccccgcggccgccaaggcgcacgtgaagctcccgggcggggggagcgcaaggaggcgggagtttgcggacgcgaacgcaggcctaggaagggaagcgattcca

SEQ ID NO: 505535 - DNA, 120 bp, Artificial Sequence
  ENSG00000164040_5 (sequence is synthesized)
gggcgcacgcgcagagcctggagactgggcggggcgtgcctcccgcaggggttacgaacgaaaggcgagcgcgtggcgctcaggagcccgcgcacgcgctgtggtctcgccccgcccatg

SEQ ID NO: 505536 - DNA, 120 bp, Artificial Sequence
  ENSG00000164040_6 (sequence is synthesized)
agcgtccgcgcggccgtcgtagcatcttttcttcagacccgcccggctcgtctacttaacctagcggaggcttggagtgagagcagggaagtgtggggcgaggtgggcggggcgttgcac

SEQ ID NO: 505537 - DNA, 120 bp, Artificial Sequence
  ENSG00000164040_7 (sequence is synthesized)
gcgtgcgcggccagcgaaagaagggagggggcgggagatccgagacaacgttaccccgtcaacacccaatcaggagccggcctgaccccgccccctcttctcacgttattggctgagagg

SEQ ID NO: 505538 - DNA, 120 bp, Artificial Sequence
  ENSG00000164040_8 (sequence is synthesized)
cccccagatgggcggggccggccgtggggttggggagggcagggggcggggaggaggaggaaggcgctggcgggcagtgatggcggctggtgatggggacgtgaagctaggcaccctggg

SEQ ID NO: 505539 - DNA, 120 bp, Artificial Sequence
  ENSG00000164040_9 (sequence is synthesized)
gagtggcagcgagagcagcaacgacggcggcagcgagagtccaggcgacgcgggagcggcagcggaagggggaggctgggcggcggcggcgttggcgcttctgacggggggcggggaaat

SEQ ID NO: 505540 - DNA, 120 bp, Artificial Sequence
  ENSG00000164040_10 (sequence is synthesized)
ctggtggctctggtgctgctgggggcctaccggctgtgggtgcgctgggggcggcggggtctgggggccggggccggggcgggcgaggagagccccgccacctctctgcctcgcatgaag

SEQ ID NO: 505541 - DNA, 120 bp, Artificial Sequence
  ENSG00000164040_11 (sequence is synthesized)
tctgcctcgcatgaagaagcgggacttcagcttggagcagctgcgccagtacgacggctcccgcaacccgcgcatcctgctcgcggtcaatgggaaagtcttcgacgtgaccaaaggcag

SEQ ID NO: 505542 - DNA, 120 bp, Artificial Sequence
  ENSG00000164040_12 (sequence is synthesized)
caagttctacggcccggcgggtccatatggaatatttgctggtagggatgcctccagaggactggccacattttgcctagataaagatgcacttagagatgaatatgatgatctctcaga

SEQ ID NO: 505543 - DNA, 120 bp, Artificial Sequence
  ENSG00000164040_13 (sequence is synthesized)
tttgaatgcagtacaaatggagagtgttcgagaatgggaaatgcagtttaaagaaaaatatgattatgtaggcagactcctaaaaccaggagaagaaccatcagaatatacagatgaaga

SEQ ID NO: 505544 - DNA, 120 bp, Artificial Sequence
  ENSG00000164040_14 (sequence is synthesized)
agataccaaggatcacaataaacaggattgaactttgtaaacaaccaaagtcaggggccttcagaactgcaattcttactccctttcacagactgtccggagtctttgggtttgattcac

SEQ ID NO: 505545 - DNA, 120 bp, Artificial Sequence
  ENSG00000164040_15 (sequence is synthesized)
aactagacattatttatgctgccaaactcatttgttgcagttgtttgtaatgtctagtggggcttcatcatcctgaaaagaaggagacagggatttttttaaagagcaagaaagtcacaa

SEQ ID NO: 505546 - DNA, 120 bp, Artificial Sequence
  ENSG00000164040_16 (sequence is synthesized)
tattacttctttccttccttttttccttctttcctttcttctttctctttctttctttttaaaatatattgaagacaaccagatatgtatttgctactcaagtgtacagatctcctcaag

SEQ ID NO: 505547 - DNA, 120 bp, Artificial Sequence
  ENSG00000164040_17 (sequence is synthesized)
aaacatcaagggactcctgtgtcacatactgtgtttttattttaacatgggtgagggaggcgacctgatcaggggaggtgggggtacacatcaatttgagttgttcaggctactgaaaca

SEQ ID NO: 505548 - DNA, 120 bp, Artificial Sequence
  ENSG00000164040_18 (sequence is synthesized)
ttaaaatgtgaattcccaaacttttctttttggctttgtcagggaaaagaaaaatatctttataaagaaatctttggaaattaggagaaggaatttcaggtgggtttaagtcagagctag

SEQ ID NO: 505549 - DNA, 120 bp, Artificial Sequence
  ENSG00000164040_19 (sequence is synthesized)
ttccccaacagaaagatcatttgaaaccagtttttatcccttctctttccttccctttccctaaatcaaatcaatattaattgtgccttatttcacttaacatagacttgaattattttt

SEQ ID NO: 505550 - DNA, 120 bp, Artificial Sequence
  ENSG00000164040_20 (sequence is synthesized)
agggaaagcccctataatgaattcagaaatcactacaagcagcattaagactgaagttggaatattctgttgaccataaaaccttgatatcattctgtgtatatagaatgtaaaaggaat

SEQ ID NO: 505551 - DNA, 120 bp, Artificial Sequence
  ENSG00000164040_21 (sequence is synthesized)
attacagtgttaactgccatatatgtaatatacacaaactcaattagcattgtaatggccaaatgcattcccccatgcttttctgttttcaaaaaaattgaaaaacaaatcaactcttat

SEQ ID NO: 505552 - DNA, 120 bp, Artificial Sequence
  ENSG00000164040_22 (sequence is synthesized)
ccccaacagctgcctaattttaggagtctgaccctccacatctcactggtgtgggtgcatggggctgtggagtgggtgtcagtatggatgtgtctgaatgtgtgaggccttggaagggac

SEQ ID NO: 505553 - DNA, 120 bp, Artificial Sequence
  ENSG00000164040_23 (sequence is synthesized)
tctttctgcagatactgtaaatacaagtaccattttaataaagcatgtacaataaaccaaaataagcttgagttggactttatatacagaactgtaagccagtgcattatgatacagttg

SEQ ID NO: 505554 - DNA, 120 bp, Artificial Sequence
  ENSG00000164040_24 (sequence is synthesized)
taagattgtgcatttgattcaagataaggaaaaatcttggaaatgaaaagcaggcactggttaaccaagttgtacacattgtaccacattcagcataactttaggaagaaattccacttt

SEQ ID NO: 505555 - DNA, 120 bp, Artificial Sequence
  ENSG00000164040_25 (sequence is synthesized)
gtggaacattctccagaaatccaagattattcaggtaagaattggtatattaaatgtacatctttttactttctattttgatgccaactgattatactagacaattagcactccaggtgg

SEQ ID NO: 505556 - DNA, 120 bp, Artificial Sequence
  ENSG00000164040_26 (sequence is synthesized)
ttattgaacacaaaacagtaaaagaatattgcactgatagatactaaattattattttattaggttgaaaaagcccttactaaaagcccctcatatatcaattactttatttcattatga

SEQ ID NO: 505557 - DNA, 120 bp, Artificial Sequence
  ENSG00000164040_27 (sequence is synthesized)
ctacttaggttccgggctggggacaagttcacttaaaaaggcaatgttatttaacaggtcaccagttaagacttctgctttgtagatacatgcagaagccatcaaacaagggggagcttt

SEQ ID NO: 505558 - DNA, 120 bp, Artificial Sequence
  ENSG00000164040_28 (sequence is synthesized)
taactgcaacaataagctaaagtatgtaaaatactacattctattcagtcttggagtgttttgtagaaagttatcttcagccaaatctttgctgaagactggttgtggagtgttggtaaa

SEQ ID NO: 505559 - DNA, 120 bp, Artificial Sequence
  ENSG00000164040_29 (sequence is synthesized)
tgctttgtgtttttatgtaaaatattttctaaacaaaaaatgttaaaagtacatgtcctctgtagtaaactgatatctatatatatgaatcattcaagcctaaagtctagtaataaactg

SEQ ID NO: 505560 - DNA, 120 bp, Artificial Sequence
  ENSG00000164040_30 (sequence is synthesized)
tacttgtgaatagagaaaccctaaatattcatgcagaaaaaattatgcggtctgttaagaaaaatgagtaatttgtgttttggacttgaaataaacagtgttctgtagataattcctcaa

SEQ ID NO: 505561 - DNA, 120 bp, Artificial Sequence
  ENSG00000164040_31 (sequence is synthesized)
aagttctacggcccgggtgaggagttggaaggggaggggaaggaccccctgcagctgaagcacaacccccttcggacagggaggcctctgggcaccgggccacgtttaggggcatgtaaa

SEQ ID NO: 505562 - DNA, 120 bp, Artificial Sequence
  ENSG00000164040_32 (sequence is synthesized)
gccactgatctccttttttccctcgctgtattactccgtaaggccacgtttaggggcatgtaaagtcccaaccctccagtctctgaagtccagacgtataagcaacacctcggactctct

SEQ ID NO: 505563 - DNA, 120 bp, Artificial Sequence
  ENSG00000164040_33 (sequence is synthesized)
agacgtataagcaacacctcggactctctttaaaccagttttagttcggagttgctttccatgattaacaaggtatgtgggatgagaacagaccagaatgcagagcttattaaagactgc

SEQ ID NO: 505564 - DNA, 120 bp, Artificial Sequence
  ENSG00000164040_34 (sequence is synthesized)
ctgaactagtcactgggaccacaaagatgatacagtctcttttctcatagaattacaaccttcataaggatagcagaaagaaaaatgttacagattcaagttcagctgagtctttacata

SEQ ID NO: 505565 - DNA, 120 bp, Artificial Sequence
  ENSG00000164040_35 (sequence is synthesized)
atacatgatgttctgttgattatttttatttttttgatgccactattaacagcaaccagtaaacattatttcccctcaagcagactggcttctaaacctaaccacttaagtttcttcttc

SEQ ID NO: 505566 - DNA, 120 bp, Artificial Sequence
  ENSG00000164040_36 (sequence is synthesized)
tccctcattacctcacagtcttcattttgaatattaagtttggggatatctgaagtaattgaaattgagggttttaagatctaagtgaaaagctttacttgggtcaaaaggcagatttcc

SEQ ID NO: 505567 - DNA, 120 bp, Artificial Sequence
  ENSG00000164040_37 (sequence is synthesized)
aggcagatttccaacaaatttcttttcttattccatctagtatctgtacatgttttgaaattaagggtatatacaaatgtgaattatgaggggtttttttctttgttgtgtttttttttt

SEQ ID NO: 505568 - DNA, 120 bp, Artificial Sequence
  ENSG00000164045_0 (sequence is synthesized)
actgagccgctattaccgcgaaaggccggcctggctgcgacagcctgggtaagaggtgtaggtcggcttggttttctgctacccggagctgggcaagcgggtgggagaacagcgaagaca

SEQ ID NO: 505569 - DNA, 120 bp, Artificial Sequence
  ENSG00000164045_1 (sequence is synthesized)
gcgtgagcctgggccgttgcctcgaggctctcgcccggcttctcttgccgacccgccacgtttgtttggatttaatcttcaggttgccggcgcccgcccgcccgctggcctcgcggtgtg

SEQ ID NO: 505570 - DNA, 120 bp, Artificial Sequence
  ENSG00000164045_2 (sequence is synthesized)
agagggaagcacccgtgcctgtggctggtggctggcgcctggagggtccgcacacccgcccggccgcgccgcttgcccgcggcagccgcgtccctgaaccgcggagtcgtgtttgtgttt

SEQ ID NO: 505571 - DNA, 120 bp, Artificial Sequence
  ENSG00000164045_3 (sequence is synthesized)
agtcgtgtttgtgtttgacccgcgggcgccggtggcgcgcggccgaggccggtgtcggcggggcggggcggtcgcggcggaggcagaggaagagggagcgggagctctgcgaggccgggc

SEQ ID NO: 505572 - DNA, 120 bp, Artificial Sequence
  ENSG00000164045_4 (sequence is synthesized)
gcccggagcccccgcaccgccgccgcctgctcttcgcctgcagcccccctcccgcgtcgcagcccgtcgtgaaggcgctatttggcgcttcagccgccgggggactgtcgcctgtcacca

SEQ ID NO: 505573 - DNA, 120 bp, Artificial Sequence
  ENSG00000164045_5 (sequence is synthesized)
acctgaccgtcactatggaccagctgcagggtctgggcagtgattatgagcaaccactggaggtgaagaacaacagtaatctgcagagaatgggctcctccgagtcaacagattcaggtt

SEQ ID NO: 505574 - DNA, 120 bp, Artificial Sequence
  ENSG00000164045_6 (sequence is synthesized)
tctgtctagattctcctgggccattggacagtaaagaaaaccttgaaaatcctatgagaagaatacattccctacctcagaagctgttgggatgtagtccagctctgaagaggagccatt

SEQ ID NO: 505575 - DNA, 120 bp, Artificial Sequence
  ENSG00000164045_7 (sequence is synthesized)
ctgattctcttgaccatgacatctttcagctcatcgacccagatgagaacaaggaaaatgaagcctttgagtttaagaagccagtaagacctgtatctcgtggctgcctgcactctcatg

SEQ ID NO: 505576 - DNA, 120 bp, Artificial Sequence
  ENSG00000164045_8 (sequence is synthesized)
gactccaggagggtaaagatctcttcacacagaggcagaactctgccccagctcggatgctttcctcaaatgaaagagatagcagtgaaccagggaatttcattcctctttttacacccc

SEQ ID NO: 505577 - DNA, 120 bp, Artificial Sequence
  ENSG00000164045_9 (sequence is synthesized)
agtcacctgtgacagccactttgtctgatgaggatgatggcttcgtggaccttctcgatggagagaatctgaagaatgaggaggagaccccctcgtgcatggcaagcctctggacagctc

SEQ ID NO: 505578 - DNA, 120 bp, Artificial Sequence
  ENSG00000164045_10 (sequence is synthesized)
ctctcgtcatgagaactacaaaccttgacaaccgatgcaagctgtttgactccccttccctgtgtagctccagcactcggtcagtgttgaagagaccagaacgatctcaagaggagtctc

SEQ ID NO: 505579 - DNA, 120 bp, Artificial Sequence
  ENSG00000164045_11 (sequence is synthesized)
cacctggaagtacaaagaggaggaagagcatgtctggggccagccccaaagagtcaactaatccagagaaggcccatgagactcttcatcagtctttatccctggcatcttcccccaaag

SEQ ID NO: 505580 - DNA, 120 bp, Artificial Sequence
  ENSG00000164045_12 (sequence is synthesized)
gaaccattgagaacattttggacaatgacccaagggaccttataggagacttctccaagggttatctctttcatacagttgctgggaaacatcaggatttaaaatacatctctccagaaa

SEQ ID NO: 505581 - DNA, 120 bp, Artificial Sequence
  ENSG00000164045_13 (sequence is synthesized)
ttatggcatctgttttgaatggcaagtttgccaacctcattaaagagtttgttatcatcgactgtcgatacccatatgaatacgagggaggccacatcaagggtgcagtgaacttgcaca

SEQ ID NO: 505582 - DNA, 120 bp, Artificial Sequence
  ENSG00000164045_14 (sequence is synthesized)
tggaagaagaggttgaagacttcttattgaagaagcccattgtacctactgatggcaagcgtgtcattgttgtgtttcactgcgagttttcttctgagagaggtccccgcatgtgccggt

SEQ ID NO: 505583 - DNA, 120 bp, Artificial Sequence
  ENSG00000164045_15 (sequence is synthesized)
atgtgagagagagagatcgcctgggtaatgaataccccaaactccactaccctgagctgtatgtcctgaaggggggatacaaggagttctttatgaaatgccagtcttactgtgagcccc

SEQ ID NO: 505584 - DNA, 120 bp, Artificial Sequence
  ENSG00000164045_16 (sequence is synthesized)
ctaccggcccatgcaccacgaggactttaaagaagacctgaagaagttccgcaccaagagccggacctgggcaggggagaagagcaagagggagatgtacagtcgtctgaagaagctctg

SEQ ID NO: 505585 - DNA, 120 bp, Artificial Sequence
  ENSG00000164045_17 (sequence is synthesized)
agggcggcaggaccagccagcagcagcccaagcttccctccatccccctttaccctctttgctgcagagaaacttaagcaaaggggacagctgtgtgacatttggagagggggcctggga

SEQ ID NO: 505586 - DNA, 120 bp, Artificial Sequence
  ENSG00000164045_18 (sequence is synthesized)
cttccatgccttaaacctacctcccacactcccaaggttggagcccagggcatcttgctggctacgcctcttctgtccctgttagacgtcctccgtccatatcagaactgtgccacaatg

SEQ ID NO: 505587 - DNA, 120 bp, Artificial Sequence
  ENSG00000164045_19 (sequence is synthesized)
cagttctgagcaccgtgtcaagctgctctgagccacagtgggatgaaccagccggggccttatcgggctccagccatctcatgaggggagaggagacggaggggagtagagaagttacac

SEQ ID NO: 505588 - DNA, 120 bp, Artificial Sequence
  ENSG00000164045_20 (sequence is synthesized)
agaaatgctgctggccaaatagcaaagacaacctgggaaggaaaggtctttgtgggataatccatatgtttaatttattcaacttcatcaatcactttattttatttttttttctaactc

SEQ ID NO: 505589 - DNA, 120 bp, Artificial Sequence
  ENSG00000164045_21 (sequence is synthesized)
ctggagacttattttactgcttcattaggttgaaatactgccattctaggtagggttttattatcccagggactacctcggcttttaatttaaaaaaaaaaaagaagtgggtaagaaaat

SEQ ID NO: 505590 - DNA, 120 bp, Artificial Sequence
  ENSG00000164045_22 (sequence is synthesized)
gcaaacctgttataagttatcggacagaaagctaggtgctctgtcacccccaggaggcgctgtggtactggggctgctgctatttaagccaagaactgaggtcctggtgagagcgttgga

SEQ ID NO: 505591 - DNA, 120 bp, Artificial Sequence
  ENSG00000164045_23 (sequence is synthesized)
cccaggcttggctgcctgacataagctaaatctcccagacccaccactggctaccgatatctatttggtgggaggtgtggccctgttcttcctcaccccagttccatgacattggctggt

SEQ ID NO: 505592 - DNA, 120 bp, Artificial Sequence
  ENSG00000164045_24 (sequence is synthesized)
ataggagccacagtcaggaaagcacttgaggcagcatctgttgggccacccccggctcagtgctggaatgttgcagtgtaggtttcccagggaaggggggtgggggtaggtgggctccac

SEQ ID NO: 505593 - DNA, 120 bp, Artificial Sequence
  ENSG00000164045_25 (sequence is synthesized)
aggatgggggaggagcatgtccactgagtatcttccttatgttgctgtgatattgatagcttttattttctaatttttaaaaaatggtcatattatgagtcaaagagtatcaaatcagtg

SEQ ID NO: 505594 - DNA, 120 bp, Artificial Sequence
  ENSG00000164045_26 (sequence is synthesized)
ttggatggaccacccaagggtgaggagaggggctggaagccctgggcattaggagaagggagtgggtgctggcatggacatgactggatagaattttctcaggagggagcttggtggatt

SEQ ID NO: 505595 - DNA, 120 bp, Artificial Sequence
  ENSG00000164045_27 (sequence is synthesized)
ttgaaggtaaaactttctgggtttatcatgttttaattttagagacagggagtgatgaatcatcaccggttgtccccttatctaactccataaaagtgggaatttcaaaagaacacctca

SEQ ID NO: 505596 - DNA, 120 bp, Artificial Sequence
  ENSG00000164045_28 (sequence is synthesized)
tccaaggagctggggcagacttcattgattctagagagacctgtttcagtgcctactcatccctgccctctggtgccagcctccttaccatcacggcttcactgaggtgtaggtgggttt

SEQ ID NO: 505597 - DNA, 120 bp, Artificial Sequence
  ENSG00000164045_29 (sequence is synthesized)
ttcttaaacaggagacagtctctcccctcttacctcaacttcttggggtgggaatcagtgatactggagatggctagttgctgtgttacgggtttgagttacatttggctataaaacaat

SEQ ID NO: 505598 - DNA, 120 bp, Artificial Sequence
  ENSG00000164045_30 (sequence is synthesized)
cttgttgggaaaaatgtgggggagaggacttcttcctacacgcgcattgagacagattccaactggttaatgatattgtttgtaagaaagagattctgttggttgactgcctaaagagaa

SEQ ID NO: 505599 - DNA, 120 bp, Artificial Sequence
  ENSG00000164045_31 (sequence is synthesized)
aggtgggatggccttcagattataccagcttagctagcattactaaccaactgttggaagctctgaaaataaaagatcttgaacccatgctctctgcctagttcttgatggatttaagga

SEQ ID NO: 505600 - DNA, 120 bp, Artificial Sequence
  ENSG00000164045_32 (sequence is synthesized)
aaggtcacacttctcttgacgcaggattatgtagacagtttttgtgagggcaaaggacgttttgctcatctctatataatgtcagctgagtatatattcattgagcactaagtgctcagt

SEQ ID NO: 505601 - DNA, 120 bp, Artificial Sequence
  ENSG00000164045_33 (sequence is synthesized)
gcctactatgtgccaggccctgtgagagttgctaggactagatgaatcggcagtgtctgttggctaatttagaattgatcttagatcatcccaggaaaccttcggtttatttgtcttacc

SEQ ID NO: 505602 - DNA, 120 bp, Artificial Sequence
  ENSG00000164047_0 (sequence is synthesized)
gtcctgtgaagcaatagccaggggctaaagcaaaccccagcccacaccctggcaggcagccagggatgggtggatcaggaaggctcctggttgggcttttgcatcaggctcaggctgggc

SEQ ID NO: 505603 - DNA, 120 bp, Artificial Sequence
  ENSG00000164047_1 (sequence is synthesized)
ataaaggaggctcctgtgggctagagggaggcagacatggggaccatgaagacccaaagggatggccactccctggggcggtggtcactggtgctcctgctgctgggcctggtgatgcct

SEQ ID NO: 505604 - DNA, 120 bp, Artificial Sequence
  ENSG00000164047_2 (sequence is synthesized)
ctggccatcattgcccaggtcctcagctacaaggaagctgtgcttcgtgctatagatggcatcaaccagcggtcctcggatgctaacctctaccgcctcctggacctggaccccaggccc

SEQ ID NO: 505605 - DNA, 120 bp, Artificial Sequence
  ENSG00000164047_3 (sequence is synthesized)
caaagcctgtgagcttcacagtgaaggagacagtgtgccccaggacgacacagcagtcaccagaggattgtgacttcaagaaggacgggctggtgaagcggtgtatggggacagtgaccc

SEQ ID NO: 505606 - DNA, 120 bp, Artificial Sequence
  ENSG00000164047_4 (sequence is synthesized)
tcaaccaggccaggggctcctttgacatcagttgtgataaggataacaagagatttgccctgctgggtgatttcttccggaaatctaaagagaagattggcaaagagtttaaaagaattg

SEQ ID NO: 505607 - DNA, 120 bp, Artificial Sequence
  ENSG00000164047_5 (sequence is synthesized)
tccagagaatcaaggattttttgcggaatcttgtacccaggacagagtcctagtgtgtgccctaccctggctcaggcttctgggctctgagaaataaactatgagagcaatttcctcagg

SEQ ID NO: 505608 - DNA, 120 bp, Artificial Sequence
  ENSG00000164048_0 (sequence is synthesized)
gcgcattctaatccgtttcacacacggtgctgctacctcgtttgcttcgtgcgtgcgtgcgcgcgcagatgtgggccccgcgggagcagctactgggctggactgcggaagctctgcctg

SEQ ID NO: 505609 - DNA, 120 bp, Artificial Sequence
  ENSG00000164048_1 (sequence is synthesized)
ccaaggattctgcctggccctgggaagagaagcctagatatctgggaccagtgactttcgaggatgtggctgtgcttttcactgaggcagagtggaagagactgagccttgagcagagga

SEQ ID NO: 505610 - DNA, 120 bp, Artificial Sequence
  ENSG00000164048_2 (sequence is synthesized)
acctatacaaagaagtgatgctggaaaatctcaggaatctggtctcattggcagaatcaaagccagaagtccatacctgcccttcttgccctctggcctttggcagtcagcagttcctca

SEQ ID NO: 505611 - DNA, 120 bp, Artificial Sequence
  ENSG00000164048_3 (sequence is synthesized)
gccaagatgagctacacaatcatcctattccaggtttccatgcaggaaatcaactccacccaggaaatccctgcccagaggatcagccacagtcacaacatccttctgataaaaatcaca

SEQ ID NO: 505612 - DNA, 120 bp, Artificial Sequence
  ENSG00000164048_4 (sequence is synthesized)
ggggggctgaagcagaagatcaacgagtggaaggaggcgtcagacccttgttttggagtacaaatgaaaggggggctttagtgggtttctctagcctgttccagagaccaccaataagct

SEQ ID NO: 505613 - DNA, 120 bp, Artificial Sequence
  ENSG00000164048_5 (sequence is synthesized)
cttggggaggcaacagaatattagagatacagctcagtccagcccagaatgcaagctctgaggaagtagacagaatttccaagagggcagaaaccccagggtttggagcagtcacgtttg

SEQ ID NO: 505614 - DNA, 120 bp, Artificial Sequence
  ENSG00000164048_6 (sequence is synthesized)
gggagtgtgcactagcttttaaccagaagtcaaacctgttcagacagaaggcagtcacagcagaaaaatcttcagacaaaaggcagtcacaggtgtgcagggagtgtgggcgaggcttta

SEQ ID NO: 505615 - DNA, 120 bp, Artificial Sequence
  ENSG00000164048_7 (sequence is synthesized)
gcaggaagtcacagctcatcatacaccagaggacacacacaggagaaaagccttatgtctgcggagagtgtgggcgaggctttatagttgagtcagtcctccgcaaccacctgagtacac

SEQ ID NO: 505616 - DNA, 120 bp, Artificial Sequence
  ENSG00000164048_8 (sequence is synthesized)
actccggggagaaaccttatgtgtgcagccattgtgggcgaggctttagctgcaagccatacctcatcagacatcagaggacacacacaagggagaaatcgtttatgtgcacagtgtgtg

SEQ ID NO: 505617 - DNA, 120 bp, Artificial Sequence
  ENSG00000164048_9 (sequence is synthesized)
ggcgaggctttcgtgaaaagtcagagctcattaagcaccagagaattcacacgggggataagccttatgtgtgcagagattgaggccgaggctttgtaaggagatcatgtctcaacacac

SEQ ID NO: 505618 - DNA, 120 bp, Artificial Sequence
  ENSG00000164048_10 (sequence is synthesized)
accagaggatacattcagatgagaagccttttgtttgcagagagtgtgggcgaggctttcgtgctaaatcaactctcctcctacaccagtggacacattcagaggtgaaacctcacgtgt

SEQ ID NO: 505619 - DNA, 120 bp, Artificial Sequence
  ENSG00000164048_11 (sequence is synthesized)
gtgaggagtgtgggcatggatttagccagaagtcgtcgctcaaatcacatcggagaacacactcaggggagaagccttatgtgtgtggggaatgtgggcggggatttagccggaggatag

SEQ ID NO: 505620 - DNA, 120 bp, Artificial Sequence
  ENSG00000164048_12 (sequence is synthesized)
tcctcaatggacactggaggacacacacgggagagaagccttacacgtgctttgagtgtgggcgaaactttagcctcaagtccgctcttagtgtacatcagaggatacactctggggaga

SEQ ID NO: 505621 - DNA, 120 bp, Artificial Sequence
  ENSG00000164048_13 (sequence is synthesized)
agccttatgcatgcacggagtgtgggcaaggctttatcacgaaatcacagctcatcagacaccagaggacacacacaggagaaaagccttatgtctgcggagagtgtgggcgaggcttta

SEQ ID NO: 505622 - DNA, 120 bp, Artificial Sequence
  ENSG00000164048_14 (sequence is synthesized)
gtcaaccctccactaccaccggagtacacactccaaggaaaaaccttatgtgtgcagccagtgtgggcgaggcttttgtgataaatcaactctcctcgcacacgagcagacacattcagg

SEQ ID NO: 505623 - DNA, 120 bp, Artificial Sequence
  ENSG00000164048_15 (sequence is synthesized)
ggagaagccttatgtgtgtggggaatgtgggcggggatttggccggaagatactcctcaacagacactggaggacacacacaggagagaaaccttacgcatgcatcgagtgtgggcgaaa

SEQ ID NO: 505624 - DNA, 120 bp, Artificial Sequence
  ENSG00000164048_16 (sequence is synthesized)
ctttagccacaagtccactctcagcttacatcagaggatacactcgggggagaagccttatgcatgcgtggagtgtgggcaaagctttaggagaaagtcacagctcatcatacaccagaa

SEQ ID NO: 505625 - DNA, 120 bp, Artificial Sequence
  ENSG00000164048_17 (sequence is synthesized)
gatacactcggggaaaagctttagaggtgcaaggagtgaggatgtgattttagcaacaagtcagccatcagccacaccagcggaaatgcttagggagaagccttgtttgtaaggtaatgt

SEQ ID NO: 505626 - DNA, 120 bp, Artificial Sequence
  ENSG00000164048_18 (sequence is synthesized)
ggacagagctgtacgtggacatcattacttgtcacgtgtcagaggacacactcgggagaaaccttcatggagtgagagtaaggtgttggctggaagtggccccttaagagatacttggag

SEQ ID NO: 505627 - DNA, 120 bp, Artificial Sequence
  ENSG00000164048_19 (sequence is synthesized)
tcaaatctatccactgtacgcccaccccactcttgttctaagagctttggggacagtcttttgaccccttacattcctttagatgtgaagatgacagagatctaacttctgagagcagag

SEQ ID NO: 505628 - DNA, 120 bp, Artificial Sequence
  ENSG00000164048_20 (sequence is synthesized)
gtgtcaagtgacggtccccttggaggaatggtctttgcatctgactacttccttctgcaactgtgttcttccattagcttccatgacactctcctgctttatttttttctacatctctag

SEQ ID NO: 505629 - DNA, 120 bp, Artificial Sequence
  ENSG00000164048_21 (sequence is synthesized)
cctttgctgtttcctctcctaccccacctttagattttactcagagttcagtctccagccctacaatctgagggacacctttaccaggtccccttcctaaccctccagtcccaaatccaa

SEQ ID NO: 505630 - DNA, 120 bp, Artificial Sequence
  ENSG00000164048_22 (sequence is synthesized)
gattctttaaccacactctaaaagttcttcagactcaggacttaaacatagccacgccaccttggccttcaatgacagggatctagcaatgctgcatcatcagccttccaataccaggtt

SEQ ID NO: 505631 - DNA, 120 bp, Artificial Sequence
  ENSG00000164048_23 (sequence is synthesized)
taagggtattttaaacacagctcctcttaaatcctccaatctcagtacccagtgttttagccatgctcgggtggctaaattacatccaggaatggtgccagggcctttagccatttgtct

SEQ ID NO: 505632 - DNA, 120 bp, Artificial Sequence
  ENSG00000164048_24 (sequence is synthesized)
ctcctcacactccagggcccatatggcccaggttctgacagtttgccttactcccttgggctggggctagccctacctgataccctgtgtcaatgagtgtaccttggagagctatccact

SEQ ID NO: 505633 - DNA, 120 bp, Artificial Sequence
  ENSG00000164048_25 (sequence is synthesized)
caggccccagtgcctctatttgctaagggactctgccacagaaaagaaggggagagatgttcatgtaacctcaaaatacttaggcttggttttgatgctagagaggaaaaaggacttgga

SEQ ID NO: 505634 - DNA, 120 bp, Artificial Sequence
  ENSG00000164048_26 (sequence is synthesized)
gagagagaaggaatggctggtccagaggcttttgtccactccctctcactggaagtggttgatctccagggaatccccaaggttagcctgcttaggggaagggctaggggtacctggaat

SEQ ID NO: 505635 - DNA, 74 bp, Artificial Sequence
  ENSG00000164048_27 (sequence is synthesized)
ggttagcctgcttaggggaagggctaggggtacctggaatgtaggatctcccccatgcctggcctaccacccta

SEQ ID NO: 505636 - DNA, 120 bp, Artificial Sequence
  ENSG00000164048_28 (sequence is synthesized)
cgtgcgtgcgcgcgcagatgtgggccccgcgggagcagctactgggctggactgcggaagctctgcctgccaaggattctgcctggccctgggaagagaagcctagatatctggttccag

SEQ ID NO: 505637 - DNA, 120 bp, Artificial Sequence
  ENSG00000164048_29 (sequence is synthesized)
tggcagatggggcactggccagaggggttaggaggatttggactctccttgggagtcgctgtgatacggccttcaattatagttgtctttccttcttggatttccaccacttccctgaaa

SEQ ID NO: 505638 - DNA, 120 bp, Artificial Sequence
  ENSG00000164048_30 (sequence is synthesized)
ccacgagctggaagctgagaccagctggtcactgctgggcctgctaggagcccacacggaagctgcccacagccagacaccagagcctcaaaggccgccatcttgaaaaaccaaccctga

SEQ ID NO: 505639 - DNA, 120 bp, Artificial Sequence
  ENSG00000164048_31 (sequence is synthesized)
cctccacaatgattgattttcaaatgttgaaccagctttgcagaactataataaacccaagtgtgataccctgtctcaagtattgtggtgatcaaataggaccagtgactttcgaggatg

SEQ ID NO: 505640 - DNA, 120 bp, Artificial Sequence
  ENSG00000164048_32 (sequence is synthesized)
agggctcctgcccctggacctgaacctggatctttggctttgatgttggaccttgtgtgtggatatgaactttgaacctgcaccttggaactaaacctctgacttggatttgttctgcat

SEQ ID NO: 505641 - DNA, 120 bp, Artificial Sequence
  ENSG00000164048_33 (sequence is synthesized)
tttggaactcaccttagacctgaaccttggtcatgaaatggatctgaatcattcttgggtcttggacatgggacttggacctccatgtgtatcttggacttaggaccatgatctggacct

SEQ ID NO: 505642 - DNA, 120 bp, Artificial Sequence
  ENSG00000164048_34 (sequence is synthesized)
tgtaaattgacttggactttggacttggaccttggactagaatttgtccctggctgtggacctcgtctttggatctggatctggacctggtcttggatgttggacctagatgcaggcctt

SEQ ID NO: 505643 - DNA, 120 bp, Artificial Sequence
  ENSG00000164048_35 (sequence is synthesized)
gcccaacacccgcgtctttggaactgcatcttggaccttggatctgaaatttaaacagggaggtgaccttcatttcttgtatttgactttataactggaaattcaatctctacctggatc

SEQ ID NO: 505644 - DNA, 120 bp, Artificial Sequence
  ENSG00000164048_36 (sequence is synthesized)
ttggacctggatctcagaccttgctttttattgggccatggatcttataccttaaacatggaaattgtacctggatttggacctttgacttggacctggatctggacccagggataagat

SEQ ID NO: 505645 - DNA, 120 bp, Artificial Sequence
  ENSG00000164048_37 (sequence is synthesized)
ttggacctcacttgcaaattttggtaatgaaattttcctttgctcctgtagtccttggacctaggcttcagtcatggatttagaccttagacgtgaccatcagaccttagagttgaacct

SEQ ID NO: 505646 - DNA, 120 bp, Artificial Sequence
  ENSG00000164048_38 (sequence is synthesized)
aaattcctggtccccagtcctataactcagaatgattatgcataaccttggacttagaacttagatctggatcttagagctgatacttgacctggtactggatatttaaccttggacttc

SEQ ID NO: 505647 - DNA, 120 bp, Artificial Sequence
  ENSG00000164048_39 (sequence is synthesized)
agacatggatttaatctgggccttgggatgatttaagatctagaagtggacctagaattagaccttggacttatgtgcctgagcctggactttggaagtggactttgggccttgtaactc

SEQ ID NO: 505648 - DNA, 75 bp, Artificial Sequence
  ENSG00000164048_40 (sequence is synthesized)
gagcctggactttggaagtggactttgggccttgtaactcaaccttgaatatgagcctcaaatgtagactgtgga

SEQ ID NO: 505649 - DNA, 90 bp, Artificial Sequence
  ENSG00000164048_41 (sequence is synthesized)
ggttggtggcacacacctgtagttccaggtactcaggaggctgaggcaggaggttcacttgggcccaggaggcagaggttgcagtgagct

SEQ ID NO: 505650 - DNA, 120 bp, Artificial Sequence
  ENSG00000164048_42 (sequence is synthesized)
acccctcaatcttgcagttctcttcccgtcataggcctgtgatctttcggggcagcatgcctccatggggctggatgaactggctaagcagcaaaacatcatcatagttttacttgtggt

SEQ ID NO: 505651 - DNA, 120 bp, Artificial Sequence
  ENSG00000164048_43 (sequence is synthesized)
gataccaaaaagtctgctggataaacaccatctctattctaatattatggagagatcaggatctcctgtgcccaaatcaaacctgttaatacactcagctgtcctcagtggtaacactga

SEQ ID NO: 505652 - DNA, 120 bp, Artificial Sequence
  ENSG00000164048_44 (sequence is synthesized)
ggtcaacacacaactccaacatcaggaacaagtcataaccattttgcatctgaaacagtgcctgacacaaaggtgcttgatcaattttatttactaaataaacctatatagtcttatttc

SEQ ID NO: 505653 - DNA, 120 bp, Artificial Sequence
  ENSG00000164049_0 (sequence is synthesized)
ttctttctcctccactgcaaagttaaatgcgagaaggtagaaacccagaggccatgctggcgctgagagatgagccccactcaccagattcaagatcccaagtgctgcagactttggcaa

SEQ ID NO: 505654 - DNA, 120 bp, Artificial Sequence
  ENSG00000164049_1 (sequence is synthesized)
agcctataaattcagagcagcccggagaggagaaaggaaagtggatgtgggttcaggccgcatgaaatggagatccgattgcctgacttagctttgaagcgaatcttctctttcctggac

SEQ ID NO: 505655 - DNA, 120 bp, Artificial Sequence
  ENSG00000164049_2 (sequence is synthesized)
ctgttcggcttgctgcaggtttcccaggtgaacaagcattggaataggattgcagacagtgattacctgtggaggtcactatctctgcagagatgggactgcagcaacttcaccaatcaa

SEQ ID NO: 505656 - DNA, 120 bp, Artificial Sequence
  ENSG00000164049_3 (sequence is synthesized)
cacctgggcacacacacatggaagcaatttttcctgcatcaaagaaggaaggagcttcggttggcattggcacagccgcataactttatctacaaagtaactaagaacatcgcatttgag

SEQ ID NO: 505657 - DNA, 120 bp, Artificial Sequence
  ENSG00000164049_4 (sequence is synthesized)
acggagttggcttatctctcaggaaatagacttacagtggatgaacaggagaaatcaatcatttgtagtgtatctccaaagcaagagctttgtgcctgggatgtgcaagagggtaccatg

SEQ ID NO: 505658 - DNA, 120 bp, Artificial Sequence
  ENSG00000164049_5 (sequence is synthesized)
atctggtcaagcccagtccaggagttccatttctcaaatctggtaaccctccctcagatgcatctcgccatcactatggatcggaaaaaaactatcaaagtgtggaactgtcaggacagg

SEQ ID NO: 505659 - DNA, 120 bp, Artificial Sequence
  ENSG00000164049_6 (sequence is synthesized)
gatgctgcaggtgacatctacacatttacactgcctgggttaagagatgtttctaaagttactgcatttcaatatggtattgtacttctacactgctctcctgacaagaaatgggtattt

SEQ ID NO: 505660 - DNA, 120 bp, Artificial Sequence
  ENSG00000164049_7 (sequence is synthesized)
gcatgtgggacatacagtcgtaccttgccacaggtattcctcacagagtccttactgagaccatcagaaggcagtgttcctctgtctacctttctcccacataaattatgtgccagcgcc

SEQ ID NO: 505661 - DNA, 120 bp, Artificial Sequence
  ENSG00000164049_8 (sequence is synthesized)
tgctggaccccaaaggtgaaaaacaggataacactgatgtcccaaagtagcactggaaaaaagacagaatttatcacctttgatctaacaaccaagaagactggaggccaaacagtcatc

SEQ ID NO: 505662 - DNA, 120 bp, Artificial Sequence
  ENSG00000164049_9 (sequence is synthesized)
caagcatatgagatcgcaagtttccaggtggcagctcatctgaagtgccctatctggatgggagccagtgatggatatatgattgtctttaccagtggaccatacttgttactcttcagc

SEQ ID NO: 505663 - DNA, 120 bp, Artificial Sequence
  ENSG00000164049_10 (sequence is synthesized)
atcactggcttcctgctgcaacgatttgaggaccatcaggcagccatcaacaacttctgggtggatccttgctatgtgctcaccacatccgagaactctgtgcacgtgtacatgtgggaa

SEQ ID NO: 505664 - DNA, 120 bp, Artificial Sequence
  ENSG00000164049_11 (sequence is synthesized)
gaaggaggccgccatccatacctcaggagctgctgtcacctggaaaacacgtggcatgatcacacaacagacagctgcatctccagtgtgatgtgtgataatgcaagcatagtacttagg

SEQ ID NO: 505665 - DNA, 120 bp, Artificial Sequence
  ENSG00000164049_12 (sequence is synthesized)
gtgaggaaagtaagtgactccagcattctggtgatgtattctttgaatacgtaatatggaaactaacaaaattgaccttgcatcatcttctgcaatgtagtaaagaaattctatttgcaa

SEQ ID NO: 505666 - DNA, 120 bp, Artificial Sequence
  ENSG00000164049_13 (sequence is synthesized)
cctgtgtggctgtgttgtgagatatacacaggaaagttagtgtgagtagggggttgtgatataaccggggctctgaggaggtgaactgactgagaacagcctgatgggactgtgactctg

SEQ ID NO: 505667 - DNA, 120 bp, Artificial Sequence
  ENSG00000164049_14 (sequence is synthesized)
ggcagccatcaacaacttctgggtggtatgtatgattctcctccactgctttttgatctgactttgactccttggccactcactctggctatccttggaaggatccttgctatgtgctca

SEQ ID NO: 505668 - DNA, 120 bp, Artificial Sequence
  ENSG00000164049_15 (sequence is synthesized)
ttggagaatgaaaaaaatccagaaaattcaacaaatgctgaagttaatgtcttatttcatagaattccaaaggctacatgatgaaatacaggcctccaccaaattggtggtgagatcaga

SEQ ID NO: 505669 - DNA, 120 bp, Artificial Sequence
  ENSG00000164049_16 (sequence is synthesized)
aatctacaagatccgggaccctcagaaaagtaatactccttgtaggtaaactgagggaaaatctattcgttagagaaggatgaacagctacctccctcagcttcagagatgggtgaaatc

SEQ ID NO: 505670 - DNA, 120 bp, Artificial Sequence
  ENSG00000164049_17 (sequence is synthesized)
tatcttcagagaattcctaaccataaccaaagtcacatttggggtttatatcagtcaaggtcccaggatgataaagatgacacatacaaattaagggtctcactctgtcacccaagctgg

SEQ ID NO: 505671 - DNA, 67 bp, Artificial Sequence
  ENSG00000164049_18 (sequence is synthesized)
ggcgtgtgccaccaccctgccctcaataatttctttttcttactcactgcagcctcaacctcccagg

SEQ ID NO: 505672 - DNA, 120 bp, Artificial Sequence
  ENSG00000164049_19 (sequence is synthesized)
attacagagcccaggactggtaacagctgtgcttcaccatcccttattggcttcccagagcctgcagctctgtgccagcttgggatccaaccccatgacacagagtggctcctgccacat

SEQ ID NO: 505673 - DNA, 120 bp, Artificial Sequence
  ENSG00000164049_20 (sequence is synthesized)
gccagaatgtccctgcccttctctccagaggcccagtcagtgagaggaggaggaactagaatccaggtctcctgcctcccagagcaaggctcctgtcactccactccctggggcttcttg

SEQ ID NO: 505674 - DNA, 120 bp, Artificial Sequence
  ENSG00000164049_21 (sequence is synthesized)
ggcctgagatcttgagagacagggtctcactgtcacccagtctggagtggagtggcataatctttcactgcagcctcaaactcctggagtccagcaatcctcccacctcaacctcttaaa

SEQ ID NO: 505675 - DNA, 120 bp, Artificial Sequence
  ENSG00000164049_22 (sequence is synthesized)
tagctgagactacagatgtgtgctaccatgcccagctaatttttaaacagttttcgtaaagatggggtctggctatcttgcccaggcttgcaatttatagagctccagacaccctcattg

SEQ ID NO: 505676 - DNA, 120 bp, Artificial Sequence
  ENSG00000164049_23 (sequence is synthesized)
gtagctgcttctgataaattccacactatggccagaagatggcagcaaaccaccagcttcagccacttacctgtggcccaggacaccggaccaggtttccaaaatctgagcttcacattc

SEQ ID NO: 505677 - DNA, 120 bp, Artificial Sequence
  ENSG00000164049_24 (sequence is synthesized)
ctagacctccagaggttctcttcatggccacctggacaactggcaaaccattctgtttccttacacgtgcacatatcatccagataactgaaactcttatcaataaaaccccaacatcac

SEQ ID NO: 505678 - DNA, 120 bp, Artificial Sequence
  ENSG00000164050_0 (sequence is synthesized)
agtgggagcaggggcggtgagcaggggcggtgggcagggccaggtgcgcaggggagaaacaaggcgccttggagttcaggtgactcccacacgggtcatgctgttgtctcctgatccagc

SEQ ID NO: 505679 - DNA, 120 bp, Artificial Sequence
  ENSG00000164050_1 (sequence is synthesized)
cggccctgccaggtgaccatgcctgctctgggcccagctcttctccaggctctctgggccgggtgggtcctcaccctccagccccttccaccaactgcattcactcccaatggcacgtat

SEQ ID NO: 505680 - DNA, 120 bp, Artificial Sequence
  ENSG00000164050_2 (sequence is synthesized)
ctgcagcacctggcaagggaccccacctcaggcaccctctacctgggggctaccaacttcctgttccagctgagccctgggctgcagctggaggccacagtgtccaccggccctgtgcta

SEQ ID NO: 505681 - DNA, 120 bp, Artificial Sequence
  ENSG00000164050_3 (sequence is synthesized)
gacagcagggactgcctgccacctgtgatgcctgatgagtgcccccaggcccagcctaccaacaacccgaatcagctgctcctggtgagcccaggggccctggtggtatgcgggagcgtg

SEQ ID NO: 505682 - DNA, 120 bp, Artificial Sequence
  ENSG00000164050_4 (sequence is synthesized)
caccagggggtctgtgaacagcggcgcctggggcagctcgagcagctgctgctgcggccagagcggcctggggacacacaatatgtggctgccaatgatcctgcggtcagcacggtgggg

SEQ ID NO: 505683 - DNA, 120 bp, Artificial Sequence
  ENSG00000164050_5 (sequence is synthesized)
ctggtagcccagggcttggcaggggagcccctcctgtttgtggggcgaggatacaccagcaggggtgtggggggtggcattccacccatcacaacccgggccctgtggccgcccgacccc

SEQ ID NO: 505684 - DNA, 120 bp, Artificial Sequence
  ENSG00000164050_6 (sequence is synthesized)
caagctgccttctcctatgaggagacagccaagctggcagtgggccgcctctccgagtacagccaccacttcgtgagtgcctttgcacgtggggccagcgcctacttcctgttcctgcgg

SEQ ID NO: 505685 - DNA, 120 bp, Artificial Sequence
  ENSG00000164050_7 (sequence is synthesized)
cgggacctgcaggctcagtctagagcttttcgtgcctatgtatctcgagtgtgtctccgggaccagcactactactcctatgtggagttgcctctggcctgcgaaggtggccgctacggg

SEQ ID NO: 505686 - DNA, 120 bp, Artificial Sequence
  ENSG00000164050_8 (sequence is synthesized)
ctgatccaggctgcagctgtggccacgtccagggaggtggcgcatggggaggtgctctttgcagctttctcctcggctgcaccccccactgtgggccggcccccatcggcggctgctggg

SEQ ID NO: 505687 - DNA, 120 bp, Artificial Sequence
  ENSG00000164050_9 (sequence is synthesized)
gcatctggagcctctgccctctgtgccttccccctggatgaggtggaccggcttgctaatcgcacgcgagatgcctgctacacccgggagggtcgtgctgaggatgggaccgaggtggcc

SEQ ID NO: 505688 - DNA, 120 bp, Artificial Sequence
  ENSG00000164050_10 (sequence is synthesized)
tacatcgagtatgatgtcaattctgactgtgcacagctgccagtggacaccctggatgcttatccctgtggctcagaccacacgcccagccccatggccagccgggtcccgctggaagcc

SEQ ID NO: 505689 - DNA, 120 bp, Artificial Sequence
  ENSG00000164050_11 (sequence is synthesized)
acaccaattctggagtggccagggattcagctaacagctgtggcagtcaccatggaagatggacacaccatcgctttcctgggtgatagtcaagggcagctgcacagggtctacttgggc

SEQ ID NO: 505690 - DNA, 120 bp, Artificial Sequence
  ENSG00000164050_12 (sequence is synthesized)
ccagggagcgatggccacccatactccacacagagcatccagcaggggtctgcagtgagcagagacctcacctttgatgggacctttgagcacctgtatgtcatgacccagagcacactt

SEQ ID NO: 505691 - DNA, 120 bp, Artificial Sequence
  ENSG00000164050_13 (sequence is synthesized)
ctgaaggttcctgtggcttcctgtgctcagcacctggactgtgcatcttgccttgctcacagggacccatactgtgggtggtgcgtgctccttggcaggtgcagtcgccgttctgagtgc

SEQ ID NO: 505692 - DNA, 120 bp, Artificial Sequence
  ENSG00000164050_14 (sequence is synthesized)
tcgaggggccagggcccagagcagtggctatggagcttccagcctgagctgggctgtctgcaagtggcagccatgagtcctgccaacatcagccgagaggagacgagggaggttttccta

SEQ ID NO: 505693 - DNA, 120 bp, Artificial Sequence
  ENSG00000164050_15 (sequence is synthesized)
tcagtgccagacctgccacccctgtggccaggggagtcatattcctgccactttggggaacatcagagtcctgccctgctgactggttctggtgtgatgtgcccctccccagaccctagt

SEQ ID NO: 505694 - DNA, 120 bp, Artificial Sequence
  ENSG00000164050_16 (sequence is synthesized)
gaggccccagtgctgccgagaggagccgactacgtatccgtgagcgtggagctcagatttggcgctgttgtgatcgccaaaacttccctctctttctatgactgtgtggcggtcactgaa

SEQ ID NO: 505695 - DNA, 120 bp, Artificial Sequence
  ENSG00000164050_17 (sequence is synthesized)
ctccgcccatctgcgcagtgccaggcctgtgtgagcagccgctgggggtgtaactggtgtgtctggcagcacctgtgcacccacaaggcctcgtgtgatgctgggcccatggttgcaagc

SEQ ID NO: 505696 - DNA, 120 bp, Artificial Sequence
  ENSG00000164050_18 (sequence is synthesized)
catcagagcccgcttgtctccccagaccctcctgcaagaggtggacccagcccctccccacccacagcccccaaagccctggccacccctgctcctgacacccttcccgtggagcctggg

SEQ ID NO: 505697 - DNA, 120 bp, Artificial Sequence
  ENSG00000164050_19 (sequence is synthesized)
gctccctccacagccacagcttcggacatctcacctggggctagtccttccctgctcagcccctgggggccatgggcaggttctggctccatatcttcccctggctccacagggtcgcct

SEQ ID NO: 505698 - DNA, 120 bp, Artificial Sequence
  ENSG00000164050_20 (sequence is synthesized)
ctccatgaggagccctcccctcccagcccccaaaatggacctggaaccgctgtccctgcccccactgacttcagaccctcagccacacctgaggacctcttggcctccccgctgtcaccc

SEQ ID NO: 505699 - DNA, 120 bp, Artificial Sequence
  ENSG00000164050_21 (sequence is synthesized)
tcagaggtagcagcagtgccccctgcagaccctggccccgaggctcttcatcccacagtgcccctggacctgccccctgccactgttcctgccaccactttcccaggggccatgggctcc

SEQ ID NO: 505700 - DNA, 120 bp, Artificial Sequence
  ENSG00000164050_22 (sequence is synthesized)
gtgaagcccgccctggactggctcacgagagaaggcggcgagctgcccgaggcggacgagtggacggggggtgacgcacccgccttctccacttccaccctcctctcaggtgatggagac

SEQ ID NO: 505701 - DNA, 120 bp, Artificial Sequence
  ENSG00000164050_23 (sequence is synthesized)
tcagcagagcttgagggccctcccgcccccctcatcctcccgtccagcctcgactaccagtatgacacccccgggctctgggagctggaagaggcgaccttgggggcaagctcctgcccc

SEQ ID NO: 505702 - DNA, 120 bp, Artificial Sequence
  ENSG00000164050_24 (sequence is synthesized)
tgtgtggagagcgttcagggctccacgttgatgccggtccatgtggagcgggaaatccggctgctaggcaggaacctgcaccttttccaggatggcccaggagacaatgagtgtgtgatg

SEQ ID NO: 505703 - DNA, 120 bp, Artificial Sequence
  ENSG00000164050_25 (sequence is synthesized)
gagctggagggcctcgaggtggtggttgaggcccgggtcgagtgtgagccacctccagatacccagtgccatgtcacctgccagcagcaccagctcagctatgaggctctgcagccggag

SEQ ID NO: 505704 - DNA, 120 bp, Artificial Sequence
  ENSG00000164050_26 (sequence is synthesized)
ctccgtgtggggctgtttctgcgtcgggccggccgtctgcgtgtggacagtgctgaggggctgcatgtggtactgtatgactgttccgtgggacatggagactgcagccgctgccaaact

SEQ ID NO: 505705 - DNA, 120 bp, Artificial Sequence
  ENSG00000164050_27 (sequence is synthesized)
gccatgccccagtatggctgtgtgtggtgtgagggggagcgtccacgttgtgtgacccgggaggcctgtggtgaggctgaggctgtggccacccagtgcccagcgcccctcatccactcg

SEQ ID NO: 505706 - DNA, 120 bp, Artificial Sequence
  ENSG00000164050_28 (sequence is synthesized)
gtggagccactgactgggcctgtagacggaggcacccgtgtcaccatcaggggctccaacctgggccagcatgtgcaggatgtgctgggcatggtcacggtggctggagtgccctgtgct

SEQ ID NO: 505707 - DNA, 120 bp, Artificial Sequence
  ENSG00000164050_29 (sequence is synthesized)
aagaggacgtggtgtctcagaacacgactttgcctaccaggatccgaaggtccattccatcttcccggcccgcggccccagagctgggggcacccgtctcaccctgaatggctccaagct

SEQ ID NO: 505708 - DNA, 120 bp, Artificial Sequence
  ENSG00000164050_30 (sequence is synthesized)
cctgactgggcggctggaggacatccgagtggtggttggagaccagccttgtcacttgctgccggagcagcagtcagaacaactgcggtgtgagaccagcccacgccccacgcctgccac

SEQ ID NO: 505709 - DNA, 120 bp, Artificial Sequence
  ENSG00000164050_31 (sequence is synthesized)
gctccctgtggctgtgtggtttggggccacggagcggaggcttcaacgcggacagttcaagtataccttggaccccaacatcacctctgctggccccaccaagagcttcctcagtggagg

SEQ ID NO: 505710 - DNA, 120 bp, Artificial Sequence
  ENSG00000164050_32 (sequence is synthesized)
acgtgagatatgcgtccgtggccagaatctggacgtggtacagacgccaagaatccgggtgaccgtggtctcgagaatgctgcagcccagccaggggcttggacggaggcgtcgcgtggt

SEQ ID NO: 505711 - DNA, 120 bp, Artificial Sequence
  ENSG00000164050_33 (sequence is synthesized)
cccggagacggcatgttcccttggaccctcctgcagtagccagcaatttgaggagccgtgccatgtcaactcctcccagctcatcacgtgccgcacacctgccctcccaggcctgcctga

SEQ ID NO: 505712 - DNA, 120 bp, Artificial Sequence
  ENSG00000164050_34 (sequence is synthesized)
ggacccctgggtccgggtggaatttatccttgacaacctggtctttgactttgcaacactgaaccccacacctttctcctatgaggccgaccccaccctgcagccactcaaccctgagga

SEQ ID NO: 505713 - DNA, 120 bp, Artificial Sequence
  ENSG00000164050_35 (sequence is synthesized)
ccccaccatgccattccggcacaagcctgggagtgtgttctccgtggagggggagaacctggaccttgcaatgtccaaggaggaggtggtggctatgataggggatggcccctgtgtggt

SEQ ID NO: 505714 - DNA, 120 bp, Artificial Sequence
  ENSG00000164050_36 (sequence is synthesized)
gaagacgctgacgcggcaccacctgtactgcgagccccccgtggagcagcccctgccacggcaccatgccctccgagaggcacctgactctttgcctgagttcacggtgcagatggggaa

SEQ ID NO: 505715 - DNA, 120 bp, Artificial Sequence
  ENSG00000164050_37 (sequence is synthesized)
cttgcgcttctccctgggtcacgtgcagtatgacggcgagagccctggggcttttcctgtggcagcccaggtgggcttgggggtgggcacctctcttctggctctgggtgtcatcatcat

SEQ ID NO: 505716 - DNA, 120 bp, Artificial Sequence
  ENSG00000164050_38 (sequence is synthesized)
tgtcctcatgtacaggaggaagagcaagcaggccctgagggactataagaaggttcagatccagctggagaatctggagagcagtgtgcgggaccgctgcaagaaggaattcacagacct

SEQ ID NO: 505717 - DNA, 120 bp, Artificial Sequence
  ENSG00000164050_39 (sequence is synthesized)
catgactgagatgaccgatctcaccagtgacctcctgggcagcggcatccccttcctcgactacaaggtgtatgcggagaggatcttcttccctgggcaccgcgagtcgcccttgcaccg

SEQ ID NO: 505718 - DNA, 120 bp, Artificial Sequence
  ENSG00000164050_40 (sequence is synthesized)
ggacctgggtgtgcctgagagcagacggcccactgtggagcaagggctggggcagctctctaacctgctcaacagcaagctcttcctcaccaagttcatccacacgctggagagccagcg

SEQ ID NO: 505719 - DNA, 120 bp, Artificial Sequence
  ENSG00000164050_41 (sequence is synthesized)
caccttttcagctcgggaccgtgcctacgtggcatctctgctcaccgtggcactgcatgggaagcttgagtatttcactgacatcctccgcactctgctcagtgacctggttgcccagta

SEQ ID NO: 505720 - DNA, 120 bp, Artificial Sequence
  ENSG00000164050_42 (sequence is synthesized)
tgtggccaagaaccccaagctgatgctgcgcaggacagagactgtggtggagaagctgctcaccaactggatgtccatctgtctgtataccttcgtgagggactccgtaggggagcctct

SEQ ID NO: 505721 - DNA, 120 bp, Artificial Sequence
  ENSG00000164050_43 (sequence is synthesized)
gtacatgctctttcgagggattaagcaccaagtggataaggggccagtggacagtgtgacaggcaaggccaaatacaccttgaacgacaaccgcctgctcagagaggatgtggagtaccg

SEQ ID NO: 505722 - DNA, 120 bp, Artificial Sequence
  ENSG00000164050_44 (sequence is synthesized)
tcccctgaccttgaatgcactattggctgtggggcctggggcaggagaggcccagggcgtgcccgtgaaggtcctagactgtgacaccatctcccaggcaaaggagaagatgctggacca

SEQ ID NO: 505723 - DNA, 120 bp, Artificial Sequence
  ENSG00000164050_45 (sequence is synthesized)
gctttataaaggagtgcctctcacccagcggccagaccctcgcacccttgatgttgagtggcggtctggggtggccgggcacctcattctttctgacgaggatgtcacttctgaggtcca

SEQ ID NO: 505724 - DNA, 120 bp, Artificial Sequence
  ENSG00000164050_46 (sequence is synthesized)
gggtctgtggaggcgcctgaacacactgcagcattacaaggtcccagatggagcaactgtggccctcgtcccctgcctcaccaagcatgtgctccgggaaaaccaggattatgtccctgg

SEQ ID NO: 505725 - DNA, 120 bp, Artificial Sequence
  ENSG00000164050_47 (sequence is synthesized)
agagcggaccccaatgctggaggatgtagatgaggggggcatccggccctggcacctggtgaagccaagtgatgagccggagccgcccaggcctcggaggggcagccttcggggcgggga

SEQ ID NO: 505726 - DNA, 120 bp, Artificial Sequence
  ENSG00000164050_48 (sequence is synthesized)
gcgtgagcgcgccaaggccatccctgagatctacctgacccgcctgctgtccatgaagggcaccctgcagaagttcgtggatgacctgttccaggtgattctcagcaccagccgccccgt

SEQ ID NO: 505727 - DNA, 120 bp, Artificial Sequence
  ENSG00000164050_49 (sequence is synthesized)
gccgctcgctgtgaagtacttctttgacctgctggatgagcaggcccagcagcatggcatctccgaccaggacaccatccacatctggaagaccaacagcttgcctctgaggttctggat

SEQ ID NO: 505728 - DNA, 120 bp, Artificial Sequence
  ENSG00000164050_50 (sequence is synthesized)
caatataataaaaaacccgcagtttgtgttcgacgtgcaaacatctgataacatggatgcggtgctccttgtcattgcacagaccttcatggacgcctgcaccctggccgaccacaagct

SEQ ID NO: 505729 - DNA, 120 bp, Artificial Sequence
  ENSG00000164050_51 (sequence is synthesized)
gggccgggactccccgatcaacaaacttctgtatgcacgggacattccccggtacaagcggatggtggaaaggtactatgcagacatcagacagactgtcccagccagcgaccaagagat

SEQ ID NO: 505730 - DNA, 120 bp, Artificial Sequence
  ENSG00000164050_52 (sequence is synthesized)
gaactctgtcctggctgaactgtcctggaactactccggagacctcggggcgcgagtggccctgcatgaactctacaagtacatcaacaagtactatgaccagatcatcactgccctgga

SEQ ID NO: 505731 - DNA, 120 bp, Artificial Sequence
  ENSG00000164050_53 (sequence is synthesized)
ggaggatggcacggcccagaagatgcagctgggctatcggctccagcagattgcagctgctgtggaaaacaaggtcacagatctataggaacccaggagccacggcctgctgttgcttca

SEQ ID NO: 505732 - DNA, 120 bp, Artificial Sequence
  ENSG00000164050_54 (sequence is synthesized)
gcctggcctgggcagccctggaagctcggaggagaggccaccttcttaggtgcctgtagtgactgacaagcagagttagtggaaggtgactcccagtctcctggtggctctggcctcggc

SEQ ID NO: 505733 - DNA, 120 bp, Artificial Sequence
  ENSG00000164050_55 (sequence is synthesized)
cctgctggatccacctcctagacccggggcctcaaggctcatggggtagtacccagcctgctccccgagtccagcgaccctgtgacaccggtctgcagggagttggggactaagggcttc

SEQ ID NO: 505734 - DNA, 120 bp, Artificial Sequence
  ENSG00000164050_56 (sequence is synthesized)
cagagagtggctggaagagactccaggcccctggggagactgtactgttcctgaacactggccttggccacactgggattcggagaggaaggaggagagccccatgcttcctgtctgcct

SEQ ID NO: 505735 - DNA, 120 bp, Artificial Sequence
  ENSG00000164050_57 (sequence is synthesized)
cctccaccatccctgacctcagttgagctgcctctggccttgttgctgctgccacatcctaggtctaagagttgaacgcctctcctaggccactacaaactgacccctcagcagggctgg

SEQ ID NO: 505736 - DNA, 120 bp, Artificial Sequence
  ENSG00000164050_58 (sequence is synthesized)
ctgccacagggctgccctgcctcataggtagccatggtgagggctatctgctgcaggggggtcttggggagagtggtgactccattgacccagcttttcattaaaggataacacactgca

SEQ ID NO: 505737 - DNA, 120 bp, Artificial Sequence
  ENSG00000164050_59 (sequence is synthesized)
gcccggccgacgcggctttgtctcctttgttcccggcggtggcagcgccgcgcgggaggggcgggcagcgggcgcagttttccgcccctcggtctccgggtaacagctgcggctccgcca

SEQ ID NO: 505738 - DNA, 120 bp, Artificial Sequence
  ENSG00000164050_60 (sequence is synthesized)
gagaggccgctgcgcgcggagcccgagcccggagcggccgacgcccgcctcggcgcgcacatcccgcggggcccggccgggtggtgactcccacacgggtcatgctgttgtctcctgatc

SEQ ID NO: 505739 - DNA, 120 bp, Artificial Sequence
  ENSG00000164050_61 (sequence is synthesized)
atgctttgagtgggtactgtgcatgtgacgtggcggaggacatgggcggctagctgtgcccactcacttgctcagcagctcgccccacaaccaggctgacagggcccctttgtaaattta

SEQ ID NO: 505740 - DNA, 120 bp, Artificial Sequence
  ENSG00000164050_62 (sequence is synthesized)
tgccacagataaattcttccttattgggggcccctggggttgaacttaaatgattgaagccacaaatattaattctcagataccaaggccttctgatgtgtcataaagaattccctccaa

SEQ ID NO: 505741 - DNA, 120 bp, Artificial Sequence
  ENSG00000164050_63 (sequence is synthesized)
agtgagagagggtctctgtcaatcttatggagcatgggaaggggaagaccacctgacagtagggcagggagaggggctgccaggtaagcttgaggggcccttgatgcagcctggcacccc

SEQ ID NO: 505742 - DNA, 120 bp, Artificial Sequence
  ENSG00000164050_64 (sequence is synthesized)
ttctctgtaaatggccagagagtaaatattttcgctttgcaggccaagtggtctctgttcaacaactcagctttgccactgtggcacaaaggcagccagggacgacatggaaacacatga

SEQ ID NO: 505743 - DNA, 120 bp, Artificial Sequence
  ENSG00000164050_65 (sequence is synthesized)
aagtggctgtgttctaacaaatctttataaaaataggttgtgggatggatttggcctggttgtggttggctgatctctaggctaaactgtgctgggctagacggggcatgggtgtgtgtg

SEQ ID NO: 505744 - DNA, 120 bp, Artificial Sequence
  ENSG00000164050_66 (sequence is synthesized)
acttgcttgggacgggacaggctgaatcgtactgggctaggcttgagcttggctggcatggctgcattggactgtgctggatgaggccggggtgtgcctggggattgtcaggcaggcctg

SEQ ID NO: 505745 - DNA, 120 bp, Artificial Sequence
  ENSG00000164050_67 (sequence is synthesized)
ccctccaaacttctaagccctcagccaccatgcagctcggacacttgtgccagagcagagactcctgctcagcctgtcctcagtccccttaagcccatgtcctgtccccttccccagtgt

SEQ ID NO: 505746 - DNA, 120 bp, Artificial Sequence
  ENSG00000164050_68 (sequence is synthesized)
tcctggctgaactgtcctgggtaaggcctccctctgcttcttgggttgggcataggcctcctgccacaacggtccttcccccttcacactgcccctttgcagggaagcccttgggaacct

SEQ ID NO: 505747 - DNA, 120 bp, Artificial Sequence
  ENSG00000164050_69 (sequence is synthesized)
gactaccagtatgacacccccgggctctgggagctggtgaggcccagcccaggaaggaggcctcaggggaggggatgtggggaagatgctacccctagcttgccttgtgattctgcactg

SEQ ID NO: 505748 - DNA, 120 bp, Artificial Sequence
  ENSG00000164050_70 (sequence is synthesized)
ggaggaggtgaggggcagggtggagtctgcagccccacaccggccttgcctctggaatctggcaaggcagagggctgagctgggcagggtgggctccatagactgccttgcccttggtgc

SEQ ID NO: 505749 - DNA, 120 bp, Artificial Sequence
  ENSG00000164050_71 (sequence is synthesized)
aaccccagaccttgctgaagcaggtagacctgggctgtcttcctaccaaggaggcccccttgctctaccctgttctgtccccatctggcacacctggcctggggtccctgggccatggag

SEQ ID NO: 505750 - DNA, 120 bp, Artificial Sequence
  ENSG00000164050_72 (sequence is synthesized)
cctccccagcacattcatcggccatgcctgccccacccgcagcttgcctctgaggttctggatcaatataataaaaaacccgcagtttgtgttcgacgtgcaaacatctgataacatgga

SEQ ID NO: 505751 - DNA, 120 bp, Artificial Sequence
  ENSG00000164050_73 (sequence is synthesized)
tgcagctccactatgtgggggtttgtagggctttatgttgaggcactgagaatcccatgctgctagtaggggcaaggggtcgtgtggtttggggctggggctgagctgacctagccggga

SEQ ID NO: 505752 - DNA, 120 bp, Artificial Sequence
  ENSG00000164050_74 (sequence is synthesized)
acccagcggccagaccctcgcacccttgatgttggtgagggcgtggagagcccctggggacctgagccactgttgggcctgggctggccccggaccaactctgcagggacaactcatcac

SEQ ID NO: 505753 - DNA, 120 bp, Artificial Sequence
  ENSG00000164050_75 (sequence is synthesized)
aggctgccccatgatggaggggctggtgtccctgtggaggaggagatgggctccactatgggaagggtatcttccagccctgcacccagttctgccttgcccttgcagagtggcggtctg

SEQ ID NO: 505754 - DNA, 120 bp, Artificial Sequence
  ENSG00000164051_0 (sequence is synthesized)
agacgattggtcgggccacgccaggtacgaggagctagggttgtcctgccagggtagaatcggaaccgtaggaggggtacttaaccggacggcctaccaggcctgtggccgtgcgcggga

SEQ ID NO: 505755 - DNA, 120 bp, Artificial Sequence
  ENSG00000164051_1 (sequence is synthesized)
agagcactgcagatctcaggatgatggggcgcagccctgggtttgccatgcagcacatcgtgggtgtgccccacgtactggttcggaggggcctccttggaagggacctcttcatgacca

SEQ ID NO: 505756 - DNA, 120 bp, Artificial Sequence
  ENSG00000164051_2 (sequence is synthesized)
ggactctctgcagcccaggcccaagccagcccggagagaaaagacctgaggaggtggccctggggctgcaccaccgcctcccagcactgggaagagccctggggcacagcattcagcaac

SEQ ID NO: 505757 - DNA, 120 bp, Artificial Sequence
  ENSG00000164051_3 (sequence is synthesized)
gagcgacctccacagccaagacttggtgggacagatatgaagagtttgttggactcaacgaggttcgagaggcccagggaaaggtgacagaggctgagaaagtgttcatggtggctcgag

SEQ ID NO: 505758 - DNA, 120 bp, Artificial Sequence
  ENSG00000164051_4 (sequence is synthesized)
ggcttgtccgagaggctcgggaggacttggaagttcaccaggccaagctgaaggaggtgagggaccgcttggaccgtgtctccagggaggacagtcagtacttggaactggctactctcg

SEQ ID NO: 505759 - DNA, 120 bp, Artificial Sequence
  ENSG00000164051_5 (sequence is synthesized)
agcacaggatgctgcaggaggagaagaggcttcgcacagcctatctgcgtgcagaagactctgagcgagagaagttctccctcttctctgcagctgtgcgggaaagtcatgagaaggagc

SEQ ID NO: 505760 - DNA, 120 bp, Artificial Sequence
  ENSG00000164051_6 (sequence is synthesized)
gggccctgattggtgtggctggctccacctatgtgaaccgtgtgcgactacaggagctgaaggctttactcctggaggcgcagaaggggcctgtgagtctccaagaggccattcgagaac

SEQ ID NO: 505761 - DNA, 120 bp, Artificial Sequence
  ENSG00000164051_7 (sequence is synthesized)
aggcgtctagctactcccgccagcagagggacctccacaatctcatggtggacctgaggggcctggtacatgctgctgggccagggcaggactctgggtcacaggcaggtagtcccccga

SEQ ID NO: 505762 - DNA, 120 bp, Artificial Sequence
  ENSG00000164051_8 (sequence is synthesized)
ccagagacagagatgtagatgtcctttcagctgccttgaaagagcagcttagtcattccaggcaagtccattcatgtctagaaggcttacgagagcagcttgatggcctagaaaagactt

SEQ ID NO: 505763 - DNA, 120 bp, Artificial Sequence
  ENSG00000164051_9 (sequence is synthesized)
gtagccaaatggctggggtggttcagcttgtaaagtctgcagcacacccaggcctggtggaaccagcagacggggctatgcccagcttcttgctggagcaggggagcatgatcttggcac

SEQ ID NO: 505764 - DNA, 120 bp, Artificial Sequence
  ENSG00000164051_10 (sequence is synthesized)
tgtcagacacggagcagagactagaagcccaagtcaacaggaacaccatctatagcaccctggtcacctgtgtgacatttgtggccacactgcctgtgctctacatgctattcaaagcca

SEQ ID NO: 505765 - DNA, 120 bp, Artificial Sequence
  ENSG00000164051_11 (sequence is synthesized)
gctaacccctggcccctcctccagagggtctgaggcaatagctgtgaatgtggatttaagtagagaatcgtagcaatgaagcgagcctttgggggcatgtacaacctcaatctgaaggag

SEQ ID NO: 505766 - DNA, 120 bp, Artificial Sequence
  ENSG00000164051_12 (sequence is synthesized)
cagtatctgtgtggctcaccagcaggcatgcttcgctttgtagacaaggttcatttacattaattatcaaaactttgtgctaatgtccaattaaaatatcctgagttttattatttaaaa

SEQ ID NO: 505767 - DNA, 120 bp, Artificial Sequence
  ENSG00000164051_13 (sequence is synthesized)
cgtccatctccttggcctgcttcttgggctgtttcagtggcttcttcttgccacctgtgggcgacacgagcacgttcggcctgcccctgccgcccggtccccaccccgccgtccccgcag

SEQ ID NO: 505768 - DNA, 120 bp, Artificial Sequence
  ENSG00000164051_14 (sequence is synthesized)
tcctcacggttccggaacacttaccttcgcggccggacatggcgcctgccgccgcttccccagaccctgccaccggaaacggagcgtctgccccaccctttgtcgtagacagcgaggcgg

SEQ ID NO: 505769 - DNA, 120 bp, Artificial Sequence
  ENSG00000164051_15 (sequence is synthesized)
aatttttttgaccattttcatagatgatttttaaaaccacaggactggataagagaggagtctgagtgccgagtgccggggtgctacagtttccagaggttaggcagatgagtggggact

SEQ ID NO: 505770 - DNA, 120 bp, Artificial Sequence
  ENSG00000164051_16 (sequence is synthesized)
ggaaaccgagtgaaaaatggcatgtgaaggaggagcaggtgaaggccagatcagagggagctggacggaatcagagaagaggaacagaaacagtgaattcaggcagtctgtcaaggagtt

SEQ ID NO: 505771 - DNA, 120 bp, Artificial Sequence
  ENSG00000164053_0 (sequence is synthesized)
actcgcggcggaggcaagcggcggcgcgcggacggttggtccagttctccggcctggcggcaggcaagtctagctcggcgctgtcggatacttggggtgagcggaaagcatggcggggac

SEQ ID NO: 505772 - DNA, 80 bp, Artificial Sequence
  ENSG00000164053_1 (sequence is synthesized)
cgccgggcaccgggcaccccccgagcaagcgggcccggggcttctccgcagccgctgccccggaccctgacgacccgttc

SEQ ID NO: 505773 - DNA, 120 bp, Artificial Sequence
  ENSG00000164053_2 (sequence is synthesized)
ccctgacgacccgttcggcgcgcatggggacttcactgccgacgacctggaggagcttgacaccctcgcgtcacaggccctgagccaatgtccggccgcggctcgggacgtgtccagtga

SEQ ID NO: 505774 - DNA, 120 bp, Artificial Sequence
  ENSG00000164053_3 (sequence is synthesized)
tcataaggtccacagattattagatggcatgtcaaaaaatccttcagggaaaaacagagaaactgttccaattaaagataatttcgaattagaggtacttcaggcacaatacaaagaact

SEQ ID NO: 505775 - DNA, 120 bp, Artificial Sequence
  ENSG00000164053_4 (sequence is synthesized)
taaagaaaagatgaaagtaatggaagaagaagttctcattaagaatggagaaattaaaattttgcgagactcactacatcagacggaatccgttctagaggaacagagaagatcacattt

SEQ ID NO: 505776 - DNA, 120 bp, Artificial Sequence
  ENSG00000164053_5 (sequence is synthesized)
tcttcttgagcaagagaaaacccaagcactcagtgacaaggaaaaggaattctccaaaaagctccaatcattgcagtctgaactccagtttaaagatgcagagatgaatgaattaaggac

SEQ ID NO: 505777 - DNA, 120 bp, Artificial Sequence
  ENSG00000164053_6 (sequence is synthesized)
aaagctccagaccagtgaacgagcaaataaactggctgctccctctgtttcccatgtcagtcctaggaaaaacccttctgtggttataaagccagaagcatgttctccacaatttggaaa

SEQ ID NO: 505778 - DNA, 120 bp, Artificial Sequence
  ENSG00000164053_7 (sequence is synthesized)
aacatcttttcctacaaaggagtcttttagtgctaacatgtcccttccccacccctgccagacggagtcaggatacaagcctctggtgggcagagaggatagtaagccccacagtctgag

SEQ ID NO: 505779 - DNA, 120 bp, Artificial Sequence
  ENSG00000164053_8 (sequence is synthesized)
aggtgactccataaaacaagaagaggcccagaaaagctttgttgacagctggagacagagatcaaacactcaaggttccattttgataaacctgctcctgaagcagcctttgatcccagg

SEQ ID NO: 505780 - DNA, 120 bp, Artificial Sequence
  ENSG00000164053_9 (sequence is synthesized)
gtcatccctaagcctttgccacctcctgagtagtagttctgagtctcctgctggcacccccctgcagccaccagggtttggcagtaccttggctggaatgtcaggcctcaggaccacagg

SEQ ID NO: 505781 - DNA, 120 bp, Artificial Sequence
  ENSG00000164053_10 (sequence is synthesized)
ttcttatgatgggtcattttccctctcagccctgagagaagcacagaacctggcattcactggactgaatctggttgcccggaatgagtgctcacgtgatggagacccagcagagggagg

SEQ ID NO: 505782 - DNA, 120 bp, Artificial Sequence
  ENSG00000164053_11 (sequence is synthesized)
cagaagggccttcccactctgccagcttcctggagccgtgcatttcctcccccttgtacagttcttcatcggcttacactgccaggccctgcaggacttggcagctgctaagagaagcgg

SEQ ID NO: 505783 - DNA, 120 bp, Artificial Sequence
  ENSG00000164053_12 (sequence is synthesized)
agcacctggggactcaccgacacattcctcctgcgtgagctctggggtagagaccaaccctgaggactcagtgtgcatcctggaaggcttctctgtgactgcacttagcattcttcagca

SEQ ID NO: 505784 - DNA, 120 bp, Artificial Sequence
  ENSG00000164053_13 (sequence is synthesized)
cctggtgtgccacagcggagcagtcgtctccctattactgtcaggagtgggggcagattctgctgctggggaaggaaacaggagcctggttcacaggcttagtgatggagatatgacctc

SEQ ID NO: 505785 - DNA, 120 bp, Artificial Sequence
  ENSG00000164053_14 (sequence is synthesized)
agccctaaggggggttgctgatgaccaaggacagcacccactgttgaagatgcttcttcacctgttggctttctcttctgcagcaacaggtcaccttcaagccagtgtcctgacccagtg

SEQ ID NO: 505786 - DNA, 120 bp, Artificial Sequence
  ENSG00000164053_15 (sequence is synthesized)
ccttaaggttttggtgaaattagccgaaaacacttcctgtgatttcttgcccaggttccagtgtgtgttccaagtgctgccaaagtgcctcagcccagagacacccctgcctagcgtgct

SEQ ID NO: 505787 - DNA, 120 bp, Artificial Sequence
  ENSG00000164053_16 (sequence is synthesized)
gctggctgttgagctcctctccctgctggcggaccacgaccagctggcacctcagctctgttcccactcagaaggctgcctcctgctgctgctgtacatgtacatcacatcacggcctga

SEQ ID NO: 505788 - DNA, 120 bp, Artificial Sequence
  ENSG00000164053_17 (sequence is synthesized)
cagagtggccttggagacacaatggctccagctggaacaagaggtggtgtggctcctggctaagcttggtgtgcagagccccttgcccccagtcactggctccaactgccagtgtaatgt

SEQ ID NO: 505789 - DNA, 120 bp, Artificial Sequence
  ENSG00000164053_18 (sequence is synthesized)
ggaggtggtcagagcgctcacggtgatgttgcacagacagtggctgacagtgcggagggcagggggacccccaaggaccgaccagcagaggcggacagtgcgctgtctgcgggacacggt

SEQ ID NO: 505790 - DNA, 120 bp, Artificial Sequence
  ENSG00000164053_19 (sequence is synthesized)
ctatcgcagaaggacaagctcttcatgatgcactgcgtggaggtcctgcatcagtttgaccaggtgatgccgggggtcagcatgctcatccgagggcttcctgatgtgacggactgtgaa

SEQ ID NO: 505791 - DNA, 120 bp, Artificial Sequence
  ENSG00000164053_20 (sequence is synthesized)
gaggcagccctggatgacctctgtgccgcggaaaccgatgtggaagaccccgaggtggagtgtggctgaggccctgagtgtccagccacatggtggcaccagcaccactcctttccttac

SEQ ID NO: 505792 - DNA, 120 bp, Artificial Sequence
  ENSG00000164053_21 (sequence is synthesized)
cacatcaactgattaaagcagtgaccagcaggaactgcccagagaactggctggccttgtttcctgagtctgatctgtttggcggagtgggaggggtggagcaggacccggaccctgagt

SEQ ID NO: 505793 - DNA, 120 bp, Artificial Sequence
  ENSG00000164053_22 (sequence is synthesized)
ggctgggatccttcttcctgtccctggctgttgctgagcccgtccccatggtaactgatctgccttgaggaaggagccctgccctgcctgtggaattgtcctgagtcattgctttgggct

SEQ ID NO: 505794 - DNA, 120 bp, Artificial Sequence
  ENSG00000164053_23 (sequence is synthesized)
ggggccatgggaagaaaccattgtgtggcagggaaggaggtggctcttggcccaggcctaaaccaggaaagcctgggaaactgggacccacaggtgggcatgaaagggccgcagcagggg

SEQ ID NO: 505795 - DNA, 120 bp, Artificial Sequence
  ENSG00000164053_24 (sequence is synthesized)
ctcccagcagtgtgtaagaccgggagctggtctggcaccactgccctggtccttccagctgcctgtcactggtatgatggccccggtgcattgtgccaccagcaggccacagctgtggat

SEQ ID NO: 505796 - DNA, 120 bp, Artificial Sequence
  ENSG00000164053_25 (sequence is synthesized)
cttggaaggcctctggggtcccccgggagcaggggagtgggtgtgggggggaacggatggtggtgagagggacagaccaggcaggctgacgagcagggcgggcctggctcacgtgggcct

SEQ ID NO: 505797 - DNA, 120 bp, Artificial Sequence
  ENSG00000164053_26 (sequence is synthesized)
gtaggcgggcccacgccaagtttcacttcccgccactgctgccagcgagagccgcgggagagtgtgcagccgagtcactactgcctgcctgcctgcctgctacggtgagtgtggccccca

SEQ ID NO: 505798 - DNA, 120 bp, Artificial Sequence
  ENSG00000164053_27 (sequence is synthesized)
caatgggatggcgcagggcaggagggccatgggttcccccaccccagactaagggggcactaggggaggggccgagtcatgtgaagagggagaccctctcagacagtcgaatgtgctggt

SEQ ID NO: 505799 - DNA, 120 bp, Artificial Sequence
  ENSG00000164053_28 (sequence is synthesized)
cccactaaggaaaccacctcaccctctccaacttcctgcctgaaaatgggccctggagctcgcagacagggcaggattgtgcagggaaggcctgagatgtgcttctgcccaccccctacc

SEQ ID NO: 505800 - DNA, 120 bp, Artificial Sequence
  ENSG00000164053_29 (sequence is synthesized)
ccactccctccccttcggatcttaacactgggcactcacacacccaccccatgctcctctccaggctcagcagcaggtacgtacccaaccatgggctcgcaggccctgcccccggggccc

SEQ ID NO: 505801 - DNA, 120 bp, Artificial Sequence
  ENSG00000164053_30 (sequence is synthesized)
atgcagaccctcatctttttcgacatggaggccactggcttgcccttctcccagcccaaggtcacggagctgtgcctgctggctgtccacagatgtgccctggagagcccccccacctct

SEQ ID NO: 505802 - DNA, 120 bp, Artificial Sequence
  ENSG00000164053_31 (sequence is synthesized)
caggggccacctcccacagttcctccaccaccgcgtgtggtagacaagctctccctgtgtgtggctccggggaaggcctgcagccctgcagccagcgagatcacaggtctgagcacagct

SEQ ID NO: 505803 - DNA, 120 bp, Artificial Sequence
  ENSG00000164053_32 (sequence is synthesized)
gtgctggcagcgcatgggcgtcaatgttttgatgacaacctggccaacctgctcctagccttcctgcggcgccagccacagccctggtgcctggtggcacacaatggtgaccgctacgac

SEQ ID NO: 505804 - DNA, 120 bp, Artificial Sequence
  ENSG00000164053_33 (sequence is synthesized)
ttccccctgctccaagcagagctggctatgctgggcctcaccagtgctctggatggtgccttctgtgtggatagcatcactgcgctgaaggccctggagcgagcaagcagcccctcagaa

SEQ ID NO: 505805 - DNA, 120 bp, Artificial Sequence
  ENSG00000164053_34 (sequence is synthesized)
cacggcccaaggaagagctatagcctaggcagcatctacactcgcctgtatgggcagtcccctccagactcgcacacggctgagggtgatgtcctggccctgctcagcatctgtcagtgg

SEQ ID NO: 505806 - DNA, 120 bp, Artificial Sequence
  ENSG00000164053_35 (sequence is synthesized)
agaccacaggccctgctgcggtgggtggatgctcacgccaggcctttcggcaccatcaggcccatgtatggggtcacagcctctgctaggaccaagccaagaccatctgctgtcacaacc

SEQ ID NO: 505807 - DNA, 120 bp, Artificial Sequence
  ENSG00000164053_36 (sequence is synthesized)
actgcacacctggccacaaccaggaacactagtcccagccttggagagagcaggggtaccaaggatcttcctccagtgaaggaccctggagccctatccagggaggggctgctggcccca

SEQ ID NO: 505808 - DNA, 120 bp, Artificial Sequence
  ENSG00000164053_37 (sequence is synthesized)
ctgggtctgctggccatcctgaccttggcagtagccacactgtatggactatccctggccacacctggggagtaggccaagaaggaaaatctgacgaataaagacccccgctgccccata

SEQ ID NO: 505809 - DNA, 120 bp, Artificial Sequence
  ENSG00000164053_38 (sequence is synthesized)
gtgagtgctcctcgcggccttttgctcggagggagttgtcaaccgcgccagatccccttgatggctgtggcttcggaacctcgcggccagcactgccttttcgcctttttaaaatatggg

SEQ ID NO: 505810 - DNA, 120 bp, Artificial Sequence
  ENSG00000164053_39 (sequence is synthesized)
aacaccctgatttaagcagcggttgtcttccagaaggtcctttgattttagggggaaatgcattagccaggtcaaacagccgatttgaaacacagaaggctaagttgacattttacgtta

SEQ ID NO: 505811 - DNA, 120 bp, Artificial Sequence
  ENSG00000164053_40 (sequence is synthesized)
ttttctaaagtttaggccacttggttcttggttctaagcagagatccttggaacacacctaccaccaccatcagaaccatcactacccatgcatggggacccattcttgtgacaagtttg

SEQ ID NO: 505812 - DNA, 120 bp, Artificial Sequence
  ENSG00000164053_41 (sequence is synthesized)
gtgatttcttgcccagagccgcaagattggggagaactgtgaacacaaccagcccaccccctcatccagtaatccagtctccctcagcactctaccaaagggttccagtgtgtgttccaa

SEQ ID NO: 505813 - DNA, 120 bp, Artificial Sequence
  ENSG00000164053_42 (sequence is synthesized)
aacactcaaggtaccagaatccctgcttctcctgcaggggcctgcatggctctgagtaatatgcagaagaattgcccaggcctctgagaaccggtgccccgggcagtccttcagagagtc

SEQ ID NO: 505814 - DNA, 120 bp, Artificial Sequence
  ENSG00000164053_43 (sequence is synthesized)
cagggaagtcaaagtatgtggcttaagcagaagactttataaagtggaaagggccaagggcaggtatgtcccagagccttccgcacccacaggcatcttcctggggcttagtggcagcct

SEQ ID NO: 505815 - DNA, 120 bp, Artificial Sequence
  ENSG00000164054_0 (sequence is synthesized)
atgcatccggtgagcagaaggaaactccgtgcgtcgcccggcgcctgtccgagtctgggaaccggtaccaagttttcgcgcagaccccgggcgcgaagctggccccgaggctgggaagtc

SEQ ID NO: 505816 - DNA, 120 bp, Artificial Sequence
  ENSG00000164054_1 (sequence is synthesized)
gtccgcttccttccttcctcctccttccaccttcctccctcctccctcctccctcctcctccctcctcctcctcctgctcccccggacagaggttccgggaaccagccgggccggggcgg

SEQ ID NO: 505817 - DNA, 120 bp, Artificial Sequence
  ENSG00000164054_2 (sequence is synthesized)
cgcgcggatcactgaggctgtggcggcactgcgcccggcgctcgcgtccgtccgcccgtccgcccgcccagccatgactgcgccggtccccgcgccgcggatcctgttgccgttgctgtt

SEQ ID NO: 505818 - DNA, 120 bp, Artificial Sequence
  ENSG00000164054_3 (sequence is synthesized)
gcggatcctgttgccgttgctgttgctgctgctgctaacgccgcctccgggtgcacgtggtgaggtgtgtatggcttcccgtggactcagcctcttccccgagtcctgtccagatttctg

SEQ ID NO: 505819 - DNA, 120 bp, Artificial Sequence
  ENSG00000164054_4 (sequence is synthesized)
ctgtggtacctgtgatgaccaatactgctgctctgacgtgctgaagaaatttgtgtggagcgaggaaaggtgtgctgtgcctgaggccagcgtgcctgccagtgtagagccggtggagca

SEQ ID NO: 505820 - DNA, 120 bp, Artificial Sequence
  ENSG00000164054_5 (sequence is synthesized)
gctgggctcggcgctgaggtttcgccctggctacaacgaccccatgtcagggttcggagcgaccttggccgttggcctgaccatctttgtgctgtctgtcgtcactatcatcatctgctt

SEQ ID NO: 505821 - DNA, 120 bp, Artificial Sequence
  ENSG00000164054_6 (sequence is synthesized)
cacctgctcctgctgctgcctttacaagacgtgccgccgaccacgtccggttgtcaccaccaccacatccaccactgtggtgcatgccccttatcctcagcctccaagtgtgccgcccag

SEQ ID NO: 505822 - DNA, 120 bp, Artificial Sequence
  ENSG00000164054_7 (sequence is synthesized)
ctaccctggaccaagctaccagggctaccacaccatgccgcctcagccagggatgccagcagcaccctacccaatgcagtacccaccaccttacccagcccagcccatgggcccaccggc

SEQ ID NO: 505823 - DNA, 120 bp, Artificial Sequence
  ENSG00000164054_8 (sequence is synthesized)
ctaccacgagaccctggctggaggagcagccgcgccctaccccgccagccagcctccttacaacccggcctacatggatgccccgaaggcggccctctgagcattccctggcctctctgg

SEQ ID NO: 505824 - DNA, 120 bp, Artificial Sequence
  ENSG00000164054_9 (sequence is synthesized)
ttccttacgccccatgtgtgctgtgtgtgtcctgcctgtatatgtggcttcctctgatgctgacaaggtggggaacaatccttgccagagtgggctgggaccagactttgttctcttcct

SEQ ID NO: 505825 - DNA, 120 bp, Artificial Sequence
  ENSG00000164054_10 (sequence is synthesized)
cacctgaaattatgcttcctaaaatctcaagccaaactcaaagaatggggtggtggggggcaccctgtgaggtggcccctgagaggtgggggcctctccagggcacatctggagttcttc

SEQ ID NO: 505826 - DNA, 120 bp, Artificial Sequence
  ENSG00000164054_11 (sequence is synthesized)
tccagcttaccctagggtgaccaagtagggcctgtcacaccagggtggcgcagctttctgtgtgatgcagatgtgtcctggtttcggcagcgtagccagctgctgcttgaggccatggct

SEQ ID NO: 505827 - DNA, 120 bp, Artificial Sequence
  ENSG00000164054_12 (sequence is synthesized)
cgtccccggagttgggggtacccgttgcagagccagggacatgatgcaggcgaagcttgggatctggccaagttggactttgatcctttgggcagatgtcccattgctccctggagcctg

SEQ ID NO: 505828 - DNA, 120 bp, Artificial Sequence
  ENSG00000164054_13 (sequence is synthesized)
tcatgcctgttggggatcaggcagcctcctgatgccagaacacctcaggcagagccctactcagctgtacctgtctgcctggactgtcccctgtccccgcatctcccctgggaccagctg

SEQ ID NO: 505829 - DNA, 120 bp, Artificial Sequence
  ENSG00000164054_14 (sequence is synthesized)
gagggccacatgcacacacagcctagctgcccccagggagctctgctgcccttgctggccctgcccttcccacaggtgagcagggctcctgtccaccagcacactcagttctcttccctg

SEQ ID NO: 505830 - DNA, 120 bp, Artificial Sequence
  ENSG00000164054_15 (sequence is synthesized)
cagtgttttcattttattttagccaaacattttgcctgttttctgtttcaaacatgatagttgatatgagactgaaacccctgggttgtggagggaaattggctcagagatggacaacct

SEQ ID NO: 505831 - DNA, 120 bp, Artificial Sequence
  ENSG00000164054_16 (sequence is synthesized)
ggcaactgtgagtccctgcttcccgacaccagcctcatggaatatgcaacaactcctgtaccccagtccacggtgttctggcagcagggacacctgggccaatgggccatctggaccaaa

SEQ ID NO: 505832 - DNA, 120 bp, Artificial Sequence
  ENSG00000164054_17 (sequence is synthesized)
ggtggggtgtggggccctggatggcagctctggcccagacatgaatacctcgtgttcctcctccctctattactgtttcaccagagctgtcttagctcaaatctgttgtgtttctgagtc

SEQ ID NO: 505833 - DNA, 120 bp, Artificial Sequence
  ENSG00000164054_18 (sequence is synthesized)
tagggtctgtacacttgtttataataaatgcaatcgtttggagctgctgccccctttcttcctggcctcggctgctggaattggaatcaggctgtactctttccatccatttgggcttct

SEQ ID NO: 505834 - DNA, 120 bp, Artificial Sequence
  ENSG00000164054_19 (sequence is synthesized)
agtcctggcccactgcgccagcgctgagcctgccagggctggggctggggatcaccttgggatgatggtgtcagtcccagggggcaggagatcgagtgtcctctgagctggcgactgggc

SEQ ID NO: 505835 - DNA, 120 bp, Artificial Sequence
  ENSG00000164054_20 (sequence is synthesized)
ctgtagaagggaaccggcatttgtggagtgtctactgagtgccaaggtctgcgctgggcactgtcctcgcaccgcctcacctagtcctcacgtagccctcgggcaagtgaggatccgccg

SEQ ID NO: 505836 - DNA, 120 bp, Artificial Sequence
  ENSG00000164054_21 (sequence is synthesized)
ggactgcggctgggagggatggctgtggctgtcccccagcccacacagtaggcgctcagtgtcagggtgcatattcccggggacgccctccaggcctgagagctgggggccgccgccgcc

SEQ ID NO: 505837 - DNA, 120 bp, Artificial Sequence
  ENSG00000164054_22 (sequence is synthesized)
gttgctgctgctgctaacgccgcctccgggtggtgagccgggggtgggggcggcccgtcctgccctgggaccgggcagacacttccccgcgctgcctctccaacgagccgggcagcacca

SEQ ID NO: 505838 - DNA, 120 bp, Artificial Sequence
  ENSG00000164054_23 (sequence is synthesized)
gccccactatgccccccactgacccctgattgccccgaggccgtcagcgaacccccacgactgcggacccctcctccaccccagcaccctccttgcctgaacaaccctgcctagacacca

SEQ ID NO: 505839 - DNA, 120 bp, Artificial Sequence
  ENSG00000164054_24 (sequence is synthesized)
ggcagctgccacctttgtctgtcctggaacggtggggaggggtctgccctcccgcccatgttccaggggatggagtccccagaggctaggccctagctcagaggctcagattgggctgtg

SEQ ID NO: 505840 - DNA, 120 bp, Artificial Sequence
  ENSG00000164054_25 (sequence is synthesized)
aagaccttgctgcatatgggttcacctgagccaccaggcacgggccatgctgatgataccagctttcagcacgtggtgaggtgtgtatggcttcccgtggactcagcctcttccccgagt

SEQ ID NO: 505841 - DNA, 120 bp, Artificial Sequence
  ENSG00000164054_26 (sequence is synthesized)
accaggccctgctttggctaagctggagggatgggtggcaagcctggctctcaagacctggggagatggaggagggtcctgactggaattctctttgcagcggttgtcaccaccaccaca

SEQ ID NO: 505842 - DNA, 120 bp, Artificial Sequence
  ENSG00000164054_27 (sequence is synthesized)
gatttgctttctttttctccaaaaggggaggaaattgaaactgagtggcccacgatgggaagaggggaaagcccaggggtacaggaggcctctgggtgaaggcagaggctaacatggggt

SEQ ID NO: 505843 - DNA, 120 bp, Artificial Sequence
  ENSG00000164054_28 (sequence is synthesized)
actttgctccttgcatgtgtgtcagccagggccccagggtcgccctctgggcctagatggatgcagaagctcctcctggaggctggtggaacagggccggttcggagcgaccttggccgt

SEQ ID NO: 505844 - DNA, 120 bp, Artificial Sequence
  ENSG00000164054_29 (sequence is synthesized)
gaggggcatgccttgggaaggtgtggatgctggtctggggaggggcgaggtgccccgggtcacgtctagctctttggcaggttcggagcgaccttggccgttggcctgaccatctttgtg

SEQ ID NO: 505845 - DNA, 120 bp, Artificial Sequence
  ENSG00000164054_30 (sequence is synthesized)
cttgctgcatatgggttcacctgagccaccaggcacgggccatgctgatgataccagctttcagggctacagatggtgccactgccttggagccctgttgcccaggctggtctcaaactc

SEQ ID NO: 505846 - DNA, 120 bp, Artificial Sequence
  ENSG00000164054_31 (sequence is synthesized)
gcccaggctggtctcaaactcctggaaggcacagacatttcctggacacctgctgcaggcccagcgcggggctaagtgctttatgaacgctggtatgcacgtggtgaggtgtgtatggct

SEQ ID NO: 505847 - DNA, 120 bp, Artificial Sequence
  ENSG00000164054_32 (sequence is synthesized)
gtaacttcatcctgttgtggtcagagaagatcctttgtatggtatctgtcttctaaaatctgctgagacttgttttgtggcctaacatatgttctctcctggagacagtctggtggacac

SEQ ID NO: 505848 - DNA, 120 bp, Artificial Sequence
  ENSG00000164054_33 (sequence is synthesized)
ctgagaggatgtgtggctttgtgctatgagatcccggtgtgggcagagtccacctctggaaggccattgaagccaccggttcatagtagcttctgtgcacgttttgtggtgccctaaggt

SEQ ID NO: 505849 - DNA, 120 bp, Artificial Sequence
  ENSG00000164054_34 (sequence is synthesized)
ggaggagacagtgcggaacaagctcccagaggggcataggaggaggagtggcttcctggggttgtggcagcagggaggtgactggggccagctcagaggcacctctgactccccaaggtg

SEQ ID NO: 505850 - DNA, 120 bp, Artificial Sequence
  ENSG00000164054_35 (sequence is synthesized)
tgcatgtgggacctgttctgttagcccagctgccgccgtggtgtgcatagcactgggcctcgtgtgccgtgtgcttggcgtgccctgctgcctcctgccccaggctattttgcccatgca

SEQ ID NO: 505851 - DNA, 120 bp, Artificial Sequence
  ENSG00000164054_36 (sequence is synthesized)
ctcgggcacccatcccaaactacatcactcaacaggcctctgcccctttctgcttgcctgccactcacacggcagcccaccatgctcacagccaaccagggtcctctctgctttcaggag

SEQ ID NO: 505852 - DNA, 120 bp, Artificial Sequence
  ENSG00000164056_0 (sequence is synthesized)
ggagtgagaccgctctgcaaaccactgcgtgctttgcagagtgattatcagcacagttccctgccctggataaggaacagctacagtcgctgttaaatgtgcctgaaaagcaatttgcaa

SEQ ID NO: 505853 - DNA, 120 bp, Artificial Sequence
  ENSG00000164056_1 (sequence is synthesized)
tctttgcattaggatttcagatgcatgccaggtttccactgattgccagaactcgagatcactacacatggatccccaaaatcaacatggcagtggcagttcgttagttgtgatccagca

SEQ ID NO: 505854 - DNA, 120 bp, Artificial Sequence
  ENSG00000164056_2 (sequence is synthesized)
gccttctttggatagccgtcagagattagactatgagagagagattcagcctactgctattttgtccttagaccagatcaaggccataagaggcagcaatgaatacacagaagggccttc

SEQ ID NO: 505855 - DNA, 120 bp, Artificial Sequence
  ENSG00000164056_3 (sequence is synthesized)
ggtggtgaaaagacctgctcctcggacagcaccaagacaagaaaagcatgaaaggactcatgaaatcataccaattaatgtgaataataactacgagcacagacacacaagccacctggg

SEQ ID NO: 505856 - DNA, 120 bp, Artificial Sequence
  ENSG00000164056_4 (sequence is synthesized)
acatgcagtactcccaagtaatgccaggggccccattttgagcagatcaaccagcactggaagtgcagccagctctgggagcaacagcagtgcctcttctgaacagggactgttaggaag

SEQ ID NO: 505857 - DNA, 120 bp, Artificial Sequence
  ENSG00000164056_5 (sequence is synthesized)
gtcaccaccaaccagaccagtccctggtcataggtctgaaagggcaatccggacccagcccaagcaactgattgtggatgacttgaagggttccttgaaagaggacctgacacagcacaa

SEQ ID NO: 505858 - DNA, 120 bp, Artificial Sequence
  ENSG00000164056_6 (sequence is synthesized)
gttcatttgtgaacagtgtgggaagtgcaagtgtggagaatgcactgctcccaggaccctaccatcctgtttggcctgtaaccggcagtgcctttgctctgctgagagcatggtggaata

SEQ ID NO: 505859 - DNA, 120 bp, Artificial Sequence
  ENSG00000164056_7 (sequence is synthesized)
tggaacctgcatgtgcttagtcaagggcatcttctaccactgctccaatgacgacgaaggggattcctattcagataatccttgctcctgttcacaatcacactgctgctctagatacct

SEQ ID NO: 505860 - DNA, 120 bp, Artificial Sequence
  ENSG00000164056_8 (sequence is synthesized)
gtgtatgggagccatgtctttatttttaccttgcttactctgttatcctcctgctaaaggatgcctgaagctgtgcaggaggtgttatgactggatccatcgcccagggtgcagatgtaa

SEQ ID NO: 505861 - DNA, 89 bp, Artificial Sequence
  ENSG00000164056_9 (sequence is synthesized)
gagagctgcccctcccggggtcagggtaaaccatcatgatttttggaggtgggttgtacctcctgaacttttagctttcaagttgtggc

SEQ ID NO: 505862 - DNA, 120 bp, Artificial Sequence
  ENSG00000164056_10 (sequence is synthesized)
ttgccaaggtctaactcatggatttttctctttcctcatggatgatcttcagcaagagtggactgggaagctgcacctggctcccactttcaacaagagcctctgccatccacttgaggg

SEQ ID NO: 505863 - DNA, 120 bp, Artificial Sequence
  ENSG00000164056_11 (sequence is synthesized)
tattgagagccagtgggcttttgtgtagcctttttgttctgcaagcaactttctaaagttgtgtacatgaacatacacccacatccagactacagtgatttagagttgttttgattgggt

SEQ ID NO: 505864 - DNA, 120 bp, Artificial Sequence
  ENSG00000164056_12 (sequence is synthesized)
accgtgggagcagggaaattggttttttaaaaagcaactgtttaattgcttaaataagctatgtattaaatctgtctccagttagggctatcttcctagcataggccccttaagtagcat

SEQ ID NO: 505865 - DNA, 120 bp, Artificial Sequence
  ENSG00000164056_13 (sequence is synthesized)
gggggatatattttttgctataacgtaaaaattttcctttaaccactgccctctccttctttctccttcaaggttctttccccctcagttttgttgttgtcttactctggagatgccaag

SEQ ID NO: 505866 - DNA, 120 bp, Artificial Sequence
  ENSG00000164056_14 (sequence is synthesized)
tgtattttttctttctatgtaattttagattcgccttacaatgtaaatcttcacattggagataatattggttggaccttgcccatcttcactctagccttcgtatttgtgaaggactca

SEQ ID NO: 505867 - DNA, 120 bp, Artificial Sequence
  ENSG00000164056_15 (sequence is synthesized)
gccaccttccttcttcaccccatgcttctcaccaaatttttgttgtcattgagggcacttggataactcaagttgatatttatagctgatcaatctatatgtgtcacagaactatgctgc

SEQ ID NO: 505868 - DNA, 120 bp, Artificial Sequence
  ENSG00000164056_16 (sequence is synthesized)
ctaaagtgatcttggctccttaatggtccttttggccccttggatagttaacagctgagtaattctaatctcttctgtgttttccttgccttaaccacaaattgtggtgctttttgtata

SEQ ID NO: 505869 - DNA, 120 bp, Artificial Sequence
  ENSG00000164056_17 (sequence is synthesized)
atgtataaatcacaaagttgaattctgactatttttaagacaaaagtctgttaaacttttttattgtaaagaatatttattatgcgaatctctattattttatggtatttattgcaaaag

SEQ ID NO: 505870 - DNA, 120 bp, Artificial Sequence
  ENSG00000164056_18 (sequence is synthesized)
aaagactgttgaaatgtactcatgtttgaatataacaaaatatcaatacttaacggaaaataaggtgacacgaagaaagtacatatgttaactataatgcagaaaatatattaattaatg

SEQ ID NO: 505871 - DNA, 120 bp, Artificial Sequence
  ENSG00000164056_19 (sequence is synthesized)
tatttattcagtgcggattgcagagggcgcagctccaccgtggtaacttgcaatgtggccgcccctgcgctggcttctttctcctcggccctcggtgaacccagcttttcctttaaagca

SEQ ID NO: 505872 - DNA, 120 bp, Artificial Sequence
  ENSG00000164056_20 (sequence is synthesized)
tagacaaatccttgcttagggtcagccagaccgtgggcttgctttgggctcccgcgtggacgctgaaggctcttcatgatttctcagaaaccttggtgggccacccaaaaagtgtgttgg

SEQ ID NO: 505873 - DNA, 120 bp, Artificial Sequence
  ENSG00000164056_21 (sequence is synthesized)
acttgcccaacgtgcggaatcggctaagcgcgtcggcctgcgcggggcacaagggacgacgcccgcctttctctctccgagaaggatccccaaacctcactctcttcactcctccccgct

SEQ ID NO: 505874 - DNA, 120 bp, Artificial Sequence
  ENSG00000164056_22 (sequence is synthesized)
gatgccgcctcgccctccccgccgcggttgatgcggcacgtgcacgccgccgcccgcaccaggacctgggccgggtcgcacggcttggcccccggccaccgcttcggcctaggatttcag

SEQ ID NO: 505875 - DNA, 120 bp, Artificial Sequence
  ENSG00000164056_23 (sequence is synthesized)
taaaaaaatccccctccccctcccggccgcggcagcctctgcctggcaggcgcgtgctccgaggtttcgccggggtactgcgcggctccgtgacccacccgccgacggcggttcgggccc

SEQ ID NO: 505876 - DNA, 120 bp, Artificial Sequence
  ENSG00000164056_24 (sequence is synthesized)
cgacccgggcgctgcggagtctcgaacgcccgtgacgtggatttttcgctcgtcaggaagccgccatcccttccttcgttccttgcgaggagcgactagaacccgagttctctgagcaca

SEQ ID NO: 505877 - DNA, 120 bp, Artificial Sequence
  ENSG00000164056_25 (sequence is synthesized)
ccgtgccgtcagctggcccgtcacgcactcgactccgccactcccctacttgtttttctgagacttgggaagccttcctgaaaggatttgtaaaaactggttcttggaaaggggctgcag

SEQ ID NO: 505878 - DNA, 120 bp, Artificial Sequence
  ENSG00000164056_26 (sequence is synthesized)
aagacctcccgaggtggatgttactgagccgcccggcgagcaccagccgtgacaggtccgggcccggccgcgcggagccgcgggagaactgccctccgcagccggaagggggccgcgggg

SEQ ID NO: 505879 - DNA, 120 bp, Artificial Sequence
  ENSG00000164056_27 (sequence is synthesized)
agtatgaagtttgttacaactatcattggaaatgcaaattgaagttgtgcctggtgttatgggttacactattcaaatcctctgcggttttgtgaatctggcttagtacttttagctacc

SEQ ID NO: 505880 - DNA, 120 bp, Artificial Sequence
  ENSG00000164056_28 (sequence is synthesized)
ttttgctttgaaagcactgagttaagaagttcttgaagaagaggaataattgtgcaggagtcaggattagatgttgaggactccgagactaaatccccgcaggttatgaatgtgttactc

SEQ ID NO: 505881 - DNA, 80 bp, Artificial Sequence
  ENSG00000164061_0 (sequence is synthesized)
aggcggcggcgcgagccgagctgggagatggcggcggcagcggcggcgccgagagtgtgagcaccgcccgggagccgccg

SEQ ID NO: 505882 - DNA, 80 bp, Artificial Sequence
  ENSG00000164061_1 (sequence is synthesized)
gcagcgcgaccccgaccccgcccgcccgcctgcccgccatgggcaacgaggtcagcctggagggcggcgctggcgacggg

SEQ ID NO: 505883 - DNA, 120 bp, Artificial Sequence
  ENSG00000164061_2 (sequence is synthesized)
gggagcagcgcggtcgaccgcggtaccaccggtccctggccccggccccggccccggtcccggccctggcccgggcagcacttcccggagactggaccccaaggaacccctgggtaacca

SEQ ID NO: 505884 - DNA, 120 bp, Artificial Sequence
  ENSG00000164061_3 (sequence is synthesized)
agactggaccccaaggaacccctgggtaaccagagagcagcttccccaactccgaagcaggcttctgctaccactcctggccatgagagcccccgagagacaagggcacagggaccagca

SEQ ID NO: 505885 - DNA, 120 bp, Artificial Sequence
  ENSG00000164061_4 (sequence is synthesized)
ggccaggaggctgatggtccccgcaggacgctgcaggtagacagcaggacacagagatcagggcggtccccctcagtgtcaccggacagaggcagcacccccacatcaccctactccgtc

SEQ ID NO: 505886 - DNA, 120 bp, Artificial Sequence
  ENSG00000164061_5 (sequence is synthesized)
cctcagatcgccccccttcccagcagcacgctgtgtcccatatgcaagacttcggacctcacgtcgacccccagccagccaaacttcaacacctgcacccagtgtcacaacaaggtctgc

SEQ ID NO: 505887 - DNA, 120 bp, Artificial Sequence
  ENSG00000164061_6 (sequence is synthesized)
aaccagtgtgggttcaaccccaaccctcatctcacccaggtgaaggagtggctctgtctgaactgtcagatgcagagggctctgggaatggacatgaccactgcacctcgctccaagagc

SEQ ID NO: 505888 - DNA, 120 bp, Artificial Sequence
  ENSG00000164061_7 (sequence is synthesized)
cagcagcagctgcactccccagccctgtctcctgcccactccccggccaaacagcccctggggaagccagaccaagagagatctcggggcccaggaggaccacagcctgggtcccgccag

SEQ ID NO: 505889 - DNA, 120 bp, Artificial Sequence
  ENSG00000164061_8 (sequence is synthesized)
gctgagacagccagggccacctcagtgccggggcctgcccaagcagctgcccctccagaggtggggagggtgtctcctcagccccctcaacccaccaagccttccacagctgagcccagg

SEQ ID NO: 505890 - DNA, 120 bp, Artificial Sequence
  ENSG00000164061_9 (sequence is synthesized)
ccacctgcaggagaggccccggccaaaagtgccaccgcagtgcccgctgggcttggtgccactgagcagacccaggagggcctcactggtaagctcttcggccttggcgcgtcactgcta

SEQ ID NO: 505891 - DNA, 120 bp, Artificial Sequence
  ENSG00000164061_10 (sequence is synthesized)
acccaggcgagcaccctcatgtctgtgcagcccgaggctgacacccagggccagcctgcccccagcaaggggacacctaagatcgtcttcaatgatgccagcaaggaggctggcccaaaa

SEQ ID NO: 505892 - DNA, 120 bp, Artificial Sequence
  ENSG00000164061_11 (sequence is synthesized)
cccttgggctcagggcccgggcctgggccagcacctggagccaaaactgagcctggggctagaatgggtcctggatctggacctggagccctgccgaaaactgggggaacaaccagtcca

SEQ ID NO: 505893 - DNA, 120 bp, Artificial Sequence
  ENSG00000164061_12 (sequence is synthesized)
aagcatggcagagcagaacatcaggcagcatcgaaggctgctgccaagccaaagaccatgccgaaggaaagggccatctgcccactgtgccaagccgagctcaacgtgggcagcaagagc

SEQ ID NO: 505894 - DNA, 120 bp, Artificial Sequence
  ENSG00000164061_13 (sequence is synthesized)
ccagccaactataacacatgcaccacctgcaggctccaggtgtgcaacctgtgtggcttcaacccaacaccccacctggtggagaaaacagagtggctctgtctgaactgccaaaccaag

SEQ ID NO: 505895 - DNA, 120 bp, Artificial Sequence
  ENSG00000164061_14 (sequence is synthesized)
cggctactggagggcagcctaggagagccgacccccctgccgccgcccacctcacagcagccccctgtaggggcccctcaccgtgcatctggaacatcccctctgaagcagaaagggcca

SEQ ID NO: 505896 - DNA, 120 bp, Artificial Sequence
  ENSG00000164061_15 (sequence is synthesized)
caggggctgggccagccttcaggccccctgcctgccaaggccagccctctatccaccaaggccagccctctgcccagcaaggccagcccccaggccaagcccctcagggcttctgaaccc

SEQ ID NO: 505897 - DNA, 120 bp, Artificial Sequence
  ENSG00000164061_16 (sequence is synthesized)
agcaagaccccaagcagtgtccaggaaaagaagacccgagtccccactaaagctgagcccatgccgaagccacctccagagactaccccaacccctgcgactcctaaagtaaagagtggg

SEQ ID NO: 505898 - DNA, 120 bp, Artificial Sequence
  ENSG00000164061_17 (sequence is synthesized)
gtgaggagggctgaacctgccacccctgtcgtcaaggctgttccagaagcccccaagggtggggaggcggaggacctggtgggcaagccttactctcaggatgcgtctcggagcccacag

SEQ ID NO: 505899 - DNA, 120 bp, Artificial Sequence
  ENSG00000164061_18 (sequence is synthesized)
agcctcagtgacacaggctattcctctgacggcatctctagctcccagagtgagatcacaggagtcgtgcagcaggaggtggaacagctggacagtgcaggggtgacagggccacatcca

SEQ ID NO: 505900 - DNA, 120 bp, Artificial Sequence
  ENSG00000164061_19 (sequence is synthesized)
cccagcccctccgagatccacaaggtggggagcagcatgcggcctttgctgcaggcccagggcctggccccaagtgagcggagcaagccactctccagcggtactggcgaggagcagaag

SEQ ID NO: 505901 - DNA, 120 bp, Artificial Sequence
  ENSG00000164061_20 (sequence is synthesized)
cagcggccccactccttgtccatcacgcctgaggcctttgactctgatgaggagctggaggatatcctggaggaagacgaagactctgctgagtggaggcgccggagagagcagcaggac

SEQ ID NO: 505902 - DNA, 120 bp, Artificial Sequence
  ENSG00000164061_21 (sequence is synthesized)
actgccgagtcctcagacgactttggcagccaattgaggcacgactatgtggaggacagcagtgagggtggcctgtcccctcttccaccccagcccccagcccgggcagcagaactgact

SEQ ID NO: 505903 - DNA, 120 bp, Artificial Sequence
  ENSG00000164061_22 (sequence is synthesized)
gatgaggatttcatgcgacggcagattctcgagatgagcgccgaggaagacaacctggaggaggatgacactgccacctccgggcgtggcctggccaaacatggcacccagaaaggtggc

SEQ ID NO: 505904 - DNA, 120 bp, Artificial Sequence
  ENSG00000164061_23 (sequence is synthesized)
cccagacccaggcctgagcctagccaagaaccagcagcactgcccaagaggcgcctgccccacaatgccaccacgggctatgaggagctgctccctgagggaggctcagcagaggctacc

SEQ ID NO: 505905 - DNA, 120 bp, Artificial Sequence
  ENSG00000164061_24 (sequence is synthesized)
gatggcagtgggaccctgcagggtgggctccgtcgcttcaagaccattgagctcaacagcacgggaagttatggtcatgagttggacctgggccaaggcccagaccccagtctggaccgg

SEQ ID NO: 505906 - DNA, 120 bp, Artificial Sequence
  ENSG00000164061_25 (sequence is synthesized)
gagcctgagctggagatggagagcctaacgggctcccctgaggaccgctcccgtggtgagcactcctctacattgcctgcctccacacccagctacacctcgggcacctctcccacctct

SEQ ID NO: 505907 - DNA, 120 bp, Artificial Sequence
  ENSG00000164061_26 (sequence is synthesized)
ctgtcctccctagaggaggacagtgacagcagccccagccgcaggcagcgtctagaagaagcaaagcagcagcgcaaggcccggcaccgctcccacgggcccctgctacccaccatcgag

SEQ ID NO: 505908 - DNA, 120 bp, Artificial Sequence
  ENSG00000164061_27 (sequence is synthesized)
gactcctcagaggaggaggagctgcgggaggaagaggagctgcttcgtgagcaagagaagatgcgggaggtggagcagcagcgcatccgcagcacggcccgcaagacccggcgggacaag

SEQ ID NO: 505909 - DNA, 120 bp, Artificial Sequence
  ENSG00000164061_28 (sequence is synthesized)
gaagaactgcgggcccagcggaggcgagagcgctccaagacaccacccagtaacttgtcacccatcgaggatgcctccccgacggaggagctgaggcaggcggccgagatggaggagcta

SEQ ID NO: 505910 - DNA, 120 bp, Artificial Sequence
  ENSG00000164061_29 (sequence is synthesized)
caccgctcctcctgctctgagtactcaccctcaccctcccttgactctgaggctgaggccttggatggtggccctagccggctttacaagtcaggcagtgagtacaacctgcccaccttc

SEQ ID NO: 505911 - DNA, 120 bp, Artificial Sequence
  ENSG00000164061_30 (sequence is synthesized)
atgtccctctactcaccaaccgagacaccctccggcagctccaccactcccagttccggacggccgctcaagagcgctgaggaggcttatgaggagatgatgcgcaaagctgagctgctc

SEQ ID NO: 505912 - DNA, 120 bp, Artificial Sequence
  ENSG00000164061_31 (sequence is synthesized)
cagaggcagcaaggccaggcagcaggggcccggggaccccatggcggcccctctcagcccacaggcccccggggcctgggctccttcgaatatcaagacactacagaccgtgagtatggc

SEQ ID NO: 505913 - DNA, 120 bp, Artificial Sequence
  ENSG00000164061_32 (sequence is synthesized)
caggctgctcagcctgccgcagagggcacgccagccagcctgggagcagccgtgtacgaagaaatccttcagacatcacagagcatagtccgcatgcggcaggcctcctcacgagacctg

SEQ ID NO: 505914 - DNA, 120 bp, Artificial Sequence
  ENSG00000164061_33 (sequence is synthesized)
gcttttgctgaggacaaaaagaaggagaagcagtttctaaatgctgagagtgcatacatggacccaatgaagcaaaatggtggcccccttacccctggtaccagtcccacccagctcgct

SEQ ID NO: 505915 - DNA, 120 bp, Artificial Sequence
  ENSG00000164061_34 (sequence is synthesized)
gcccctgtgtccttctctacccccacctcctcagacagcagcgggggccgagttattcccgatgtccgtgtcactcagcattttgcaaaggagactcaggaccccctcaagctgcacagc

SEQ ID NO: 505916 - DNA, 120 bp, Artificial Sequence
  ENSG00000164061_35 (sequence is synthesized)
tctcctgcctcccccagctcagcctccaaggagataggcatgcccttttcccagggccctgggaccccagccaccacagctgtggctccttgtccagctgggctgccacgaggatatatg

SEQ ID NO: 505917 - DNA, 120 bp, Artificial Sequence
  ENSG00000164061_36 (sequence is synthesized)
actccagcctccccagcaggctccgagcgtagtccttcaccatcttccacagcccacagctatggacacagcccaaccactgcaaactatgggtcccaaactgaggatctaccccaggcc

SEQ ID NO: 505918 - DNA, 120 bp, Artificial Sequence
  ENSG00000164061_37 (sequence is synthesized)
cccagtggccttgctgcagctggacgagctgctagagagaagcccttgagtgcgagtgacggtgagggtggcactcctcagccttcccgggcatattcctactttgcaagctccagccca

SEQ ID NO: 505919 - DNA, 120 bp, Artificial Sequence
  ENSG00000164061_38 (sequence is synthesized)
cctctctccccgtcttccccctcagagagtcccacattctcccctggcaagatgggcccaagggccacagcagagttctctacacagacgccaagtccagcccctgcctcagacatgcca

SEQ ID NO: 505920 - DNA, 120 bp, Artificial Sequence
  ENSG00000164061_39 (sequence is synthesized)
cggagccctggtgcccccactccatcacctatggtagcccagggtacacaaacaccacatcgacccagcacgcctcgcctggtgtggcaggagtcctctcaagaggctccctttatggtc

SEQ ID NO: 505921 - DNA, 120 bp, Artificial Sequence
  ENSG00000164061_40 (sequence is synthesized)
atcacgctggcatctgacgcctccagccagaccaggatggtacatgccagtgcctccacctccccgctctgctcacctactgaaacccagcccaccacccatggctacagccagacaaca

SEQ ID NO: 505922 - DNA, 120 bp, Artificial Sequence
  ENSG00000164061_41 (sequence is synthesized)
cctccgagtgtgtctcagctgcccccagagccacctgggccacctggctttccacgggtgcccagtgctggtgcagatgggcccctggcactatatggctggggtgccctccctgctgag

SEQ ID NO: 505923 - DNA, 120 bp, Artificial Sequence
  ENSG00000164061_42 (sequence is synthesized)
aacatctccctgtgccggatctcctctgtccctgggacgtctagggttgagccaggccccaggacccctggcactgcagtggtagacctccgtacagctgtcaagcccactcccatcatc

SEQ ID NO: 505924 - DNA, 120 bp, Artificial Sequence
  ENSG00000164061_43 (sequence is synthesized)
ctcactgaccagggcatggacctcacctctcttgctgtggaagcgaggaagtatggtcttgccctggatccaatcccaggacggcagtcgaccgccgtgcagcccttggttatcaacctc

SEQ ID NO: 505925 - DNA, 120 bp, Artificial Sequence
  ENSG00000164061_44 (sequence is synthesized)
aatgcccaggagcataccttccttgctactgccaccaccgtgagcatcaccatggcctcgtctgtgttcatggctcaacaaaagcagcctgtggtctatggagacccctaccagagccgc

SEQ ID NO: 505926 - DNA, 120 bp, Artificial Sequence
  ENSG00000164061_45 (sequence is synthesized)
cttgactttggccagggtgggggtagccctgtgtgcctggcccaggtcaaacaagtagagcaggctgtccagacagccccataccgaagtgggccccggggaagacccagggaggccaag

SEQ ID NO: 505927 - DNA, 120 bp, Artificial Sequence
  ENSG00000164061_46 (sequence is synthesized)
tttgccagatataacctacccaaccaagtagctcctctggccagaagagacgttttgatcactcagatgggcaccgcccagagcattggcctcaagccaggcccagtgccagagccaggt

SEQ ID NO: 505928 - DNA, 120 bp, Artificial Sequence
  ENSG00000164061_47 (sequence is synthesized)
gccgagccccaccgggccacccctgcagagctgcggtcacatgctctgccaggtgccaggaagccacacacagtggtggtgcagatgggagagggcacagcaggcactgtgaccacactg

SEQ ID NO: 505929 - DNA, 120 bp, Artificial Sequence
  ENSG00000164061_48 (sequence is synthesized)
ctcccagaggagcctgcgggtgccctggaccttaccgggatgaggcctgagagccagctggcatgctgtgacatggtctacaagctcccctttggcagcagctgcactggcaccttccac

SEQ ID NO: 505930 - DNA, 120 bp, Artificial Sequence
  ENSG00000164061_49 (sequence is synthesized)
ccggcccccagtgtgcctgagaagagcatggcagatgctgccccacctggccaaagcagcagccccttctatggtccccgggaccctgagcctcctgagcccccaacctaccgggcacag

SEQ ID NO: 505931 - DNA, 120 bp, Artificial Sequence
  ENSG00000164061_50 (sequence is synthesized)
ggggtggtggggcctgggccccatgaggagcagaggccctacccacaaggcctgcctggtaggctgtactcctccatgtctgacaccaatttggctgaggctggcctcaactaccatgcc

SEQ ID NO: 505932 - DNA, 120 bp, Artificial Sequence
  ENSG00000164061_51 (sequence is synthesized)
cagaggatcgggcagctcttccagggtcctggacgagactcggctatggacctcagctcactgaagcactcctacagcctgggctttgcggatggacgctacctagggcagggcttgcag

SEQ ID NO: 505933 - DNA, 120 bp, Artificial Sequence
  ENSG00000164061_52 (sequence is synthesized)
tatggctcagtcacggacctgcgtcatcctacagaccttttggctcacccgcttcccatgcggcgctatagctcagtgtcgaacatctactcagaccacaggtacggcccacggggagat

SEQ ID NO: 505934 - DNA, 120 bp, Artificial Sequence
  ENSG00000164061_53 (sequence is synthesized)
gcagttggcttccaggaggccagcctggcccagtacagtgccaccacagcccgtgaaatcagtcgcatgtgcgctgccctcaactccatggaccagtatggtgggcggcatggcagtggt

SEQ ID NO: 505935 - DNA, 120 bp, Artificial Sequence
  ENSG00000164061_54 (sequence is synthesized)
ggtggtggccctgaccttgtgcagtaccagccccagcacgggcccgggctcagtgctccacagagtctggttcccctcagacctggactccttggtaaccccacctttccagagggccac

SEQ ID NO: 505936 - DNA, 120 bp, Artificial Sequence
  ENSG00000164061_55 (sequence is synthesized)
ccaagtcctgggaacttggcccagtatgggcctgcagcaggccaaggaacagcagtcagacagctgctgccgtccacagccactgtacgtgcagctgatggcatgatctactcgactatc

SEQ ID NO: 505937 - DNA, 120 bp, Artificial Sequence
  ENSG00000164061_56 (sequence is synthesized)
aataccccaattgctgcaacactgcccatcaccacccagcctgcctcagtcctgcggcccatggtgcgtggtggcatgtacaggccttacgcatctggtggaatcacagccgtgccactc

SEQ ID NO: 505938 - DNA, 120 bp, Artificial Sequence
  ENSG00000164061_57 (sequence is synthesized)
accagtctgacacgtgtgcccatgattgccccccgggtacctcttggacccacagggctgtaccgctatcctgcaccaagtagatttcccattgcttccagtgttccacctgcagaaggg

SEQ ID NO: 505939 - DNA, 120 bp, Artificial Sequence
  ENSG00000164061_58 (sequence is synthesized)
cctgtctatctggggaaacctgctgctgccaaggcccctggggctgggggcccttcaaggccagagatgccagtaggggctgcacgggaagagcctcttcccacaaccacccctgctgcc

SEQ ID NO: 505940 - DNA, 120 bp, Artificial Sequence
  ENSG00000164061_59 (sequence is synthesized)
atcaaggaggctgcaggagccccagctcctgccccactagctggccagaagccaccagcagatgctgctcctgggggtggcagtggggccctcagccggccagggttcgagaaagaggaa

SEQ ID NO: 505941 - DNA, 120 bp, Artificial Sequence
  ENSG00000164061_60 (sequence is synthesized)
gcatcacaggaggagaggcagcggaagcaacaggagcagctgctccagctagagcgggagcgggtggagttggagaagctgcgacaacttcggctgcaagaggagctagagcgggaacgt

SEQ ID NO: 505942 - DNA, 120 bp, Artificial Sequence
  ENSG00000164061_61 (sequence is synthesized)
gtggagctgcagaggcaccgtgaggaggagcagctgctggtgcagcgggagttgcaggagctgcagaccatcaagcaccatgtgctgcagcagcagcaagaggaacgccaggctcaattt

SEQ ID NO: 505943 - DNA, 120 bp, Artificial Sequence
  ENSG00000164061_62 (sequence is synthesized)
gcactgcagcgggaacagctagcgcagcagcgtctgcagctggagcagatccagcagctgcagcagcagctgcagcagcagctagaggagcagaagcagcggcagaaggctccctttcct

SEQ ID NO: 505944 - DNA, 120 bp, Artificial Sequence
  ENSG00000164061_63 (sequence is synthesized)
gcagcctgtgaggcacctggccgagggcctcccctagcggctgctgagttggcccagaatggccagtattggcccccccttacacatgcagccttcattgccatggcagggcctgaagga

SEQ ID NO: 505945 - DNA, 120 bp, Artificial Sequence
  ENSG00000164061_64 (sequence is synthesized)
cttgggcagcctcgtgagcctgtgctgcaccggggtctccccagctctgcctcagacatgtcactgcaaacggaggagcagtgggaggccagccgtagtggcatcaagaagcggcactcc

SEQ ID NO: 505946 - DNA, 120 bp, Artificial Sequence
  ENSG00000164061_65 (sequence is synthesized)
atgccacgcctgcgggatgcctgtgagctagagtctgggactgagccctgtgtggtcaggaggattgccgacagcagcgtgcagacagacgatgaggatggggagagccgctacctcttg

SEQ ID NO: 505947 - DNA, 120 bp, Artificial Sequence
  ENSG00000164061_66 (sequence is synthesized)
ccgggcacggcggagtgctgactgcagtgtgcagacggacgacgaagacagtgctgagtgggagcagccagtgcgccgccgcaggtctcgtcttccccgccactcagactcaggctctga

SEQ ID NO: 505948 - DNA, 120 bp, Artificial Sequence
  ENSG00000164061_67 (sequence is synthesized)
cagcaagcacgatgccactgcctcatcatccagtgctgctgccactgtgagggccatgagcagcgtgggcatccagaccatcagtgactgctccgtgcagacggagcctgaccagctgcc

SEQ ID NO: 505949 - DNA, 120 bp, Artificial Sequence
  ENSG00000164061_68 (sequence is synthesized)
cagggtctctccagccatccacatcacagctgccaccgatcccaaggtggagatcgtcaggtacatatcggcgccagagaagactgggcgtggggagagcctggcctgccagacggagcc

SEQ ID NO: 505950 - DNA, 120 bp, Artificial Sequence
  ENSG00000164061_69 (sequence is synthesized)
agatgggcaggcccagggtgtagccgggccgcagcttgtagggccaactgccatcagcccctacctgcctggcatccagatcgtcaccccagggcctctgggcagatttgaaaaaaagaa

SEQ ID NO: 505951 - DNA, 120 bp, Artificial Sequence
  ENSG00000164061_70 (sequence is synthesized)
gccagatcccctggagattgggtaccaggcccacctgcctccggagtctctctcacagcttgtgagccgccagcctcccaagtcccctcaggtcctctactcaccagtctcacccctgtc

SEQ ID NO: 505952 - DNA, 120 bp, Artificial Sequence
  ENSG00000164061_71 (sequence is synthesized)
ccctcaccggctcctggacacctcctttgcttccagtgagaggctgaacaaagctcacgtgagtccccagaagcacttcacggctgacagcgctctccgccagcagacgctgcctcgccc

SEQ ID NO: 505953 - DNA, 120 bp, Artificial Sequence
  ENSG00000164061_72 (sequence is synthesized)
catgaagaccctgcagcggtccctgtctgaccctaagcccctcagccccaccgccgaagagtctgccaaagagagattctccctctaccagcaccaggggggactgggtagccaggtgtc

SEQ ID NO: 505954 - DNA, 120 bp, Artificial Sequence
  ENSG00000164061_73 (sequence is synthesized)
ggcgttgccacccaacagcctggtccgcaaggtgaagcggacactgcccagcccccctccagaggaggctcaccttcccctggctggccaggcctccccacagctgtatgcagccagcct

SEQ ID NO: 505955 - DNA, 120 bp, Artificial Sequence
  ENSG00000164061_74 (sequence is synthesized)
gctgcagcgagggctgacggggcccaccactgtccctgctaccaaggccagcctgctccgggagctggaccgggacctgcggctggtggagcatgagtccaccaaactgcgcaagaagca

SEQ ID NO: 505956 - DNA, 120 bp, Artificial Sequence
  ENSG00000164061_75 (sequence is synthesized)
ggcagagctggatgaggaggagaaggagattgacgccaagctcaagtacctggagttgggtatcacacaacgcaaagagtctttggccaaagaccggggtggccgtgactacccaccctt

SEQ ID NO: 505957 - DNA, 120 bp, Artificial Sequence
  ENSG00000164061_76 (sequence is synthesized)
gcgtggtcttggcgagcatcgtgactacctatcggacagtgagctcaaccagctgcggctccagggctgcaccactcccgctggccagtttgtggacttccctgccactgccgctgctcc

SEQ ID NO: 505958 - DNA, 120 bp, Artificial Sequence
  ENSG00000164061_77 (sequence is synthesized)
tgccaccccctctggtcccactgccttccagcagccccgcttccagcctccagccccacagtattctgcaggcagtggtgggccaactcagaacggattcccagcccaccaggcccccac

SEQ ID NO: 505959 - DNA, 120 bp, Artificial Sequence
  ENSG00000164061_78 (sequence is synthesized)
ctaccctggccccagcacgtacccagctcctgcctttcctcctggtgccagttacccagctgagcctggcctgccaaaccagcaggctttccgccccacaggccactatgcaggccaaac

SEQ ID NO: 505960 - DNA, 120 bp, Artificial Sequence
  ENSG00000164061_79 (sequence is synthesized)
acccatgccaaccacacagagcaccctttttccagtccccgctgatagccgtgccccactgcagaagccacgccagacatcgctagccgacttggagcagaaggtgcccaccaactatga

SEQ ID NO: 505961 - DNA, 120 bp, Artificial Sequence
  ENSG00000164061_80 (sequence is synthesized)
ggtgatcgccagccccgttgtgcccatgtcttcagccccatctgaaaccagctacagtggcccagcagtgagcagcggctatgagcagggcaaggtccctgaggtgccccgggctggtga

SEQ ID NO: 505962 - DNA, 120 bp, Artificial Sequence
  ENSG00000164061_81 (sequence is synthesized)
ccgtggcagtgtgagccagagcccagcccccacctacccctctgactcacactataccagtctggagcagaacgttcctcgaaactacgtaatgattgatgacatcagtgaactgaccaa

SEQ ID NO: 505963 - DNA, 120 bp, Artificial Sequence
  ENSG00000164061_82 (sequence is synthesized)
ggacagcacctctactgctcctgatagccaacggctggagcccctggggccaggcagcagtgggcgtccagggaaggagcctggagaaccaggtgtccttgacgggcccacactgccctg

SEQ ID NO: 505964 - DNA, 120 bp, Artificial Sequence
  ENSG00000164061_83 (sequence is synthesized)
ctgctatgccagaggagaagaggaatctgaggaggactcatacgatccccgcgggaagggtggccacctccggagcatggagagcaatggtcgaccagccagtacccactactatggtga

SEQ ID NO: 505965 - DNA, 120 bp, Artificial Sequence
  ENSG00000164061_84 (sequence is synthesized)
cagtgactacaggcatggggctcgagtagagaagtatggtccagggcccatggggcccaagcatccctccaagagcctggctccagctgccatctcctcaaagcgcagcaagcaccggaa

SEQ ID NO: 505966 - DNA, 120 bp, Artificial Sequence
  ENSG00000164061_85 (sequence is synthesized)
gcagggcatggagcaaaagatatccaagttctcgcctattgaagaggccaaagacgtagagtcagacctggcgtcctaccccccacctgcagtcagcagcagcctggtctctcggggcag

SEQ ID NO: 505967 - DNA, 120 bp, Artificial Sequence
  ENSG00000164061_86 (sequence is synthesized)
gaagttccaggatgaaatcacctatgggctcaagaagaacgtgtatgagcagcaaaaatactatgggatgtccagccgggacgcagtggaggacgaccgcatttatggcgggagcagccg

SEQ ID NO: 505968 - DNA, 120 bp, Artificial Sequence
  ENSG00000164061_87 (sequence is synthesized)
gtcccgggcaccttctgcatacagtggggagaagctgtccagccacgacttcagtggctggggcaaggggtacgaaagggaacgggaggctgtggagcgacttcaaaaagcgggccccaa

SEQ ID NO: 505969 - DNA, 120 bp, Artificial Sequence
  ENSG00000164061_88 (sequence is synthesized)
gccctcatccctaagtatggcccacagccgggtacgaccccccatgcggagccaggcctctgaagaggagagccccgtcagtcctttggggaggccccgccctgccggagggcccctccc

SEQ ID NO: 505970 - DNA, 120 bp, Artificial Sequence
  ENSG00000164061_89 (sequence is synthesized)
tcccggcggggatacctgcccacagttctgctccagccactccatgcctgatgtccaggaacatgtcaaggacggacctcgggcccacgcatataagcgtgaggagggctacatcctgga

SEQ ID NO: 505971 - DNA, 120 bp, Artificial Sequence
  ENSG00000164061_90 (sequence is synthesized)
tgattcccattgcgtggtttccgacagcgaagcgtatcacctgggccaggaggagacggactggtttgataagccccgggatgcccgctctgaccggttcaggcaccacgggggccatgc

SEQ ID NO: 505972 - DNA, 120 bp, Artificial Sequence
  ENSG00000164061_91 (sequence is synthesized)
agtttcctcctcctcccagaagcgaggccctgccaggcacagctaccatgactacgatgaaccccctgaggagggcctgtggcctcatgatgagggtggcccaggccgccatgcctcagc

SEQ ID NO: 505973 - DNA, 120 bp, Artificial Sequence
  ENSG00000164061_92 (sequence is synthesized)
caaggaacaccggcacggtgaccacgggcggcactcaggccgccacactggtgaggagccgggacggcgtgctgccaaaccacacgctcgggacctgggtcgccatgaggcccggcccca

SEQ ID NO: 505974 - DNA, 120 bp, Artificial Sequence
  ENSG00000164061_93 (sequence is synthesized)
ctctcagcccagctctgctccagctatgccgaagaagggtcagcctgggtatcccagctctgctgagtactcacagccatcccgtgcttcatccgcataccatcatgcctctgacagcaa

SEQ ID NO: 505975 - DNA, 120 bp, Artificial Sequence
  ENSG00000164061_94 (sequence is synthesized)
gaagggctcccggcaagcccactccgggcccgctgcactgcagtcaaaggcagaaccccaggcgcagccgcagctgcaaggtcggcaggcagctccaggaccacagcagtcacagtcacc

SEQ ID NO: 505976 - DNA, 120 bp, Artificial Sequence
  ENSG00000164061_95 (sequence is synthesized)
atcatccaggcaaataccctctggggcagcatcacgccagccacagacacagcagcagcagcaaggtcttgggctgcagcccccacagcaggctctgacacaggctcggctgcagcaaca

SEQ ID NO: 505977 - DNA, 120 bp, Artificial Sequence
  ENSG00000164061_96 (sequence is synthesized)
gagccagccaaccacccggggctcagcccctgctgccagccagcctgcagggaagcctcagccaggccccagcacagccacaggtcctcaaccagcaggaccgccacgggcagaacagac

SEQ ID NO: 505978 - DNA, 120 bp, Artificial Sequence
  ENSG00000164061_97 (sequence is synthesized)
aaatggctctaaagggacagccaaagcaccgcaacaggggagggctcctcaggcccagccagcaccaggacctggacctgcaggtgtgaaggctggagccaggcctggaggaaccccagg

SEQ ID NO: 505979 - DNA, 120 bp, Artificial Sequence
  ENSG00000164061_98 (sequence is synthesized)
ggctcccgccggccagccaggtgccgatggggagagcgtgttctccaagatcctccctggcggggcagccgagcaagctggcaaactgacggaagctgtctctgcttttggcaaaaaatt

SEQ ID NO: 505980 - DNA, 120 bp, Artificial Sequence
  ENSG00000164061_99 (sequence is synthesized)
ttcctcattctggtgaccatgcccagcatggctcttgaagaaatgaagagaggtatcattgctgtggaaaaatctctggagtcagaggcctgggcgcagctctggactctgcgtataaca

SEQ ID NO: 505981 - DNA, 120 bp, Artificial Sequence
  ENSG00000164061_100 (sequence is synthesized)
catctacaatctggcaaacccttggcccaaagactcaccaggtgggacgtggcaggcaggcctcagttgaggacgtgatgttttctcacagcagctgcctgggtgaagcatctgctggac

SEQ ID NO: 505982 - DNA, 120 bp, Artificial Sequence
  ENSG00000164061_101 (sequence is synthesized)
aagtcggaccactggccaggggacctttgattgtctttccagagatgctgctctctgcagggcaccaccttcaaggcacagcccttgttgggagggagaaccctctccagaaaccctgcc

SEQ ID NO: 505983 - DNA, 120 bp, Artificial Sequence
  ENSG00000164061_102 (sequence is synthesized)
accatggtgtcttgccgtacttcccacagccgcctttttgcggcctggccggccaggcttcccgtgcgttatacacagagtttgggcacacactgccctccctccgagatgccagaagtt

SEQ ID NO: 505984 - DNA, 120 bp, Artificial Sequence
  ENSG00000164061_103 (sequence is synthesized)
tttccacagccttggagaggggctttgactgagggctgggggccctgggctccgtttccttcacattccagctggcccggatccctctgtggcacagggccctgcccgtcacatgccctc

SEQ ID NO: 505985 - DNA, 120 bp, Artificial Sequence
  ENSG00000164061_104 (sequence is synthesized)
tgggtgacatcggagcagacctccatgtggccaggggttgggagaactttacaaacattaggacctaacactgtctcatcgctgaaataagaggccatagcaccgaaaagcagcgtgggc

SEQ ID NO: 505986 - DNA, 120 bp, Artificial Sequence
  ENSG00000164061_105 (sequence is synthesized)
gccggctgaggcttctcccagcccgtgggtggcagcgtgctagcacactgccaccatctcaaagccatccccctagccatcgtgagcatcccagcggcaccgccattgtctcaaccagcc

SEQ ID NO: 505987 - DNA, 120 bp, Artificial Sequence
  ENSG00000164061_106 (sequence is synthesized)
ggctcctcgtctgtacacctggggatttcttttgatttcaagaacagccttaatcattccagtttgatttacgtgtatacctcataaacatttttcttttgtttctctctccccctttct

SEQ ID NO: 505988 - DNA, 120 bp, Artificial Sequence
  ENSG00000164061_107 (sequence is synthesized)
ctcttctcttggctcactcccttgcctctccccctccaccaccaccttgtgactgatggtttggtttcctctctgctctgcccctgctcagcacagggagaatgttgacttagaagcaat

SEQ ID NO: 505989 - DNA, 120 bp, Artificial Sequence
  ENSG00000164061_108 (sequence is synthesized)
agggggcagcaggccaccaagagcacaaccccagggcgaggtctggggaggcctcccagcccgcctctgtttactgtgcaattccagtcgttcttaagccatcaccagtgggtgtactca

SEQ ID NO: 505990 - DNA, 120 bp, Artificial Sequence
  ENSG00000164061_109 (sequence is synthesized)
gagcagaggggccaggacttctgccagccaagggaaaggcccagagccctgtgcgggggaatgtggcactgtctatccatccggtggactgggcagcattcctccccagggctcttccct

SEQ ID NO: 505991 - DNA, 120 bp, Artificial Sequence
  ENSG00000164061_110 (sequence is synthesized)
tgggggcctcctttcatctggggcacagccacaagtctcatctctaacgttctatgcaatgaaatataaaccctcaatgacaactgttaatatttaataaattccatgttatgtataagg

SEQ ID NO: 505992 - DNA, 120 bp, Artificial Sequence
  ENSG00000164061_111 (sequence is synthesized)
agttaattgcaaacatgcaattgagaaactggatagatacactcataaaacccccacccctccccaccccacccctgctcccattgtgtgtgtgaaattctcagtctgtggcatgtttga

SEQ ID NO: 505993 - DNA, 120 bp, Artificial Sequence
  ENSG00000164061_112 (sequence is synthesized)
cctgtggcaggactcgctgctgccaggtgagtcaccgcctgtcctgcagtggagcatgcacagctcgcagcctctttgcacgatttcatccattttaaatgcttgaccctcttgcttgga

SEQ ID NO: 505994 - DNA, 120 bp, Artificial Sequence
  ENSG00000164061_113 (sequence is synthesized)
gttctttttgcctcagaacctctccttcaggagcacttctagctgacttctgcacaagctagtgaggacctgccagaattgttgcctgagcgtgccaggctgcagggcaggcagtaaaag

SEQ ID NO: 505995 - DNA, 120 bp, Artificial Sequence
  ENSG00000164061_114 (sequence is synthesized)
gcccccacataccctgcagttttctctgtccaggacagcaggtaaaaaggaatccccagagcagacgcaatggtaggagcctgcacaggatgtgtgtgtatggacattctgaaggtttgc

SEQ ID NO: 505996 - DNA, 120 bp, Artificial Sequence
  ENSG00000164061_115 (sequence is synthesized)
tgtaggatatctgtctgtctgtcattttcccttcctaccccaaccctgagccagaggcatctgacagccctttcccagagggcaccacgcaagggcagagctgggcggcatccacagcca

SEQ ID NO: 505997 - DNA, 120 bp, Artificial Sequence
  ENSG00000164061_116 (sequence is synthesized)
gagaggcagaggcaagagcagagccaggctgtgcccgagggaccccagctcttgactgcacctgtttcatgcctctcctctgtggctaggaggctcaaaggactgtgagccaggagatct

SEQ ID NO: 505998 - DNA, 120 bp, Artificial Sequence
  ENSG00000164061_117 (sequence is synthesized)
gggctggagctagggggtcaatggatgctcaggaagagctgggcctttggcacttgtggtgagaacagttgacagtggtcatctggaactgttcatataaacagtggcttcaagctaagt

SEQ ID NO: 505999 - DNA, 120 bp, Artificial Sequence
  ENSG00000164061_118 (sequence is synthesized)
ttcttgtgaagtttctcaatagcaaatcttacagaaggtcctgtgtgaccctctctgcatctgtccccaggacctatgctccctgctcacccccttctccaaagcccaagcgtcccgctg

SEQ ID NO: 506000 - DNA, 120 bp, Artificial Sequence
  ENSG00000164061_119 (sequence is synthesized)
ctcatcagcttttttaccattgagccaggagtgcggcaggcagtacctgcctgacccttcaaggcctgaccttcgtccagagtgctctggtttgcaccatgcatttctcaggggtccgca

SEQ ID NO: 506001 - DNA, 120 bp, Artificial Sequence
  ENSG00000164061_120 (sequence is synthesized)
tttctcatgcttttctataagatctacacaccccttcagagagggctcctcgctcacctctggtagctatggatgggacaggaagctgccaacctttgtgttggacttaacacccttgcc

SEQ ID NO: 506002 - DNA, 120 bp, Artificial Sequence
  ENSG00000164061_121 (sequence is synthesized)
tttctgggacttggcctcaccccacccatggaatacctgcctcatcccaaagatcaggtatgggctgaatgcagccatctgagcaagggctgagggaagccatcacctaacacctctggc

SEQ ID NO: 506003 - DNA, 120 bp, Artificial Sequence
  ENSG00000164061_122 (sequence is synthesized)
cacccaggaccaggtctgtgtggggatgtgccttggagaccaaggcaatagtcctttccactacaggccaggggatgggacaagaagtagggaacaggcagggaaatgttaggaggtcag

SEQ ID NO: 506004 - DNA, 120 bp, Artificial Sequence
  ENSG00000164061_123 (sequence is synthesized)
cctccagcaggcctagtctcaggctctaaagtactgacttttcagcaaatttcctttctggccaagccctctgagtttgaaattctgacatctgccactcctcatcccccactgtaccca

SEQ ID NO: 506005 - DNA, 120 bp, Artificial Sequence
  ENSG00000164061_124 (sequence is synthesized)
caggatacatcatcgcccctctgtgaaggtggctggagcaggcctctggtccatggactgtccttcctggcccttgcatggatgcagttgtgactctggggacaatgcagccagaagctg

SEQ ID NO: 506006 - DNA, 120 bp, Artificial Sequence
  ENSG00000164061_125 (sequence is synthesized)
agggaccagcacttggtgccttggaaagtagagagcaacagacacatctccaaatgggcaaggagtctctagcatgcagcccaggccttctccatacccctctccccagcatcatgagca

SEQ ID NO: 506007 - DNA, 120 bp, Artificial Sequence
  ENSG00000164061_126 (sequence is synthesized)
agggcattgcctcctctctctgctcacttcagggcccagtgcactcacttcacagtgacagccctcccctacaatccttgggcagagcatgtggtctgagggcccacagtgaaagaacag

SEQ ID NO: 506008 - DNA, 120 bp, Artificial Sequence
  ENSG00000164061_127 (sequence is synthesized)
cagtggtggcaactatgccttgccttctggagcctgtagggagttttccaggcaggtcctttgccaggacagcatggtcctgccctgttgtcccgtctgctctcctcttacccaccccca

SEQ ID NO: 506009 - DNA, 120 bp, Artificial Sequence
  ENSG00000164061_128 (sequence is synthesized)
tgctgtaaatacttgtcatcatggactccaacagggttagagggacaggcctaatcaactgaaactcctcggagatgccatctctgtctccctgggtgccagcagccctgctgccatgtg

SEQ ID NO: 506010 - DNA, 120 bp, Artificial Sequence
  ENSG00000164061_129 (sequence is synthesized)
gccctgctgccatgtgcactggggtggcactggagagccatggcagtcgtgagatattgtatgtgtatgcacatgatcatgtgtgtatgtgcgtgcgtgcgtgcgtgtgtgtgtgtgtgt

SEQ ID NO: 506011 - DNA, 120 bp, Artificial Sequence
  ENSG00000164061_130 (sequence is synthesized)
cagtttctggggtcaaatcagctccttctctccaagtgcactaccctggagagtggtggccactcaataccttttcctctagctttcatgtcttgtttttgctttccccttcctcctccc

SEQ ID NO: 506012 - DNA, 120 bp, Artificial Sequence
  ENSG00000164061_131 (sequence is synthesized)
tctctccctttctttccttctctccttctttatttgaggggggaagagtgctgtacaaagtcaaacaaacaagtttacagttgtaagtgcaatgacccgagtcctccacatgaccttgtg

SEQ ID NO: 506013 - DNA, 120 bp, Artificial Sequence
  ENSG00000164061_132 (sequence is synthesized)
aattgtgtgctgtccttctgtgctctgtgagaactcgtggtacttcagtgtccctccccctgtattgtgacaaggtaattctgtggtatcagaataaaaggacttgatataaacaaccta

SEQ ID NO: 506014 - DNA, 120 bp, Artificial Sequence
  ENSG00000164061_133 (sequence is synthesized)
gctttcagacaggacagtctatggaaaggcttgcctccctgggtggctgaggctgtaggctcaggacaggtgccttggggccacacaggagggaagggacacagtagaaggaaagtctag

SEQ ID NO: 506015 - DNA, 120 bp, Artificial Sequence
  ENSG00000164061_134 (sequence is synthesized)
atgaggttctggcacgcttggagactgtgggttttacactggtgctgtgtctggcaccttgtcagatgctttgctgggttttgataccctttgatctagtaaagtttctctttgaagacc

SEQ ID NO: 506016 - DNA, 120 bp, Artificial Sequence
  ENSG00000164062_0 (sequence is synthesized)
acttccgggcgcgagcacgccccgcctcgccccggcggcagagaggagactatggaacgtcaggtgctgctgagcgagcccgaggaggcggcggctctgtatcggggccttagccgccag

SEQ ID NO: 506017 - DNA, 120 bp, Artificial Sequence
  ENSG00000164062_1 (sequence is synthesized)
cccgcgctgagcgccgcctgcctgggcccggaggtcaccacgcagtacggcggccaataccggacggtgcacactgagtggacccagagggacctggaacgcatggagaacattcgattc

SEQ ID NO: 506018 - DNA, 120 bp, Artificial Sequence
  ENSG00000164062_2 (sequence is synthesized)
tgccgccaatacctggtgttccatgacggggactcagtggtgtttgcaggacctgcaggcaacagtgtggagacccggggggaactgctgagcagagagtctccttcaggcaccatgaaa

SEQ ID NO: 506019 - DNA, 120 bp, Artificial Sequence
  ENSG00000164062_3 (sequence is synthesized)
gctgtgctgcgcaaggctggaggcacgggccctggggaagagaagcagttcctggaggtctgggagaagaaccggaagctcaagagcttcaacctgtcagcgctggagaaacatgggcct

SEQ ID NO: 506020 - DNA, 120 bp, Artificial Sequence
  ENSG00000164062_4 (sequence is synthesized)
gtttatgaggatgactgctttggctgcctgtcctggtcgcactcggagacacacttgttgtatgtggcagagaagaagcgccccaaggccgagtccttctttcagaccaaagccttggac

SEQ ID NO: 506021 - DNA, 120 bp, Artificial Sequence
  ENSG00000164062_5 (sequence is synthesized)
gtcagtgccagcgatgatgagatagccaggctgaagaagccagaccaagccatcaagggggatcagtttgtgttttatgaagactggggagaaaacatggtttccaaaagcatccctgtg

SEQ ID NO: 506022 - DNA, 120 bp, Artificial Sequence
  ENSG00000164062_6 (sequence is synthesized)
ctctgcgtgctggatgtcgagagtggcaacatctctgtgcttgagggggtccctgagaatgtgtcccctggacaggcattttgggcccctggagatgctggtgtggtgtttgtgggctgg

SEQ ID NO: 506023 - DNA, 120 bp, Artificial Sequence
  ENSG00000164062_7 (sequence is synthesized)
tggcatgagcccttccggttgggcatccgcttttgcaccaatcgcaggtcagccctgtattatgtggacctcatcggggggaagtgtgagctcctctcggatgactccctggctgtctct

SEQ ID NO: 506024 - DNA, 120 bp, Artificial Sequence
  ENSG00000164062_8 (sequence is synthesized)
tctccccggctgagcccagaccaatgtcgcattgtctacctgcagtacccatctctgatcccccatcaccaatgcagccagctgtgcctgtatgactggtataccaaggttacctcagtg

SEQ ID NO: 506025 - DNA, 120 bp, Artificial Sequence
  ENSG00000164062_9 (sequence is synthesized)
gtggtagatgttgtgcctcggcagctgggagagaacttctctgggatctactgcagccttctgcctttgggatgctggtcagctgacagccagagagtggtctttgactcggctcagcgc

SEQ ID NO: 506026 - DNA, 120 bp, Artificial Sequence
  ENSG00000164062_10 (sequence is synthesized)
agccggcaggacctgtttgctgtggacacccaagtgggcactgtgacctccctcacagctggagggtcaggtgggagctggaagttgctcacaattgaccaggacctcatggtggcacag

SEQ ID NO: 506027 - DNA, 120 bp, Artificial Sequence
  ENSG00000164062_11 (sequence is synthesized)
gggcatccgggtgctacagccacccccagagcaagagaatgtgcagtatgctggccttgactttgaagcaatcctgctgcagcctggcagccctccagataagacccaagtgcccatggt

SEQ ID NO: 506028 - DNA, 120 bp, Artificial Sequence
  ENSG00000164062_12 (sequence is synthesized)
ggtcatgccccacggggggccccattcatcctttgtcactgcctggatgctgttcccagccatgctttgcaagatgggctttgcggtactactagtgaactatcgtggctccacgggctt

SEQ ID NO: 506029 - DNA, 120 bp, Artificial Sequence
  ENSG00000164062_13 (sequence is synthesized)
tggccaggacagcatcctctccctcccaggcaatgtgggccaccaggatgtgaaggatgtccagtttgcagtggaacaggtgctccaggaggaacactttgatgcaagccatgtggccct

SEQ ID NO: 506030 - DNA, 120 bp, Artificial Sequence
  ENSG00000164062_14 (sequence is synthesized)
tatgggtggttcccatggtggcttcatttcctgccacttgattggtcagtacccagagacctacagggcctgcgtggcccggaaccccgtgatcaacatcgcctccatgttgggctccac

SEQ ID NO: 506031 - DNA, 120 bp, Artificial Sequence
  ENSG00000164062_15 (sequence is synthesized)
tgacatccctgactggtgcgtggtggaggctggctttcctttcagcagtgactgcctgccagacctcagcgtgtgggctgagatgctggacaaatcgcccatcagatacatccctcaggt

SEQ ID NO: 506032 - DNA, 120 bp, Artificial Sequence
  ENSG00000164062_16 (sequence is synthesized)
gaagacaccactgttactgatgttgggccaggaggaccggcgtgtgcccttcaagcagggcatggagtattaccgtgccctcaagacccggaatgtgcctgttcggctcctgctctatcc

SEQ ID NO: 506033 - DNA, 120 bp, Artificial Sequence
  ENSG00000164062_17 (sequence is synthesized)
caaaagcacccacgcattatcagaggtggaggtggagtcagacagcttcatgaatgctgtgctctggctacgcacacacttgggcagctgaagccctgccattctgcatgagctgatcag

SEQ ID NO: 506034 - DNA, 120 bp, Artificial Sequence
  ENSG00000164062_18 (sequence is synthesized)
cctgtgccacacttcgctcttgaggagctcaacggtctggcagggcagcaggaggctttctgggctctggactccacggatgcgtgggcagaggaatgtgggctatgtagtcataataaa

SEQ ID NO: 506035 - DNA, 120 bp, Artificial Sequence
  ENSG00000164062_19 (sequence is synthesized)
ttaggacacagagcctggttcctgctggtactttgtaccaaaccatccccaaccccacctcccactctggggtgcagagaccctaggttctgggtgtggcagccacaagggcttcatctg

SEQ ID NO: 506036 - DNA, 120 bp, Artificial Sequence
  ENSG00000164062_20 (sequence is synthesized)
cctccagtgtgagaagggagggaacagtgagaggcttagcctctgcctgtcctggcaaccaggactctgtaccagcctagcttccctgctgcagccccttccattagcaactactctgta

SEQ ID NO: 506037 - DNA, 120 bp, Artificial Sequence
  ENSG00000164062_21 (sequence is synthesized)
ccacccttcccaagagtatgtctggaggactagtgtgaggccctgtctttccacggcacccatgggcaaaagtagtcccagggacattgccttggttggggaagcccctaggctggacag

SEQ ID NO: 506038 - DNA, 120 bp, Artificial Sequence
  ENSG00000164062_22 (sequence is synthesized)
atcacctagcccagggtgtgctgggctcaagccacccgagccctagcaaggagtcactgacacatttcctggaagcaaaggctaagaagcatctgtacaggcataaagaggaaacatggc

SEQ ID NO: 506039 - DNA, 120 bp, Artificial Sequence
  ENSG00000164062_23 (sequence is synthesized)
cgagcacgccccgcctcgccccggcggcagagaggagactatggaacgtcaggtgagggctcggcccgcggtccccgtggtccctgcagcccgggccgggcctgaccctggtgtgtcccc

SEQ ID NO: 506040 - DNA, 120 bp, Artificial Sequence
  ENSG00000164062_24 (sequence is synthesized)
ttgctgtggacacccaagtgggcactgtgacctccctcacagctggtgagcaaggctttggggatgggggtaagggcagggctggtgagcaagccaaccaggcagcgggggactggagct

SEQ ID NO: 506041 - DNA, 120 bp, Artificial Sequence
  ENSG00000164062_25 (sequence is synthesized)
gcccctgtctgtgcagacccttacccaaccaacagactagcttccctgctctactgccctttagcactcaactctgttccatgtgtcctggcccagcctcagcacggcccccacctctgc

SEQ ID NO: 506042 - DNA, 120 bp, Artificial Sequence
  ENSG00000164062_26 (sequence is synthesized)
tcctaaaacccacaaaactctctcttatcaagatctgccagactcatccttctcgctctgcaaaccttgggtgcctgtctcaggcagaggcagctctgccacctgagggcccaggaaaag

SEQ ID NO: 506043 - DNA, 120 bp, Artificial Sequence
  ENSG00000164062_27 (sequence is synthesized)
cccagtgttgactcccccgtcttccccatacttaggcctggtgattctgcctttgaaatgtgttttgagtcctccacctgacctgactgtatccgctcctccacaaagctaccaaagtat

SEQ ID NO: 506044 - DNA, 120 bp, Artificial Sequence
  ENSG00000164062_28 (sequence is synthesized)
cattccaaagctacatctcattgtacaactgcttggacaccactgccccaaatcagcacgctccccgacccccaacttcccggtcccagctgccaccctgcacacagcagccatcgaggg

SEQ ID NO: 506045 - DNA, 120 bp, Artificial Sequence
  ENSG00000164062_29 (sequence is synthesized)
cagagagtggtctttgactcggctcagcgcagccggcaggacctgtttgctgtggacacccaagtgggagctggaagttgctcacaattgaccaggacctcatggtggcacagttttcca

SEQ ID NO: 506046 - DNA, 120 bp, Artificial Sequence
  ENSG00000164062_30 (sequence is synthesized)
gggctcagtgtgctcccttcccatactgtgcctgtcagacctggggaggcactagcttttaggaagcagagcaggtcctatagacaggctgggcattgagtatcttgtgttctcaggggg

SEQ ID NO: 506047 - DNA, 120 bp, Artificial Sequence
  ENSG00000164062_31 (sequence is synthesized)
tccccgaagccgggctcccgggttccgcttccacagggccgccccctctcctccgagatccaacgcctcgcccctcgagtggacccagagggacctggaacgcatggagaacattcgatt

SEQ ID NO: 506048 - DNA, 120 bp, Artificial Sequence
  ENSG00000164062_32 (sequence is synthesized)
agccgtccgcaatgcaagccttttatgaatgctcaccatgtgcctagaagggaggccagcagccaggttcttgcccccttgggagctcattcagtttctggtgacatggcctgataagca

SEQ ID NO: 506049 - DNA, 120 bp, Artificial Sequence
  ENSG00000164062_33 (sequence is synthesized)
ctggaagcttgctccaaactcagcctggactagagcccatggtggcctggggagttgcagagagtagagtctctgcctcagggaggaaaggcaaggtggggctagaggtgctccagaagc

SEQ ID NO: 506050 - DNA, 120 bp, Artificial Sequence
  ENSG00000164062_34 (sequence is synthesized)
tctcgtaggcccttctaccctccccgaagccgggctcccgggttccgcttccacagggccgccccctctcctccgagatccaacgcctcgcccctcgactgctgagcagagagtctcctt

SEQ ID NO: 506051 - DNA, 120 bp, Artificial Sequence
  ENSG00000164066_0 (sequence is synthesized)
agaggcaacatggcggccttagcaagctatagctgcgagatttgaattactccactcgtagctattgcattcctgacgatggcctctgtggcttcgtgcgattcgcgtccgagctcagac

SEQ ID NO: 506052 - DNA, 120 bp, Artificial Sequence
  ENSG00000164066_1 (sequence is synthesized)
gagctccctggagacccctcttcacaagaagaagatgaggactatgattttgaagatcgggtcagcgactcgggttcatattcctcagcgagtagcgattatgatgatcttgagcctgaa

SEQ ID NO: 506053 - DNA, 120 bp, Artificial Sequence
  ENSG00000164066_2 (sequence is synthesized)
tggctggacagtgtgcagaaaaatggagagctgttttatttggaattgagtgaggatgaagaagaaagcctccttcctgagacaccaactgtgaaccatgtcaggttcagtgaaaatgag

SEQ ID NO: 506054 - DNA, 120 bp, Artificial Sequence
  ENSG00000164066_3 (sequence is synthesized)
attatcattgaagatgactacaaagaaagaaaaaagtatgaacccaaactcaagcagtttaccaaaattttaagaaggaaaagacttttacccaagcgctgcaataaaaaaaatagcaat

SEQ ID NO: 506055 - DNA, 120 bp, Artificial Sequence
  ENSG00000164066_4 (sequence is synthesized)
gacaatggaccagtatccattctaaagcatcagtccaatcagaagacaggagtcattgtccaacagcgatacaaagatgtgaatgtttatgtaaaccccaaaaagctaactgttatcaaa

SEQ ID NO: 506056 - DNA, 120 bp, Artificial Sequence
  ENSG00000164066_5 (sequence is synthesized)
gccaaagagcagctcaagcttctggaagtgctggttggaattattcatcagaccaagtggagctggagaagaaccggaaagcagggtgatggagagaggcttgtggttcatggcctgctg

SEQ ID NO: 506057 - DNA, 120 bp, Artificial Sequence
  ENSG00000164066_6 (sequence is synthesized)
ccagggggatctgctatgaagagcggtcaggtactcattggtgatgtccttgttgctgtgaatgatgtcgatgttactactgaaaacatcgagagagttctgtcttgcattcctggacct

SEQ ID NO: 506058 - DNA, 120 bp, Artificial Sequence
  ENSG00000164066_7 (sequence is synthesized)
atgcaggtgaaactgacatttgaaaatgcatatgatgtgaaaagggagacgtcccatccaagacagaaaaagacacagtccaacacaagtgatttagtcaagcttctctggggagaagag

SEQ ID NO: 506059 - DNA, 120 bp, Artificial Sequence
  ENSG00000164066_8 (sequence is synthesized)
gttgaaggtatccagcagagtggcctaaacactcctcatatcattatgtatctcacactacagctcgactcagaaacctcaaaggaagagcaggaaattctttatcattatccaatgtct

SEQ ID NO: 506060 - DNA, 120 bp, Artificial Sequence
  ENSG00000164066_9 (sequence is synthesized)
gaagcatctcagaaacttaaaagtgtgagagggatttttctcacactctgtgacatgctggaaaacgtaactgggacacaagttactagttcatccctccttttaaatggaaaacaaatt

SEQ ID NO: 506061 - DNA, 120 bp, Artificial Sequence
  ENSG00000164066_10 (sequence is synthesized)
catgtggcttattggaaagaatctgacaagttgttgctaattggcctgcctgctgaagaagttcctcttcctcgtctaaggaacatgatagaaaatgtcatccaaaccttaaaatttatg

SEQ ID NO: 506062 - DNA, 120 bp, Artificial Sequence
  ENSG00000164066_11 (sequence is synthesized)
tatggttctttagatagtgccttttgccagattgagaatgttcctcgtttggatcatttttttaacttgttctttcaaagagcacttcagcctgcgaaactgcattccagcgccagtccc

SEQ ID NO: 506063 - DNA, 120 bp, Artificial Sequence
  ENSG00000164066_12 (sequence is synthesized)
agtgctcagcagtacgatgcttccagtgcagtacttttagacaacctccctggagtccggtggctcacacttccactggaaatcaagatggaattagacatggcattaagtgacttggag

SEQ ID NO: 506064 - DNA, 120 bp, Artificial Sequence
  ENSG00000164066_13 (sequence is synthesized)
gctgcagattttgcagaactgtccgaggattactatgacatgaggcggctgtatacaattttggggtcttctctattttacaagggttatttgatatgcagtcatttgcccaaggatgat

SEQ ID NO: 506065 - DNA, 120 bp, Artificial Sequence
  ENSG00000164066_14 (sequence is synthesized)
cttattgatattgccgtatactgtcgccactattgcctgctgcctttagcagcaaaacaaagaattggtcagttgatcatatggagagaagtgtttcctcagcatcacctccgacctttg

SEQ ID NO: 506066 - DNA, 120 bp, Artificial Sequence
  ENSG00000164066_15 (sequence is synthesized)
gcagactcaagcactgaagtctttccggaacctgaaggaagatattttttgctagttgttggcttgaaacattatatgctatgtgtactattagaagctggaggttgcgcatccaaagct

SEQ ID NO: 506067 - DNA, 120 bp, Artificial Sequence
  ENSG00000164066_16 (sequence is synthesized)
attgggagtcctggaccagactgtgtatatgtggatcaagtcaaaacaactcttcaccagctggatggagtagattctcgcatagatgaacggctagcatcttctccagtcccctgtttg

SEQ ID NO: 506068 - DNA, 120 bp, Artificial Sequence
  ENSG00000164066_17 (sequence is synthesized)
tcttgtgctgactggttccttactggatcacgtgaaaaaacagatagcttgaccacttcgcctattctcagtaggctacaaggtacttccaaagtagcaacttctccaacatgcagaaga

SEQ ID NO: 506069 - DNA, 120 bp, Artificial Sequence
  ENSG00000164066_18 (sequence is synthesized)
acgctttttggtgactattccttaaagacacgcaagcctagtccttcctgtagtagtggaggatctgacaatggttgtgaaggtggagaagatgatggctttagcccccatactacaccg

SEQ ID NO: 506070 - DNA, 120 bp, Artificial Sequence
  ENSG00000164066_19 (sequence is synthesized)
gatgcagtacggaagcaaagagaatctcagggctctgatggtttagaagaaagtgggaccttgcttaaggtcactaaaaagaagtctactcttccaaatccatttcatttgggaaacttg

SEQ ID NO: 506071 - DNA, 120 bp, Artificial Sequence
  ENSG00000164066_20 (sequence is synthesized)
aaaaaggaccttccagaaaaagaattagaaatatataacacagtgaaactgacatctggtcctgagaacacacttttccactacgttgccttagaaacagtgcaaggaatctttattact

SEQ ID NO: 506072 - DNA, 120 bp, Artificial Sequence
  ENSG00000164066_21 (sequence is synthesized)
cctacccttgaagaggtggcacagctaagtggctctatccaccctcagctaataaagaatttccatcagtgttgtctttccattcgtgcagttttccaacagacattggtggaagagaaa

SEQ ID NO: 506073 - DNA, 120 bp, Artificial Sequence
  ENSG00000164066_22 (sequence is synthesized)
aagaaaggactaaatagtggagaccattcagattctgcaaagtcagtgtcttctcttaaccctgttaaagaacatggtgtgttgtttgaatgttcacctggaaactggactgatcagaaa

SEQ ID NO: 506074 - DNA, 120 bp, Artificial Sequence
  ENSG00000164066_23 (sequence is synthesized)
aaagcaccaccagttatggcttactgggtagtagggagactttttcttcatccaaaacctcaagaactttatgtctgttttcatgactcagtcacagaaattgccattgaaatagctttt

SEQ ID NO: 506075 - DNA, 120 bp, Artificial Sequence
  ENSG00000164066_24 (sequence is synthesized)
aaattgttctttgggttaaccttgtagctgtgctttcttgatgcgtagaaacacgtgcatggaggatcaaacactgtcagaattgctgaaatcaatacacaaagagataaagtttagctt

SEQ ID NO: 506076 - DNA, 120 bp, Artificial Sequence
  ENSG00000164066_25 (sequence is synthesized)
gcttctttttactattcaatattgaacataatattgttaaatattgagatgaaatgctgttggatttgatacattaaatcttaatgtaatattgtaagacttttgagaatatacttgatt

SEQ ID NO: 506077 - DNA, 120 bp, Artificial Sequence
  ENSG00000164066_26 (sequence is synthesized)
tgtgaaagaagggattgttaacttattgctattttggtatataatgttaatttattgactagtttgaaataatgtgaagtgttttttatatcagattaatataggaaatgtttattcttg

SEQ ID NO: 506078 - DNA, 120 bp, Artificial Sequence
  ENSG00000164066_27 (sequence is synthesized)
aaaaatactcaatttgttgttgtttatttttctcaaaattcatactgatatctgatgaaatgattatgaaattgggagcaggtgaccaggtgctgtaactaagtagtgctatgaccatga

SEQ ID NO: 506079 - DNA, 120 bp, Artificial Sequence
  ENSG00000164066_28 (sequence is synthesized)
gcaagtttttgtacctctctaagctcagagttttcatgtaaaatgagatgattgcattgaggtttcaaaaatacctcttaagtaaaatgtgcttttattttattttagttttagttttag

SEQ ID NO: 506080 - DNA, 87 bp, Artificial Sequence
  ENSG00000164066_29 (sequence is synthesized)
attttattttagttttagttttcgttacataggtaaacatgtgccatggcggtttgctccacctatcaacccatcacctaggtatta

SEQ ID NO: 506081 - DNA, 120 bp, Artificial Sequence
  ENSG00000164066_30 (sequence is synthesized)
tcctaatactctccctacccccacaacaggccctggtgtgcattgttcccctccctttgtccatgtgttctcatggtcagctcccacttataagtgagaacctacagtgtttggttttct

SEQ ID NO: 506082 - DNA, 89 bp, Artificial Sequence
  ENSG00000164066_31 (sequence is synthesized)
ccatgtctttgctattgtaaatagtgcttcaatgaacatatgtgtgcatatatatttgtaattgaatgatttatattactttgagtata

SEQ ID NO: 506083 - DNA, 77 bp, Artificial Sequence
  ENSG00000164066_32 (sequence is synthesized)
ccaacagtgtaaaagcgttcctatttcctcacagcctcgccagcatctgttatttcttgactttttaataatagcca

SEQ ID NO: 506084 - DNA, 63 bp, Artificial Sequence
  ENSG00000164066_33 (sequence is synthesized)
taatgcggttctattttttcttgtaacttggtttgagttccttgtagatcctggatatcagat

SEQ ID NO: 506085 - DNA, 120 bp, Artificial Sequence
  ENSG00000164066_34 (sequence is synthesized)
cccagtttttaatgcggttctattttttcttgtaacttggtttgagttccttgtagatcctggatatcagatcattgttggatgaatagattgccaaaattttctcccactctgtaggtt

SEQ ID NO: 506086 - DNA, 120 bp, Artificial Sequence
  ENSG00000164066_35 (sequence is synthesized)
gtgcagaaggtctttaatttaactagatcccatttgtcaagttttgcttttgttgcagttgcttttgtgatttcatcatgaaatctttgcccatgctcatgtcttaaatggtattgccta

SEQ ID NO: 506087 - DNA, 120 bp, Artificial Sequence
  ENSG00000164066_36 (sequence is synthesized)
gattttcttctagggattttatagttttgggctttacatttaagcctttattctatcttaattttttgtataaggtatgaggaatgggtccagtttctattttctgcatatggatagcta

SEQ ID NO: 506088 - DNA, 90 bp, Artificial Sequence
  ENSG00000164066_37 (sequence is synthesized)
cattgcttgtttttcatgtgcaatcttatttctgagttctctattctattccattggtctatgtgtcagtttttgtaccagtaccatgat

SEQ ID NO: 506089 - DNA, 120 bp, Artificial Sequence
  ENSG00000164066_38 (sequence is synthesized)
ccattggtctatgtgtcagtttttgtaccagtaccatgatgttttggttattgtacccttacagtacagtttgaagtttggtagtgtgatgcctccagctttgatcttttggcttaggat

SEQ ID NO: 506090 - DNA, 120 bp, Artificial Sequence
  ENSG00000164066_39 (sequence is synthesized)
tgccttggctatacaggctctttttttggttccatataaattttaaaatagttttttctaattctatgaagaatatcaatggtagtttaatgggaataacattgactctataaattactt

SEQ ID NO: 506091 - DNA, 120 bp, Artificial Sequence
  ENSG00000164066_40 (sequence is synthesized)
attttattctctttgaagcaattgtgagtaggagttcattcatgatttggatctctgcttgcctgttgttggtgtataggaatgctggtgacttctgcacaatgattttgtatcttgaga

SEQ ID NO: 506092 - DNA, 70 bp, Artificial Sequence
  ENSG00000164066_41 (sequence is synthesized)
acaatggggttttctagatataggataatgtcctctgcaaacaaagacattttgacttcctctcttcttc

SEQ ID NO: 506093 - DNA, 120 bp, Artificial Sequence
  ENSG00000164066_42 (sequence is synthesized)
ttaacatgaaaggatgttgaattttattgaaggtgttttctgcatctattgagttaatcatgtggtctttgtctttagttctgtttgtgtgatgaattaagtttattgatttgcatatgt

SEQ ID NO: 506094 - DNA, 120 bp, Artificial Sequence
  ENSG00000164066_43 (sequence is synthesized)
tttttgttgtatctctgccaggttttgatatcaggatgatgctggccttatagaatgagttagggaggagtctctccttttcatttgtttggaatagtttcagaagaagtggtatcagct

SEQ ID NO: 506095 - DNA, 120 bp, Artificial Sequence
  ENSG00000164066_44 (sequence is synthesized)
cttttcatttgtttggaatagtttcagaagaagtggtatcagcttctttttgtatttctggcagaattcagctgtagatccatctggtcctgggctttttttggttggtagcctattaat

SEQ ID NO: 506096 - DNA, 80 bp, Artificial Sequence
  ENSG00000164066_45 (sequence is synthesized)
aatttatccatttcttctagattttcgagtttatttgcaccgagctgttatagtattgtctgatggttgtttatatttcc

SEQ ID NO: 506097 - DNA, 120 bp, Artificial Sequence
  ENSG00000164066_46 (sequence is synthesized)
agctaatagtctattttgttaatattttcaaaaaaaagcagcccctggattcatttattttttgaagggtttttcatgtctctagctccttcatttccactctgattttggttacttttt

SEQ ID NO: 506098 - DNA, 120 bp, Artificial Sequence
  ENSG00000164066_47 (sequence is synthesized)
ccactctgattttggttactttttgtcttctgctggcttttgggtttgtttgctcttggttcactagttcttttagttgtgatactagggtgtcgatttgagatctttctagctttttga

SEQ ID NO: 506099 - DNA, 120 bp, Artificial Sequence
  ENSG00000164066_48 (sequence is synthesized)
aggttgttcaatttccacgtagttttgtggttttgagtgactttcttactcttgagttccaatttgattgcgctgtgatctgagagactgtttgttattacttcagttctttagcatttg

SEQ ID NO: 506100 - DNA, 120 bp, Artificial Sequence
  ENSG00000164066_49 (sequence is synthesized)
ctgaggagtgctttacttctaattgtgtgatcaattttagagtaagtaccatgtggcactgagaagaatatatattctgttgtttgggggtggaaagatgtctagatatttatcaggtcc

SEQ ID NO: 506101 - DNA, 120 bp, Artificial Sequence
  ENSG00000164066_50 (sequence is synthesized)
tgggggtggaaagatgtctagatatttatcaggtcccacttgatccagagctgaggtcaagtcctgaataactttgttaattttctgtctcgatgatctaatattgacagtggggtgtta

SEQ ID NO: 506102 - DNA, 81 bp, Artificial Sequence
  ENSG00000164066_51 (sequence is synthesized)
aagtctcccactattattgtgtggaaatctaagtctctttttgggtctctaagaacttgttttatgaatctgagtgctcct

SEQ ID NO: 506103 - DNA, 120 bp, Artificial Sequence
  ENSG00000164066_52 (sequence is synthesized)
tgtcttttttttaatctttattcgtttaaagtctttgtcagaaactaggattgcagcctctcctttttctgttttccttttgcttggtagattttccttcatccttttattttgagtcta

SEQ ID NO: 506104 - DNA, 120 bp, Artificial Sequence
  ENSG00000164066_53 (sequence is synthesized)
tgtgtgtccttgcatgtgagatgggtctcttgaatacagcacactgatagagtttgactctatccagcttgccactctgcgtcttttatttggggcatttagtgcatttacatttaaggt

SEQ ID NO: 506105 - DNA, 120 bp, Artificial Sequence
  ENSG00000164066_54 (sequence is synthesized)
taatattgttatgtgtgaattttatcctgacatcatgatgctagttgattattttgcagacttgtttatgtttttgcttcatagtgttactgatctgtgtatttcaatgtgttttttgta

SEQ ID NO: 506106 - DNA, 120 bp, Artificial Sequence
  ENSG00000164066_55 (sequence is synthesized)
caatgtgttttttgtagcggctggtaacagtttttcctttccatattgagtgcttccttcaggagcacttgcaaggcaggcctggtggtgacgaattccctcagcatttgcttgtctgaa

SEQ ID NO: 506107 - DNA, 120 bp, Artificial Sequence
  ENSG00000164066_56 (sequence is synthesized)
cttcacttatgaagcttagttcagccagatatgaaattctaggttggaaattctttcctttaagaatgttgaaaattggcccccaacctcttccagcttataaggtttctgctgagaggt

SEQ ID NO: 506108 - DNA, 73 bp, Artificial Sequence
  ENSG00000164066_57 (sequence is synthesized)
ccccaacctcttccagcttatataagtgacctggcctatctctctgactgcccttaacattttttccttcatt

SEQ ID NO: 506109 - DNA, 72 bp, Artificial Sequence
  ENSG00000164066_58 (sequence is synthesized)
gatatccagaagtgtgttttccaacttggttccattcttctgtctctttcaggtatatctaccagtcgtagg

SEQ ID NO: 506110 - DNA, 120 bp, Artificial Sequence
  ENSG00000164066_59 (sequence is synthesized)
ccaacttggttccattcttctgtctctttcaggtatatctaccagtcgtaggttcagtcttttaacataatcccatagttctcagaggtttcattcattccttttcattcttttttctct

SEQ ID NO: 506111 - DNA, 120 bp, Artificial Sequence
  ENSG00000164066_60 (sequence is synthesized)
cttatttcagcaagatagtcttcaaactctgatatcctttcttccacttagtctatttggctatggatacttgtgtttccattataaagttctcatgtttttcagctccatcagatcatt

SEQ ID NO: 506112 - DNA, 120 bp, Artificial Sequence
  ENSG00000164066_61 (sequence is synthesized)
catttacgttcctctccaaactggttattctgtttaacagctcctataatgttttattatggttcttagcttctttgcagtgagttagaacatattcccttagcttggtgaagttcgtta

SEQ ID NO: 506113 - DNA, 120 bp, Artificial Sequence
  ENSG00000164066_62 (sequence is synthesized)
gcctcagcccagttctgtgcccttgctagagacatgttgcaatcttttggaggagaagaggcactctggctttctgagttttccgtatccttgcattctttctcatcttcatgggtttat

SEQ ID NO: 506114 - DNA, 120 bp, Artificial Sequence
  ENSG00000164066_63 (sequence is synthesized)
ttccgtatccttgcattctttctcatcttcatgggtttatctacctttgatctttgagtctgctgacttttggatgaggtttttgtggtgtcttttttgttgatgttgttgcattctgtt

SEQ ID NO: 506115 - DNA, 120 bp, Artificial Sequence
  ENSG00000164066_64 (sequence is synthesized)
tttctttagtagtcaggcccctcttctgcagagctgctgcagtttgcctggggtccactctagaccctattcgcctgggtctctcgtcttccaggagatatcaccagtggaggctgcaga

SEQ ID NO: 506116 - DNA, 120 bp, Artificial Sequence
  ENSG00000164066_65 (sequence is synthesized)
ccagcaaagatggcagcctgctccttcctctgggagctctgtcccagaggggcactggcctgatgctagccggaatgctcctgtatgaagtgtctggagactcctgttgggaggtctcag

SEQ ID NO: 506117 - DNA, 120 bp, Artificial Sequence
  ENSG00000164066_66 (sequence is synthesized)
tcagaaggagcggggtcagagaaccacttaaataagcagtctgtctgccccttgacagggtgggtgtgctacactggggggaatccccctcatctggactgccttgactctccagagcca

SEQ ID NO: 506118 - DNA, 120 bp, Artificial Sequence
  ENSG00000164066_67 (sequence is synthesized)
gcaggcagagaagactaagatcactgatccatgatacttcagccatccttcctcctaggggctcctcttggggttatcagcgttttgtccataaacccctggctggggatgctgagattc

SEQ ID NO: 506119 - DNA, 120 bp, Artificial Sequence
  ENSG00000164066_68 (sequence is synthesized)
ccacagggaggccctgtccagtgaagaggagtgaatctgggttccaccccatctcgccggcgctagcagcaagggaaagtggccaattgaagccgcagtgatggcggcctcccctccctt

SEQ ID NO: 506120 - DNA, 120 bp, Artificial Sequence
  ENSG00000164066_69 (sequence is synthesized)
ctcccccctctccttccccacttccagaactcagtcgtcttaggcagtttctagctggtgggggaggattccaagccagtgggttttagcttatagagttctgtgagagcaaggctgctt

SEQ ID NO: 506121 - DNA, 120 bp, Artificial Sequence
  ENSG00000164066_70 (sequence is synthesized)
ggctccctggcttcagccccctccccatgagagtggacagatctcctgcctcacgggagttcccagagccggagtatgcaaatactccagtgtctcagtgcctgctcaaagcggctgccc

SEQ ID NO: 506122 - DNA, 120 bp, Artificial Sequence
  ENSG00000164066_71 (sequence is synthesized)
acccaagcagagatttgtgcttgggacccaaagctctggtagcattggctcaggagggaacctcctgatctacaagttgcaaggatctgtgggaaaagcctggttttcagggaggggaag

SEQ ID NO: 506123 - DNA, 120 bp, Artificial Sequence
  ENSG00000164066_72 (sequence is synthesized)
caaaatccttcaccatctcccttggctggacgagggagttcactttgctgcgtgcagttcctggatgggatcttgctccaccctgtttgcttgctctccgtgggtcatgccagccaccta

SEQ ID NO: 506124 - DNA, 120 bp, Artificial Sequence
  ENSG00000164066_73 (sequence is synthesized)
gcagtcccaataagagaacttcagtatctcaactgaagatgcagagttgactcacagttttcttccttcttggtgggagctgcagagcagagctgcctctctttgaccatctgggctctc

SEQ ID NO: 506125 - DNA, 120 bp, Artificial Sequence
  ENSG00000164066_74 (sequence is synthesized)
tgttctactttttttttttttttttttgcctcttgcatgttggtcacctcctaaattagtaatgtccaagtacttattccttatcagatacttttcgttaatttaactatcctagtacat

SEQ ID NO: 506126 - DNA, 120 bp, Artificial Sequence
  ENSG00000164066_75 (sequence is synthesized)
acctcactgtggggaaagggggaaagatgaaaattaaacttactttttatttatttgattctctttaagtttcaggtaagctcaattttgactaggatatatatatgtgtgtgtgtgtat

SEQ ID NO: 506127 - DNA, 120 bp, Artificial Sequence
  ENSG00000164066_76 (sequence is synthesized)
gtgtgtgtgtatatatatgtattttttaaactatttgtcaactttatttttttttgtttgtttttgttaaaatacattcagcggctgggcttagtggctcacgcctgtaatctcaacact

SEQ ID NO: 506128 - DNA, 120 bp, Artificial Sequence
  ENSG00000164066_77 (sequence is synthesized)
tcaagaccagcctgagcaacatagcaaaaactccatctctacaaaaacaccaaaattagccgggtgtggtagcactctcttttaacagtcccagatacctgggaggctgaggtgggaaga

SEQ ID NO: 506129 - DNA, 120 bp, Artificial Sequence
  ENSG00000164066_78 (sequence is synthesized)
aaaaaatcacattcaagtatatttcacatgcattttatataattcatgaatttcaggaaagctgcatgtaaatctttttttaaagctaaatcatgttaaagacactgaaaaagttaacta

SEQ ID NO: 506130 - DNA, 87 bp, Artificial Sequence
  ENSG00000164066_79 (sequence is synthesized)
taaagctaaatcatgttaaagacactgaaaaagttaactaaaattctatggtgacttcttttataaaatactaatttttggccgggc

SEQ ID NO: 506131 - DNA, 81 bp, Artificial Sequence
  ENSG00000164066_80 (sequence is synthesized)
ccaccgcacttctgcctgtggactaacttttatcttagaaatatagatcattatgcattgggttttttcaaagggggaaca

SEQ ID NO: 506132 - DNA, 120 bp, Artificial Sequence
  ENSG00000164066_81 (sequence is synthesized)
tatagatcattatgcattgggttttttcaaagggggaacactttagtgaacaatagtttacttgacctttagttggaaaagaaaactaatggtggagaattttctttggctgggagaatt

SEQ ID NO: 506133 - DNA, 120 bp, Artificial Sequence
  ENSG00000164066_82 (sequence is synthesized)
tggtagattgagagaaaggaagaacatcaatactgcatttttacttgacatttaccctgtagatcctcctagaggttcgatgcccccaagacattccaacactgagctgtttcttctcca

SEQ ID NO: 506134 - DNA, 120 bp, Artificial Sequence
  ENSG00000164066_83 (sequence is synthesized)
ggtcttaagctttgaatacaagctataccagcacatctaaaatcggtctctacatttttccatcttaaatatgagctgtccagcttagtcaaaactaactgcaaaacactgggtgtacca

SEQ ID NO: 506135 - DNA, 120 bp, Artificial Sequence
  ENSG00000164066_84 (sequence is synthesized)
tttgagtcatttggtcttaaaagaaacactattatcactgtgtcacagtttgagagattttcacttaagcatttaagttgcaaaccactacatatttgtcccattagtgactagtgggcc

SEQ ID NO: 506136 - DNA, 120 bp, Artificial Sequence
  ENSG00000164066_85 (sequence is synthesized)
ttaattttggcattcaaattagggtaaaaaaccttggttcttgaaatgctacagaaaatagcttgaggccaggcacagttgctcacacctgtaactccagcactttggaaggctgaggca

SEQ ID NO: 506137 - DNA, 82 bp, Artificial Sequence
  ENSG00000164066_86 (sequence is synthesized)
tagctcgtgccactgccactccagcctgggcaacagaacgaggctctgtttaaaaaacaaaaaagcttgaaataccttcccc

SEQ ID NO: 506138 - DNA, 120 bp, Artificial Sequence
  ENSG00000164066_87 (sequence is synthesized)
gctctgtttaaaaaacaaaaaagcttgaaataccttccccttaagatcacaatattgtcatatgctaccatttgactcacaactgctgtcttaggactgcttatttacatatatatgtat

SEQ ID NO: 506139 - DNA, 120 bp, Artificial Sequence
  ENSG00000164066_88 (sequence is synthesized)
taagacactttggttaaaacaatttattaaatgtcttaaatttctggatatgtccctgaaaataccatgaactacttctaatactgataattatgaataaacgtagctgttgatcacctc

SEQ ID NO: 506140 - DNA, 120 bp, Artificial Sequence
  ENSG00000164066_89 (sequence is synthesized)
aggttttcatacaaactgaactaaggtagggttttatcataggggactttttgtttcatttaatgaaattttgatgtgttgaactgctttcctggtgtcagagaaacatgagaccatcgc

SEQ ID NO: 506141 - DNA, 120 bp, Artificial Sequence
  ENSG00000164066_90 (sequence is synthesized)
tcaataatggaaataaaaaggcagagcagactactgatcttaataaaaggaaaattatttgctgtatcgtagatgtgcactgtaatttccatgttaaagaggcactgcatttttaagaaa

SEQ ID NO: 506142 - DNA, 120 bp, Artificial Sequence
  ENSG00000164066_91 (sequence is synthesized)
taaaatcacacatcttattttttcatttctaaatggatattgaactaagctctgaaggcaaacttagctgcctatttttccaaatatgttcagaatcacatctgaaacatcaaactgatt

SEQ ID NO: 506143 - DNA, 120 bp, Artificial Sequence
  ENSG00000164066_92 (sequence is synthesized)
atcagacaataaagtgcctgttactttattaaataaagggggacaggatgacagtgcagatatcctagaaatatgctttagaagacatagaaacgttgttaaattggattttattagtat

SEQ ID NO: 506144 - DNA, 120 bp, Artificial Sequence
  ENSG00000164066_93 (sequence is synthesized)
gcaaatgttcccttccaccaacaactattaatgtgaaaaactatatatagctagcattttttaaaatatcaaatactgtctcattatcatatgtttagcccccccaaaattacattttag

SEQ ID NO: 506145 - DNA, 120 bp, Artificial Sequence
  ENSG00000164066_94 (sequence is synthesized)
actcttactttctctccctctcccctttctttagctcttgtttgtgtcttgccaaagaagtgtacctagtaagggaatgtttcttatttgtgccaagggactattgatgatgctgtataa

SEQ ID NO: 506146 - DNA, 120 bp, Artificial Sequence
  ENSG00000164066_95 (sequence is synthesized)
tggcaagatagcattttgtaatacctgcttttttatatttctaatacaaatgggcaaagctgtgaaaccaatttactaggtttttctgctttggacataattgtatgtgttaattctctc

SEQ ID NO: 506147 - DNA, 120 bp, Artificial Sequence
  ENSG00000164066_96 (sequence is synthesized)
taaacagtgcctggcacatattacatgctataaaagtgttagctactactgctaccatttattattatcattattaaatatccattggttgaaaaaccaagtagtcagctaaatcatacc

SEQ ID NO: 506148 - DNA, 120 bp, Artificial Sequence
  ENSG00000164066_97 (sequence is synthesized)
tgctactgtacaaaatgtaggggaaaagctgagaaaaatcatttatcaataaacagttttcagaacaagaatttatactttggatatttttaaattgttaaatgttattgaaactttatg

SEQ ID NO: 506149 - DNA, 120 bp, Artificial Sequence
  ENSG00000164066_98 (sequence is synthesized)
caccaaaactgtatgaaataatttaattttgcagttgtgtttctatattctatgtaattaaagctacttttatactatattgatagttttaaataaaactggtttggaggtttgtttgca

SEQ ID NO: 506150 - DNA, 120 bp, Artificial Sequence
  ENSG00000164066_99 (sequence is synthesized)
atccataaatagtgcttttaccttttactagtaaggaaagttttaaccaatgaagagtaagaatgtggttatgaactgcctctttaagtttactcaacagaagaaaactttgccatattt

SEQ ID NO: 506151 - DNA, 120 bp, Artificial Sequence
  ENSG00000164066_100 (sequence is synthesized)
tgccctaattgaagctttctgttttcataaaaccagagattatcaaagattaaatttttgcaatgattttcatacatataaatagtccattggagttgtcctacaaattccattagagta

SEQ ID NO: 506152 - DNA, 120 bp, Artificial Sequence
  ENSG00000164066_101 (sequence is synthesized)
gactggggacagagggacttaatttctctttcatcttgaaatttatcttccattgatagtggaagtatctttttgatggcagcaaatttaactcttttctacttcaagtgagaatttaaa

SEQ ID NO: 506153 - DNA, 120 bp, Artificial Sequence
  ENSG00000164066_102 (sequence is synthesized)
catgtggcttattggaaagaatctgacaagttgttgctaattggcctgcctgctgaagaaattgagttaccaagctcagcccacactcatggggagaggaattaagcctcacttcttgag

SEQ ID NO: 506154 - DNA, 120 bp, Artificial Sequence
  ENSG00000164066_103 (sequence is synthesized)
gggaagagtatcaaagaatttgtggacctattttaccatcacaaacaggaattccaaagatggctacagtgaaaaatatcaaaatgattatgttttgaagaaattacgtaatttcttgga

SEQ ID NO: 506155 - DNA, 120 bp, Artificial Sequence
  ENSG00000164066_104 (sequence is synthesized)
cttctgtttacttatttgtataatgggaataataagagctaccttataaaattcttaaaaggcttcaatgagaaaatagttcctcttcctcgtctaaggaacatgatagaaaatgtcatc

SEQ ID NO: 506156 - DNA, 120 bp, Artificial Sequence
  ENSG00000164066_105 (sequence is synthesized)
cagtgaatccaggatgttattaatagacattttgtaataaatttttataacaactttttttctgattatgaaagatattaagggccaattgtgaaaaattacaagaagaccaaaaagtgt

SEQ ID NO: 506157 - DNA, 120 bp, Artificial Sequence
  ENSG00000164066_106 (sequence is synthesized)
agagacttgattatctttttaaagttgtgagctggttaattctctatgagccacagaaaactgactatatactaacagtttaacgttgtgaccaaattaaagctataacaatttccttca

SEQ ID NO: 506158 - DNA, 120 bp, Artificial Sequence
  ENSG00000164066_107 (sequence is synthesized)
ccattccccactaattcatcagcaagtcctgatcagtctgtcttcaaaatctccaatctgtccatttctctttatctttattattgccctgtccagccactgctatctctcacacactac

SEQ ID NO: 506159 - DNA, 120 bp, Artificial Sequence
  ENSG00000164066_108 (sequence is synthesized)
agtagcctcctaactggtctccttcccttcattcttgccacttgaactaattttcatatagcagcgtgatctttctacattattatctggttcctacctacccctctgacttcagatatc

SEQ ID NO: 506160 - DNA, 120 bp, Artificial Sequence
  ENSG00000164066_109 (sequence is synthesized)
aaaccacacgtgcctcctttgcactgtattgcaaacaccctggcaaagcttttccccagcccagggcttttgtactttttcttcttgctggatctttctgacattggaatatcagctcaa

SEQ ID NO: 506161 - DNA, 120 bp, Artificial Sequence
  ENSG00000164066_110 (sequence is synthesized)
atgaatttgtgttttttactttttgttcatttgctgtctttctccattagaacataagcttcatgggagctcattgtcttttgtcttgatatttttactgccatacctccagcaatgaga

SEQ ID NO: 506162 - DNA, 120 bp, Artificial Sequence
  ENSG00000164066_111 (sequence is synthesized)
atagtgcctggaatgtagtagtcactcaaatatttgttagatgaatcagcaaataattattttgatatgccgatagcatatgtacctgctattttgtcattcagtgagctgttccaataa

SEQ ID NO: 506163 - DNA, 120 bp, Artificial Sequence
  ENSG00000164066_112 (sequence is synthesized)
atgcttgcagtcaatgctgtgttacttttatatggctaaaaccaagtatttcggttttttctgtcattttgttttttgagttctttaatgttataccttcagtagtaaagaggggaggaa

SEQ ID NO: 506164 - DNA, 120 bp, Artificial Sequence
  ENSG00000164066_113 (sequence is synthesized)
ataacttatgcttattatgtacttactgtttaccagtaaataataagcataataagaacttatgcttgttatgttctaggcattctgcatgtgagctagattgtattaaccctgttttta

SEQ ID NO: 506165 - DNA, 120 bp, Artificial Sequence
  ENSG00000164066_114 (sequence is synthesized)
cagagttggaaaccaaagttagagaaaggttaggtgatttgcctgtgatagctacctagaaagagctgtgataagccagatctgttctattacaaagttcaaaatctctttatcattcca

SEQ ID NO: 506166 - DNA, 120 bp, Artificial Sequence
  ENSG00000164066_115 (sequence is synthesized)
cgttgcctgaaagatttcaggagttgtaaatggttaaaagacagtcagaggtaaaaacaacctacattttttacaaaaagggtacttcagccctttcttttataaatatgtcacttgtgt

SEQ ID NO: 506167 - DNA, 120 bp, Artificial Sequence
  ENSG00000164066_116 (sequence is synthesized)
tagccctgtggttcttccatagagccatctacttgatacacttgagagtaggttttagggtaaaaagtttggacagggtaaatttctttacacaatccgtcagtaacattctagcagcaa

SEQ ID NO: 506168 - DNA, 120 bp, Artificial Sequence
  ENSG00000164066_117 (sequence is synthesized)
ttctattgaaggaagagaggagtgaggaagatagcctatgtagttgggaaagatccagttcccttaggagcacacaaaaaatgaccaccatttccatatgtcgttctaacttacagctct

SEQ ID NO: 506169 - DNA, 120 bp, Artificial Sequence
  ENSG00000164066_118 (sequence is synthesized)
agattaaacttcagattaaatttattctgtttttaaatttggaatgcttcaaagaagaacaaaggtgatacatgaaagagttcaggcaatttccatagaaacaaaacccaaatcctaaat

SEQ ID NO: 506170 - DNA, 120 bp, Artificial Sequence
  ENSG00000164066_119 (sequence is synthesized)
cttttagacaacctccctggagtccggtggctcacacttccactggaaatcaagatggaattagacatggcattaagtgacttggaggctgcagattttgcagaactgggttatttgata

SEQ ID NO: 506171 - DNA, 120 bp, Artificial Sequence
  ENSG00000164066_120 (sequence is synthesized)
gcgcgtcggaggctggcacctccaggttcaccgcggcggccggagctgtgcgggggccagacggttcggcgggagccggggctgggacctgggtgacctgtcgtccgcccctgtagcgag

SEQ ID NO: 506172 - DNA, 120 bp, Artificial Sequence
  ENSG00000164066_121 (sequence is synthesized)
ttagatagtatcatgaaggaattttctgtgattgtgtcatctgggaaaattatctagtttgcagtgttctctagaggaactgctgaggaggcacatccctgtcaaacctgattgcttacc

SEQ ID NO: 506173 - DNA, 120 bp, Artificial Sequence
  ENSG00000164068_0 (sequence is synthesized)
aagaggttgggcggatgttgtgagccgggtcgctgcggccgaggctccggcccccaggaccactggctgcccatgagagatgaaggatggcatccaagggggccggcatgtctttctccc

SEQ ID NO: 506174 - DNA, 120 bp, Artificial Sequence
  ENSG00000164068_1 (sequence is synthesized)
gcaagagctataggctgacctcagatgctgagaaatccagggtcacaggcattgtgcaggagaagctgctgaatgactacctgaaccgcatcttttcctcttctgaacatgcacccccag

SEQ ID NO: 506175 - DNA, 120 bp, Artificial Sequence
  ENSG00000164068_2 (sequence is synthesized)
cagccaccagcaggaaacccctgaacttccagaacctgccagaacatttggaccagttgctacaggtggacaatgaggaggaggaaagccagggacaggttgaagggcggcttggcccat

SEQ ID NO: 506176 - DNA, 120 bp, Artificial Sequence
  ENSG00000164068_3 (sequence is synthesized)
ccactgtggtcctggaccacacaggcggctttgaggggcttctcctggtggatgatgacctgctgggggtgattggacacagcaactttggcaccatccgctctaccacatgcgtgtaca

SEQ ID NO: 506177 - DNA, 120 bp, Artificial Sequence
  ENSG00000164068_4 (sequence is synthesized)
aagggaaatggctctacgaggtcctcatctcctcccaggggctcatgcagatcggctggtgcaccatcagctgccgcttcaaccaggaggagggggttggagatacacacaactcctatg

SEQ ID NO: 506178 - DNA, 120 bp, Artificial Sequence
  ENSG00000164068_5 (sequence is synthesized)
cctatgatggcaaccgcgtgcgcaagtggaatgtgaccacaacgaattatggcaaggcgtgggcagcgggggacatcgtgagctgcctgattgacctggatgatggcactctgtccttct

SEQ ID NO: 506179 - DNA, 120 bp, Artificial Sequence
  ENSG00000164068_6 (sequence is synthesized)
gcctgaacggtgtatcactgggcactgcctttgagaacctgtccaggggcctgggtatggcctacttcccagccatcagcctctctttcaaggagtccgtggccttcaactttggcagcc

SEQ ID NO: 506180 - DNA, 120 bp, Artificial Sequence
  ENSG00000164068_7 (sequence is synthesized)
gtcctctgcgctacccagtggcaggctaccggcccctgcaggacccaccgagtgctgacctggtgcgggcacagaggttgctgggctgcttccgggcagtgctgagtgtggagctggacc

SEQ ID NO: 506181 - DNA, 120 bp, Artificial Sequence
  ENSG00000164068_8 (sequence is synthesized)
ctgtggaggggcggctgttggacaaggagagctccaagtggcggttgcggggccagcccaccgtcctcctcacactggcccacatcttccatcactttgcaccgcttctgcgcaaggtgt

SEQ ID NO: 506182 - DNA, 120 bp, Artificial Sequence
  ENSG00000164068_9 (sequence is synthesized)
atctggtggaggctgtgctcatgagcttcttgctgggcatcgtggagaagggcacacccacacaggcacagtccgtggtgcaccaggtcctggacctcttgtggctcttcatggaggact

SEQ ID NO: 506183 - DNA, 120 bp, Artificial Sequence
  ENSG00000164068_10 (sequence is synthesized)
acgaggtacaagattgcctcaagcagttgatgatgtctctgcttcggctgtaccgattctcacccattgtcccagacctgggcctacagatccattacctgcggctcactatcgccatcc

SEQ ID NO: 506184 - DNA, 120 bp, Artificial Sequence
  ENSG00000164068_11 (sequence is synthesized)
tgaggcatgagaagtcccgcaagtttctgcttagcaatgtcctcttcgacgtgctccgctccgtcgtcttcttttacatcaagagccccctgcgtgtggaggaggccggcctgcaggagc

SEQ ID NO: 506185 - DNA, 120 bp, Artificial Sequence
  ENSG00000164068_12 (sequence is synthesized)
tcattcccaccacctggtggccccactgctccagtagggagggcaaagagagcacggagatgaaggaggagaccgcagaggagcggctgcggcggcgagcctacgaacggggctgtcagc

SEQ ID NO: 506186 - DNA, 120 bp, Artificial Sequence
  ENSG00000164068_13 (sequence is synthesized)
ggctcaggaagcgcatcgaagtggtggaagaactacaggtccagatcctgaagctgctgctggacaataaagatgacaatgggggtgaagcttctaggtatatcttcctgaccaagtttc

SEQ ID NO: 506187 - DNA, 120 bp, Artificial Sequence
  ENSG00000164068_14 (sequence is synthesized)
gcaagtttctgcaggagaacgccagtggccgggggaacatgcccatgctctgcccccctgagtacatggtctgcttcttacaccggctgatctctgccctgcgctactattgggatgaat

SEQ ID NO: 506188 - DNA, 120 bp, Artificial Sequence
  ENSG00000164068_15 (sequence is synthesized)
acaaggcttccaatcctcatgcttccttcagtgaggaggcctacatcccgccccaggtcttctataatggcaaggtggactactttgacctgcagcgcctggggggcctcctctcgcacc

SEQ ID NO: 506189 - DNA, 120 bp, Artificial Sequence
  ENSG00000164068_16 (sequence is synthesized)
tgcggaagaccctcaaagatgaccttgcttccaaagccaacattgtgatcgacccactggagctccagtcaaccgccatggatgacctagatgaggatgaggagccagccccagctatgg

SEQ ID NO: 506190 - DNA, 120 bp, Artificial Sequence
  ENSG00000164068_17 (sequence is synthesized)
cggctggctcagttctccaactttgggccgagccaaccgcttcctcagcacagcggctgtgagcctcatgaccccacggcggcctctgagcacctcggagaaagtgaaggtccgcacgct

SEQ ID NO: 506191 - DNA, 120 bp, Artificial Sequence
  ENSG00000164068_18 (sequence is synthesized)
gagcgtggagcagaggacccgtgaggacattgaaggcagccactggaatgagggcttgctgctggggcggccccccgaggagcctgagcagcccctcaccgagaactcgctgctggaagt

SEQ ID NO: 506192 - DNA, 120 bp, Artificial Sequence
  ENSG00000164068_19 (sequence is synthesized)
cctggatggggcggtcatgatgtacaacctcagcgtacaccagcagctgggcaagatggtgggtgtctccgatgatgtcaatgaatacgctatggctctgagggacacagaggacaagct

SEQ ID NO: 506193 - DNA, 120 bp, Artificial Sequence
  ENSG00000164068_20 (sequence is synthesized)
ccgccggtgccccaagaggaggaaggacatccttgcagagttgaccaagagccagaaggttttctcagaaaagctggaccacctgagccgccgtcttgcctgggtccatgccactgtcta

SEQ ID NO: 506194 - DNA, 120 bp, Artificial Sequence
  ENSG00000164068_21 (sequence is synthesized)
ctcccaggagaagatgctggacatctactggctgctgcgcgtctgcctgcggaccattgagcacggtgatcgcacagggtctctctttgccttcatgcccgagttctacctgagcgtggc

SEQ ID NO: 506195 - DNA, 120 bp, Artificial Sequence
  ENSG00000164068_22 (sequence is synthesized)
catcaacagctacagtgctctcaagaattactttggtcccgtgcacagcatggaggagctcccaggctatgaagagaccctgacccgcctggctgccattctcgccaaacactttgccga

SEQ ID NO: 506196 - DNA, 120 bp, Artificial Sequence
  ENSG00000164068_23 (sequence is synthesized)
cgcacgcattgtgggcactgacatccgagactcactgatgcaggccctggccagctacgtgtgctacccacactccctgcgggctgtggagcgaatccccgaggagcagcgtatcgccat

SEQ ID NO: 506197 - DNA, 120 bp, Artificial Sequence
  ENSG00000164068_24 (sequence is synthesized)
ggtgaggaacctcctggcgccctatgagcagcggccctgggcccagaccaactggatcctggtgcggctctggaggggctgtggcttcgggtaccgctatacacggctgccacatctgct

SEQ ID NO: 506198 - DNA, 120 bp, Artificial Sequence
  ENSG00000164068_25 (sequence is synthesized)
gaaaaccaaacttgaggacgccaatttgcccagcctccagaagccctgcccttccaccctgctgcagcagcacatggcggacctcctacagcagggtcctgatgtggcacccagcttcct

SEQ ID NO: 506199 - DNA, 120 bp, Artificial Sequence
  ENSG00000164068_26 (sequence is synthesized)
caacagcgtcctcaatcagctcaactgggccttctctgaattcattggcatgatccaagagatccagcaggctgctgagcgcctggagcggaactttgtggacagccggcagctcaaggt

SEQ ID NO: 506200 - DNA, 120 bp, Artificial Sequence
  ENSG00000164068_27 (sequence is synthesized)
atgtgccacctgctttgacctctcggtcagcctgctgcgtgtcttggagatgactatcacactggtgcctgagatattccttgactggacccggcctacctctgagatgctgctgcggcg

SEQ ID NO: 506201 - DNA, 120 bp, Artificial Sequence
  ENSG00000164068_28 (sequence is synthesized)
tcttgcacagctgctaaaccaggtgctgaaccgggtgacagctgagaggaacctgtttgatcgtgtggtcaccctacggctgcctggcctagagagcgtggaccactatcccattctggt

SEQ ID NO: 506202 - DNA, 120 bp, Artificial Sequence
  ENSG00000164068_29 (sequence is synthesized)
ggcagtgacgggcatcctggtgcagctcctggtgcgtggcccagcctcagagagagagcaagccacatcagtgctcctggcagatccctgcttccagctacgctcaatatgctatctcct

SEQ ID NO: 506203 - DNA, 120 bp, Artificial Sequence
  ENSG00000164068_30 (sequence is synthesized)
gggacagccagagcccccagcacctggcactgctctgccagcccctgaccggaagcgcttctccctgcagagctatgcggattatatcagtgccgatgagctggcccaagtggaacagat

SEQ ID NO: 506204 - DNA, 120 bp, Artificial Sequence
  ENSG00000164068_31 (sequence is synthesized)
gctggcgcacctgacctctgcatctgcccaggcagcagctgcctccctgcccaccagtgaggaggacctctgccccatctgctatgcccaccccatctctgctgtgttccagccctgtgg

SEQ ID NO: 506205 - DNA, 120 bp, Artificial Sequence
  ENSG00000164068_32 (sequence is synthesized)
ccacaagtcctgcaaagcctgtatcaaccagcacctgatgaacaacaaggactgcttcttctgcaaaaccaccatcgtgtctgtagaggactgggagaagggagccaatacgagtactac

SEQ ID NO: 506206 - DNA, 120 bp, Artificial Sequence
  ENSG00000164068_33 (sequence is synthesized)
ctcctcagctgcctagccctcacagcctgtgccatcctggaacctccacctttgaacccagagccaggctgggccctatttatgagctccctttgcccttctcctgtatcccacaccacc

SEQ ID NO: 506207 - DNA, 120 bp, Artificial Sequence
  ENSG00000164068_34 (sequence is synthesized)
acatccaacctccttgcctgcctgtatcctcattggtgggagcccagccatggccctaattgtgcctgagcttgactttcagtcagggccacagtgagcattaaattattattccataca

SEQ ID NO: 506208 - DNA, 120 bp, Artificial Sequence
  ENSG00000164068_35 (sequence is synthesized)
tcctacacaggcacaacggacatccacatagccaggcatccaactccagcccacccttcactctcctccctgcagcccaccagtgaggaggacctctgccccatctgctatgcccacccc

SEQ ID NO: 506209 - DNA, 120 bp, Artificial Sequence
  ENSG00000164068_36 (sequence is synthesized)
gtgagccctaggagccctggtctgagacctctgtggcccagcaacacacttctgtggggggcggggaggggaggagcttcctctgtggttcaccctgcagcaaacaaacgtctgcaccct

SEQ ID NO: 506210 - DNA, 120 bp, Artificial Sequence
  ENSG00000164068_37 (sequence is synthesized)
gccctgggacctgcagccacagagccaacagctccctagcaaaggaaaacagacaagatggaacacggctatgaagagaccctgacccgcctggctgccattctcgccaaacactttgcc

SEQ ID NO: 506211 - DNA, 120 bp, Artificial Sequence
  ENSG00000164068_38 (sequence is synthesized)
ggcatgggaggggaggagacaggccatgctagacacgcccgtggtagatgtgccctcactgagggctgcagtgctgaggtcccacagcatcacctggcgagggccccatgtgaccagggc

SEQ ID NO: 506212 - DNA, 120 bp, Artificial Sequence
  ENSG00000164068_39 (sequence is synthesized)
cctcagacctcagtcagtcccctagggaaacagggacattgccaaccaagggcatcaggggatgtcctggaaagaagactgaaggataataacatcccaggccaaggaaactgcgtgtgc

SEQ ID NO: 506213 - DNA, 120 bp, Artificial Sequence
  ENSG00000164068_40 (sequence is synthesized)
caagccttagaggagccgtggggcaatggccttcttgtccctcagtcagaccccggaaggggtcatctatgtttggtgttgctcgagtggctcaaggctctgtgcctgaggcttgtgcct

SEQ ID NO: 506214 - DNA, 120 bp, Artificial Sequence
  ENSG00000164068_41 (sequence is synthesized)
cattgggtggcgggtgttgtgcgtgtttggttgtgtgtgtattcctgtgtgcacatgggcccgcagggctgcctgttcaagaccgtgcatgggagcacatgcctcagcgaggctggtttc

SEQ ID NO: 506215 - DNA, 120 bp, Artificial Sequence
  ENSG00000164068_42 (sequence is synthesized)
tgctcctgctgcctcagtctgacctgctgactgttgtgggaatgggaccgccctgggcctaaggttgggaccttggcagggctggggtccagactgggtctgaagaagcctggatgaagt

SEQ ID NO: 506216 - DNA, 120 bp, Artificial Sequence
  ENSG00000164068_43 (sequence is synthesized)
agagccaacagctccctagcaaaggaaaacagacaagatggaacacggtgggtgtagacctcttggctttcacttccttcctagtgctatgagcaactgccatggtccaggagccagctg

SEQ ID NO: 506217 - DNA, 120 bp, Artificial Sequence
  ENSG00000164068_44 (sequence is synthesized)
gccttgcaccttgactccctggcactggtcacaaagcgtagcagttggtcaggggcagaatggtttgtcttggtaaatcacagcagggggtggaccctgctagggtccacatccgaacct

SEQ ID NO: 506218 - DNA, 120 bp, Artificial Sequence
  ENSG00000164068_45 (sequence is synthesized)
gggcctctcagcctgctgattccaggctgggcgtggcagtgtatgtctggatcaggcagtgagctgtcaggcccctagcctgccccctgcccagccacaggcctcagtgcaggctttgtc

SEQ ID NO: 506219 - DNA, 120 bp, Artificial Sequence
  ENSG00000164068_46 (sequence is synthesized)
ttcaaagacagagctgtgagtgcccaaggagctttgactgctcatcaggtgtgtgtgctgagatgggtttgagcccaggtcagggctcctgccagggcctgtcatcccttcacagtgagc

SEQ ID NO: 506220 - DNA, 120 bp, Artificial Sequence
  ENSG00000164068_47 (sequence is synthesized)
ctgtgccttagcccttgcacagccaccaatgaatgctttgcccgatgtccccagatgccaccctgggtccaggctggccttgggagccagctctagagcctgctacccaagtccacccac

SEQ ID NO: 506221 - DNA, 120 bp, Artificial Sequence
  ENSG00000164068_48 (sequence is synthesized)
cctgctgacatgcctgcctctggagcccccactcccagccgacacgtctcacttcccacccttgcaggctatgaagagaccctgacccgcctggctgccattctcgccaaacactttgcc

SEQ ID NO: 506222 - DNA, 120 bp, Artificial Sequence
  ENSG00000164068_49 (sequence is synthesized)
tacgtgcttgtggacgctggccttgcggctgggtgcgtctggcggtgtggtgctgagtactgaggactgtgcgctcagctcttggagcgggctgggtgtttggggccagcggcggcagcg

SEQ ID NO: 506223 - DNA, 120 bp, Artificial Sequence
  ENSG00000164068_50 (sequence is synthesized)
gcaggcacggcggcagcagcggcagggtggggcgaacaggcggggcccagtggccaggcacacgaagagtcccgcatgctgctcctgtacgttgcctatggccaagctgccgtcggccag

SEQ ID NO: 506224 - DNA, 120 bp, Artificial Sequence
  ENSG00000164068_51 (sequence is synthesized)
gatgctgccatcgcgggatcctggcgccctgagaagctcctgctgcggcgaaacccaggcaatgcgcatggccgggacgctggtgttgcagtaaagcctcagggaccgacccaccagcgc

SEQ ID NO: 506225 - DNA, 120 bp, Artificial Sequence
  ENSG00000164068_52 (sequence is synthesized)
aagaggttgggcggatgttgtgagccgggtcgctgcggccgaggctccgggtgagtgaggggcggcagggctctgagcctggcgggttccggctattcccttcgcggtccgggctagtcc

SEQ ID NO: 506226 - DNA, 120 bp, Artificial Sequence
  ENSG00000164068_53 (sequence is synthesized)
agtgcgagggcacctgcagcgcagggatctgggtgcgaaactccgagcggaagctggtctggcaggtcctgtggagcttggggccaggcgggggcgacttgggggagccatgcgccgccc

SEQ ID NO: 506227 - DNA, 120 bp, Artificial Sequence
  ENSG00000164068_54 (sequence is synthesized)
gtgccgcagtgggggcaggcggtgggatttgtgttgggcttatcctgtatcttatgggcaggggtctcatccagggccacttcccgctccatgcaggcaaagggtttctcactgggctgg

SEQ ID NO: 506228 - DNA, 120 bp, Artificial Sequence
  ENSG00000164068_55 (sequence is synthesized)
tgccttgctgtgggtggaggcatggaccctccctcacaattctgcagccccgtgggccaagggaaccctgagccagccctggtcctggccgcctttcttcactgcagcgccccatgcagg

SEQ ID NO: 506229 - DNA, 120 bp, Artificial Sequence
  ENSG00000164068_56 (sequence is synthesized)
gggacttggggaaccctggtggtggagccctggcccaaacctgccccccatctcctggagcctgagggccatgttcctcacctgacctccagtggtggaagaactacaggtccagatcct

SEQ ID NO: 506230 - DNA, 120 bp, Artificial Sequence
  ENSG00000164070_0 (sequence is synthesized)
agtagggaaagacccaggctgcgggacgcggtgcaggctgcggcgctgacggcctctgctccttccgcgggtttccgactccctgccctagattttctgcttagcgacttggggtcccct

SEQ ID NO: 506231 - DNA, 120 bp, Artificial Sequence
  ENSG00000164070_1 (sequence is synthesized)
ctcgtttgcttctggtaggagtcgcaatcccagcagcaatagcccagaagaggacacggttcccgtaccgaagggttcagtaccagcagcccgaccatcacgcggcgggatgtctgtggt

SEQ ID NO: 506232 - DNA, 120 bp, Artificial Sequence
  ENSG00000164070_2 (sequence is synthesized)
tggcattgacctcggctttctcaactgctacattgctgtcgcgagaagtggcggcatcgagaccatcgccaatgagtacagcgacaggtgtaccccggcctgtatatcattgggatcaag

SEQ ID NO: 506233 - DNA, 120 bp, Artificial Sequence
  ENSG00000164070_3 (sequence is synthesized)
aactcgagccattggaaatgcagcaaagagccagatagtcacgaacgtaagaaatacaattcatggcttcaaaaagcttcatgggcgatcatttgatgatcccattgtgcaaactgaaag

SEQ ID NO: 506234 - DNA, 120 bp, Artificial Sequence
  ENSG00000164070_4 (sequence is synthesized)
gatcaggcttccctatgaactgcagaaaatgcctaatggaagtgcaggagttaaggtgcggtacttagaggaagagagaccttttgcaattgagcaagttactggaatgctgttagccaa

SEQ ID NO: 506235 - DNA, 120 bp, Artificial Sequence
  ENSG00000164070_5 (sequence is synthesized)
gcttaaagagacttcagaaaatgctttgaagaaaccagtggctgactgtgtgatttcaattcctagcttttttactgatgccgagagaagatctgtgatggctgcagcccaggttgcagg

SEQ ID NO: 506236 - DNA, 120 bp, Artificial Sequence
  ENSG00000164070_6 (sequence is synthesized)
cttaaattgtttaaggttgatgaatgaaactactgcagttgcactggcgtatggaatttataaacaggatcttcccccattagatgagaaaccaagaaatgtagtatttattgatatggg

SEQ ID NO: 506237 - DNA, 120 bp, Artificial Sequence
  ENSG00000164070_7 (sequence is synthesized)
acattctgcctatcaggtcttggtttgtgcttttaacaaaggaaaacttaaagtcttggctactacctttgatccatatttgggtggcaggaactttgatgaggctttagtagactactt

SEQ ID NO: 506238 - DNA, 120 bp, Artificial Sequence
  ENSG00000164070_8 (sequence is synthesized)
ctgtgatgagttcaagaccaaatataagataaatgtgaaagaaaactctcgggccttgttgcgtttatatcaggaatgtgaaaaactaaagaagctaatgagtgcaaatgcatcagatct

SEQ ID NO: 506239 - DNA, 120 bp, Artificial Sequence
  ENSG00000164070_9 (sequence is synthesized)
tccattgaacattgagtgtttcatgaatgaccttgatgtttctagtaaaatgaacagggctcaatttgaacaactgtgtgcttcccttttggccagggttgaaccacctttaaaagcagt

SEQ ID NO: 506240 - DNA, 120 bp, Artificial Sequence
  ENSG00000164070_10 (sequence is synthesized)
aatggaacaagctaacttacaacgtgaagacattagtagtatagaaattgtaggaggagcaacacgaattcctgcagtgaaagaacaaatcactaaattctttcttaaagacataagtac

SEQ ID NO: 506241 - DNA, 120 bp, Artificial Sequence
  ENSG00000164070_11 (sequence is synthesized)
cacattaaatgctgatgaagctgttgcaagaggatgtgcgttacagtgtgcgattctctcaccagcatttaaagtgcgtgaattttccataacagaccttgttccctattcaatcacatt

SEQ ID NO: 506242 - DNA, 120 bp, Artificial Sequence
  ENSG00000164070_12 (sequence is synthesized)
aaggtggaagacctcttttgaagatggaagtggggaatgtgaagttttctgtaagaaccatcctgccccattctcaaaagtcattactttccacaagaaggaaccatttgaactagaagc

SEQ ID NO: 506243 - DNA, 120 bp, Artificial Sequence
  ENSG00000164070_13 (sequence is synthesized)
attttatactaatttacatgaagtgccttatcctgatgcaagaattgggagcttcactattcagaatgtttttccacagtctgatggtgatagttccaaagtgaaggttaaagttcgtgt

SEQ ID NO: 506244 - DNA, 120 bp, Artificial Sequence
  ENSG00000164070_14 (sequence is synthesized)
taacatccatggaatcttcagtgtggctagcgcatcagtaattgagaagcaaaatttggaaggcgatcacagtgatgctccaatggagacagaaacttcatttaaaaatgaaaacaaaga

SEQ ID NO: 506245 - DNA, 120 bp, Artificial Sequence
  ENSG00000164070_15 (sequence is synthesized)
taatatggataaaatgcaggttgatcaagaagaagggcatcaaaaatgtcatgctgaacacactccagaagaggaaattgatcatacaggagccaaaacaaagtcagctgtctcagacaa

SEQ ID NO: 506246 - DNA, 120 bp, Artificial Sequence
  ENSG00000164070_16 (sequence is synthesized)
acaagaccgattaaatcagacacttaaaaaaggaaaagtcaaaagtattgatctaccgatccagagtagcctatgtagacaactaggccaagatcttctcaacagctacattgaaaatga

SEQ ID NO: 506247 - DNA, 120 bp, Artificial Sequence
  ENSG00000164070_17 (sequence is synthesized)
ggggaagatgatcatgcaagataagttagagaaagaaagaaatgatgctaagaatgccgttgaagaatatgtatatgattttagagacaggctgggcactgtctatgaaaaattcatcac

SEQ ID NO: 506248 - DNA, 120 bp, Artificial Sequence
  ENSG00000164070_18 (sequence is synthesized)
tccagaagacttgagtaaactgtctgcagtattggaagacacagaaaattggctttatgaagacggagaggaccaacctaaacaagtttatgtggataagcttcaagaactaaagaaata

SEQ ID NO: 506249 - DNA, 120 bp, Artificial Sequence
  ENSG00000164070_19 (sequence is synthesized)
cggccagcctattcaaatgaagtacatggagcatgaagagagaccaaaagccttaaatgacttgggaaaaaagatccaacttgtcatgaaagtgatagaagcttatagaaacaaggatga

SEQ ID NO: 506250 - DNA, 120 bp, Artificial Sequence
  ENSG00000164070_20 (sequence is synthesized)
aagatatgatcatctggatcctactgaaatggaaaaggttgaaaaatgtatcagtgatgccatgagttggctgaatagtaagatgaatgcacagaacaaactaagtctcactcaagatcc

SEQ ID NO: 506251 - DNA, 120 bp, Artificial Sequence
  ENSG00000164070_21 (sequence is synthesized)
tgtggtaaaagtttcagaaatagtagcaaagtcaaaggaactggataatttctgtaaccccatcatttacaagcccaaaccaaaagcagaagttcctgaagacaaaccaaaagctaatag

SEQ ID NO: 506252 - DNA, 120 bp, Artificial Sequence
  ENSG00000164070_22 (sequence is synthesized)
tgaacacaatggcccaatggatggacagagtggaactgaaactaaatcagattcaacaaaagacagctcacagcatactaaatcctctggagagatggaagtggactaagtcttaatttt

SEQ ID NO: 506253 - DNA, 120 bp, Artificial Sequence
  ENSG00000164070_23 (sequence is synthesized)
accttcacattaattcaaaccgtgcaagtaaccacggggtccatcttttacatctggtacacacaacagacgctcagttgttcttaaccacttttgtcatttgttttttggagtagtttt

SEQ ID NO: 506254 - DNA, 120 bp, Artificial Sequence
  ENSG00000164070_24 (sequence is synthesized)
gaaaagtgttttatattgagtgcacttctgttcatttccattgctgcttatatgcagtgttagccgaattagatttacaagacaatctaagctttccggataattttatatatcaaacat

SEQ ID NO: 506255 - DNA, 120 bp, Artificial Sequence
  ENSG00000164070_25 (sequence is synthesized)
acaggatggatacatagttggcaacagtctaccttatttaaagcttctactgggataaacctcaattcctttattcaggaaaggatactttattgcattattgttgcagaagcatagatt

SEQ ID NO: 506256 - DNA, 120 bp, Artificial Sequence
  ENSG00000164070_26 (sequence is synthesized)
taattgcatctttattttgaaaaacaaatgaaaattgatggggtttaaagctacagaggcactgacctttttctagttattgtattgctacaatttaaatattaaaacaaataagagctt

SEQ ID NO: 506257 - DNA, 120 bp, Artificial Sequence
  ENSG00000164070_27 (sequence is synthesized)
tctcaacaaattagtccatctcattgatgtaccacagaaatccaaagctttgctgtcatcacataaatgaattaaatcacatgtgaaagggaacacacccaattttatgttaaggtgaaa

SEQ ID NO: 506258 - DNA, 120 bp, Artificial Sequence
  ENSG00000164070_28 (sequence is synthesized)
ccagcagtttgcttcttttattagtaatgtggattgatgttttctcagagtaactcgttgtcttttcgcttgaaatttttgatcttgtcctgaagactagctgctgctaaaacaatgcta

SEQ ID NO: 506259 - DNA, 120 bp, Artificial Sequence
  ENSG00000164070_29 (sequence is synthesized)
gcctaaagatacaggagtctctgacaaaatgactttcatgttaaggggaaatgctgtttatctactcagacatgcatctgtgatgttcatagccttgtttcagttataatagttgtcttg

SEQ ID NO: 506260 - DNA, 120 bp, Artificial Sequence
  ENSG00000164070_30 (sequence is synthesized)
tttttttcttaattgattttgttaataataccttaacacagggtaggaagaagtggcacagtgtattgcattatatacatttatcattgatttacctaatgttaccttgtagattaaaca

SEQ ID NO: 506261 - DNA, 120 bp, Artificial Sequence
  ENSG00000164070_31 (sequence is synthesized)
ctattaagtggtaatacttgaaaaggagcacttataccataagtcttaggaaataatgtttgtaataaacttaactatgttacatatcaacaggcaaaaatatagaatgttacatagtgt

SEQ ID NO: 506262 - DNA, 120 bp, Artificial Sequence
  ENSG00000164070_32 (sequence is synthesized)
tgtgtgattaaattatagttcctgctgttaacattaccttttgaaaccttggctccagttttggtgcttcttatacaaattaaatgcgaaaagggactgtaaacttaagatgtattttaa

SEQ ID NO: 506263 - DNA, 120 bp, Artificial Sequence
  ENSG00000164070_33 (sequence is synthesized)
ggactttatctgtgcttcatcacccaacttgttcacattgttaatttctgtccagagacctgaaactgcttaagtatgggaacagactgaaatggtgtttcaacctgcaagagacagaag

SEQ ID NO: 506264 - DNA, 120 bp, Artificial Sequence
  ENSG00000164070_34 (sequence is synthesized)
catagacaagtatatgagcccttatgtccttaatgccaatcaactagattgacctaggttaaaatttcaaaaggctcattttctcccaaagctaaatctttatattaggaacaattaaat

SEQ ID NO: 506265 - DNA, 120 bp, Artificial Sequence
  ENSG00000164070_35 (sequence is synthesized)
attgacttaagttgtaaaaattgagagtacaatatctttagggatagtcattatttctcacaactagttctctacgagagattttgtttctacaatgtagtcagcacttaatggagagta

SEQ ID NO: 506266 - DNA, 120 bp, Artificial Sequence
  ENSG00000164070_36 (sequence is synthesized)
tggagtagtgcattttgcagggatttttattccgtcttttgaggggaagaatctcttttttgcattaaaaaatcatataaacttaatatatttttaaactctcctagtctttaaactttc

SEQ ID NO: 506267 - DNA, 120 bp, Artificial Sequence
  ENSG00000164070_37 (sequence is synthesized)
tcttaattctcttaaaatgaaataggtatatccaataggtgatgaaatacattttttacaaacatagatgctttttatttgtatgttgaatgtacagattcatttcaagaaaagcatgaa

SEQ ID NO: 506268 - DNA, 120 bp, Artificial Sequence
  ENSG00000164070_38 (sequence is synthesized)
gataatgaaagcaaatatgtaacaatacaagtagggactttagagcttctatttgggttaaaacatccactcacttggttaggagctatgcctcagaaacttcctgggagtaaatatggg

SEQ ID NO: 506269 - DNA, 120 bp, Artificial Sequence
  ENSG00000164070_39 (sequence is synthesized)
aacaacttttctattaatacatctaaattttctagtatatcctgacattttccattcctgctctgaagtcacttttagttttgtgttttagtcagatagtaccactaatttttgtaatta

SEQ ID NO: 506270 - DNA, 120 bp, Artificial Sequence
  ENSG00000164070_40 (sequence is synthesized)
tatacatccaaatatatatactttttctacccaattattcaacttaaaagatttcaaaaacgatttagccttataatgtatttatttatttaattcattaatgaaagagagtgctctctt

SEQ ID NO: 506271 - DNA, 120 bp, Artificial Sequence
  ENSG00000164070_41 (sequence is synthesized)
attaatgaaagagagtgctctctttaatgcagctttgggtagacagtctaattcagtccaattttaatctgcattaaaatatgcaatgctagacaaagattttcaaaataaaaagctatt

SEQ ID NO: 506272 - DNA, 120 bp, Artificial Sequence
  ENSG00000164070_42 (sequence is synthesized)
atttcagaaattattttaaaagatgcatagtaaaacagtgttttcctatggtaagcaaataagaatgaagtttgtagggaatatttggaatgattaatataaattagtatactttggctc

SEQ ID NO: 506273 - DNA, 120 bp, Artificial Sequence
  ENSG00000164070_43 (sequence is synthesized)
tgtggaaaagtgtaaattgtggttttagaaaccaactcttgatagttgtactgtgattataaaaaacaattgttaaataatataatggaagtttgtgataattccttagcagtaatgtaa

SEQ ID NO: 506274 - DNA, 80 bp, Artificial Sequence
  ENSG00000164070_44 (sequence is synthesized)
acaaaaaagtagccgggcgtggtggcatgtccctgtaatctcagctacccgggaggctcgttagctgagatcgtgctcct

SEQ ID NO: 506275 - DNA, 120 bp, Artificial Sequence
  ENSG00000164070_45 (sequence is synthesized)
ctccgtctcaaaaaaaaaacaaaaattcttccaaaaaactagaaagagcacagcaaagaatttggctattgaaataacagataaacttgattttgaaaaggataacaaggctgggcacag

SEQ ID NO: 506276 - DNA, 72 bp, Artificial Sequence
  ENSG00000164070_46 (sequence is synthesized)
aggatcacttaagcctgagaggtcaaggttgcaatgagccataatcataccactgcactccagcctgggcaa

SEQ ID NO: 506277 - DNA, 66 bp, Artificial Sequence
  ENSG00000164070_47 (sequence is synthesized)
cataaaaggaaaacaagacatttactaagaagagctaaaggaaagaattaaaggtttcttatgctt

SEQ ID NO: 506278 - DNA, 120 bp, Artificial Sequence
  ENSG00000164070_48 (sequence is synthesized)
aagaagagctaaaggaaagaattaaaggtttcttatgcttttttgggggggggtgtcaatttttagtatattaagagctaaaagaagtaaaggtttcttagactttttttgggagggagg

SEQ ID NO: 506279 - DNA, 120 bp, Artificial Sequence
  ENSG00000164070_49 (sequence is synthesized)
cgtcaatttttagtatatttgtgattaattccatgatagaagtctttaaagagaattttggggctcaataatttaacataatgtcagtgttaaagcacttaatccaaattagcccatctt

SEQ ID NO: 506280 - DNA, 120 bp, Artificial Sequence
  ENSG00000164070_50 (sequence is synthesized)
taactgttttgaaaaatctatatttattaaaggtagtagacatttgaatatagtaatcaaattaactgattttgttttcaccctaaatacatacaaccattcctccactttcataaattt

SEQ ID NO: 506281 - DNA, 120 bp, Artificial Sequence
  ENSG00000164070_51 (sequence is synthesized)
gacaaataataagcctctcccattaggattttctgttttatagtaaatagttggtatttggtagtccacaattaaagtcattgcattaattttacaaattatagatttagaaatgattct

SEQ ID NO: 506282 - DNA, 120 bp, Artificial Sequence
  ENSG00000164070_52 (sequence is synthesized)
taagttattggtaaaatataactttctcagtttttaaaagtttacaaaatttttttttttgttttgagacagagtatggctttgttacccaggctggattgcaatggggtgatctaggct

SEQ ID NO: 506283 - DNA, 89 bp, Artificial Sequence
  ENSG00000164070_53 (sequence is synthesized)
tttgttacccaggctggattgcaatggggtgatctaggctcactgcagcctccaccacctgagttcaagcgatttttctgcctcaacca

SEQ ID NO: 506284 - DNA, 120 bp, Artificial Sequence
  ENSG00000164070_54 (sequence is synthesized)
atttttgcttttaaagttaatgttattttgtggttaaacttctaaagttttgaactgtaagcagaattttgttttgtgatattttattgtataaactgttaatgagaggcacagctaatt

SEQ ID NO: 506285 - DNA, 120 bp, Artificial Sequence
  ENSG00000164070_55 (sequence is synthesized)
gtacatatcaatatacatttaaaatctggtaacactggttaaatagcccttgatgacttttcatgtggcatgagagggatatgcttataaagcttaattctgatattatcctcttactac

SEQ ID NO: 506286 - DNA, 120 bp, Artificial Sequence
  ENSG00000164070_56 (sequence is synthesized)
ctacagtatgttttgcaaaaatcagtccacttagcaaactaatctttgtaaagcagtcagtttcagaagatactttttatcaaaaaagatggcaggtttaacattataccttttggtttt

SEQ ID NO: 506287 - DNA, 120 bp, Artificial Sequence
  ENSG00000164070_57 (sequence is synthesized)
tgcccaacatttgatttaatctaaagcaagaatataaaataattttaagaagcatataatttcttttgataaaaagtaacaaaaatttaatgcagatcaaagaccaaggcttgtaaccaa

SEQ ID NO: 506288 - DNA, 120 bp, Artificial Sequence
  ENSG00000164070_58 (sequence is synthesized)
aacaagcaaaaagaaactttagctgtttaactatcacctctctaatttaaaatgcatgaaaattaatactttgtttttgttttttttttggaaacagtctcactctgtcacccaggctgg

SEQ ID NO: 506289 - DNA, 75 bp, Artificial Sequence
  ENSG00000164070_59 (sequence is synthesized)
ttggccaggctggttttgaactcctgacttcaaatgatccacccacatccacctggttcttttatatactcatgt

SEQ ID NO: 506290 - DNA, 120 bp, Artificial Sequence
  ENSG00000164070_60 (sequence is synthesized)
cacctggccaatgttcttttatatactcatgttttctaacaaaacagctttggatttataatgctgccagatgtcattacaattttttttctaaattcaaaggtaattattctaaacaat

SEQ ID NO: 506291 - DNA, 120 bp, Artificial Sequence
  ENSG00000164070_61 (sequence is synthesized)
aaaagggcacctggaattttcagaacattaaaaaactgaaaccacttagaagaaaagaagaaacctaaatgtctgtggaagtgatcagtattaagtgggtgatggctctttcatcttcct

SEQ ID NO: 506292 - DNA, 120 bp, Artificial Sequence
  ENSG00000164070_62 (sequence is synthesized)
tatccctaaagatacttccaacatattgttagagtaagtattaaaagaaaaagtaggtttgctgaaaaacattactaaatgacttggagctctccagtcaaagaaacaaagctaattgaa

SEQ ID NO: 506293 - DNA, 120 bp, Artificial Sequence
  ENSG00000164070_63 (sequence is synthesized)
ataatgtacatttggttcagtctgtcaggcaagtacaaatccataacaaaaaaaattaatagtatgctctttgctttggaatctctaatttacggtcatgccctaagtcacaggatgatt

SEQ ID NO: 506294 - DNA, 120 bp, Artificial Sequence
  ENSG00000164070_64 (sequence is synthesized)
attagggaaatgtcattgacacctgaaaattacctatcctgtaaaaagactggtgaaattcaacatgttttaaataatttaattgcattatagcatataaactataaatgaaaatgatct

SEQ ID NO: 506295 - DNA, 120 bp, Artificial Sequence
  ENSG00000164070_65 (sequence is synthesized)
ttgtctttcctttatcttgctttatcctcttatccaattctagactcttaaataatcactgtatttttctcaagtatttgttattttttattatcctttagatctttttgttcatggctc

SEQ ID NO: 506296 - DNA, 120 bp, Artificial Sequence
  ENSG00000164070_66 (sequence is synthesized)
tttaaaaatagttttactgataatccaatcacttggatagttaattttattactttttgtttcctttttaatatttattcttcccgttaagggttttttggctataaattcgtacttgat

SEQ ID NO: 506297 - DNA, 120 bp, Artificial Sequence
  ENSG00000164070_67 (sequence is synthesized)
aagctatgttatttctttgtgtaatttaatagtagcattctggagtagattctttttttgtattctggccttggaatactttaattccggaccaaaagaggtcaattttgtgagtattgc

SEQ ID NO: 506298 - DNA, 120 bp, Artificial Sequence
  ENSG00000164070_68 (sequence is synthesized)
ctattaagtaaacaacatccctcatttttaatccaaatatcaatttgacagaataacaagggtcagaaattcaaaatagctgttagacacctttgattctttgctgctctctggttatgt

SEQ ID NO: 506299 - DNA, 120 bp, Artificial Sequence
  ENSG00000164070_69 (sequence is synthesized)
atgtgtgttgtgcatcttccttgttgttttagagtttcctaaattttttgcttctggggacttgagtatttttaaatgttcttaaaattatatgaatctacccagaatgtagatgtcaaa

SEQ ID NO: 506300 - DNA, 120 bp, Artificial Sequence
  ENSG00000164070_70 (sequence is synthesized)
gagactctgtctcaaaaaaaaaaaaaagtgtaattagaaatggaaatctaggtaaaggaagctttaaaatgttgtattttttccctgaaataaacttttatgatttaatgtcttggaaaa

SEQ ID NO: 506301 - DNA, 120 bp, Artificial Sequence
  ENSG00000164070_71 (sequence is synthesized)
aacttttatgatttaatgtcttggaaaaagactcacatgaaaagtggcttttatatttggtaggataaagccattgtcctttaataccatagcaaatagaagcaatttttaatgaggtta

SEQ ID NO: 506302 - DNA, 120 bp, Artificial Sequence
  ENSG00000164070_72 (sequence is synthesized)
ctgaattgtttagtattcctaatatggcatccaggtcatcttttcttttctccaaccattattaaaataacttgacactttgggaggccaagctgggcagatcacctgaggtcaggagtt

SEQ ID NO: 506303 - DNA, 120 bp, Artificial Sequence
  ENSG00000164070_73 (sequence is synthesized)
gtgatgactgactctagtcattatggaaaataacttttggcagtttagttcctaatgttaacaattcctctttttaagagaggtactacatttgatttctcaatttctcagtttgttttc

SEQ ID NO: 506304 - DNA, 120 bp, Artificial Sequence
  ENSG00000164070_74 (sequence is synthesized)
aatacaaacagcaaccactgaaatgcagaaaatggtaatcaagtgtgatgtttctataaaaataattgagattcacatgtaatagaccctttagctttaatgagcagacatgagaatggt

SEQ ID NO: 506305 - DNA, 120 bp, Artificial Sequence
  ENSG00000164070_75 (sequence is synthesized)
ttatgatcttaagttggtaacataggaatatgtatttgtcaattttagttcacaaacatatccataagaatgtttacacatggcagtatcaaagcatataaaatattttctatgtaagta

SEQ ID NO: 506306 - DNA, 120 bp, Artificial Sequence
  ENSG00000164070_76 (sequence is synthesized)
aattgcatctttatgctagtgaacaaagtagcaataaatgttcatttttggatggcagtacacattgttaacaatcgtgtaattataataaatatgtctacctactccttgaaccatgaa

SEQ ID NO: 506307 - DNA, 120 bp, Artificial Sequence
  ENSG00000164070_77 (sequence is synthesized)
atgggcccctcggggaggcgaggcctgcgggcgagcccttctgagggcagggggtgagggggcggcgcccgccagccaggacagcatcctgccgccgtgacaagcacgcctccggttgcc

SEQ ID NO: 506308 - DNA, 120 bp, Artificial Sequence
  ENSG00000164070_78 (sequence is synthesized)
aaaacaacccaaaaatgtgcctcaaaacacgttcgcaaagccccgggccggccggtcgcctgcctctcacctagcccgaccgcccgacgtcctactgccgagcgagggcgagcaagccaa

SEQ ID NO: 506309 - DNA, 120 bp, Artificial Sequence
  ENSG00000164070_79 (sequence is synthesized)
aagtttgttggcaaggaatataatgaagtaattctgaaatatgaaaaactagttgctgcttataggctgctgttactggtaattttatgaggaaaccaactgtatgaaacctatattact

SEQ ID NO: 506310 - DNA, 66 bp, Artificial Sequence
  ENSG00000164070_80 (sequence is synthesized)
gccgaaaggcgattttcttttattctattttaagacagtttctccctttttttaaggttgcttttt

SEQ ID NO: 506311 - DNA, 120 bp, Artificial Sequence
  ENSG00000164070_81 (sequence is synthesized)
taataattactatgcatctttcttccaaattgatcagaattcaaccactagactttaaactacttcatttaaggactgtggctttttctttcaatctttccatgtatcattttgtaatcg

SEQ ID NO: 506312 - DNA, 120 bp, Artificial Sequence
  ENSG00000164073_0 (sequence is synthesized)
aggtgtcgcgagagttgggcgcaagacgccttgtagggagtgtaactatggccggcctgcggaacgaaagtgaacaggagccgctcttaggcgacacacctggaagcagagaatgggaca

SEQ ID NO: 506313 - DNA, 120 bp, Artificial Sequence
  ENSG00000164073_1 (sequence is synthesized)
ttttagagactgaagagcattataagagccgatggagatctattaggattttatatcttactatgtttctcagcagtgtagggttttctgtagtgatgatgtccatatggccatatctcc

SEQ ID NO: 506314 - DNA, 120 bp, Artificial Sequence
  ENSG00000164073_2 (sequence is synthesized)
aaaagattgatccgacagctgatacaagttttttgggctgggttattgcttcatatagtcttggccaaatggtagcttcacctatatttggtttatggtctaattatagaccaagaaaag

SEQ ID NO: 506315 - DNA, 120 bp, Artificial Sequence
  ENSG00000164073_3 (sequence is synthesized)
agcctcttattgtctccatcttgatttccgtggcagccaactgcctctatgcatatctccacatcccagcttctcataataaatactacatgctggttgctcgtggattgttgggaattg

SEQ ID NO: 506316 - DNA, 120 bp, Artificial Sequence
  ENSG00000164073_4 (sequence is synthesized)
gagcaggaaatgtagcagttgttagatcatatactgctggtgctacttcccttcaggaaagaacaagttccatggcaaacataagcatgtgtcaagcattaggttttattctaggtccag

SEQ ID NO: 506317 - DNA, 120 bp, Artificial Sequence
  ENSG00000164073_5 (sequence is synthesized)
tttttcagacttgttttacattccttggagaaaaaggtgtgacatgggatgtgattaaactgcagataaacatgtatacaacaccagttttacttagcgccttcctgggaattttaaata

SEQ ID NO: 506318 - DNA, 120 bp, Artificial Sequence
  ENSG00000164073_6 (sequence is synthesized)
ttattctgatccttgccatactaagagaacatcgtgtggatgactcaggaagacagtgtaaaagtattaattttgaagaagcaagtacagatgaagctcaggttccccaaggaaatattg

SEQ ID NO: 506319 - DNA, 120 bp, Artificial Sequence
  ENSG00000164073_7 (sequence is synthesized)
accaggttgctgttgtggccatcaatgttctgttttttgtgactctatttatctttgccctttttgaaaccatcattactccattaacaatggatatgtatgcctggactcaagaacaag

SEQ ID NO: 506320 - DNA, 120 bp, Artificial Sequence
  ENSG00000164073_8 (sequence is synthesized)
ctgtgttatataatggcataatacttgctgctcttggggttgaagccgttgttattttcttaggagttaagttgctttccaaaaagattggcgagcgtgctattctactgggaggactca

SEQ ID NO: 506321 - DNA, 120 bp, Artificial Sequence
  ENSG00000164073_9 (sequence is synthesized)
atcttgttaccttggggaaatcaatttcccaaaatacagtgggaagatttgcacaataattcaatccctaataccacatttggggaaattattattggtctttggaagtctccaatggaa

SEQ ID NO: 506322 - DNA, 120 bp, Artificial Sequence
  ENSG00000164073_10 (sequence is synthesized)
gatgacaatgaaagaccaactggttgctcgattgaacaagcctggtgcctctacaccccggtgattcatctggcccagttccttacatcagctgtgctaataggattaggctatccagtc

SEQ ID NO: 506323 - DNA, 120 bp, Artificial Sequence
  ENSG00000164073_11 (sequence is synthesized)
tgcaatcttatgtcctatactctatattcaaaaattctaggaccaaaacctcaggtaagccaggtaccctgacattgcaattatagaaaatatacttgtaagcactcaacattttttgct

SEQ ID NO: 506324 - DNA, 120 bp, Artificial Sequence
  ENSG00000164073_12 (sequence is synthesized)
gccattctctatttttacacagactgatttgagggatttttatcatattcagcatttaaaatttttaaaaatcccacaacttctataaagttcattcttgggtaggttatgtgggttata

SEQ ID NO: 506325 - DNA, 120 bp, Artificial Sequence
  ENSG00000164073_13 (sequence is synthesized)
gttttggatacagaagttgtaggagtggcattgtggtagagtgtaaagtggcacagtggagtcagccaaatatggcttcaaacctcttgaacaagttacttaaactttctgagtttcagc

SEQ ID NO: 506326 - DNA, 120 bp, Artificial Sequence
  ENSG00000164073_14 (sequence is synthesized)
ttctacctttgttaaacaggcataacacctgtcatcgaaacttgtgaacattacaaatgatgtatttaaagcacctacctcagtgactggcatgtagcaggtacaaaataaatgttagct

SEQ ID NO: 506327 - DNA, 120 bp, Artificial Sequence
  ENSG00000164073_15 (sequence is synthesized)
ttaaaaggtattttaatcaattttattattcccagggcttcagcagacagtaagtttttccctttacactccttttattttttttaatctgacttaatattaaatgctatatttatagga

SEQ ID NO: 506328 - DNA, 120 bp, Artificial Sequence
  ENSG00000164073_16 (sequence is synthesized)
ggcattttatgtttaatttaaaagtaaaagatgcagaaatgattcttgtaagtttgctgtagtttggtaataccatttctttgcttttaaataactaaaccccaatatcaatctgcttgt

SEQ ID NO: 506329 - DNA, 120 bp, Artificial Sequence
  ENSG00000164073_17 (sequence is synthesized)
cctccatttcacccccaacagggtgtatacatgggctggttaacagcatctggaagtggagcccggattcttgggcctatgttcatcagccaagtgtatgctcactggggaccacgatgg

SEQ ID NO: 506330 - DNA, 120 bp, Artificial Sequence
  ENSG00000164073_18 (sequence is synthesized)
gcattcagcctggtgtgtggaataatagtgctcaccatcaccctcctgggagtggtttacaaaagactcattgctctttctgtaagatatgggaggattcaggaataaactagctaagac

SEQ ID NO: 506331 - DNA, 120 bp, Artificial Sequence
  ENSG00000164073_19 (sequence is synthesized)
agaacatatgttgaataacagagagaattctacatgtcattgtgaatagtaggttatataaaaacatactagatgataatttccttacctcagaaatgaaatattattcttataatacct

SEQ ID NO: 506332 - DNA, 120 bp, Artificial Sequence
  ENSG00000164073_20 (sequence is synthesized)
tcttaatacccactgcagaagtgtcattaaaataatatacagtggaaccagaaagagggttctgtaagaattagccatagcagaacaaaattatagaattttaaatacctctacccaagt

SEQ ID NO: 506333 - DNA, 120 bp, Artificial Sequence
  ENSG00000164073_21 (sequence is synthesized)
agaggtatttttattcagacacctactttttatttataaaaaaatgcattttctattatcaagttcacttatgaaataaaaattataacacatattttccatttagcgtgcctaacatcc

SEQ ID NO: 506334 - DNA, 120 bp, Artificial Sequence
  ENSG00000164073_22 (sequence is synthesized)
taccttgccttctatgagtctttcttctaatactacacctctgccttattttagttcagggtttcactaagtaacccctacattaataaatgagtatggataatgctaatatttgagcaa

SEQ ID NO: 506335 - DNA, 120 bp, Artificial Sequence
  ENSG00000164073_23 (sequence is synthesized)
tacagaggattaagagatcaagatacttcactgcctattagcctaatagggatacctactttctttcaaatgccaaaaattcacattagaaacataatccagatatgtgttattttatat

SEQ ID NO: 506336 - DNA, 120 bp, Artificial Sequence
  ENSG00000164073_24 (sequence is synthesized)
atatatatacaaaacagtaaatggtttcttaaaattattgctatttttcaacccccttaaactggagaaaaacatttaattagtaaaacattaattaatttactttaatttttcccatct

SEQ ID NO: 506337 - DNA, 120 bp, Artificial Sequence
  ENSG00000164073_25 (sequence is synthesized)
ctcagtagtggcggggaggaacacaacagttttcaatctatgtctgcatagttgtgtagagctgcagaattttagttggatttttaatttggatgatccctgacagccccaaactagtca

SEQ ID NO: 506338 - DNA, 120 bp, Artificial Sequence
  ENSG00000164073_26 (sequence is synthesized)
ggctaataagtatttgaggcaaaatggctttaatctaacaatttactgagtttacctgaagttggctaaataacactgtatgtttaacttctacctctacataagttgaatgctgataaa

SEQ ID NO: 506339 - DNA, 120 bp, Artificial Sequence
  ENSG00000164073_27 (sequence is synthesized)
aggaactagtagataactatgtatattgataagcactgttaagaaaatgcaaaaatatttctaaacacttttccaaatgttttctactttaagttagaaatagtttcaaatctgagaata

SEQ ID NO: 506340 - DNA, 120 bp, Artificial Sequence
  ENSG00000164073_28 (sequence is synthesized)
aacaaagtgagaccctgtctttacaaaaaataaaaacaaaaatttaaaactgtataatctgcactttatgctaaactagctgtgctcttaaactcaattttttcagctctaataaagggc

SEQ ID NO: 506341 - DNA, 120 bp, Artificial Sequence
  ENSG00000164073_29 (sequence is synthesized)
ttaatttgatagaattattctacgattaaattttgaagactgttttcactctcctctgccgcccatagcaagactgcttccatagatttctcagaaccgtagccagttctggctatttgg

SEQ ID NO: 506342 - DNA, 120 bp, Artificial Sequence
  ENSG00000164073_30 (sequence is synthesized)
tcaagtctgggatccctcttacctgctattctgcagctgctttctctgtcttacattttttgggccacgtctaatcttaaagagtaaactctacccttggtttgcatagtgtgcatgaca

SEQ ID NO: 506343 - DNA, 120 bp, Artificial Sequence
  ENSG00000164073_31 (sequence is synthesized)
aaaataacaagaataatggtaatgatgaaaatgataagagcaaaatttgtggagtgctttccacattccaggtaatgtgtaacatacaatttaattcttacagcagtcttatggagtgaa

SEQ ID NO: 506344 - DNA, 120 bp, Artificial Sequence
  ENSG00000164073_32 (sequence is synthesized)
aatactattatgattcccgttttacagatgaaagaatggaggcacagaaaagttacttgtctaagtaacagtctatccttaaagtccacagtcttaaccacttgatttttcatagtgagg

SEQ ID NO: 506345 - DNA, 120 bp, Artificial Sequence
  ENSG00000164073_33 (sequence is synthesized)
aaaatatcccagaaagttgcagtttcaattaatcactaattgtagggtaatttaactataccagtgagtcctactagcagaaatatttgggcaacataagcccactgactggagcttttg

SEQ ID NO: 506346 - DNA, 120 bp, Artificial Sequence
  ENSG00000164073_34 (sequence is synthesized)
tcttagcataataacctgtttccagcaagaatataacagaaaaaagtttcccagctttcaaaggtttataatattgattaaaatttagataaacttaaccttacacaaatgactcttact

SEQ ID NO: 506347 - DNA, 120 bp, Artificial Sequence
  ENSG00000164073_35 (sequence is synthesized)
ttcctttttattgagagcattttctttggagcattttcttctttggaggattataccttgctcatcttggcacaaaagaaggcgaaaggaagtaacatgggattgggaaaagagcaagga

SEQ ID NO: 506348 - DNA, 120 bp, Artificial Sequence
  ENSG00000164073_36 (sequence is synthesized)
gataaagtttgaggaaaaaaaatcaccatgttgatgtcttcttgagtaggccaagttgcgtataaagagaaaatgacaacaggagattttaaggtatgatatattgttaagagtagtaca

SEQ ID NO: 506349 - DNA, 120 bp, Artificial Sequence
  ENSG00000164073_37 (sequence is synthesized)
tatttaagaagagaaaatatgtttttgaaaacaaatttaaacttgaaaggatgattttcatattttgaagggatttataacttcacaaagcatctccattctatcttgttcagctttaca

SEQ ID NO: 506350 - DNA, 120 bp, Artificial Sequence
  ENSG00000164073_38 (sequence is synthesized)
tttaaaaataaactcttcttgttcatataaaccttatctcttacataaagtgaaatctgttaattttttgttttgacaaggataaactacttacctgcatctgtttaagaatagattaac

SEQ ID NO: 506351 - DNA, 120 bp, Artificial Sequence
  ENSG00000164073_39 (sequence is synthesized)
taaggttgtatgtatatgtttggttgtgtcatattcacattcattctgacatttatggctcacttttaactggtctcatccccttttaaactcatatttcacagttcaacatacatgttt

SEQ ID NO: 506352 - DNA, 120 bp, Artificial Sequence
  ENSG00000164073_40 (sequence is synthesized)
ctcattgtaaacaaatatttttcttatcattttgcctttgctcatgatgttctcattacctatagtttctcttctgttctcatcattcttcatccttcaagattcagtttaaaccaggtg

SEQ ID NO: 506353 - DNA, 120 bp, Artificial Sequence
  ENSG00000164073_41 (sequence is synthesized)
catcattcttcatccttcaagattcagtttaaaccaggtgtggtggcacgtgcctataataccagctactcaggagactgaggtagcagaatctcttgagcccaggagttcgaggccagc

SEQ ID NO: 506354 - DNA, 90 bp, Artificial Sequence
  ENSG00000164073_42 (sequence is synthesized)
gcagctcacctgaggtcaggagttaacgtcgctactaaaaaaaatataaaaattagctgtgcccacgtggtggcacatgcctgtaatctc

SEQ ID NO: 506355 - DNA, 60 bp, Artificial Sequence
  ENSG00000164073_43 (sequence is synthesized)
agtgacctgagatcgcaccattgcaccccagcctgggcaacaagatcaaaactccgtctc

SEQ ID NO: 506356 - DNA, 86 bp, Artificial Sequence
  ENSG00000164073_44 (sequence is synthesized)
tcagactacagatattgcagattttgaagaacaagaacatatgttgaataacagagagaattctacatgtcattgtgaatagtagg

SEQ ID NO: 506357 - DNA, 120 bp, Artificial Sequence
  ENSG00000164073_45 (sequence is synthesized)
attcaagaccagcctgggaaacaaaagcattttctttggagcattttcttctttggaggattataccttgctcatcttggcacaaaagaaggcgaaaggaagtaacatgggattgggaaa

SEQ ID NO: 506358 - DNA, 120 bp, Artificial Sequence
  ENSG00000164073_46 (sequence is synthesized)
tttttgtgactctatttatctttgccctttttgaaacgtaagttttattccatcttcatctgaatcagattatgttttaacctttatttcttaatgcaatgttaattaggcatatagatg

SEQ ID NO: 506359 - DNA, 120 bp, Artificial Sequence
  ENSG00000164073_47 (sequence is synthesized)
ttattgaaaatcttatgtaaggcaaatttttcttaccatgatgtaaaaaatgtatatacattttgttgcttgtaacttgaatgtagttaattatttgtccataatcttaactaccttatc

SEQ ID NO: 506360 - DNA, 120 bp, Artificial Sequence
  ENSG00000164073_48 (sequence is synthesized)
ttattttcttataaaagaatctgtttcactactctttccctctttcatctgagttttatgataaatacagttataaaactttagtgccatgatttaattatccttaagctctataatttc

SEQ ID NO: 506361 - DNA, 120 bp, Artificial Sequence
  ENSG00000164073_49 (sequence is synthesized)
ctacatatatgtatatatatatatgattcaatctggtaattttaactcaatttaatacctgaccttgaagaaaaacctagtatattacaaaatctctgccttgtgcaggctttattgacc

SEQ ID NO: 506362 - DNA, 120 bp, Artificial Sequence
  ENSG00000164073_50 (sequence is synthesized)
tttatcatatggctgttttatttttaaaataactttccatgaaattataaaaatagtacattcaaatcccaaatattacaactgtatttctatatccactcctttctgtgaaagtaacca

SEQ ID NO: 506363 - DNA, 120 bp, Artificial Sequence
  ENSG00000164073_51 (sequence is synthesized)
gtgtgagccgaggagattcgctcccaacgtaggagaaagggcgtctggccgcaccgtgcggtgatgagcccgtgggttcgagtgacggggctggagaaacccaggctgctgctttgcctg

SEQ ID NO: 506364 - DNA, 70 bp, Artificial Sequence
  ENSG00000164073_52 (sequence is synthesized)
agtgacggggctggagaaacccaggctgctgctttgcctgttgcagcacccaacaggcctcctctgcctg

SEQ ID NO: 506365 - DNA, 120 bp, Artificial Sequence
  ENSG00000164073_53 (sequence is synthesized)
gggaggcgcgtgccgagggaggaggctgaggacacagcctcctttcgccctgcgctgcccggccttccgcgtgaccccgcctatgacctcggggcgttccgcctacgtctgaccgtcaga

SEQ ID NO: 506366 - DNA, 120 bp, Artificial Sequence
  ENSG00000164073_54 (sequence is synthesized)
agcctaaaaatttttttaaatgtttatttataaattttgctacaatgtaatttctacattactttaatgtcataagaaaaattagatgtataggtaatgtaatttttctcctatttccct

SEQ ID NO: 506367 - DNA, 120 bp, Artificial Sequence
  ENSG00000164073_55 (sequence is synthesized)
tattttgagaagaaattctgggcaccatttttgaccattgaagacttatttgtaatttaatttctactttacattgtgaatgttcattttctaataaacaagattattttgcatatgtac

SEQ ID NO: 506368 - DNA, 120 bp, Artificial Sequence
  ENSG00000164073_56 (sequence is synthesized)
ggcgcgctaagaggcgcggggagctcttagcgcacctactacttaaccggaccggctacttactggccgccaggtggaagcctgcgatcgagctggccgggcctcccagcaccgccgctc

SEQ ID NO: 506369 - DNA, 120 bp, Artificial Sequence
  ENSG00000164073_57 (sequence is synthesized)
tccaggctccctttccaggactcaactttggtcccagccccaatcgcagctccggtaacctttccaggaaccgaaatgctagatacagcggaaggagaaacggagggaggaagacaaacc

SEQ ID NO: 506370 - DNA, 120 bp, Artificial Sequence
  ENSG00000164073_58 (sequence is synthesized)
cggagcagggcggcgcggcagtttggacacgccccgagctctcctgggctctcagtccccgtcaggatgggaggcgcgtgccgagggaggaggctgaggacacagcctcctttcgccctg

SEQ ID NO: 506371 - DNA, 120 bp, Artificial Sequence
  ENSG00000164073_59 (sequence is synthesized)
cgctgcccggccttccgcgtgaccccgcctatgacctcggggcgttccgcctacgtctgaccgtcaggtgcgcacgcgcacttacaggcttgttttgccagcttcacgccacccgggatg

SEQ ID NO: 506372 - DNA, 120 bp, Artificial Sequence
  ENSG00000164073_60 (sequence is synthesized)
gagttctataaattacattcccatttttggattgagatataccaagtacaaaatacatctgagtatttcttaagataacaggattgaagtatatctctggggaagaaaattcaccttgct

SEQ ID NO: 506373 - DNA, 120 bp, Artificial Sequence
  ENSG00000164073_61 (sequence is synthesized)
ggaagaaaattcaccttgcttttaaatgccatttaaaaattatttctgtcatataaattatcttattgttggccatgcacagtggctcacacgtgtaatcccaacactttgggaggccaa

SEQ ID NO: 506374 - DNA, 87 bp, Artificial Sequence
  ENSG00000164073_62 (sequence is synthesized)
cactttgggaggccaaggcgggcggactggttgagctcaggagttcaagcccagactgggtagcatgatgaaacctgtggtagtaca

SEQ ID NO: 506375 - DNA, 120 bp, Artificial Sequence
  ENSG00000164073_63 (sequence is synthesized)
agtgctgggattacaggcatgaggccatgtgaggctgtgcccggcctcaaggtttggtcttgatttactaactacatgttgctaagtaggggaaaggcatggaagtaacattttaaatag

SEQ ID NO: 506376 - DNA, 120 bp, Artificial Sequence
  ENSG00000164073_64 (sequence is synthesized)
agtaggggaaaggcatggaagtaacattttaaatagattaatggatttgtatcagtcttaaatataaaagttactagtaatgtatatctcttatcttttatatattcgaaaaaatttttt

SEQ ID NO: 506377 - DNA, 120 bp, Artificial Sequence
  ENSG00000164073_65 (sequence is synthesized)
tagagtgctttattcaatagtctaaaaacatttattactaatgtttataatcactgtaaaacttcaaatactaaagtagatcatgtatgctttaggatgagttggatttttttcatttta

SEQ ID NO: 506378 - DNA, 120 bp, Artificial Sequence
  ENSG00000164073_66 (sequence is synthesized)
cctgtttatgataatttgataagaattgtaacttctgtcttaagtttattggttatatctcattggtaacagttttattactgaaaaaccaataaaagaaactatattagaatgtgaaaa

SEQ ID NO: 506379 - DNA, 120 bp, Artificial Sequence
  ENSG00000164073_67 (sequence is synthesized)
caatcttatgtcctatactctatattcaaaaattctaggaccaaaacctcaggcataacacctgtcatcgaaacttgtgaacattacaaatgatgtatttaaagcacctacctcagtgac

SEQ ID NO: 506380 - DNA, 87 bp, Artificial Sequence
  ENSG00000164073_68 (sequence is synthesized)
gattcaggaataaactagctaagactgtgatggaaactacttgctgtgtggcacttcctggtctaaagctctgctagacaattgcgg

SEQ ID NO: 506381 - DNA, 120 bp, Artificial Sequence
  ENSG00000164073_69 (sequence is synthesized)
ttattctgatccttgccatactaagacaagatcttactctgttgctcagactggagggcagtggcactatctcggctcaatgcaacctccatctcccggattcaaggattctcatacctc

SEQ ID NO: 506382 - DNA, 120 bp, Artificial Sequence
  ENSG00000164073_70 (sequence is synthesized)
gcagcaggctctgctgagtgacattttgcaaggctgaggcccccgtaggcgcaggcgccgttggggtgcgcatccggggacctgcaggttacaagcagcagatcccaccttcagtcctgg

SEQ ID NO: 506383 - DNA, 120 bp, Artificial Sequence
  ENSG00000164073_71 (sequence is synthesized)
cccccgtaggcgcaggcgccgttggggtgcgcatccggggacctgcaggttacaagcagcagatcccaccttcagtcctggctctgacaagccctccaggaaccgaaatgctagatacag

SEQ ID NO: 506384 - DNA, 120 bp, Artificial Sequence
  ENSG00000164073_72 (sequence is synthesized)
gcctggcaacagagcaagactccgtcccccccgccaaaaaaaaaaaaaaaaaatacctggcttattttgcaagtacagatgaagctcaggttccccaaggaaatattgaccaggttgctg

SEQ ID NO: 506385 - DNA, 120 bp, Artificial Sequence
  ENSG00000164074_0 (sequence is synthesized)
agcgcagggcgaaaggaggctgtgtcctcagcctcctccctcggcacgcgcctcccatcctgacggggactgagagcccaggagagctcggggcgtgtccaaactgccgcgccgccctgc

SEQ ID NO: 506386 - DNA, 120 bp, Artificial Sequence
  ENSG00000164074_1 (sequence is synthesized)
tccgggtttgtcttcctccctccgtttctccttccgctgtatctagcatttcggttcctggaaaggttaccggagctgcgattggggctgggaccaaagttgagtcctggaaagggagcc

SEQ ID NO: 506387 - DNA, 120 bp, Artificial Sequence
  ENSG00000164074_2 (sequence is synthesized)
tggagagcggcggtgctgggaggcccggccagctcgatcgcaggcttccacctggcggccaatgcttgtttgctactgatgggtgtgagcaagttagatattctataccggagacttctc

SEQ ID NO: 506388 - DNA, 120 bp, Artificial Sequence
  ENSG00000164074_3 (sequence is synthesized)
ctaacaaaactttttatcagaggatggggaaggccagaagatctcaaaagactctttgaattcagaaagatgattggaaatcgggaaagatgccagaatctggtttcaagcgattatcca

SEQ ID NO: 506389 - DNA, 120 bp, Artificial Sequence
  ENSG00000164074_4 (sequence is synthesized)
gtacacattgataagattgaagagcaatcagattgtaagatcttagatggacactttgtttcccccatggctcactatgtgcctgatatcatgccaattgaatctgttattgcaaggttc

SEQ ID NO: 506390 - DNA, 120 bp, Artificial Sequence
  ENSG00000164074_5 (sequence is synthesized)
caatttattgtgcctaaagaatggaacagcaaatatagacctgtatgcattcatcttgctggaacaggagatcatcattactggaggcgacgaacactaatggcccgtcctatgattaaa

SEQ ID NO: 506391 - DNA, 120 bp, Artificial Sequence
  ENSG00000164074_6 (sequence is synthesized)
gaagcccgaatggcttctttattgttagaaaacccttattatggctgcaggaaacccaaggaccaagtaaggtccagcttaaaaaatgtgtccgacctttttgtgatgggaggagctctt

SEQ ID NO: 506392 - DNA, 120 bp, Artificial Sequence
  ENSG00000164074_7 (sequence is synthesized)
gttttagaatctgcagctctcttgcactggctagagagggaaggttacggccctttaggaatgactggaatatccatgggaggacacatggcttccttagcggtatccaactggcctaag

SEQ ID NO: 506393 - DNA, 120 bp, Artificial Sequence
  ENSG00000164074_8 (sequence is synthesized)
cccatgccattgattccatgcctgtcttggtccacagcatctggggtcttcactacgggtgtgttgagtaaatcaattaattggagggagctggaaaagcaatattatacccagacagtt

SEQ ID NO: 506394 - DNA, 120 bp, Artificial Sequence
  ENSG00000164074_9 (sequence is synthesized)
tatgaagaagaaattattcacatgcttgaatactgtggaacagattctttcaaaatgggacaagagtttgtgaaacacttcactagcagtgcagacaagctaactaaccttaatctggtt

SEQ ID NO: 506395 - DNA, 120 bp, Artificial Sequence
  ENSG00000164074_10 (sequence is synthesized)
tccagaactttaaatttagatatatcaaaccaagttgtatcccaaaaacctgctgactgccataattctagcaaaacatctgtcagtgcgacatcagaaggactcttattgcaagatacc

SEQ ID NO: 506396 - DNA, 120 bp, Artificial Sequence
  ENSG00000164074_11 (sequence is synthesized)
tctaagatgaagcgcttcaatcaaacactttcaaccaacaaaagtggttatacaagtcgcaaccctcagtcataccacctacttagtaaagaacaaagcagaaacagtcttcggaaagag

SEQ ID NO: 506397 - DNA, 120 bp, Artificial Sequence
  ENSG00000164074_12 (sequence is synthesized)
tctttaatatttatgaaaggagtcatggatgaatgtactcatgtagcaaatttctcagtcccagttgatccaagcctcattatagtggttcaagccaaagaagatgcctatattccacga

SEQ ID NO: 506398 - DNA, 120 bp, Artificial Sequence
  ENSG00000164074_13 (sequence is synthesized)
acaggagttcgaagtttacaagaaatttggcctggttgtgaaatccgatacttagaagggggtcatattagtgcttatctttttaaacaaggactcttcagacaagccatctatgatgca

SEQ ID NO: 506399 - DNA, 120 bp, Artificial Sequence
  ENSG00000164074_14 (sequence is synthesized)
tttgaccgcttcctccataaatacgctaactagttggattattatatgtaaccagtgtggccatgatgtttcttacaaaagggagcttcatcctgtgatcatgtgaaggacaagcagaca

SEQ ID NO: 506400 - DNA, 120 bp, Artificial Sequence
  ENSG00000164074_15 (sequence is synthesized)
gcactaatatatctaatcgctatcaatttggtctggaattcattgttacacatcagttaactataaacttcgaatacatttgaataatttcaagataatatttgaagtaaataatgttaa

SEQ ID NO: 506401 - DNA, 120 bp, Artificial Sequence
  ENSG00000164074_16 (sequence is synthesized)
tttattggaatcccatatattcagtgtttagtctgttgttactgtttatgaaaaactaaatttttaatcatgaataatttattaaattaaataaatttattcatagaaacttttctgggt

SEQ ID NO: 506402 - DNA, 120 bp, Artificial Sequence
  ENSG00000164074_17 (sequence is synthesized)
agaaacttttctgggttttagtaaaattgctaaatcaaaccaagattttaatatatcagcatttactttgtacccttataacatttcactcttgacttgatttgagaaacatgtttattt

SEQ ID NO: 506403 - DNA, 120 bp, Artificial Sequence
  ENSG00000164074_18 (sequence is synthesized)
tttgaatgttcttgtgttcaactaattttctgctgtggaaataaatacttatgatatataaaatcagtgttaactttgaattctaaaatatcctgatagcttcatagataagtgcttttc

SEQ ID NO: 506404 - DNA, 120 bp, Artificial Sequence
  ENSG00000164074_19 (sequence is synthesized)
tagcttcatagataagtgcttttctttttcttttttttttcttttaacatgtacctctacttgaatgtaagtgcttttaataatcaaagtgagtggcagggtgcggtggctcacgcctgt

SEQ ID NO: 506405 - DNA, 82 bp, Artificial Sequence
  ENSG00000164074_20 (sequence is synthesized)
ggttgggagttcaagaccagcctgaccaatatagagaaaccccctctctactacataatcccagatactcaggaggcagagg

SEQ ID NO: 506406 - DNA, 61 bp, Artificial Sequence
  ENSG00000164074_21 (sequence is synthesized)
aattagccaagcatggtggcgcatgcctataatcccagtccgagatcacaccattgcactc

SEQ ID NO: 506407 - DNA, 120 bp, Artificial Sequence
  ENSG00000164074_22 (sequence is synthesized)
aataataaccaaaatgagtgttctgcagataaaatgcattagactttgctagactaaaactttactaaagattagggtttttaaaaaatgccaataggccgggtgcagtggctcatgcct

SEQ ID NO: 506408 - DNA, 120 bp, Artificial Sequence
  ENSG00000164074_23 (sequence is synthesized)
tctgtctcaaaacaaaacaaaatgccaaacttatttctccctactaaaaagtttcaattcacaaaaatggaaacattggaagacctgttgcattaactgacggagtgcagtggcatgatc

SEQ ID NO: 506409 - DNA, 82 bp, Artificial Sequence
  ENSG00000164074_24 (sequence is synthesized)
agacctgttgcattaactgacgcctctcaggttcaagcggttctcctgcctccacctgagtagctgagattacaggtgcccg

SEQ ID NO: 506410 - DNA, 69 bp, Artificial Sequence
  ENSG00000164074_25 (sequence is synthesized)
tgagccaccacacccgacctgacattttatttttatttttttaattacatttttctatatgcttattct

SEQ ID NO: 506411 - DNA, 120 bp, Artificial Sequence
  ENSG00000164074_26 (sequence is synthesized)
tttttatttttttaattacatttttctatatgcttattctttggattgctaaccatctaactacccaaatacttaacagccttggcttttaatttcaaaatttaatagacacatatgcaa

SEQ ID NO: 506412 - DNA, 120 bp, Artificial Sequence
  ENSG00000164074_27 (sequence is synthesized)
ttgatttgtcccatataaactttattttacagaaaatatttaaagttttatgtaatagctattaactctcttaaatggggtttatatggctcgatttggtgctttctttttatgttaaac

SEQ ID NO: 506413 - DNA, 120 bp, Artificial Sequence
  ENSG00000164074_28 (sequence is synthesized)
ttctctagctgtcagctaaaatgttaaaaaagtcgaaaatattttagggtattgtgtgaagttttacagtaggtatttttgagttttgtttgaaatctgtgttgtctgtgaattattttt

SEQ ID NO: 506414 - DNA, 120 bp, Artificial Sequence
  ENSG00000164074_29 (sequence is synthesized)
aaatagggattcttagtctactaacgatatttgaattataatgtgcctttgcagtctttttaaaggagatttcatttgtcacctctatgcctctatcatcttaattttttacaaatattt

SEQ ID NO: 506415 - DNA, 120 bp, Artificial Sequence
  ENSG00000164074_30 (sequence is synthesized)
aaaaattattaatgtgaagttattgatggtagacaaagtagtaacttctttcaaactactttggcataacaagccaacactgtacagctctttgagctataagcaattttacatgttcag

SEQ ID NO: 506416 - DNA, 120 bp, Artificial Sequence
  ENSG00000164074_31 (sequence is synthesized)
atgagaacctttagttttaaccaaaagtataacatctactaaagttcttccacaaaatactttttaaaataaaacttgtcaactgaattacgattttcttatattatgtatatagtgagg

SEQ ID NO: 506417 - DNA, 120 bp, Artificial Sequence
  ENSG00000164074_32 (sequence is synthesized)
ttatatgattgaatgctttttgaacaatggttttagtaaaacaaatactttattattgttcacataaacatttcttactaagcaataatgtactatgttgtgtgaatttctattgttaaa

SEQ ID NO: 506418 - DNA, 120 bp, Artificial Sequence
  ENSG00000164074_33 (sequence is synthesized)
aaaatgaaatgttgatttagttttaattcttaggcataactaacttttctcaaataaagtgtgaaagaaagtatttttaaaatttcatctcttaaccagatgttttaagaatatatccct

SEQ ID NO: 506419 - DNA, 89 bp, Artificial Sequence
  ENSG00000164074_34 (sequence is synthesized)
tatatatatccctaaaactacctcagttgaagaattcaaagtgcaaaataacttttcttaggattttttaatctattccccccaaaatg

SEQ ID NO: 506420 - DNA, 120 bp, Artificial Sequence
  ENSG00000164074_35 (sequence is synthesized)
aacttttcttaggattttttaatctattccccccaaaatggtggcttaagtgttctcaaatacataaatatacacatatacgtatatgtatacgttttatatatatatacacacacacgt

SEQ ID NO: 506421 - DNA, 80 bp, Artificial Sequence
  ENSG00000164074_36 (sequence is synthesized)
tatatatatatatatatatataatctcaaagaagtgcggtctgccatttatctgccattttgaggatttaggtactacat

SEQ ID NO: 506422 - DNA, 120 bp, Artificial Sequence
  ENSG00000164074_37 (sequence is synthesized)
catttatctgccattttgaggatttaggtactacataaaatattagaaattcatttagaccagatctgtaaactggtagttcacataggccagtttgacccacagttattttattagatg

SEQ ID NO: 506423 - DNA, 120 bp, Artificial Sequence
  ENSG00000164074_38 (sequence is synthesized)
tacataatgtttcaaaaatgtttgaatttgaaaagtcttttgattgggtgtgtgttccccagtttgccacagcctactggacttccctcttatatcagacaacttctctactttgtagtt

SEQ ID NO: 506424 - DNA, 120 bp, Artificial Sequence
  ENSG00000164074_39 (sequence is synthesized)
cctgctcagccctgaagacctctaagtttgagacccctgatttagatctgtaattagaaaaaggttctgaatttcatgatttgctaatgtaattactattaagtcattttagcatgtgca

SEQ ID NO: 506425 - DNA, 120 bp, Artificial Sequence
  ENSG00000164074_40 (sequence is synthesized)
ttttagagtccttctttgtatttttgtaatgtggtgctttctctcataaagataattgaattgttaacactgtaattgaaattttaaaaatcatttccaaatcttttattatatttcaca

SEQ ID NO: 506426 - DNA, 120 bp, Artificial Sequence
  ENSG00000164074_41 (sequence is synthesized)
gtaaaagtctatttaaaaagctaatcatttgtgctttttttcaagaggtattattgtaaatacggtagacacatgtcacatttgattaatgtacccaaacttgaactgagtgtatatgtt

SEQ ID NO: 506427 - DNA, 120 bp, Artificial Sequence
  ENSG00000164074_42 (sequence is synthesized)
ccctctttgttattatgccctaaacaaggtaagacagaaataagcaagggaggctctagcagaacagtatcagtatctctataaaaataaccaaaattttccccaaatatgtgtgatctg

SEQ ID NO: 506428 - DNA, 120 bp, Artificial Sequence
  ENSG00000164074_43 (sequence is synthesized)
tctaaacatgtattcgttcatttgttgtttgttttctggattttttgcttcaacaaatgtaaaagatcacatatttttatagtctgtttcaatctttgaattccctcctcacctcccaca

SEQ ID NO: 506429 - DNA, 120 bp, Artificial Sequence
  ENSG00000164074_44 (sequence is synthesized)
cctagaatttgatcttcttattttcttctagagaactaagcatgatgcatattataggcatgctttatcgtgtggctttcccctcttcaaatattaatggccaggtattttaggatgtga

SEQ ID NO: 506430 - DNA, 120 bp, Artificial Sequence
  ENSG00000164074_45 (sequence is synthesized)
gaaggaagatcatggcttgttaaagttgctttggtgcatcaagagttttttcactctattctgatgttttttcagaatggcctgaacatctgtggaataatttagcaatgtttttcagtt

SEQ ID NO: 506431 - DNA, 120 bp, Artificial Sequence
  ENSG00000164074_46 (sequence is synthesized)
agcaagtgaatattgaaccttaaataagaagtgcttttaatgtgaacaaccttatatgactccactattttagttagaacttataaaaacttttatgctggctgggcgcggtggcttacg

SEQ ID NO: 506432 - DNA, 120 bp, Artificial Sequence
  ENSG00000164074_47 (sequence is synthesized)
cacctggcggccagtccccggatgcgcaccccaacggcgcctgcgcctacgggggcctcagccttgcaaaatgtcactcagcagagcctgctgctgaaacgtgggagttgaaaaagatgc

SEQ ID NO: 506433 - DNA, 120 bp, Artificial Sequence
  ENSG00000164076_0 (sequence is synthesized)
gatgctggaggttcgctagccgaagcggctgcatctggcgccgcgtctgccccgcgtgctcggagcggattctgcccgccgtccccggagccctcggcgccccgctgagcccgcgatcac

SEQ ID NO: 506434 - DNA, 120 bp, Artificial Sequence
  ENSG00000164076_1 (sequence is synthesized)
ttcctccctgtgaccaaccggcgctgcaggttagagcctggcaatgccgtttgggtgtgtgactctgggcgacaagaagaactataaccagccatcggaggtgactgacagatatgattt

SEQ ID NO: 506435 - DNA, 120 bp, Artificial Sequence
  ENSG00000164076_2 (sequence is synthesized)
gggacaggtcatcaagactgaggagttttgtgaaatcttccgggccaaggacaagacgacaggcaagctgcacacctgcaagaagttccagaagcgggacggccgcaaggtgcggaaagc

SEQ ID NO: 506436 - DNA, 120 bp, Artificial Sequence
  ENSG00000164076_3 (sequence is synthesized)
tgccaagaacgagataggcatcctcaagatggtgaagcatcccaacatcctacagctggtggatgtgtttgtgacccgcaaggagtactttatcttcctggagctggccacggggaggga

SEQ ID NO: 506437 - DNA, 120 bp, Artificial Sequence
  ENSG00000164076_4 (sequence is synthesized)
ggtgtttgactggatcctggaccagggctactactcggagcgagacacaagcaacgtggtacggcaagtcctggaggccgtggcctatttgcactcactcaagatcgtgcacaggaatct

SEQ ID NO: 506438 - DNA, 120 bp, Artificial Sequence
  ENSG00000164076_5 (sequence is synthesized)
caagctggagaacctggtttactacaaccggctgaagaactcgaagattgtcatcagtgacttccatctggctaagctagaaaatggcctcatcaaggagccctgtgggacccccgagta

SEQ ID NO: 506439 - DNA, 120 bp, Artificial Sequence
  ENSG00000164076_6 (sequence is synthesized)
tctggccccagaggtggtaggccggcagcggtatggacgccctgtggactgctgggccattggagtcatcatgtacatcctgctttcaggcaatccacctttctatgaggaggtggaaga

SEQ ID NO: 506440 - DNA, 120 bp, Artificial Sequence
  ENSG00000164076_7 (sequence is synthesized)
agatgattatgagaaccatgataagaatctcttccgcaagatcctggctggtgactatgagtttgactctccatattgggatgatatttcgcaggcagccaaagacctggtcacaaggct

SEQ ID NO: 506441 - DNA, 120 bp, Artificial Sequence
  ENSG00000164076_8 (sequence is synthesized)
gatggaggtggagcaagaccagcggatcactgcagaagaggccatctcccatgagtggatttctggcaatgctgcttctgataagaacatcaaggatggtgtctgtgcccagattgaaaa

SEQ ID NO: 506442 - DNA, 120 bp, Artificial Sequence
  ENSG00000164076_9 (sequence is synthesized)
gaactttgccagggccaagtggaagaaggctgtccgagtgaccaccctcatgaaacggctccgggcaccagagcagtccagcacggctgcagcccagtcggcctcagccacagacactgc

SEQ ID NO: 506443 - DNA, 120 bp, Artificial Sequence
  ENSG00000164076_10 (sequence is synthesized)
cacccccggggctgcaggtggggccacagctgcagctgcgagtggagctacctcagcccctgagggtgatgctgctcgtgctgcaaagagtgataatgtggcccccgcagaccgtagtgc

SEQ ID NO: 506444 - DNA, 120 bp, Artificial Sequence
  ENSG00000164076_11 (sequence is synthesized)
caccccagccacagatggaagtgccaccccagccactgatggcagtgtcaccccagccaccgatggaagcatcactccagccactgatgggagtgtcaccccagccactgacaggagcgc

SEQ ID NO: 506445 - DNA, 120 bp, Artificial Sequence
  ENSG00000164076_12 (sequence is synthesized)
cagccggacagcacagccccagagggcgccacaggccaggctccaccctctagtaaaggggaagaggctgctggttatgcccaggagtctcaaagggaggaggccagctgagtaggcagc

SEQ ID NO: 506446 - DNA, 120 bp, Artificial Sequence
  ENSG00000164076_13 (sequence is synthesized)
ctggtgagggggggcaggggatgggcaggagggtgggagagtggatgaggggcttctcactgtacatagagtcactggcatgatgccctcgctcccccatgcccccacatcccagtgggg

SEQ ID NO: 506447 - DNA, 120 bp, Artificial Sequence
  ENSG00000164076_14 (sequence is synthesized)
cataactaggggtcacgggagagcagtctcgtctcctgtgtgtatgtgtgtgagtggtgggcaggccagtggcagggccggccccagcccctgcatggattccttgtggcttttctgtct

SEQ ID NO: 506448 - DNA, 120 bp, Artificial Sequence
  ENSG00000164076_15 (sequence is synthesized)
tttgctagcttcaccagtttctgttccttgtgggatgctgctctagggatactcagggggctcctgctctccttccccttcccttcttgcctcaccattcccctaggcaggccctgcagg

SEQ ID NO: 506449 - DNA, 120 bp, Artificial Sequence
  ENSG00000164076_16 (sequence is synthesized)
tcccacactctcccaggccctaaacttgggcggccttgccctgagagctggtcctccagcgaggccctgtcagcggtcttaggctcctgcacatgaaggtgtgtgcctgtggtgtgtggg

SEQ ID NO: 506450 - DNA, 120 bp, Artificial Sequence
  ENSG00000164076_17 (sequence is synthesized)
ctgctctaggagcagatacaggctggtatagaggatgcagaaaggtagggcagtatgtttaagtccagacttggcacatggctagggatactgctcactagctgtggaggtcctcaggag

SEQ ID NO: 506451 - DNA, 120 bp, Artificial Sequence
  ENSG00000164076_18 (sequence is synthesized)
tggagagaatgagtaggagggcagaagcttccatttttgtccttcctaagaccctgttatttgtgttatttcctgcctttccgagtcctgcagtgggctgccctgtaccctgaacctcat

SEQ ID NO: 506452 - DNA, 120 bp, Artificial Sequence
  ENSG00000164076_19 (sequence is synthesized)
gagcctctaagggaaaggaggaacaattaggacgtggcaatgagacctggcagggcagagtacaagcccagcacccagtgtcccagccttactgggtccttaccctgggccaaacaggga

SEQ ID NO: 506453 - DNA, 120 bp, Artificial Sequence
  ENSG00000164076_20 (sequence is synthesized)
gggctgatacctccttgctcttcctagatgcccacctcctacaatctcagcccacaagtcctctccaccctagggggcttgctgcatggcaataactcataatctgatttggaggtttgc

SEQ ID NO: 506454 - DNA, 120 bp, Artificial Sequence
  ENSG00000164076_21 (sequence is synthesized)
cctttacaggggcagattttctgctcagttcaacaatgaaatgaagaggaactccctctttctacagctcacttctatcagaggcccaggtgcctcagagccacattgagttgctttttc

SEQ ID NO: 506455 - DNA, 120 bp, Artificial Sequence
  ENSG00000164076_22 (sequence is synthesized)
tgggatgaggaagtagggttaaactccccagtttcctgagggaggctcctgacaggtgccctttgtcagaccctaccacagcctggataggcagccacattggtcctcgcccttgctcgg

SEQ ID NO: 506456 - DNA, 120 bp, Artificial Sequence
  ENSG00000164076_23 (sequence is synthesized)
cactccgtggtggtcctgcccttctccctgcatgcctgtgggtctgctctggtgtgtgaaggtcggtgggttaactgtgtgcctactgaacctggcaaataaacatcaccctgcaaagcc

SEQ ID NO: 506457 - DNA, 120 bp, Artificial Sequence
  ENSG00000164076_24 (sequence is synthesized)
gggctttcacctgtcccaccctctgcagctaaggaaaccccctttctggacccttggcgtcccaggtccctgtgccttgctcagccagctgcctggcgtaggcagctcacccaagtgctc

SEQ ID NO: 506458 - DNA, 120 bp, Artificial Sequence
  ENSG00000164076_25 (sequence is synthesized)
ttgtagccccagaggtggtaggccggcagcggtatggacgccctgtggactgctgggccattggagtcatcatgtacatcctgtgagtggacagatggacaagcaggcttgcagtcagat

SEQ ID NO: 506459 - DNA, 120 bp, Artificial Sequence
  ENSG00000164076_26 (sequence is synthesized)
gggcaagcagggggtggggcaggggcagggggataatggggggcagccttcagggagctgctctgggcagggggaaaatgtgctcatctcaggaagctggtgtggatggtactggacctg

SEQ ID NO: 506460 - DNA, 120 bp, Artificial Sequence
  ENSG00000164077_0 (sequence is synthesized)
gggggcctccagccatcaacgctatcgtttgcaatgggaagactgtgtctccctgcggtccctcagccggctagtccccagctggggaatacaaaaggcgagatctggaacccatccttt

SEQ ID NO: 506461 - DNA, 120 bp, Artificial Sequence
  ENSG00000164077_1 (sequence is synthesized)
agatctggaacccatcctttggctgggagggcgagatccggtagggggcagtggccagagtctcgctctgccacccagcctggagtacaacgacacgattttggctcactgcaacctctg

SEQ ID NO: 506462 - DNA, 79 bp, Artificial Sequence
  ENSG00000164077_2 (sequence is synthesized)
ctgcaacctctgcctctccaactacagtaaagatggggtttcaccaggttagccaggctggtctcaaacttctgacctc

SEQ ID NO: 506463 - DNA, 120 bp, Artificial Sequence
  ENSG00000164077_3 (sequence is synthesized)
gggattacaggagagctcaaaggatggctactgacatgcagaggaagagaagcagcgaatgccttgatggcacattgactccttctgatggacagagtatggagagagctgagagcccca

SEQ ID NO: 506464 - DNA, 120 bp, Artificial Sequence
  ENSG00000164077_4 (sequence is synthesized)
caccaggaatggcccagggaatggagccaggtgcgggccaggagggtgccatgttcgtccatgcccgttcctacgaggacctgactgagtcagaggatggggcagcttctggggacagcc

SEQ ID NO: 506465 - DNA, 120 bp, Artificial Sequence
  ENSG00000164077_5 (sequence is synthesized)
acaaggagggtaccaggggtcccccgccgctgcctacagacatgcgccagatcagccaggactttagcgagctaagcacccagctgacgggtgtggcccgggacctgcaggaggagatgc

SEQ ID NO: 506466 - DNA, 120 bp, Artificial Sequence
  ENSG00000164077_6 (sequence is synthesized)
tgccaggaagctctgaggattggctggaacccccaggggcagttgggcgaccagccacagagccccccagggagggcacaaccgagggggatgaggaggatgccacggaggcatggcgcc

SEQ ID NO: 506467 - DNA, 120 bp, Artificial Sequence
  ENSG00000164077_7 (sequence is synthesized)
tgcaccagaagcatgtctttgtgctgagtgaggcagggaagcctgtgtactcccgctatgggtctgaggaggcactttccagcactatgggtgttatggtggccctggtgtccttcctgg

SEQ ID NO: 506468 - DNA, 120 bp, Artificial Sequence
  ENSG00000164077_8 (sequence is synthesized)
aggcagacaagaacgccatccgctccatccatgcagatggctacaaggtagtattcgtgcgccggagcccgctggtgctagtggcggtggctcgtacgcggcagtcggcacaagagctgg

SEQ ID NO: 506469 - DNA, 120 bp, Artificial Sequence
  ENSG00000164077_9 (sequence is synthesized)
cgcaggagctgctctacatctactaccagatcctaagccttcttaccggtgcgcagctgagccacatcttccagcagaagcagaactatgatttgcggcgcctactctcgggctcagagc

SEQ ID NO: 506470 - DNA, 120 bp, Artificial Sequence
  ENSG00000164077_10 (sequence is synthesized)
gcatcaccgacaacctgctgcagctcatggcacgagaccccagcttcctgatgggggcggcacggtgcctgcccctggcggcggccgtgcgcgacactgtgagcgccagcctgcagcagg

SEQ ID NO: 506471 - DNA, 120 bp, Artificial Sequence
  ENSG00000164077_11 (sequence is synthesized)
cgcgtgcgcgcagcctggtcttctccatcctgctggcccgcaaccagctcgtggcactcgtgcgccgaaaggaccaatttctgcaccccatcgacctgcacctgctcttcaacctcatta

SEQ ID NO: 506472 - DNA, 120 bp, Artificial Sequence
  ENSG00000164077_12 (sequence is synthesized)
gttcctcctcgtcctttcgcgagggcgaggcctggacgcccgtgtgcctgcccaaattcaacgcagccggcttcttccacgcacacatctcttacctagagcctgacactgacctctgcc

SEQ ID NO: 506473 - DNA, 120 bp, Artificial Sequence
  ENSG00000164077_13 (sequence is synthesized)
tgctgcttgtctccactgaccgtgaggacttctttgcagtctctgactgccgccgccgcttccaggagcgccttcgcaagcgcggagcccacctggccctgcgagaggcactgcgcacac

SEQ ID NO: 506474 - DNA, 120 bp, Artificial Sequence
  ENSG00000164077_14 (sequence is synthesized)
cctactacagcgttgcccaagtgggcatccctgacctgcgtcacttcctctataagtcaaagagctcgggactcttcaccagccctgagattgaggccccatacaccagtgaagaggagc

SEQ ID NO: 506475 - DNA, 120 bp, Artificial Sequence
  ENSG00000164077_15 (sequence is synthesized)
aggagcggctgctgggcctctaccagtacttgcacagtcgtgcccacaatgcctctcgcccactcaagaccatttactacacgggccccaacgagaacctcctggcctgggtgacaggcg

SEQ ID NO: 506476 - DNA, 120 bp, Artificial Sequence
  ENSG00000164077_16 (sequence is synthesized)
aagctgatgcgctggatccgcaaagaggaagaccgcctcttcattctcacgcccctcacctattgatgggaatgtgtgcgggctcagccttcctggacacactaggtgtgggaagccata

SEQ ID NO: 506477 - DNA, 120 bp, Artificial Sequence
  ENSG00000164077_17 (sequence is synthesized)
ggagcctccagatgggggctggcctctcttgcccagccagcgggcagggactgtgggttggtgaatgcattaaagtgctttggggaagacacttgtcaagctctgtcacttgtcccttcg

SEQ ID NO: 506478 - DNA, 120 bp, Artificial Sequence
  ENSG00000164077_18 (sequence is synthesized)
cccatccaccctcactcacatacagacactggatcctcctccgtagctcctgcacagggacacaggcacatttgagcccctctcctccctcccttgcaccagcatgaggccacacacatt

SEQ ID NO: 506479 - DNA, 120 bp, Artificial Sequence
  ENSG00000164077_19 (sequence is synthesized)
ctcagctggatcttgggctggggccgttttggtttagttgaagtcctaccatatataaaaagttctcaggcaccatactgccctaccctacccccacccccatattcagtctgagcttct

SEQ ID NO: 506480 - DNA, 120 bp, Artificial Sequence
  ENSG00000164077_20 (sequence is synthesized)
gctgtctgcctctcttatcactcctgggaggggccccctgctgcatgccacaaaagactactcaaccaccttcagagccctcgctgtggctctgtttaatgggttgctgtagttcagcag

SEQ ID NO: 506481 - DNA, 120 bp, Artificial Sequence
  ENSG00000164077_21 (sequence is synthesized)
aagctgagttgagtaagatacagatggtcaaaatggggggagtctgagccctggtactggatggagcccctggtgaggcaacccagtcttcagctgaaattcagaatccagtctcccttt

SEQ ID NO: 506482 - DNA, 120 bp, Artificial Sequence
  ENSG00000164077_22 (sequence is synthesized)
agctgcaggcctctgaggaaactgtccctgctcaggccttcccatgaagggctgtatgcctcagttctcctacctcagccagtgcattcctccaaatggtcctcaagagtgagctgaggg

SEQ ID NO: 506483 - DNA, 120 bp, Artificial Sequence
  ENSG00000164077_23 (sequence is synthesized)
tctgagagaaggcccagttgaccctctaaggcagaagtgggcctgccataataagagctaatactgctacgtgcactcggccctccttagtcaccctagtccctggcatggcataggcag

SEQ ID NO: 506484 - DNA, 120 bp, Artificial Sequence
  ENSG00000164077_24 (sequence is synthesized)
acctgcatggggcaccatggacatccaggaggctcggcagtgaaagcccagccccatttactctaccacaggacccagggcacaatgcagagagcttccactttgctgccgggggatctt

SEQ ID NO: 506485 - DNA, 120 bp, Artificial Sequence
  ENSG00000164077_25 (sequence is synthesized)
ctagttctggccccagggaacacaaggcctaggaagtacttattggagaaaactgtcctctgaatgtggtcttcagactgtcagagagaatcaccctcatgcagtttctgagagttgagc

SEQ ID NO: 506486 - DNA, 120 bp, Artificial Sequence
  ENSG00000164077_26 (sequence is synthesized)
caatattttctgctactaaaatcaagccatattgaagaatgagcctgtgtgggtgacatggacccagggtacactggaacagttgtatttattgtcccagaaaatggcagcacagcccct

SEQ ID NO: 506487 - DNA, 120 bp, Artificial Sequence
  ENSG00000164077_27 (sequence is synthesized)
gcccttggccccactgtggctcacattggaatgggcatggcagcaggctaccagcccagattccaaagcctccggggagcagccataggcttggtgggtgctgttcaccctgcacacatg

SEQ ID NO: 506488 - DNA, 120 bp, Artificial Sequence
  ENSG00000164077_28 (sequence is synthesized)
ccctgggtctcttttatgcctgttttctgcttttgttcctcccctgctcctagtaagaacaccaaaccactgcctctggggcctgggtgatgccaagccagctgtccctgattgttactg

SEQ ID NO: 506489 - DNA, 120 bp, Artificial Sequence
  ENSG00000164077_29 (sequence is synthesized)
gcattctggtcaacagtgagcccctaagtgcctcttttggttgccctgactcttgtaggtttctcagcttctgtgtagttcagcatatattctggggagatcatagttggataaatgtgt

SEQ ID NO: 506490 - DNA, 120 bp, Artificial Sequence
  ENSG00000164077_30 (sequence is synthesized)
atacctaggactataggcacctaggagtgtggggtgtacctgcttggagatcaggggtgggaagacagacaaatagggaaggtgttcgtagtggaagagccagcatgtgcaaagggaagg

SEQ ID NO: 506491 - DNA, 65 bp, Artificial Sequence
  ENSG00000164077_31 (sequence is synthesized)
ggtgttcgtagtggaagagccagcatgtgcaaagggaaggacctggtaagaacctagtattgtat

SEQ ID NO: 506492 - DNA, 120 bp, Artificial Sequence
  ENSG00000164077_32 (sequence is synthesized)
agttgactgccagcccacgtggcctggaggcacctagagactggagagctgtcatctttggagggaggggcttgaagacgggggcctccagccatcaacgctatcgtttgcaatgggaag

SEQ ID NO: 506493 - DNA, 120 bp, Artificial Sequence
  ENSG00000164077_33 (sequence is synthesized)
aatgcaccccgggggcgggccgagtcgggctgagcggctggagctgggccttggccgcgagaggccggcgaaagctatcttcctgcaccggcggccgggtgagggcggtgggagggagcg

SEQ ID NO: 506494 - DNA, 120 bp, Artificial Sequence
  ENSG00000164077_34 (sequence is synthesized)
gtgcctgcgctgtggccatgtctgtgtacgcagggggccggggccccgcgaagctgtgccctcaggccggccccggccggacacccttacccctccatgggtccggcagagggcagtgac

SEQ ID NO: 506495 - DNA, 120 bp, Artificial Sequence
  ENSG00000164077_35 (sequence is synthesized)
gattcccaaccactttttcctttccacttattcatgcatttgtcagtcactcattggatatttgtcaggttctggggataaggcaggaggccaggctcattctgcatctggctttcctct

SEQ ID NO: 506496 - DNA, 120 bp, Artificial Sequence
  ENSG00000164077_36 (sequence is synthesized)
attgtgggctcttctgttccctgtgtctacagcgcacctccccggctccttctcccctcctcacgagttaggcctgctctgaccatgctctgtatagcacactaattatttcataatttt

SEQ ID NO: 506497 - DNA, 120 bp, Artificial Sequence
  ENSG00000164077_37 (sequence is synthesized)
atctctttatgcatatattgcccatctctctcttccacaagattgtgaacactttgagcgcagagcagttatatccccagtgcctggtacagggctgaattcgcaagagagactcaaaat

SEQ ID NO: 506498 - DNA, 120 bp, Artificial Sequence
  ENSG00000164077_38 (sequence is synthesized)
atatctgttaaactattttgtcaaaaaatcaataaaggaagactgacctggtccctgccctgaggcagtcacaggctgcggcgccattatagtggggtcagtcaggagctatggcctgag

SEQ ID NO: 506499 - DNA, 120 bp, Artificial Sequence
  ENSG00000164077_39 (sequence is synthesized)
tagggtaggggagctttctcccagagagagagattcattgagtatgggcagtgctccagacacagggtgaggtgctgcgttccggcaccttactgggtaccattgtagttggggagaagg

SEQ ID NO: 506500 - DNA, 120 bp, Artificial Sequence
  ENSG00000164077_40 (sequence is synthesized)
acaataactggcaagtgccacaagagaaatcaaaaagggatatatagagtgcctggggttggaggtcagtaactaacatcttccctgagagcttaagtgtgacaattagccggcctcttg

SEQ ID NO: 506501 - DNA, 120 bp, Artificial Sequence
  ENSG00000164077_41 (sequence is synthesized)
tgtggagtcgggaggctgtttggtcctgagctctgagatgtagccctgaagctgtccctacctttggaagcagaccagtgtgctgggcctgttttactctggcaccagagacccagactc

SEQ ID NO: 506502 - DNA, 120 bp, Artificial Sequence
  ENSG00000164077_42 (sequence is synthesized)
tccatcaccccatgagcataccctctctactttattaaccagaaggcctggaaatgcccaatatacccagagaaggaaactggaacagaggtctccggggtcccttgccctggagcaact

SEQ ID NO: 506503 - DNA, 120 bp, Artificial Sequence
  ENSG00000164077_43 (sequence is synthesized)
ctactttaggggtcattttggtccagctcaggaagcacagccctcctccaccccctcccccagcagaggggctgggaagatatggcctccctttgtcccttttggcccacaggattccta

SEQ ID NO: 506504 - DNA, 120 bp, Artificial Sequence
  ENSG00000164077_44 (sequence is synthesized)
gctcacctttcctctactccagatctgtcactctgtcttggacatctaaactcaacctggcctctccaaagaggggtcaccaaagacactatgagcttagggggtaagaggggacatagc

SEQ ID NO: 506505 - DNA, 120 bp, Artificial Sequence
  ENSG00000164077_45 (sequence is synthesized)
tctagtctcagtgggcccagccctgtcctggggtgcctgctatggtggggagacaatgccctgtcctaagggagcacctggagggtaggacataagatagagtcttcctggataggaata

SEQ ID NO: 506506 - DNA, 120 bp, Artificial Sequence
  ENSG00000164077_46 (sequence is synthesized)
gggctgggctttatggaggtcctaggtatgggccatgaggggcctctaacctagatgacgaccctttgccccttctccaggtgacaggcgcctttgagctctacatgtgttacagccccc

SEQ ID NO: 506507 - DNA, 120 bp, Artificial Sequence
  ENSG00000164077_47 (sequence is synthesized)
gggagaaacaatcctaacgtccctttctctcacttgaaatgaactgctagctggctcggacggagaggcccagagtccagggctgttctgtgtgggactctagactcggaggaggcgccc

SEQ ID NO: 506508 - DNA, 120 bp, Artificial Sequence
  ENSG00000164077_48 (sequence is synthesized)
aggcccctagaaggcggcgccggatgaggcaatcgcggacccgggtcaggacctgcccacggctctgctgggactaggagcccagaaccagtccctcggcgccgcaggcggccaaacgct

SEQ ID NO: 506509 - DNA, 120 bp, Artificial Sequence
  ENSG00000164078_0 (sequence is synthesized)
agtgtacagcggcggctggggcggcaggtgaggcggctggggcgttgctgtcgtgcgtccgcaggcgtcaggtgctcagacccgagggccgggaagggatttgggtttcacaggaacctg

SEQ ID NO: 506510 - DNA, 120 bp, Artificial Sequence
  ENSG00000164078_1 (sequence is synthesized)
gggcgggggtccgctatcttggggctgtcgggaccgctgcttaaatttggcccagtccagacctcgagtcgggcccccagccaggcccacgcccaggtccaggcccaggccggtagggat

SEQ ID NO: 506511 - DNA, 120 bp, Artificial Sequence
  ENSG00000164078_2 (sequence is synthesized)
cctctagggtcccagctcgcctcgatggagctcctcccgccgctgcctcagtccttcctgttgctgctgctgttgcctgccaagcccgcggcgggcgaggactggcagtgcccgcgcacc

SEQ ID NO: 506512 - DNA, 120 bp, Artificial Sequence
  ENSG00000164078_3 (sequence is synthesized)
ccctacgcggcctctcgcgactttgacgtgaagtacgtggtgcccagcttctccgccggaggcctggtacaggccatggtgacctacgagggcgacagaaatgagagtgctgtgtttgta

SEQ ID NO: 506513 - DNA, 120 bp, Artificial Sequence
  ENSG00000164078_4 (sequence is synthesized)
gccatacgcaatcgcctgcatgtgcttgggcctgacctgaagtctgtccagagcctggccacgggccctgctggagaccctggctgccagacgtgtgcagcctgtggcccaggaccccac

SEQ ID NO: 506514 - DNA, 120 bp, Artificial Sequence
  ENSG00000164078_5 (sequence is synthesized)
ggccctcccggtgacacagacacaaaggtgctggtgctggatcccgcgctgcctgcgctggtcagttgtggctccagcctgcagggccgctgcttcctgcatgacctagagccccaaggg

SEQ ID NO: 506515 - DNA, 120 bp, Artificial Sequence
  ENSG00000164078_6 (sequence is synthesized)
acagccgtgcatctggcagcgccagcctgcctcttctcagcccaccataaccggcccgatgactgccccgactgtgtggccagcccattgggcacccgtgtaactgtggttgagcaaggc

SEQ ID NO: 506516 - DNA, 120 bp, Artificial Sequence
  ENSG00000164078_7 (sequence is synthesized)
caggcctcctatttctacgtggcatcctcactggacgcagccgtggctgccagcttcagcccacgctcagtgtctatcaggcgtctcaaggctgacgcctcgggattcgcaccgggcttt

SEQ ID NO: 506517 - DNA, 120 bp, Artificial Sequence
  ENSG00000164078_8 (sequence is synthesized)
gtggcgttgtcagtgctgcccaagcatcttgtctcctacagtattgaatacgtgcacagcttccacacgggagccttcgtatacttcctgactgtacagccggccagcgtgacagatgat

SEQ ID NO: 506518 - DNA, 120 bp, Artificial Sequence
  ENSG00000164078_9 (sequence is synthesized)
cctagtgccctgcacacacgcctggcacggcttagcgccactgagccagagttgggtgactatcgggagctggtcctcgactgcagatttgctccaaaacgcaggcgccggggggcccca

SEQ ID NO: 506519 - DNA, 120 bp, Artificial Sequence
  ENSG00000164078_10 (sequence is synthesized)
gaaggcggacagccctaccctgtgctgcgggtggcccactccgctccagtgggtgcccaacttgccactgagctgagcatcgccgagggccaggaagtactatttggggtctttgtgact

SEQ ID NO: 506520 - DNA, 120 bp, Artificial Sequence
  ENSG00000164078_11 (sequence is synthesized)
ggcaaggatggtggtcctggcgtgggccccaactctgtcgtctgtgccttccccattgacctgctggacacactaattgatgagggtgtggagcgctgttgtgaatccccagtccatcca

SEQ ID NO: 506521 - DNA, 120 bp, Artificial Sequence
  ENSG00000164078_12 (sequence is synthesized)
ggcctccggcgaggcctcgacttcttccagtcgcccagtttttgccccaacccgcctggcctggaagccctcagccccaacaccagctgccgccacttccctctgctggtcagtagcagc

SEQ ID NO: 506522 - DNA, 120 bp, Artificial Sequence
  ENSG00000164078_13 (sequence is synthesized)
ttctcacgtgtggacctattcaatgggctgttgggaccagtacaggtcactgcattgtatgtgacacgccttgacaacgtcacagtggcacacatgggcacaatggatgggcgtatcctg

SEQ ID NO: 506523 - DNA, 120 bp, Artificial Sequence
  ENSG00000164078_14 (sequence is synthesized)
caggtggagctggtcaggtcactaaactacttgctgtatgtgtccaacttctcactgggtgacagtgggcagcccgtgcagcgggatgtcagtcgtcttggggaccacctactctttgcc

SEQ ID NO: 506524 - DNA, 120 bp, Artificial Sequence
  ENSG00000164078_15 (sequence is synthesized)
tctggggaccaggttttccaggtacctatccaaggccctggctgccgccacttcctgacctgtgggcgttgcctaagggcatggcatttcatgggctgtggctggtgtgggaacatgtgc

SEQ ID NO: 506525 - DNA, 120 bp, Artificial Sequence
  ENSG00000164078_16 (sequence is synthesized)
ggccagcagaaggagtgtcctggctcctggcaacaggaccactgcccacctaagcttactgagttccacccccacagtggacctctaaggggcagtacaaggctgaccctgtgtggctcc

SEQ ID NO: 506526 - DNA, 120 bp, Artificial Sequence
  ENSG00000164078_17 (sequence is synthesized)
aacttctaccttcacccttctggtctggtgcctgagggaacccatcaggtcactgtgggccaaagtccctgccggccactgcccaaggacagctcaaaactcagaccagtgccccggaaa

SEQ ID NO: 506527 - DNA, 120 bp, Artificial Sequence
  ENSG00000164078_18 (sequence is synthesized)
gactttgtagaggagtttgagtgtgaactggagcccttgggcacccaggcagtggggcctaccaacgtcagcctcaccgtgactaacatgccaccgggcaagcacttccgggtagacggc

SEQ ID NO: 506528 - DNA, 120 bp, Artificial Sequence
  ENSG00000164078_19 (sequence is synthesized)
tcttgaaggccagagtctgtctgtaggcaccagccgggctgtgctggtcaatgggactgagtgtctgctagcacgggtcagtgaggggcagcttttatgtgccacaccccctggggccac

SEQ ID NO: 506529 - DNA, 120 bp, Artificial Sequence
  ENSG00000164078_20 (sequence is synthesized)
ggtggccagtgtcccccttagcctgcaggtggggggtgcccaggtacctggttcctggaccttccagtacagagaagaccctgtcgtgctaagcatcagccccaactgtggctacatcaa

SEQ ID NO: 506530 - DNA, 120 bp, Artificial Sequence
  ENSG00000164078_21 (sequence is synthesized)
ctcccacatcaccatctgtggccagcatctaacttcagcatggcacttagtgctgtcattccatgacgggcttagggcagtggaaagcaggtgtgagaggcagcttccagagcagcagct

SEQ ID NO: 506531 - DNA, 120 bp, Artificial Sequence
  ENSG00000164078_22 (sequence is synthesized)
gtgccgccttcctgaatatgtggtccgagacccccagggatgggtggcagggaatctgagtgcccgaggggatggagctgctggctttacactgcctggctttcgcttcctacccccacc

SEQ ID NO: 506532 - DNA, 120 bp, Artificial Sequence
  ENSG00000164078_23 (sequence is synthesized)
ccatccacccagtgccaacctagttccactgaagcctgaggagcatgccattaagtttgagtatattgggctgggcgctgtggctgactgtgtgggtatcaacgtgaccgtgggtggtga

SEQ ID NO: 506533 - DNA, 120 bp, Artificial Sequence
  ENSG00000164078_24 (sequence is synthesized)
gagctgccagcacgagttccggggggacatggttgtctgccccctgcccccatccctgcagcttggccaggatggtgccccattgcaggtctgcgtagatggtgaatgtcatatcctggg

SEQ ID NO: 506534 - DNA, 120 bp, Artificial Sequence
  ENSG00000164078_25 (sequence is synthesized)
tagagtggtgcggccagggccagatggggtcccacagagcacgctccttggtatcctgctgcctttgctgctgcttgtggctgcactggcgactgcactggtcttcagctactggtggcg

SEQ ID NO: 506535 - DNA, 120 bp, Artificial Sequence
  ENSG00000164078_26 (sequence is synthesized)
gaggaagcagctagttcttcctcccaacctgaatgacctggcatccctggaccagactgctggagccacacccctgcctattctgtactcgggctctgactacagaagtggccttgcact

SEQ ID NO: 506536 - DNA, 120 bp, Artificial Sequence
  ENSG00000164078_27 (sequence is synthesized)
ccctgccattgatggtctggattccaccacttgtgtccatggagcatccttctccgatagtgaagatgaatcctgtgtgccactgctgcggaaagagtccatccagctaagggacctgga

SEQ ID NO: 506537 - DNA, 120 bp, Artificial Sequence
  ENSG00000164078_28 (sequence is synthesized)
ctctgcgctcttggctgaggtcaaggatgtgctgattccccatgagcgggtggtcacccacagtgaccgagtcattggcaaaggccactttggagttgtctaccacggagaatacataga

SEQ ID NO: 506538 - DNA, 120 bp, Artificial Sequence
  ENSG00000164078_29 (sequence is synthesized)
ccaggcccagaatcgaatccaatgtgccatcaagtcactaagtcgcatcacagagatgcagcaggtggaggccttcctgcgagaggggctgctcatgcgtggcctgaaccacccgaatgt

SEQ ID NO: 506539 - DNA, 120 bp, Artificial Sequence
  ENSG00000164078_30 (sequence is synthesized)
gctggctctcattggtatcatgttgccacctgagggcctgccccatgtgctgctgccctatatgtgccacggtgacctgctccagttcatccgctcacctcagcggaaccccaccgtgaa

SEQ ID NO: 506540 - DNA, 120 bp, Artificial Sequence
  ENSG00000164078_31 (sequence is synthesized)
ggacctcatcagctttggcctgcaggtagcccgcggcatggagtacctggcagagcagaagtttgtgcacagggacctggctgcgcggaactgcatgctggacgagtcattcacagtcaa

SEQ ID NO: 506541 - DNA, 120 bp, Artificial Sequence
  ENSG00000164078_32 (sequence is synthesized)
ggtggctgactttggtttggcccgcgacatcctggacagggagtactatagtgttcaacagcatcgccacgctcgcctacctgtgaagtggatggcgctggagagcctgcagacctatag

SEQ ID NO: 506542 - DNA, 120 bp, Artificial Sequence
  ENSG00000164078_33 (sequence is synthesized)
atttaccaccaagtctgatgtgtggtcatttggtgtgctgctgtgggaactgctgacacggggtgccccaccataccgccacattgacccttttgaccttacccacttcctggcccaggg

SEQ ID NO: 506543 - DNA, 120 bp, Artificial Sequence
  ENSG00000164078_34 (sequence is synthesized)
tcggcgcctgccccagcctgagtattgccctgattctctgtaccaagtgatgcagcaatgctgggaggcagacccagcagtgcgacccaccttcagagtactagtgggggaggtggagca

SEQ ID NO: 506544 - DNA, 120 bp, Artificial Sequence
  ENSG00000164078_35 (sequence is synthesized)
gatagtgtctgcactgcttggggaccattatgtgcagctgccagcaacctacatgaacttgggccccagcacctcgcatgagatgaatgtgcgtccagaacagccgcagttctcacccat

SEQ ID NO: 506545 - DNA, 120 bp, Artificial Sequence
  ENSG00000164078_36 (sequence is synthesized)
gccagggaatgtacgccggccccggccactctcagagcctcctcggcccacttgacttagttcttgggctggacctgcttagctgccttgagctaaccccaagctgcctctgggccatgc

SEQ ID NO: 506546 - DNA, 120 bp, Artificial Sequence
  ENSG00000164078_37 (sequence is synthesized)
caggccagagggcagtggccctccaccttgttcctgccctttaactttcagaggcaataggtaaatggggcccattaggtccctcactccacagagtgagccagtgagggcagtcctgca

SEQ ID NO: 506547 - DNA, 120 bp, Artificial Sequence
  ENSG00000164078_38 (sequence is synthesized)
acatgtatttatggagtgcctgctgtggaccctgtcttctgggcacagtggactcagcagtgaccacaccaacactgacccttgaaccaataaaggaacaaatgactattaaagcacaaa

SEQ ID NO: 506548 - DNA, 120 bp, Artificial Sequence
  ENSG00000164078_39 (sequence is synthesized)
ttggccagtttagtgctctgaggtctggttgccaatgagaatgtgtggtgtgagccttgggccctggatcccctctcatcgactcattatgcacctcacaccaggccactttggagttgt

SEQ ID NO: 506549 - DNA, 120 bp, Artificial Sequence
  ENSG00000164078_40 (sequence is synthesized)
aacctagttccactgaagcctgaggagcatgccattaagtttgaggtaagtgtaagggataggggcagggacagttggggatctgaaagtaggggccagcctactggctggtcctcatga

SEQ ID NO: 506550 - DNA, 120 bp, Artificial Sequence
  ENSG00000164080_0 (sequence is synthesized)
tgtatgtaggctgggagtgtctgctgatcacttggagtgctgtcccttggaacaggaggagtaagattgagcacccctgcagtggaccatgagtcggtaatgcccactgaggacctctgg

SEQ ID NO: 506551 - DNA, 120 bp, Artificial Sequence
  ENSG00000164080_1 (sequence is synthesized)
gagccatgtcagacgaatctgcctcagggagcgatccagacctggacccggacgtggagctggaggatgcggaagaggaggaggaggaggaggaggtggcagtggaggagtgtgacaggg

SEQ ID NO: 506552 - DNA, 120 bp, Artificial Sequence
  ENSG00000164080_2 (sequence is synthesized)
atgatgaagaagacctgctggatgacccatccctggaaggcatgtgtggcactgagcatgcccagttgggagaagatgggcagcagccgccgcggtgcacttcaactacctcatctcagt

SEQ ID NO: 506553 - DNA, 120 bp, Artificial Sequence
  ENSG00000164080_3 (sequence is synthesized)
ctgagccttcagagcagcttaggcgccaccaaggcaagaacctagcctccgaggaccccaaaaagaagagagctcagaagccctcccacatgagaagaaacatacgaaagctactccggg

SEQ ID NO: 506554 - DNA, 120 bp, Artificial Sequence
  ENSG00000164080_4 (sequence is synthesized)
aggatcaattggagcctgttaccaaagcagcacagcaagaagagttggaaagaaggaagcgcctggagcagcagaggaaagattatgcagcccctattcctactgttccgctggagttcc

SEQ ID NO: 506555 - DNA, 120 bp, Artificial Sequence
  ENSG00000164080_5 (sequence is synthesized)
tccctgaggaaattgctttaagggcaagtgacggtccccaactgcctcctcgggtcttggcccaggaagtcatttgtttggacagtagcagtggcagtgaggatgaaaaaagcagtcgag

SEQ ID NO: 506556 - DNA, 120 bp, Artificial Sequence
  ENSG00000164080_6 (sequence is synthesized)
atgaggtgattgaactgagctctggagaggaggacactctgcacattgtggacagcagtgaatctgtcagtgaagatgatgaggaagaagagaagggtggcacccatgtcaatgatgtct

SEQ ID NO: 506557 - DNA, 120 bp, Artificial Sequence
  ENSG00000164080_7 (sequence is synthesized)
taaaccagcgtgacgcccttgggcgggtccttgtcaacctaaaccaccctccagaggaggaaaatgtcttccttgccccacagttggcacgggctgtgaaacctcatcagattggcggga

SEQ ID NO: 506558 - DNA, 120 bp, Artificial Sequence
  ENSG00000164080_8 (sequence is synthesized)
tccggttcctttacgataacctagtggagtctctggagaggtttaagaccagcagtggctttggctgtattctggcccacagcatgggtctggggaaaactttgcaagtgatctctttca

SEQ ID NO: 506559 - DNA, 120 bp, Artificial Sequence
  ENSG00000164080_9 (sequence is synthesized)
tcgacgtcctcttccgccacacgccagccaaaacagtccttgccattgtgccggttaatactcttcagaattggctggcagagttcaacatgtggcttccacctcctgaagccctcccgg

SEQ ID NO: 506560 - DNA, 120 bp, Artificial Sequence
  ENSG00000164080_10 (sequence is synthesized)
ctgacaacaagcctgaagaagtccagcctcggttctttaaagttcacatcttgaatgatgagcacaagacgatggcatctcgtgctaaagtgatggctgattgggtgtcagagggtggcg

SEQ ID NO: 506561 - DNA, 120 bp, Artificial Sequence
  ENSG00000164080_11 (sequence is synthesized)
tgctgctgatggggtacgagatgtacagactcctcactctgaagaaatcatttgccacaggtagaccgaagaaaaccaagaagcgttctcacccagtcatcattgatctagatgaggaag

SEQ ID NO: 506562 - DNA, 120 bp, Artificial Sequence
  ENSG00000164080_12 (sequence is synthesized)
atcggcagcaggagtttcggagagagtttgagaaggctttatgccgccctggccctgatgtagtaatctgtgatgagggacaccgcatcaaaaactgccaggccagcacctcacaggctc

SEQ ID NO: 506563 - DNA, 120 bp, Artificial Sequence
  ENSG00000164080_13 (sequence is synthesized)
tgaagaatatccgctctcgccgccgggtggtgctgactgggtaccctctgcaaaacaacctcattgagtactggtgcatggtggactttgtgcgcccagacttccttggcacccggcagg

SEQ ID NO: 506564 - DNA, 120 bp, Artificial Sequence
  ENSG00000164080_14 (sequence is synthesized)
agttcagcaacatgtttgaacgccctatcctgaatgggcaatgtattgacagcacacctcaggacgtccgcctcatgcggtaccggagccatgtcctgcacagtcttctggagggctttg

SEQ ID NO: 506565 - DNA, 120 bp, Artificial Sequence
  ENSG00000164080_15 (sequence is synthesized)
tgcagaggagaggccacactgtgctgaagattcatctccctgccaaggaagaaaatgtgatccttgtgcggctctccaagatccagcgagatttgtatacacagttcatggatcgcttcc

SEQ ID NO: 506566 - DNA, 120 bp, Artificial Sequence
  ENSG00000164080_16 (sequence is synthesized)
gggactgtggtagcagcggttggctggggctgaacccccttaaggcattctgtgtgtgttgcaagatctggaatcaccctgatgtgctgtatgaagcccttcagaaggagagcttggcca

SEQ ID NO: 506567 - DNA, 120 bp, Artificial Sequence
  ENSG00000164080_17 (sequence is synthesized)
atgagcaggacctagacgtggaagaacttggctctgcagggaccagtgcccgctgtccaccacagggaacaaaaggcaagggagaggatagcaccttggcttcctcgatgggagaggcaa

SEQ ID NO: 506568 - DNA, 120 bp, Artificial Sequence
  ENSG00000164080_18 (sequence is synthesized)
ccaatagcaagttcctacagggcgttggcttcaaccctttccaggagcgaggcaacaacattgtcacatatgaatgggccaaggaccttctgactaattaccagactggagtcctagaaa

SEQ ID NO: 506569 - DNA, 120 bp, Artificial Sequence
  ENSG00000164080_19 (sequence is synthesized)
actctcccaagatggtactgcttttccacctgattgaggaaagtgtgaagcttggggacaagatccttgtgtttagccagagtctttccaccttggctctcatcgaggaattccttggaa

SEQ ID NO: 506570 - DNA, 120 bp, Artificial Sequence
  ENSG00000164080_20 (sequence is synthesized)
aacgagaagtaccctgtccacctggtaccgaggggcaaggagcacagaagtgggttcgaaacatcagctacttccggctagatggtagcacccctgcctttgagagggagcggcttatta

SEQ ID NO: 506571 - DNA, 120 bp, Artificial Sequence
  ENSG00000164080_21 (sequence is synthesized)
atcagttcaatgatcccagcaacctcaccacctggctgttccttctctctacaagggccggatgcttgggtgtgaatctgattggtgccaaccgagtggtggtgtttgatgcttcctgga

SEQ ID NO: 506572 - DNA, 120 bp, Artificial Sequence
  ENSG00000164080_22 (sequence is synthesized)
acccttgccatgatgcccaggcagtatgtcgggtataccgttatggccagaaaaagccctgttacatctatcgccttgtggctgattacactctagaaaagaagatctatgaccgtcaga

SEQ ID NO: 506573 - DNA, 120 bp, Artificial Sequence
  ENSG00000164080_23 (sequence is synthesized)
tttccaagcagggcatgtcagatcgggtggtggatgatctaaatccaatgctgaacttcacacggaaagaggtggaaaacctactgcactttgttgagaaggagccagctccccaagttt

SEQ ID NO: 506574 - DNA, 120 bp, Artificial Sequence
  ENSG00000164080_24 (sequence is synthesized)
ccttgaacgtaaaggggatcaaggagtcagtcctgcaactggcctgtctgaagtaccctcacctcatcaccaaggagcctttcgagcatgagtcattgctcttgaaccgaaaggatcaca

SEQ ID NO: 506575 - DNA, 120 bp, Artificial Sequence
  ENSG00000164080_25 (sequence is synthesized)
agctaaccaaggctgagaaaaaagcagcaaagaaaagctatgaggaagacaaacgcacatcagtcccctatacccgcccatcgtatgcgcagtattaccctgccagcgatcagagcctga

SEQ ID NO: 506576 - DNA, 120 bp, Artificial Sequence
  ENSG00000164080_26 (sequence is synthesized)
ccagcatccccgccttcagccagagaaactggcagccaactttgaagggtgatgaaaagcctgtggccagtgttcgtcctgtgcagtccacccccatccccatgatgccccggcatgtcc

SEQ ID NO: 506577 - DNA, 120 bp, Artificial Sequence
  ENSG00000164080_27 (sequence is synthesized)
cattgggaggaagtgtaagctctgcctccagcacaaatccatccatgaactttcccatcaactacttgcagcgtgcaggagtccttgtgcagaaggtggtcaccacgacagatattgtta

SEQ ID NO: 506578 - DNA, 120 bp, Artificial Sequence
  ENSG00000164080_28 (sequence is synthesized)
ttcctggactcaacagctccacagatgtacaggcaagaattaatgctggtgagagcatccacatcatccgtgggacaaaagggacgtacatccgtaccagtgatggacggatctttgctg

SEQ ID NO: 506579 - DNA, 120 bp, Artificial Sequence
  ENSG00000164080_29 (sequence is synthesized)
tccgggcaactggcaaaccaaaggttcctgaagatggtcggatggctgcctcaggttcccagggaccttcttgcgagtccacaagcaacggcagacacagtgcctcatcacccaaagccc

SEQ ID NO: 506580 - DNA, 120 bp, Artificial Sequence
  ENSG00000164080_30 (sequence is synthesized)
ccgaccctgaggggctggccaggcccgtctctcctgacagcccagagatcatcagtgagcttcagcagtatgcagatgtggctgctgcccgggaatcccgtcagagctccccaagcacca

SEQ ID NO: 506581 - DNA, 120 bp, Artificial Sequence
  ENSG00000164080_31 (sequence is synthesized)
atgccgccctgcctggccccccggcccaacttatggacagcagtgctgttcccgggacagctctcggaactgagcctcgactagggggtcattgcctcaatagttccctcttggtgactg

SEQ ID NO: 506582 - DNA, 120 bp, Artificial Sequence
  ENSG00000164080_32 (sequence is synthesized)
gccagccctgtggtgacaggcacccagtgctggacttaaggggccacaagcgaaagttggccacaccacctgctgcccaggagtcatcccgccggcggtccaggaagggtcatctgccag

SEQ ID NO: 506583 - DNA, 120 bp, Artificial Sequence
  ENSG00000164080_33 (sequence is synthesized)
cccccgtgcagccgtatgaacacgggtatccagtctctggcgggtttgccatgccacccgtctccttaaaccataacctcaccacccccttcacctcccaggctggggagaactccctgt

SEQ ID NO: 506584 - DNA, 120 bp, Artificial Sequence
  ENSG00000164080_34 (sequence is synthesized)
ttatgggcagtaccccctcctactaccagctgtccaatttgctggcagatgcccgcctggtgtttccagtgactactgaccctctggtgccagcaggccccgtcagttcctcttccacgg

SEQ ID NO: 506585 - DNA, 120 bp, Artificial Sequence
  ENSG00000164080_35 (sequence is synthesized)
ctacctcagtcactgccagcaacccctccttcatgctcaacccttctgtgccagggatactacccagctattcactcccattctcacagccactcctgtccgagccgaggatgtttgcgc

SEQ ID NO: 506586 - DNA, 120 bp, Artificial Sequence
  ENSG00000164080_36 (sequence is synthesized)
cttttccttcccctgtcttgcccagcaacctttcgcggggcatgtctatctatccaggctacatgtccccacatgcaggctacccagctggtggcctcctacggtcccaggtgcctccat

SEQ ID NO: 506587 - DNA, 120 bp, Artificial Sequence
  ENSG00000164080_37 (sequence is synthesized)
ttgactctcatgaggttgccgaggttgggttcagctccaatgatgatgaggataaagacgatgatgtgatagaggtcactgggaaatagctagggagcccctccccacctcacttggggc

SEQ ID NO: 506588 - DNA, 120 bp, Artificial Sequence
  ENSG00000164080_38 (sequence is synthesized)
ccccagcaggttgcccaccaagctgaaaggcagtgatttagaccttttgagaataggacacttggcaggagggaaaaggaagaggacaaaggagggtggttggccaaagtggcagagctc

SEQ ID NO: 506589 - DNA, 120 bp, Artificial Sequence
  ENSG00000164080_39 (sequence is synthesized)
aaaaaaaaaaaaaaaaaaagtccaacacagcagcaatagcgggaaatcagggacccaaaacagggatggaggggcagtgcagcctcttttccttcctgccttgcttatgctgtctgcttg

SEQ ID NO: 506590 - DNA, 120 bp, Artificial Sequence
  ENSG00000164080_40 (sequence is synthesized)
cacatcccatttctgtctttgggaacattctttcccaagagagctgccttactaggtgacttagcttggcctggggaggggagtgaaggaagggagaatgagtgagagaaggagggtggg

SEQ ID NO: 506591 - DNA, 120 bp, Artificial Sequence
  ENSG00000164080_41 (sequence is synthesized)
tagggggagcagactgtgatcccatgtgaagtggggtctttttagggggtgggaaggaagctgaccaggtatgtgtgtttgtgagtgtgtgtgtgtatgtttattttgtatgtgtatgta

SEQ ID NO: 506592 - DNA, 120 bp, Artificial Sequence
  ENSG00000164080_42 (sequence is synthesized)
tggaacagagcaggggtgaaggtgggaggggagggagggaagaactaagagggaaactgaaaaatgaatttatctttctttaaatggaagtcagtttggtggttcatggcacctagtgtg

SEQ ID NO: 506593 - DNA, 120 bp, Artificial Sequence
  ENSG00000164080_43 (sequence is synthesized)
aacatcagggtgagcccagaagagccatggaaataacaagtttccttcgggatgggtgaagagaaggcccagctaactcaagtccctggtattcagagccacatttgtgtgagaatttgg

SEQ ID NO: 506594 - DNA, 120 bp, Artificial Sequence
  ENSG00000164080_44 (sequence is synthesized)
ggaaattcatgagagaaaatgggcattaccaatctatgtctcttaaccccggtggctatctctgagcagctctccctttccagcttggaaggttgtctgtgtgcagaggctgggagggag

SEQ ID NO: 506595 - DNA, 120 bp, Artificial Sequence
  ENSG00000164080_45 (sequence is synthesized)
aagcactgcagtacgtgaatgaaaggtcgcagagttgtggctggaaaatacatttttcaccagggtagaactgagcccccagctgcctatcctggtagtcttttctgttcctttccttcc

SEQ ID NO: 506596 - DNA, 120 bp, Artificial Sequence
  ENSG00000164080_46 (sequence is synthesized)
cctttagagagctccatgttaatttatttcttatgggcaattatttattacttggacttttcatgtgtcttgtttatttgggggtggggggaggttaggggtaaggagggtaggtgatag

SEQ ID NO: 506597 - DNA, 120 bp, Artificial Sequence
  ENSG00000164080_47 (sequence is synthesized)
aaagggaagttttaagatatcccagaccctatagccactggtgaaaaacaatcctggatggatggtaaattgaccaggggaagagttaggtttgaccaaggtttggattaaacaactata

SEQ ID NO: 506598 - DNA, 120 bp, Artificial Sequence
  ENSG00000164080_48 (sequence is synthesized)
tttttgagagatggcttttcaggaagatcagggaatcctgagactggatagttagtggagggtgggactcattccacagaaatcgaaagttgtgatcatggagtttgcaattgggaagta

SEQ ID NO: 506599 - DNA, 120 bp, Artificial Sequence
  ENSG00000164080_49 (sequence is synthesized)
agagaccccagatttggagctgtgtcctcctgggatgatgttagatgttggctctctatgctgaatagtgaagctgtggataggcggttgctgggttgagggactgttgatttcatgttc

SEQ ID NO: 506600 - DNA, 120 bp, Artificial Sequence
  ENSG00000164080_50 (sequence is synthesized)
gaaaatatcttcaggtggtccatgtaggcctggtgtctgctgcctccatctttgaaggaacatggaggagccctttctctgtaggagccctaagtctgggttttatcttaaaagaacaca

SEQ ID NO: 506601 - DNA, 120 bp, Artificial Sequence
  ENSG00000164080_51 (sequence is synthesized)
ccagtcattctgggtctccccttattgccattgccaggggagggtcgtctagtccttaagcataaacactggctgtcttcctactggtgtccccgccccctctgtatcccccaccccaac

SEQ ID NO: 506602 - DNA, 120 bp, Artificial Sequence
  ENSG00000164080_52 (sequence is synthesized)
actttgccagacagttctttatgatgaacaaactttggctttagagctttaccacttacccatggctccctccttactgggcaggtggtgtacctgcctcttcccagcccagaaggcagc

SEQ ID NO: 506603 - DNA, 120 bp, Artificial Sequence
  ENSG00000164080_53 (sequence is synthesized)
ttagtcaggtcatcccagtagtagctcctacagctcttctgaccagcccatttccatctttggagggccttagcagactctggggtattgtcctcagagaagagacaaggagatgatgga

SEQ ID NO: 506604 - DNA, 120 bp, Artificial Sequence
  ENSG00000164080_54 (sequence is synthesized)
tggggtgcatgtgtatatgtgtgtttgtctgctgtccaataacaccaaaagtggaacttaagaagctttgtgttttcataagcaccctgccagacacttaactcttctactcatggaagc

SEQ ID NO: 506605 - DNA, 120 bp, Artificial Sequence
  ENSG00000164080_55 (sequence is synthesized)
cttagatctacaatttagctatgcaaattattttaataatttaaaaatagcagttccaaccagtgctttctctttcagatgcatcccaagaatggatggtgaagggactcagttggagtg

SEQ ID NO: 506606 - DNA, 120 bp, Artificial Sequence
  ENSG00000164080_56 (sequence is synthesized)
agctctcaggttgaggctggtgcagtaggagtgagctagactgaatctccaatttatgggacacactcagaacctgggttacactgatgcctctcaggccctggagcactgggatcccag

SEQ ID NO: 506607 - DNA, 120 bp, Artificial Sequence
  ENSG00000164080_57 (sequence is synthesized)
agatgcatgtgtgcatgtgtatgtctgtgtgtgtgtgttgtcgggagaagggggtagtatttctgtgttcacttctaggaaatcactgtactagcctccaagaatccggaaaccttccca

SEQ ID NO: 506608 - DNA, 120 bp, Artificial Sequence
  ENSG00000164080_58 (sequence is synthesized)
gccgggaactgaaaccattccctggagggatgggcttggcttttgaagttgacagaaagtaaatgggtattctgagaggcagcacatgcctactgtctatccagtgttccagggactggg

SEQ ID NO: 506609 - DNA, 120 bp, Artificial Sequence
  ENSG00000164080_59 (sequence is synthesized)
tcttgcttctactcagcagaggccatcattctgggaggctgacctgactagagaaggctttcttttatatgtgcagtttctattgtgtagaggggttgggggtgggatcatgggaaattg

SEQ ID NO: 506610 - DNA, 120 bp, Artificial Sequence
  ENSG00000164080_60 (sequence is synthesized)
ttttttttttttttttttttttaaagaaaataacctgaaaacacttctgacttttccactgtctctttatatgtgctgataggcaaatgtgcatgcacaccaaacataagcatgtttgtg

SEQ ID NO: 506611 - DNA, 120 bp, Artificial Sequence
  ENSG00000164080_61 (sequence is synthesized)
aggcaaatgtgcatgcacaccaaacataagcatgtttgtgagggaagcaggaagtatctcagagcctaagaaccatgttttatagtttctttgatcataaacacttggtggtgtcttcca

SEQ ID NO: 506612 - DNA, 120 bp, Artificial Sequence
  ENSG00000164080_62 (sequence is synthesized)
cccattatccaggcctgaggggggcagggtggctggtgataagagggagggcagaaaatcaggcctaggcgttttcccttaccattgtcttccatggaatgttttcaagggcctctcaag

SEQ ID NO: 506613 - DNA, 120 bp, Artificial Sequence
  ENSG00000164080_63 (sequence is synthesized)
ccccattcatctggtttagccaagttctcagcctggggaacacagtactacttaatgattgaggtttaccatttatagtgatgcttgatttccttttcttaatatatttgtagataaaaa

SEQ ID NO: 506614 - DNA, 120 bp, Artificial Sequence
  ENSG00000164080_64 (sequence is synthesized)
ttgaacagggacaaagtagctatttaagaaaggaagtgaaccatgttgggtcatatcattttctttagattggatatctatgaagtccacacccctttgagttatgctttttaggcatct

SEQ ID NO: 506615 - DNA, 120 bp, Artificial Sequence
  ENSG00000164080_65 (sequence is synthesized)
atctcatcatctcctgatttaaggataattctgtctggtccttggagctctcttccctaggaattagtgtgtggagtctctatatgcttgtgatccttggagctctcttccctaggaatt

SEQ ID NO: 506616 - DNA, 120 bp, Artificial Sequence
  ENSG00000164080_66 (sequence is synthesized)
agtgtgtggagtctctatatgcttgtgattcacaactaaatatgaaatttctcaattcaggagcaggaagcaaagtgctggggtacagttttgcagattggttgaaacacttagccaaac

SEQ ID NO: 506617 - DNA, 120 bp, Artificial Sequence
  ENSG00000164080_67 (sequence is synthesized)
ttaagtggcctgggtaggaccatcactcccaaagttgtcagcagagaagggccctctgtgtgagtctattcaaacctggcattgctctgaaattgagtcctcatcccatggggaaggtct

SEQ ID NO: 506618 - DNA, 120 bp, Artificial Sequence
  ENSG00000164080_68 (sequence is synthesized)
gaaattgagtcctcatcccatggggaaggtcttctgggggctttacattccttgttactagtgttctggatattaccttctgcttcccacttccttttttttttttttgagacagagtct

SEQ ID NO: 506619 - DNA, 65 bp, Artificial Sequence
  ENSG00000164080_69 (sequence is synthesized)
tgctctgtcacccaggcttgagtgcaatggtgtgatcttggctccgtgcaacctccactcccggt

SEQ ID NO: 506620 - DNA, 120 bp, Artificial Sequence
  ENSG00000164080_70 (sequence is synthesized)
cttccttttgatttctcagatcagtctttcccttctgagccatggccttctgtgcacccagctcagtggctcttcacccctaaaactaagtgaagtcatccttccccaaaaggacccctg

SEQ ID NO: 506621 - DNA, 120 bp, Artificial Sequence
  ENSG00000164080_71 (sequence is synthesized)
ggagatgttctggccctctgctgactactcccaggaatcagcacctcaaggactatttgagaatgttgtgctctctattggtcaccttgagactccgttcccctgctgccaactcttctc

SEQ ID NO: 506622 - DNA, 120 bp, Artificial Sequence
  ENSG00000164080_72 (sequence is synthesized)
ttctgccctgtgtattctgctgtgatccccttaacggcttttctgtgctactagcttagccctaggccttttatgaatacctgagtcttataacaatgaacttcttgagcaggcagtgtc

SEQ ID NO: 506623 - DNA, 120 bp, Artificial Sequence
  ENSG00000164080_73 (sequence is synthesized)
caacttctttgctcttcagggacctgagtgtgcacctttcccttttgcaggtctatttgacatagtaatctagtgtgttggggaggggtagccaagcaggctgcagtgtctgcaatgcag

SEQ ID NO: 506624 - DNA, 120 bp, Artificial Sequence
  ENSG00000164080_74 (sequence is synthesized)
agggcttggggaggtttgggtactctctgctgccactactgggatgatattcagaagagagaggacctcatactgtgactggacccaggaccctccctggaagagagctcagcccagctg

SEQ ID NO: 506625 - DNA, 120 bp, Artificial Sequence
  ENSG00000164080_75 (sequence is synthesized)
tgtgtgtgtgagtgtgtgtgtgtgtgtttgtgtgctgtgctcatgtgcacctgggtgtaaaatgactgttatctggttgtgttactcagggtgggctggggactcaccagaagaatcccc

SEQ ID NO: 506626 - DNA, 120 bp, Artificial Sequence
  ENSG00000164080_76 (sequence is synthesized)
gaatcccccccagcctgcccaagacaggtttttcccttgtaccatcttcagagaggtcaggggaagagggtccaggtgggttaaggggggtcgctatggataaccactaagaccagactg

SEQ ID NO: 506627 - DNA, 120 bp, Artificial Sequence
  ENSG00000164080_77 (sequence is synthesized)
ctgccaggaggagtgggggataatgaggtggccccagggtcctggcacctggctttggttttccgtcttctttcctcaggacgcccctgaggcctgggacctgtgcctggcttcgaggag

SEQ ID NO: 506628 - DNA, 120 bp, Artificial Sequence
  ENSG00000164080_78 (sequence is synthesized)
catctgtggctgggtgatccagctgctggtgtgatcatgggcttccctcctctcagcagggcaggcgctcctgccccagagactgggcaactggctgtttctatgacgtatttattttta

SEQ ID NO: 506629 - DNA, 120 bp, Artificial Sequence
  ENSG00000164080_79 (sequence is synthesized)
cttgtgtttcatgtcacttttttaaaaaaaagcaaacagaacaattgtaagtcagtataactgcctatcagttttctttatttctctttttgtaaaataaaatttaaactcaagaaggca

SEQ ID NO: 506630 - DNA, 120 bp, Artificial Sequence
  ENSG00000164080_80 (sequence is synthesized)
tggggcctcagggaagattgagatggggactaaggatacacatggtcccaagggagttactcctactgagagtcttcaataaagggagaataaagtgagagggggccacctcagttcact

SEQ ID NO: 506631 - DNA, 120 bp, Artificial Sequence
  ENSG00000164080_81 (sequence is synthesized)
gcactggaggtttgggggctccaaggagagaggtgatggttttgtaccacataactcctgggggtgccattcacacagtgtaatataactgatgccccctgcagtgtgcaactcagctgc

SEQ ID NO: 506632 - DNA, 120 bp, Artificial Sequence
  ENSG00000164080_82 (sequence is synthesized)
acaacttgttattccaaggggattaatggaaaaatactgtggggcagcgtttttgactgctagcataatcagaattcaagagatatatagcttagacaagttattaggggtaccttccat

SEQ ID NO: 506633 - DNA, 120 bp, Artificial Sequence
  ENSG00000164080_83 (sequence is synthesized)
tggattccatacttaatcagattgagacctctctcattcttttcttgagggacctgtttcattgacttcatacctctacccctggctactcttcagcagacctgttaggtattattctta

SEQ ID NO: 506634 - DNA, 120 bp, Artificial Sequence
  ENSG00000164080_84 (sequence is synthesized)
attgaccactgctttaataagtcagcagaaggtatgtgtctggggacaagaggggtttccaaatatttcttttatagccacagtcctgggtcaaggccaggaaactaaggcaagcgtggt

SEQ ID NO: 506635 - DNA, 120 bp, Artificial Sequence
  ENSG00000164080_85 (sequence is synthesized)
ctgtgatgatgctttggtatcactgcatccttccttcttcctttcctctcttctcctgggagttctcaactcttgctaggaatactctgtgaaatgatatgtgattggtctactataagt

SEQ ID NO: 506636 - DNA, 120 bp, Artificial Sequence
  ENSG00000164080_86 (sequence is synthesized)
cagatacattttgtctatagttttatacagtagcagactgtagccacactgtgaaactggaacattcttactcttatttgaataagaatgtcaaaaaggcttgtgacagcttttttgatt

SEQ ID NO: 506637 - DNA, 120 bp, Artificial Sequence
  ENSG00000164080_87 (sequence is synthesized)
atgtatcaaacatacttactggcatggctcctggtatgcatgctgccattcatgtgtcatggtgaccagaactgataatcaaaacaaatatgcaggccctttggctgtgaagggctctga

SEQ ID NO: 506638 - DNA, 120 bp, Artificial Sequence
  ENSG00000164080_88 (sequence is synthesized)
ctttaatttttggtgtgacagtgtttattgtgggacgtgtgtgtttgagcaagtatgtgtttccagactccctgggacacccttggaatgttttttgtcctgtgtctcctctccctttcc

SEQ ID NO: 506639 - DNA, 120 bp, Artificial Sequence
  ENSG00000164080_89 (sequence is synthesized)
tcaaaaatgctgatgatattttttaacattttgttagtggtagttcctggtttagaggtggttataggtctatgaagaaagaagtgattcaggtatatcaagcttttaatcagtaaagac

SEQ ID NO: 506640 - DNA, 120 bp, Artificial Sequence
  ENSG00000164080_90 (sequence is synthesized)
attgaataaagtttttataatgtattaattttgactggtgacagttaattatcttaacatctccatggaaaaagtttagctatcactgtgagttcatgctggtatgggattatttttgca

SEQ ID NO: 506641 - DNA, 120 bp, Artificial Sequence
  ENSG00000164080_91 (sequence is synthesized)
ctattttatacacctgttaattttaagtactcctgtagacaaaccacaggtaaaacattttgttttggtgtatgtctcaacgagcagtgatttacaaatactatatgtgttcagattccc

SEQ ID NO: 506642 - DNA, 120 bp, Artificial Sequence
  ENSG00000164080_92 (sequence is synthesized)
ccatcacactccttcccactgtggttttgggagcatgaaggcgttgcttatcccctatgtctggttcactgtatgtaggctgggagtgtctgctgatcacttggagtgctgtcccttgga

SEQ ID NO: 506643 - DNA, 120 bp, Artificial Sequence
  ENSG00000164080_93 (sequence is synthesized)
acaggaggagtaagattgaggtaaggctcagtctgtttgaaagtcatttgcttcttaatttttactgcataaaatataatgtaaatctgaatgttttttgctttgttactcttcattctg

SEQ ID NO: 506644 - DNA, 120 bp, Artificial Sequence
  ENSG00000164080_94 (sequence is synthesized)
atctattaaaatgaaattctgccttttgctgtctatctctctgtgtatatatcttgggcaaaaataaatgaagaaatgtaaaatcaaggtatttaaataataaatgaattcttcaaaata

SEQ ID NO: 506645 - DNA, 120 bp, Artificial Sequence
  ENSG00000164080_95 (sequence is synthesized)
atcggcagcaggagtttcggagagggtgcacccctacttctcatattattgactaagagcaggccctgtcaccctctgactccggatcctcttccctccctagagtttgagaaggcttta

SEQ ID NO: 506646 - DNA, 120 bp, Artificial Sequence
  ENSG00000164080_96 (sequence is synthesized)
tcatgctgagatcggctatactttgaaaagagtccagtccttcctccttcaatttgggatgtggctttgactaatttccctgtgtctccttggtaaatataagttttttgcttgtcttaa

SEQ ID NO: 506647 - DNA, 120 bp, Artificial Sequence
  ENSG00000164080_97 (sequence is synthesized)
tagtaaaagtcaaaattttaataagtgttgacaagttctaactttaagtttctgtagtcttctgctctgactgtgtgcagtaaattatcttcactccctggatttttggttttgcttttt

SEQ ID NO: 506648 - DNA, 120 bp, Artificial Sequence
  ENSG00000164081_0 (sequence is synthesized)
gtaaccgaaccctgagccgcctgcgcggatcggcgtccgcagcgggcggctgctgagctgccttgaggtgcagtgttggggatccagagccatgtcggacctgctactactgggcctgat

SEQ ID NO: 506649 - DNA, 120 bp, Artificial Sequence
  ENSG00000164081_1 (sequence is synthesized)
tgggggcctgactctcttactgctgctgacgctgctggcctttgccgggtactcagggctactggctggggtggaagtgagtgctgggtcaccccccatccgcaacgtcactgtggccta

SEQ ID NO: 506650 - DNA, 120 bp, Artificial Sequence
  ENSG00000164081_2 (sequence is synthesized)
caagttccacatggggctctatggtgagactgggcggcttttcactgagagctgcagcatctctcccaagctccgctccatcgctgtctactatgacaacccccacatggtgccccctga

SEQ ID NO: 506651 - DNA, 120 bp, Artificial Sequence
  ENSG00000164081_3 (sequence is synthesized)
taagtgccgatgtgccgtgggcagcatcctgagtgaaggtgaggaatcgccctcccctgagctcatcgacctctaccagaaatttggcttcaaggtgttctccttcccggcacccagcca

SEQ ID NO: 506652 - DNA, 120 bp, Artificial Sequence
  ENSG00000164081_4 (sequence is synthesized)
tgtggtgacagccaccttcccctacaccaccattctgtccatctggctggctacccgccgtgtccatcctgccttggacacctacatcaaggagcggaagctgtgtgcctatcctcggct

SEQ ID NO: 506653 - DNA, 120 bp, Artificial Sequence
  ENSG00000164081_5 (sequence is synthesized)
agatccatttcatgtgcccactggcacggcagggagacttctatgtgcctgagatgaaggagacagagtggaaatggcgggggcttgtggaggccattgacacccaggtggatggcacag

SEQ ID NO: 506654 - DNA, 120 bp, Artificial Sequence
  ENSG00000164081_6 (sequence is synthesized)
gagctgacacaatgagtgacacgagttctgtaagcttggaagtgagccctggcagccgggagacttcagctgccacactgtcacctggggcgagcagccgtggctgggatgacggtgaca

SEQ ID NO: 506655 - DNA, 120 bp, Artificial Sequence
  ENSG00000164081_7 (sequence is synthesized)
cccgcagcgagcacagctacagcgagtcaggtgccagcggctcctcttttgaggagctggacttggagggcgaggggcccttaggggagtcacggctggaccctgggactgagcccctgg

SEQ ID NO: 506656 - DNA, 120 bp, Artificial Sequence
  ENSG00000164081_8 (sequence is synthesized)
ggactaccaagtggctctgggagcccactgcccctgagaagggcaaggagtaacccatggcctgcaccctcctgcagtgcagttgctgaggaactgagcagactctccagcagactctcc

SEQ ID NO: 506657 - DNA, 120 bp, Artificial Sequence
  ENSG00000164081_9 (sequence is synthesized)
agccctcttcctccttcctctgggggaggaggggttcctgagggacctgacttcccctgctccaggcctcttgctaagccttctcctcactgccctttaggctcccagggccagaggagc

SEQ ID NO: 506658 - DNA, 120 bp, Artificial Sequence
  ENSG00000164081_10 (sequence is synthesized)
cagggactattttctgcaccagcccccagggctgccacccctgttgtgtctttttttcagactcacagtggagcttccaggacccagaataaagccaatgatttacttgtttcacctgga

SEQ ID NO: 506659 - DNA, 120 bp, Artificial Sequence
  ENSG00000164081_11 (sequence is synthesized)
cgggcggctgctgaggtgagggccgggccagaggagaggcatacccactggggcgtaggtctgggactccccctgtccgccctggcgcgacctcaggactctccgtgtcccctccgtgac

SEQ ID NO: 506660 - DNA, 120 bp, Artificial Sequence
  ENSG00000164081_12 (sequence is synthesized)
ccccgcggcccgggccgctctttgcatcttgtcttgcccacagctggcctcggccaggtccgagggcctggatgcgaccttggggcagcccctactcttccgggcagcccacttccgcgg

SEQ ID NO: 506661 - DNA, 120 bp, Artificial Sequence
  ENSG00000164081_13 (sequence is synthesized)
tgggctgcaaactttagcgtcctttaagttacagacgtgcgtggggctccgtgaggaggtgggcgaagagaaaggctctgagtaaataggcaaggcccggggtgagcaggggctggaatc

SEQ ID NO: 506662 - DNA, 120 bp, Artificial Sequence
  ENSG00000164081_14 (sequence is synthesized)
cgaaagtgggaggcggcggccccccaccctccatagtccttccgccctctgctagcaccgaagtttagcccaggacgggggccgtttaagggcccggccctccgccgccgcgcacgtgag

SEQ ID NO: 506663 - DNA, 120 bp, Artificial Sequence
  ENSG00000164081_15 (sequence is synthesized)
cggcaccaggaagctggctgggcgcagccttccctgaggctcgctggcaccggccgcacgcgtccatcccgggcctctgagcggagggggagccgaggctagagggagggcgcagtctgc

SEQ ID NO: 506664 - DNA, 120 bp, Artificial Sequence
  ENSG00000164081_16 (sequence is synthesized)
ccaaggtcagcggcagcggcagtttctgggcgccaagtgtgattggagtactccaggaagaggggcgtgaccagagctctagcgaagagacctgacattgtaaagctaggtttggcttct

SEQ ID NO: 506665 - DNA, 120 bp, Artificial Sequence
  ENSG00000164081_17 (sequence is synthesized)
gatttccacagggggtttgagaatgggacgagggtgctttagagggaccggtaggctttccctgaggacggtaatcagggcatgatggttggctcagtggttatttcctgggcaggggtg

SEQ ID NO: 506666 - DNA, 120 bp, Artificial Sequence
  ENSG00000164081_18 (sequence is synthesized)
actgttctttcagctcccagcactggagcgctcggcccctgccgcactggatgccagcagttactaaaagtgagcctggcatttcagctgccttgaggtgcagtgttggggatccagagc

SEQ ID NO: 506667 - DNA, 120 bp, Artificial Sequence
  ENSG00000164081_19 (sequence is synthesized)
atgtcccgccgcgagagggggcggagcgagcgtgcgcggcgggcgcgcgcaggctccgtaaccgaaccctgagccgcctgcgcggatcggcgtccgcagcgggcggctgctgaggggaaa

SEQ ID NO: 506668 - DNA, 120 bp, Artificial Sequence
  ENSG00000164081_20 (sequence is synthesized)
tagggggtcattgcctcaatagttccctcttggtgactggccagccctgtggtgacaggcacccagtgctggacttaaggggccacaagcgaaagttggccacaccacctgctgcccagg

SEQ ID NO: 506669 - DNA, 120 bp, Artificial Sequence
  ENSG00000164081_21 (sequence is synthesized)
gcttggtggagagcaacagaaggctttgaaggggaaagttgagctgagtcttgcaggatgggcaggagtttcccagtcagaagggactctggaatagggtgaagaaggacatttcaggca

SEQ ID NO: 506670 - DNA, 120 bp, Artificial Sequence
  ENSG00000164081_22 (sequence is synthesized)
gaggaagtagcttacgcaaaggcaggaagcatgggaggatgtggcatgtttggggagctgcaaatagtttcatgtgggtgtgtgtgggggtgtggcgggtgaggaggctggcaaggcggg

SEQ ID NO: 506671 - DNA, 120 bp, Artificial Sequence
  ENSG00000164081_23 (sequence is synthesized)
ctgggccagagcctggatctgtccctccctctgccatgcagacactcagttggtgcctgcccacctgggctctggcccctgctggggcctgaggctgcagaaagggagtgcaaggtgagt

SEQ ID NO: 506672 - DNA, 120 bp, Artificial Sequence
  ENSG00000164081_24 (sequence is synthesized)
gtgtgggcaaattcatgcagtattatgtgggccactccaaaagagccttgcctattggcttgtgaatttagtttcatcctagaggtaaattgggagccattgagaggttctgagcaagat

SEQ ID NO: 506673 - DNA, 120 bp, Artificial Sequence
  ENSG00000164081_25 (sequence is synthesized)
gaccacatgtgttctggtgtcttttggctactgaagaggatgttgagctgggagtcccataaggcctgctgaagcgttcccaggaaagaccctggaactcaaacccaggcaagccagctg

SEQ ID NO: 506674 - DNA, 120 bp, Artificial Sequence
  ENSG00000164081_26 (sequence is synthesized)
tagaaaggaagagaataagtgacctttcatccgtttctccatatgacttatgtagatgtttcttttgcacagcacaggttggtagggtcagggacatgaagataggctttgtggcaggca

SEQ ID NO: 506675 - DNA, 120 bp, Artificial Sequence
  ENSG00000164081_27 (sequence is synthesized)
gtgtctcttggcttgtcagcaggaggcctgccagataacttcctgcctatctggtcattctcaagtcttggcgtgtgagtagggcagttccaccatctagagacaagagatggtattgca

SEQ ID NO: 506676 - DNA, 120 bp, Artificial Sequence
  ENSG00000164081_28 (sequence is synthesized)
gtgatctcctgtgcctctgggtggggtgggaggagcttcaggccaaaagaagtgactgtgtgcaaggtagacttatggagggcaagaaagtttacagcaaaatactgggggagaagagag

SEQ ID NO: 506677 - DNA, 120 bp, Artificial Sequence
  ENSG00000164081_29 (sequence is synthesized)
tgccactgagccacgctgaaaggctcttcaagagggtatttgaaccggaaggacaggcagggaggagctgcatattcagaggtttgggtggtcgggcattctaggccatggacagttgtt

SEQ ID NO: 506678 - DNA, 120 bp, Artificial Sequence
  ENSG00000164081_30 (sequence is synthesized)
tggactgtgtcatagctactaataaccacaattatggggcatttgctgaatgctggacccaggctaagctctcgtgaagtttcttgtttaatatggcagttctgtaagtagatattgagg

SEQ ID NO: 506679 - DNA, 120 bp, Artificial Sequence
  ENSG00000164081_31 (sequence is synthesized)
aactggggctcccagaacccaagggacttgtctagaatcacacgactcagattcgcaccgtggcctgcctctctcaagctgtgtttctgaccactacacccggttgcctgctactaaagc

SEQ ID NO: 506680 - DNA, 120 bp, Artificial Sequence
  ENSG00000164081_32 (sequence is synthesized)
tctgagccaggtttggatgccgtaggcttcaagggggctgcaaggggaccagagctgcagacagttgagggtgaccgttagggtctgcttagaagtgagagcctggaataggtgcccaag

SEQ ID NO: 506681 - DNA, 120 bp, Artificial Sequence
  ENSG00000164081_33 (sequence is synthesized)
tcccaggcaaactgtgactaaaaggaaggcctgggttggcctgagtagaggaggccattcagggctgagaaacccccaggggatttcagagagggcttggaaagggctgtaatgggaggg

SEQ ID NO: 506682 - DNA, 120 bp, Artificial Sequence
  ENSG00000164081_34 (sequence is synthesized)
agaggtgagaacaggtaataatgacttcacagtgctgggaaggagggctggggagaggagtaagtggaggtagagggagaagcctgtttaaacttaggggtcatccctgtgaaggtgaac

SEQ ID NO: 506683 - DNA, 120 bp, Artificial Sequence
  ENSG00000164081_35 (sequence is synthesized)
tgctggcaaaaaaaatttttttgcggtgggtagggagaaaggagcctttagagttgagcaaaacccaggattgagggtacaaggtctgtgctgaatctcttggattcaagatcatatgtc

SEQ ID NO: 506684 - DNA, 120 bp, Artificial Sequence
  ENSG00000164081_36 (sequence is synthesized)
tctgagggcccagtctgaaggctggtacagacttaggcacctggaaagctgacgtgggaaacaggtagcagtaggtgagacaaagtgaggcctcttgatgccaggaggagaaatgagtac

SEQ ID NO: 506685 - DNA, 120 bp, Artificial Sequence
  ENSG00000164081_37 (sequence is synthesized)
ggtagggaggcaagcagagtgggaagtgcaggcactagcaacctacagagatttggaggggaaccagtggtcttggcttttagccaggaagggacttaggaagtgggataggtccctgga

SEQ ID NO: 506686 - DNA, 120 bp, Artificial Sequence
  ENSG00000164081_38 (sequence is synthesized)
tgggccatgggttgcagaagaagtctagaggctctggtgatggtagctggccctgccagaggggtggggaggatgatctcttcacagaatttcaccagcaacccagatgtcagtgatccc

SEQ ID NO: 506687 - DNA, 120 bp, Artificial Sequence
  ENSG00000164081_39 (sequence is synthesized)
aatcctatgtcctgacaggtgcttcctgcagcccctcctcagccacttgccaggtcctgaccctgcaagcatgtgtgtaaacacacacacacgtgttcttgctttcctagggcatgaccg

SEQ ID NO: 506688 - DNA, 120 bp, Artificial Sequence
  ENSG00000164081_40 (sequence is synthesized)
tggagggctctgagctctttattaccactcctcagttttgctcccttgcctgccataatttctctgcctgtaaagcctgctcttctccaggagataggagggaaattagctaataggatt

SEQ ID NO: 506689 - DNA, 120 bp, Artificial Sequence
  ENSG00000164081_41 (sequence is synthesized)
ttgctggacccaggctgcaggatcagccactgtacagttctgctggtggccctggggcgtgggggctgacagagggtcttatggtggggtggaagggccccctcagtggagccatgtgga

SEQ ID NO: 506690 - DNA, 120 bp, Artificial Sequence
  ENSG00000164081_42 (sequence is synthesized)
gggtgatggttcagaggtcctctccgcccttccctctcctggcctccagaagggcagagaccaagtctaacccctcactatgatccctgggtttccacagggcatggcatgtttgttgaa

SEQ ID NO: 506691 - DNA, 120 bp, Artificial Sequence
  ENSG00000164081_43 (sequence is synthesized)
ggaatagatgagagtcctgtggtacgatgccacaggcaggggccataggtgggttccagtaagaaaatagctagctgtgtcctggtatctggggctgcatggcttgtcagagctgctggt

SEQ ID NO: 506692 - DNA, 120 bp, Artificial Sequence
  ENSG00000164081_44 (sequence is synthesized)
gtgagactgggcggcttttcactgagagctgcagcatctctcccaagctccgctccatcgctgtctactatgacaacccccacatggatcctggacctttttgcctagaggcctggagtg

SEQ ID NO: 506693 - DNA, 120 bp, Artificial Sequence
  ENSG00000164081_45 (sequence is synthesized)
ccgcgagagggggcggagcgagcgtgcgcggcgggcgcgcgcaggctccgtaaccgaaccctgagccgcctgcgcggatcggcgtccgcagcgggcggctgctgaggtgccccctgataa

SEQ ID NO: 506694 - DNA, 120 bp, Artificial Sequence
  ENSG00000164082_0 (sequence is synthesized)
gagcgcagagccagcgagccagcgagcgagcgagcgggagccggagcctcgcgccccccgctccactccgattctctccgcgccagagccagcgcgccaggagctgggtcccttcgcatc

SEQ ID NO: 506695 - DNA, 120 bp, Artificial Sequence
  ENSG00000164082_1 (sequence is synthesized)
tctcttcttgtctgtcctttcctggtccctgtttcctcctctctttgccttcgctgcttctaatctcatcccctggagacccaggtctgcgggacccatccatcccctttggggccatgg

SEQ ID NO: 506696 - DNA, 120 bp, Artificial Sequence
  ENSG00000164082_2 (sequence is synthesized)
gatcgctgcttgcgctcctggcactgctgctgctgtggggtgctgtggctgagggcccagccaagaaggtgctgaccctggagggagacttggtgctgggtgggctgttcccagtgcacc

SEQ ID NO: 506697 - DNA, 120 bp, Artificial Sequence
  ENSG00000164082_3 (sequence is synthesized)
agaagggcggcccagcagaggactgtggtcctgtcaatgagcaccgtggcatccagcgcctggaggccatgctttttgcactggaccgcatcaaccgtgacccgcacctgctgcctggcg

SEQ ID NO: 506698 - DNA, 120 bp, Artificial Sequence
  ENSG00000164082_4 (sequence is synthesized)
tgcgcctgggtgcacacatcctcgacagttgctccaaggacacacatgcgctggagcaggcactggactttgtgcgtgcctcactcagccgtggtgctgatggctcacgccacatctgcc

SEQ ID NO: 506699 - DNA, 120 bp, Artificial Sequence
  ENSG00000164082_5 (sequence is synthesized)
ccgacggctcttatgcgacccatggtgatgctcccactgccatcactggtgttattggcggttcctacagtgatgtctccatccaggtggccaacctcttgaggctatttcagatcccac

SEQ ID NO: 506700 - DNA, 120 bp, Artificial Sequence
  ENSG00000164082_6 (sequence is synthesized)
agattagctacgcctctaccagtgccaagctgagtgacaagtcccgctatgactactttgcccgcacagtgcctcctgacttcttccaagccaaggccatggctgagattctccgcttct

SEQ ID NO: 506701 - DNA, 120 bp, Artificial Sequence
  ENSG00000164082_7 (sequence is synthesized)
tcaactggacctatgtgtccactgtggcgtctgagggcgactatggcgagacaggcattgaggcctttgagctagaggctcgtgcccgcaacatctgtgtggccacctcggagaaagtgg

SEQ ID NO: 506702 - DNA, 120 bp, Artificial Sequence
  ENSG00000164082_8 (sequence is synthesized)
gccgtgccatgagccgcgcggcctttgagggtgtggtgcgagccctgctgcagaagcccagtgcccgcgtggctgtcctgttcacccgttctgaggatgcccgggagctgcttgctgcca

SEQ ID NO: 506703 - DNA, 120 bp, Artificial Sequence
  ENSG00000164082_9 (sequence is synthesized)
gccagcgcctcaatgccagcttcacctgggtggccagtgatggttggggggccctggagagtgtggtggcaggcagtgagggggctgctgagggtgctatcaccatcgagctggcctcct

SEQ ID NO: 506704 - DNA, 120 bp, Artificial Sequence
  ENSG00000164082_10 (sequence is synthesized)
accccatcagtgactttgcctcctacttccagagcctggacccttggaacaacagccggaacccctggttccgtgaattctgggagcagaggttccgctgcagcttccggcagcgagact

SEQ ID NO: 506705 - DNA, 120 bp, Artificial Sequence
  ENSG00000164082_11 (sequence is synthesized)
gcgcagcccactctctccgggctgtgccctttgagcaggagtccaagatcatgtttgtggtcaatgcagtgtacgccatggcccatgcgctccacaacatgcaccgtgccctctgcccca

SEQ ID NO: 506706 - DNA, 120 bp, Artificial Sequence
  ENSG00000164082_12 (sequence is synthesized)
acaccacccggctctgtgacgcgatgcggccagttaacgggcgccgcctctacaaggactttgtgctcaacgtcaagtttgatgccccctttcgcccagctgacacccacaatgaggtcc

SEQ ID NO: 506707 - DNA, 120 bp, Artificial Sequence
  ENSG00000164082_13 (sequence is synthesized)
gacaccagcctcatcccatgggcctcaccctcagccggccccctgcccgcctctcgctgcagtgagccctgcctccagaatgaggtgaagagtgtgcagccgggcgaagtctgctgctgg

SEQ ID NO: 506708 - DNA, 120 bp, Artificial Sequence
  ENSG00000164082_14 (sequence is synthesized)
ctctgcattccgtgccagccctatgagtaccgattggacgaattcacttgcgctgattgtggcctgggctactggcccaatgccagcctgactggctgcttcgaactgccccaggagtac

SEQ ID NO: 506709 - DNA, 120 bp, Artificial Sequence
  ENSG00000164082_15 (sequence is synthesized)
atccgctggggcgatgcctgggctgtgggacctgtcaccatcgcctgcctcggtgccctggccaccctctttgtgctgggtgtctttgtgcggcacaatgccacaccagtggtcaaggcc

SEQ ID NO: 506710 - DNA, 120 bp, Artificial Sequence
  ENSG00000164082_16 (sequence is synthesized)
tcaggtcgggagctctgctacatcctgctgggtggtgtcttcctctgctactgcatgaccttcatcttcattgccaagccatccacggcagtgtgtaccttacggcgtcttggtttgggc

SEQ ID NO: 506711 - DNA, 120 bp, Artificial Sequence
  ENSG00000164082_17 (sequence is synthesized)
actgccttctctgtctgctactcagccctgctcaccaagaccaaccgcattgcacgcatcttcggtggggcccgggagggtgcccagcggccacgcttcatcagtcctgcctcacaggtg

SEQ ID NO: 506712 - DNA, 120 bp, Artificial Sequence
  ENSG00000164082_18 (sequence is synthesized)
gccatctgcctggcacttatctcgggccagctgctcatcgtggtcgcctggctggtggtggaggcaccgggcacaggcaaggagacagcccccgaacggcgggaggtggtgacactgcgc

SEQ ID NO: 506713 - DNA, 120 bp, Artificial Sequence
  ENSG00000164082_19 (sequence is synthesized)
tgcaaccaccgcgatgcaagtatgttgggctcgctggcctacaatgtgctcctcatcgcgctctgcacgctttatgccttcaagactcgcaagtgccccgaaaacttcaacgaggccaag

SEQ ID NO: 506714 - DNA, 120 bp, Artificial Sequence
  ENSG00000164082_20 (sequence is synthesized)
ttcattggcttcaccatgtacaccacctgcatcatctggctggcattcctgcccatcttctatgtcacctccagtgactaccgggtacagaccaccaccatgtgcgtgtcagtcagcctc

SEQ ID NO: 506715 - DNA, 120 bp, Artificial Sequence
  ENSG00000164082_21 (sequence is synthesized)
agcggctccgtggtgcttggctgcctctttgcgcccaagctgcacatcatcctcttccagccgcagaagaacgtggttagccaccgggcacccaccagccgctttggcagtgctgctgcc

SEQ ID NO: 506716 - DNA, 120 bp, Artificial Sequence
  ENSG00000164082_22 (sequence is synthesized)
agggccagctccagccttggccaagggtctggctcccagtttgtccccactgtttgcaatggccgtgaggtggtggactcgacaacgtcatcgctttgaagaccccatactcccgccctg

SEQ ID NO: 506717 - DNA, 120 bp, Artificial Sequence
  ENSG00000164082_23 (sequence is synthesized)
acacagctgctcctgggaacctagtgcagacccacgtccagggccaggaggaagttggctggagcactgcaataatttattacccaccctatgtctgcccccaaagtcacttacccacct

SEQ ID NO: 506718 - DNA, 120 bp, Artificial Sequence
  ENSG00000164082_24 (sequence is synthesized)
ccttaccccagctcttcagactcagaagtcaggagccttggccaggagcctctgcagtggccactaactgcccttgtagctgtgtttcctcctggccaggcccagggctcagagaggagc

SEQ ID NO: 506719 - DNA, 120 bp, Artificial Sequence
  ENSG00000164082_25 (sequence is synthesized)
aagccagggttcactctgccctggacccgggtggctgaggacggcaggccccagtcctaaccagcaaaggtgcttccagcccagcccctccccccaactagggccttttttattttttat

SEQ ID NO: 506720 - DNA, 120 bp, Artificial Sequence
  ENSG00000164082_26 (sequence is synthesized)
ataagttactctgggatggggagggtggttattgtgggggctgcccctccccctgcacagtagtttgtcctgtggtttattttgtattacctgtaaataaagtggctttattttaaaaaa

SEQ ID NO: 506721 - DNA, 120 bp, Artificial Sequence
  ENSG00000164082_27 (sequence is synthesized)
atgtggctgtgctagcatctatttctgcagccccgggttggggcagggatgagtgggcggcctcctacctgctgctgtcttccagggcctctgctgaagttttctccacagtcctcctta

SEQ ID NO: 506722 - DNA, 120 bp, Artificial Sequence
  ENSG00000164082_28 (sequence is synthesized)
gggctcatgcatttatctccagaagtccagttacctccttgccatcccaagctgcctgcctcctggatcagggcccacgcctcagcagtggtctgcttctccctcgtcctgatcaacacg

SEQ ID NO: 506723 - DNA, 120 bp, Artificial Sequence
  ENSG00000164082_29 (sequence is synthesized)
aggctagcctgtcatccgtaggctgcacctgcctgttaatattccccctcatggctgctccttctctcttgcccatgtccctatcatcttccctttgccaggcactgtggcctcccatgc

SEQ ID NO: 506724 - DNA, 120 bp, Artificial Sequence
  ENSG00000164082_30 (sequence is synthesized)
attatcgtttttatcctctcagcagccttgtagggcaggaatgtgaaactgaggctcagggagatttgccaactccaggggcccaaaggtggccaacctcttgaggctatttcagatccc

SEQ ID NO: 506725 - DNA, 120 bp, Artificial Sequence
  ENSG00000164082_31 (sequence is synthesized)
acgtcaagtttgatggtgacctgaaagtctcctgaaatcaaaagttattttaataagagtgccagctttaagagaaatgactgctgcagatcatcactatgcttcaggaagaatcaccgt

SEQ ID NO: 506726 - DNA, 120 bp, Artificial Sequence
  ENSG00000164082_32 (sequence is synthesized)
ctttgaccgctttggtgatggtattggccgctacaacatcttcacctatctgcgtgcaggcagtgggcgctatcgctaccagaagactcgcaagtgccccgaaaacttcaacgaggccaa

SEQ ID NO: 506727 - DNA, 120 bp, Artificial Sequence
  ENSG00000164082_33 (sequence is synthesized)
cgggaagcgggaagacagccccgggcgtcccgcctttcttctccagaaaacgcacgccccacatcgcactcccccgttcctcctgctccagcgtcctctggtccttctttctgtctgtgc

SEQ ID NO: 506728 - DNA, 120 bp, Artificial Sequence
  ENSG00000164082_34 (sequence is synthesized)
ctccgtctttgtctcaacctctcaggcttgctcgctccctgcccagattttgtggcccaggctcctggctgtctgactccgggtttctgtccccttcctgcctctgagcttccgtctggg

SEQ ID NO: 506729 - DNA, 120 bp, Artificial Sequence
  ENSG00000164082_35 (sequence is synthesized)
cctcccctctgggagacttgcgacttgaccagttttggcttcagcccccatctgggtccctgtctccatctgtgctggtcttcctccctgcttctccctcgcttgcctgggtaagctgct

SEQ ID NO: 506730 - DNA, 120 bp, Artificial Sequence
  ENSG00000164082_36 (sequence is synthesized)
gctttcctgatccccagaggagcccagtgcccctgccctggggagctgagggggcaaaatgaagaggctcagcctccgtggccagcacatggggtccttgagttagttgctgcccttctt

SEQ ID NO: 506731 - DNA, 120 bp, Artificial Sequence
  ENSG00000164082_37 (sequence is synthesized)
caaactcagtttcctttcctgttctgaggaaagaggtatgtccctctcccagcctttccaagcctgtgtgattgtgagagcctttgtggggtgtgtgtttgggaaggcaactggggtaca

SEQ ID NO: 506732 - DNA, 120 bp, Artificial Sequence
  ENSG00000164082_38 (sequence is synthesized)
aatgattggacgcagtggggaagagacagggagggggtctctgagggccatggctagggtgggcagggccctgaagctgaggatggggagattggaaatggtgactttctctgctgggtc

SEQ ID NO: 506733 - DNA, 120 bp, Artificial Sequence
  ENSG00000164082_39 (sequence is synthesized)
gggagtgaagagaaaacagaggcacaaaatctcaagcagtgttctacacagagctagagagtcccgcactctcaccctcagcactgtttggagactctagcccccaaccctgacacacac

SEQ ID NO: 506734 - DNA, 120 bp, Artificial Sequence
  ENSG00000164082_40 (sequence is synthesized)
atacgtgaacatctgcttgccctgttgacttaggaccttgagccacttgggtaccctccctgaggccagccattccaccttgctgtctcattcccagggcttagtgtctctattccttcc

SEQ ID NO: 506735 - DNA, 120 bp, Artificial Sequence
  ENSG00000164082_41 (sequence is synthesized)
tcagtcagcaaactgtggggatggctttttaagaaccaaaggttagaacccttgggtgttcacatgggctccagtctccccacgggttggagactgtcccttagagatgcttcccttcct

SEQ ID NO: 506736 - DNA, 120 bp, Artificial Sequence
  ENSG00000164082_42 (sequence is synthesized)
cttccctggtgggtcctgagacagcagttccttctctctggaaatccaaggctcaggatggggacctctgagtttgtgactgtgacatagtctgttccaaaggtattgacctcggggtcc

SEQ ID NO: 506737 - DNA, 120 bp, Artificial Sequence
  ENSG00000164082_43 (sequence is synthesized)
tgggaggtttgtgctgttcttggacaccctttgaattacagaggggtcagcattggctggggtctcctgtcctctgcctgggacttcactgcttgcatctctccccactgctgagtttgg

SEQ ID NO: 506738 - DNA, 120 bp, Artificial Sequence
  ENSG00000164082_44 (sequence is synthesized)
taggggaatatggcccatctctcaccaagctgaggccagggctgagagacaggtccaggggagtcccaggagcttctcaacctacttaatgacaccatcctgtccctccctggcttttga

SEQ ID NO: 506739 - DNA, 120 bp, Artificial Sequence
  ENSG00000164082_45 (sequence is synthesized)
gtacctaggaaaggggctcgtggggaggcagagtcagaaggggcagctgctctcaggttccacttttcctggtctgtttttctgtctttctatctctctgcaggagctgggtcccttcgc

SEQ ID NO: 506740 - DNA, 120 bp, Artificial Sequence
  ENSG00000164082_46 (sequence is synthesized)
ggctgtcagaggatgaggggaagcagaacttcagcttccattcctttgctaaggaaacagtagagtgaaagtaaaggactcacctggggtggcgtcagagcaagggcaaggatgctaggc

SEQ ID NO: 506741 - DNA, 120 bp, Artificial Sequence
  ENSG00000164082_47 (sequence is synthesized)
agagaggactccaactgaagctacggctgaggttccactttcttccagagagtagacctctggcctggtcccgccattttgagggtctctggctcctccttgggccttgcccactgtctt

SEQ ID NO: 506742 - DNA, 120 bp, Artificial Sequence
  ENSG00000164082_48 (sequence is synthesized)
cattctcaggcagcaccaagagttagaatcagtctggcttgagggtgagcatcaggatgacgctctatattcacggaaaatgtctttctgtctttcttttttcttttctttcttttttct

SEQ ID NO: 506743 - DNA, 89 bp, Artificial Sequence
  ENSG00000164082_49 (sequence is synthesized)
ttctttctttctttctttcttttcttagatggggtctcactatattttgtaggctggagtgcagtggttattcacaggcacaatatctg

SEQ ID NO: 506744 - DNA, 120 bp, Artificial Sequence
  ENSG00000164082_50 (sequence is synthesized)
gaactgacattcagagttagctacaatcagtgtaggggttagggttggaatctggggtccgatttggttgatgttagagcaaggctaaattcagcatgtttggcttgggtggaatttatg

SEQ ID NO: 506745 - DNA, 120 bp, Artificial Sequence
  ENSG00000164082_51 (sequence is synthesized)
gtagggctagagttggattttgagaacttttaggctgagtagaaagagtaggtgcttgaggggacctgggtttgaatctaggctgcactattcactcatggggccttaagcatgtcttct

SEQ ID NO: 506746 - DNA, 120 bp, Artificial Sequence
  ENSG00000164082_52 (sequence is synthesized)
gctttcttgaaccctgatttctcactggggccagggatggctgtaaatcctggctagagcctggctgggagatgtgaggtttacaggggatgaagtgggggtggagagaggaagtgattt

SEQ ID NO: 506747 - DNA, 120 bp, Artificial Sequence
  ENSG00000164082_53 (sequence is synthesized)
tccagccactgaccacattctggtgaatggcagtggttgcaggtgaccagtgaggttgggattcagtttgcaccaggatgactgttaggactaggggtgctggagctggggttgttgtta

SEQ ID NO: 506748 - DNA, 120 bp, Artificial Sequence
  ENSG00000164082_54 (sequence is synthesized)
ggattagtggggacaggattggagctgagactgggtttagccttagcattgagtttggggagagggctgtagtgtatgtttcgatgaagttgggatttggagcctgggttggaaagtgtt

SEQ ID NO: 506749 - DNA, 120 bp, Artificial Sequence
  ENSG00000164082_55 (sequence is synthesized)
ggatagtactaaagttgaatttggggagtcatggttggggattgatgtgggcattaggtttttggagatgtctgggctttaaggctgggattacatttggcatttagggttggggtttga

SEQ ID NO: 506750 - DNA, 120 bp, Artificial Sequence
  ENSG00000164082_56 (sequence is synthesized)
tgttggagtttaggagtaagactttgttgtcatctctcatttagaaaaatgattggggtcaaggcaggatttagtattgggttaaggattggaagggctaatggtggtcttagctctggc

SEQ ID NO: 506751 - DNA, 120 bp, Artificial Sequence
  ENSG00000164082_57 (sequence is synthesized)
atttgggttccatgttagggtgaatgttgaggtcacatcagggtaacacactagtccaaccttctcttccttccctcccccatcctagccccctttcgcccagctgacacccacaatgag

SEQ ID NO: 506752 - DNA, 80 bp, Artificial Sequence
  ENSG00000164086_0 (sequence is synthesized)
gtttaattggggctgtcaggccgcggtgcgcgcggagggccgggcgggcgggcgggacggaggccgggaggccgggaggc

SEQ ID NO: 506753 - DNA, 80 bp, Artificial Sequence
  ENSG00000164086_1 (sequence is synthesized)
cccggccccggccccgggccgcccgcgctccccatgaaaaaccagctccgcggccccccagcgcgggcgcacatgtcgac

SEQ ID NO: 506754 - DNA, 80 bp, Artificial Sequence
  ENSG00000164086_2 (sequence is synthesized)
aaaaaccagctccgcggccccccagcgcgggcgcacatgtcgacttcgggggcggcggcggctgggggcacccgggcggg

SEQ ID NO: 506755 - DNA, 120 bp, Artificial Sequence
  ENSG00000164086_3 (sequence is synthesized)
gccctgcaagagcgccgagtggctgcaggaggagctggaggcgcgcggcggcgcgtccttgctgctgctcgactgccggccgcacgagctcttcgagtcgtcgcacatcgagacggccat

SEQ ID NO: 506756 - DNA, 120 bp, Artificial Sequence
  ENSG00000164086_4 (sequence is synthesized)
caacctggccatcccgggcctcatgttgcgccgcctgcgcaagggcaacctgcccatccgctccatcatccccaaccacgccgacaaggagcgcttcgccacgcgctgcaaggcggccac

SEQ ID NO: 506757 - DNA, 120 bp, Artificial Sequence
  ENSG00000164086_5 (sequence is synthesized)
cgtgctgctctacgacgaggccacggccgagtggcagcccgagcccggcgctcccgcctccgtgctcggcctgctcctacagaagctgcgcgacgacggctgccaggcctactacctcca

SEQ ID NO: 506758 - DNA, 120 bp, Artificial Sequence
  ENSG00000164086_6 (sequence is synthesized)
aggtggtttcaacaagtttcaaacagagtactctgagcactgcgagaccaacgtggacagctcttcctcgccgagcagctcgccacccacctcagtgctgggcctggggggcctgcgcat

SEQ ID NO: 506759 - DNA, 120 bp, Artificial Sequence
  ENSG00000164086_7 (sequence is synthesized)
cagctctgactgctccgacggcgagtcggaccgagagctgcccagcagtgccaccgagtcagacggcagccctgtgccatccagccaaccagccttccctgtccagatcctgccctacct

SEQ ID NO: 506760 - DNA, 120 bp, Artificial Sequence
  ENSG00000164086_8 (sequence is synthesized)
ctacctcggctgcgccaaggactccaccaacctggacgtgctcggcaagtatggcatcaagtatatcctcaatgtcacacccaacctacccaacgccttcgagcacggcggcgagttcac

SEQ ID NO: 506761 - DNA, 120 bp, Artificial Sequence
  ENSG00000164086_9 (sequence is synthesized)
ctacaagcagatccccatctctgaccactggagccagaacctctcccagttcttccctgaggccatcagcttcattgacgaagcccgctccaagaagtgtggtgtcctggtgcactgcct

SEQ ID NO: 506762 - DNA, 120 bp, Artificial Sequence
  ENSG00000164086_10 (sequence is synthesized)
ggcaggcatcagccgctcagtgacggtcactgtggcctatctgatgcagaagatgaacctgtcactcaacgacgcctacgactttgtcaagaggaaaaagtccaacatctcgcccaactt

SEQ ID NO: 506763 - DNA, 120 bp, Artificial Sequence
  ENSG00000164086_11 (sequence is synthesized)
caacttcatggggcagctgctggactttgagcggacgctggggctaagcagcccgtgcgacaaccacgcgtcgagtgagcagctctacttttccacgcccaccaaccacaacctgttccc

SEQ ID NO: 506764 - DNA, 120 bp, Artificial Sequence
  ENSG00000164086_12 (sequence is synthesized)
actcaatacgctggagtccacgtgaggcctggtgcacggggggcatggcaccaggcccctgctcggctctccacagggctaggtgggagagcccaagcccgccacctctggcctgaggaa

SEQ ID NO: 506765 - DNA, 120 bp, Artificial Sequence
  ENSG00000164086_13 (sequence is synthesized)
cccccagatgtcacctgtgcccagaggcccaggctgatcggtgtcggagcgcccctcaccatccttgggggcagggcccgcaggcaaggtctcccactgcagggcttgctggagaggcct

SEQ ID NO: 506766 - DNA, 120 bp, Artificial Sequence
  ENSG00000164086_14 (sequence is synthesized)
ggctcttggacacgtggctttgggcgtccaccagggcctcatcctgtccaggacgctcctttctgctgacagcccagccagtttggctgttttttaaagacacatccacggacctgagtt

SEQ ID NO: 506767 - DNA, 120 bp, Artificial Sequence
  ENSG00000164086_15 (sequence is synthesized)
ggctgttttttaaagacacatccacggacctgagtttactttttacttttggcaggtaaatccaagctccctggagcacaaagagtgtttgagctcttcttgatttttcttttttttttt

SEQ ID NO: 506768 - DNA, 120 bp, Artificial Sequence
  ENSG00000164086_16 (sequence is synthesized)
caacagtggattgtataacccagtatttcatccctttcctgatcctgcaagagagagaaatgttcagttttgtttttcgttcaatttcaaaaagcaagtatcgtgtttgtttttgttttt

SEQ ID NO: 506769 - DNA, 120 bp, Artificial Sequence
  ENSG00000164086_17 (sequence is synthesized)
gttttttaatggaaaagacagacgccatgttgaccttgaccaaatgcgttttgcacatgtgtgaagcctctgtttcctcagcgggcccttcttgaaggggtggcttactgctcttcaggt

SEQ ID NO: 506770 - DNA, 120 bp, Artificial Sequence
  ENSG00000164086_18 (sequence is synthesized)
attgggacccccagtcgtgccgcctcccacccttggcccagtctgacttagctctgcattcgcctgtgatgactgctgcaagttgtgattggtgggctggatggtggtctttgcattttc

SEQ ID NO: 506771 - DNA, 120 bp, Artificial Sequence
  ENSG00000164086_19 (sequence is synthesized)
tgccgtctcatccatccctctggtggtccctgcagacctccctgaggcagaaggtggggaccctggggccctgccgctgtcccccaggaggtgggccgcagggggctgccaggcagtagc

SEQ ID NO: 506772 - DNA, 120 bp, Artificial Sequence
  ENSG00000164086_20 (sequence is synthesized)
attagccctctggggtcagcccctaagaaggcctgggctctgagcccttttatatacttagccactacttctgtctgtctgtctgtctctctctcttcctctccctctctctctttctct

SEQ ID NO: 506773 - DNA, 120 bp, Artificial Sequence
  ENSG00000164086_21 (sequence is synthesized)
ctctccctctctctctctttctttctctctccccccctccctctctcttcctttcctctctcttgttgtaactgggagtggaggcccagtggctggggagacattaggtggtggggccca

SEQ ID NO: 506774 - DNA, 120 bp, Artificial Sequence
  ENSG00000164086_22 (sequence is synthesized)
gcccgacctccaggttcttccttctccctagctgttgctttggtctggccactcccagcccccttgtccccttggaagcttgccctgccctcatcttgcccatgccttctactgccagga

SEQ ID NO: 506775 - DNA, 120 bp, Artificial Sequence
  ENSG00000164086_23 (sequence is synthesized)
gacttgcacccatttcaaccctagggcgggggcaagtggggcaaggatggaccagcagaaggggggtaaggctctgttcacttccccctgcctccacagaacgaagccacggattccgtt

SEQ ID NO: 506776 - DNA, 120 bp, Artificial Sequence
  ENSG00000164086_24 (sequence is synthesized)
atcttcctccagttttgttccttctccagcctcagttccaccaggtgtcaggactgcatgggggcctggggcaggcagaggagtcaggccagggtccctgacggagcagcactcagcatg

SEQ ID NO: 506777 - DNA, 120 bp, Artificial Sequence
  ENSG00000164086_25 (sequence is synthesized)
tgagtgaggccacagaaaaactctgccccactgcttcttacctcacgggggtggctttcagggattctttagcgcagcagattaaaatcttgccacagtcgagaaattgacaacaagctt

SEQ ID NO: 506778 - DNA, 120 bp, Artificial Sequence
  ENSG00000164086_26 (sequence is synthesized)
ccatgctgtacatggttctctttttctctcttttatttttaaaaagaaaacccagaaagatgtaccagatttgtgtaaatgagggtatgccagaaggtggccagttttgctttatgatct

SEQ ID NO: 506779 - DNA, 120 bp, Artificial Sequence
  ENSG00000164086_27 (sequence is synthesized)
tatgaaggaagatttgtgaccctacgtatatatatacacacacatacatatatatatatatcccgaaccaacaacgggactttgtttatattgcaaataaatattattttttctttaaaa

SEQ ID NO: 506780 - DNA, 120 bp, Artificial Sequence
  ENSG00000164086_28 (sequence is synthesized)
cagttcttccctgaggccatcagcttcattggtaggtgctgtgtgctgggcaggggggtgtgggtgcatcaaggtgtatgcaggactctgggtggcgcccccgcctgactgggtacctct

SEQ ID NO: 506781 - DNA, 120 bp, Artificial Sequence
  ENSG00000164086_29 (sequence is synthesized)
gggcctgttgagacctgtgtgtgccctacgtgtgccagcgtgtgcccgtgggtgtacccaggcctactgtgagtcaccgagtcccttgggcccctctacctgttggggcctgagcagtct

SEQ ID NO: 506782 - DNA, 120 bp, Artificial Sequence
  ENSG00000164086_30 (sequence is synthesized)
cctgagtcctgagctccccctagctgacagcacgtcatgggctctctgctgtccagcttgtgttttcctggcttagatgttgtttcgggcttagcaagctgaaacatcacagcgcacaga

SEQ ID NO: 506783 - DNA, 120 bp, Artificial Sequence
  ENSG00000164086_31 (sequence is synthesized)
cctcccacgggtctcacttgctccgcatcacgcctcagcacacgtgtctctccaggatggggttgtcatagtgcctctttgggctttaatgtggacctaagagggctgaaaggtagccct

SEQ ID NO: 506784 - DNA, 120 bp, Artificial Sequence
  ENSG00000164086_32 (sequence is synthesized)
ggagccagaggcacaccccaaacaggcagctattgaaatgtggtgactgctagctcagtcagcctccagatgctctctgcagcctgtagggcttgcttggagtgtagggaggagtgcaag

SEQ ID NO: 506785 - DNA, 120 bp, Artificial Sequence
  ENSG00000164086_33 (sequence is synthesized)
agaaggtgggggagtggagaaaggccttccccagagcagtgtgtcctgctgtctggcttagtgcccttcgagtccctgtatccccagcctcagcagactcgggtccccactgctttctcc

SEQ ID NO: 506786 - DNA, 120 bp, Artificial Sequence
  ENSG00000164086_34 (sequence is synthesized)
ggcacgagggctcaggatgaatgtaaacgctctatctctgagcctggtgacccaatgtttctgcccagcctccagtggcaaggtgtgggggtggcccgggctgtcttttcccgatggtgg

SEQ ID NO: 506787 - DNA, 120 bp, Artificial Sequence
  ENSG00000164086_35 (sequence is synthesized)
ctgtgtccagtggagggcgttttggtgtcggctgggctgggctagctttaacaacaggaagtgggaggcttccccgcctcatccgcttactgggaaccaaaagtaggtgcctggctggga

SEQ ID NO: 506788 - DNA, 120 bp, Artificial Sequence
  ENSG00000164086_36 (sequence is synthesized)
ggaaggaaggaagctgaggcctgggggaggggctgcaactggggctgcctggagcttctcagccctgcccaccaccccctgggtcaagagggctaggggtgctgcctcagcatttgaact

SEQ ID NO: 506789 - DNA, 120 bp, Artificial Sequence
  ENSG00000164086_37 (sequence is synthesized)
cccccaacgagggaggggaatagagagagggaagcaggcttcgccaggctgggcctggctagtgggtacctttatccttcctgaaagctcctccccgtctgggtagggggacctttttcc

SEQ ID NO: 506790 - DNA, 120 bp, Artificial Sequence
  ENSG00000164086_38 (sequence is synthesized)
tcatttgacaagtgaaggaattgaggcccaggcatcccttaggagtcagtgggacaggatcagtcaccagctacaccctgaaaaggccaaaaataaagccagcagaaacagactgtcttt

SEQ ID NO: 506791 - DNA, 120 bp, Artificial Sequence
  ENSG00000164086_39 (sequence is synthesized)
ggatcacctggaggtgggtttggaggccaggcgttcctcacatcctggtgtcaccactggaggctggtcccagcacccccttttcccacccccaatctcgaggtctgaccacacagctcc

SEQ ID NO: 506792 - DNA, 120 bp, Artificial Sequence
  ENSG00000164086_40 (sequence is synthesized)
tcatgaagctgcaatgtctgtctccttgccagatgatcctgccccagtgccttagccatggggccccctgtcagtccctgagtctggaggaagcacctactgtatgctttactccttggt

SEQ ID NO: 506793 - DNA, 120 bp, Artificial Sequence
  ENSG00000164086_41 (sequence is synthesized)
tgggaggggatgggagaggaagctctgtcaggacaaaggcaacgaagaacagtgggtgaacccgtatgtcatcttgtaggaaggcattgattgcgtgctagctgtgtgcctggctcctgg

SEQ ID NO: 506794 - DNA, 120 bp, Artificial Sequence
  ENSG00000164086_42 (sequence is synthesized)
agggttcagagtcagggtggtggggacatcaaggaccccatggctgcctcttgtgaatctatgtccctggcacagctgtggcacacagagaggcagctgccccggggtccaggagagatt

SEQ ID NO: 506795 - DNA, 120 bp, Artificial Sequence
  ENSG00000164086_43 (sequence is synthesized)
acaggactgagttgttcagtagctcggccagtatttattgagcttctatgtgtcagacagaggagtctgagggtggcactgggggaagctgggagggttggaggggaaaggggacaggaa

SEQ ID NO: 506796 - DNA, 120 bp, Artificial Sequence
  ENSG00000164086_44 (sequence is synthesized)
ggttggccccatccagtcagctgtggtaggagatatcactgacacatgggcctcctgaggaaggtctagcaagtggcaggggtggggcccatttaagcacacctcacttatgaagcccca

SEQ ID NO: 506797 - DNA, 120 bp, Artificial Sequence
  ENSG00000164086_45 (sequence is synthesized)
tcacaagtgatagtgtggccatcatcccagtccatgtgtcttaggagctggagttaaggccttggggactagctgggcagatggcagagcgaaatgcagggccaggccacctacttcctt

SEQ ID NO: 506798 - DNA, 120 bp, Artificial Sequence
  ENSG00000164086_46 (sequence is synthesized)
ccagaggagcctccctcaggccactttcctagaagactctcagggacaacccatgggagcggctccaagagaaccagcccagcccccagtcccaggtcatggcctggcagcagcgggcgc

SEQ ID NO: 506799 - DNA, 120 bp, Artificial Sequence
  ENSG00000164087_0 (sequence is synthesized)
gaacgggccgcaacggccaccgcagctgccttcggcgccgccagccccgccatggctgcgccctgcgcggaggacccctcgctggaaaggcattttaagggccaccgagatgcagttacc

SEQ ID NO: 506800 - DNA, 120 bp, Artificial Sequence
  ENSG00000164087_1 (sequence is synthesized)
tgtgtggacttcagtatcaacacaaagcagctggccagtggctccatggactcatgcctcatggtctggcacatgaagccgcagtcacgcgcctaccgcttcactggccacaaggatgcc

SEQ ID NO: 506801 - DNA, 120 bp, Artificial Sequence
  ENSG00000164087_2 (sequence is synthesized)
gtcacctgtgtgaacttctctccttcgggacacctgcttgcttccggctcccgagacaagactgtccgcatctgggtacccaatgtcaaaggtgagtccactgtgtttcgtgcacacaca

SEQ ID NO: 506802 - DNA, 120 bp, Artificial Sequence
  ENSG00000164087_3 (sequence is synthesized)
gccacagtgaggagtgtccacttctgcagtgatggccagtccttcgtgacagcctctgacgacaagacagtcaaagtgtgggcaactcatcgccagaaattcctgttctccctgagccag

SEQ ID NO: 506803 - DNA, 120 bp, Artificial Sequence
  ENSG00000164087_4 (sequence is synthesized)
catatcaactgggtccgctgtgccaagttctcccccgacgggcggctcatcgtgtctgccagtgatgacaagactgttaagctgtgggacaagagcagccgggaatgtgtccactcgtat

SEQ ID NO: 506804 - DNA, 120 bp, Artificial Sequence
  ENSG00000164087_5 (sequence is synthesized)
tgtgagcatggcggctttgtcacctatgtggacttccaccccagtgggacgtgcattgccgctgccggcatggacaacacagtgaaggtgtgggacgtgcggactcaccggctgctgcag

SEQ ID NO: 506805 - DNA, 120 bp, Artificial Sequence
  ENSG00000164087_6 (sequence is synthesized)
cattatcagttgcacagtgcagcagtgaacgggctctctttccacccgtcgggaaactacctgatcacagcctccagtgactcaaccctgaagatcctggacctgatggagggccggctg

SEQ ID NO: 506806 - DNA, 120 bp, Artificial Sequence
  ENSG00000164087_7 (sequence is synthesized)
ctctacacactccacgggcatcagggaccagccaccactgttgccttttcaagaacgggggagtattttgcttctggaggctctgatgaacaagtgatggtttggaagagtaactttgat

SEQ ID NO: 506807 - DNA, 120 bp, Artificial Sequence
  ENSG00000164087_8 (sequence is synthesized)
aagtcacgaaagtgccgaggcccccagccacactggccagctccatggggaatctgccagaagtggacttccctgtccccccaggcagaggcaggagtgtggagtctgtgcagagccagc

SEQ ID NO: 506808 - DNA, 120 bp, Artificial Sequence
  ENSG00000164087_9 (sequence is synthesized)
cccaggagcccgtgagtgtgccccagacactgactagcacgctggagcacattgtgggccagctggatgtcctcactcagacagtctccattctggagcagcggttgacactgacagaag

SEQ ID NO: 506809 - DNA, 120 bp, Artificial Sequence
  ENSG00000164087_10 (sequence is synthesized)
acaagctgaagcagtgtctggagaaccagcagctaatcatgcagagagcaacaccatgatcaggggagcaggaatcaggagctcggtggatttgcaggtggcaggccagggatttgtacc

SEQ ID NO: 506810 - DNA, 120 bp, Artificial Sequence
  ENSG00000164087_11 (sequence is synthesized)
atgggacttgggtaaataaaggggactgaactctgtgggaatcacatccatactggagccctggatttttgcagttctgccctccaccttgctatctgcaccaggaggctctccacctgg

SEQ ID NO: 506811 - DNA, 120 bp, Artificial Sequence
  ENSG00000164087_12 (sequence is synthesized)
cagccagaggtccccagtgggccgggctcacacacaaatgatgcttcagacccgaatgagaggaccacattttgcttaatgtaaaggagccacttgaaaatgtctgctccttcggggtcc

SEQ ID NO: 506812 - DNA, 120 bp, Artificial Sequence
  ENSG00000164087_13 (sequence is synthesized)
tgagattgtggctccccctctggaggaggtggctccacgatgccttgattttcactcatcatttggacatgtgactggcttttcctacctctgccatggtgtagaaattgattgcacatt

SEQ ID NO: 506813 - DNA, 120 bp, Artificial Sequence
  ENSG00000164087_14 (sequence is synthesized)
gattggatgagccgggggttttctctaaatctgactaaaggcccaaagtgggcccatctgagtcaggtttgttgagaacaagccctctcaagtgggtggtggcttttcagtggccctgat

SEQ ID NO: 506814 - DNA, 120 bp, Artificial Sequence
  ENSG00000164087_15 (sequence is synthesized)
ttctgttccacacgtgttcactggagccaggtgacttcctccttgcgtgagtgagggcacaggaatctcaaaattaaacctgacttcattgcacttgttgcaggagtggcttatgctgga

SEQ ID NO: 506815 - DNA, 120 bp, Artificial Sequence
  ENSG00000164087_16 (sequence is synthesized)
gggctggtggggtgaacccttcatcctgggtcttttaatttctcaggcggaacgagtggcggcggacagaggcttttggctgcgctgtctgtgggttgtctgggcttggggaactgggca

SEQ ID NO: 506816 - DNA, 120 bp, Artificial Sequence
  ENSG00000164087_17 (sequence is synthesized)
cggagaccgtggcgccggccgccggtcatacagctctgcttccagtcgtcgggcaaaaagctgaggcgcttctcctttaattgcggtgggcggggcgtgccgacgcggcccgcgttgcta

SEQ ID NO: 506817 - DNA, 120 bp, Artificial Sequence
  ENSG00000164087_18 (sequence is synthesized)
ccgcagctgccttcggcgccgccagccccgccatggctgcgccctgcgcggaagagtgctggccctggggaagccccttcctcacccaggcttcacacatttgaccctggctctctctca

SEQ ID NO: 506818 - DNA, 80 bp, Artificial Sequence
  ENSG00000164088_0 (sequence is synthesized)
ctagcgccccgcgctccgcgggcagccccctgccgccgcgccatgtccgccggctggttccggcgccgcttcctgcctgg

SEQ ID NO: 506819 - DNA, 120 bp, Artificial Sequence
  ENSG00000164088_1 (sequence is synthesized)
taccgacggccccgcttccttcgcggctccagctccagccccggggcggccgacgcctcgcgccgcccagactcccggcccgtgcgcagccccgcacgaggacgcacgctaccctggaat

SEQ ID NO: 506820 - DNA, 120 bp, Artificial Sequence
  ENSG00000164088_2 (sequence is synthesized)
cgcagccccgcacgaggacgcacgctaccctggaatgcaggctacgccgagattatcaatgcagagaaatctgaattcaatgaggatcaagccgcctgtgggaagctgtgcatccggaga

SEQ ID NO: 506821 - DNA, 120 bp, Artificial Sequence
  ENSG00000164088_3 (sequence is synthesized)
tgtgagtttggggctgaagaagagtggctgaccctgtgcccagaggagttcctgacaggccattactgggcactgttcgatgggcacggcggtcctgcagcagccatcttggctgccaac

SEQ ID NO: 506822 - DNA, 120 bp, Artificial Sequence
  ENSG00000164088_4 (sequence is synthesized)
accctgcactcctgcttgcgccggcagctggaggccgtggtggaaggcttggtggccactcagccccccatgcacctcaatggccgctgcatctgccccagtgaccctcagtttgtggag

SEQ ID NO: 506823 - DNA, 120 bp, Artificial Sequence
  ENSG00000164088_5 (sequence is synthesized)
gaaaagggcatcagggcagaagacttggtgatcggggcattggagagtgcctttcaggaatgtgatgaggtgatcgggcgggagctggaggcctcaggccagatgggcggctgcacagcc

SEQ ID NO: 506824 - DNA, 120 bp, Artificial Sequence
  ENSG00000164088_6 (sequence is synthesized)
ctggtggctgtgtccctgcagggaaagctgtacatggccaatgctggggatagcagggccatcttggtgcggagagatgagatacggccactgagcttcgagttcaccccagagactgag

SEQ ID NO: 506825 - DNA, 120 bp, Artificial Sequence
  ENSG00000164088_7 (sequence is synthesized)
cggcagcggatccagcagctggcctttgtctatcctgagcttctggctggtgagttcacccgactggagttccctcggcggctgaagggggatgacttgggacagaaggttttgttcagg

SEQ ID NO: 506826 - DNA, 120 bp, Artificial Sequence
  ENSG00000164088_8 (sequence is synthesized)
gatcaccacatgagtggctggagctacaaacgtgtggagaaatcggatctcaagtacccactgatccatggacagggtaggcaggctcggttactaggaacactggctgtctcccggggc

SEQ ID NO: 506827 - DNA, 120 bp, Artificial Sequence
  ENSG00000164088_9 (sequence is synthesized)
ggtgactgtgctggatgtggaccagctggagctacaggaggatgatgtggttgtcatggcaactgatggactctgggatgtactgtccaacgagcaggtggcatggctggtgcggagctt

SEQ ID NO: 506828 - DNA, 120 bp, Artificial Sequence
  ENSG00000164088_10 (sequence is synthesized)
cctccctgggaaccaagaggacccacacaggttctcaaagctggcccagatgctgatacacagcacacagggaaaggaagacagtctcacagaggaagggcaggtgtcctacgatgacgt

SEQ ID NO: 506829 - DNA, 120 bp, Artificial Sequence
  ENSG00000164088_11 (sequence is synthesized)
ctctgtgttcgtgattcccttgcacagtcagggccaagagagcagtgaccactgaggattcagacactgtatcccagaactgctctagtgcccgggtgtggtctgggcatccctccagtg

SEQ ID NO: 506830 - DNA, 120 bp, Artificial Sequence
  ENSG00000164088_12 (sequence is synthesized)
tgaccaagagcaaatcctgcctgccctatccctagccaccgcccagtgctctcactatccacctcaacacacatccatctcaagaggaacatttataccaggcagtcagagctggaagtg

SEQ ID NO: 506831 - DNA, 120 bp, Artificial Sequence
  ENSG00000164088_13 (sequence is synthesized)
tatggagagcccagcccaccaggtcctgccttttgcggtgataaccttctctggcagagtgactttacaacttaactaggaaacccatgtgaggctcctcagacaggatcttgaacagcc

SEQ ID NO: 506832 - DNA, 120 bp, Artificial Sequence
  ENSG00000164088_14 (sequence is synthesized)
caaagtatcattctcagataggggcacccaagctaagggtattagccaaagatgccaggatgggtagctagcccatgtttagatccaggtctccaattcatggttatcagggcatgtgtt

SEQ ID NO: 506833 - DNA, 120 bp, Artificial Sequence
  ENSG00000164088_15 (sequence is synthesized)
caacaacccccaaagtccacgcaggtggcttgtagaaacctttgggcagcctcatgtctgctaaaacagccatcttcaagacagcccctgaaaagagaccagttcaggtcctgccctgct

SEQ ID NO: 506834 - DNA, 120 bp, Artificial Sequence
  ENSG00000164088_16 (sequence is synthesized)
gttctttgctggagatgaggaacaggtgctggggctaaagtttggggtagagcacaagggacaagaggaactcttggagttggctgggtgagagggctctccatttgctacctgtagtag

SEQ ID NO: 506835 - DNA, 120 bp, Artificial Sequence
  ENSG00000164088_17 (sequence is synthesized)
cctgcctcttaactggttgcttctccctagttccagccctgccctggtctgatgccccaacactgcccttgctttgttttccctgtcacctccctattattaaatgttttctacagaaga

SEQ ID NO: 506836 - DNA, 120 bp, Artificial Sequence
  ENSG00000164088_18 (sequence is synthesized)
ctacccttaccgtctagccctgggtcaccaggtaggctccagaggagctgggccctgacttttaccttagccatgaggccagtgaagttaggaagcttacatcgtggttgtctaagtgtg

SEQ ID NO: 506837 - DNA, 120 bp, Artificial Sequence
  ENSG00000164088_19 (sequence is synthesized)
tgttagggacagcactggggagctgttgccccagagggaggggtcttctccctgtgctggcttgggtccctgtgcccatggggacataggtgtgtccctggagggtcgcttaccatttcc

SEQ ID NO: 506838 - DNA, 120 bp, Artificial Sequence
  ENSG00000164088_20 (sequence is synthesized)
tgttcagggatcaccacatgagtggctggtgagtggggatgggggacaggtaggaagggagacccctgggatccaggcccagccgtatggcctggggcccccctccaccttggcagggtg

SEQ ID NO: 506839 - DNA, 120 bp, Artificial Sequence
  ENSG00000164088_21 (sequence is synthesized)
cccgacccagcgttttccttgggattccgacctccccctcagagaagacaggaggtcgggaaggacctgcagcccaggggcttccaagatgaggcccagagactcggattatcaatgcag

SEQ ID NO: 506840 - DNA, 120 bp, Artificial Sequence
  ENSG00000164088_22 (sequence is synthesized)
agacagagcactgacaatgagctggcagctggccaggatcagggctgtctcaagcttcttggaggaggcagggagaccgtgggttccgaaaatccctggatttagactctcatggtccag

SEQ ID NO: 506841 - DNA, 120 bp, Artificial Sequence
  ENSG00000164088_23 (sequence is synthesized)
cccgtggccctcccagacttgctgcttgcttggtccacagtcggactgcattgcttgggtccccatgtccagccttgtgcagtgagttctcctaaggtctggccttgcccctttgctctg

SEQ ID NO: 506842 - DNA, 120 bp, Artificial Sequence
  ENSG00000164088_24 (sequence is synthesized)
cttggattgggaggatgagattgggttggttggattgttactaacagccatcactatcagcataacccctctcatttatccagcacctactgtgtgctaactgcttttacctgcatcatc

SEQ ID NO: 506843 - DNA, 120 bp, Artificial Sequence
  ENSG00000164088_25 (sequence is synthesized)
taattgaataccctattggtccttggtgcaggggctggtttctcttcctattttgagtagcacttcccttgtctagatctcctgactgcagggatcttggaggtatggctggactttggg

SEQ ID NO: 506844 - DNA, 120 bp, Artificial Sequence
  ENSG00000164089_0 (sequence is synthesized)
acgccaccggtgacctccgacgccccgggcaagagaacgccaggagggataacgggaggaaggccggccggggccgccaaggcagtcccaggctcgcgtaggaggcgcgcagaccttgca

SEQ ID NO: 506845 - DNA, 120 bp, Artificial Sequence
  ENSG00000164089_1 (sequence is synthesized)
ccttgcaccttcgcagcgccctgcaccccgccaccatgtgcgagctgtacagtaagcgggacactctggggctgaggaagaagcacatcgggccctcatgcaaagttttctttgcatcgg

SEQ ID NO: 506846 - DNA, 120 bp, Artificial Sequence
  ENSG00000164089_2 (sequence is synthesized)
atcccatcaaaatagtgagagcccagaggcagtacatgtttgatgagaacggtgaacagtacttggactgcatcaacaatgttgcccatgtgggacactgtcacccaggagtggtcaaag

SEQ ID NO: 506847 - DNA, 120 bp, Artificial Sequence
  ENSG00000164089_3 (sequence is synthesized)
ctgccctgaaacagatggaactgctaaatacaaattctcgattcctccacgacaacattgttgagtatgccaaacgcctttcagcaactctgccggagaaactctctgtttgttatttta

SEQ ID NO: 506848 - DNA, 120 bp, Artificial Sequence
  ENSG00000164089_4 (sequence is synthesized)
caaattcaggatccgaagccaacgacttagccttacgcctggctcggcagttcagaggccaccaggatgtgatcactcttgaccatgcttaccatggtcacctatcatccttaattgaga

SEQ ID NO: 506849 - DNA, 120 bp, Artificial Sequence
  ENSG00000164089_5 (sequence is synthesized)
ttagcccatataagtttcagaaaggaaaagatgtcaaaaaagaatttgtacatgtggcaccaactccagatacttacagaggaaaatatagagaagaccatgcagactcagccagtgctt

SEQ ID NO: 506850 - DNA, 120 bp, Artificial Sequence
  ENSG00000164089_6 (sequence is synthesized)
atgcagatgaagtgaagaaaatcattgaagatgctcataacagtggaaggaagattgctgcctttattgctgaatccatgcagagttgtggcggacaaataattcctccagcaggctact

SEQ ID NO: 506851 - DNA, 120 bp, Artificial Sequence
  ENSG00000164089_7 (sequence is synthesized)
tccagaaagtggcagaatatgtacacggtgcagggggtgtgtttatagctgatgaagttcaagtgggctttggcagagttgggaaacatttctggagcttccagatgtatggtgaagact

SEQ ID NO: 506852 - DNA, 120 bp, Artificial Sequence
  ENSG00000164089_8 (sequence is synthesized)
cccggtggcatgtgtggtaacaaccaaagaaattgcagaagccttcagcagctctgggatggaatattttaatacgtatggaggaaatccagtatcttgtgctgttggtttggctgtcct

SEQ ID NO: 506853 - DNA, 120 bp, Artificial Sequence
  ENSG00000164089_9 (sequence is synthesized)
ggatataattgaaaatgaagaccttcaaggaaatgccaagagagtagggaattatctcactgagttactgaaaaaacagaaggctaaacacactttgataggagatattaggggcattgg

SEQ ID NO: 506854 - DNA, 120 bp, Artificial Sequence
  ENSG00000164089_10 (sequence is synthesized)
cctttttattggaattgatttagtgaaggaccatctgaaaaggacccctgccacagctgaagctcagcacatcatctacaagatgaaagaaaaacgagtgcttctcagtgccgatggacc

SEQ ID NO: 506855 - DNA, 120 bp, Artificial Sequence
  ENSG00000164089_11 (sequence is synthesized)
tcatagaaatgtacttaaaataaaaccacctatgtgcttcactgaagaagatgcaaagttcatggtggaccaacttgataggattctaacagttttagaagaagctatgggaaccaaaac

SEQ ID NO: 506856 - DNA, 120 bp, Artificial Sequence
  ENSG00000164089_12 (sequence is synthesized)
cgaaagtgtgacctctgagaatactccatgcaaaacaaagatgctgaaagaagcccacatagaactgcttagggacagcaccactgactccaaagaaaatcccagcagaaagagaaatgg

SEQ ID NO: 506857 - DNA, 120 bp, Artificial Sequence
  ENSG00000164089_13 (sequence is synthesized)
aatgtgcacggatacacattcactgctcagtaagaggctcaagacatgactgatttgcattttaaagcaagatgcgatgtccagagttacagagaatgagtagatgtgtctcatcggtta

SEQ ID NO: 506858 - DNA, 120 bp, Artificial Sequence
  ENSG00000164089_14 (sequence is synthesized)
atagctctattatacctctaaaggtggaattgtcagtttagattcataaatgaaaaggtaaatgagtaatcagaataaaccaagtgataatcaaaccatgtcaagattattagttcagac

SEQ ID NO: 506859 - DNA, 120 bp, Artificial Sequence
  ENSG00000164089_15 (sequence is synthesized)
tctagcctgttaattttcttagttgatttctgaagctacctgatttattctattaaattgtaagcttgcaaactcaaaataaattggcagatttacctctcatgttttaatgtgtcaaat

SEQ ID NO: 506860 - DNA, 120 bp, Artificial Sequence
  ENSG00000164089_16 (sequence is synthesized)
tagagagcaaagtataacaggtgccttcacttttgagacttagtgccttaaaatatgtattctataatgatttcatatataaaagtatatttattgactgtaataaaataaaatatgatg

SEQ ID NO: 506861 - DNA, 120 bp, Artificial Sequence
  ENSG00000164089_17 (sequence is synthesized)
gtgcacgcgccccgcgcgcctccacctgcaggggccgcgcggactcccagaaacgctcctggaacccggaacgctgggcttcctgcccgctcgaaagtccccggctcgctctgcagccgg

SEQ ID NO: 506862 - DNA, 120 bp, Artificial Sequence
  ENSG00000164089_18 (sequence is synthesized)
cggactagcgggggctgccggccggctagaggggttggtggatgacggccaatagccctagcagacaccattccagggatgggagatgggtggaagaaggatagcgctccgccaccccca

SEQ ID NO: 506863 - DNA, 120 bp, Artificial Sequence
  ENSG00000164089_19 (sequence is synthesized)
acaaaccaattctgacaatttttacttaaagtgagctttttcttcttgcatgcttggttaagtgatgaagggtttatctagccaatagaaaaacttgaaaccaccttctgttagaaaagc

SEQ ID NO: 506864 - DNA, 120 bp, Artificial Sequence
  ENSG00000164091_0 (sequence is synthesized)
ctcagcttctgcctgtcgccccaaaatggcggacacaatgagccggcgacgcgccggttgtccgtgaggtggctgtgaggacgaacggtcggcgaggctccacagtccaggcagaagacc

SEQ ID NO: 506865 - DNA, 120 bp, Artificial Sequence
  ENSG00000164091_1 (sequence is synthesized)
ctcgaccaagcaggaagaagaggaggaggcggcccaactgttggccgacttcccgctagccgccggcgcggcgcccgccccgcctgggttggcccctcggcagcccgcccgctcgccgcc

SEQ ID NO: 506866 - DNA, 120 bp, Artificial Sequence
  ENSG00000164091_2 (sequence is synthesized)
gggccccgccccggccctgcgccgccgctgccttccccagccgccgccatgaagctgaccgacagcgtgttgcggagcttccgcgtcgctaaggtgttccgcgaaaactcggacaagatt

SEQ ID NO: 506867 - DNA, 120 bp, Artificial Sequence
  ENSG00000164091_3 (sequence is synthesized)
aactgcttcgatttcagccccaacggcgagacggtcatctcgagtagcgacgacgactccatcgtgctctatgactgccaggagggcaaaccaaagagaaccctgtacagtaagaaatat

SEQ ID NO: 506868 - DNA, 120 bp, Artificial Sequence
  ENSG00000164091_4 (sequence is synthesized)
ggtgtggacctcatcagatacactcatgcagcaaacacagttgtttacagctctaacaaaatagacgatactattcgttacttgtccttgcatgacaacaaatacatcagatactttcct

SEQ ID NO: 506869 - DNA, 120 bp, Artificial Sequence
  ENSG00000164091_5 (sequence is synthesized)
ggacatagcaaaagggtggtggccttgtccatgtcacctgtggatgacactttcatttctgggtctcttgataagaccattcgactctgggatctccggtctcctaactgccagggcctc

SEQ ID NO: 506870 - DNA, 120 bp, Artificial Sequence
  ENSG00000164091_6 (sequence is synthesized)
atgcatctgcaggggaagccagtttgttcttttgatccagaagggttaattttcgctgcaggtgtcaactctgaaatggtcaagctttatgaccttcgttcttttgataaggggccattt

SEQ ID NO: 506871 - DNA, 120 bp, Artificial Sequence
  ENSG00000164091_7 (sequence is synthesized)
gctacctttaagatgcagtatgatcgaacttgtgagtggacaggacttaaattcagcaatgatggcaagctcatcctcatttccaccaacggcagcttcattcgtctgattgatgcattc

SEQ ID NO: 506872 - DNA, 120 bp, Artificial Sequence
  ENSG00000164091_8 (sequence is synthesized)
aaaggagtggtgatgcacacatttgggggttatgccaacagcaaagctgtcacactggaggcttcatttactccagactctcagtttattatgattggttcagaggatggcaagatccat

SEQ ID NO: 506873 - DNA, 120 bp, Artificial Sequence
  ENSG00000164091_9 (sequence is synthesized)
gtctggaatggagagagcggtataaaagtagctgtgttggatggtaaacacacaggcccgattacctgtttgcaattcaaccccaagttcatgacttttgccagtgcgtgttccaacatg

SEQ ID NO: 506874 - DNA, 120 bp, Artificial Sequence
  ENSG00000164091_10 (sequence is synthesized)
gccttttggttgcccaccattgatgactgaccctgttgctgcttggctatttctgtatagtgagggcggccagcaggaagaaactcagagggaactgagataatagtgggattggatcat

SEQ ID NO: 506875 - DNA, 120 bp, Artificial Sequence
  ENSG00000164091_11 (sequence is synthesized)
ttgactgggctggagaacatccttttacatggccttcccatggatgtgctgtacatctgctcaaaagaaaataattactttgatgagcgtcttcaaaaggactcttggtgcaacagactc

SEQ ID NO: 506876 - DNA, 120 bp, Artificial Sequence
  ENSG00000164091_12 (sequence is synthesized)
aattggaactcagcttttctaactgtcactgcaccaagctctgctggaggagtgaccagactcacgatttggtatagtggggctctcaagcatcttcaatttgaatgtacatgctgctga

SEQ ID NO: 506877 - DNA, 120 bp, Artificial Sequence
  ENSG00000164091_13 (sequence is synthesized)
ggagccggtgaagtcatcagttccgcacatcccttctaccctccaactgcatgggaagccaaagtcctggttttgaaatgcttgggcagctcagccgcttgccctcaccctgcatgtctt

SEQ ID NO: 506878 - DNA, 120 bp, Artificial Sequence
  ENSG00000164091_14 (sequence is synthesized)
gttactgggtctccctgtgtacttgtggcattatccacaaccatcatgtttcttaggtgccaaacatttacagaaacattttcatatatcttggggtcagagaaagggacagatacagaa

SEQ ID NO: 506879 - DNA, 120 bp, Artificial Sequence
  ENSG00000164091_15 (sequence is synthesized)
ggaccttgcttgcaggaagccatgcagttagtttctgcagttagtcgtgtgaggctaggtggttgggcaggcctcgggctgtaggtgttgggtgggaaaaagacccaagggcctgaaagg

SEQ ID NO: 506880 - DNA, 120 bp, Artificial Sequence
  ENSG00000164091_16 (sequence is synthesized)
gagggaaaggggagggtagcgggagggtagcaggtgagttcctagggctggaaggtttagcagcagcctggtgcagtgccctgtcatcaagacaaacccacggtcctcctgggtgcctac

SEQ ID NO: 506881 - DNA, 120 bp, Artificial Sequence
  ENSG00000164091_17 (sequence is synthesized)
tgagtctgagttgtttacactgatgccttccctgcccaccacaaattgtgtacatagtcttcagatgataccacccctttccccagctcccaaccaagagctggttctaggcctgtgtta

SEQ ID NO: 506882 - DNA, 120 bp, Artificial Sequence
  ENSG00000164091_18 (sequence is synthesized)
tatgtcatatttagcgtttttatatatgacctttgatttctgttgtttgtattttagcacagtgtatgcaccttcatttaaatacatctgtgtgcatacagatacgcatatatgtgtgtg

SEQ ID NO: 506883 - DNA, 120 bp, Artificial Sequence
  ENSG00000164091_19 (sequence is synthesized)
cgtatgcatatatctctcatctgtagtttccaagagttcagctgaagcagatggagtcctgcagcccaggagacaccctgcatccctgctaatagtgtttgccacaagtattagtgagtc

SEQ ID NO: 506884 - DNA, 120 bp, Artificial Sequence
  ENSG00000164091_20 (sequence is synthesized)
ttccttattaatattttcatttcagaagactgaagcaaagctgatagtgtttgctgtttctttggcagctaagtgagggtcttgggatgacttgctgtgttcctcaagctgcactttggg

SEQ ID NO: 506885 - DNA, 120 bp, Artificial Sequence
  ENSG00000164091_21 (sequence is synthesized)
gccatctctgcagtattagccccctttttgcttggtggtactctgtctgtgcctgtgtgtgtgtgtgatagtcactcttgcatggcttccatgtctggtttgtggcatttggggataagg

SEQ ID NO: 506886 - DNA, 120 bp, Artificial Sequence
  ENSG00000164091_22 (sequence is synthesized)
tgctgaagccagagcatttgcagtttgtttgaggcctcgttgccaatgatagatcactcctgttgacctggtatgtctgcttgcttgctgcttttccttgctttctcttggaagaggaaa

SEQ ID NO: 506887 - DNA, 120 bp, Artificial Sequence
  ENSG00000164091_23 (sequence is synthesized)
ggactctggtcaggcccaggctgagtgagatgagctgcagctggctcatggccttcttagagcagagagaggagtatgtcattttactaagttcctaaacaaacatttatgcaggcaaca

SEQ ID NO: 506888 - DNA, 120 bp, Artificial Sequence
  ENSG00000164091_24 (sequence is synthesized)
ctccttgcagatccagaaactgaggcacaatagggttatgacttgctcaagaatatgtagctgctagggggtaaatcaaggcatcacaatttctgttcagcgggcaggaataggctgtga

SEQ ID NO: 506889 - DNA, 120 bp, Artificial Sequence
  ENSG00000164091_25 (sequence is synthesized)
attgctagcactttttttttttaagcaattactttttgacttgttcctctgaaagtgcaagaggcgtacacctttcccaaatgtagactagaatctgcaggatgccacccactgtatagt

SEQ ID NO: 506890 - DNA, 120 bp, Artificial Sequence
  ENSG00000164091_26 (sequence is synthesized)
tctgctttcccagagaggaagaacttttagaaaccaaatgatcttaattgttattgcccacccctggcttttccgggtagaaaattcacagtaggaatgattgttaagagagagtgcttg

SEQ ID NO: 506891 - DNA, 120 bp, Artificial Sequence
  ENSG00000164091_27 (sequence is synthesized)
gaaccatgggttaacaggaaaggctacctaacttcacatatctgcaaccagagcagccaccaagcattacttagcagcaggaaaatgattgtatttgagttcctgtgtgtccaaaactga

SEQ ID NO: 506892 - DNA, 68 bp, Artificial Sequence
  ENSG00000164091_28 (sequence is synthesized)
gaaaatgattgtatttgagttcctgtgtgtccaaaactgagcaccatgttctttgaaaacatgccacc

SEQ ID NO: 506893 - DNA, 68 bp, Artificial Sequence
  ENSG00000164091_29 (sequence is synthesized)
tccccacctcacagtctctatcgttgggccctgtggttgcaaagctgcctcctgaattaagaaggaaa

SEQ ID NO: 506894 - DNA, 120 bp, Artificial Sequence
  ENSG00000164091_30 (sequence is synthesized)
ccctgtggttgcaaagctgcctcctgaattaagaaggaaagggaaaagatatagctggaagcgagtggaagagatgctgagggctggggctgcacagacgtgctcagcagggctacaggt

SEQ ID NO: 506895 - DNA, 120 bp, Artificial Sequence
  ENSG00000164091_31 (sequence is synthesized)
gctcaagccctattggggatgggtggggagtggggcagcggcgtttgccaccttaagaattggggccaaagccactgatgtttatttgacagtgacactgcactgggtacttaaagaaat

SEQ ID NO: 506896 - DNA, 120 bp, Artificial Sequence
  ENSG00000164091_32 (sequence is synthesized)
tatttcccgttgtaattataattactgcttattaaggaaaatatgggaattttagaaagaatcaagtttgccacccaaatgctaccactgttaatcttttggtgttaaatgttcccccta

SEQ ID NO: 506897 - DNA, 120 bp, Artificial Sequence
  ENSG00000164091_33 (sequence is synthesized)
gacatttctgtgcatagatttttggtgtgtttacatagtcgttattctgtatatacaattttatgtcccttttgtacttaacgtataaacattttttccatgttacagtcttaaacagaa

SEQ ID NO: 506898 - DNA, 120 bp, Artificial Sequence
  ENSG00000164091_34 (sequence is synthesized)
aaggtagggccttagcgagggaaatggctgccgcgtaatgcccggtgatgcgagaaagaagggcctgctgccaccaggacccgtcatcgcccagcccagggaccgcttctgaaggccatg

SEQ ID NO: 506899 - DNA, 120 bp, Artificial Sequence
  ENSG00000164091_35 (sequence is synthesized)
cgagccctggcggcgcagacttaccagcccacagctccggccgcggtgcccagcgctggagaacggaaacataattcaagacatttcctgagtgccttctgtgtgggccgaatgctgtag

SEQ ID NO: 506900 - DNA, 120 bp, Artificial Sequence
  ENSG00000164091_36 (sequence is synthesized)
cttcgtagttgtcattcaagaagtttgaagatgttttcaaggaaaattgtgtagtgttcaagttatggaatatacaaatatccctattcccctattccccctcccaagttaaatgccctc

SEQ ID NO: 506901 - DNA, 120 bp, Artificial Sequence
  ENSG00000164091_37 (sequence is synthesized)
ttattagaaagcacccctgtgaacccctgggatgactcgatgctttcaacccctttattcctatgttctgtttgccttcagaatgttctttctatggttttctttctgcattttggtacc

SEQ ID NO: 506902 - DNA, 120 bp, Artificial Sequence
  ENSG00000164091_38 (sequence is synthesized)
attttcccttagctgtttctcaacaatttttccttattcctagtctttttaaggggataatacttttctattttgcagttttattctttatggcacttcatttctctaccgccaccatgt

SEQ ID NO: 506903 - DNA, 120 bp, Artificial Sequence
  ENSG00000164091_39 (sequence is synthesized)
tttttgtttgtttactctttcagatagaatcatttggttaagagtgtcttatttttccacaagcacaaatctctgattgttcctttctttaatattgtcaaaatctcactgctattactc

SEQ ID NO: 506904 - DNA, 120 bp, Artificial Sequence
  ENSG00000164091_40 (sequence is synthesized)
attggtataagaatttgatttttttaatgtcttaagatctttttaacccagatcttgacatcacttctctgacgttttgtttattttcattgtaatttgtgtgtccaattgaagaatgtt

SEQ ID NO: 506905 - DNA, 120 bp, Artificial Sequence
  ENSG00000164091_41 (sequence is synthesized)
caaatgagttgagggtgggtcaacatactgatggagaactctagacaaaaattgctgccagggttcaacctgatcttcagtttaactgccatggctgctcacctctttaagtctgttagc

SEQ ID NO: 506906 - DNA, 120 bp, Artificial Sequence
  ENSG00000164091_42 (sequence is synthesized)
tcaacagccacatatttttctttaaggtttgccattctgtggacactagaccagtatctaaaattattatgtgtgctttacttgtttttgttttttgaccagggtatatttgcagggtgg

SEQ ID NO: 506907 - DNA, 120 bp, Artificial Sequence
  ENSG00000164091_43 (sequence is synthesized)
gagttgcattgtaattatgaagaaaccaaattggtaataaaaggtcatttcaaacattgctttctatgctgtcaacttaagaactctgcttttgagttaggtgaaatctacatacccact

SEQ ID NO: 506908 - DNA, 120 bp, Artificial Sequence
  ENSG00000164091_44 (sequence is synthesized)
cttcagctgcagagtagaattattcaccattatttattcatgccttgcttgggatatagaatacaatggattatttgaccttgtctttttaagatgaaaatgtaaagtaaatttctttta

SEQ ID NO: 506909 - DNA, 120 bp, Artificial Sequence
  ENSG00000164093_0 (sequence is synthesized)
ggagccgcagatctggtccgtcgctcgcctgggtgcctggagctgagctgcggcaaggcccggctcctgttcgaccgcccgaggggtgtgcgtgtgcgcgttgcggagggtgcgctcaga

SEQ ID NO: 506910 - DNA, 120 bp, Artificial Sequence
  ENSG00000164093_1 (sequence is synthesized)
gggccgcgtcgtggctgcagcggctgctgccgccgcaggggatctaatatcacctacctgtccctgtcactcttgacacttctctgtcagggctgccgcgtggggggggggcgggcagag

SEQ ID NO: 506911 - DNA, 120 bp, Artificial Sequence
  ENSG00000164093_2 (sequence is synthesized)
cgcggtcggcgttagctttccttattggaggggttcttgggggagggagggagagaagaagggggtctttgcccactcttgtttcgctttggagcttggaagcctgctccctaaagacgc

SEQ ID NO: 506912 - DNA, 120 bp, Artificial Sequence
  ENSG00000164093_3 (sequence is synthesized)
tctgagtggtgcccttctgcccacatcccatgtcttcgtttgcccgctgactttccgtctccggactttttcgcttgagccttccggaggagacgggggcagcttggcttgagaactcgg

SEQ ID NO: 506913 - DNA, 120 bp, Artificial Sequence
  ENSG00000164093_4 (sequence is synthesized)
cgggggttgcgtcccctggctctccccgcagcggggaaactccgcgcctagagcgcgacccggagcgggcagcggcggctacgggggctcggcggggcagtagccaaggactagtagagc

SEQ ID NO: 506914 - DNA, 120 bp, Artificial Sequence
  ENSG00000164093_5 (sequence is synthesized)
gtcgcgctccctcgtccatgaactgcatgaaaggcccgcttcacttggagcaccgagcagcggggaccaagctgtcggccgtctcctcatcttcctgtcaccatccccagccgttagcca

SEQ ID NO: 506915 - DNA, 120 bp, Artificial Sequence
  ENSG00000164093_6 (sequence is synthesized)
tggcttcggttctggctcccggtcagccccggtcgctggactcctccaagcacaggctggaggtgcacaccatctccgacacctccagcccggaggccgcagagaaagataaaagccagc

SEQ ID NO: 506916 - DNA, 120 bp, Artificial Sequence
  ENSG00000164093_7 (sequence is synthesized)
aggggaagaatgaggacgtgggcgccgaggacccgtctaagaagaagcggcaaaggcggcagcggactcactttaccagccagcagctccaggagctggaggccactttccagaggaacc

SEQ ID NO: 506917 - DNA, 120 bp, Artificial Sequence
  ENSG00000164093_8 (sequence is synthesized)
gctacccggacatgtccacacgcgaagaaatcgctgtgtggaccaaccttacggaagcccgagtccgggtttggttcaagaatcgtcgggccaaatggagaaagagggagcgcaaccagc

SEQ ID NO: 506918 - DNA, 120 bp, Artificial Sequence
  ENSG00000164093_9 (sequence is synthesized)
aagaatggcttcgggccgcagttcaatgggctcatgcagccctacgacgacatgtacccaggctattcctacaacaactgggccgccaagggccttacatccgcctccctatccaccaag

SEQ ID NO: 506919 - DNA, 120 bp, Artificial Sequence
  ENSG00000164093_10 (sequence is synthesized)
agcttccccttcttcaactctatgaacgtcaaccccctgtcatcacagagcatgttttccccacccaactctatctcgtccatgagcatgtcgtccagcatggtgccctcagcagtgaca

SEQ ID NO: 506920 - DNA, 120 bp, Artificial Sequence
  ENSG00000164093_11 (sequence is synthesized)
ggcgtcccgggctccagtctcaacagcctgaataacttgaacaacctgagtagcccgtcgctgaattccgcggtgccgacgcctgcctgtccttacgcgccgccgactcctccgtatgtt

SEQ ID NO: 506921 - DNA, 120 bp, Artificial Sequence
  ENSG00000164093_12 (sequence is synthesized)
tatagggacacgtgtaactcgagcctggccagcctgagactgaaagcaaagcagcactccagcttcggctacgccagcgtgcagaacccggcctccaacctgagtgcttgccagtatgca

SEQ ID NO: 506922 - DNA, 120 bp, Artificial Sequence
  ENSG00000164093_13 (sequence is synthesized)
gtggaccggcccgtgtgagccgcacccacagcgccgggatcctaggaccttgccggatggggcaactccgcccttgaaagactgggaattatgctagaaggtcgtgggcactaaagaaag

SEQ ID NO: 506923 - DNA, 120 bp, Artificial Sequence
  ENSG00000164093_14 (sequence is synthesized)
ggagagaaagagaagctatatagagaaaaggaaaccactgaatcaaagagagagctcctttgatttcaaagggatgtcctcagtgtctgacatctttcactacaagtatttctaacagtt

SEQ ID NO: 506924 - DNA, 120 bp, Artificial Sequence
  ENSG00000164093_15 (sequence is synthesized)
gcaaggacacatacacaaacaaatgtttgactggatatgacattttaacattactataagcttgttattttttaagtttagcattgttaacatttaaatgactgaaaggatgtatatata

SEQ ID NO: 506925 - DNA, 120 bp, Artificial Sequence
  ENSG00000164093_16 (sequence is synthesized)
tcgaaatgtcaaattaattttataaaagcagttgttagtaatatcacaacagtgtttttaaaggttaggctttaaaataaagcatgttatacagaagcgattaggatttttcgcttgcga

SEQ ID NO: 506926 - DNA, 120 bp, Artificial Sequence
  ENSG00000164093_17 (sequence is synthesized)
gcaagggagtgtatatactaaatgccacactgtatgtttctaacatattattattattataaaaaatgtgtgaatatcagttttagaatagtttctctggtggatgcaatgatgtttctg

SEQ ID NO: 506927 - DNA, 120 bp, Artificial Sequence
  ENSG00000164093_18 (sequence is synthesized)
aaactgctatgtacaacctaccctgtgtataacatttcgtacaatattattgttttacttttcagcaaatatgaaacaaatgtgttttatttcatgggagtaaaatatactgcatacaaa

SEQ ID NO: 506928 - DNA, 120 bp, Artificial Sequence
  ENSG00000164093_19 (sequence is synthesized)
tcagagggatcaatatacaggccctaccacggaaaggcggggaaaaggttcgaatagaaaactgctgcagaagggaagccactgagaggagcaaatgtggacttgagggaaactctctcc

SEQ ID NO: 506929 - DNA, 120 bp, Artificial Sequence
  ENSG00000164093_20 (sequence is synthesized)
cccacccccacttctatcccgtgcaatttaataccatcctcgccaggaaccttaacctcgtcattttaaaaaatgagatatccgtgacccagggtgaacttgttgaatgtaggtacagca

SEQ ID NO: 506930 - DNA, 120 bp, Artificial Sequence
  ENSG00000164093_21 (sequence is synthesized)
gaggaaattctagactctatgagcgtctgagccttgtccagtgcaaacccttcgtgaacactgggtcagtgcgtggccgtgcccacctgtgcgccgacactctcagcatgcctggtccac

SEQ ID NO: 506931 - DNA, 120 bp, Artificial Sequence
  ENSG00000164093_22 (sequence is synthesized)
ccgccttgacctcgggcgcggtgtcccagctaagctgggcccagcgtcccggccttccccagctgacaagcctagctcgttcgctcccggctgtggccctcccaccctctcccactagct

SEQ ID NO: 506932 - DNA, 120 bp, Artificial Sequence
  ENSG00000164093_23 (sequence is synthesized)
cactccattcttctagatttctcttcactcatcctctcccatccccaccgcgcccacctccactcccgccctctaccggtctctcactttcctccctccgcagtccctctttgctgtgac

SEQ ID NO: 506933 - DNA, 120 bp, Artificial Sequence
  ENSG00000164093_24 (sequence is synthesized)
ctctttcctcaactctgcaggcctgaaagaaggtcacacacgcacgctcacacccacactccacacgcctcgtcccaaacaaccccatgaacattgtcctttgttccgtctcttgggcca

SEQ ID NO: 506934 - DNA, 120 bp, Artificial Sequence
  ENSG00000164093_25 (sequence is synthesized)
ctttccctgtcgcttcctcccagcccgtcctgatttgctccccaaaagtacgtttctgtctccccgctgccctggcgctccccctttgatttattagggctgccgggttggcgcagattg

SEQ ID NO: 506935 - DNA, 120 bp, Artificial Sequence
  ENSG00000164093_26 (sequence is synthesized)
ctttttcttctcttccatcccatcctcccttctggtcctcctttccacagtgggagtccgtgctcctgctcctcggttggctcctaagtgccccgccaggtcccctctcctttcgctctc

SEQ ID NO: 506936 - DNA, 120 bp, Artificial Sequence
  ENSG00000164093_27 (sequence is synthesized)
ccggctccggctcccgactcttcggcccgctggcatctgcttccctcccctgcctcgtttctcgtcgcccctgctcgctccccccggcgctcgcccgggcgctgtgctcgctcctggatc

SEQ ID NO: 506937 - DNA, 120 bp, Artificial Sequence
  ENSG00000164093_28 (sequence is synthesized)
gccagccgcgcagccgggctcggccggccgcccgcgcgccactgtgcagtggagtttggtggaatctctgctgacgtcacgtcactccccacacggagtaggagcagagggaagagagag

SEQ ID NO: 506938 - DNA, 120 bp, Artificial Sequence
  ENSG00000164093_29 (sequence is synthesized)
ggatgagagggagggagaggagagagagtgcgagaccgagcgagaaagctggagaggagcagaaagaaactgccagtggcggctagatttcggaggccccagtgcacccgtggactcctt

SEQ ID NO: 506939 - DNA, 120 bp, Artificial Sequence
  ENSG00000164093_30 (sequence is synthesized)
cggaacttggcaccctcaggagccctgcagtcctctcaggcccggctttcgggcgcttgccgtgcagccggaggctcggctcgctggaaatcgccccgggaagcagtgggacgcggagac

SEQ ID NO: 506940 - DNA, 120 bp, Artificial Sequence
  ENSG00000164093_31 (sequence is synthesized)
agcagctctctcccggtagccgaatcactaaatctggagccgccaaactgctacttctgggcccacgggcccacaaggatcgaatcggcagagtccccgcccgcgttctcgctagcgggt

SEQ ID NO: 506941 - DNA, 120 bp, Artificial Sequence
  ENSG00000164093_32 (sequence is synthesized)
cgagacgcagggaaacgataacggggaatggagaccaactgccgcaaactggtgtcggcgtgtgtgcaattaggcgtgcagccggcggccgttgaatgtctcttctccaaagactccgaa

SEQ ID NO: 506942 - DNA, 120 bp, Artificial Sequence
  ENSG00000164093_33 (sequence is synthesized)
tggcccagctttttccctcctgggctcgcgcttcttacaccttctttacggttgtttcggccattcaggtctctcccacacaccctatttcctagttttgtgatctccgggagcaaagtt

SEQ ID NO: 506943 - DNA, 120 bp, Artificial Sequence
  ENSG00000164093_34 (sequence is synthesized)
ttaatacacaactactagtcctcttagaaggagaaagaaaaaaagaagaaagacttttctgcttggtttatttatcttctctcaggagttgaactctggaaattgaaactcacaccccct

SEQ ID NO: 506944 - DNA, 120 bp, Artificial Sequence
  ENSG00000164093_35 (sequence is synthesized)
cttctaaattataatcatagttttgtaaaaagggcttaccttaactttgtagcaaatctgtactttatggattggcaaaaatgagctcaaataaataacccaatagcaacgtcctggttt

SEQ ID NO: 506945 - DNA, 120 bp, Artificial Sequence
  ENSG00000164093_36 (sequence is synthesized)
aaaattaagtgctctgggtagaaaaaataaagcccccggttagagcagagcaaacaaaaagaagaaaacaacgataaaaagaataaagaccaaaatgctctcccaaatcagagggaatga

SEQ ID NO: 506946 - DNA, 120 bp, Artificial Sequence
  ENSG00000164093_37 (sequence is synthesized)
agacactctctgggtggcatttgtgcaaggcatgaggctatgctggtggataaaaggccgggaagaagttgaaaatggttttagtttaactgtccagagccagagctgggtcctgggcgg

SEQ ID NO: 506947 - DNA, 120 bp, Artificial Sequence
  ENSG00000164093_38 (sequence is synthesized)
gaggtacaggccaagtagaccaggagagaatgtggaaggcagcgccgcctgggagggcgccggtggggcgcagctttgcaaaggcagaaggcctcgcggcggcctggttgcgagattaca

SEQ ID NO: 506948 - DNA, 120 bp, Artificial Sequence
  ENSG00000164093_39 (sequence is synthesized)
gttccctctccgaggccgacaggactgccgccctggctcaggctcccagagcggcaccggctcactgccccgccatcccgcgatctcacgagctgggctgcatgggcaatcccctgcaca

SEQ ID NO: 506949 - DNA, 120 bp, Artificial Sequence
  ENSG00000164093_40 (sequence is synthesized)
ggacattgtgttcctggcttgcagttgccagagcagagctaataaaatccctaccaggccaagagccgcgaacaggctccaacctgtgagcctttaacaaggaaaacccgccagagacac

SEQ ID NO: 506950 - DNA, 120 bp, Artificial Sequence
  ENSG00000164093_41 (sequence is synthesized)
gcgagggggaggggggtctgtaaaccacgcgcgtgtgcgcgtcccaggagatttggtgtgtctgcgcagaggtgtataaatatacttgaaagcacaggctataaaagtgaatgtgccgct

SEQ ID NO: 506951 - DNA, 120 bp, Artificial Sequence
  ENSG00000164093_42 (sequence is synthesized)
caggaagcccgcctctggttttaagatgttaggccaacagggaagcgcggagccgcagatctggtccgtcgctcgcctgggtgcctggagctgagctgcggcaaggcccggctcctgttc

SEQ ID NO: 506952 - DNA, 120 bp, Artificial Sequence
  ENSG00000164093_43 (sequence is synthesized)
gcggtgcagtgaagcgaggccagggtgtgtgagtgcgctagcgtgtgtgtcgggggaaggcgggggttggcctccgatggaagttttagtaatctgcactgtggcatctgtttgctccct

SEQ ID NO: 506953 - DNA, 120 bp, Artificial Sequence
  ENSG00000164096_0 (sequence is synthesized)
gcactgcgcaggcggccggactccgctcagtttccggtgcggcgaacaccaaagtccgggaacttaagcattttcggtttctagggttgttacgaagctgcaggagcgagatggaggtgg

SEQ ID NO: 506954 - DNA, 120 bp, Artificial Sequence
  ENSG00000164096_1 (sequence is synthesized)
acgcaccgggtgttgatggtcgagatggtctccgggagcggcgaggctttagcgagggagggaggcagaacttcgatgtgaggcctcagtctggggcaaatgggcttcccaaacactcct

SEQ ID NO: 506955 - DNA, 120 bp, Artificial Sequence
  ENSG00000164096_2 (sequence is synthesized)
actggttggacctctggcttttcatccttttcgatgtggtggtgtttctctttgtgtattttttgccatgacttgttcgctgatatctaaattaagaagttggttcttgagtgaattctg

SEQ ID NO: 506956 - DNA, 120 bp, Artificial Sequence
  ENSG00000164096_3 (sequence is synthesized)
aaaatggctacaaacttcttgaataaagaagacaggactctcaatagaagaatttcacatctccaagggacccttcctttcattttacactttgttactaatttgcagaactctattaat

SEQ ID NO: 506957 - DNA, 120 bp, Artificial Sequence
  ENSG00000164096_4 (sequence is synthesized)
tgggtaggatttcacccattcctagctaagttcttaaaattaaaccctttggttcgtgtttaaaaactttcaaacatctgatggctttacaggggctgaatataaaagcatttgtactta

SEQ ID NO: 506958 - DNA, 120 bp, Artificial Sequence
  ENSG00000164096_5 (sequence is synthesized)
aaggtcttgtgtattcattaagaaatatagtaatgtcttttaatgttttaagagttgatcagggtttactatgatgcaagtaataggatgattaataagggaaggtttttatgaattcaa

SEQ ID NO: 506959 - DNA, 120 bp, Artificial Sequence
  ENSG00000164096_6 (sequence is synthesized)
aagtcaattattcaaaagcagggaaagattttgagagagggaacaaagtattcttagattgcgtagaagctgctaggttccagttttaatttttaggtttagttggactctgttatgaaa

SEQ ID NO: 506960 - DNA, 120 bp, Artificial Sequence
  ENSG00000164096_7 (sequence is synthesized)
agataggttatgggtgggcgacaggttgatacagtcttagaaaaagcaggtaatatcaaagtattggaaagctagcatgcatgccctcttacctgggtatcttcccccttttttcctttt

SEQ ID NO: 506961 - DNA, 120 bp, Artificial Sequence
  ENSG00000164096_8 (sequence is synthesized)
aaactcttgagcctcctataacgaaggattatgtgtttcaaacctattttttttttactgtttcattaagtgtgcttgtgcccaaaatatttacttgtataatatctgtaacttgcttaa

SEQ ID NO: 506962 - DNA, 120 bp, Artificial Sequence
  ENSG00000164096_9 (sequence is synthesized)
atacttcagcaaagtcagcatatttactcattcaacaaatatttgagccaggcattattttagacacagcagtgaacaaaacaaaaaggcattcttgccttcatggagcttacattctta

SEQ ID NO: 506963 - DNA, 120 bp, Artificial Sequence
  ENSG00000164096_10 (sequence is synthesized)
ttgttatttaaatctaaatgttataaaacaagaatttatattctagggttgatcagctagtatttaatcaaaaaggccacactcccatagcagctactctaagctgtagtagctaataaa

SEQ ID NO: 506964 - DNA, 120 bp, Artificial Sequence
  ENSG00000164096_11 (sequence is synthesized)
aatcccagcactttgggaggccaagggtggtagatcacttgaggtcaagagttgtgacaccagcctggccaacctggtgaaaccctatctctattaaaaaatacaaaaaaatacaaaaaa

SEQ ID NO: 506965 - DNA, 120 bp, Artificial Sequence
  ENSG00000164096_12 (sequence is synthesized)
tgcactctaacgtgggcaacagagaccctgtctcaaaaagaaaatattcctgttagccctaaaggctttacatgaggaatggtagaagtggtcttttgtttaaattagttgcattcagca

SEQ ID NO: 506966 - DNA, 120 bp, Artificial Sequence
  ENSG00000164096_13 (sequence is synthesized)
tatatgaattgtcttaaatattttggggatactcccccgccttttaaacagggcataagatctggtaaactctctgtatatcttcctacctttcaaaatcgttcttagggttagtcaagt

SEQ ID NO: 506967 - DNA, 120 bp, Artificial Sequence
  ENSG00000164096_14 (sequence is synthesized)
ctggaatataattgctgactataaagttagcaattatgcttttaaggtgttgtcacatcaacctaaagagaaccatctatggaaggtatggttgaaacatctgtaggaacacagaactgg

SEQ ID NO: 506968 - DNA, 120 bp, Artificial Sequence
  ENSG00000164096_15 (sequence is synthesized)
gatttcactgagtttaccaaatcaactgtgtgaactgtttctgcactgcttgctaatggtttcatctaataaatgtttacttatatagctgagtttggttttattctaacaaattacctg

SEQ ID NO: 506969 - DNA, 120 bp, Artificial Sequence
  ENSG00000164096_16 (sequence is synthesized)
gtggtgtgattgtgaggtgattaacagttctcacatagtttactgttaggtcacacacagacttccgatcataatccatactgcctttttgagcctaaaatcagcctactaccacaatta

SEQ ID NO: 506970 - DNA, 120 bp, Artificial Sequence
  ENSG00000164096_17 (sequence is synthesized)
ccaaatattctgaaaatttctagtatggtgaagatggagagatcttggtgtgaaggttaattttatatgtcatcttgattatgctaggagatgcccagatttctgggtttgtccatgagg

SEQ ID NO: 506971 - DNA, 120 bp, Artificial Sequence
  ENSG00000164096_18 (sequence is synthesized)
gtgtttccagaagagattagcatttgaatcagtagactgaataaaaaagagccacccactccactgcgggtgggccaaccccttgagggcctagctggaataaaaaggcagaggaagggc

SEQ ID NO: 506972 - DNA, 120 bp, Artificial Sequence
  ENSG00000164096_19 (sequence is synthesized)
aaattctgtcttctctctgcttgaacagggacatccatgttctatccttggacattggttctcctgattctctggctttcagacatggaccagggcccctggttctcagacctttgggtt

SEQ ID NO: 506973 - DNA, 120 bp, Artificial Sequence
  ENSG00000164096_20 (sequence is synthesized)
tggactggaactacaccattggctttcctgggcttactgtctgcggaaagcagattgtgggacttctcagcctccataatcacaagagccaatccctcataataaatttatttctatata

SEQ ID NO: 506974 - DNA, 120 bp, Artificial Sequence
  ENSG00000164096_21 (sequence is synthesized)
atgaccagtctaataaatagccccattaataggagaccattacagaatgtagagggaaataataggtgccaaaggaaggcaaaaaactatggaaacaaatacttcattcactgccttgat

SEQ ID NO: 506975 - DNA, 120 bp, Artificial Sequence
  ENSG00000164096_22 (sequence is synthesized)
cttgagaaaataaccctctccccaagaagaaaacatgacatagaaggtggagacaagttaaatgtgaagttttcacaattgcggtcacggaggcagcggaaagccgagccaggcgcctgc

SEQ ID NO: 506976 - DNA, 120 bp, Artificial Sequence
  ENSG00000164099_0 (sequence is synthesized)
gctgcgtccgcgccttctcttttccggtcctctccgccggccggggctcggctgagctccagatttccccacccgcggccgccgccaggggacaggagccgaggcgcggcagggcaccag

SEQ ID NO: 506977 - DNA, 120 bp, Artificial Sequence
  ENSG00000164099_1 (sequence is synthesized)
ggcaaggttggggaggcgagggcggtccgcgtgcgggggcgggagggggctgggggattcgagggacgcggcagccccgcccccgccccctcctcttctccgctccaagcccgagaagct

SEQ ID NO: 506978 - DNA, 120 bp, Artificial Sequence
  ENSG00000164099_2 (sequence is synthesized)
gagaagctggggagcatggaccagaccccgcagcgctggcaccatgacgctcgcccgcttcgtgctagccctgatgttaggggcgctccccgaagtggtcggctttgattctgtcctcaa

SEQ ID NO: 506979 - DNA, 120 bp, Artificial Sequence
  ENSG00000164099_3 (sequence is synthesized)
tgattccctccaccacagccaccgccattcgccccctgcgggtccgcactacccctattaccttcccacccagcagcggcccccgaggacgcgtccgccgccgcctctcccgcgcttccc

SEQ ID NO: 506980 - DNA, 120 bp, Artificial Sequence
  ENSG00000164099_4 (sequence is synthesized)
ctccaggccgggcacacgccccggccgcacccctggggctgccccgccggcgagccatgggtcagcgtgacggacttcggcgccccgtgtctgcggtgggcggaggtgccacccttcctg

SEQ ID NO: 506981 - DNA, 120 bp, Artificial Sequence
  ENSG00000164099_5 (sequence is synthesized)
cgccccgtgtctgcggtgggcggaggtgccacccttcctggagcggtcgcccccagcgagctgggctcagctgcgaggacagcgccacaacttttgtcggagccccgacggcgcgggcag

SEQ ID NO: 506982 - DNA, 120 bp, Artificial Sequence
  ENSG00000164099_6 (sequence is synthesized)
accctggtgtttctacggagacgcccgtggcaaggtggactggggctactgcgactgcagacacggatcagtacgacttcgtggcggcaaaaatgagtttgaaggcacagtggaagtata

SEQ ID NO: 506983 - DNA, 120 bp, Artificial Sequence
  ENSG00000164099_7 (sequence is synthesized)
tgcaagtggagtttggggcactgtctgtagcagccactgggatgattctgatgcatcagtcatttgtcaccagctgcagctgggaggaaaaggaatagcaaaacaaaccccgttttctgg

SEQ ID NO: 506984 - DNA, 120 bp, Artificial Sequence
  ENSG00000164099_8 (sequence is synthesized)
actgggccttattcccatttattggagcaatgtccgttgccgaggagatgaagaaaatatactgctttgtgaaaaagacatctggcagggtggggtgtgtcctcagaagatggcagctgc

SEQ ID NO: 506985 - DNA, 120 bp, Artificial Sequence
  ENSG00000164099_9 (sequence is synthesized)
tgtcacgtgtagcttttcccatggcccaacgttccccatcattcgccttgctggaggcagcagtgtgcatgaaggccgggtggagctctaccatgctggccagtggggaaccgtttgtga

SEQ ID NO: 506986 - DNA, 120 bp, Artificial Sequence
  ENSG00000164099_10 (sequence is synthesized)
tgaccaatgggatgatgccgatgcagaagtgatctgcaggcagctgggcctcagtggcattgccaaagcatggcatcaggcatattttggggaagggtctggcccagttatgttggatga

SEQ ID NO: 506987 - DNA, 120 bp, Artificial Sequence
  ENSG00000164099_11 (sequence is synthesized)
agtacgctgcactgggaatgagctttcaattgagcagtgtccaaagagctcctggggagagcataactgtggccataaagaagatgctggagtgtcctgtacccctctaacagatggggt

SEQ ID NO: 506988 - DNA, 120 bp, Artificial Sequence
  ENSG00000164099_12 (sequence is synthesized)
catcagacttgcaggtgggaaaggcagccatgagggtcgcttggaggtatattacagaggccagtggggaactgtctgtgatgatggctggactgagctgaatacatacgtggtttgtcg

SEQ ID NO: 506989 - DNA, 120 bp, Artificial Sequence
  ENSG00000164099_13 (sequence is synthesized)
acaattgggatttaaatatggtaaacaagcatctgccaaccattttgaagaaagcacagggcccatatggttggatgacgtcagctgctcaggaaaggaaaccagatttcttcagtgttc

SEQ ID NO: 506990 - DNA, 120 bp, Artificial Sequence
  ENSG00000164099_14 (sequence is synthesized)
caggcgacagtggggaaggcatgactgcagccaccgcgaagatgttagcattgcctgctaccctggcggcgagggacacaggctctctctgggttttcctgtcagactgatggatggaga

SEQ ID NO: 506991 - DNA, 120 bp, Artificial Sequence
  ENSG00000164099_15 (sequence is synthesized)
aaataagaaagaaggacgagtggaggtttttatcaatggccagtggggaacaatctgtgatgatggatggactgataaggatgcagctgtgatctgtcgtcagcttggctacaagggtcc

SEQ ID NO: 506992 - DNA, 120 bp, Artificial Sequence
  ENSG00000164099_16 (sequence is synthesized)
tgccagagcaagaaccatggcttactttggagaaggaaaaggacccatccatgtggataatgtgaagtgcacaggaaatgagaggtccttggctgactgtatcaagcaagatattggaag

SEQ ID NO: 506993 - DNA, 120 bp, Artificial Sequence
  ENSG00000164099_17 (sequence is synthesized)
acacaactgccgccacagtgaagatgcaggagttatttgtgattattttggcaagaaggcctcaggtaacagtaataaagagtccctctcatctgtttgtggcttgagattactgcaccg

SEQ ID NO: 506994 - DNA, 120 bp, Artificial Sequence
  ENSG00000164099_18 (sequence is synthesized)
tcggcagaagcggatcattggtgggaaaaattctttaaggggtggttggccttggcaggtttccctccggctgaagtcatcccatggagatggcaggctcctctgcggggctacgctcct

SEQ ID NO: 506995 - DNA, 120 bp, Artificial Sequence
  ENSG00000164099_19 (sequence is synthesized)
gagtagctgctgggtcctcacagcagcacactgtttcaagaggtatggcaacagcactaggagctatgctgttagggttggagattatcatactctggtaccagaggagtttgaggaaga

SEQ ID NO: 506996 - DNA, 120 bp, Artificial Sequence
  ENSG00000164099_20 (sequence is synthesized)
tcaacagattgtgattcatcgggagtatcgacccgaccgcagtgattatgacatagccctggttagattacaaggaccagaagagcaatgtgccagattcagcagccatgttttgccagc

SEQ ID NO: 506997 - DNA, 120 bp, Artificial Sequence
  ENSG00000164099_21 (sequence is synthesized)
ctgtttaccactctggagagagaggccacagaaaacagcatccaactgttacataacaggatggggtgacacaggacgagcctattcaagaacactacaacaagcagccattcccttact

SEQ ID NO: 506998 - DNA, 120 bp, Artificial Sequence
  ENSG00000164099_22 (sequence is synthesized)
tcctaaaaggttttgtgaagaacgttataagggtcggtttacagggagaatgctttgtgctggaaacctccatgaacacaaacgcgtggacagctgccagggagacagcggaggaccact

SEQ ID NO: 506999 - DNA, 120 bp, Artificial Sequence
  ENSG00000164099_23 (sequence is synthesized)
catgtgtgaacggcccggagagagctgggtggtgtatggggtgacctcctgggggtatggctgtggagtcaaggattctcctggtgtttataccaaagtctcagcctttgtaccttggat

SEQ ID NO: 507000 - DNA, 120 bp, Artificial Sequence
  ENSG00000164099_24 (sequence is synthesized)
aaaaagtgtcaccaaactgtaattcttcatggaaacttcaaagcagcatttaaacaaatggaaaactttgaacccccactattagcactcagcagagatgacaacaaatggcaagatctg

SEQ ID NO: 507001 - DNA, 120 bp, Artificial Sequence
  ENSG00000164099_25 (sequence is synthesized)
tttttgctttgtgttgtggtaaaaaattgtgtaccccctgctgcttttgagaaatttgtgaacattttcagaggcctcagtgtagtggaagtgataatccttaaatgaacattttctacc

SEQ ID NO: 507002 - DNA, 120 bp, Artificial Sequence
  ENSG00000164099_26 (sequence is synthesized)
ctaatttcactggagtgacttattctaagcctcatctatcccctacctatttctcaaaatcattctatgctgattttacaaaagatcatttttacatttgaactgagaaccccttttaat

SEQ ID NO: 507003 - DNA, 120 bp, Artificial Sequence
  ENSG00000164099_27 (sequence is synthesized)
tgaatcagtggtgtctgaaatcatattaaatacccacatttgacataaatgcggtaccctttactacactcatgagtggcatatttatgcttaggtcttttcaaaagacttgacaagaaa

SEQ ID NO: 507004 - DNA, 120 bp, Artificial Sequence
  ENSG00000164099_28 (sequence is synthesized)
tcttcatattctctgtagcctttgtcaagtgaggaaatcagtggttaaagaattccactataaacttttaggcctgaataggagtagtaaagcctcaaggacatctgcctgtcacaatat

SEQ ID NO: 507005 - DNA, 120 bp, Artificial Sequence
  ENSG00000164099_29 (sequence is synthesized)
attctcaaagtgatctgatatttggaaacaagtatccttgttgagtaccaagtgctacagaaaccataagataaaaatactttctacctacagcgtataaactagcaaaatttgaaagga

SEQ ID NO: 507006 - DNA, 120 bp, Artificial Sequence
  ENSG00000164099_30 (sequence is synthesized)
tttctggtaactaaatgccagctggacatacaacctattttatccaacacattaacatatctactatatttgcttttaacaagcacctcatcatagtccacgttccccgaccatgatgta

SEQ ID NO: 507007 - DNA, 120 bp, Artificial Sequence
  ENSG00000164099_31 (sequence is synthesized)
agagtgccacccactgacacttccctgtaactgacttatacctgcaggttttcccaagcccaacctgatacaatccaatcttaaaatatactagtcaaaatgctttcctggcctacacat

SEQ ID NO: 507008 - DNA, 120 bp, Artificial Sequence
  ENSG00000164099_32 (sequence is synthesized)
tgaaaagttctaatacatacagcagttataacatatgccaggcactgcattaggcagctttgcacatcactgacaatttgcaaaaggccagtaaatcttatggtagtagcccttgttttc

SEQ ID NO: 507009 - DNA, 120 bp, Artificial Sequence
  ENSG00000164099_33 (sequence is synthesized)
aaatgggggaaaacaggcttgcctcaaagtgagaccagttggtgaaactgattccaaactccagaaaaaatgctgatttttttccccatggttctcctacctaaatgattggtttcccta

SEQ ID NO: 507010 - DNA, 120 bp, Artificial Sequence
  ENSG00000164099_34 (sequence is synthesized)
tggctatttctccaagagttaagggatagctgcttaactatgcacctttacagaacattcttagcagtaatgctcaaatttaaaaggcacactcaagatacttccatgtcatggatcctt

SEQ ID NO: 507011 - DNA, 120 bp, Artificial Sequence
  ENSG00000164099_35 (sequence is synthesized)
ccccaggtcccagtagtataaatatagggaagaggttagcatgaacttacaaattgttttaagtaatcctcttgaatgccagtcattaaaggactttgcccttctacatcaaattacatc

SEQ ID NO: 507012 - DNA, 120 bp, Artificial Sequence
  ENSG00000164099_36 (sequence is synthesized)
cttttcacaaatccccatttctgtaataactggtgcaaacctaaaggtgctttatagttttactactttgcagatttgcaatgctgcatataatgcagaagagcattaaaaacttttgta

SEQ ID NO: 507013 - DNA, 120 bp, Artificial Sequence
  ENSG00000164099_37 (sequence is synthesized)
aaaactcatgattttgataaacttttaaagtagcgtttatatgtaaatagaactacacatggcacacacacttgcacaagggcttcagaaaaacgtgcaatataggtgagaaaaatgtct

SEQ ID NO: 507014 - DNA, 120 bp, Artificial Sequence
  ENSG00000164099_38 (sequence is synthesized)
attgaaactttctcacaggctgcccttataattaaactagtgttggggcaagcaacatctgtttcaagtagatcagggactagcaaacctaaaaggcagcaagcagcctgcagtttgctc

SEQ ID NO: 507015 - DNA, 120 bp, Artificial Sequence
  ENSG00000164099_39 (sequence is synthesized)
aatccttaagaatacatggttcatacaacatgcttttactatgtcttaagtgtgacttttgaaagatacaagtgttctgtgcatatttgtgtaaataaatacataattttccaccttgta

SEQ ID NO: 507016 - DNA, 120 bp, Artificial Sequence
  ENSG00000164099_40 (sequence is synthesized)
gtggaaacagcctaaatgaatggatgaagaaaatgtgaggctttcaaactttggaggaatgcactgcggtaggatttggagtgagtgcaagatatgctttttgtgaagtgagagaagaga

SEQ ID NO: 507017 - DNA, 120 bp, Artificial Sequence
  ENSG00000164099_41 (sequence is synthesized)
tatttttaagaaataatatatgtgaaatttgaggatataaaaattgattcacttacagcctgtgtatcccttggaaagttattatctaccaggagcacttgacatccagtttaaagacta

SEQ ID NO: 507018 - DNA, 120 bp, Artificial Sequence
  ENSG00000164099_42 (sequence is synthesized)
attatcagaaagtgttgtgtcattgaaattttcagctatgaattactagattcagtaaaccagtgagaagcctttcccttttttctatggatggcagagtccttaattgtttaaagaaag

SEQ ID NO: 507019 - DNA, 120 bp, Artificial Sequence
  ENSG00000164099_43 (sequence is synthesized)
agtagtcaaaagaaaatgtattagatttcactatatcaatgagaatttaatcatgtgctgttatttgttaaaatgttctctaatttctacttattgatatatctaaaatggtgctttttt

SEQ ID NO: 507020 - DNA, 120 bp, Artificial Sequence
  ENSG00000164099_44 (sequence is synthesized)
ttagtttgtgcaagttgatcagttgctaagaaatgatccttttggtttctttaagtgagttaaattttactttctgtatgtctacttctacctgccatctacttttatgttatttatcat

SEQ ID NO: 507021 - DNA, 120 bp, Artificial Sequence
  ENSG00000164099_45 (sequence is synthesized)
agctctcaagtttccatcattcagtagccattgcacctctaaccactggccttgaatatgaagtgtttctcatctttggctttttttggggtctatttcccataactgtctaattttcag

SEQ ID NO: 507022 - DNA, 120 bp, Artificial Sequence
  ENSG00000164099_46 (sequence is synthesized)
taatttttatgcagagaaaaataatcttttgagtctgtgcgccaacattatgaaatttctacccctaaattgtttttctttacttagaaaattaagttcctcactaacaatgtttacaat

SEQ ID NO: 507023 - DNA, 120 bp, Artificial Sequence
  ENSG00000164100_0 (sequence is synthesized)
gtaaagtcaaaaagcctgagccgatggtaacgagtggtactgtttccgtttcttttccatctattgcaactttctcaagcattttcagctctgaactttaattccagactgtattttctg

SEQ ID NO: 507024 - DNA, 120 bp, Artificial Sequence
  ENSG00000164100_1 (sequence is synthesized)
tgagtcctgatcaagtgatacaaatgagctgcaatggtgacataaactcttgacagagattggaaaagtagctggaacaccatcttttcttttaactttttatggtgcttctgttggcat

SEQ ID NO: 507025 - DNA, 120 bp, Artificial Sequence
  ENSG00000164100_2 (sequence is synthesized)
agttggggaaagcacctacaacatgagttttatcatgaagcttcacagacactttcaaagaacagtcattctgcttgccactttttgtatggtgagcattatcatttctgcttactacct

SEQ ID NO: 507026 - DNA, 120 bp, Artificial Sequence
  ENSG00000164100_3 (sequence is synthesized)
gtacagtggctacaaacaggaaaatgaactctctgagacggcttcagaagttgactgtggcgacctccaacacctaccatatcaactaatggaagtgaaagcaatgaagctttttgatgc

SEQ ID NO: 507027 - DNA, 120 bp, Artificial Sequence
  ENSG00000164100_4 (sequence is synthesized)
ctcaaggacagaccccacagtcctagtatttgtagagagccagtactcatctcttggtcaagacatcattatgattctagaatcaagtagattccagtatcacattgaaattgcccctgg

SEQ ID NO: 507028 - DNA, 120 bp, Artificial Sequence
  ENSG00000164100_5 (sequence is synthesized)
aaagggagatctcccagtgcttatagacaaaatgaaaggcaaatacattctcattatttatgagaatattttaaagtatataaatatggattcctggaatcgaagccttctagataaata

SEQ ID NO: 507029 - DNA, 120 bp, Artificial Sequence
  ENSG00000164100_6 (sequence is synthesized)
ctgtgtagaatatggtgtgggtgtcattggattccacaaaactagtgagaagagtgtacagagctttcagttaaaaggtttccctttttccatatatggaaatcttgcagtaaaagattg

SEQ ID NO: 507030 - DNA, 120 bp, Artificial Sequence
  ENSG00000164100_7 (sequence is synthesized)
ttgtattaatcctcattctccattgattcgtgtgaccaaatcttccaagcttgaaaaaggttctttacctggaactgactggacagtttttcagattaatcattcagcctatcaaccagt

SEQ ID NO: 507031 - DNA, 120 bp, Artificial Sequence
  ENSG00000164100_8 (sequence is synthesized)
aatatttgccaaagtaaagaccccagaaaacctttctccttccatctctaaaggtgctttttatgccactattatacatgacctggggcttcatgatggaattcaaagggttctttttgg

SEQ ID NO: 507032 - DNA, 120 bp, Artificial Sequence
  ENSG00000164100_9 (sequence is synthesized)
caacaacttgaacttttggctgcacaagctcatcttcatagatgccatctccttcttatcagggaagaggctgacattgtccttggacaggtacattcttgtggatattgatgatatatt

SEQ ID NO: 507033 - DNA, 120 bp, Artificial Sequence
  ENSG00000164100_10 (sequence is synthesized)
tgtgggaaaagagggaacaagaatgaacaccaatgatgtaaaggccctgcttgatactcagaatcttttgcgtgcacaaatcacaaattttacattcaacctgggattttcagggaaatt

SEQ ID NO: 507034 - DNA, 120 bp, Artificial Sequence
  ENSG00000164100_11 (sequence is synthesized)
ttaccatacaggaactgaagaggaagatgaaggagatgactgtctgttggggtctgtggatgagttctggtggtttcctcacatgtggagccatatgcagccccacctcttccacaatga

SEQ ID NO: 507035 - DNA, 120 bp, Artificial Sequence
  ENSG00000164100_12 (sequence is synthesized)
gtcatctttggtggagcagatgattctcaacaaaaaatttgccttagagcacggcattccaacggacatgggctacgctgtggcccctcaccattcgggcgtctaccctgtacatgttca

SEQ ID NO: 507036 - DNA, 120 bp, Artificial Sequence
  ENSG00000164100_13 (sequence is synthesized)
gctttatgaggcctggaagaaggtctggaatattaaaatcaccagcactgaagaatatccacatctgaagccagctagataccggaggggttttatccacaaaaacatcatggttctccc

SEQ ID NO: 507037 - DNA, 120 bp, Artificial Sequence
  ENSG00000164100_14 (sequence is synthesized)
aagacaaacctgtgggcttttcactcacaccattttctacaaagaatatccagggggtcctaaagagctggataagagtatccaaggaggagaacttttcttcactgtcgtcctcaaccc

SEQ ID NO: 507038 - DNA, 120 bp, Artificial Sequence
  ENSG00000164100_15 (sequence is synthesized)
tatcagcattttcatgacccatttgtccaactatgggaatgaccgactgggattatatacatttgttaatctggccaactttgtgaagagctggaccaacctgcgacttcagactctgcc

SEQ ID NO: 507039 - DNA, 120 bp, Artificial Sequence
  ENSG00000164100_16 (sequence is synthesized)
tccagtacaactggcccacaagtattttgagctgtttcctgatcagaaagaccctctctggcagaatccttgcgatgacaaacgccacagagacatttggtctaaagaaaaaacttgtga

SEQ ID NO: 507040 - DNA, 120 bp, Artificial Sequence
  ENSG00000164100_17 (sequence is synthesized)
tcgcttaccaaaattcttggtaataggaccccagaaaactggtaccactgctttgtatttgttcctggttatgcatccttccatccttagtaactcccccagcccaaaaacctttgagga

SEQ ID NO: 507041 - DNA, 120 bp, Artificial Sequence
  ENSG00000164100_18 (sequence is synthesized)
ggtacagttctttaatagaaataactaccacagggggattgattggtatatggatttcttcccagtcccatctaatgtcactaccgactttttgtttgagaagagtgccaattacttcca

SEQ ID NO: 507042 - DNA, 120 bp, Artificial Sequence
  ENSG00000164100_19 (sequence is synthesized)
ctcagaggaagcccctaaaagagctgcttctctggttcccaaagccaagattatcaccattctcattgacccttcagaccgagcatactcctggtaccagcatcagcgatcacatgaaga

SEQ ID NO: 507043 - DNA, 120 bp, Artificial Sequence
  ENSG00000164100_20 (sequence is synthesized)
ccctgcagctctgaagtttagcttctacgaagtgatctcagcagggccccgtgcaccctcggagctcagagccttgcagaagagatgtttggtcccggggtggtatgccagccacatcga

SEQ ID NO: 507044 - DNA, 120 bp, Artificial Sequence
  ENSG00000164100_21 (sequence is synthesized)
gagatggcttgtttatttccccccatttcagttgctaattattgatgggcaacaactaagaactgatcctgctacagtgatggatgaagtacagaagtttctaggagtcttgcctcatta

SEQ ID NO: 507045 - DNA, 120 bp, Artificial Sequence
  ENSG00000164100_22 (sequence is synthesized)
taattactcagaagctttaacgtttgattctcataaaggtttctggtgtcagttactggaagaaggtaaaacaaaatgccttggaaagagcaaaggaagaaaataccctccaatggattc

SEQ ID NO: 507046 - DNA, 120 bp, Artificial Sequence
  ENSG00000164100_23 (sequence is synthesized)
tgatagcaggacatttctgtcaagctactatcgagatcacaacgtggaactctcaaagctgctgcacaaactgggtcagcctctgccatcctggctgagacaggagctgcagaaagtaag

SEQ ID NO: 507047 - DNA, 120 bp, Artificial Sequence
  ENSG00000164100_24 (sequence is synthesized)
accttttccaaagcttccagaagctaccaaaaggcagttgaaaaatatacctcttcaaatgagaaaaaagaacagtttcttccatgtgctggcacgtggatgattagaaaaaaagaaaaa

SEQ ID NO: 507048 - DNA, 120 bp, Artificial Sequence
  ENSG00000164100_25 (sequence is synthesized)
gtatgtgttacaagccttgaggcctgtggcctttctcttaacccatatctgagcctgtgggattattgtagactactgtgcactcatgtggaagtcaattgcaaccaacataaatatcaa

SEQ ID NO: 507049 - DNA, 120 bp, Artificial Sequence
  ENSG00000164100_26 (sequence is synthesized)
acacaaatgcagaactgttccatttcatagtaatatttacacttttatatatcaactaagattgtgtctctgtaggtttttagaccactgtttgcctgtacgatgttttcttattatttt

SEQ ID NO: 507050 - DNA, 120 bp, Artificial Sequence
  ENSG00000164100_27 (sequence is synthesized)
attctataaagtgtcctatgaaacaagaagcaaaataaacatcacaatgtagcataaaatgtcaaaagcataacacccatgaaaaatgcttgccaaaatttaaatccacttaagtattta

SEQ ID NO: 507051 - DNA, 120 bp, Artificial Sequence
  ENSG00000164100_28 (sequence is synthesized)
gaaataattgtaaattataatttgtgctagatcagagtggaaaagttatatatgagtgttatctgcaccaaaaaaaaataagtgctatagcaaaagtgattttttcatatacatagtcta

SEQ ID NO: 507052 - DNA, 120 bp, Artificial Sequence
  ENSG00000164100_29 (sequence is synthesized)
gtgaatatatgtaaaaattactaactcttccatcacaacgtaattgttatactgaaatatatactgtaaagctgttggatggtaaatagaaacacatcaagtacaccaaaacagtaaata

SEQ ID NO: 507053 - DNA, 120 bp, Artificial Sequence
  ENSG00000164100_30 (sequence is synthesized)
acaatgtaaagtgtactgactgaatcctctaaaagggagaaattgtaggggtctaaaaacatatcatcgagaattctatgtccacttgctgtaagctgtgaatctatcccagtagtcctc

SEQ ID NO: 507054 - DNA, 120 bp, Artificial Sequence
  ENSG00000164100_31 (sequence is synthesized)
actagttctacagaaatgcatgcctagagtctgaggtatgtgtcatctccagaaacaggttgacttttaaatgtgaatagctatttttaatgctccccaaaacaaaacctattaaactaa

SEQ ID NO: 507055 - DNA, 120 bp, Artificial Sequence
  ENSG00000164100_32 (sequence is synthesized)
aactaaaaacagtttccctagatgatgtggttaggctatttacatttaggttattaaaaaattgcattttcccagatagttcaaaataaaattatgtaatgtagtagagatttataacaa

SEQ ID NO: 507056 - DNA, 120 bp, Artificial Sequence
  ENSG00000164100_33 (sequence is synthesized)
aaaacaaattaatatattatttgtaatctaatgtttgcaatgatacttttgatataaggcaaagaaacataagcagagcagaggcccatttttgaaaatatttcacccatcactctggtg

SEQ ID NO: 507057 - DNA, 120 bp, Artificial Sequence
  ENSG00000164100_34 (sequence is synthesized)
gaagtaacagatcataggtacaattaaggattagctactaaattaaatgcaggaagtacaaagatgagcaagtcatgctcttgaaatatatttacatttcaattgtaaataatatatatg

SEQ ID NO: 507058 - DNA, 120 bp, Artificial Sequence
  ENSG00000164100_35 (sequence is synthesized)
tatggttaataaagtttccaaaaaagaaaagaatacatcatacttattttcctgttaatatttacttaatttttttttttgagagggggacagagtctcactatgtcacccaggctggag

SEQ ID NO: 507059 - DNA, 120 bp, Artificial Sequence
  ENSG00000164100_36 (sequence is synthesized)
actacttaatttttaaatgtactgtacatatacataaaatttaagtagtaaattaattccctgctatgattataagcctttataaaatattatcaaaggtatgattagaaacaaatggga

SEQ ID NO: 507060 - DNA, 120 bp, Artificial Sequence
  ENSG00000164100_37 (sequence is synthesized)
ggaaaacccatagtaaaaatattttcattgtcattttaatgggtaaaactatcaattactaattagaaaatgaattgtgagatccacttactataaatttttaactgtacattataatta

SEQ ID NO: 507061 - DNA, 120 bp, Artificial Sequence
  ENSG00000164100_38 (sequence is synthesized)
cttttttaaagtttcatgtacctaaagcatatgctaatttttaaatatactattagcagaaaaaattggaaaaatcaccaatttttaagactcttgactctaaaagcaaaatcaaagtga

SEQ ID NO: 507062 - DNA, 120 bp, Artificial Sequence
  ENSG00000164100_39 (sequence is synthesized)
tttggacaaatatgggaaacacagtcttcatgcttactgctgtctcttttatagcagcagatgccagacatgctaggaaaattactatagtcttccatctccaccaacttaagaaaactg

SEQ ID NO: 507063 - DNA, 120 bp, Artificial Sequence
  ENSG00000164100_40 (sequence is synthesized)
gcttaggaaggttaaacatgagaataggcctcagcagttatatacagtgtcatgttttcatttggcaacaacatttattctaataaaaaaagaaaagaaaaactgatacatttatgcttt

SEQ ID NO: 507064 - DNA, 120 bp, Artificial Sequence
  ENSG00000164100_41 (sequence is synthesized)
aatggtaagatgtacatttgaactgctaagcaaagctgctaatggcctattttgtttaggtaaatcgagttgactgaacacttcatccttttaaatagatgtcaaaaacatactccgtgt

SEQ ID NO: 507065 - DNA, 120 bp, Artificial Sequence
  ENSG00000164100_42 (sequence is synthesized)
ttgtataaagacaggagaaaaaggaagagatcttaccaaaatttattcattcacaagtacatgtattacgctagctagagcagcaaacctgtgaaaggatttttgaccactcaatgtgtc

SEQ ID NO: 507066 - DNA, 120 bp, Artificial Sequence
  ENSG00000164100_43 (sequence is synthesized)
ttgaagacagcatcaaattctagaggacatgcatactttccacattatatactccaactggttaatatgctaatctgaaagtaacataaatacatatgagagaataatgagagataatct

SEQ ID NO: 507067 - DNA, 120 bp, Artificial Sequence
  ENSG00000164100_44 (sequence is synthesized)
gatttaaaactagctttgtatagaattccctttttcattgtttaaaatatgaaacttcctcaggaagaaatgaaatggttatttcaatgtttatagctgtaatattcttgtcattcacat

SEQ ID NO: 507068 - DNA, 120 bp, Artificial Sequence
  ENSG00000164100_45 (sequence is synthesized)
tgaatgaaaattactggaaacatttttttctctgagttttttaaaataaaaaacctagatataattctgatagtagcatggtacctcatatgtacaacaataaactgataggaaaatgaa

SEQ ID NO: 507069 - DNA, 120 bp, Artificial Sequence
  ENSG00000164100_46 (sequence is synthesized)
gccgggcgggtcccagggccgtggttctccagcgcaggagtccccggcgcacccgctgcgctcgccccgcagccgcagcctgagcggccgaagtcgccaccagctgtgtccgcgcagatc

SEQ ID NO: 507070 - DNA, 120 bp, Artificial Sequence
  ENSG00000164100_47 (sequence is synthesized)
cagctgtgtccgcgcagatcccgggcgcggaggggagaggtcgcccgcttgtcgcccccgccggaccccgggcaccgcgtagcacccaagcgccacccggacgaggggccctggggagcg

SEQ ID NO: 507071 - DNA, 120 bp, Artificial Sequence
  ENSG00000164100_48 (sequence is synthesized)
ttcatcttccagcagggatacaactatcccagtttgtactacaactgggttacccaggacatgggatttactgggaaagtctgggcaatctaggattatcgctcaccctaaatcaactaa

SEQ ID NO: 507072 - DNA, 120 bp, Artificial Sequence
  ENSG00000164100_49 (sequence is synthesized)
gaagattatgtatttctatctgaatcaagaaaaataaagattttactaaaagattgagtgtggcaggatcctgaaatggttttctacatgtatttacaactagagtagaagtcatttcgt

SEQ ID NO: 507073 - DNA, 120 bp, Artificial Sequence
  ENSG00000164100_50 (sequence is synthesized)
ttaattactttccagaaactatctacctcaaaaaaaagctattactaatctcagacttagctcatttaaatatgaaattaaagtgaatttgtcttaatgataataaatatttccacaaat

SEQ ID NO: 507074 - DNA, 120 bp, Artificial Sequence
  ENSG00000164100_51 (sequence is synthesized)
ttcaagaattacagatctcattgtagcaagttcagatacttttggaagtcaaatatgcagtgcattttctcttatcatatttttctgaaactgaaaatcagtactactaaatatgaagat

SEQ ID NO: 507075 - DNA, 120 bp, Artificial Sequence
  ENSG00000164100_52 (sequence is synthesized)
caatgactgtataagcatatttattcacatttaaacatgaggatttaacttgatttcagcgaacacttctgacacatatatgaagccaatcatgccaaatttaaattgtattacatttct

SEQ ID NO: 507076 - DNA, 120 bp, Artificial Sequence
  ENSG00000164100_53 (sequence is synthesized)
tattgtgtaaaactgctgcccttaaacagaaaacaattatttgaaatagtttgtcattattatgagttgattgtgttacataaacagctgattgtttactattaaaaaattttaaaatta

SEQ ID NO: 507077 - DNA, 120 bp, Artificial Sequence
  ENSG00000164104_0 (sequence is synthesized)
aaaccagttcacgccggagccccgtgagggaagcgtctccgttgggtccggccgctctgcgggactctgaggaaaagctcgcaccaggtggacgcggatctgtcaacatgggtaaaggag

SEQ ID NO: 507078 - DNA, 120 bp, Artificial Sequence
  ENSG00000164104_1 (sequence is synthesized)
accccaacaagccgcggggcaaaatgtcctcgtacgccttcttcgtgcagacctgccgggaagagcacaagaagaaacacccggactcttccgtcaatttcgcggaattctccaagaagt

SEQ ID NO: 507079 - DNA, 120 bp, Artificial Sequence
  ENSG00000164104_2 (sequence is synthesized)
gttcggagagatggaagaccatgtctgcaaaggagaagtcgaagtttgaagatatggcaaaaagtgacaaagctcgctatgacagggagatgaaaaattacgttcctcccaaaggtgata

SEQ ID NO: 507080 - DNA, 120 bp, Artificial Sequence
  ENSG00000164104_3 (sequence is synthesized)
agaaggggaagaaaaaggaccccaatgctcctaaaaggccaccatctgccttcttcctgttttgctctgaacatcgcccaaagatcaaaagtgaacaccctggcctatccattggggata

SEQ ID NO: 507081 - DNA, 120 bp, Artificial Sequence
  ENSG00000164104_4 (sequence is synthesized)
ctgcaaagaaattgggtgaaatgtggtctgagcagtcagccaaagataaacaaccatatgaacagaaagcagctaagctaaaggagaaatatgaaaaggatattgctgcatatcgtgcca

SEQ ID NO: 507082 - DNA, 120 bp, Artificial Sequence
  ENSG00000164104_5 (sequence is synthesized)
agggcaaaagtgaagcaggaaagaagggccctggcaggccaacaggctcaaagaagaagaacgaaccagaagatgaggaggaggaggaggaagaagaagatgaagatgaggaggaagagg

SEQ ID NO: 507083 - DNA, 120 bp, Artificial Sequence
  ENSG00000164104_6 (sequence is synthesized)
tgaagatgaagaataaatggctatcctttaatgatgcgtgtggaatgtgtgtgtgtgctcaggcaattattttgctaagaatgtgaattcaagtgcagctcaatactagcttcagtataa

SEQ ID NO: 507084 - DNA, 120 bp, Artificial Sequence
  ENSG00000164104_7 (sequence is synthesized)
aaactgtacagatttttgtatagctgataagattctctgtagagaaaatacttttaaaaaatgcaggttgtagctttttgatgggctactcatacagttagattttacagcttctgatgt

SEQ ID NO: 507085 - DNA, 120 bp, Artificial Sequence
  ENSG00000164104_8 (sequence is synthesized)
tgaatgttcctaaatatttaatggtttttttaatttcttgtgtatggtagcacagcaaacttgtaggaattagtatcaatagtaaattttgggttttttaggatgttgcatttcgttttt

SEQ ID NO: 507086 - DNA, 120 bp, Artificial Sequence
  ENSG00000164104_9 (sequence is synthesized)
ttaaaaaaaattttgtaataaaattatgtatattatttctattgtctttgtcttaatatgctaagttaattttcactttaaaaaagccatttgaagaccagagctatgttgatttttttc

SEQ ID NO: 507087 - DNA, 120 bp, Artificial Sequence
  ENSG00000164104_10 (sequence is synthesized)
ggtatttctgcctagtagttcttagacacagttgacctagtaaaatgtttgagaattaaaaccaaacatgctcatatttgcaaaatgttctttaaaagttacatgttgaactcagtgaac

SEQ ID NO: 507088 - DNA, 120 bp, Artificial Sequence
  ENSG00000164104_11 (sequence is synthesized)
aactcagtgaactttataagaatttatgcagttttacagaacgttaagttttgtacttgacgtttctgtttattagctaaattgttcctcaggtgtgtgtatatatatatacatatatat

SEQ ID NO: 507089 - DNA, 120 bp, Artificial Sequence
  ENSG00000164104_12 (sequence is synthesized)
aaaaggtacagtgtcatcttttttaaagccgtggataagactaggtataggtaataactgtagaaaacctgggaaatttagttaatcttgtattaatggttgtcagctatgttttgaaaa

SEQ ID NO: 507090 - DNA, 120 bp, Artificial Sequence
  ENSG00000164104_13 (sequence is synthesized)
accttccttttgactgaaaccagtgtttgtagcactagtatattcctgcagacagacttgtagttacttgtagttattgtatagtctgtatagtctgttatttttttttttaagcagaga

SEQ ID NO: 507091 - DNA, 120 bp, Artificial Sequence
  ENSG00000164104_14 (sequence is synthesized)
gtcaaagaaattgttttatgtagatatatataaaatgtgaaggtacaggagggactatggcactgtgtgtgatgtaaaagggtattggtagtgaaagtactgatactgctgtatcgcaac

SEQ ID NO: 507092 - DNA, 120 bp, Artificial Sequence
  ENSG00000164104_15 (sequence is synthesized)
ccttgtcattttacgtcattaacttgttaaagcctagtgggataagtgctctaaaaacttagactggttacctttttagacagttattagggttattggtcaatcatcttagattgttta

SEQ ID NO: 507093 - DNA, 120 bp, Artificial Sequence
  ENSG00000164104_16 (sequence is synthesized)
tcgggttcgtggacctgcctttccccattccctcagagcctctactcggtctcggcgcagtggctctcggggtctgacccggcgagcggcatttggggtgcgggccggcgagggctgggt

SEQ ID NO: 507094 - DNA, 120 bp, Artificial Sequence
  ENSG00000164105_0 (sequence is synthesized)
agtgagcggggtccccgctccaggagacgctcgagtctgcgtcccggccctcagcactgtccactgtttcggtgccagcagagaccagcaggcccgggacagttggtgtttggccgtgcc

SEQ ID NO: 507095 - DNA, 120 bp, Artificial Sequence
  ENSG00000164105_1 (sequence is synthesized)
gctgtctaacttggtgtgcagagtgaattgccgctgccggagcggagagaggcggagcggccaggagagaggggatttctgtcagcgccggcctcgggagctcggagacatgaacggctt

SEQ ID NO: 507096 - DNA, 120 bp, Artificial Sequence
  ENSG00000164105_2 (sequence is synthesized)
gagacatgaacggcttcacgcctgacgagatgagccgcggcggggatgcggccgccgcagtggccgcagtggtcgctgccgcggccgccgccgcctcggcggggaacgggaccggcgcgg

SEQ ID NO: 507097 - DNA, 120 bp, Artificial Sequence
  ENSG00000164105_3 (sequence is synthesized)
gtctcagcggctgggcccccgggggcggccgggccgggccccgggcaactgtgctgcctgcgggaggatggtgagcggtgcggccgggcggcaggcaacgccagcttcagcaagaggatc

SEQ ID NO: 507098 - DNA, 120 bp, Artificial Sequence
  ENSG00000164105_4 (sequence is synthesized)
agaagagcatctcccagaagaaggtgaagatcgagctggataagagcgcaaggcatctttacatatgtgattatcataaaaacttaattcagagtgttcgaaacagaagaaagagaaaag

SEQ ID NO: 507099 - DNA, 120 bp, Artificial Sequence
  ENSG00000164105_5 (sequence is synthesized)
ggagtgatgatgatggaggtgattcacctgttcaagatattgataccccagaggttgatttataccaattacaagtaaatacacttaggagatacaaaagacacttcaagctaccaacca

SEQ ID NO: 507100 - DNA, 120 bp, Artificial Sequence
  ENSG00000164105_6 (sequence is synthesized)
gaccaggacttaataaagcacaacttgttgagatagttggttgccactttaggtctattccagtgaatgaaaaagacaccttaacatatttcatctactcagtgaagaatgacaagaaca

SEQ ID NO: 507101 - DNA, 120 bp, Artificial Sequence
  ENSG00000164105_7 (sequence is synthesized)
aatcagatctcaaggttgatagtggtgttcactaggagacgtggaattgagactaataacttggatgttaacactgtttactgttttttcacatgtagaaatgttctttgtgtatttttt

SEQ ID NO: 507102 - DNA, 120 bp, Artificial Sequence
  ENSG00000164105_8 (sequence is synthesized)
ctacagaggattttctctgattttattttctttgtttctgactctaataattagttggaaactcatataaaatgagctttcctaaattaaatctattttaaataaaggttattactatta

SEQ ID NO: 507103 - DNA, 120 bp, Artificial Sequence
  ENSG00000164105_9 (sequence is synthesized)
tcaggaaatgcgctttctgctccccgcgcccggtagagctaatgcagggaagtttctgggaacattcgaccagcgtttgtattggagtcgaggaacttctctgaaaaccaattctacgat

SEQ ID NO: 507104 - DNA, 120 bp, Artificial Sequence
  ENSG00000164106_0 (sequence is synthesized)
agcatttaagaagcatcctctgccaagaccaaaaggaaagaagaaaaagggccaaaagccaaaatgaaactgatggtacttgttttcaccattgggctaactttgctgctaggagttcaa

SEQ ID NO: 507105 - DNA, 120 bp, Artificial Sequence
  ENSG00000164106_1 (sequence is synthesized)
gccatgcctgcaaatcgcctctcttgctacagaaagatactaaaagatcacaactgtcacaaccttccggaaggagtagctgacctgacacagattgatgtcaatgtccaggatcatttc

SEQ ID NO: 507106 - DNA, 120 bp, Artificial Sequence
  ENSG00000164106_2 (sequence is synthesized)
tgggatgggaagggatgtgagatgatctgttactgcaacttcagcgaattgctctgctgcccaaaagacgttttctttggaccaaagatctctttcgtgattccttgcaacaatcaatga

SEQ ID NO: 507107 - DNA, 120 bp, Artificial Sequence
  ENSG00000164106_3 (sequence is synthesized)
gaatcttcatgtattctggagaacaccattcctgatttcccacaaactgcactacatcagtataactgcatttctagtttctatatagtgcaatagagcatagattctataaattcttac

SEQ ID NO: 507108 - DNA, 120 bp, Artificial Sequence
  ENSG00000164106_4 (sequence is synthesized)
ttgtctaagacaagtaaatctgtgttaaacaagtagtaataaaagttaattcaatctaatttttctctgtggacattgttggcattggttaaaaattttgcctagaaaatgtaatctatg

SEQ ID NO: 507109 - DNA, 120 bp, Artificial Sequence
  ENSG00000164106_5 (sequence is synthesized)
aggtgttcattatactcagttaaagagttctgtcccccagatgaagagccataggcatggctcaaggattgaaaatactttcagtccttagttgacagttattaaccacatattgaaaga

SEQ ID NO: 507110 - DNA, 120 bp, Artificial Sequence
  ENSG00000164106_6 (sequence is synthesized)
tagttgacagttattaaccacatattgaaagaaccaggtataagctgagattcttggaagggagctagaaattttctagtaagaaggaaaaagggaccagcctgggcaacatagtgagac

SEQ ID NO: 507111 - DNA, 120 bp, Artificial Sequence
  ENSG00000164106_7 (sequence is synthesized)
agcaggttgtgggtgcccacatctgtagttctagttactcaagagggtcatttgaatctagaatttcgagtctgcagtgagctatgattgcactactgcactctagcctgggtgacagag

SEQ ID NO: 507112 - DNA, 120 bp, Artificial Sequence
  ENSG00000164106_8 (sequence is synthesized)
aaaaaaaaaaaaaaaggaaaagggaacaatatttgagggtatattatgtatgctaataactttaagtacatttcaggctgggactggtgactaatgcctgtaatcctagcattttgggag

SEQ ID NO: 507113 - DNA, 62 bp, Artificial Sequence
  ENSG00000164106_9 (sequence is synthesized)
ttacaaaaaaaatttaaaaattagctgcatggcggcatgcacctgtagtcccagctatttgg

SEQ ID NO: 507114 - DNA, 120 bp, Artificial Sequence
  ENSG00000164106_10 (sequence is synthesized)
ccagctatttgggaggctgaggtaggaggatcactcgagcccagaaattcaaggctgcagtgagctaagatgatgccactgaactccaccatggaaccacagagtgagactctgtctcaa

SEQ ID NO: 507115 - DNA, 120 bp, Artificial Sequence
  ENSG00000164106_11 (sequence is synthesized)
actctgtctcaaacaaacaaacaaaaaccaagaactttaagcacatttcattttactctcttaaaaaacaacaacaaaagccttcaaggtaaatattctcagccccatttttcagctgct

SEQ ID NO: 507116 - DNA, 120 bp, Artificial Sequence
  ENSG00000164106_12 (sequence is synthesized)
cagctgctaactcaagtttaagatatttgctaaaaatcaaggcagattttcaagagttccaattccaaagcccatatgccacacacagatgtatccttaaaaccatgatacatttcctaa

SEQ ID NO: 507117 - DNA, 120 bp, Artificial Sequence
  ENSG00000164106_13 (sequence is synthesized)
agtatccatttttaagaataacaaaacacacattaaaagaaacataatggatgagaatttaaaagtatcatacattttaaaagtaaataaaacagggaacttcaaaggtattttctgatt

SEQ ID NO: 507118 - DNA, 120 bp, Artificial Sequence
  ENSG00000164106_14 (sequence is synthesized)
gttagaggagacagctttggattatgccccataacttaagaggtatgtgactcatattgccatcagaggtaatgtcagaaagtctttcatgttataaaaatgtattcaaagcctgctaag

SEQ ID NO: 507119 - DNA, 120 bp, Artificial Sequence
  ENSG00000164106_15 (sequence is synthesized)
tgccagccattattaagatctgggcatacagtaatgaataaaatggacttatcttcttggaacttgtgctctaacaaaggtgtgattgctataaacaagtaattatttataaatgtgaag

SEQ ID NO: 507120 - DNA, 120 bp, Artificial Sequence
  ENSG00000164106_16 (sequence is synthesized)
ggggaaatgtttgagagacaccataccacacaggcaatctgggagatatcattttatgaataaaagtgacattatttcattaaaatatatccttggaggtccctgatctgtttctggaga

SEQ ID NO: 507121 - DNA, 120 bp, Artificial Sequence
  ENSG00000164106_17 (sequence is synthesized)
ccacacccagaacagtatctggtatctaatctgtgtttagtaagtgttactgggctgaaagaccacacccaaaacagtgtctggtatctaatctgtgtaaataagtgttactgggctgga

SEQ ID NO: 507122 - DNA, 90 bp, Artificial Sequence
  ENSG00000164106_18 (sequence is synthesized)
ctggtatctaatctgtgtaaataagtgttactgggctggaccaaacaattttgaggtagtcacaattcagtgtcttaaagtgtatataaa

SEQ ID NO: 507123 - DNA, 120 bp, Artificial Sequence
  ENSG00000164106_19 (sequence is synthesized)
gtgtatataaacacaagtcagaacatgttttcgaacagtgtaagctcctataaaatacatgaagtgaaattgtaaaataatatagataggtaggtagatggataatattagttgttttat

SEQ ID NO: 507124 - DNA, 120 bp, Artificial Sequence
  ENSG00000164106_20 (sequence is synthesized)
caagatagcatgtgatttgattggcctttctttcttcactgaattgactggtaatgaaatcagcctaactcaataatgaaagtttcatatccattctggaacaatgcatagaataggtaa

SEQ ID NO: 507125 - DNA, 120 bp, Artificial Sequence
  ENSG00000164106_21 (sequence is synthesized)
atttaaaaaaactatcagcaaaccagttttattttctacttggtaggaactctccttgagggggaaaaagcattaaagatccagtgtctccatttacaaatgacacatcagcataaggac

SEQ ID NO: 507126 - DNA, 120 bp, Artificial Sequence
  ENSG00000164106_22 (sequence is synthesized)
atatgtgagacaacaacggctttttagtaaacgttcccttactactgcaatcaaagcctggtaagaaaaattgtatctaacaaagctaaatatttaataaataaaattttataaattatt

SEQ ID NO: 507127 - DNA, 120 bp, Artificial Sequence
  ENSG00000164106_23 (sequence is synthesized)
catcataatgtctttctgaaaatatgaaattcagttatttcttttagaaatgaatgcattatacaagtacacagccttctttatattacaaaataaatgtaaaaacatacattcacacaa

SEQ ID NO: 507128 - DNA, 120 bp, Artificial Sequence
  ENSG00000164106_24 (sequence is synthesized)
cttaccttatataactatttctctaacttggtcaatgcatttttaaaaacaatagatttttttttttttttgaaactgagtctcactctgtcacccaggccagagtacagtggcacaatc

SEQ ID NO: 507129 - DNA, 120 bp, Artificial Sequence
  ENSG00000164106_25 (sequence is synthesized)
ataagacaactaagcttttattaaaattttattattcttctaaacaccatcttgcagcaactgaatgagataggtactgatattatccttgttctatggacaaaaaagctaaggtttaaa

SEQ ID NO: 507130 - DNA, 120 bp, Artificial Sequence
  ENSG00000164106_26 (sequence is synthesized)
gatattaagtagtttgtctaagtttacattatcagtgagcaattgagccagattttgaatatggccagtcttacactagcatctagagtcttaaccactatgttgtttaacagcattacc

SEQ ID NO: 507131 - DNA, 120 bp, Artificial Sequence
  ENSG00000164106_27 (sequence is synthesized)
taatgcattatttcctttacagaaaggcaaacttttacatggataggacacacaattgtacatttcagatagctcatatatgctaaaagcttactgaacaagtatttctgtattgttatc

SEQ ID NO: 507132 - DNA, 120 bp, Artificial Sequence
  ENSG00000164106_28 (sequence is synthesized)
tttgactttctatatcattgttcttactgtgaatcccacgttactgagcacaaagttgacagtaatacatattaatagctcacctctttttaattaaaattcatcttttcttcatcgtaa

SEQ ID NO: 507133 - DNA, 120 bp, Artificial Sequence
  ENSG00000164106_29 (sequence is synthesized)
gtagtgagggggaagttgcagacctatgtaactttggaaatgagtagagtctgtcaaactaaaggtaaaagacaccgtatataaacactgtactccagctgataaaattgtttaccatga

SEQ ID NO: 507134 - DNA, 120 bp, Artificial Sequence
  ENSG00000164106_30 (sequence is synthesized)
gaaaacaccattcagctgctttaagtttctgactgtccagttaagaactgtttcaagccaaatatgaacagaagatggacggaggaaacacagtaaaagagagacgactctgtggctcac

SEQ ID NO: 507135 - DNA, 120 bp, Artificial Sequence
  ENSG00000164106_31 (sequence is synthesized)
agagagcaggctaagagcacagttttgtcttggtttccagtttgtgctccactacttatcagctgtgtgatcttggccaagtgcttaatttttttgaaccccagttcccccatctggaaa

SEQ ID NO: 507136 - DNA, 120 bp, Artificial Sequence
  ENSG00000164106_32 (sequence is synthesized)
ctacctcatgggaggtggcatcagttcaccctcttacacaacagctacttggtgattctgctgtctcttcaagggccttactgacgattcctcagtagaacctgttttcctgagtctcac

SEQ ID NO: 507137 - DNA, 120 bp, Artificial Sequence
  ENSG00000164106_33 (sequence is synthesized)
ttcagcaacataaagctaagtttggtcctggctggagcagcgagtctgtcgatcccaggccagagacaaggcagacaaaggttcatttgtaaagaagctccttccagcacctcctctctt

SEQ ID NO: 507138 - DNA, 120 bp, Artificial Sequence
  ENSG00000164106_34 (sequence is synthesized)
ctccttttgcccaaactcacccagtgagtgtgagcatttaagaagcatcctctgccaagaccaaaaggaaagaagaaaaaggctatgaaaagctctcccaaatgctggtccttttctcca

SEQ ID NO: 507139 - DNA, 120 bp, Artificial Sequence
  ENSG00000164106_35 (sequence is synthesized)
tataaccatcttaccaaggaaaggtgcagagttgaagtgaccagtactatcccacataactagctaatatcaacactgggattagaacccacgtgttctgattaagaacagatttttctt

SEQ ID NO: 507140 - DNA, 120 bp, Artificial Sequence
  ENSG00000164106_36 (sequence is synthesized)
ctaccaagccagctggttctcaaagtgtggttcccagaacagcagcttcagcatcacctgagtttttaaaattgcatatccatccttggactcctccccagacctactgaatcagaaact

SEQ ID NO: 507141 - DNA, 120 bp, Artificial Sequence
  ENSG00000164107_0 (sequence is synthesized)
agctgtacatggagatcttgctgggaaaatccgcttgctcccctcacgtcgtccagcccaggagaaccaccgccgtcaccccggagcttcctcggccaccgcgcagagccctccgagagc

SEQ ID NO: 507142 - DNA, 120 bp, Artificial Sequence
  ENSG00000164107_1 (sequence is synthesized)
ccgagccgcggtcttcgagctccaaggctcattcagggccccagatccttgccccgaaaggagaggatctgagaaaatggatgcactgagacctctctgaaaaccctccgagagagcgcg

SEQ ID NO: 507143 - DNA, 120 bp, Artificial Sequence
  ENSG00000164107_2 (sequence is synthesized)
agaggagcgaggacacgttactcgcagctaaaatcacatttaaggaccaaaacaacaacaaccaaaaatttcattaaaacaataagcgcccaagaacccagatcgggctggtggggggag

SEQ ID NO: 507144 - DNA, 120 bp, Artificial Sequence
  ENSG00000164107_3 (sequence is synthesized)
gggaagaggcgggaaggggagggtcgcacggaggtagctttgcagtgagcagtcgaccccgccgccccccggcacagctggaccggctcctccagccgcggctcagactcgcccctggat

SEQ ID NO: 507145 - DNA, 120 bp, Artificial Sequence
  ENSG00000164107_4 (sequence is synthesized)
tccgggttagcttcggtgccaggaccgcggcccgggcttggattcccgagactccgcgtaccagcctcgcgggagccccggcacctttgtatgagcacgagaggattctgcctccgcgca

SEQ ID NO: 507146 - DNA, 120 bp, Artificial Sequence
  ENSG00000164107_5 (sequence is synthesized)
gaggattctgcctccgcgcagcagcccgggaagcaggagccgaagcgcgggccgtggagcaaggcgggaaccggaggcggcggcggcggcggccaggggcgcacggtgccaggaccagct

SEQ ID NO: 507147 - DNA, 120 bp, Artificial Sequence
  ENSG00000164107_6 (sequence is synthesized)
tgggggaggacgccgagcgctgaggcaggggcccgggccgagggcgcggcggggctgcgcgcacgctggggcgcgtggaggggcgcggagggcgaaatgagtctggtaggtggttttccc

SEQ ID NO: 507148 - DNA, 120 bp, Artificial Sequence
  ENSG00000164107_7 (sequence is synthesized)
tccccaccacccggtggtgcaccacgagggctacccgtttgccgccgccgccgccgcagctgccgccgccgccgccagccgctgcagccatgaggagaacccctacttccatggctggct

SEQ ID NO: 507149 - DNA, 120 bp, Artificial Sequence
  ENSG00000164107_8 (sequence is synthesized)
catcggccaccccgagatgtcgccccccgactacagcatggccctgtcctacagccccgagtatgccagcggcgccgccggcctggaccactcccattacgggggggtgccgccgggcgc

SEQ ID NO: 507150 - DNA, 120 bp, Artificial Sequence
  ENSG00000164107_9 (sequence is synthesized)
cgggcccccgggcctgggggggccgcgcccggtgaagcgccgaggcaccgccaaccgcaaggagcggcgcaggactcagagcatcaacagcgccttcgccgaactgcgcgagtgcatccc

SEQ ID NO: 507151 - DNA, 120 bp, Artificial Sequence
  ENSG00000164107_10 (sequence is synthesized)
aactctccaaaatcaagaccctgcgcctggccaccagctacatcgcctacctcatggacctgctggccaaggacgaccagaatggcgaggcggaggccttcaaggcagagatcaagaaga

SEQ ID NO: 507152 - DNA, 120 bp, Artificial Sequence
  ENSG00000164107_11 (sequence is synthesized)
ccgacgtgaaagaggagaagaggaagaaggagctgaacgaaatcttgaaaagcacagtgagcagcaacgacaagaaaaccaaaggccggacgggctggccgcagcacgtctgggccctgg

SEQ ID NO: 507153 - DNA, 120 bp, Artificial Sequence
  ENSG00000164107_12 (sequence is synthesized)
agctcaagcagtgaggaggaggagaaggaggaggaggagagcgcgagtgagcaggggccaaggcgccagatgcagacccaggactccggaaaagccgtccgcgctccgctctgaggactc

SEQ ID NO: 507154 - DNA, 120 bp, Artificial Sequence
  ENSG00000164107_13 (sequence is synthesized)
cttgcatttggaatcatccggtttatttatgtgcaatttccttcccctctctttgaccccctttgaggcatctgctccccgtctccccctccaaaaaaaaagtggatatttgaagaaaag

SEQ ID NO: 507155 - DNA, 120 bp, Artificial Sequence
  ENSG00000164107_14 (sequence is synthesized)
cattccatattttaatacgaagaggacactcccgtgtggtaagggatcccgtcgtctcatagattctgtgtgcgtgaatgttccctcttggctgtgtagacaccagcgttgccccccgcc

SEQ ID NO: 507156 - DNA, 120 bp, Artificial Sequence
  ENSG00000164107_15 (sequence is synthesized)
aacctactcaaccccttccagataaagacagtgggcactagtgcgtttgtgaagtgtatctttaatacttggcctttggatataaatattcctgggtattataaagttttatttcaaagc

SEQ ID NO: 507157 - DNA, 120 bp, Artificial Sequence
  ENSG00000164107_16 (sequence is synthesized)
agaaaacagggccgctaacatttccgttggggtcggtatctagtgctatccattcatctgtggtcgttccctctttgaagatgtttccaacagccacttgttttgtgcacttccgtcctc

SEQ ID NO: 507158 - DNA, 120 bp, Artificial Sequence
  ENSG00000164107_17 (sequence is synthesized)
taaaactaaatggaatttaattaatattgaaggtgtaaacgttgtaagtattcaataaaccactgtgttttttttttacaaaaaccttaatcttttaatggctgatacctcaaaagagtt

SEQ ID NO: 507159 - DNA, 120 bp, Artificial Sequence
  ENSG00000164107_18 (sequence is synthesized)
ttgaaaacaaagctgttatacttgttttcgtaatatttaaaatattcagaagtaaactaaattatcatgattgcctctaactttattttaaagactcagtggttccaaccagtcaccctg

SEQ ID NO: 507160 - DNA, 120 bp, Artificial Sequence
  ENSG00000164107_19 (sequence is synthesized)
acctgcggcctacgcaggaggaggaggtgctcttaaagagaagtgtccttgttacaaatcctgcaaatggtctggggtttgtcggtgtggtgtctccttccctcttcccccagctggaga

SEQ ID NO: 507161 - DNA, 120 bp, Artificial Sequence
  ENSG00000164107_20 (sequence is synthesized)
acgctgagtagtctctagaaggaagatctgggctggagaacccagtccggcagttcgctcagaaggtgtaaaggtgctcttgctttcctgaagtcaatcagaagccatttcttgaggccg

SEQ ID NO: 507162 - DNA, 120 bp, Artificial Sequence
  ENSG00000164107_21 (sequence is synthesized)
tcagtttttgtttggagagtgtttctggtggaggagttgtgaggagaaccccggcattattgctgcaacgggaactagtctggggtgtttaattcaaactatggggctttcatccaagaa

SEQ ID NO: 507163 - DNA, 80 bp, Artificial Sequence
  ENSG00000164107_22 (sequence is synthesized)
ggaaaatccgcttgctcccctcacgtccccgggaagcaggagccgaagcgcgggccgtggagcaaggcgggaaccggagg

SEQ ID NO: 507164 - DNA, 120 bp, Artificial Sequence
  ENSG00000164107_23 (sequence is synthesized)
ccggcctctttccaattgggctgagaaatggcatctcgtgttctttggctgcgtcccgcttcaaggttgtttgcaccaggttgtgtaaggatggcttccggcataagcagagagttgagg

SEQ ID NO: 507165 - DNA, 120 bp, Artificial Sequence
  ENSG00000164107_24 (sequence is synthesized)
ggagggtgtcagcaggaggaggagaaggttagggatgctttgcgctggtgatcttacctccgggttatcgctgctcccctagtacttaggacggaccttgaaaactctgggtcgcgatcg

SEQ ID NO: 507166 - DNA, 120 bp, Artificial Sequence
  ENSG00000164107_25 (sequence is synthesized)
atcgcgatcgcactggtctggatgcctcaccccgtctctgttagacccttcttttggcctccaatccaatcttgctttcagatgtttccagaataagtctcgaagaagcccttgattcca

SEQ ID NO: 507167 - DNA, 120 bp, Artificial Sequence
  ENSG00000164107_26 (sequence is synthesized)
attatttcactattgatcgcaccccctaccccactcccagaaggaggctgccagagactgagccctgagttttgtggttgttctcatactatgcccggaaaacgtaatggtaaacataaa

SEQ ID NO: 507168 - DNA, 120 bp, Artificial Sequence
  ENSG00000164107_27 (sequence is synthesized)
ataagtacttttgacttcaaaatacagctccaatttttccttggctatgacgttaaaatgtaatttcccagatgagtatattccattggcatttctaattttatttgaataagcctgtac

SEQ ID NO: 507169 - DNA, 120 bp, Artificial Sequence
  ENSG00000164107_28 (sequence is synthesized)
gagagacaagctagaggctctgcggacttctgcgggcggctgacaacgcgagggcgaggggagaaagccatcaggtcctagacgtggaagaaaggagcctaccaaagtgttggagtaaac

SEQ ID NO: 507170 - DNA, 120 bp, Artificial Sequence
  ENSG00000164109_0 (sequence is synthesized)
ctgacgacgtgctgcgtcgttacttttgaaacgcttggcggggaagtgctgttggagccgctgtggttgctgtccgcggagtggaagcgcgtgcttttgtttgtgtccctggccatggcg

SEQ ID NO: 507171 - DNA, 120 bp, Artificial Sequence
  ENSG00000164109_1 (sequence is synthesized)
ctgcagctctcccgggagcagggaatcaccctgcgcgggagcgccgaaatcgtggccgagttcttctcattcggcatcaacagcattttatatcagcgtggcatatatccatctgaaacc

SEQ ID NO: 507172 - DNA, 120 bp, Artificial Sequence
  ENSG00000164109_2 (sequence is synthesized)
tttactcgagtgcagaaatacggactcaccttgcttgtaactactgatcttgagctcataaaatacctaaataatgtggtggaacaactgaaagattggttatacaagtgttcagttcag

SEQ ID NO: 507173 - DNA, 120 bp, Artificial Sequence
  ENSG00000164109_3 (sequence is synthesized)
aaactggttgtagttatctcaaatattgaaagtggtgaggtcctggaaagatggcagtttgatattgagtgtgacaagactgcaaaagatgacagtgcacccagagaaaagtctcagaaa

SEQ ID NO: 507174 - DNA, 120 bp, Artificial Sequence
  ENSG00000164109_4 (sequence is synthesized)
gctatccaggatgaaatccgttcagtgatcagacagatcacagctacggtgacatttctgccactgttggaagtttcttgttcatttgatctgctgatttatacagacaaagatttggtt

SEQ ID NO: 507175 - DNA, 120 bp, Artificial Sequence
  ENSG00000164109_5 (sequence is synthesized)
gtacctgaaaaatgggaagagtcgggaccacagtttattaccaattctgaggaagtccgccttcgttcatttactactacaatccacaaagtaaatagcatggtggcctacaaaattcct

SEQ ID NO: 507176 - DNA, 120 bp, Artificial Sequence
  ENSG00000164109_6 (sequence is synthesized)
gtcaatgactgaggatgacatgaggaaaataatgtaattgtaattttgaaatgtggttttcctgaaatcaagtcatctatagttgatatgttttatttcattggttaatttttacatgga

SEQ ID NO: 507177 - DNA, 120 bp, Artificial Sequence
  ENSG00000164109_7 (sequence is synthesized)
gaaaaccaaaatgatacttactgaactgtgtgtaattgttccttttatttttttggtacctatttgacttaccatggagttaacatcatgaatttattgcacattgttcaaaaggaacca

SEQ ID NO: 507178 - DNA, 120 bp, Artificial Sequence
  ENSG00000164109_8 (sequence is synthesized)
ggaggtttttttgtcaacattgtgatgtatattcctttgaagatagtaactgtagatggaaaaacttgtgctataaagctagatgctttcctaaatcagatgttttggtcaagtagtttg

SEQ ID NO: 507179 - DNA, 120 bp, Artificial Sequence
  ENSG00000164109_9 (sequence is synthesized)
actcagtataggtagggagatatttaagtataaaatacaacaaaggaagtctaaatattcagaatctttgttaaggtcctgaaagtaactcataatctataaacaatgaaatattgctgt

SEQ ID NO: 507180 - DNA, 120 bp, Artificial Sequence
  ENSG00000164109_10 (sequence is synthesized)
atagctccttttgaccttcatttcatgtatagttttccctattgaatcagtttccaattatttgactttaatttatgtaacttgaacctatgaagcaatggatatttgtactgtttaatg

SEQ ID NO: 507181 - DNA, 120 bp, Artificial Sequence
  ENSG00000164109_11 (sequence is synthesized)
ttctgtgatacagaactcttaaaaatgttttttcatgtgttttataaaatcaagttttaagtgaaagtgaggaaataaagttaagtttgttttaaatttgtcttaaaacattttgatact

SEQ ID NO: 507182 - DNA, 120 bp, Artificial Sequence
  ENSG00000164109_12 (sequence is synthesized)
ggtttggtgttgatatagttaaatggtaattagaattgattcagcatagctaatgaattcttgttcctacgaagttatagaacttaagggtccaaagttgagtgagtcttgaggtgtctt

SEQ ID NO: 507183 - DNA, 120 bp, Artificial Sequence
  ENSG00000164109_13 (sequence is synthesized)
caatctaatggataaactttgatcacatcctgttcatctcatagcaatagacttaaggctattacttcatcattgtgaaaagataaatgtcctttggaattagtccaacaattccagttg

SEQ ID NO: 507184 - DNA, 120 bp, Artificial Sequence
  ENSG00000164109_14 (sequence is synthesized)
aacaagtgttgattttagtactttactatactcttagccttattgtcagcctacttttccttatatacttaaatactatgcttattcctgtgctttcattaataccctcatctggtacat

SEQ ID NO: 507185 - DNA, 120 bp, Artificial Sequence
  ENSG00000164109_15 (sequence is synthesized)
gctttctatccagttctcacctgtttttccaaggtcagtttaaggcagatttgtaaagtcttctctaatctctaatctaaatctgacctcattttgtaaaaattcagtttattaatgttt

SEQ ID NO: 507186 - DNA, 120 bp, Artificial Sequence
  ENSG00000164109_16 (sequence is synthesized)
attattagacactaagttctttatgtgtattaacttatttaaccttcactatttttaagtaattgcacatagtctgaatctgttcattcagaaattacatattgagcaaatactgtggat

SEQ ID NO: 507187 - DNA, 120 bp, Artificial Sequence
  ENSG00000164109_17 (sequence is synthesized)
cagtggcagtttctgggttctcagtgacaaatttgtagactcttcatatctttatggaataagtggaccactggtgttaccaacctagatgatttcaagaaaagtggcaattaaatgctt

SEQ ID NO: 507188 - DNA, 120 bp, Artificial Sequence
  ENSG00000164109_18 (sequence is synthesized)
catttgtattttaactatttgagaagtcagactaaattctgcgaaatcacttttcccccccaagatggagtcttattctgtcgcccaggctggagtacagtgacgcagctcagctcacta

SEQ ID NO: 507189 - DNA, 73 bp, Artificial Sequence
  ENSG00000164109_19 (sequence is synthesized)
tcgcccaggctggagtacagtgacgcagctcagctcactacagcctctgcctcccggattccagccattcttc

SEQ ID NO: 507190 - DNA, 82 bp, Artificial Sequence
  ENSG00000164109_20 (sequence is synthesized)
tctgcccgccttgacctcacaaagcatcacatttttaaaggttgtgtgtatactctggtcatttcaactcagctaccaatat

SEQ ID NO: 507191 - DNA, 120 bp, Artificial Sequence
  ENSG00000164109_21 (sequence is synthesized)
tatcatttgcatgctactatttactctgaggtttctggagagctagtcatgatgagtcattttaccccttacagattatataatcaattaagaaatacacattttgggctgggcgcagtg

SEQ ID NO: 507192 - DNA, 90 bp, Artificial Sequence
  ENSG00000164109_22 (sequence is synthesized)
ctgaggcaggagaggtgagccaagaccgtgccactgtactctagcctgggcgacagagcaaggctccatctcaaaaaataataaataaaa

SEQ ID NO: 507193 - DNA, 120 bp, Artificial Sequence
  ENSG00000164109_23 (sequence is synthesized)
cgacagagcaaggctccatctcaaaaaataataaataaaaaagaaatacacattttggagctgagtgggagccaaactatgagttttattgaggtgaagctatactggaaaagctttgcc

SEQ ID NO: 507194 - DNA, 120 bp, Artificial Sequence
  ENSG00000164109_24 (sequence is synthesized)
ctgtagctccaagtggactgtcccatcctctttctagaccttgaggcttacctcaggaggatgatgtttaaatcaacagctgaaagacttgtgagtggtttctacaccatgttaaagaga

SEQ ID NO: 507195 - DNA, 120 bp, Artificial Sequence
  ENSG00000164109_25 (sequence is synthesized)
aggttctaagacagcatgataggcctctaggcctggcctggactctggctcagtgttgcttaccatatgtagaggatgaacagaggttaagcccatcaaggtctgaagtagagcccagga

SEQ ID NO: 507196 - DNA, 120 bp, Artificial Sequence
  ENSG00000164109_26 (sequence is synthesized)
ggaactgaactgtatctggctttcaggatccttttcccagtgtcatcaatcagagaagtcaaacctctgtgagaatgcttgtgcagaggtataacagtctcatgtattggttggcttttg

SEQ ID NO: 507197 - DNA, 120 bp, Artificial Sequence
  ENSG00000164109_27 (sequence is synthesized)
ctgcacctttctcattctgttggagggacattggttagtcaggactctgaaggccagctttttcacactgaccaaagcaagtgaaggtcaagcctaactttaatgggaccaggaagtata

SEQ ID NO: 507198 - DNA, 120 bp, Artificial Sequence
  ENSG00000164109_28 (sequence is synthesized)
ctcctcccatggaggtggtgggaatggcaccgagaagtttgatgacagttatctaatggactagaggttggcaaactttctgtaaatggccaggtagtaaatagttctgcttttgaaggc

SEQ ID NO: 507199 - DNA, 120 bp, Artificial Sequence
  ENSG00000164109_29 (sequence is synthesized)
atatggtctcttgcacctactcgaggctgaaagcagctatagacaatacataaatgaatgagcgtgagtgtgttccaataagaaaaaaacatggctgtttgcttcggccccagggttgta

SEQ ID NO: 507200 - DNA, 120 bp, Artificial Sequence
  ENSG00000164109_30 (sequence is synthesized)
gcttaccagtcctgtaacagatcacagtttgctcttttggtcacaaatacttgaacccctccctagttcagagcatttgataccgtaatatttaaagctcacttgtaaaacatcgtttgt

SEQ ID NO: 507201 - DNA, 120 bp, Artificial Sequence
  ENSG00000164109_31 (sequence is synthesized)
tgcctccatccatagtatctcaaacagaatgtctctcccaaatatacctaaattccatattctctgaagcacaaccagctattttcttgacatacttcctaacacaccccacagttcaca

SEQ ID NO: 507202 - DNA, 120 bp, Artificial Sequence
  ENSG00000164109_32 (sequence is synthesized)
atttgatctgaaaacttgttaagggaggttctttggcatgtgatgccataaaaagagaggtatgggctctcctttaaaaaagagaccctttttatgagactcacaataggataaagagcc

SEQ ID NO: 507203 - DNA, 120 bp, Artificial Sequence
  ENSG00000164109_33 (sequence is synthesized)
catgcctatttttaatcattttttcactatatagacatgcatgctgaaaaatgtttttattagtataatgctaattatactgacttcctatatattttagcatatagattcaaagattat

SEQ ID NO: 507204 - DNA, 120 bp, Artificial Sequence
  ENSG00000164109_34 (sequence is synthesized)
tagcacaataaggtagataacttcatagaccatttcttcatcttgttttcatttagtatgtaaaatttatctaaaatttacatgaaagatcagaatagctatgtaatgctactttgtaac

SEQ ID NO: 507205 - DNA, 120 bp, Artificial Sequence
  ENSG00000164109_35 (sequence is synthesized)
tcttatattttccaccagatgtcactaatgctgtaatattcaaattaagatgactttcttttggttctaaaggctgtaagcttattggaaaagcaaggttactcagcattggaattcctg

SEQ ID NO: 507206 - DNA, 120 bp, Artificial Sequence
  ENSG00000164109_36 (sequence is synthesized)
gcaacaaatatataaatacattaggggaataaacacttagcatttattatttactagtcacttcacatgaatttttatttaattctcatgcttttgtgcacaagtaaaactgggggtcaa

SEQ ID NO: 507207 - DNA, 120 bp, Artificial Sequence
  ENSG00000164109_37 (sequence is synthesized)
tgggcatgcaaattgtgtcgtggtttttgaagtttagtggtctctcctatccctggccaaggaagtatgcaaattgtattgtggtttttgaagtttaggtgatctcttccttctatccct

SEQ ID NO: 507208 - DNA, 120 bp, Artificial Sequence
  ENSG00000164109_38 (sequence is synthesized)
agccaaggaagttcatcctgactccccaacaagcatatcaaaaggagtgtttcgtcacctttttcctcttaccctttacatccttttagcaataaagtgttcagaacaaactggttttcc

SEQ ID NO: 507209 - DNA, 120 bp, Artificial Sequence
  ENSG00000164109_39 (sequence is synthesized)
tttactgtgctttgcaaaacttattcatgttttattgggtgactttgtatttacactttcctcagatagtctgttgtcagatgactttgaccaatgattgggaggaaccaaatacagagg

SEQ ID NO: 507210 - DNA, 120 bp, Artificial Sequence
  ENSG00000164109_40 (sequence is synthesized)
attttatcctatgcctaatctatattgtctacagagtaaatcaggtatgaatttgtgaacagtaatgaaacaattttccaactaatcagaagaattgtttgttaagtaaccttaattact

SEQ ID NO: 507211 - DNA, 120 bp, Artificial Sequence
  ENSG00000164109_41 (sequence is synthesized)
cagtttttggtgaattgtttgcggcttaacttgtaaataatttcttattctttttttaaatgtatgaaatatttctagttattttgttcaatgtgactgataaaagtttatattggaata

SEQ ID NO: 507212 - DNA, 120 bp, Artificial Sequence
  ENSG00000164109_42 (sequence is synthesized)
gtggtggaacaactgaaaggtattttaatcattggaaacaatttgagtcttgcagattttctagcatcttaagcagtcatttttccgctctgcacatagaagtgtactgacatctcaaat

SEQ ID NO: 507213 - DNA, 120 bp, Artificial Sequence
  ENSG00000164109_43 (sequence is synthesized)
atattttcaattgagaggaagaaaataatatataaaatggaagaaatacactcttcccccacccactacattgtgagtgggctgaatattttgatgttagaaatctgatatggctaaaaa

SEQ ID NO: 507214 - DNA, 120 bp, Artificial Sequence
  ENSG00000164111_0 (sequence is synthesized)
agtctaggtgcagctgccggatccttcagcgtctgcatctcggcgtcgccccgcgtaccgtcgcccggctctccgccgctctcccggggtttcggggcacttgggtcccacagtctggtc

SEQ ID NO: 507215 - DNA, 120 bp, Artificial Sequence
  ENSG00000164111_1 (sequence is synthesized)
ctgcttcaccttcccctgacctgagtagtcgccatggcacaggttctcagaggcactgtgactgacttccctggatttgatgagcgggctgatgcagaaactcttcggaaggctatgaaa

SEQ ID NO: 507216 - DNA, 120 bp, Artificial Sequence
  ENSG00000164111_2 (sequence is synthesized)
ggcttgggcacagatgaggagagcatcctgactctgttgacatcccgaagtaatgctcagcgccaggaaatctctgcagcttttaagactctgtttggcagggatcttctggatgacctg

SEQ ID NO: 507217 - DNA, 120 bp, Artificial Sequence
  ENSG00000164111_3 (sequence is synthesized)
aaatcagaactaactggaaaatttgaaaaattaattgtggctctgatgaaaccctctcggctttatgatgcttatgaactgaaacatgccttgaagggagctggaacaaatgaaaaagta

SEQ ID NO: 507218 - DNA, 120 bp, Artificial Sequence
  ENSG00000164111_4 (sequence is synthesized)
ctgacagaaattattgcttcaaggacacctgaagaactgagagccatcaaacaagtttatgaagaagaatatggctcaagcctggaagatgacgtggtgggggacacttcagggtactac

SEQ ID NO: 507219 - DNA, 120 bp, Artificial Sequence
  ENSG00000164111_5 (sequence is synthesized)
cagcggatgttggtggttctccttcaggctaacagagaccctgatgctggaattgatgaagctcaagttgaacaagatgctcaggctttatttcaggctggagaacttaaatgggggaca

SEQ ID NO: 507220 - DNA, 120 bp, Artificial Sequence
  ENSG00000164111_6 (sequence is synthesized)
atatcaggatttcaaattgaggaaaccattgaccgcgagacttctggcaatttagagcaactactccttgctgttgtgaaatctattcgaagtatacctgcctaccttgcagagaccctc

SEQ ID NO: 507221 - DNA, 120 bp, Artificial Sequence
  ENSG00000164111_7 (sequence is synthesized)
tattatgctatgaagggagctgggacagatgatcataccctcatcagagtcatggtttccaggagtgagattgatctgtttaacatcaggaaggagtttaggaagaattttgccacctct

SEQ ID NO: 507222 - DNA, 120 bp, Artificial Sequence
  ENSG00000164111_8 (sequence is synthesized)
ctttattccatgattaagggagatacatctggggactataagaaagctcttctgctgctctgtggagaagatgactaacgtgtcacggggaagagctccctgctgtgtgcctgcaccacc

SEQ ID NO: 507223 - DNA, 120 bp, Artificial Sequence
  ENSG00000164111_9 (sequence is synthesized)
ccactgccttccttcagcacctttagctgcatttgtatgccagtgcttaacacattgccttattcatactagcatgctcatgaccaacacatacacgtcatagaagaaaatagtggtgct

SEQ ID NO: 507224 - DNA, 120 bp, Artificial Sequence
  ENSG00000164111_10 (sequence is synthesized)
tctttctgatctctagtggagatctctttgactgctgtagtactaaagtgtacttaatgttactaagtttaatgcctggccattttccatttatatatattttttaagaggctagagtgc

SEQ ID NO: 507225 - DNA, 120 bp, Artificial Sequence
  ENSG00000164111_11 (sequence is synthesized)
ttttagccttttttaaaaactccatttatattacatttgtaaccatgatactttaatcagaagcttagccttgaaattgtgaactcttggaaatgttattagtgaagttcgcaactaaac

SEQ ID NO: 507226 - DNA, 120 bp, Artificial Sequence
  ENSG00000164111_12 (sequence is synthesized)
taaacctgtaaaattatgatgattgtattcaaaagattaatgaaaaataaacatttctgtccccctgaattatgtgtacatgtgtgtttagatttattattaaatttatttaacaatgtt

SEQ ID NO: 507227 - DNA, 120 bp, Artificial Sequence
  ENSG00000164111_13 (sequence is synthesized)
aggtgcagctgccggatccttcagcgtctgcatctcggcgtcgccccgcgtaccgtcgcccggctctccgccgctctcccggggtttcggggcacttgggtcccacagtctgggtgagtg

SEQ ID NO: 507228 - DNA, 120 bp, Artificial Sequence
  ENSG00000164111_14 (sequence is synthesized)
gtcgcagcccggggagggggctccttctggagaggagagcgtggtcgcggggcactggattcgcgcggacgctcggccgagagctgtcccggtagctgcgagagggcgggtcggccccgt

SEQ ID NO: 507229 - DNA, 120 bp, Artificial Sequence
  ENSG00000164111_15 (sequence is synthesized)
agaaggtaaatgtttgtgagttatattttgacttcacctccactatcacttccttcatttctgtgatttgaatgcagtcctttgtaggtatgggaggcacgcagtaaatgatggatgaat

SEQ ID NO: 507230 - DNA, 120 bp, Artificial Sequence
  ENSG00000164111_16 (sequence is synthesized)
ataatttgtggtacttgctgattcttactgcgatgattctgactgtatgttgcctgtgcttgtttgtgtttcagaatatctggtctaaattcttaacagctaactcatacatgttttaga

SEQ ID NO: 507231 - DNA, 120 bp, Artificial Sequence
  ENSG00000164111_17 (sequence is synthesized)
tagtagtatcttgttcctttcatagaatgatagcggtatcttgttctttcatagaatttaaaatcagtagggtcattattggttttggacagtgctgggtgatgataacgtgaaatagtg

SEQ ID NO: 507232 - DNA, 120 bp, Artificial Sequence
  ENSG00000164111_18 (sequence is synthesized)
caggattgatcttaataaaagcatattattcctagagaaagagtgttattgaataaccatcaggtggaaccatttttccttttgaatgagaatgctctatagttcagtaatgtgacatat

SEQ ID NO: 507233 - DNA, 120 bp, Artificial Sequence
  ENSG00000164111_19 (sequence is synthesized)
atgttgcatgaaagacaaggataagagaacctgattcttgtgttaagtttaaaattttagtgacacgattagagcaatgagttaaaaagcttagcataatgtttcctgaagtagagatga

SEQ ID NO: 507234 - DNA, 120 bp, Artificial Sequence
  ENSG00000164111_20 (sequence is synthesized)
tggctcccaagtgaaagcatgggtattgatgtggctgaggctcttggtgaactcagaagcattatttagtagtggtaacagatgactcaacaaaccaaaccccttgcctatgataataat

SEQ ID NO: 507235 - DNA, 120 bp, Artificial Sequence
  ENSG00000164111_21 (sequence is synthesized)
ctactattttcatattttataagaagctactgctgaagatggagtttacttttgcataggatttgcaattagtgtagggatatacaggttgtctttatgttaacattaaggtaaaaatgg

SEQ ID NO: 507236 - DNA, 120 bp, Artificial Sequence
  ENSG00000164112_0 (sequence is synthesized)
gggtgtgcgggcggcgcgctcgccctccagctgcagcccgcgccgagcgcgcagggccagcgagcgccggcgcctccagcatggagtgggaactcaacttgctgctctacctggcgctct

SEQ ID NO: 507237 - DNA, 120 bp, Artificial Sequence
  ENSG00000164112_1 (sequence is synthesized)
tcttcttcctgctcttcttacttttcctcctgctcttcgtggtcatcaagcagctgaagaactccgtggccaacacggccggggcgctccagcccgggcgcctctcggtgcaccgcgagc

SEQ ID NO: 507238 - DNA, 120 bp, Artificial Sequence
  ENSG00000164112_2 (sequence is synthesized)
cttggggcttctcccgagagcaagcggtgtgacccgagtgcgggcactggcgggagggcaccgagctgcgcgggcgctgggctgggtctccgcctcgattctccgtcctcgcggcctccc

SEQ ID NO: 507239 - DNA, 120 bp, Artificial Sequence
  ENSG00000164112_3 (sequence is synthesized)
agcttccagagccgagctgctgcccttgactggtgctcaggggaccacagctgcaatgacagtttgggcctgcaaaaagaaggctggaacaacgggagatggaagctttctgcaaatgca

SEQ ID NO: 507240 - DNA, 120 bp, Artificial Sequence
  ENSG00000164112_4 (sequence is synthesized)
gcaccactggtatccatgaatttaacctgcccatcattcttcctaaacaagagactattgaaaagtcagggtgttcaaaatggcttcagatcttatcaggacaatcttggctgttgcact

SEQ ID NO: 507241 - DNA, 120 bp, Artificial Sequence
  ENSG00000164112_5 (sequence is synthesized)
aatttccaaacttggcacagctgtagatgcagaactgatgccatctggtgcgattctacagaataagagagaaaatttacccagagtgtgccatgcactggcttttctgggaatggcaag

SEQ ID NO: 507242 - DNA, 120 bp, Artificial Sequence
  ENSG00000164112_6 (sequence is synthesized)
gtgccaggatttgtttttggttcgcttgcaggggtggaaacttggaactaggttccaagatggtccccgcagcaccccacaagaagaaggaggaagcccacagagaaaacggggcatgcc

SEQ ID NO: 507243 - DNA, 120 bp, Artificial Sequence
  ENSG00000164112_7 (sequence is synthesized)
agttcaaatccacttccttttaaagagcttcctcagcagcccaataacttttgccttcatctcattggccagaactgtgtcattggctactgctatctgcaagattgtctgagaaatgta

SEQ ID NO: 507244 - DNA, 120 bp, Artificial Sequence
  ENSG00000164112_8 (sequence is synthesized)
gtttttgtagctggatatataactgcctttgacaaaaatccagtttctcttgatgaagaagaagatgatggtggatcttgggaggacaactaacattttatgccctggctacagaataca

SEQ ID NO: 507245 - DNA, 120 bp, Artificial Sequence
  ENSG00000164112_9 (sequence is synthesized)
tctagttccttcacaactgtcaaagctccaagcagcactgctcccctctgacagagtgagcagagtgaaggcatgtcaggtgttctcacaaaactcttgacagggctgacctctctcagt

SEQ ID NO: 507246 - DNA, 120 bp, Artificial Sequence
  ENSG00000164112_10 (sequence is synthesized)
caatatccttgtcccacatcaggattttctagagggccctgggtacctgtgcacttccttggtggccgtaacctctttgtggagggttggtgtaggataaagaatgttctattacgctgc

SEQ ID NO: 507247 - DNA, 120 bp, Artificial Sequence
  ENSG00000164112_11 (sequence is synthesized)
tccctcatctgtatcatttctctcctctctaattttcctgtcagttatattttggtggagtctgggtttgtgtatttgattcctatagaaagaccatcgctttcatgcatggaggagggg

SEQ ID NO: 507248 - DNA, 120 bp, Artificial Sequence
  ENSG00000164112_12 (sequence is synthesized)
aatctacgcaaagaaaggctaccttactcctttctgtgactccaccaccagtctaggaatatcctgggagaagaattgcctctcaaagctgcttctataagcagcctacatcctagctaa

SEQ ID NO: 507249 - DNA, 120 bp, Artificial Sequence
  ENSG00000164112_13 (sequence is synthesized)
gcaaagaagaaacacttcccacatctagggctgtctaaaagaactttctgtgatgacagaaatgttctatatctgcagtgtccaatatggtaaccatataggcacatgtggctagtgaac

SEQ ID NO: 507250 - DNA, 120 bp, Artificial Sequence
  ENSG00000164112_14 (sequence is synthesized)
acttgaaatgtggctagtgtgactgaggaaggaaaatttaaattttgtttaattgtaattaatttaaattcagatagccaaatggggctactagctattgtgttagatagcacggtatac

SEQ ID NO: 507251 - DNA, 120 bp, Artificial Sequence
  ENSG00000164112_15 (sequence is synthesized)
tttattctctttcttgtgttgtagaaccagctgggagaggtgtgggtcagtcatgggcttggtatcccctggtcttcactattctagcttgccattgaatttgtctcccagaggaaaaga

SEQ ID NO: 507252 - DNA, 120 bp, Artificial Sequence
  ENSG00000164112_16 (sequence is synthesized)
aagaatggtatttggaattaaattcaagatgttaacttgacatctatatattgcacatattcctgtatagtgaatggatgacctcctgggaatagttcctgtgactgattttagtgataa

SEQ ID NO: 507253 - DNA, 120 bp, Artificial Sequence
  ENSG00000164112_17 (sequence is synthesized)
ttgatcatgaagaaatggcagtactgctccacttcaccttcctagtgactattatgtgttcctagtcagagtgactcagcagagattattttgttctcttgtgcaatttattctgtgtca

SEQ ID NO: 507254 - DNA, 120 bp, Artificial Sequence
  ENSG00000164112_18 (sequence is synthesized)
ttttatttttgtaatattgtggcagctaaatgattattctgtgtatgtttttcaaaatattaggtggcttatattttttaaaaggctatgaaataaaaataaactatacgtaacacagtt

SEQ ID NO: 507255 - DNA, 120 bp, Artificial Sequence
  ENSG00000164112_19 (sequence is synthesized)
gctgttacctcttctggcgtccgtgcccgcggaagttcgctcctagggaagtcgctcgcgtcctcaagagcacctgagaggatctcggcgaagcggaaggctttggtgccagctgggaga

SEQ ID NO: 507256 - DNA, 120 bp, Artificial Sequence
  ENSG00000164112_20 (sequence is synthesized)
gtctgcgccggatttcctcagctccttggcgcgtttcctcggagccgggggaggcaaagcacggaccccggagtcggcgcccatagcgggacgccctcgcgaggggcgggagtgcgggag

SEQ ID NO: 507257 - DNA, 120 bp, Artificial Sequence
  ENSG00000164112_21 (sequence is synthesized)
attcagtcgtccatttggagggaggaatcccttcctcccggtgatccttactcatattctagccaccaaccacggttagtgcttgcggattgccgtgcagggtaggtttcgaatctggga

SEQ ID NO: 507258 - DNA, 120 bp, Artificial Sequence
  ENSG00000164112_22 (sequence is synthesized)
tattgaaaagtcagggtgagtagtttattaccatctcagtattaatccaatctctcagctggttctactgactcaggttcctaagaaagcaggggtgcctttctatcttgtatccagggc

SEQ ID NO: 507259 - DNA, 120 bp, Artificial Sequence
  ENSG00000164113_0 (sequence is synthesized)
gtaaacaggaaggccacagtggaggccaagccttccccatgggcaccttctcagattgcgattgtggatgaaatgagggattttcttgaaacaaccctcacgcaggtgacgcaagacgcg

SEQ ID NO: 507260 - DNA, 120 bp, Artificial Sequence
  ENSG00000164113_1 (sequence is synthesized)
gagctcggctgcacgacgctggcgcaagcgcgggggcaagagcgccggcctccgagacggtgagaaaatggctagcaacaatcattggtttcagagttcgcaggtccccagctttgccca

SEQ ID NO: 507261 - DNA, 120 bp, Artificial Sequence
  ENSG00000164113_2 (sequence is synthesized)
gatgctgaaaaagaacctgccagttcaaccagcgacaaagacgataactacacccacaggatggtcctcagaaagttacggcctgtccaagatggcatccaaggttacgcaagtaacggg

SEQ ID NO: 507262 - DNA, 120 bp, Artificial Sequence
  ENSG00000164113_3 (sequence is synthesized)
taattttccagagccgttgctttccaagaatctttcatctatttcaaatcctgtccttcctccaaaaaaaatacctaaggaatttataatgaaatacaaacgtggagagataaatcctgt

SEQ ID NO: 507263 - DNA, 120 bp, Artificial Sequence
  ENSG00000164113_4 (sequence is synthesized)
gtcagccttgcaccagtttgcacaaatgcagcgagttcagcttgaccttaaggaaactgtgacaacaggtaatgttatgggaccatattttgccttttgtgctgtggtggatggtattca

SEQ ID NO: 507264 - DNA, 120 bp, Artificial Sequence
  ENSG00000164113_5 (sequence is synthesized)
gtacaagactggactgggacaaaataaaaaggagtctagatccaatgcagcaaaattagctcttgatgagcttctacaactggatgaacctgaaccacgaattttagaaacatcaggtcc

SEQ ID NO: 507265 - DNA, 120 bp, Artificial Sequence
  ENSG00000164113_6 (sequence is synthesized)
tcctcctttccctgcagaacctgttgttttatctgaactagcatatgtttcaaaagtacattatgaagggagacatattcaatatgcaaagatttcacagatcgttaaagaaagatttaa

SEQ ID NO: 507266 - DNA, 120 bp, Artificial Sequence
  ENSG00000164113_7 (sequence is synthesized)
tcaactaatttctaatcgttcagaatacctgaaatatagcagttcattggctgcttttataattgaaagagctggacaacatgaggttgtagctataggcacaggtgaatacaattacag

SEQ ID NO: 507267 - DNA, 120 bp, Artificial Sequence
  ENSG00000164113_8 (sequence is synthesized)
gctgttgttacagcaagaaggtctcttcttaggtacttttatagacaacttctgctcttctacagcaaaaatcctgctatgatggaaaaatcaatattttgtacagaaccaacttctaat

SEQ ID NO: 507268 - DNA, 120 bp, Artificial Sequence
  ENSG00000164113_9 (sequence is synthesized)
ctactcactcttaaacagaatatcaacatttgcctttacatgaaccagttgcctaaaggatcagcccagattaagtcacagttacgtcttaatccacattctatatctgcatttgaagcc

SEQ ID NO: 507269 - DNA, 120 bp, Artificial Sequence
  ENSG00000164113_10 (sequence is synthesized)
aatgaagaactctgtctccacgtggctgttgaaggcaaaatttatctgactgtttactgtcctaaagatggtgttaatagaataagcagtatgtcctcaagtgacaaattgaccagatgg

SEQ ID NO: 507270 - DNA, 120 bp, Artificial Sequence
  ENSG00000164113_11 (sequence is synthesized)
gaagtgcttggtgtacagggagcattgctgagtcattttatacagccagtttacatcagcagtatacttattggtgatgggaattgcagtgataccagaggcttagaaatcgctataaag

SEQ ID NO: 507271 - DNA, 120 bp, Artificial Sequence
  ENSG00000164113_12 (sequence is synthesized)
caacgtgttgatgatgcactcacttcaaaacttccaatgttttacttagtcaacagacctcatattagtttagtaccctctgcatatccccttcaaatgaacttggaatataaatttctg

SEQ ID NO: 507272 - DNA, 120 bp, Artificial Sequence
  ENSG00000164113_13 (sequence is synthesized)
agtctgaattgggcacaaggagatgtttctttggagattgtggatggcctgagtgggaagatcactgaaagttccccatttaaaagtggtatgtcaatggcaagtcggctttgtaaggct

SEQ ID NO: 507273 - DNA, 120 bp, Artificial Sequence
  ENSG00000164113_14 (sequence is synthesized)
gcaatgttaagtcggtttaacctgcttgccaaagaagctaaaaaagaattacttgaagctggtacatatcatgcagctaagtgtatgtctgcctcctatcaagaagctaaatgtaagttg

SEQ ID NO: 507274 - DNA, 120 bp, Artificial Sequence
  ENSG00000164113_15 (sequence is synthesized)
aaatcctacttacaacaacatggctatggatcctggattgtgaaatctccctgcatagagcaatttaacatgtgaaataggcaatccattatcacattaaaaatcttgttttgtttggtg

SEQ ID NO: 507275 - DNA, 120 bp, Artificial Sequence
  ENSG00000164113_16 (sequence is synthesized)
ggtttaaaggtttcgtggttgtatagacatttacccgtggccgtgtacctggagctggcatctgactcaacatttggaggaggcctgtagagctctttacctgtgccgctcgtttaacca

SEQ ID NO: 507276 - DNA, 120 bp, Artificial Sequence
  ENSG00000164113_17 (sequence is synthesized)
agtggaggccaagccttccccatgggcaccttctcagattgcgattgtggatgaaatgagggattttcttgaaacaaccctcacgcaggtaccccttgggcagccttcaaccgctctggg

SEQ ID NO: 507277 - DNA, 120 bp, Artificial Sequence
  ENSG00000164113_18 (sequence is synthesized)
gaaggaggccccaggcatagacaactgcagtataaataatcatccctacagtgctctgtcagggctgtaggggggcacgggacagtaagggaggaggctgaactgcgcgattttacctgg

SEQ ID NO: 507278 - DNA, 120 bp, Artificial Sequence
  ENSG00000164113_19 (sequence is synthesized)
gagacggttagtgattggacgaagcagggcgcgggggcgcaagcccgggtcctgcaggggcgacgcgaggcctcttttgaaagatgcggccctgaccctgtgaacctcgcgcagagcggc

SEQ ID NO: 507279 - DNA, 120 bp, Artificial Sequence
  ENSG00000164113_20 (sequence is synthesized)
ctgaagcgagaggttgaggctgggaggtgggagcaacggcggcggcggccgcctgcgagcccccggcctgaggcgcagcagcagctgcccgtcttcccacatagagggcaggaaggacaa

SEQ ID NO: 507280 - DNA, 120 bp, Artificial Sequence
  ENSG00000164113_21 (sequence is synthesized)
gttcgctcactggccaagcttcaggacgtgtgaggtagtttttctgtaaacaggaaggccacagtggaggccaagccttccccatgggcaccttctcagattgcgattgtggatgaaatg

SEQ ID NO: 507281 - DNA, 120 bp, Artificial Sequence
  ENSG00000164114_0 (sequence is synthesized)
cttcgtctgggtggttgccccagcgacacgttgggccgaagagcggtgttgggtacccgagagacccggcggtggggaagtcacttcctcccgaagacgctgtttcctagcaaccgccct

SEQ ID NO: 507282 - DNA, 120 bp, Artificial Sequence
  ENSG00000164114_1 (sequence is synthesized)
ccgcctctgttattagcccctcctcctcgctcggtccaggaccggctctgcgggcgccgccaggcccagaccaagctactatcagaagttgaattctaataattagctattttataaagg

SEQ ID NO: 507283 - DNA, 120 bp, Artificial Sequence
  ENSG00000164114_2 (sequence is synthesized)
taacgagaaaaaatacactatgtctgatgaagtttttagcaccactttggcatatacaaagagtccaaaagttaccaaaagaactactttccaggatgagctaataagagcaattacagc

SEQ ID NO: 507284 - DNA, 120 bp, Artificial Sequence
  ENSG00000164114_3 (sequence is synthesized)
tcgctcagccagacaaaggagttctgaatactcagatgactttgacagtgatgagattgtttctttaggtgatttttctgacacttcagcagatgaaaattcagttaataaaaaaatgaa

SEQ ID NO: 507285 - DNA, 120 bp, Artificial Sequence
  ENSG00000164114_4 (sequence is synthesized)
tgactttcatatatcagatgatgaagaaaagaatccttcaaaactattgtttttgaaaaccaataaatcaaacggtaacataaccaaagatgagccagtgtgtgccatcaaaaatgaaga

SEQ ID NO: 507286 - DNA, 120 bp, Artificial Sequence
  ENSG00000164114_5 (sequence is synthesized)
ggaaatggcacctgatgggtgtgaagacattgttgtaaaatctttctctgaatctcaaaataaggatgaggaatttgaaaaagacaaaataaaaatgaaacctaaacccagaattctttc

SEQ ID NO: 507287 - DNA, 120 bp, Artificial Sequence
  ENSG00000164114_6 (sequence is synthesized)
aattaaaagcacatcttcagcagaaaacaacagccttgacacagatgatcactttaaaccatcacctcggccaaggagtatgttgaaaaagaaaagtcacatggaggagaaggatggact

SEQ ID NO: 507288 - DNA, 120 bp, Artificial Sequence
  ENSG00000164114_7 (sequence is synthesized)
agaagataaagaaactgccctcagtgaagaattggagttacattctgcaccttcttcccttccaacgccgaatggcatacaattagaagctgagaaaaaagcattctctgaaaaccttga

SEQ ID NO: 507289 - DNA, 120 bp, Artificial Sequence
  ENSG00000164114_8 (sequence is synthesized)
tcctgaggattcatgcttaacaagtctagcatcatcatcacttaaacaaattcttggagattctttttcaccaggatctgagggaaacgcatctggaaaagatccaaatgaagaaatcac

SEQ ID NO: 507290 - DNA, 120 bp, Artificial Sequence
  ENSG00000164114_9 (sequence is synthesized)
tgaaaaccataattccttgaaatcagatgaaaataaagagaattcattttcagcagaccatgtgactactgcagttgagaaatccaaggaaagtcaagtgactgctgatgaccttgaaga

SEQ ID NO: 507291 - DNA, 120 bp, Artificial Sequence
  ENSG00000164114_10 (sequence is synthesized)
agaaaaggcaaaagcggaactgattatggatgatgacagaacagttgatccactactatctaaatctcagagtatcttaatatctaccagtgcaacagcatcttcaaagaaaacaattga

SEQ ID NO: 507292 - DNA, 120 bp, Artificial Sequence
  ENSG00000164114_11 (sequence is synthesized)
agatagaaatataaagaataaaaagtcaacaaataatagagcatccagtgcatctgccagattaatgacctctgagtttttgaagaaatctagttctaaaaggagaactccatcgacaac

SEQ ID NO: 507293 - DNA, 120 bp, Artificial Sequence
  ENSG00000164114_12 (sequence is synthesized)
tacctcttctcactatttagggactttaaaagtcttggaccaaaaaccttcacagaaacagagcatagaacctgatagagcagataacataagggcagctgtttatcaggagtggttaga

SEQ ID NO: 507294 - DNA, 120 bp, Artificial Sequence
  ENSG00000164114_13 (sequence is synthesized)
aaagaaaaatgtgtatttacatgaaatgcacagaataaaaagaattgaaagtgaaaacttaaggatccaaaatgaacagaaaaaagctgctaaaagagaagaagcattagcatcatttga

SEQ ID NO: 507295 - DNA, 120 bp, Artificial Sequence
  ENSG00000164114_14 (sequence is synthesized)
ggcctggaaggctatgaaagaaaaggaagcaaagaaaatagctgccaaaaagaggcttgaagaaaaaaacaagaagaaaactgaagaagaaaatgctgcaagaaaaggagaagcactaca

SEQ ID NO: 507296 - DNA, 120 bp, Artificial Sequence
  ENSG00000164114_15 (sequence is synthesized)
agcttttgaaaaatggaaagagaaaaagatggaatatcttaaagagaaaaatagaaaggagagagaatatgaaagagcaaagaaacagaaagaggaggaaactgttgccgagaaaaagaa

SEQ ID NO: 507297 - DNA, 120 bp, Artificial Sequence
  ENSG00000164114_16 (sequence is synthesized)
agataatttaactgctgttgagaaatggaatgaaaaaaaggaagcttttttcaagcaaaaggaaaaagaaaaaataaatgagaaaagaaaggaagaactgaaaagagctgagaaaaaaga

SEQ ID NO: 507298 - DNA, 120 bp, Artificial Sequence
  ENSG00000164114_17 (sequence is synthesized)
taaagataaacaagctattaatgaatatgaaaaatggctggaaaataaggaaaaacaagaaagaattgaacgaaaacagaagaaacgtcattcctttcttgaaagtgaggcacttcctcc

SEQ ID NO: 507299 - DNA, 120 bp, Artificial Sequence
  ENSG00000164114_18 (sequence is synthesized)
gtggagccctccaagcagaactgtgttcgcaaaagtgttttgataattctagttcttacattatttggttatttatcggtttgccaatattagccatagatttaaaaccattcaattatt

SEQ ID NO: 507300 - DNA, 120 bp, Artificial Sequence
  ENSG00000164114_19 (sequence is synthesized)
tatagttagaggaatatattttaattaaatgccagacactcctgctgacaatgaaagaaatactttggaatgtaatcagtgaaagcatttttttgaactgtagataaactgcctcaaaca

SEQ ID NO: 507301 - DNA, 120 bp, Artificial Sequence
  ENSG00000164114_20 (sequence is synthesized)
aagacctaataatcagattgtttttaccattaagatacataagattttatcatgtcctgataattcttatggtggagtgattcatgatctttttcattaagctctgtatgttatttaagt

SEQ ID NO: 507302 - DNA, 120 bp, Artificial Sequence
  ENSG00000164114_21 (sequence is synthesized)
atatttaattccagtaataaaaaggaaatcatctaggtaccataatgatagaaattattccttttgtggatgattgtgaatctagattcaggtttttaaatgaagggtcgctgggaagtg

SEQ ID NO: 507303 - DNA, 120 bp, Artificial Sequence
  ENSG00000164114_22 (sequence is synthesized)
cgcatatattattccttctgaaactgatgtttagctcaaagcagttgcatttgtactgtgctagttagaattttcatcagttgaggcagtagctcagtagaactctaatcatcaaggctt

SEQ ID NO: 507304 - DNA, 120 bp, Artificial Sequence
  ENSG00000164114_23 (sequence is synthesized)
tttatttaagaattttgccttatgttttaatatgagtgtactttatctgttccaggcttatgtgataatcataggtactttataatgagtccacctctgaaatttttctttctgaattct

SEQ ID NO: 507305 - DNA, 120 bp, Artificial Sequence
  ENSG00000164114_24 (sequence is synthesized)
atctcactttattatttcagtgataccaaaagacatcaatgtcacagtagtgatatacttatgtattagttatggaaattccacaggagttcaaggtcattatcactataattattttcc

SEQ ID NO: 507306 - DNA, 120 bp, Artificial Sequence
  ENSG00000164114_25 (sequence is synthesized)
tgactaaagccataaaggtgatttaggcaattattgtcatcttagctagtcctgttttatagcttatattcagcagacagctgtatgggaaggtaaatatgttgacaatgtccacaaagc

SEQ ID NO: 507307 - DNA, 120 bp, Artificial Sequence
  ENSG00000164114_26 (sequence is synthesized)
ctttatttatttatttatttgatctctgcatgtcctcgtagtaactggtctcatacttgacctggtcatctggtttaagacagaccaagtgtatgctcacggagctgaaatgcattagtc

SEQ ID NO: 507308 - DNA, 120 bp, Artificial Sequence
  ENSG00000164114_27 (sequence is synthesized)
agttgtgcaatgaggagatgatggatgagaatatatagttcctatttattgagcatctaatatataatctctactggacctttacaaatgtatttaacatctttacaacaacttttcagg

SEQ ID NO: 507309 - DNA, 120 bp, Artificial Sequence
  ENSG00000164114_28 (sequence is synthesized)
gtaggtgttaccggcttcatcttacatataaaaatactggcgctcagataaaccaagtaacttaccgtccatctggagtgtgcctgagttgagatcaaacgggattcagtacgtctgact

SEQ ID NO: 507310 - DNA, 120 bp, Artificial Sequence
  ENSG00000164114_29 (sequence is synthesized)
gaatctgcctccttctgaaatctctatgctctttttcacacttctctgtagcctcagagactgccaagttctgtcaagacctctgcataatatcaacgttacaaacacgttttaactttt

SEQ ID NO: 507311 - DNA, 120 bp, Artificial Sequence
  ENSG00000164114_30 (sequence is synthesized)
aaatcatgtattgttatccaaagatgatctttctctacagaaatagctgcttgttcttagagatggtggaggtcattaaatctataaagtgagataaaaatccataagatttcatgagtt

SEQ ID NO: 507312 - DNA, 120 bp, Artificial Sequence
  ENSG00000164114_31 (sequence is synthesized)
actcaggcatcttataactactatcagaatatcagaaaactcagcaagttatgtgacaaaggctttgagatgatcactccagacgttccacatactgagcatcagccttcttgctgcagt

SEQ ID NO: 507313 - DNA, 120 bp, Artificial Sequence
  ENSG00000164114_32 (sequence is synthesized)
gcatgtgcaagataagatgtcataggcagctttgtaagattgtatcagtgctatagacaattaagagaaatttcatagataaaactagaaccctttctatatggccagaactgtaatact

SEQ ID NO: 507314 - DNA, 120 bp, Artificial Sequence
  ENSG00000164114_33 (sequence is synthesized)
ttatgaaattgatctgattatcagcaatatgtagtatcagcatggaatttaggacctctcttactcattcctgtgtcccccatagtaccaaaaacagtgcctgccaaaatagattaaaag

SEQ ID NO: 507315 - DNA, 120 bp, Artificial Sequence
  ENSG00000164114_34 (sequence is synthesized)
tgtttattgtattagctgtttagagctgaaaagatatttacaaattccagggaagtaaaaggaaaaaaactgaaaaaggtacagctacttttggggatgtgagatcatggatgtgtatct

SEQ ID NO: 507316 - DNA, 120 bp, Artificial Sequence
  ENSG00000164114_35 (sequence is synthesized)
tatagatttcacattatttatttactttccattattttcttctacattatcatatttagtggctaaccattattacttcttaggttgttgtgagaaccgagttaattaatgtaaactatt

SEQ ID NO: 507317 - DNA, 120 bp, Artificial Sequence
  ENSG00000164114_36 (sequence is synthesized)
tgacacataataaggacttaaatgttcattgttgtcattattgatttattaccatgagccctacatttccccattcatgagtgtgcgaacattaacatagatagggttgataatggttat

SEQ ID NO: 507318 - DNA, 120 bp, Artificial Sequence
  ENSG00000164114_37 (sequence is synthesized)
taacatagatagggttgataatggttatttgacattacacatttttaggaagaagaaatttctgtcttgctggccagtccaggctgtaacactcaaaaaaacaaaacaaaacaaaacaaa

SEQ ID NO: 507319 - DNA, 120 bp, Artificial Sequence
  ENSG00000164114_38 (sequence is synthesized)
agggccttcctaaaaagaaagctaagtaagtattaatttcttaggattgcttctgaggtaggatgaggtgtttgcatagacccaacaagtcattcacttcaaattttttttgtcttacta

SEQ ID NO: 507320 - DNA, 120 bp, Artificial Sequence
  ENSG00000164114_39 (sequence is synthesized)
tgataaataacatattatttcctgtttacagcaacctgcactgaaattaactagttgaataaaatcacctcttctagcacaaataaagctgagttcggggaggtgggtgaaaatacagta

SEQ ID NO: 507321 - DNA, 120 bp, Artificial Sequence
  ENSG00000164114_40 (sequence is synthesized)
ctgttgtttacttcctaagatccaagggagagaatcaagcttggtaatattctcttgaatatacatttacctatttaaaaggtatgattttcccatatttccttaggaagtatgtcatgt

SEQ ID NO: 507322 - DNA, 120 bp, Artificial Sequence
  ENSG00000164114_41 (sequence is synthesized)
atagatatttactcattaggtttacattaatttgtattataagggaatgtttaattcaaattaaggacattaaaagtatatagactttcatataaaagttccggttttataaattgcgtt

SEQ ID NO: 507323 - DNA, 120 bp, Artificial Sequence
  ENSG00000164114_42 (sequence is synthesized)
cgttgatcacttaaagaatgcagagatctcaaagtaaagaaaacaaattttatgaatattttaaaacattacttaaaacaagtttccttagaaagcacatttgtggataaatttaaatat

SEQ ID NO: 507324 - DNA, 120 bp, Artificial Sequence
  ENSG00000164114_43 (sequence is synthesized)
taatactaaataataaagtagtatacagaatttaaatttcataataatgaagaaagtggtaatgctatttaacttaaaagatgcaatatggcattttagatcaagaggttaaagttttct

SEQ ID NO: 507325 - DNA, 120 bp, Artificial Sequence
  ENSG00000164114_44 (sequence is synthesized)
taatgaaagaaagtaacgatttatgggataaaaatattccagtggtttgtatttgcttcatacttcaaaagtgttagtccatttattgtttaaagttatattgaaactgatattttcact

SEQ ID NO: 507326 - DNA, 120 bp, Artificial Sequence
  ENSG00000164114_45 (sequence is synthesized)
gctgccaaagcagtacctgacagtagataggtatccacagtcttatgttccttagagttatagaactatgcctctgaaaggggttttaatactttaataaacctggcctaaactgtttta

SEQ ID NO: 507327 - DNA, 120 bp, Artificial Sequence
  ENSG00000164114_46 (sequence is synthesized)
tttctaagttgaagaaactgattgtcaagtactttgacttgtccaatctcatacaactaactatggtacatctagagttagatctcagtatcaggggtcccagttgtattctgctcacca

SEQ ID NO: 507328 - DNA, 120 bp, Artificial Sequence
  ENSG00000164114_47 (sequence is synthesized)
ttccacaatttcgatattgataaaactttcacactaacttttgaactgtggttattattaatttagttgattcatgtcctcttatttatctccttactcctccactgctgccttcataac

SEQ ID NO: 507329 - DNA, 120 bp, Artificial Sequence
  ENSG00000164114_48 (sequence is synthesized)
tgtccaccagatcaaagctatttgggtacctacactttaaagtgaggggaaataatgaagtttcttaaatcctgtgtcatggactaagatacaataaagaaaaggaatttcacaaagtag

SEQ ID NO: 507330 - DNA, 120 bp, Artificial Sequence
  ENSG00000164114_49 (sequence is synthesized)
gggaaattacgtgttagttataatcattcccaagaataaactagtaaaagaaacttagatttccctaatttaatcttgactccgattttgatagtgctatataaaaaggtatttaaaccc

SEQ ID NO: 507331 - DNA, 120 bp, Artificial Sequence
  ENSG00000164114_50 (sequence is synthesized)
atatgcttccttttacataaaagaaagatatcaactttcctagtttgcatttacactggctaataggataataaaatgctgtgtaaatgttaaactggaagtttctctgagttattttta

SEQ ID NO: 507332 - DNA, 120 bp, Artificial Sequence
  ENSG00000164114_51 (sequence is synthesized)
ctttaaaatttcatgtgattatgccattttgaatatgtatattacatgtaattgtataatgttaactcgggtaggcaaaattcttggtattaaatttaggatgttttaaaaattattaag

SEQ ID NO: 507333 - DNA, 120 bp, Artificial Sequence
  ENSG00000164114_52 (sequence is synthesized)
aagatattaatgtctgctttttgatagcatatattttcatgtaatgtttagtgtattaaaatcaaccattcaagatttattttattgggtgacactattgactgtgttccaaaatgccca

SEQ ID NO: 507334 - DNA, 120 bp, Artificial Sequence
  ENSG00000164114_53 (sequence is synthesized)
tagtgttaggaaatgtggtgtgagttttatttgtgggctaaggataaaataatcatatgctaatataccttttattataaatgactaaaaatttggatataaaactgatgttttactaca

SEQ ID NO: 507335 - DNA, 120 bp, Artificial Sequence
  ENSG00000164114_54 (sequence is synthesized)
caaattacagagagagataatataattatataattattaaataattagaaaatgcaaataagcaaaagtcacccatgttcccagttctcatctcctgaagatagttataactaacatatt

SEQ ID NO: 507336 - DNA, 120 bp, Artificial Sequence
  ENSG00000164114_55 (sequence is synthesized)
attttgtactcttcctgttaattagtttctagtgtactttctcctgtagctgaaattaagctgagaaaaaaggaagagatagttcctccctcctctttctctctcccactctgtctctct

SEQ ID NO: 507337 - DNA, 120 bp, Artificial Sequence
  ENSG00000164114_56 (sequence is synthesized)
gtctctctcctgtgctatctgtgtgtatatacaaatatgtatgcatatatatataatgatgtacataatatatataaaatacaaatactaatgtgcatattttcaaacatacacatattt

SEQ ID NO: 507338 - DNA, 120 bp, Artificial Sequence
  ENSG00000164114_57 (sequence is synthesized)
ttgaaataagaatgagtcagactacatatttggtagccagatttttttcactcagtgatatatcatgaacatatttccatgctaatataattttctaataattttagatgctgtaactac

SEQ ID NO: 507339 - DNA, 120 bp, Artificial Sequence
  ENSG00000164114_58 (sequence is synthesized)
aatttcattgttaatgggcaatttgttgctttacaaatggtaaattatatgataaataatatgatcattattcttgtagccaatatcattattagaaatgatggaccgcattaaagctat

SEQ ID NO: 507340 - DNA, 120 bp, Artificial Sequence
  ENSG00000164114_59 (sequence is synthesized)
aaaattaaataagaatttataaatgtaaggagttattcagacatcttgtatctagtattacaatatcagaaaactcagcaggttatatgacatatacactttgagatagtcactcagagg

SEQ ID NO: 507341 - DNA, 120 bp, Artificial Sequence
  ENSG00000164114_60 (sequence is synthesized)
ttttcacatacaggattaaccttgctgcagtgcgtgtgcaagattaaaaaagatgtcacgggtcactttgtaatgtcatatcgttgctgttgataaataaaggaaatgttataaataaaa

SEQ ID NO: 507342 - DNA, 120 bp, Artificial Sequence
  ENSG00000164114_61 (sequence is synthesized)
tcacttcctcccgaagacgctgtttcctagcaaccgccctccgcctctgttattagcccctcctcctcgctcggtccaggaccggctctgcgggcgccgccaggcccagaccaaggatga

SEQ ID NO: 507343 - DNA, 120 bp, Artificial Sequence
  ENSG00000164114_62 (sequence is synthesized)
atgaaaaagagaaggagagaatgaatttgtgtgcgtgtgtgtgtgttttacatactttcttctgcaactgataaggaaataatttttaaaaatacactgtattccaccgagtctaaaact

SEQ ID NO: 507344 - DNA, 120 bp, Artificial Sequence
  ENSG00000164114_63 (sequence is synthesized)
gcatcaattgtaagacgtagcattattttacataccactaaggaagaaggaaatgcatccaattaaactataacacaccagtgattgtagagtttatccagttttagagaaagtaaaatg

SEQ ID NO: 507345 - DNA, 120 bp, Artificial Sequence
  ENSG00000164114_64 (sequence is synthesized)
aatgtcaaaaagtgttgcttttctgaatctatataatagtgtttatctttaataattttttaaatttatgtatctttgaattatgtaatttatggctaagaacaatatagtcagtgtcat

SEQ ID NO: 507346 - DNA, 120 bp, Artificial Sequence
  ENSG00000164114_65 (sequence is synthesized)
aaaaataaatgagaaaagaaaggaagaactgaaaagagctgagaaaaaagataaagataaacaagctattaatgaatatgaaaaatggctgatagaatagaaaaattgcccctgtatagg

SEQ ID NO: 507347 - DNA, 120 bp, Artificial Sequence
  ENSG00000164114_66 (sequence is synthesized)
agtctaatgacttcagttttcatggaaaacaacatctcaagctttttatatacaaactagtttgaacagtaagcatttggtgggtaattgctttaggggaaagttaatagccaaagatca

SEQ ID NO: 507348 - DNA, 120 bp, Artificial Sequence
  ENSG00000164114_67 (sequence is synthesized)
gaaaataagcaaaaagctcagttttccacaaataaatgtctgaaggactttttaacaaggttcttttaattactatcaaggtgactattgattcttttgaactgatattacagttaatat

SEQ ID NO: 507349 - DNA, 120 bp, Artificial Sequence
  ENSG00000164114_68 (sequence is synthesized)
aattgtctatttgctaccctggctttacagctccctgctagtaagatgaagcatatttcaagttactgccccctcatgttaagtgaaattacaaaaagagatttattcagtcaatttctg

SEQ ID NO: 507350 - DNA, 120 bp, Artificial Sequence
  ENSG00000164114_69 (sequence is synthesized)
tggacacagtctggtcactgcttttcttccgcctagctagatggtctgtctctaaaatattaaaatgattgaagatgatctaattacagctttgcttttctcaattaaaattctgaaagg

SEQ ID NO: 507351 - DNA, 120 bp, Artificial Sequence
  ENSG00000164114_70 (sequence is synthesized)
taattgcatttcttggaagtttattttaagataatcagtcccaaaatttttatatggtagctagtatatatttaagaaaaaaagacagacttaacttccattttacagacctgttgtatt

SEQ ID NO: 507352 - DNA, 120 bp, Artificial Sequence
  ENSG00000164114_71 (sequence is synthesized)
agaccaaggtgagcagctcctacccgatgcttggctcttgattctcagggtcgcggagaactggccgcgggcgtccggggccgggaacagaaagcgggacctgggggccatgggggatcc

SEQ ID NO: 507353 - DNA, 120 bp, Artificial Sequence
  ENSG00000164114_72 (sequence is synthesized)
ggacagagaccgcgcttggacgtgcacgggcctggcgttcgctggtgctcagcatacggcgcggtgaggagcggcgagcacccggacgtcacctggcctggtagggaacggaacccgggg

SEQ ID NO: 507354 - DNA, 120 bp, Artificial Sequence
  ENSG00000164114_73 (sequence is synthesized)
gcttcgtcgttttgtctggctctctttaacacttttgtgagaggaaaaattggcttgcaatacatctcgctggctgtttgcggctactatcagaagttgaattctaataattagctattt

SEQ ID NO: 507355 - DNA, 120 bp, Artificial Sequence
  ENSG00000164116_0 (sequence is synthesized)
aggtagacatgagcgacccaagctgcggatttgcgaggcgcgccctggagctgctagagatccggaagcacagccccgaggtgtgcgaagccaccaaacatcccagttaccagtgtcctt

SEQ ID NO: 507356 - DNA, 120 bp, Artificial Sequence
  ENSG00000164116_1 (sequence is synthesized)
gaattgatagtggcttctgtttgtcagtctcatataagaactacagctcatcaggaggagatcgcagcagggtaagagacaccaacaccatgttctgcacgaagctcaaggatctcaaga

SEQ ID NO: 507357 - DNA, 120 bp, Artificial Sequence
  ENSG00000164116_2 (sequence is synthesized)
tcacaggagagtgtcctttctccttactggcaccaggtcaagttcctaacgagtcttcagaggaggcagcaggaagctcagagagctgcaaagcaaccgtgcccatctgtcaagacattc

SEQ ID NO: 507358 - DNA, 120 bp, Artificial Sequence
  ENSG00000164116_3 (sequence is synthesized)
ctgagaagaacatacaagaaagtcttcctcaaagaaaaaccagtcggagccgagtctatcttcacactttggcagagagtatttgcaaactgattttcccagagtttgaacggctgaatg

SEQ ID NO: 507359 - DNA, 120 bp, Artificial Sequence
  ENSG00000164116_4 (sequence is synthesized)
ttgcacttcagagaacattggcaaagcacaaaataaaagaaagcaggaaatctttggaaagagaagactttgaaaaaacaattgcagagcaagcagttgcagcaggagttccagtggagg

SEQ ID NO: 507360 - DNA, 120 bp, Artificial Sequence
  ENSG00000164116_5 (sequence is synthesized)
ttatcaaagaatctcttggtgaagaggtttttaaaatatgttacgaggaagatgaaaacatccttggggtggttggaggcacccttaaagattttttaaacagcttcagtacccttctga

SEQ ID NO: 507361 - DNA, 120 bp, Artificial Sequence
  ENSG00000164116_6 (sequence is synthesized)
aacagagcagccattgccaagaagcaggaaaaaggggcaggcttgaggacgcctccattctatgcctggataaggaggatgattttctacatgtttactacttcttccctaagagaacca

SEQ ID NO: 507362 - DNA, 120 bp, Artificial Sequence
  ENSG00000164116_7 (sequence is synthesized)
cctccctgattcttcccggcatcataaaggcagctgctcacgtattatatgaaacggaagtggaagtgtcgttaatgcctccctgcttccataatgattgcagcgagtttgtgaatcagc

SEQ ID NO: 507363 - DNA, 120 bp, Artificial Sequence
  ENSG00000164116_8 (sequence is synthesized)
cctacttgttgtactccgttcacatgaaaagcaccaagccatccctgtcccccagcaaaccccagtcctcgctggtgattcccacatcgctattctgcaagacatttccattccatttca

SEQ ID NO: 507364 - DNA, 120 bp, Artificial Sequence
  ENSG00000164116_9 (sequence is synthesized)
tgtttgacaaagatatgacaattctgcaatttggcaatggcatcagaaggctgatgaacaggagagactttcaaggaaagcctaattttgaagaatactttgaaattctgactccaaaaa

SEQ ID NO: 507365 - DNA, 120 bp, Artificial Sequence
  ENSG00000164116_10 (sequence is synthesized)
tcaaccagacgtttagcgggatcatgactatgttgaatatgcagtttgttgtacgagtgaggagatgggacaactctgtgaaaaaatcttcaagggttatggacctcaaaggccaaatga

SEQ ID NO: 507366 - DNA, 120 bp, Artificial Sequence
  ENSG00000164116_11 (sequence is synthesized)
tctacattgttgaatccagtgcaatcttgtttttggggtcaccctgtgtggacagattagaagattttacaggacgagggctctacctctcagacatcccaattcacaatgcactgaggg

SEQ ID NO: 507367 - DNA, 120 bp, Artificial Sequence
  ENSG00000164116_12 (sequence is synthesized)
atgtggtcttaataggggaacaagcccgagctcaagatggcctgaagaagaggctggggaagctgaaggctacccttgagcaagcccaccaagccctggaggaggagaagaaaaagacag

SEQ ID NO: 507368 - DNA, 120 bp, Artificial Sequence
  ENSG00000164116_13 (sequence is synthesized)
tagaccttctgtgctccatatttccctgtgaggttgctcagcagctgtggcaagggcaagttgtgcaagccaagaagttcagtaatgtcaccatgctcttctcagacatcgttgggttca

SEQ ID NO: 507369 - DNA, 120 bp, Artificial Sequence
  ENSG00000164116_14 (sequence is synthesized)
ctgccatctgctcccagtgctcaccgctgcaggtcatcaccatgctcaatgcactgtacactcgcttcgaccagcagtgtggagagctggatgtctacaaggtggagaccattggcgatg

SEQ ID NO: 507370 - DNA, 120 bp, Artificial Sequence
  ENSG00000164116_15 (sequence is synthesized)
cctattgtgtagctgggggattacacaaagagagtgatactcatgctgttcagatagcgctgatggccctgaagatgatggagctctctgatgaagttatgtctccccatggagaaccta

SEQ ID NO: 507371 - DNA, 120 bp, Artificial Sequence
  ENSG00000164116_16 (sequence is synthesized)
tcaagatgcgaattggactgcactctggatcagtttttgctggcgtcgttggagttaaaatgccccgttactgtctttttggaaacaatgtcactctggctaacaaatttgagtcctgca

SEQ ID NO: 507372 - DNA, 120 bp, Artificial Sequence
  ENSG00000164116_17 (sequence is synthesized)
gtgtaccacgaaaaatcaatgtcagcccaacaacttacagattactcaaagactgtcctggtttcgtgtttacccctcgatcaagggaggaacttccaccaaacttccctagtgaaatcc

SEQ ID NO: 507373 - DNA, 120 bp, Artificial Sequence
  ENSG00000164116_18 (sequence is synthesized)
ggcaatgccaattttttaggcaaagcatcaggaatagattagcaacctatatacctatttataagtctttggggtttgactcattgaagatgtgtagagcctctgaaagcactttaggga

SEQ ID NO: 507374 - DNA, 120 bp, Artificial Sequence
  ENSG00000164116_19 (sequence is synthesized)
ttgtagatggctaacaagcagtattaaaatttcaggagccaagtcacaatctttctcctgtttaacatgacaaaatgtatgtactcacttcagtacttcagctcttcaagaaaaaaaaaa

SEQ ID NO: 507375 - DNA, 120 bp, Artificial Sequence
  ENSG00000164116_20 (sequence is synthesized)
aaaaccttaaaaagctacttttgtgggagtatttctattatataaccagcacttactacctgtactcaaaattcagcaccttgtacatatatcagataattgtagtcaattgtacaaact

SEQ ID NO: 507376 - DNA, 120 bp, Artificial Sequence
  ENSG00000164116_21 (sequence is synthesized)
gatggagtcacctgcaatctcatatcctggtggaatgccatggttattaaagtgtgtttgtgatagtgtcgtcaaaaaaaaggtttttgaatagaaattacattctttgacaccctcagt

SEQ ID NO: 507377 - DNA, 120 bp, Artificial Sequence
  ENSG00000164116_22 (sequence is synthesized)
tctttcaaactttcaactctgcattttattgcattttctcatttaactgttagtatatgtttgaatataggctgactttttttctctattgcactttcttctttttttctttttagaaaa

SEQ ID NO: 507378 - DNA, 120 bp, Artificial Sequence
  ENSG00000164116_23 (sequence is synthesized)
taagcaattaggggttagatgcaatatgaatataaaatagttctgtaaataccaaatattatttttagttctggaagttaaaaatactctccatagtaacgtgtgttataataataaata

SEQ ID NO: 507379 - DNA, 120 bp, Artificial Sequence
  ENSG00000164116_24 (sequence is synthesized)
tttcttttgtttgacttttttaaaattctacaatggtaaaagctattttaatccatgttagcaatttaattcctattaattcattttactatcataatagcaaagtattcagaataaaag

SEQ ID NO: 507380 - DNA, 120 bp, Artificial Sequence
  ENSG00000164116_25 (sequence is synthesized)
aggtttatatcttctattaaaatgcagtaatactattcaaatctaatttagctggaagcaacatgggagtaaagtaatcatccaggggacccaccataaaggacattggtaaaacattta

SEQ ID NO: 507381 - DNA, 120 bp, Artificial Sequence
  ENSG00000164116_26 (sequence is synthesized)
cacacgtaaacacacgtgcaggcacacttggaacaatatggacccacttcagcagacatcttctattgccatgctgagctgtttaaagttttaagaagaaaatctaagtatggaagtaga

SEQ ID NO: 507382 - DNA, 120 bp, Artificial Sequence
  ENSG00000164116_27 (sequence is synthesized)
aaataagacttgttcttttggtggatatctcatttttcttgagtatttgtgctgaacattttggtgtatgtctatgaactaagaatcaagtttttgtctcattaaatatacatatatgaa

SEQ ID NO: 507383 - DNA, 120 bp, Artificial Sequence
  ENSG00000164116_28 (sequence is synthesized)
gtgtttttattctacttgaaatatcttgacttaaaaaaaacgactgttagtattgatgaagcaaatgaggcagtgactacattatggaaatgtctaagtattttttccggaacttcaact

SEQ ID NO: 507384 - DNA, 120 bp, Artificial Sequence
  ENSG00000164116_29 (sequence is synthesized)
ttttctttttgttttacataaacatttaagcagctaggaacttttagttttagttaggtcagttgaagttctctggtgaactaaaaaatctacattttggttggggataaagatttgatt

SEQ ID NO: 507385 - DNA, 120 bp, Artificial Sequence
  ENSG00000164116_30 (sequence is synthesized)
ttaaaaacagcttgaatttaaagcaagaaaaagatgaacgttatagttttaaaatcaatattagcagagccatagataggctgagctcttatttggggttctgagaaataactcagttta

SEQ ID NO: 507386 - DNA, 120 bp, Artificial Sequence
  ENSG00000164116_31 (sequence is synthesized)
aaacttctttaactgcctcccttagtacccaggctagcccatggtgacatcagggatattcattactgattggcctctagtattccaagggtactactatagatattacaatgatgctgt

SEQ ID NO: 507387 - DNA, 120 bp, Artificial Sequence
  ENSG00000164116_32 (sequence is synthesized)
ttactaagtgataaccccgtatcttacaggactgactttgactcaataaaccactcagcctattattggaaagtgccataggccttgagaaagtatagttacatcctcacaaatatatga

SEQ ID NO: 507388 - DNA, 120 bp, Artificial Sequence
  ENSG00000164116_33 (sequence is synthesized)
agttaagtcactacttacaaggaaaaaaaatgtaaatacatttttctttctggaaccgaactcttattatggggaaataatagaaataaagaaaatgtaaaagcatgaaatggaatgtag

SEQ ID NO: 507389 - DNA, 120 bp, Artificial Sequence
  ENSG00000164116_34 (sequence is synthesized)
tcttgatcaaacatttcagcagacctcaatttgcttacaatctgtactcaaaaagtttataattcaatcagaattcaaaaagtattttgtgtgtttgtgatgtattagcatatacacaaa

SEQ ID NO: 507390 - DNA, 120 bp, Artificial Sequence
  ENSG00000164116_35 (sequence is synthesized)
acaaatgaggggaatgtatataatcttggtgaaaagttgtatgggagttttttgtacgattcctgcaacttttctataaacgtggcattatatctaaataaaaaattaccaaaaaacata

SEQ ID NO: 507391 - DNA, 120 bp, Artificial Sequence
  ENSG00000164116_36 (sequence is synthesized)
atggtgcgttttggctgctactttctttttcagtctttcggtgcggagaaggggaggaggcgggcagaggtctgaaaaaatcgaatgccttatggaaaggaactgcaagggttcctttgg

SEQ ID NO: 507392 - DNA, 120 bp, Artificial Sequence
  ENSG00000164116_37 (sequence is synthesized)
ggtgatcaaagagggagacacagacacagagagacaaaggcaaggaggactgtctgggagccacgcgggcgatacagtttccgaggcacgccgcgtcccgcctagcctgttgaacagtgc

SEQ ID NO: 507393 - DNA, 120 bp, Artificial Sequence
  ENSG00000164116_38 (sequence is synthesized)
acacagtgatttctgttatggcgattgggcggctgcagagaccaggactcagttcccctgccctagtctgagcctagtgggtgggactcagctcagagtcagttttccagaagcaggttt

SEQ ID NO: 507394 - DNA, 120 bp, Artificial Sequence
  ENSG00000164116_39 (sequence is synthesized)
cagtgcagagttttcctacacttttcctgcgctagagcagcgagcagcctggaacagacccaggcggaggacacctgtgggggagggagcgcctggaggagcttagagaccccagccggg

SEQ ID NO: 507395 - DNA, 80 bp, Artificial Sequence
  ENSG00000164116_40 (sequence is synthesized)
cgtgagaacgcgcggggcgcgccggggccgctggtctcccacggccagggcgcctgggccccagagcccatcagccgcgt

SEQ ID NO: 507396 - DNA, 120 bp, Artificial Sequence
  ENSG00000164116_41 (sequence is synthesized)
gcgtgcagcgctgcggcctccggcgcgccggcaggcaagcgagcgggcgcagctgggggatgcctggaccccggaggcagcagggctggaggcggtggcgggcttcagggcaacttcacc

SEQ ID NO: 507397 - DNA, 120 bp, Artificial Sequence
  ENSG00000164116_42 (sequence is synthesized)
cacctaaaatctcttgtttttatttatatacaattgccatttgccccactgatttgattcattcttcataacttttttcttccttagtcgtaaggaaaaaagaaacgtgataacttttat

SEQ ID NO: 507398 - DNA, 120 bp, Artificial Sequence
  ENSG00000164116_43 (sequence is synthesized)
catcctcactttaacttttttacactgcttattagcctcctaagaatgacttgcctgaggtgtttgtggcccagccataaatccatgacagatattacatagtcttccatcattcttctt

SEQ ID NO: 507399 - DNA, 120 bp, Artificial Sequence
  ENSG00000164116_44 (sequence is synthesized)
ttagaagcacatattaatactcttagtatgttgataggtgttctgacatcaactagtacactgcagtgcagttctggcagtaaacacccagactcagcacagtcataaccacaagttaca

SEQ ID NO: 507400 - DNA, 120 bp, Artificial Sequence
  ENSG00000164116_45 (sequence is synthesized)
cataatactatcttgaatatgaaagctatttcatatttaagagcaagaaacaaaagggtaaaaatatatgcatcacttcaaatgtttgataaaacatatgtaaaacaatggtaaaagaat

SEQ ID NO: 507401 - DNA, 120 bp, Artificial Sequence
  ENSG00000164117_0 (sequence is synthesized)
gatttaaaagaatgaaaaggcggatctggtcattcgtctccgcccggggtctctgtaaggacggcggagagaggcgacctccgcccaataccaggcgcagccttgccgtctcctcggggc

SEQ ID NO: 507402 - DNA, 120 bp, Artificial Sequence
  ENSG00000164117_1 (sequence is synthesized)
tcaccaagcagccaccagcaaagaagccggtttcaaaggcccagcacgacagggagaggaaaacggagcatatgcaaccatacacagtcaccagagtccagcctcccgcaaccagtcgct

SEQ ID NO: 507403 - DNA, 120 bp, Artificial Sequence
  ENSG00000164117_2 (sequence is synthesized)
acagccaggcgcctgcgcccagaagcgcttctcgcgccgaccgtttgtatttggaattgtgggttcctgcccgccacgcaccaccgcaagaccttcaaagctgggagcttctctgtgctc

SEQ ID NO: 507404 - DNA, 120 bp, Artificial Sequence
  ENSG00000164117_3 (sequence is synthesized)
caggattcctcgctgccgattccacaccgcgttcaagactcctgtgaagagcgactccgctgagagcctcctcaatggccagtccacttctaacttgcagctgagaagtttttctgatct

SEQ ID NO: 507405 - DNA, 120 bp, Artificial Sequence
  ENSG00000164117_4 (sequence is synthesized)
tgatggtcagagtggctcgtgctacgaagtgagaaacaaggaatctatagcgaatcgtaaacaacagaaataaaaatgcgtctccgttaagagtcggagcctaacgtcacttccggcaac

SEQ ID NO: 507406 - DNA, 120 bp, Artificial Sequence
  ENSG00000164117_5 (sequence is synthesized)
aataggaaacgtcaaaattgggatagtcggcagttctggcccctgcagctggaggtaccctgagttctgagggtcgtagtgctgtttctggtattctcatcgcggtcacctctaccggtg

SEQ ID NO: 507407 - DNA, 120 bp, Artificial Sequence
  ENSG00000164117_6 (sequence is synthesized)
tggacaagtaaagtttgaatcagcttctccatggcctgggcaccagttcccggctgagccattttccttttggctaaaagtccccgcccagaggccaattcgtcgcggcggcggtggaga

SEQ ID NO: 507408 - DNA, 120 bp, Artificial Sequence
  ENSG00000164117_7 (sequence is synthesized)
tcgcaggtcgctcaggcttgcagatgggtcaagggttgtggagagtggtcagaaaccagcagctgcaacaagaaggctacagtgagcaaggctacctcaccagagagcagagcaggagaa

SEQ ID NO: 507409 - DNA, 120 bp, Artificial Sequence
  ENSG00000164117_8 (sequence is synthesized)
tggctgcgagcaacatttctaacaccaatcatcgtaaacaagtccaaggaggcattgacatatatcatcttttgaaggcaaggaaatcgaaagaacaggaaggattcattaatttggaaa

SEQ ID NO: 507410 - DNA, 120 bp, Artificial Sequence
  ENSG00000164117_9 (sequence is synthesized)
tgttgcctcctgagctaagctttaccatcttgtcctacctgaatgcaactgacctttgcttggcttcatgtgtttggcaggaccttgcgaatgatgaacttctctggcaagggttgtgca

SEQ ID NO: 507411 - DNA, 120 bp, Artificial Sequence
  ENSG00000164117_10 (sequence is synthesized)
ttagaaaattgtatatgcagctggatgaaggcagcctcacctttaatgccaacccagatgagggagtgaactactttatgtccaagggtatcctggatgattcgccaaaggaaatagcaa

SEQ ID NO: 507412 - DNA, 120 bp, Artificial Sequence
  ENSG00000164117_11 (sequence is synthesized)
agtttatcttctgtacaagaacactaaattggaaaaaactgagaatctatcttgatgaaaggagagatgtcttggatgaccttgtaacattgcataattttagaaatcagttcttgccaa

SEQ ID NO: 507413 - DNA, 120 bp, Artificial Sequence
  ENSG00000164117_12 (sequence is synthesized)
atgcactgagagaattttttcgtcatatccatgcccctgaagagcgtggagagtatcttgaaactcttataacaaagttctcacatagattctgtgcttgcaaccctgatttaatgcgag

SEQ ID NO: 507414 - DNA, 120 bp, Artificial Sequence
  ENSG00000164117_13 (sequence is synthesized)
aacttggccttagtcctgatgctgtctatgtactgtgctactctttgattctactttccattgacctcactagccctcatgtgaagaataaaatgtcaaaaagggaatttattcgaaata

SEQ ID NO: 507415 - DNA, 120 bp, Artificial Sequence
  ENSG00000164117_14 (sequence is synthesized)
cccgtcgcgctgctcaaaatattagtgaagattttgtagggcatctttatgacaatatctaccttattggccatgtggctgcataaaaagcacaattgctaggacttcagtttttacttc

SEQ ID NO: 507416 - DNA, 120 bp, Artificial Sequence
  ENSG00000164117_15 (sequence is synthesized)
agactaaagctacccaaggacttagcagatatgggggttacatcagtgctggtcattgtagcctgagtatacaatcaagcttcagtgtgcaacctttttttcttttgccattttctattt

SEQ ID NO: 507417 - DNA, 120 bp, Artificial Sequence
  ENSG00000164117_16 (sequence is synthesized)
tagtaatttccttggggaactaaataattttgcagaatttttcctaattttgtttatcacgttttgcacaaagcagagccactgtctaacacagctgttaacgaatgataaactgacatt

SEQ ID NO: 507418 - DNA, 120 bp, Artificial Sequence
  ENSG00000164117_17 (sequence is synthesized)
atactctaaaagatggtgtatttgtgcattagatttgcctgaaaaactttatccatttccattctttatacaaataccatgtaatgtgtacatatttaactaaagagatttatagtcata

SEQ ID NO: 507419 - DNA, 120 bp, Artificial Sequence
  ENSG00000164117_18 (sequence is synthesized)
attattttattgtaaagattttaactaaagtttttccttttctctcaaactgagttctgaaatttatttgattctgatctgaaactattgtcttcgtaaaagttagatctgacttcagac

SEQ ID NO: 507420 - DNA, 120 bp, Artificial Sequence
  ENSG00000164117_19 (sequence is synthesized)
agaaaccaataccagcttccttttcctttaaactttgaagagtgttgatttgttactatattactatgcaaaactggcagttatttttataatataaatttataatttgattttttattt

SEQ ID NO: 507421 - DNA, 120 bp, Artificial Sequence
  ENSG00000164117_20 (sequence is synthesized)
taaaaactgggttaatcaagtctcggtaagtcctttaaaccatttaggatttttaaaacatcaaaatttatgatttacattcataggaataaaataaaatattattagaactctggtaaa

SEQ ID NO: 507422 - DNA, 120 bp, Artificial Sequence
  ENSG00000164117_21 (sequence is synthesized)
agctggatgaaggcagcctcacctttaatgccaacccagatgagccacagggaacaagattctccaaaggacaccgttcatgtcacggatatgggtaaccaagctccacagcagctgctg

SEQ ID NO: 507423 - DNA, 120 bp, Artificial Sequence
  ENSG00000164117_22 (sequence is synthesized)
cgcaggtcgctcagaccaagaaaaaacatgtttggtttcatttcgaagctccttagaaagaattctatagatcctctcaacatgataaagaagctttgaacaaaataaattcaaatttgg

SEQ ID NO: 507424 - DNA, 120 bp, Artificial Sequence
  ENSG00000164118_0 (sequence is synthesized)
aggtgaaaaattagacgatttcaagaattggagctgaatctgatgttaagtaatggcaacaggtgacttaaaaagaagcttacggaacctagaacaggtgctccgcttgctaaattatcc

SEQ ID NO: 507425 - DNA, 120 bp, Artificial Sequence
  ENSG00000164118_1 (sequence is synthesized)
tgaagaggtggactgtgtaggtttgataaagggagacccagcagcatctttgcccatcatcagctattcttttacctcatactcaccttatgtaacagaacttataatggaatccaatgt

SEQ ID NO: 507426 - DNA, 120 bp, Artificial Sequence
  ENSG00000164118_2 (sequence is synthesized)
agagctcatagcaaaaaatgacttgcgctttatagatgctgtctataagcttcttcgtgatcaatttaattataaaccaattttgacaaaaaagcagtttatccaatgtgggtttgcaga

SEQ ID NO: 507427 - DNA, 120 bp, Artificial Sequence
  ENSG00000164118_3 (sequence is synthesized)
atggaaaatccaaattgtttgtgatattttgaattgtgtgatgaaaaagcacaaggaattaagcagtcttcagaagattccatcacaacaaagaaagaaaatcagttctggtaagtcaga

SEQ ID NO: 507428 - DNA, 120 bp, Artificial Sequence
  ENSG00000164118_4 (sequence is synthesized)
acctcctttgggcaatgagaaaatatctgcagaggctgttggcgttgatatcagtggcaggtttatgacctcaggaaagaagaaagctgtggtgattcgtcacttgtataatgaagataa

SEQ ID NO: 507429 - DNA, 120 bp, Artificial Sequence
  ENSG00000164118_5 (sequence is synthesized)
tgttgacatttctgaggatacattaagtccaataacagatgttaatgaagcagttgatgtgtctgacttaaatgctactgaaataaagatgcctgaagtaaaggttcctgaaatcaaggc

SEQ ID NO: 507430 - DNA, 120 bp, Artificial Sequence
  ENSG00000164118_6 (sequence is synthesized)
tgagcaacaggatgtaaatgttaatcctgagattactgcactacaaactatgcttgctgaatgccaagaaaatcttaagaaactgacttcgatagagaaaaggttagactgtttggaaca

SEQ ID NO: 507431 - DNA, 120 bp, Artificial Sequence
  ENSG00000164118_7 (sequence is synthesized)
aaaaatgaaaggaaaagtgatggtagatgaaaacacctggactaatcttcttagtcgtgtcactcttcttgaaacagaaatgcttttgtctaaaaagaatgatgaatttatagagtttaa

SEQ ID NO: 507432 - DNA, 120 bp, Artificial Sequence
  ENSG00000164118_8 (sequence is synthesized)
tgaagttagtgaagactacgcttcttgtagtgacatggaccttctgaatcctcacagaaaaagcgaagtagagaggccagcaagtattcctctgtcctctggctatagtacagcatcatc

SEQ ID NO: 507433 - DNA, 120 bp, Artificial Sequence
  ENSG00000164118_9 (sequence is synthesized)
agattcaactcccagagcctctactgttaattactgtggtttgaatgagatttcagaggaaacaacaatccagaaaatggaaaggatgaaaaaaatgtttgaagaaactgcagagttact

SEQ ID NO: 507434 - DNA, 120 bp, Artificial Sequence
  ENSG00000164118_10 (sequence is synthesized)
gaaatgtccaaatcactacttgtaggattttctacatgaacttttttctaggactttggttactatacatattgtatattttaagaattctttatacaattttaatatactgcaatactg

SEQ ID NO: 507435 - DNA, 120 bp, Artificial Sequence
  ENSG00000164118_11 (sequence is synthesized)
cagtttttgacaatttggattccatttggtatatgaatttttgcattcattattgaataactcttttaatatttttgagcaatgattatactgctttaccttgtgtcacttttttttttt

SEQ ID NO: 507436 - DNA, 120 bp, Artificial Sequence
  ENSG00000164118_12 (sequence is synthesized)
ttaggaaaaactcatgttccagtatatttctcttacagagtgaagtcattacagcactgtatttctgtgttgacatttgttggcagtgtgctaagtaatgttttttaaagcacaggcttg

SEQ ID NO: 507437 - DNA, 120 bp, Artificial Sequence
  ENSG00000164118_13 (sequence is synthesized)
aggactatggtttacatcctgttggaaacattccaaatgggacttgtgtattatacccaggaggctctcatatataccatcttggcatctgtactgatgaataagttataatgaacagtt

SEQ ID NO: 507438 - DNA, 120 bp, Artificial Sequence
  ENSG00000164118_14 (sequence is synthesized)
aaaaatgctcattgaaaattaaataaaacaaaaaggcagttatttcatgcttggtcaaaaacatcaatacctttccaattaacactgagaaattaaggttaagattctccttttgtactg

SEQ ID NO: 507439 - DNA, 120 bp, Artificial Sequence
  ENSG00000164118_15 (sequence is synthesized)
ggaaacaggctggaggactatggtcctcaagtttagaccaagaggactatggtctcaaggttcaccatgagaaatgtgttgaacattttagtatgctctattgtataatttttttggagg

SEQ ID NO: 507440 - DNA, 120 bp, Artificial Sequence
  ENSG00000164118_16 (sequence is synthesized)
caggtgatctgcctgtcttggcctccggcgtaacactttttaagaccagtgtaacagaaagagaatgtagccattctagccaccgttaaaagatacacagtgaggtgttgtgttttgttt

SEQ ID NO: 507441 - DNA, 120 bp, Artificial Sequence
  ENSG00000164118_17 (sequence is synthesized)
ttttgtttttttaatgatgaaaagttacacattttttggagagaaaagtcttagctgaaggtaaatcaatggaaaaatgaaatttatttttaatattactactatatgaattatcttttt

SEQ ID NO: 507442 - DNA, 120 bp, Artificial Sequence
  ENSG00000164118_18 (sequence is synthesized)
acttgtagataaaagtgttccagtaatcagaaaatcctcaagaaaattgacttcattatttggaaggaaaattagtattttttttaatattatatggaccatctgattatattttattta

SEQ ID NO: 507443 - DNA, 120 bp, Artificial Sequence
  ENSG00000164118_19 (sequence is synthesized)
tttatggtatgtatgtataattctatattacactgtcaaatataaaatattgttatatgagtagaaatcacttaaattttttttgtgtttgtgaatttgaaacagtgtaagaaatcactt

SEQ ID NO: 507444 - DNA, 120 bp, Artificial Sequence
  ENSG00000164118_20 (sequence is synthesized)
ttttgtgtttgtgaatttgaaacagtgtaagaaatcacttttaagaaaacatttttagaattcctttgttttttttttttttctttttgaaacagggtctcactctattgcccaggctgg

SEQ ID NO: 507445 - DNA, 69 bp, Artificial Sequence
  ENSG00000164118_21 (sequence is synthesized)
cactggcgtgatctcggctcactgcaccttctgcctaccgctgtaccgtcatgcctggctaatttttgt

SEQ ID NO: 507446 - DNA, 120 bp, Artificial Sequence
  ENSG00000164118_22 (sequence is synthesized)
ttgcccagtctgttctcaaactcgtgagctaaagctactcgcccacctggatgtcccaaagtgctagattccatgggtgagtcaccatgcttggccacatttttagtattctaataaaca

SEQ ID NO: 507447 - DNA, 120 bp, Artificial Sequence
  ENSG00000164118_23 (sequence is synthesized)
gttggtcatcagaactttaaaatggtagcctacagaaacatacaattttgaatttaacagagtttcagtaaatatttccagaattaatgaagcatgttagctttaattttttcaattgtg

SEQ ID NO: 507448 - DNA, 120 bp, Artificial Sequence
  ENSG00000164118_24 (sequence is synthesized)
agagaagtacatttataaaaattaagaggttaagaggttatagttataagggaaaaaacttctgtatcgattaactcctaaaatatcagtaccagcatggaattatagcaccaccttgtg

SEQ ID NO: 507449 - DNA, 120 bp, Artificial Sequence
  ENSG00000164118_25 (sequence is synthesized)
gttaacatgccagtattttaccttttgttaaaacaagtgatttcccatcaaacaggataatattttttcccttttgaaaaattcaattttaaaaagaaacatttttgaagttttcttatg

SEQ ID NO: 507450 - DNA, 120 bp, Artificial Sequence
  ENSG00000164118_26 (sequence is synthesized)
gaagatagaaaaaaagttaagtctctttctaccctttctttttttctttatatagtgcagatatacacacagagaagggacttaaaacatttctaatctcctagtttatatacagtgtgc

SEQ ID NO: 507451 - DNA, 120 bp, Artificial Sequence
  ENSG00000164118_27 (sequence is synthesized)
agtatatattgaaaatataaaatatttcatatatgttatcaggtggaaatttagaatccaaattttcttaaactttaataacttgtctaacaactctctaatagggactaaaaatcaact

SEQ ID NO: 507452 - DNA, 120 bp, Artificial Sequence
  ENSG00000164118_28 (sequence is synthesized)
taaaaatcaactcaatatatcatacatttacacttacaaagagtctttatctagacaacataatttttggaaaaataaagcaaattcaactttattggagttattggacagatcagcaaa

SEQ ID NO: 507453 - DNA, 120 bp, Artificial Sequence
  ENSG00000164118_29 (sequence is synthesized)
ttgttattttaaaaagttttcttgtttaggcaatttggtaagtggtttctagttataaactagccactgttgattaacttgagaaggtgaagcaggggagttctgaagagattacctaga

SEQ ID NO: 507454 - DNA, 120 bp, Artificial Sequence
  ENSG00000164118_30 (sequence is synthesized)
gctacataaccctaagttaagtaaaattttcactttcattcttttcattctctcataaactggttgaaaaaacactgtactaccaacaaaggtgtcagttgcttgtgctgccctgtctat

SEQ ID NO: 507455 - DNA, 120 bp, Artificial Sequence
  ENSG00000164118_31 (sequence is synthesized)
gttatgctctgaataggtctcggtaaagattatatggaaatactataaagaatacataaggtaaaatactagtcagaaagggttcagaagaagttagcatcaactgtatgaaaattctag

SEQ ID NO: 507456 - DNA, 120 bp, Artificial Sequence
  ENSG00000164118_32 (sequence is synthesized)
gtaaagctaagtactattgagttggaaaaaagtaattctatcatgtttgcttgttttcctctactgtttttaatgtgatgttgtaatatattttaaaaataaaacttgaaaacgttggga

SEQ ID NO: 507457 - DNA, 120 bp, Artificial Sequence
  ENSG00000164118_33 (sequence is synthesized)
agagaagctcccagctttgaaggtcttgcggtgaagcatcaagtgtacctgatttgtgaacctatcttgcttcagttggtttcctcctaaatattaggcagatgggattggctggtctgt

SEQ ID NO: 507458 - DNA, 120 bp, Artificial Sequence
  ENSG00000164118_34 (sequence is synthesized)
agattcaactcccagagcctctactgttaattactgtggtttgaatgagatttcagagaattttcctgcatggagtgctacatcctcttgttccagtctcagctggctgctccgtgggca

SEQ ID NO: 507459 - DNA, 120 bp, Artificial Sequence
  ENSG00000164118_35 (sequence is synthesized)
tacttcatacctttcatcacagagctttgcttggcctctctcctgtgtgtaatctctgtttcttggatcctgtgcttaccttttcctgctgtactctgatgtttcagtgaagctcatcca

SEQ ID NO: 507460 - DNA, 120 bp, Artificial Sequence
  ENSG00000164118_36 (sequence is synthesized)
cgaagtccagaattctgcctggaaaccagcttcctcctcagctccagctcttttaatgggcatatcaaaactgatgactttttccttcctgctacatgggtaacacttagttgtttgtct

SEQ ID NO: 507461 - DNA, 120 bp, Artificial Sequence
  ENSG00000164118_37 (sequence is synthesized)
gatagcccctcactcatatttttcatgtgggtttatagctttcatatttctttattattgtaaatgggggctgtggaaggtgagaaaacacatgctttcttaaaacagaagctctctcct

SEQ ID NO: 507462 - DNA, 120 bp, Artificial Sequence
  ENSG00000164118_38 (sequence is synthesized)
tcattaatttaaatatttttatcggctctagaaaatgcataaggttagtacaagatcagtagagagaaagtcaaagattacagaagtgctgaagcagaccattcttcctttcttcccaat

SEQ ID NO: 507463 - DNA, 120 bp, Artificial Sequence
  ENSG00000164118_39 (sequence is synthesized)
gtctattaagatcacacataggtaaactgttacaaatccagaatggtgaaagagtccaacaatggctgagggaagtagaggttaagatatagctcaacagtgaaagtagcagggaaagag

SEQ ID NO: 507464 - DNA, 120 bp, Artificial Sequence
  ENSG00000164118_40 (sequence is synthesized)
ctgggcaaggccaagaccatcttttgtaccgttggtacagtaggctaaaggtacggtgttccatattaaatacagcaatatgaagaaaaataaattaagtcccttatacctaagacctct

SEQ ID NO: 507465 - DNA, 120 bp, Artificial Sequence
  ENSG00000164118_41 (sequence is synthesized)
atttctctgttgattacatacacagtggcaatggaaagaagggaaaataatggggatagcatttgctcattctctgaccatgcaacactggcagcattctatacttattctattaactgc

SEQ ID NO: 507466 - DNA, 120 bp, Artificial Sequence
  ENSG00000164118_42 (sequence is synthesized)
atcaaccacatcttataaaacacatttccataggccatatgtaataggccttggctttattcattgcatttattggctccttaaattgacaacatataattgttttcatataattttcat

SEQ ID NO: 507467 - DNA, 120 bp, Artificial Sequence
  ENSG00000164118_43 (sequence is synthesized)
caaataaaattcactttaatttgtatgaacatatttaaagtggaaagtatcttcccaaatggtccatatcttaaagtgtcagatattttatgggcttcacatctgaactgccagagatct

SEQ ID NO: 507468 - DNA, 120 bp, Artificial Sequence
  ENSG00000164118_44 (sequence is synthesized)
caggcatagcatgcattaatcacaaccacttactgacctggttcagatacttactcaatacatggggctagacacagagtgtgccttaggctaaagaaaaaattattcaagttgagcata

SEQ ID NO: 507469 - DNA, 120 bp, Artificial Sequence
  ENSG00000164118_45 (sequence is synthesized)
tccataaactctggctcaagcagtgtattttgggggtaataaacacaagtttgttcctagttggagggatatgatgcttaggtttgaacctgttaaccttcctgggtttgagggctagaa

SEQ ID NO: 507470 - DNA, 120 bp, Artificial Sequence
  ENSG00000164118_46 (sequence is synthesized)
aacgtggagacattcctttctaactaacacattttctaatagaaacaatccaccaggatgttgagcccacattttaagagttcttcggaatttactgaaaatggaaaactgattacattg

SEQ ID NO: 507471 - DNA, 120 bp, Artificial Sequence
  ENSG00000164118_47 (sequence is synthesized)
ggcacataggacatttatatttatagaaacattttagataagacaagaattttaaaagccagaaatcacttttagtgggcattttcagaaaaatgttgtcaactttttgtaatttttaat

SEQ ID NO: 507472 - DNA, 120 bp, Artificial Sequence
  ENSG00000164118_48 (sequence is synthesized)
aggcataaaaaagattgttatattgatattgacagaaattaggtggttaattagagagcgtaaaaggatgaattgctctaacattggtttagaatttttctttatatgattcaattttgt

SEQ ID NO: 507473 - DNA, 120 bp, Artificial Sequence
  ENSG00000164118_49 (sequence is synthesized)
ggtctggcaaaggcccaatagtcatttatctagtatgcatacctttccacagctggattttcaaatatgatgataaagttcatatgacagacctattctgaaaataaatatgtcagcagg

SEQ ID NO: 507474 - DNA, 120 bp, Artificial Sequence
  ENSG00000164118_50 (sequence is synthesized)
ggagcacagagaagctcccagctttgaaggtcttgcggtggtgcgtggcgggcaggaacccacaattccaaatacaaacggtcggcgcgagaagcgcttctgggcgcaggcgcctggctg

SEQ ID NO: 507475 - DNA, 120 bp, Artificial Sequence
  ENSG00000164118_51 (sequence is synthesized)
ttgctctgcttgtattactcttcaaaatatttattcactggtactgaagagagacataactttgttgtcagaaattccattatcagaggtagaaatcatgtaagagacactgaaatgttt

SEQ ID NO: 507476 - DNA, 120 bp, Artificial Sequence
  ENSG00000164118_52 (sequence is synthesized)
ggaaaacaagcaagcattagcttttgttgtaaatattgctagcaagaaaaatagcaaacgcgaatcttagtctctcaaaattctttcataagtaaacagtacttaatgcaatgtttcaaa

SEQ ID NO: 507477 - DNA, 120 bp, Artificial Sequence
  ENSG00000164118_53 (sequence is synthesized)
ctgtgttttgtacattctcggtccatctttgatgatggtttactttgagaaatcatctaaatttgttgctttttaaattaaaggaaacaacaatccagaaaatggaaaggatgaaaaaaa

SEQ ID NO: 507478 - DNA, 120 bp, Artificial Sequence
  ENSG00000164118_54 (sequence is synthesized)
tgtaagtaacagaaaggggcaacagaaattcatttctctatagggaattgtattggattacagtatatatagaatgtgcatgtgtgtttcaaaccttaaaggtctctcaatcaggtgtgg

SEQ ID NO: 507479 - DNA, 120 bp, Artificial Sequence
  ENSG00000164118_55 (sequence is synthesized)
attcgctatagattccttgtttctcacttcgtagcacgagccactctgaccatcaagatcagaaaaacttctcagctgcaagttagaagtggactggccattgaggaggctctcagcgga

SEQ ID NO: 507480 - DNA, 120 bp, Artificial Sequence
  ENSG00000164120_0 (sequence is synthesized)
gagctcgcccaccgcccgccccagcagtggctgcaccatgcacgtgaacggcaaagtggcgctggtgaccggcgcggctcagggcataggcagagcctttgcagaggcgctgctgcttaa

SEQ ID NO: 507481 - DNA, 120 bp, Artificial Sequence
  ENSG00000164120_1 (sequence is synthesized)
gggcgccaaggtagcgctggtggattggaatcttgaagcaggtgtacagtgtaaagctgccctggatgagcagtttgaacctcagaagactctgttcatccagtgcgatgtggctgacca

SEQ ID NO: 507482 - DNA, 120 bp, Artificial Sequence
  ENSG00000164120_2 (sequence is synthesized)
gcaacaactgagagacacttttagaaaagttgtagaccactttggaagactggacattttggtcaataatgctggagtgaataatgagaaaaactgggaaaaaactctgcaaattaattt

SEQ ID NO: 507483 - DNA, 120 bp, Artificial Sequence
  ENSG00000164120_3 (sequence is synthesized)
ggtttctgttatcagtggaacctatcttggtttggattacatgagtaagcaaaatggaggtgaaggcggcatcattatcaatatgtcatctttagcaggactcatgcccgttgcacagca

SEQ ID NO: 507484 - DNA, 120 bp, Artificial Sequence
  ENSG00000164120_4 (sequence is synthesized)
gccggtttattgtgcttcaaagcatggcatagttggattcacacgctcagcagcgttggctgctaatcttatgaacagtggtgtgagactgaatgccatttgtccaggctttgttaacac

SEQ ID NO: 507485 - DNA, 120 bp, Artificial Sequence
  ENSG00000164120_5 (sequence is synthesized)
agccatccttgaatcaattgaaaaagaagaaaacatgggacaatatatagaatataaggatcatatcaaggatatgattaaatactatggaattttggacccaccattgattgccaatgg

SEQ ID NO: 507486 - DNA, 120 bp, Artificial Sequence
  ENSG00000164120_6 (sequence is synthesized)
attgataacactcattgaagatgatgctttaaatggtgctattatgaagatcacaacttctaagggaattcattttcaagactatgatacaactccatttcaagcaaaaacccaatgaac

SEQ ID NO: 507487 - DNA, 120 bp, Artificial Sequence
  ENSG00000164120_7 (sequence is synthesized)
agcttatgtgttagccatagctgaaaataagcacaaatagcttatattcagatcctatcttcatttgaatatagcttttaaatgaaatgttacagtttgaagttttccttcatgcacttg

SEQ ID NO: 507488 - DNA, 120 bp, Artificial Sequence
  ENSG00000164120_8 (sequence is synthesized)
gtgataaacgttttctaaatttttagttaagtatatggataaaaagttatgaactattaaaaatgtgatgtggaccaaaggctaggttgtaatcttgatagtctaaaaaatgatcaaaac

SEQ ID NO: 507489 - DNA, 120 bp, Artificial Sequence
  ENSG00000164120_9 (sequence is synthesized)
aaatgattttcaaggaatattcaatattctgcctttcagaaagtgtatttatatctgtgcttcataaatattaatgttcttcagaacatcattttaaaggagatacttgaattgttattt

SEQ ID NO: 507490 - DNA, 120 bp, Artificial Sequence
  ENSG00000164120_10 (sequence is synthesized)
atataccatctttcaactgaacatttcagttcttccaagagcttcttagagtagtatattttgggggcagtcaaggaataaactacagtgtaaacatatcccagatgaaaactgctgtat

SEQ ID NO: 507491 - DNA, 120 bp, Artificial Sequence
  ENSG00000164120_11 (sequence is synthesized)
ggaaaaatgacagaaagtaactgattgacactgttgattcacagttcagcctcctatctgggaaagacatttctttcctctgctcactttaagaacttttaccgactccaaaaatctcag

SEQ ID NO: 507492 - DNA, 120 bp, Artificial Sequence
  ENSG00000164120_12 (sequence is synthesized)
tcaggaattaaacttttaacagttacagcaataaagaatagttagtactccaaaaatattatatttaagatgctcaacaagaaaaaaatgcaaatgtaatatttttttcaaattacttct

SEQ ID NO: 507493 - DNA, 120 bp, Artificial Sequence
  ENSG00000164120_13 (sequence is synthesized)
tgacttgtccaaatttcaaaagtgcctacccttcaataaaacttttttattctgatctccataaattacttagtcttctatgtatagctatcaaggaaataaaaccaattttgccacagc

SEQ ID NO: 507494 - DNA, 120 bp, Artificial Sequence
  ENSG00000164120_14 (sequence is synthesized)
cacaactgtaaatgtttttgtacccatgctgaaactcataacaacacagacataaaaatagctgtgaggttttgctttttttgttgtcagctatcttaagaatcattaaatacacctgct

SEQ ID NO: 507495 - DNA, 120 bp, Artificial Sequence
  ENSG00000164120_15 (sequence is synthesized)
ttgggtaaaactctttgcaagcagtaattaacactagtaacagtgaaagcacaagatttccaaatcagtcgttttctcaaaaaaatatcgtataagtgactcatcctgtctgctaactcc

SEQ ID NO: 507496 - DNA, 120 bp, Artificial Sequence
  ENSG00000164120_16 (sequence is synthesized)
agacctcccagcttgaagccaaatctttccatgtgagattgatatggatttcctagaagtactggaatgttgtcatatcttgccctattttaattctgctatagaaaacaattgccttca

SEQ ID NO: 507497 - DNA, 120 bp, Artificial Sequence
  ENSG00000164120_17 (sequence is synthesized)
cttttaaggagtaatttgaatattaataactctggtctagattttcatataatgtattaaagacaaagtagtgaacatcaatgaacatctgatagagataaactgtaatcaggcataagc

SEQ ID NO: 507498 - DNA, 120 bp, Artificial Sequence
  ENSG00000164120_18 (sequence is synthesized)
ttgtttgtatgttctggcagtgactaatcagtaaatgatgtcggtttgcccagtatcacttatcttctgtatttttcctctgtcgtgtaaatagtataaccttttcatttatggacaatt

SEQ ID NO: 507499 - DNA, 120 bp, Artificial Sequence
  ENSG00000164120_19 (sequence is synthesized)
ttttggactagtagccttcaatatacattctgctttgaattaattttttcaaatcaataaattatgtagacatttaaaatcaaatatcaagtagaattgaaaaatgtgagttacataagt

SEQ ID NO: 507500 - DNA, 120 bp, Artificial Sequence
  ENSG00000164120_20 (sequence is synthesized)
taaaaacttactttaaatcttaccttctataggtagctctaaataaattcatatggttatatggcatctctggtgtatactgattgagaaaataattaaactgaagttaggggaggggga

SEQ ID NO: 507501 - DNA, 120 bp, Artificial Sequence
  ENSG00000164120_21 (sequence is synthesized)
gtatgcagacatttgaaaacctggctggcagaagttctgccgtcttcagcagggagctcccagggttactttagaactgctggattcctttttctctagcagaaagagaagaagaacatg

SEQ ID NO: 507502 - DNA, 120 bp, Artificial Sequence
  ENSG00000164120_22 (sequence is synthesized)
gaggaggcatggctactcttttaagaaccccagcccagtaatggcagaccttctgctcacatttcagtatagaacttgagctcatgtttcacctaactgtaagcgagtctgtctgggaaa

SEQ ID NO: 507503 - DNA, 120 bp, Artificial Sequence
  ENSG00000164120_23 (sequence is synthesized)
tgcagtctagctgtgtgcctaagagaagaatggatttcagagggcagctaatcatcttttccacagcatgcaatcctaaactatagtattttcagagtagtatgatttagtatcagctga

SEQ ID NO: 507504 - DNA, 120 bp, Artificial Sequence
  ENSG00000164120_24 (sequence is synthesized)
aatagttcaagtgaaattgtgaagtttaagaagtctgatcaacatggacagcaaatctaagctatcttgtccaaaaaagtgagactttaaaaaattatctgtttggttttagttaatgtg

SEQ ID NO: 507505 - DNA, 120 bp, Artificial Sequence
  ENSG00000164120_25 (sequence is synthesized)
gtgatttcagaatagaaatttcagccccacaccccaccccaaccttggcatctcagctccagtgatttgggaagttgggtttggaggtacctgtgattgaacctctgtctgattctcagc

SEQ ID NO: 507506 - DNA, 120 bp, Artificial Sequence
  ENSG00000164120_26 (sequence is synthesized)
atttgtctcatccctctaggaatgattatcaaatggttcttttatatcactgtaaagctgccaccagaggagatttagaaatctcctttagaagttctcaaaaatagactagcatctcat

SEQ ID NO: 507507 - DNA, 120 bp, Artificial Sequence
  ENSG00000164120_27 (sequence is synthesized)
tttctgggtcgcttaaagtcaaaatcatgtccctaaagctattacaaacctatttctataaatttttcagggtaatcagattctttttcctagtggtacaactacttataaattataaca

SEQ ID NO: 507508 - DNA, 120 bp, Artificial Sequence
  ENSG00000164120_28 (sequence is synthesized)
ttttaatcctaatgatactttaaaaggtgagcgcacgggcaatatttgaaaggggtatgtgttccagagagggccaaatgttaagctgtgggagactgaaaccctaaaagcaaattggca

SEQ ID NO: 507509 - DNA, 120 bp, Artificial Sequence
  ENSG00000164120_29 (sequence is synthesized)
aagctaaatctatactattttgaaataaaatcataagaaaaaaacaagtgactggagaattaaaaagagatatttagtattttcttaaaagtttaaatatttaaaaacctggggctgtga

SEQ ID NO: 507510 - DNA, 120 bp, Artificial Sequence
  ENSG00000164120_30 (sequence is synthesized)
tcaagattgataattctctgtattctttcataaagctaagagggtcagcaaagcttggagtaccatgaatattctacaaggagcccctggcctttatgtcactggaggcactgatttcat

SEQ ID NO: 507511 - DNA, 120 bp, Artificial Sequence
  ENSG00000164120_31 (sequence is synthesized)
tctttggaaggctgaaagcctcagagttggatcaatttaggacgatctgggagaaattctttaccataagagggtgcttccttgccccaaagagcatgaataaagaaatgcaatgtagaa

SEQ ID NO: 507512 - DNA, 120 bp, Artificial Sequence
  ENSG00000164120_32 (sequence is synthesized)
gctttattgtttgcttgttttgttccggagtcggggccgggagggagtgcaggaggagggatccaagcttccaagcctctgctccgctctccttctatccagttggtctttagggcactg

SEQ ID NO: 507513 - DNA, 120 bp, Artificial Sequence
  ENSG00000164120_33 (sequence is synthesized)
aaggaaactcttcttcagaaataaccttttaacttttcttctgtcagctgcctgccaatcacggagccagaggctgaggggaggctttgagccggtctgcgagtccggaaggcaaagatc

SEQ ID NO: 507514 - DNA, 120 bp, Artificial Sequence
  ENSG00000164120_34 (sequence is synthesized)
gcgaagcttggcgctccagaacgctcagggggcaggtgacacagtcgtgggttccccggcgggcgctggcttgacagtttcctccccgcccactggcaggggagcgccccgccgggctgc

SEQ ID NO: 507515 - DNA, 120 bp, Artificial Sequence
  ENSG00000164120_35 (sequence is synthesized)
gacagagcagagtccacttctcatctccagtatccgtaaaaatttgtccaaaatgtaactaagaaaacacaatgatattagttacttctgctccccgtcaccctcaaccccactgattac

SEQ ID NO: 507516 - DNA, 120 bp, Artificial Sequence
  ENSG00000164120_36 (sequence is synthesized)
aattctggacgacacgggtcatggagcaaataaactacacttaggctactgagtttcacaaagctatctggttttatgttactgtgttattcagattcatcttaaattgaaattatcaca

SEQ ID NO: 507517 - DNA, 120 bp, Artificial Sequence
  ENSG00000164120_37 (sequence is synthesized)
cggtttattgtgcttcaaagcatggcatagttggattcacacgctcagcagcggtgaggctacaacaaccgtcatatctcattttctctttgtacacatttataaaacatgaattctgta

SEQ ID NO: 507518 - DNA, 120 bp, Artificial Sequence
  ENSG00000164120_38 (sequence is synthesized)
gagaggaatcacttgagaaatcacttggatgaaaggtggaaaaatgacatacctccatctcaattataaaaagttatcagatcacataaagaaccaaataaataatagatcatttttaaa

SEQ ID NO: 507519 - DNA, 120 bp, Artificial Sequence
  ENSG00000164120_39 (sequence is synthesized)
atctatttaccagtcattgttacatagctgggaggatatctaattagtattttttacatcagaaaattgtaagatgctttaatgatcagtttgtcctgtgctatatgtttatgaaactgc

SEQ ID NO: 507520 - DNA, 120 bp, Artificial Sequence
  ENSG00000164120_40 (sequence is synthesized)
atttctctgcccacacactccgagactcgccccgccgcccgaggtgcactggcggagacagggaggccgcgcccggcgtgcccactttgccacttccaaaatttgctgaagctgaggctg

SEQ ID NO: 507521 - DNA, 120 bp, Artificial Sequence
  ENSG00000164120_41 (sequence is synthesized)
tgagcacacctcagaagtggctgggagggaacccaaacctaattgccaaatttcaggtccaggaggggagcctcttgtgtgtttattgtttgtccgtctatttcgtgagctgcgcaggcc

SEQ ID NO: 507522 - DNA, 120 bp, Artificial Sequence
  ENSG00000164120_42 (sequence is synthesized)
aatatgacacacaattgacactgaccagaaacacagcgccaaggacactctagtcctagccatgaaatgttatgattccaggttttcaggacagagcagagtccacttctcatctccagt

SEQ ID NO: 507523 - DNA, 120 bp, Artificial Sequence
  ENSG00000164120_43 (sequence is synthesized)
gcccgccccagcagtggctgcaccatgcacgtgaacggcaaagtggcgctggtgaccggcgcggctcagggcataggcagagcctttgcagaggcgctgctgcttaagggcgccaagaca

SEQ ID NO: 507524 - DNA, 120 bp, Artificial Sequence
  ENSG00000164122_0 (sequence is synthesized)
accagctgatattttctttcctcaggaccagctgttcaggagcatcccggacgagagccaggcacatttgagacttggatccaactaaagaccgccgcagattcttctgcagcaatgtcg

SEQ ID NO: 507525 - DNA, 120 bp, Artificial Sequence
  ENSG00000164122_1 (sequence is synthesized)
gtgttagaagaaaatcggccgtttgctcaacaattatccaatgtctactttacaatactttcgctgttctgttttaagctttttgtgaaaatcagccttgccatcctcagtcatttctac

SEQ ID NO: 507526 - DNA, 120 bp, Artificial Sequence
  ENSG00000164122_2 (sequence is synthesized)
atagtgaaaggcaaccgcaaggaagcggcaaggatagcagctgaattttatggagtaacccaaggacaaggttcctgggcagatcgatcaccactacatgaagcagcaagtcaaggtcgc

SEQ ID NO: 507527 - DNA, 120 bp, Artificial Sequence
  ENSG00000164122_3 (sequence is synthesized)
cttcttgctctgagaacattattatcacagggttataatgtaaatgcagtaaccttagaccatgtcaccccattgcacgaagcctgccttggagatcacgtggcatgtgccagaactctg

SEQ ID NO: 507528 - DNA, 120 bp, Artificial Sequence
  ENSG00000164122_4 (sequence is synthesized)
ctggaagcaggagctaatgtaaatgcaatcacgatagatggcgtgactccgttattcaacgcatgctcccaaggcagtccaagctgtgcagagctgcttctggagtatggtgccaaagcc

SEQ ID NO: 507529 - DNA, 120 bp, Artificial Sequence
  ENSG00000164122_5 (sequence is synthesized)
cagctggagtcatgtcttccatccccaacgcatgaggccgccagtaaaggtcaccatgaatgtcttgacatcctgatatcctggggcatagatgttgaccaagaaattcctcatttggga

SEQ ID NO: 507530 - DNA, 120 bp, Artificial Sequence
  ENSG00000164122_6 (sequence is synthesized)
actcctctctatgtagcttgtatgtcacagcaattccattgcatctggaagcttctttatgctggtgctgacgtacagaaaggcaaatattgggatactccattacatgctgctgctcaa

SEQ ID NO: 507531 - DNA, 120 bp, Artificial Sequence
  ENSG00000164122_7 (sequence is synthesized)
caatccagcacagaaattgtaaacttactgctagaatttggagcagatatcaatgccaaaaatacagagcttctgcgacctatagatgtagctacgtctagcagtatggtggaaaggata

SEQ ID NO: 507532 - DNA, 120 bp, Artificial Sequence
  ENSG00000164122_8 (sequence is synthesized)
ttgcttcaacatgaagctaccccaagctctctttaccaactttgccgactctgtatccgaagctacataggaaaaccaagattgcaccttatcccacaactccagctgccaacgttactg

SEQ ID NO: 507533 - DNA, 120 bp, Artificial Sequence
  ENSG00000164122_9 (sequence is synthesized)
aagaatttcttacagtatcgataaaacagtaaagtaattctaaataccttgaaaatcaaaatttctatttcttttgcttaaggaatagttcatataaaaatatgctaaagataggataaa

SEQ ID NO: 507534 - DNA, 120 bp, Artificial Sequence
  ENSG00000164122_10 (sequence is synthesized)
agtgagtgtgagatcacccagggaagcagtaaaatatcaattttcattttaagtgtattagtactattgttttatcatttatgctgtctttggattatagcatatttataatatctattt

SEQ ID NO: 507535 - DNA, 120 bp, Artificial Sequence
  ENSG00000164122_11 (sequence is synthesized)
tttgttatttcaatataccctcctgtttattcaggaaaaaataataaagtcactatcttatgttttcttttggattggaaagaaataaagctcctagtaaagttattcatattatattta

SEQ ID NO: 507536 - DNA, 120 bp, Artificial Sequence
  ENSG00000164122_12 (sequence is synthesized)
actttttaattttggctattgtaattggctaacttgttactgatattgacataaaatatgaatatggcttagcaaagagcaactaatatgttttctgaaaccaggatgatgctcattcag

SEQ ID NO: 507537 - DNA, 120 bp, Artificial Sequence
  ENSG00000164122_13 (sequence is synthesized)
gaaatccactatgttgaatgtccactggtcattagaatgaacacttcataaagataaattgcccccctctcccccacttacccctggcaaaggactcacaagtcacttctcttctccata

SEQ ID NO: 507538 - DNA, 120 bp, Artificial Sequence
  ENSG00000164122_14 (sequence is synthesized)
gtacatggacttgttacagaaaagtgataggatgaaaggtcaatactgccctctcaccctgagatatttagaacattacacaccttctaaggctatgttaagactgcctccttctcagga

SEQ ID NO: 507539 - DNA, 120 bp, Artificial Sequence
  ENSG00000164122_15 (sequence is synthesized)
gtagcccctgatgatctcttatcaaggcggttatatgcatattactccagccttcttccatttcagaaattgtcaatagctagtgatacttggacttaagaaaatgaactatatatctaa

SEQ ID NO: 507540 - DNA, 120 bp, Artificial Sequence
  ENSG00000164122_16 (sequence is synthesized)
ttaacaaacaggccctggatcatattccggggatcatcacatcagtccaaggatataaaaaaatggaagattaaaaactcaaattgtggagtttttaaagagtgggtgccacttaacaca

SEQ ID NO: 507541 - DNA, 120 bp, Artificial Sequence
  ENSG00000164122_17 (sequence is synthesized)
ttggagaccttaaaaaatgtatatagagaacttaatcgcactgtttctaattctttttacacaaaacaagggcttagagtatactgtatttgcaagtaatagcaagagagtattgtataa

SEQ ID NO: 507542 - DNA, 120 bp, Artificial Sequence
  ENSG00000164122_18 (sequence is synthesized)
aagaagatattactaagctagtcctctgcaagggtaaatactacgtttattctcttcagctttaactatacttgagtgcaataaaaaacttaataaaattttatgcctgttttgtaattc

SEQ ID NO: 507543 - DNA, 120 bp, Artificial Sequence
  ENSG00000164122_19 (sequence is synthesized)
agggcctattatgattttagaaataagataatcaacgtacaactctttgtaaaacaaaagcaactttgggtgagttttatagatttattaaattttgataaagtaaatattttgaccact

SEQ ID NO: 507544 - DNA, 120 bp, Artificial Sequence
  ENSG00000164122_20 (sequence is synthesized)
attttcaacaacccagggcttattttcttctgacttcttggctaacttccagactatgggaaaataaattatgattgtatgtgacccccagatcactaagcttgcattttggcagaaaga

SEQ ID NO: 507545 - DNA, 120 bp, Artificial Sequence
  ENSG00000164122_21 (sequence is synthesized)
aaaaaaatcagttgtgatttaaaacgtttgttgagattttcaaacatagaaataaagctgtagcatattcactaaacaatgttttatatgaggatagggacctttaaatatgtgttttat

SEQ ID NO: 507546 - DNA, 120 bp, Artificial Sequence
  ENSG00000164122_22 (sequence is synthesized)
agaatatctcacacatttgtaatggataacgtgcattaaaatggagttcttattatagaataacctggttaaacagatattaaagctgcttttgggtaaaacaggtttccaccagtattt

SEQ ID NO: 507547 - DNA, 120 bp, Artificial Sequence
  ENSG00000164122_23 (sequence is synthesized)
tccctgagctagaggagaagtcttagattttaagagtaatacaacccatctatcttattagtcttgtgccaataagagaagtaaatatcaaacattaaaatggtcactttacaatttcag

SEQ ID NO: 507548 - DNA, 120 bp, Artificial Sequence
  ENSG00000164122_24 (sequence is synthesized)
tatgtctgtaccttgtatcttagcttgagtatgattgtcttatcaaagtagtgttctaactttaatgtattgtatgtttgttattatattaaagtgtgattattattcattggaataaaa

SEQ ID NO: 507549 - DNA, 120 bp, Artificial Sequence
  ENSG00000164122_25 (sequence is synthesized)
aatgttgaagacatctcaagttagcacacaggaacctttgtgaaagtctgaagggaaggaaaaaatagttagaaatccagacgctgatatttcttcttgctagagcatttgcacttatga

SEQ ID NO: 507550 - DNA, 120 bp, Artificial Sequence
  ENSG00000164122_26 (sequence is synthesized)
cacctggttgtcacagacaaaaaacgtcaaccaaactatgtccgcagatattgctgttgaaatgaactgcattaagcaggtcctcacgaaaagaaggctagtgagtatagaggaatgttc

SEQ ID NO: 507551 - DNA, 120 bp, Artificial Sequence
  ENSG00000164122_27 (sequence is synthesized)
aatgctgaggttggtggacaaataaaggcttcactcgactttttattgatttgacattctggtactagataaaggaaagagcaaaacaaagtgcaggatcgagagaaaatcgattgcttg

SEQ ID NO: 507552 - DNA, 120 bp, Artificial Sequence
  ENSG00000164122_28 (sequence is synthesized)
aaaaactgggtattttacttgctgcaagtcccgactgtgtcagctgatgagtttaacactatgacagcacagtcctcacctgcctgctcgctgctgtaatccccacactgttgtgtgccc

SEQ ID NO: 507553 - DNA, 120 bp, Artificial Sequence
  ENSG00000164122_29 (sequence is synthesized)
agcacctggcacacgggaagcgctcaagagatgtgtgtgaatgaaggagccacatcttgacttgcgacgcggagcagtaagctgcagttatttggtagcggtggaagaataaattctacc

SEQ ID NO: 507554 - DNA, 120 bp, Artificial Sequence
  ENSG00000164122_30 (sequence is synthesized)
ccaatcagggagagcagagagtcccactaagactgcaggttggaataaagaacagcagggttcctgggcagatcgatcaccactacatgaagcagcaagtcaaggtcgccttcttgctct

SEQ ID NO: 507555 - DNA, 120 bp, Artificial Sequence
  ENSG00000164122_31 (sequence is synthesized)
acaaggagcttggagctccttaaaatggccgaacagaactggcaaatgacaagtgattttttcttttcttgctgataaaaaaaaaaaaaaattatgagtcggatttacctcgacagtggc

SEQ ID NO: 507556 - DNA, 120 bp, Artificial Sequence
  ENSG00000164122_32 (sequence is synthesized)
actcactatcactaggccaacagatttaggtactcatgtttaagtaaagtagaataaaaaataaaatggagcaagaactgggctcagatatgactcctaaaggttgtatgagggcacggc

SEQ ID NO: 507557 - DNA, 120 bp, Artificial Sequence
  ENSG00000164122_33 (sequence is synthesized)
cttgtaaagaaacccaaagcagcacagcctctgagaactgaataatggccccttccagatgcctctttgcaatggtggaaatttggcagtaacaggttcctgggcagatcgatcaccact

SEQ ID NO: 507558 - DNA, 120 bp, Artificial Sequence
  ENSG00000164123_0 (sequence is synthesized)
attagcaaccacctggtgcaggtcacaagcagggagaggaaagactgcagagtctttcgttctttctggtgcagcttaactgatttgaagaagccgaagaagaaaatccagtagcacggt

SEQ ID NO: 507559 - DNA, 120 bp, Artificial Sequence
  ENSG00000164123_1 (sequence is synthesized)
taagactttagccatggcatctgtatcataccaaaagccaacatctactactgtgggaaaacaaatgatttttacaggtccagactacataaaggattatttacccaaaattcatcagca

SEQ ID NO: 507560 - DNA, 120 bp, Artificial Sequence
  ENSG00000164123_2 (sequence is synthesized)
cacctcctatgtaggagaacagcatctggcgttagaaaaaactggagatctcagatatttatggaggcctgcctcaaatagaagcttgccagcaaaatataaacatgagtacgtcagtga

SEQ ID NO: 507561 - DNA, 120 bp, Artificial Sequence
  ENSG00000164123_3 (sequence is synthesized)
aattggttggagaataccacagtataattttatcaacaaatcaagactggggagtggctttcatatcaagtatgaagaactaagtcaagcttctcttgattcaataacccacagatatca

SEQ ID NO: 507562 - DNA, 120 bp, Artificial Sequence
  ENSG00000164123_4 (sequence is synthesized)
aaacccatggcaaccaaaacctcatgtcctggatatgcaaggaaaacagagtcgcgcttcttttgcctggcatatgagtgctttcgaggacactgatcagagaaattccaaatgggctat

SEQ ID NO: 507563 - DNA, 120 bp, Artificial Sequence
  ENSG00000164123_5 (sequence is synthesized)
accaaaaaaggaaaagaaaaggaaacattaacctctaaatcagcataactcaacctgcttttagaaggagaaactgcctactactgtataacaaaaaataagatcataataatccacaag

SEQ ID NO: 507564 - DNA, 120 bp, Artificial Sequence
  ENSG00000164123_6 (sequence is synthesized)
tgcttctcatattgccccaggacagatgtcttgcaagagtacgcttcagcttaaagcccaaataaacagtttggaaaaaaggtgttgtcagtctttgcaaccattaatattgtttcatga

SEQ ID NO: 507565 - DNA, 120 bp, Artificial Sequence
  ENSG00000164123_7 (sequence is synthesized)
aactaattgttattgactatcatactaatagtagctgtttactgagtgcttataacatctaacactattccaagtgctttacattcattctctaatataatttcataaccataggagata

SEQ ID NO: 507566 - DNA, 120 bp, Artificial Sequence
  ENSG00000164123_8 (sequence is synthesized)
ggttctattatttccccagctttgcagataaggaaattaaggctttgaaagagtacatggttaggaagtagcagaacttggatttgaccccaggttatggggctctaaagctaacatata

SEQ ID NO: 507567 - DNA, 120 bp, Artificial Sequence
  ENSG00000164123_9 (sequence is synthesized)
tggcttttaaagtattttataatattggcatggtgctttagcagtaaaaagcagttatatccctaattttcagaagattctcacagcacccttgttgaacaggtactatctttcttttac

SEQ ID NO: 507568 - DNA, 120 bp, Artificial Sequence
  ENSG00000164123_10 (sequence is synthesized)
ctccttgtcccttgtctagatcctagtcattctctacaacacagttcaaacatcgctgcctcaaggaaaccctgcctcaccacatcatcagccctcagcttccgtcccagccccggccaa

SEQ ID NO: 507569 - DNA, 120 bp, Artificial Sequence
  ENSG00000164123_11 (sequence is synthesized)
cacagtataattttatcaacaaatcaagactggggagtggctttcatatcaaggatgccaccactcagaagtagaacctcgattttcccagcatcctgaagactgcacataaaacaagca

SEQ ID NO: 507570 - DNA, 120 bp, Artificial Sequence
  ENSG00000164124_0 (sequence is synthesized)
gtagagggaatgagtcaggctccggctccacactggcacgtagtgggcggatcgcgccggcgctgagtaggaaggagcttcagccgccagcccggaacgcatcataggttagcttttcaa

SEQ ID NO: 507571 - DNA, 120 bp, Artificial Sequence
  ENSG00000164124_1 (sequence is synthesized)
gacacttcctgcatctctgacctgttgcacctctgttatcttggcacctctgttatcttagcagcaagcacctgcctcagctgacccttgagccataacccataagctcctgaaaagtac

SEQ ID NO: 507572 - DNA, 120 bp, Artificial Sequence
  ENSG00000164124_2 (sequence is synthesized)
atcaagtctaaagtgaaccagctaactcattaagactggaatcatgagcaacaatggagcagacctaacctttggttacatctcctgttttgtagctatccttttgtttggctcaaattt

SEQ ID NO: 507573 - DNA, 120 bp, Artificial Sequence
  ENSG00000164124_3 (sequence is synthesized)
tgtgccacttaaaaaatttgatactggtgatggaatgtttctccagtgggttctttgtgctgccatatggttggttgccttggttgtcaatctgatattacattgtccaaagttttggcc

SEQ ID NO: 507574 - DNA, 120 bp, Artificial Sequence
  ENSG00000164124_4 (sequence is synthesized)
ttttgcaatgcttgggggctgcatttgggcaacagggaacattgctgttgtcccaattatcaaaaccattggtttaggccttggaatcttaatctggggatcatttaatgccttaactgg

SEQ ID NO: 507575 - DNA, 120 bp, Artificial Sequence
  ENSG00000164124_5 (sequence is synthesized)
ctgggcaagctcaaggtttggctggtttggattggatgcagaagaagtatcaaatccgctgctaaattacattggagctgggctatcagtagtaagtgctttcatatttttgttcatcaa

SEQ ID NO: 507576 - DNA, 120 bp, Artificial Sequence
  ENSG00000164124_6 (sequence is synthesized)
aagtgaaataccaaataacacgtgttccatggataccactccattaataacagagcatgtgatcaacacaacccaagacccctgttcctgggtggataaactttctacagtacaccaccg

SEQ ID NO: 507577 - DNA, 120 bp, Artificial Sequence
  ENSG00000164124_7 (sequence is synthesized)
catagtgggctgcagtcttgcagtgatatctggagtactctatggatctacatttgtgccaatcatctacatcaaggaccacagcaaaagaaatgatagtatatatgcaggggcaagcca

SEQ ID NO: 507578 - DNA, 120 bp, Artificial Sequence
  ENSG00000164124_8 (sequence is synthesized)
atatgatttagactatgtgtttgcgcacttcagtggcatctttcttacaagtactgtctactttctggcctactgcatagccatgaaaaatagtcctaaactatatcctgaagcagtcct

SEQ ID NO: 507579 - DNA, 120 bp, Artificial Sequence
  ENSG00000164124_9 (sequence is synthesized)
accaggattcctgtcaggagtactttgggctatagctacctgctgttggttcatagcaaatcactctctgagtgctgtggtcagttttccaataatcactgctggtccaggatttatagc

SEQ ID NO: 507580 - DNA, 120 bp, Artificial Sequence
  ENSG00000164124_10 (sequence is synthesized)
tgcaatgtggggtatcttcatgtttaaggaaataaagggtctacaaaactacctattaatgatacttgcattttgcatcatcttgactggagccttatgcactgctttttctaaaatcta

SEQ ID NO: 507581 - DNA, 120 bp, Artificial Sequence
  ENSG00000164124_11 (sequence is synthesized)
acaatgacaaaaccagcaggtggcagcagtagttaagagaacgcgtctatcggacagcggagagatcatgctgagaaaagagtgcattttcatatagcaaatggatctcagccactgttg

SEQ ID NO: 507582 - DNA, 120 bp, Artificial Sequence
  ENSG00000164124_12 (sequence is synthesized)
gagtgggtaaatgatttttttccccaaaaatgtgagaatgaaggaagattgagtttcattcaagtataaaaatgaaaatttcttctgatgaactgtttatgaaggtagtactttactggg

SEQ ID NO: 507583 - DNA, 120 bp, Artificial Sequence
  ENSG00000164124_13 (sequence is synthesized)
gtatagagtccatatacaaagaagttacagtccatatttctcacctattaccccagtgaagtgaggcagaaataccttgggcgaggagggagagccttaccttctaatggaattagattc

SEQ ID NO: 507584 - DNA, 120 bp, Artificial Sequence
  ENSG00000164124_14 (sequence is synthesized)
caaagatatttggatcctttgtttcataaagtaaatgcatagttggtaactaaatgttaaaaaggccattttattattgttagccaaaacttctgtttatttcaagttaatatcgcccaa

SEQ ID NO: 507585 - DNA, 120 bp, Artificial Sequence
  ENSG00000164124_15 (sequence is synthesized)
ctctacatcatctacccattttagctcataatgcttttgattatcgccagataaagtccattctcagagaacaaaaatttttcatcattgagaaaatgtgcataacataatacatacata

SEQ ID NO: 507586 - DNA, 120 bp, Artificial Sequence
  ENSG00000164124_16 (sequence is synthesized)
cacaagtatattcacgtacataaatacacacagatatgttgctaaagtgagattgtaggttatcagtaacaatttaaaggaaacaaccactcttttgaatgtacaacttttttttctgaa

SEQ ID NO: 507587 - DNA, 120 bp, Artificial Sequence
  ENSG00000164124_17 (sequence is synthesized)
atacacttttctaaaaccctcttaactggaggtttcctgttttcttcttgttttaactggtggtttccagtaggcaaaataaaatgacaggcatgctagttttttttttttttttttttt

SEQ ID NO: 507588 - DNA, 120 bp, Artificial Sequence
  ENSG00000164124_18 (sequence is synthesized)
tttaagaaaactgaaattaagccaggcagggtggcgcactactataatcccagctgctggggcggctgaagtaggagggtcacttagcccaagagtgcaaatctgccagcctaggcaaca

SEQ ID NO: 507589 - DNA, 120 bp, Artificial Sequence
  ENSG00000164124_19 (sequence is synthesized)
tagcaaggtcccatctctaaaaaagaaatttaatttaaatttgtaagaaaaaagaaaactgaaacagaactgccagtacaatgtttgttgcaattgtttccaaaactttgagataacgaa

SEQ ID NO: 507590 - DNA, 120 bp, Artificial Sequence
  ENSG00000164124_20 (sequence is synthesized)
acccctattcaaatgtaaattttacccattcccacctgatagtactgtttattactttgctatgcaggagaaacaaaacagctttttatttgtgtgtatactctgaagtcaatgtgcatg

SEQ ID NO: 507591 - DNA, 120 bp, Artificial Sequence
  ENSG00000164124_21 (sequence is synthesized)
ggttaaatcccacctctgcttcattttatttgtgtggctttggacaagttcctaagccctctgtgtcaggcccctcattaacaaaatggagtttatgatggcatctacctcacatggtta

SEQ ID NO: 507592 - DNA, 120 bp, Artificial Sequence
  ENSG00000164124_22 (sequence is synthesized)
ttgtgtggttgaaattagttcaaatctgtaaagtatgttgatgagtatctggtacttggcaaacactatataattgttagctttattattatgtgttgtttgaaggggaaaaaagttttt

SEQ ID NO: 507593 - DNA, 120 bp, Artificial Sequence
  ENSG00000164124_23 (sequence is synthesized)
gtagattggagaacaccatgtaagagctactaagctcaccaccttcccatccaaacaattattactcctctaaatgaatactacttaaaagtgatggagcttctgtttgtttattgaatt

SEQ ID NO: 507594 - DNA, 120 bp, Artificial Sequence
  ENSG00000164124_24 (sequence is synthesized)
gctaatacaaataaatatttgactataacttcttatactcattttaattttaacctgaaatgtcattaaattatgctgataaactttgaataaattgtgatacaaaagctatttttctca

SEQ ID NO: 507595 - DNA, 80 bp, Artificial Sequence
  ENSG00000164124_25 (sequence is synthesized)
ttattctttagttgggatttccaatttatatgcaaaattttaaatgtgaagtaaagcagtttcagaagaaaaatgaaaaa

SEQ ID NO: 507596 - DNA, 120 bp, Artificial Sequence
  ENSG00000164124_26 (sequence is synthesized)
gtcgaaatgcacctcatgcactctaattagcacgtcaaattagtctctccgtttcagaggtgtagggcctttgtggagccttctcaataaaataatttgccactcttgaaggttagacat

SEQ ID NO: 507597 - DNA, 120 bp, Artificial Sequence
  ENSG00000164124_27 (sequence is synthesized)
tctcttctatcaatgtacacataaaggttttgttttgctttgcttgttgtgaattaaaatggggagaaaatgatgtgttagctatcacccagtcatgtgtctttttagtcataggttagc

SEQ ID NO: 507598 - DNA, 120 bp, Artificial Sequence
  ENSG00000164124_28 (sequence is synthesized)
agtgacattccatgagacaagcagtcctgtggtgaggcccatgtcaagaaggcctgagatctcccaccatcagctacagccaatttgtcagtcacagatcctcaaaatgagcagcagata

SEQ ID NO: 507599 - DNA, 120 bp, Artificial Sequence
  ENSG00000164124_29 (sequence is synthesized)
cgtagagggaatgagtcaggctccggctccacactggcacgtagtgggcggatcgcgccggcgctgagtaggaaggagcttcagccgccagcccggaacgcagtgagtacagccactcaa

SEQ ID NO: 507600 - DNA, 120 bp, Artificial Sequence
  ENSG00000164124_30 (sequence is synthesized)
aggaaagccaagtcgctttgcaggggagcgtctcatgatttttcagaaacgtgctcatggttaaaaagaaaaatcaaggctcggaataaatacattcaagcactgttaattttagcccaa

SEQ ID NO: 507601 - DNA, 120 bp, Artificial Sequence
  ENSG00000164124_31 (sequence is synthesized)
agacaggcggtacttgcctggagatttgggaaaatcaacatgaaactaaaaatgaaattttagttggagtggagcaagcagtattgatcagaacataccaaatacgaattttttcaaagt

SEQ ID NO: 507602 - DNA, 120 bp, Artificial Sequence
  ENSG00000164124_32 (sequence is synthesized)
ctgcgtagaagtttaaattactaggaaaaatgtaaaggagaagtatttactaataaatgaaacaaaagtaataaaataaaaatgaattaatatagtttgacaaaatatcagcgaacgctg

SEQ ID NO: 507603 - DNA, 120 bp, Artificial Sequence
  ENSG00000164124_33 (sequence is synthesized)
aaaagaaaacattaaaataatgtttgagactttttaggttttgtgcaggaagaattgggaaaaatgtgctggatggagtgatactgcttttcttttccacaaaaatttcattattttaga

SEQ ID NO: 507604 - DNA, 120 bp, Artificial Sequence
  ENSG00000164124_34 (sequence is synthesized)
gagcggtagagcctttttaaagacagtaagttattgccaattcacaatgaaataagatcacatgctctgaaatgtacaagagctgcatgcaataaacttcatttatctataggtaataac

SEQ ID NO: 507605 - DNA, 120 bp, Artificial Sequence
  ENSG00000164124_35 (sequence is synthesized)
cataacccatgtaagtcactgcagggctgaacctctctttgagcctaacagtagaataataattatttttattgaatagtgttaatgtgtcaatgttgaaatgtgcctcagtgtgtcttc

SEQ ID NO: 507606 - DNA, 120 bp, Artificial Sequence
  ENSG00000164124_36 (sequence is synthesized)
ctcaaccacatccctatagaggatgttttcttaatagcaatgtgtttttgttttaagaaagtccacacaatttcaaatacacattttctttactaaagtttattgaccagttttgaagtg

SEQ ID NO: 507607 - DNA, 120 bp, Artificial Sequence
  ENSG00000164124_37 (sequence is synthesized)
atccttgttttcagttaaactatctttaataatggtaaataacatattttgtaggttgttgtatatttaatattctctgcaagaacacataaggaacaatacatggacctttaaatattt

SEQ ID NO: 507608 - DNA, 120 bp, Artificial Sequence
  ENSG00000164124_38 (sequence is synthesized)
gtcattgtgaaataaaataacaaggaaaggtgatttcaggtgtactttattcaatacatatatacaagaagttattactataacattaaatttgcaggaaaaaagaaaccactggattat

SEQ ID NO: 507609 - DNA, 120 bp, Artificial Sequence
  ENSG00000164124_39 (sequence is synthesized)
tctgcttctattccagagggcttattccaaagggccagtgtgcaaaatatgaatccaagatggcattgtggaaagacgctgtacctcctgtgataaaattactttggtggtgcttttttc

SEQ ID NO: 507610 - DNA, 120 bp, Artificial Sequence
  ENSG00000164124_40 (sequence is synthesized)
ccatggataccactccattaataacagagcatgtgagtatagtatgagagacaacttgatttgaaacataaaattaagataaatggataatacataaattttaaacacagatgaaaaagt

SEQ ID NO: 507611 - DNA, 120 bp, Artificial Sequence
  ENSG00000164124_41 (sequence is synthesized)
ggtgtttgctcatcactcctggctatgtaaaatatcttagcttatttattatgggtaggtctatgtagcaatcaatcaatatttccgcagttgagcttctcagcaagcacacgggtttat

SEQ ID NO: 507612 - DNA, 120 bp, Artificial Sequence
  ENSG00000164124_42 (sequence is synthesized)
ttattttgattaacagatctctactaggtgatatatatataaccccatttttgtaatgatttaaagattcctacaatagaggaaccctaaatactgtagaggaatgtgaaaataacttta

SEQ ID NO: 507613 - DNA, 120 bp, Artificial Sequence
  ENSG00000164124_43 (sequence is synthesized)
gaaagtcagaggaaggaggttttgaagttggtccaggggagaatagaccataggaggccaagaaaggtaagtgaagtcctatgagaataggaactggtatcccattctacccgaagtgaa

SEQ ID NO: 507614 - DNA, 120 bp, Artificial Sequence
  ENSG00000164124_44 (sequence is synthesized)
aaacagaaaatatgataggagtcactgttttgatcttgaagaatctaaatcagtctggaatagtaaatctgaatgaaacaggagcaacttttaaaagggacctgataaagcgcaagtgtc

SEQ ID NO: 507615 - DNA, 120 bp, Artificial Sequence
  ENSG00000164124_45 (sequence is synthesized)
agtagctacatatacaaaagtgacttcagggcaaagcctcattgtcatgaacccaggctctaatccttctcatctcaagaaatctctcctgtctgccctgggccagtgctatccagctgc

SEQ ID NO: 507616 - DNA, 120 bp, Artificial Sequence
  ENSG00000164124_46 (sequence is synthesized)
cctctgaatccagcgctcctcacccccagtggggtattgccccttggcagggtgcttatttaccccttacttcaaaattaatcttttctcctttccttcttcccctatccaaacttttat

SEQ ID NO: 507617 - DNA, 120 bp, Artificial Sequence
  ENSG00000164124_47 (sequence is synthesized)
caactaaaaccttagttaaattgacactaaagttgaatagtaattagcttaagtgtaaagagaagaggtttattaatccacaggcatctctaatcagggaaatgtttcagggagaaggga

SEQ ID NO: 507618 - DNA, 120 bp, Artificial Sequence
  ENSG00000164124_48 (sequence is synthesized)
ggagttggctttgggaaagggttccttgcctgcttcagggatccagacacctcctgcccaaccatcctccaaaacaatggaacaaaataataaaataaatgcagcttggtaaaagataca

SEQ ID NO: 507619 - DNA, 120 bp, Artificial Sequence
  ENSG00000164124_49 (sequence is synthesized)
cagtaggctaactgcctgagatttttctaggcaataagtttaaagatccataaacagcatgattgatgggtacagaaccatgcatcatgagctccttatgatgaaagaaaccgttattgc

SEQ ID NO: 507620 - DNA, 120 bp, Artificial Sequence
  ENSG00000164124_50 (sequence is synthesized)
caaaggaaaacttgacttagcacatgacaaagaattcaaatctactttcttgtctcttacaaaaataataggattataacatcaagaacacttcagttggccaggcgtgatggctcatgc

SEQ ID NO: 507621 - DNA, 120 bp, Artificial Sequence
  ENSG00000164124_51 (sequence is synthesized)
ttttgagccacctgacaattcagtccagcacagcaactgaaggaaggcgttccccaacctgctgtcctatgaaggcctctaggtcaccggtgctaaagccctcctttctccaccctcctt

SEQ ID NO: 507622 - DNA, 120 bp, Artificial Sequence
  ENSG00000164124_52 (sequence is synthesized)
aagtggaggtaaacgtcccagcaggaagtcaaggctggattggcgctcttcgcgagcaccctgggaacgggagtctgggtcacgggtgctagagccctcccctctcctcccggccggtgt

SEQ ID NO: 507623 - DNA, 65 bp, Artificial Sequence
  ENSG00000164124_53 (sequence is synthesized)
caagaccagcctgtccaacatggtgaaactctatctctactaagaatacaaaaaaaaaaaaaatg

SEQ ID NO: 507624 - DNA, 85 bp, Artificial Sequence
  ENSG00000164124_54 (sequence is synthesized)
gaccaaaaaaacacttcggctatagtattataatataccccccttatccacagggaatatgttccaagacacccaaggaatgcct

SEQ ID NO: 507625 - DNA, 120 bp, Artificial Sequence
  ENSG00000164124_55 (sequence is synthesized)
atccacagggaatatgttccaagacacccaaggaatgcctgaaaccacagatagtaccaaacctatatatagtatgtctttgtatctgatcactaagacagctactaagtgactcggggg

SEQ ID NO: 507626 - DNA, 120 bp, Artificial Sequence
  ENSG00000164124_56 (sequence is synthesized)
caggcagtgtatacgatatgaataggctggacatagggatcattcacgttccaggtgagatggagaaggacgatgcagggtttcatcacactattcagaacagtgtgaaattgaaaactt

SEQ ID NO: 507627 - DNA, 120 bp, Artificial Sequence
  ENSG00000164124_57 (sequence is synthesized)
atgaattattcatttccagaatttttcatttaatgtctttggactactgttgacagtgagtaactgaaaccacagaaagtgaaagtacagataagggaggggtactgtaattccatagta

SEQ ID NO: 507628 - DNA, 120 bp, Artificial Sequence
  ENSG00000164124_58 (sequence is synthesized)
gaaatatgaatttgctcataatttttcctggcttagaatatcagcctaatattgaaacatggcttggaatgttttattaactaatttagtaaaaaaaacaaatcagtataagaaatgctc

SEQ ID NO: 507629 - DNA, 120 bp, Artificial Sequence
  ENSG00000164124_59 (sequence is synthesized)
attgatcttaagcattccataggaggagagtctaatttccttacagattatgcagaccattaaaatatgcaaatgaaacatgagataataagttttattagtttttataggtgtatcaca

SEQ ID NO: 507630 - DNA, 120 bp, Artificial Sequence
  ENSG00000164124_60 (sequence is synthesized)
atagccacatattaaatgtgagaatttgaaatggaagacttgccaactgccaagtcatcctaaatgaaagaggaaacaattagaaacagttgagtttagagatatcagaatgcataggtg

SEQ ID NO: 507631 - DNA, 120 bp, Artificial Sequence
  ENSG00000164124_61 (sequence is synthesized)
acatgtttattatattttaaagcatgtttgaaagagaagagaaaagcactagaaatattgtcaccagtgtgattatcaattgaatgttcttttgttttaatttgggccaatgttttcaat

SEQ ID NO: 507632 - DNA, 120 bp, Artificial Sequence
  ENSG00000164124_62 (sequence is synthesized)
aaggagaggttacttctttgctctattactctgtttcatatttggttaaagcagggattaccagcatgaagtaatgttcatctgagttcaagaagaaaattgtaatgcaagctttgactt

SEQ ID NO: 507633 - DNA, 120 bp, Artificial Sequence
  ENSG00000164124_63 (sequence is synthesized)
gtagagggaatgagtcaggctccggctccacactggcacgtagtgggcggatcgcgccggcgctgagtaggaaggagcttcagccgccagcccggaacgcacagcaagcacctgcctcag

SEQ ID NO: 507634 - DNA, 120 bp, Artificial Sequence
  ENSG00000164124_64 (sequence is synthesized)
taaatcatgttgatcttgatacctagtgaatagagcttaaaattagtcatttgacagtgctcataccagtttgtctgaaagtcagaataggagaaccattaaggttgtttcatggtaaag

SEQ ID NO: 507635 - DNA, 120 bp, Artificial Sequence
  ENSG00000164124_65 (sequence is synthesized)
ttagggagggtacagtcaggaaatctcttgggccattatatgaatggaagaaatttatagtcagttctactataacacctgttttgaaaacatgaatcttcaacatgattgatatattag

SEQ ID NO: 507636 - DNA, 120 bp, Artificial Sequence
  ENSG00000164124_66 (sequence is synthesized)
acagaagactgcacctagatgaataaagatgtgtgataatacacataatgcacgcagacacacgtacaatcttcaaatatcgaccagctcccttagttcatcacatgtggttatgatgta

SEQ ID NO: 507637 - DNA, 120 bp, Artificial Sequence
  ENSG00000164124_67 (sequence is synthesized)
ttccacccaaccacatctcctgtcccaactcctcacccaataccttcacagtaactcgtaagctgcaaccctttggatgctcacttccaggagcaaacttctggtgtttttcaattaaaa

SEQ ID NO: 507638 - DNA, 120 bp, Artificial Sequence
  ENSG00000164124_68 (sequence is synthesized)
tgccctatttattacagcatcatgtaattaaccagttaaccagttaaaactgtactactattttaattaggttgagtgttgttctcctagccccattttcccattatgctctgtagtttt

SEQ ID NO: 507639 - DNA, 120 bp, Artificial Sequence
  ENSG00000164124_69 (sequence is synthesized)
tactgcatgattttgcatagtgcagtgatttcaaggaatgcacatgttacattatagcagaactgactaatgtgaattttggggaaggagaagcaagagttatttgtatttgcctgactt

SEQ ID NO: 507640 - DNA, 120 bp, Artificial Sequence
  ENSG00000164124_70 (sequence is synthesized)
ccatattaaagccaggagaaggaattgagatttatggtgaacacatgttgggaattacttccttggtagtatttatcacctgacagcagttgtgttatttccccaattctttgtcttcgt

SEQ ID NO: 507641 - DNA, 120 bp, Artificial Sequence
  ENSG00000164124_71 (sequence is synthesized)
gcacttagaaaataggattacctcctattttcctccagggcctttcttctcttttcctctggagttaggacaagaatgggaactacccgaagaacaaaaaaatgggtagaggatctagct

SEQ ID NO: 507642 - DNA, 120 bp, Artificial Sequence
  ENSG00000164124_72 (sequence is synthesized)
tttttagtcttccacaattagctttgtgatcctgggcaaatattaccagctctgctgttttcagtttctcatttgtaaagtgaacaacttataaaatgaagtttcttttcatctctgtga

SEQ ID NO: 507643 - DNA, 120 bp, Artificial Sequence
  ENSG00000164124_73 (sequence is synthesized)
atgagacaagcagtcctgtggtgaggcccatgtcaagaaggcctgagatctcccaccatcagctacagccaatttgtcagtcactcatcatttctcattatacacagagatcctcaaaat

SEQ ID NO: 507644 - DNA, 120 bp, Artificial Sequence
  ENSG00000164124_74 (sequence is synthesized)
acgtagagggaatgagtcaggctccggctccacactggcacgtagtgggcggatcgcgccggcgctgagtaggaaggagcttcagccgccagcccggaacgcaaagctcctgaaaagtac

SEQ ID NO: 507645 - DNA, 120 bp, Artificial Sequence
  ENSG00000164124_75 (sequence is synthesized)
tagtcctgatgccactttaatactgcagggtatttctgtgacttccgccagtcacagagcttgagataaatggatggtttttgcttgtttgtgatttgccttttgaagcatgtttatgat

SEQ ID NO: 507646 - DNA, 120 bp, Artificial Sequence
  ENSG00000164125_0 (sequence is synthesized)
ctcgatcttttgaacttcatgagactgacatttctgagtctgtttgcgaacaggacactagagggctcccaggggttaaaaataagtggaaatttatttgaatgaaaactgattctctac

SEQ ID NO: 507647 - DNA, 120 bp, Artificial Sequence
  ENSG00000164125_1 (sequence is synthesized)
ggcatttcttttttccgaatttaaaattaaagtttattttgttaactattgtttttaaaagctttgtatctcttaaaaccatgcagcagtcagtttccaagttttgctttgcaatcagta

SEQ ID NO: 507648 - DNA, 120 bp, Artificial Sequence
  ENSG00000164125_2 (sequence is synthesized)
gttttcaagggagcttttaaagctgaactgaaatgtttgaaatgtggaacactcttgaccatgaaatatgttctacttacatgcctcagcctttaaaagttctttgcattagagtcaagg

SEQ ID NO: 507649 - DNA, 120 bp, Artificial Sequence
  ENSG00000164125_3 (sequence is synthesized)
attacattcttcctggagccaagcatggggccagctgtaaacaagccgcatttctccttggggagactgataatttaaaaggtttgttgtgtcagaaacattcccagcttcatcaccaac

SEQ ID NO: 507650 - DNA, 120 bp, Artificial Sequence
  ENSG00000164125_4 (sequence is synthesized)
cctttccttccacctctgcccactggagaccacttatatcccgaagcggacgcggcagctgaagtcaggaaaccatgcatcacattagcaggagccaactgcagactttaaactccgttc

SEQ ID NO: 507651 - DNA, 120 bp, Artificial Sequence
  ENSG00000164125_5 (sequence is synthesized)
aacatgtggatgcggcagagaaatgacctgtccagacaagccggggcagctcataaactggttcatctgctccctgtgcgtcccgcgggtgcgtaagctctggagcagccggcgtccaag

SEQ ID NO: 507652 - DNA, 120 bp, Artificial Sequence
  ENSG00000164125_6 (sequence is synthesized)
gacccggagaaaccttctgctgggcactgcgtgtgccatctacttgggcttcctggtgagccaggtggggagggcctctctccagcatggacaggcggctgagaaggggccacatcgcag

SEQ ID NO: 507653 - DNA, 120 bp, Artificial Sequence
  ENSG00000164125_7 (sequence is synthesized)
ccgcgacaccgccgagccatccttccctgagatacccctggatggtaccctggcccctccagagtcccagggcaatgggtccactctgcagcccaatgtggtgtacattaccctacgctc

SEQ ID NO: 507654 - DNA, 120 bp, Artificial Sequence
  ENSG00000164125_8 (sequence is synthesized)
caagcgcagcaagccggccaatatccgtggcaccgtgaagcccaagcgcaggaaaaagcatgcagtggcatcggctgccccagggcaggaggctttggtcggaccatcccttcagccgca

SEQ ID NO: 507655 - DNA, 120 bp, Artificial Sequence
  ENSG00000164125_9 (sequence is synthesized)
ggaagcggcaagggaagctgatgctgtagcacctgggtacgctcagggagcaaacctggttaagattggagagcgaccctggaggttggtgcggggtccgggagtgcgagccgggggccc

SEQ ID NO: 507656 - DNA, 120 bp, Artificial Sequence
  ENSG00000164125_10 (sequence is synthesized)
agacttcctgcagcccagctccagggagagcaacattaggatctacagcgagagcgccccctcctggctgagcaaagatgacatccgaagaatgcgactcttggcggacagcgcagtggc

SEQ ID NO: 507657 - DNA, 120 bp, Artificial Sequence
  ENSG00000164125_11 (sequence is synthesized)
agggctccggcctgtgtcctctaggagcggagcccgtttgctggtgctggaggggggcgcacctggcgctgtgctccgctgtggccctagcccctgtgggcttctcaagcagcccttgga

SEQ ID NO: 507658 - DNA, 120 bp, Artificial Sequence
  ENSG00000164125_12 (sequence is synthesized)
catgagtgaggtgtttgccttccacctagacaggatcctggggctcaacaggaccctgccgtctgtgagcaggaaagcagagttcatccaagatggccgcccatgccccatcattctttg

SEQ ID NO: 507659 - DNA, 120 bp, Artificial Sequence
  ENSG00000164125_13 (sequence is synthesized)
ggatgcatctttatcttcagcaagtaatgacacccattcttctgttaagctcacctggggaacttatcagcagttgctgaaacagaaatgctggcagaatggccgagtacccaagcctga

SEQ ID NO: 507660 - DNA, 120 bp, Artificial Sequence
  ENSG00000164125_14 (sequence is synthesized)
atcgggttgtactgaaatacatcatcatgagtggtccaagatggcactctttgattttttgttacagatttataatcgcttagatacaaattgctgtggattcagacctcgcaaggaaga

SEQ ID NO: 507661 - DNA, 120 bp, Artificial Sequence
  ENSG00000164125_15 (sequence is synthesized)
tgcctgtgtacagaatggattgaggccaaaatgtgatgaccaaggttctgcggctctagcacacattatccagcgaaagcatgacccaaggcatttggtttttatagacaacaagggttt

SEQ ID NO: 507662 - DNA, 120 bp, Artificial Sequence
  ENSG00000164125_16 (sequence is synthesized)
ctttgacaggagtgaagataacttaaacttcaaattgttagaaggcatcaaagagtttccagcttctgcagtttctgttttgaagagccagcacttacggcagaaacttcttcagtctct

SEQ ID NO: 507663 - DNA, 120 bp, Artificial Sequence
  ENSG00000164125_17 (sequence is synthesized)
gtttcttgataaagtgtattgggaaagtcaaggaggtagacaaggaattgaaaagcttatcgatgtaatagaacacagagccaaaattcttatcacctatatcaatgcacacggggtcaa

SEQ ID NO: 507664 - DNA, 120 bp, Artificial Sequence
  ENSG00000164125_18 (sequence is synthesized)
agtattacctatgaatgaatgacaaaagaatcttctggctagggtgttagatatatttatgcatttttggttttgtttttaaatcaagcacatcaacctcaagcccgtttagcaatgagg

SEQ ID NO: 507665 - DNA, 120 bp, Artificial Sequence
  ENSG00000164125_19 (sequence is synthesized)
cagtgtagatgaatacgtaaaataaatgactttaaccaagtagctataatgggacttagcactgtatgcatacttaaaaaggttttgaaaaacaaactacttgagaaatatttgtttata

SEQ ID NO: 507666 - DNA, 120 bp, Artificial Sequence
  ENSG00000164125_20 (sequence is synthesized)
ctagctaagttttgaaaacatttgtcatgctgtttaatagaaaactgcaaaccagagacactgactccattaataaaccatattttgtgccgttttgactgttctgaccaaatactaatg

SEQ ID NO: 507667 - DNA, 120 bp, Artificial Sequence
  ENSG00000164125_21 (sequence is synthesized)
ggaacaattcttgacgtttttctgttgctgattgttaacatagagcagtctctacactaccctgaggcaactctacattggaacactgaggcttacagcctgcaagagcatcagagctga

SEQ ID NO: 507668 - DNA, 120 bp, Artificial Sequence
  ENSG00000164125_22 (sequence is synthesized)
ccatacatttaaacagaaatgctggtttatttgcaaaatcaccagtatattttctattgtgtctataaaaaatcagtcatttaagtacaagaatcatattttccattcctttttagaaat

SEQ ID NO: 507669 - DNA, 120 bp, Artificial Sequence
  ENSG00000164125_23 (sequence is synthesized)
ttattttgttgtccctatggaaatcattcacatctgacaatttatatgttaaagagttttactctctctattttggtccaatttgtatctagtggctgagaaattaaataattctaaagt

SEQ ID NO: 507670 - DNA, 120 bp, Artificial Sequence
  ENSG00000164125_24 (sequence is synthesized)
tgagaaattaaataattctaaagtatgaagttacctatctgaaaatgtacttacagagtatcattttaaaatggatgtctctttaaaaattttgttacttttaccaacaatgtaatataa

SEQ ID NO: 507671 - DNA, 120 bp, Artificial Sequence
  ENSG00000164125_25 (sequence is synthesized)
gtgaattccttaaaatttgttctatgtacttatatttaatttgatttaatggttactgcccagatattgagaattggttcaaatattgagtgtgtttcaatatattatctggcttatttc

SEQ ID NO: 507672 - DNA, 120 bp, Artificial Sequence
  ENSG00000164125_26 (sequence is synthesized)
aacatgagtaatatgagcaaaataagttaaaacctgcgtctgatcaattttcctcatgactagaactaaaacagtaaatttggacaatattaagcctcaaataatcatctccaaactcct

SEQ ID NO: 507673 - DNA, 120 bp, Artificial Sequence
  ENSG00000164125_27 (sequence is synthesized)
tctaacactttttaaatcagattggaagacatggacaaatcaggttcatgtgttgcatctttatgtcctttgccaatatccaagatcatcacatatggtagatattcacatggagtttca

SEQ ID NO: 507674 - DNA, 120 bp, Artificial Sequence
  ENSG00000164125_28 (sequence is synthesized)
aattcagaatagattaccattaccttcctgcccttacacatcctactccttatttaaaagttctatttgtgacttttcatttcctgaaagtttaaaaatacaatttgagaatgtttataa

SEQ ID NO: 507675 - DNA, 120 bp, Artificial Sequence
  ENSG00000164125_29 (sequence is synthesized)
tacattctctcctgtcttttcacggttacgtctgttattgctgaaatacaccacattttctttgttctggtcaaggttaactcaatatctgtgtgaaagagaactactaacaacgttaca

SEQ ID NO: 507676 - DNA, 120 bp, Artificial Sequence
  ENSG00000164125_30 (sequence is synthesized)
atagaggctagatttgaaaaaaaaaatctatagatctaattgatacaattgtagaacaaaatgtcaaaataatgttttaagtataagagaagatggaccaaggagagagagatcatttga

SEQ ID NO: 507677 - DNA, 120 bp, Artificial Sequence
  ENSG00000164125_31 (sequence is synthesized)
aaatctaattgtagcttttctaggctcacattcatgtactacttttagcacccttatgggctgtgctcgccccctggacagttgagctttggattatcttcctcttcaattttccctcta

SEQ ID NO: 507678 - DNA, 120 bp, Artificial Sequence
  ENSG00000164125_32 (sequence is synthesized)
ttgacccgagtgtctccctctgcttctacagatttatagtactccttggctcttttgagtctccacttttactcactgtctctgggatttttaagatccttttcttctcttataaatcat

SEQ ID NO: 507679 - DNA, 120 bp, Artificial Sequence
  ENSG00000164125_33 (sequence is synthesized)
cctcttaatgaaaattagcctaacaaaagtttggagactggaatcctactttgagccactgacttgaaataactcttttggcaagttgcctgacatcctgtcttaccaaggtggcatatt

SEQ ID NO: 507680 - DNA, 120 bp, Artificial Sequence
  ENSG00000164125_34 (sequence is synthesized)
tgcatttttactgcttaaaacatttttttttttttaccatctttatccaaatttatcatattgatggtaggactaacaggctttttagaagctggctttaactttgagtctcaagctaca

SEQ ID NO: 507681 - DNA, 120 bp, Artificial Sequence
  ENSG00000164125_35 (sequence is synthesized)
atgctgttgggcagcctggtcttcccacgtgagggtttaactttgtttatttgcctccagttattccaaaatgcttattaaatgaaagtcccaggaacatgtttattttagtcacctttg

SEQ ID NO: 507682 - DNA, 120 bp, Artificial Sequence
  ENSG00000164125_36 (sequence is synthesized)
ctttttaacaattttgttttgtaatcaatgagtaattcatgatgaattatttttgactaatggatagccgaaggccaggcttttaattctaataggtaatgttcttcttttgtcttattg

SEQ ID NO: 507683 - DNA, 120 bp, Artificial Sequence
  ENSG00000164125_37 (sequence is synthesized)
aaacaatgagaatactctgtgcatttcaaatgcactccgattatgctgtggttttattcacataagcacaatatgtgttttatttataacttcataacaaacttataatataataattta

SEQ ID NO: 507684 - DNA, 120 bp, Artificial Sequence
  ENSG00000164125_38 (sequence is synthesized)
ccttagcagacatgcaaaagcttattcttgtgtgacttactttctttaagctaataatataaaaataaatatgtatcttaaaaatctataataaaacattagaaattaaagatatgtgct

SEQ ID NO: 507685 - DNA, 120 bp, Artificial Sequence
  ENSG00000164125_39 (sequence is synthesized)
ttttattttgcagatgagttcatttgcttttgtagatgtgttttcagagctaggtacagaggaatgtttgctacctttagcggtgaaaaaagaaagagagtcaagaattttgttggattg

SEQ ID NO: 507686 - DNA, 120 bp, Artificial Sequence
  ENSG00000164125_40 (sequence is synthesized)
tgtttgtgtgtgcatatatttgatatcatcattatatttgtaatctttggacttgtaatcatagcctgtttattctactgtgccattaaatatactttaccttatacataacgaataaaa

SEQ ID NO: 507687 - DNA, 120 bp, Artificial Sequence
  ENSG00000164125_41 (sequence is synthesized)
gtgaactgttgcaccgtgcaattgcacactataaatgtctttccttatctgtgtgtactcttatctcactgttctattttttctcctcatttatattaactctttcttacctttttttct

SEQ ID NO: 507688 - DNA, 120 bp, Artificial Sequence
  ENSG00000164125_42 (sequence is synthesized)
tagatttatttacacactgtcttatgaaattcttatgtttatgtcagcacagaacaagcacacatttagagcattcatctgaaaattatatggaaattgaacatgggtcaaataaagatg

SEQ ID NO: 507689 - DNA, 120 bp, Artificial Sequence
  ENSG00000164125_43 (sequence is synthesized)
cagcagcagcgtgtctttccatgcgcttggcattctttattttcccagcctgggaggatatgagagttccagggaaatgctgtattggacatgcaagactcacctggggaacttatcagc

SEQ ID NO: 507690 - DNA, 120 bp, Artificial Sequence
  ENSG00000164125_44 (sequence is synthesized)
aattcacatgaacacccacatatcttttaaaacccgctttctcaccactgtgacagaattttatctcttcacttgttgagatttctctagagagtccagtactgcatcattttgacaaac

SEQ ID NO: 507691 - DNA, 120 bp, Artificial Sequence
  ENSG00000164125_45 (sequence is synthesized)
attcacatgcttcgttatttgcagctgttggggattctggttcattttcttttttccctcactctctttttctaaatgatttttctccacccacggttcacatttggacagcagcagcag

SEQ ID NO: 507692 - DNA, 120 bp, Artificial Sequence
  ENSG00000164125_46 (sequence is synthesized)
cagcgtgtctttccatgcgcttggcattctttattttcccagcctgggaggatatgagagttccagggaaatgctgtattggacatgcaagagtaagcccatactgtataatctttgctc

SEQ ID NO: 507693 - DNA, 120 bp, Artificial Sequence
  ENSG00000164125_47 (sequence is synthesized)
tccatttccctcgcttcacttcccagtggcttattaaatctaattaaagccaacggcaatttgcatgatgaggagaggaagctaggctggaggcaaagaacttgctgacagtcaggcata

SEQ ID NO: 507694 - DNA, 120 bp, Artificial Sequence
  ENSG00000164125_48 (sequence is synthesized)
ttcttgagcagatggaatcttcttaagccgcgcagagccagaccatgttaggtttaaccccccctttttttttcaatggatttaacctctttatttaacaaataaaaagaatgagcaaaa

SEQ ID NO: 507695 - DNA, 120 bp, Artificial Sequence
  ENSG00000164125_49 (sequence is synthesized)
attggtgatttgttcagtatgtatactaactagctgtgtggttttatcaagcccctgactatgatctattgagtctgtctttcaagattctcccgtcttgggtgacaaacattttggcag

SEQ ID NO: 507696 - DNA, 120 bp, Artificial Sequence
  ENSG00000164125_50 (sequence is synthesized)
gttctaacacatgtagccagttactgcagttgccagcaaaaggactggtctgcggtcatgcccatgccatataaaggatattctctgaatattaaagctattccagggctcgaatacaaa

SEQ ID NO: 507697 - DNA, 120 bp, Artificial Sequence
  ENSG00000164125_51 (sequence is synthesized)
gtacagtgagtcagtggcttatgtttgaatgcagaatgatgccagaagttacaactttgaatccagattggcccaagaggctaaaatgtaccccaaagagattataagctgaaaggatac

SEQ ID NO: 507698 - DNA, 120 bp, Artificial Sequence
  ENSG00000164125_52 (sequence is synthesized)
ttaactttctccatgttaccatgaaatttagcatttcagtgaggttcccagggagcctagaatggaatggattaaaatccctgggagtggctgagacccaactgcatttccaatggcttt

SEQ ID NO: 507699 - DNA, 120 bp, Artificial Sequence
  ENSG00000164125_53 (sequence is synthesized)
agcattataatttcattttaaaatggatacccctggaagtaccagtgatttacttagaaaaattggacattccctactgatggtggttcttgtctaagtgctccagattcacaggtatgc

SEQ ID NO: 507700 - DNA, 120 bp, Artificial Sequence
  ENSG00000164125_54 (sequence is synthesized)
tttgatgtctcaagtttataaagcagtccaccacagttatgccaatgtaagaaaccttctcaaacatttaatctaatgttgataaaaatgaatttttattgggtgcccacaatttgctaa

SEQ ID NO: 507701 - DNA, 120 bp, Artificial Sequence
  ENSG00000164125_55 (sequence is synthesized)
ggattatacaaattgattcatatgtgttggctcctagaattttcataacaatgctatgaagtggggactattattatttccatttagtagatgagaaaattgaggcttattgagacaaag

SEQ ID NO: 507702 - DNA, 120 bp, Artificial Sequence
  ENSG00000164125_56 (sequence is synthesized)
taattggcctcaactcccacagctagtaggtggctaagctgggttttgactatagacccagcaaacttcagaacataacttcttagccactggacttaggtgaatatgtaacttattatc

SEQ ID NO: 507703 - DNA, 120 bp, Artificial Sequence
  ENSG00000164125_57 (sequence is synthesized)
caaactggaaccgtgtggcgtgaaaggagatgctggtgggcattgggacaacaggcccacactgactgttctgagcagagtagagcacaggatcccccttgttatgctgaaatcccattc

SEQ ID NO: 507704 - DNA, 120 bp, Artificial Sequence
  ENSG00000164125_58 (sequence is synthesized)
attttcatgtcataaaggccccagagaggagaagatgaactcctgtgtatatcctgaggcagagttctctgatatgtcctttgagcttcccttagacgctcttagactactgtattggga

SEQ ID NO: 507705 - DNA, 120 bp, Artificial Sequence
  ENSG00000164125_59 (sequence is synthesized)
gaatgcagtagtggctaagagcctgggccgtggagttggactgactaggtttgaacttaccaatcatacgacttggaaatgttgccatgtctctttatgcctcagtttcctcagctgtaa

SEQ ID NO: 507706 - DNA, 120 bp, Artificial Sequence
  ENSG00000164125_60 (sequence is synthesized)
aatgacaatactgcctaccatatgagattgttgttagttaatacagggaaaacacttagaaccagtatttgccacaagataaaccttcaataaatattggttattattattattattgta

SEQ ID NO: 507707 - DNA, 120 bp, Artificial Sequence
  ENSG00000164125_61 (sequence is synthesized)
ccaagcacatgaggtaccaagttcattgaattcctcacataatctccaagtctcatgtgttacttcgttacgtgataggactatgactaaaactgctcaattaaacttttgtaatcccaa

SEQ ID NO: 507708 - DNA, 120 bp, Artificial Sequence
  ENSG00000164125_62 (sequence is synthesized)
attgtaaaatatagtatttttaggattatacaccatatgctaatcttttacccactcttcagtatcacaactttctttctctgtggggaggaaaaatccctgtcccctttctgtcttctt

SEQ ID NO: 507709 - DNA, 120 bp, Artificial Sequence
  ENSG00000164125_63 (sequence is synthesized)
gccttttgattctatttgccatagtctaattgacaccccaaggtcatcagcccctgcctttgtgctaggacacgcaaaccacccaggccaatccctaacctgttttttcaaaaaacctcc

SEQ ID NO: 507710 - DNA, 120 bp, Artificial Sequence
  ENSG00000164128_0 (sequence is synthesized)
aatctttaggatctgagcaggagaaataccagcggatcttccccactctgctcccttccattcccacccttccttctttaataagcaggagcgaaaaagacaaattccaaagaggattgt

SEQ ID NO: 507711 - DNA, 120 bp, Artificial Sequence
  ENSG00000164128_1 (sequence is synthesized)
tcagttcaagggaatgaagaattcagaataattttggtaaatggattccaatatggggaataagaataagctgaacagttgacctgctttgaagaaacatactgtccatttgtctaaaat

SEQ ID NO: 507712 - DNA, 120 bp, Artificial Sequence
  ENSG00000164128_2 (sequence is synthesized)
aatctataacaaccaaaccaatcaaaatgaattcaacattattttcccaggttgaaaatcattcagtccactctaatttctcagagaagaatgcccagcttctggcttttgaaaatgatg

SEQ ID NO: 507713 - DNA, 120 bp, Artificial Sequence
  ENSG00000164128_3 (sequence is synthesized)
attgtcatctgcccttggccatgatatttaccttagctcttgcttatggagctgtgatcattcttggtgtctctggaaacctggccttgatcataatcatcttgaaacaaaaggagatga

SEQ ID NO: 507714 - DNA, 120 bp, Artificial Sequence
  ENSG00000164128_4 (sequence is synthesized)
gaaatgttaccaacatcctgattgtgaacctttccttctcagacttgcttgttgccatcatgtgtctcccctttacatttgtctacacattaatggaccactgggtctttggtgaggcga

SEQ ID NO: 507715 - DNA, 120 bp, Artificial Sequence
  ENSG00000164128_5 (sequence is synthesized)
tgtgtaagttgaatccttttgtgcaatgtgtttcaatcactgtgtccattttctctctggttctcattgctgtggaacgacatcagctgataatcaaccctcgagggtggagaccaaata

SEQ ID NO: 507716 - DNA, 120 bp, Artificial Sequence
  ENSG00000164128_6 (sequence is synthesized)
atagacatgcttatgtaggtattgctgtgatttgggtccttgctgtggcttcttctttgcctttcctgatctaccaagtaatgactgatgagccgttccaaaatgtaacacttgatgcgt

SEQ ID NO: 507717 - DNA, 120 bp, Artificial Sequence
  ENSG00000164128_7 (sequence is synthesized)
acaaagacaaatacgtgtgctttgatcaatttccatcggactctcataggttgtcttataccactctcctcttggtgctgcagtattttggtccactttgttttatatttatttgctact

SEQ ID NO: 507718 - DNA, 120 bp, Artificial Sequence
  ENSG00000164128_8 (sequence is synthesized)
tcaagatatatatacgcctaaaaaggagaaacaacatgatggacaagatgagagacaataagtacaggtccagtgaaaccaaaagaatcaatatcatgctgctctccattgtggtagcat

SEQ ID NO: 507719 - DNA, 120 bp, Artificial Sequence
  ENSG00000164128_9 (sequence is synthesized)
ttgcagtctgctggctccctcttaccatctttaacactgtgtttgattggaatcatcagatcattgctacctgcaaccacaatctgttattcctgctctgccacctcacagcaatgatat

SEQ ID NO: 507720 - DNA, 120 bp, Artificial Sequence
  ENSG00000164128_10 (sequence is synthesized)
ccacttgtgtcaaccccatattttatgggttcctgaacaaaaacttccagagagacttgcagttcttcttcaacttttgtgatttccggtctcgggatgatgattatgaaacaatagcca

SEQ ID NO: 507721 - DNA, 120 bp, Artificial Sequence
  ENSG00000164128_11 (sequence is synthesized)
tccacgatgcacacagatgtttccaaaacttctttgaagcaagcaagcccagtcgcatttaaaaaaatcaacaacaatgatgataatgaaaaaatctgaaactacttatagcctatggtc

SEQ ID NO: 507722 - DNA, 120 bp, Artificial Sequence
  ENSG00000164128_12 (sequence is synthesized)
ccggatgacatctgtttaaaaacaagcacaacctgcaacatactttgattacctgttctcccaaggaatggggttgaaatcatttgaaaatgactaagattttcttgtcttgctttttac

SEQ ID NO: 507723 - DNA, 120 bp, Artificial Sequence
  ENSG00000164128_13 (sequence is synthesized)
tgcttttgttgtagttgtcataattacatttggaacaaaaggtgtgggctttggggtcttctggaaatagttttgaccagacatctttgaagtgctttttgtgaatttatgcatataata

SEQ ID NO: 507724 - DNA, 120 bp, Artificial Sequence
  ENSG00000164128_14 (sequence is synthesized)
taaagacttttatactgtacttattggaatgaaatttctttaaagtattactattaactgacttcagaagtacctgccatccaatacggtcattagattgggtcatcttgattagattag

SEQ ID NO: 507725 - DNA, 120 bp, Artificial Sequence
  ENSG00000164128_15 (sequence is synthesized)
attagattagattgtcaacagattgggccatccttactttatgataggcatcattttagtgtgttacaatagtaacagtatgcaaaagcagcattcaggagccgaaagatagtctgaagt

SEQ ID NO: 507726 - DNA, 120 bp, Artificial Sequence
  ENSG00000164128_16 (sequence is synthesized)
cattcagaagtggtttgaggtttctgttttttggtggtttttgtttgttttttttttttttcaccttaagggaggatttaatttgctcccaactgattgtcacttaaatgaaaatttaaa

SEQ ID NO: 507727 - DNA, 120 bp, Artificial Sequence
  ENSG00000164128_17 (sequence is synthesized)
aatgaataaaaagacatacttctcagctgcaaatattatggagaattggggcacccacaggaatgaagagagaaagcagctccctaacttcaaaaccattttggtacctgacaacaagag

SEQ ID NO: 507728 - DNA, 120 bp, Artificial Sequence
  ENSG00000164128_18 (sequence is synthesized)
cattttagagtaattaatttaataaagtaaattagtattgctgcaaatagttaaattatatttatttgaattgatggtcaagagattttccattttttttacagactgttcagtgtttgt

SEQ ID NO: 507729 - DNA, 120 bp, Artificial Sequence
  ENSG00000164128_19 (sequence is synthesized)
caagctttctggcataaatatgtactcaaaaggcatttccgcttacaatttgtagaaacacaaaatgcgttttccatacagcagtgcctatatagtgactgatttttaactttcaatgtc

SEQ ID NO: 507730 - DNA, 120 bp, Artificial Sequence
  ENSG00000164128_20 (sequence is synthesized)
catctttcaaaggaagtaacaccaaggtacaatgttaaaggaatattcactttacctagcagggaaaaatacacaaaaactgcagatacttcatatagcccattttaacttgtataaact

SEQ ID NO: 507731 - DNA, 120 bp, Artificial Sequence
  ENSG00000164128_21 (sequence is synthesized)
gtgtgacttgtggcgtcttataaataatgcactgtaaagattactgaatagttgtgtcatgttaatgtgcctaatttcatgtatcttgtaatcatgattgagcctcagaatcatttggag

SEQ ID NO: 507732 - DNA, 120 bp, Artificial Sequence
  ENSG00000164128_22 (sequence is synthesized)
aaactatattttaaagaacaagacatacttcaatgtattatacagataaagtattacatgtgtttgattttaaaagggcggacattttattaaaatcaatattgtttttgctttttctga

SEQ ID NO: 507733 - DNA, 120 bp, Artificial Sequence
  ENSG00000164128_23 (sequence is synthesized)
gaaaagcagtagctgtttgttctcgaccctgggccggctctctggcgaagcaagcgagggagcagaaagctaacccgaccaggttccccacccaggactagaccgagtgctcttccgtga

SEQ ID NO: 507734 - DNA, 120 bp, Artificial Sequence
  ENSG00000164128_24 (sequence is synthesized)
ctactactttattagtctttattgtcttaaggcagcagtctgttgaacaagccctccccagcaaggaaggagcagagaattatgtaattcatttagataagctagcagtaactttgggag

SEQ ID NO: 507735 - DNA, 120 bp, Artificial Sequence
  ENSG00000164128_25 (sequence is synthesized)
gctgtatgtaacaaggctgacatttcttttccaacacaagtgaggtgaacagccagccaatcctgagtatttgaaaaaatgtatctgcagcaggttatgatcagggagctgtattttcaa

SEQ ID NO: 507736 - DNA, 120 bp, Artificial Sequence
  ENSG00000164128_26 (sequence is synthesized)
ttgcattcggactgcaaaattctgctgaaagagccttaggctattttccatggtctaaggtaaaatcgttttggctttggtccaacacaacgcctcagttcctttaaaagattaactaaa

SEQ ID NO: 507737 - DNA, 120 bp, Artificial Sequence
  ENSG00000164128_27 (sequence is synthesized)
ggtctgtgaacttggaaaaaagaattcccgtttctggaattcgagttctatggatgtttgttattgctcgcatttgttatatgaagacacctcgcaaacaggagcgcaaaccttagagcg

SEQ ID NO: 507738 - DNA, 120 bp, Artificial Sequence
  ENSG00000164128_28 (sequence is synthesized)
cagctgcctcccgggctcgggtcagcgctggaccgcgcggcagctggacggcctgagtggcgccccgcgggctgcgcccccggcctcgccagagacccgctagggttgagccctgacccg

SEQ ID NO: 507739 - DNA, 120 bp, Artificial Sequence
  ENSG00000164128_29 (sequence is synthesized)
tgccagccgggctgcagccagagcgcgtccagccgggggcagcgctttgtccatcccccgccccatccccaggaggctccttcgcggatccccgacactctcctcccgggttcggcccgc

SEQ ID NO: 507740 - DNA, 120 bp, Artificial Sequence
  ENSG00000164128_30 (sequence is synthesized)
attattgtggcgaatttcatgtttcccagcgagccctttgattcctggtttgggctggcgctcgagctctccagccgggtatgacttcggccacaagatggcactgacctgcaaacaaag

SEQ ID NO: 507741 - DNA, 120 bp, Artificial Sequence
  ENSG00000164128_31 (sequence is synthesized)
tcagttcaagggaatgaagaattcagaataattttgacttgcttgttgccatcatgtgtctcccctttacatttgtctacacattaatggaccactgggtctttggtgaggcgatgtgtt

SEQ ID NO: 507742 - DNA, 120 bp, Artificial Sequence
  ENSG00000164129_0 (sequence is synthesized)
gtcctgctcccgctgctgccgccaccgccggggtgcaggagcgatcgcgctgggccgcgctcccgggagcccagggcctgcagcggccggggcgccccgaggtctgctcattgtgttttt

SEQ ID NO: 507743 - DNA, 120 bp, Artificial Sequence
  ENSG00000164129_1 (sequence is synthesized)
gtgtttttcaggaaaaaggaagggaaagggtgttacaaggaaaggctatcggtaacaactgacctgccacaaagttagaagaaaggattgattcaagaaagactataatatggatttaga

SEQ ID NO: 507744 - DNA, 120 bp, Artificial Sequence
  ENSG00000164129_2 (sequence is synthesized)
gctcgacgagtattataacaagacacttgccacagagaataatactgctgccactcggaattctgatttcccagtctgggatgactataaaagcagtgtagatgacttacagtattttct

SEQ ID NO: 507745 - DNA, 120 bp, Artificial Sequence
  ENSG00000164129_3 (sequence is synthesized)
gattgggctctatacatttgtaagtcttcttggctttatggggaatctacttattttaatggctctcatgaaaaagcgtaatcagaagactacggtaaacttcctcataggcaatctggc

SEQ ID NO: 507746 - DNA, 120 bp, Artificial Sequence
  ENSG00000164129_4 (sequence is synthesized)
cttttctgatatcttggttgtgctgttttgctcacctttcacactgacgtctgtcttgctggatcagtggatgtttggcaaagtcatgtgccatattatgccttttcttcaatgtgtgtc

SEQ ID NO: 507747 - DNA, 120 bp, Artificial Sequence
  ENSG00000164129_5 (sequence is synthesized)
agttttggtttcaactttaattttaatatcaattgccattgtcaggtatcatatgataaaacatcccatatctaataatttaacagcaaaccatggctactttctgatagctactgtctg

SEQ ID NO: 507748 - DNA, 120 bp, Artificial Sequence
  ENSG00000164129_6 (sequence is synthesized)
gacactaggttttgccatctgttctccccttccagtgtttcacagtcttgtggaacttcaagaaacatttggttcagcattgctgagcagcaggtatttatgtgttgagtcatggccatc

SEQ ID NO: 507749 - DNA, 120 bp, Artificial Sequence
  ENSG00000164129_7 (sequence is synthesized)
ctgcagaagtataagctgtggattgtccaacaaagaaaacagacttgaagaaaatgagatgatcaacttaactcttcatccatccaaaaagagtgggcctcaggtgaaactctctggcag

SEQ ID NO: 507750 - DNA, 120 bp, Artificial Sequence
  ENSG00000164129_8 (sequence is synthesized)
ccataaatggagttattcattcatcaaaaaacacagaagaagatatagcaagaagacagcatgtgtgttacctgctccagaaagaccttctcaagagaaccactccagaatacttccaga

SEQ ID NO: 507751 - DNA, 120 bp, Artificial Sequence
  ENSG00000164129_9 (sequence is synthesized)
aaactttggctctgtaagaagtcagctctcttcatccagtaagttcataccaggggtccccacttgctttgagataaaacctgaagaaaattcagatgttcatgaattgagagtaaaacg

SEQ ID NO: 507752 - DNA, 120 bp, Artificial Sequence
  ENSG00000164129_10 (sequence is synthesized)
ttctgttacaagaataaaaaagagatctcgaagtgttttctacagactgaccatactgatattagtatttgctgttagttggatgccactacaccttttccatgtggtaactgattttaa

SEQ ID NO: 507753 - DNA, 120 bp, Artificial Sequence
  ENSG00000164129_11 (sequence is synthesized)
tgacaatcttatttcaaataggcatttcaagttggtgtattgcatttgtcatttgttgggcatgatgtcctgttgtcttaatccaattctatatgggtttcttaataatgggattaaagc

SEQ ID NO: 507754 - DNA, 120 bp, Artificial Sequence
  ENSG00000164129_12 (sequence is synthesized)
tgatttagtgtcccttatacactgtcttcatatgtaataattctcactgtttaccaaggaaagaacaaatgctggggtcatataaaatatatttatgataactatttacatataataaat

SEQ ID NO: 507755 - DNA, 120 bp, Artificial Sequence
  ENSG00000164129_13 (sequence is synthesized)
agaaattttgttaacatggaatttaatttatgtgaaagagttctggattcaaatgtcagttcataatatatggaagataattttatgtgttatagtaggattaatttatttagttgtgca

SEQ ID NO: 507756 - DNA, 120 bp, Artificial Sequence
  ENSG00000164129_14 (sequence is synthesized)
gtcagtgtcaatccaatctgtaatttcactttagaaggttgtattaccttccacttccatgttgtcttataaacaaatgaattgtattttttgttgaaagtaaaagttatatctaaccaa

SEQ ID NO: 507757 - DNA, 120 bp, Artificial Sequence
  ENSG00000164129_15 (sequence is synthesized)
ccctgggagcccgcacccgtctctggtgccagggcgttgtcgggggtcccaagagagcggggtggggaaggtgaagggagcgcggctggaaaaatggggattagggtggcggaacaggca

SEQ ID NO: 507758 - DNA, 120 bp, Artificial Sequence
  ENSG00000164129_16 (sequence is synthesized)
cttgtcaggagtgaagagacagcggagagggtactgggctgaattctttcgtgccgagcaggtccctccggttcccaactcacccgggtggagcaggcgcgggccgaacccgggaggaga

SEQ ID NO: 507759 - DNA, 120 bp, Artificial Sequence
  ENSG00000164129_17 (sequence is synthesized)
gtgtcggggatccgcgaaggagcctcctggggatggggcgggggatggacaaagcgctgcccccggctggacgcgctctggctgcagcccggctggcatccggagctgggaacagcagcc

SEQ ID NO: 507760 - DNA, 120 bp, Artificial Sequence
  ENSG00000164129_18 (sequence is synthesized)
gctcaaccctagcgggtctctggcgaggccgggggcgcagcccgcggggcgccactcaggccgtccagctgccgcgcggtccagcgctgacccgagcccgggaggcagctgcgctctaag

SEQ ID NO: 507761 - DNA, 120 bp, Artificial Sequence
  ENSG00000164129_19 (sequence is synthesized)
ggaggcagctgcgctctaaggtttgcgctcctgtttgcgaggtgtcttcatataacaaatgcgagcaataacaaacatccatagaactcgaattccagaaacgggaattcttttttccaa

SEQ ID NO: 507762 - DNA, 120 bp, Artificial Sequence
  ENSG00000164129_20 (sequence is synthesized)
gttcacagacctttagttaatcttttaaaggaactgaggcgttgtgttggaccaaagccaaaacgattttaccttagaccatggaaaatagcctaaggctctttcagcagaattttgcag

SEQ ID NO: 507763 - DNA, 120 bp, Artificial Sequence
  ENSG00000164129_21 (sequence is synthesized)
tccgaatgcaattttagatttcagatttctcaagggaagagaaactctgctgttagaatttggaagggagggtggtgcatgcctgtgtgtttgtcagctgagcagagctgtatttatctt

SEQ ID NO: 507764 - DNA, 120 bp, Artificial Sequence
  ENSG00000164129_22 (sequence is synthesized)
tccaattcaaattgtgccagattctggctttaagaacaaaccatgggaatatttgagaacatggaatcatgctgctgttccacgatcacagcaaaacagacaatagttgatattgtatca

SEQ ID NO: 507765 - DNA, 120 bp, Artificial Sequence
  ENSG00000164129_23 (sequence is synthesized)
ttgcaggaggaaaaagaattacatatattttattcttttgtgtgattgtcatcctttgtgaaaagaatgatgtgtattttcataaagcaaaaaattattcaaacaaagaaaccttattta

SEQ ID NO: 507766 - DNA, 120 bp, Artificial Sequence
  ENSG00000164129_24 (sequence is synthesized)
aatgtacaagtcagacttttaatatcctttgaattccctgcagttcctcctattattcttgagaactatctactttcttaaaatacttaaaatctattcagaaggtttcatttgtctagg

SEQ ID NO: 507767 - DNA, 120 bp, Artificial Sequence
  ENSG00000164129_25 (sequence is synthesized)
tgtcagatatagaagagtttataagaaaattccagtaaacctttaaaaagatattattttttataagttgccatagtttaataaagaacttttatttttcacactttttactcagagatt

SEQ ID NO: 507768 - DNA, 120 bp, Artificial Sequence
  ENSG00000164134_0 (sequence is synthesized)
ggctgcctctgtcggtctgttcagttaccacgtgaaccgccgacggagacccgtagtgggggaggcggcggcagcgttaagtgagaaaggaaaaaagacaacgaggaaaaaggaggtgtc

SEQ ID NO: 507769 - DNA, 120 bp, Artificial Sequence
  ENSG00000164134_1 (sequence is synthesized)
cgggtagggcaacgcggcgacacccgaggcctggtggtggcggcggatcgagatattcaaggctgaagcagctacggaacggcagcggcggcggtcggacaaactgactgaccgagccgg

SEQ ID NO: 507770 - DNA, 120 bp, Artificial Sequence
  ENSG00000164134_2 (sequence is synthesized)
gtggtggcgggagcagcgggagcagccggaacgatgccggccgtgagcctcccgcccaaggagaatgcgctcttcaagcggatcttgaggtgttatgaacataaacagtatagaaatgga

SEQ ID NO: 507771 - DNA, 120 bp, Artificial Sequence
  ENSG00000164134_3 (sequence is synthesized)
ttgaaattctgtaaacaaatactttctaatcccaaatttgcagagcatggagaaaccttggctatgaaaggattaacattgaactgtttggggaaaaaggaagaagcttatgaattggtt

SEQ ID NO: 507772 - DNA, 120 bp, Artificial Sequence
  ENSG00000164134_4 (sequence is synthesized)
cgtagaggtttgagaaatgacttgaagagtcatgtgtgttggcacgtttatggccttcttcagaggtcagacaagaagtatgatgaagccattaagtgttacagaaatgcactaaaatgg

SEQ ID NO: 507773 - DNA, 120 bp, Artificial Sequence
  ENSG00000164134_5 (sequence is synthesized)
gataaagacaatcttcaaatcttaagggacctttccttactacagattcaaatgcgagatcttgagggttacagggaaacgaggtatcagttacttcagcttcgacctgcgcagagagca

SEQ ID NO: 507774 - DNA, 120 bp, Artificial Sequence
  ENSG00000164134_6 (sequence is synthesized)
tcatggattggttatgctattgcttaccatttattagaagattatgaaatggcagcaaagattttagaagaatttaggaaaacacaacagacatcccctgacaaggtggattatgaatat

SEQ ID NO: 507775 - DNA, 120 bp, Artificial Sequence
  ENSG00000164134_7 (sequence is synthesized)
agtgaactactcttatatcagaatcaagttcttcgggaagcaggtctctatagagaagctttggaacatctttgtacctatgaaaagcagatttgtgataaacttgctgtagaagaaacc

SEQ ID NO: 507776 - DNA, 120 bp, Artificial Sequence
  ENSG00000164134_8 (sequence is synthesized)
aaaggggaacttctgttgcaactatgtcgtttggaagatgctgcagatgtttatagaggattgcaagagagaaatcctgaaaactgggcctattacaaaggcttggaaaaagcactcaag

SEQ ID NO: 507777 - DNA, 120 bp, Artificial Sequence
  ENSG00000164134_9 (sequence is synthesized)
ccagctaatatgttagaacggctaaaaatttatgaggaagcctggactaaatatcccaggggactggtgccaagaaggctgccgttaaactttttatctggtgagaagtttaaagaatgt

SEQ ID NO: 507778 - DNA, 120 bp, Artificial Sequence
  ENSG00000164134_10 (sequence is synthesized)
ttggataagttcctaaggatgaatttcagcaagggttgcccaccagtcttcaatactttaagatcattatacaaagacaaagaaaaggtggcaatcatagaagagttagtagtaggttat

SEQ ID NO: 507779 - DNA, 120 bp, Artificial Sequence
  ENSG00000164134_11 (sequence is synthesized)
gaaacctctctaaaaagctgccggttatttaaccccaatgatgatggaaaggaggaaccaccaaccacattactttgggtccagtactacttggcacaacattatgacaaaattggtcag

SEQ ID NO: 507780 - DNA, 120 bp, Artificial Sequence
  ENSG00000164134_12 (sequence is synthesized)
ccatctattgctttggagtacataaatactgctattgaaagtacacctacattaatagaactctttctcgtgaaagctaaaatctataagcatgctggaaatattaaagaagctgcaagg

SEQ ID NO: 507781 - DNA, 120 bp, Artificial Sequence
  ENSG00000164134_13 (sequence is synthesized)
tggatggatgaggcccaggccttggacacagcagacagatttatcaactccaaatgtgcaaaatacatgctaaaagccaacctgattaaagaagctgaagaaatgtgctcaaagtttaca

SEQ ID NO: 507782 - DNA, 120 bp, Artificial Sequence
  ENSG00000164134_14 (sequence is synthesized)
agggaaggaacatcagcggtagagaatttgaatgaaatgcagtgcatgtggttccaaacagaatgtgcccaggcttataaagcaatgaataaatttggtgaagcacttaagaaatgtcat

SEQ ID NO: 507783 - DNA, 120 bp, Artificial Sequence
  ENSG00000164134_15 (sequence is synthesized)
gagattgagagacattttatagaaatcactgatgaccagtttgactttcatacatactgtatgaggaagattacccttagatcatatgtggacttattaaaactagaagatgtacttcga

SEQ ID NO: 507784 - DNA, 120 bp, Artificial Sequence
  ENSG00000164134_16 (sequence is synthesized)
cagcatccattttacttcaaggcagcaagaattgctatagagatctatttgaagcttcatgacaacccccttacagatgagaataaagaacacgaagctgatacagcaaacatgtctgac

SEQ ID NO: 507785 - DNA, 120 bp, Artificial Sequence
  ENSG00000164134_17 (sequence is synthesized)
aaagagctaaagaagctacgtaataaacaaagaagagctcaaaagaaagcccagatagaagaagagaaaaaaaatgcagaaaaagaaaagcagcagagaaatcagaaaaagaagaaggat

SEQ ID NO: 507786 - DNA, 120 bp, Artificial Sequence
  ENSG00000164134_18 (sequence is synthesized)
gatgatgatgaggagataggaggtccaaaagaagaacttattccagagaaactggccaaggttgaaactccattggaagaagctattaaatttttaacaccgttgaagaacttggtgaag

SEQ ID NO: 507787 - DNA, 120 bp, Artificial Sequence
  ENSG00000164134_19 (sequence is synthesized)
aacaagatagagactcatctttttgcctttgagatttactttaggaaagaaaagtttcttttgatgctacaatcagtaaagagggcatttgctattgattctagtcatccctggcttcat

SEQ ID NO: 507788 - DNA, 120 bp, Artificial Sequence
  ENSG00000164134_20 (sequence is synthesized)
gagtgtatgattcgtctctttaatactgcagtgtgtgaaagtaaagatttatctgatacagttagaacagtattaaaacaagaaatgaatcgtctttttggagcaacgaatccaaagaat

SEQ ID NO: 507789 - DNA, 120 bp, Artificial Sequence
  ENSG00000164134_21 (sequence is synthesized)
tttaatgaaacttttctgaaaaggaattctgattcattgccacacagattatcagctgccaaaatggtatattacttagatccttctagtcagaagcgagctatagagttggcaacaaca

SEQ ID NO: 507790 - DNA, 120 bp, Artificial Sequence
  ENSG00000164134_22 (sequence is synthesized)
cttgatgaatctctcactaacagaaacctccagacatgtatggaggtattggaagccttgtatgatggtagcctaggagactgtaaagaagctgctgaaatttatagagcaaattgtcat

SEQ ID NO: 507791 - DNA, 120 bp, Artificial Sequence
  ENSG00000164134_23 (sequence is synthesized)
aagcttttcccttatgctttggctttcatgcctcctggatatgaagaggatatgaagatcacagttaatggagatagttctgcagaagctgaagaactggccaatgaaatttgaacatca

SEQ ID NO: 507792 - DNA, 120 bp, Artificial Sequence
  ENSG00000164134_24 (sequence is synthesized)
ctaaacaagcaaatggaatgactttggaccatatctagtatataatatttttgtcacgcacctgctgcattgctctaacttacacagaatgagaggagtaaatgttcttgccttcaaata

SEQ ID NO: 507793 - DNA, 120 bp, Artificial Sequence
  ENSG00000164134_25 (sequence is synthesized)
caggatagaggttcagtttcttaaaaaattaaagctgctaaaattgagtggttaaaaaagataccttatcctattcctccccacccacccatgtttttaaactaatttatataaaatctg

SEQ ID NO: 507794 - DNA, 120 bp, Artificial Sequence
  ENSG00000164134_26 (sequence is synthesized)
gaggctgttacagctaacaaagcaggtgtgtggcagaaatattactttaaatttgtcttgtgagattttactatatctcagacagcataaatgctgttttagcactggattctttcactg

SEQ ID NO: 507795 - DNA, 120 bp, Artificial Sequence
  ENSG00000164134_27 (sequence is synthesized)
agcacaaagagttgttggggctttagcatctgactgattttgttacggggttgattctgaccataggaagtatgcaatgtgaatcactatttacagagaaacctacaacagatgcttgat

SEQ ID NO: 507796 - DNA, 120 bp, Artificial Sequence
  ENSG00000164134_28 (sequence is synthesized)
gttgtagaaactgggacatatagataccaagcaaaattataagaaacctataaggtgttcaatacgcttgtgtttccaaaattcactgtacatgatcagtttggtgttcttgtaccacag

SEQ ID NO: 507797 - DNA, 120 bp, Artificial Sequence
  ENSG00000164134_29 (sequence is synthesized)
tttttaactgaaggaaccagttgtaacagtctcaattttaactaaaacttgaagaactaaaacaacaatgcaaacctttcagcattgtttggccaaacttgttaaaactgtaatgcaaga

SEQ ID NO: 507798 - DNA, 120 bp, Artificial Sequence
  ENSG00000164134_30 (sequence is synthesized)
accaaatgcactgtgatgtggcaccaactaattagcaagcatgaatttttcacccaagagtgaaaaaaggaaaatctaccatggcttgaagttaaagagcagaactcctgactaccattc

SEQ ID NO: 507799 - DNA, 120 bp, Artificial Sequence
  ENSG00000164134_31 (sequence is synthesized)
tatgactgatcaaaagactaatagttaaaaacctcagcaggccttgttcacgatatgcagaaaaaaaagtgctgcagtttagatacctctggaatttttccacagtgtcacaggtttgta

SEQ ID NO: 507800 - DNA, 120 bp, Artificial Sequence
  ENSG00000164134_32 (sequence is synthesized)
atacttgaagccctacatttctaagaatatatttcttgctcagttgtttcaggcaagcccaagactttgtaatttttaaagggcccaagattttttttttttttttttttttcaaataac

SEQ ID NO: 507801 - DNA, 120 bp, Artificial Sequence
  ENSG00000164134_33 (sequence is synthesized)
agaccagcttctttttcttgcagttacagatgtaatttcctttttgttgtcaaacataaggtaccaaatatgatgcaataaattgttttgaaaaacagttgtgtgaatatttcaactaat

SEQ ID NO: 507802 - DNA, 120 bp, Artificial Sequence
  ENSG00000164134_34 (sequence is synthesized)
ctgtgttgggcttctgtgaaatacacaggtggaaacagaggtgcaagccagaggcaatgtaatatgctgtaaggctagtgcagatgggagctttttagaaggggctaagtgctggtgtca

SEQ ID NO: 507803 - DNA, 120 bp, Artificial Sequence
  ENSG00000164134_35 (sequence is synthesized)
gggaaattccataatgaagtagaatgctgctcctgcattaagatttcattgagggcaaggctggtggcaggtactatgaatgtaattcataatttaaaaggaaaactaaaaactattttg

SEQ ID NO: 507804 - DNA, 120 bp, Artificial Sequence
  ENSG00000164134_36 (sequence is synthesized)
atttgggaaaatgagccttaatttgttaaacctatacactgagaactagcctcaggcttaatattctcattgcatttgcaagatctgagcaaataagattaagtaaaacaaatcaattgt

SEQ ID NO: 507805 - DNA, 120 bp, Artificial Sequence
  ENSG00000164134_37 (sequence is synthesized)
atatataattgacctttttgtggaacatgtagtttatagaaagtatactctaaagggaatttgccgaagaccttttactgattgaacagttgtgctacaatcaacttttcatagtacatg

SEQ ID NO: 507806 - DNA, 120 bp, Artificial Sequence
  ENSG00000164134_38 (sequence is synthesized)
acctgcattccacatctcagtctaacagtttagtagtgatgtaaagagaagtacaaaccgaactccagtgctttgttatgttttattaactggccctgtctcaggaacatcttaacagat

SEQ ID NO: 507807 - DNA, 120 bp, Artificial Sequence
  ENSG00000164134_39 (sequence is synthesized)
ggcaaaaaaacaaaaactttttttcaactcctatgagtggcaactgaagttcttattgttgggaaagaacactagtcctacctctgccactaatgaggtgtttggaggaggtaccagcca

SEQ ID NO: 507808 - DNA, 120 bp, Artificial Sequence
  ENSG00000164134_40 (sequence is synthesized)
tataatagggggtgtatgtgtgaattttgtttaaactctactgtatattgaaatgaaattcatttatttgtcttgacaatgttcaaatgatgtagattgtcttagaatgaatattcataa

SEQ ID NO: 507809 - DNA, 120 bp, Artificial Sequence
  ENSG00000164134_41 (sequence is synthesized)
gtactcagaactcttaagatgcagatgccacccgtgaggagctaaattcctaatgtgtattgtattccaacccaattttactggaactattgaataaatcttttattttctttcaggttt

SEQ ID NO: 507810 - DNA, 120 bp, Artificial Sequence
  ENSG00000164134_42 (sequence is synthesized)
acttgatagtggatacattggtgtcagaggaccttgactgggttcattttatgtccagacatcacccctgaaacactgtactgtactatcttgctctgagtagtatcaactggatcgtct

SEQ ID NO: 507811 - DNA, 120 bp, Artificial Sequence
  ENSG00000164134_43 (sequence is synthesized)
catatttgcctcattcatcctattaatttcaaatgatactgtgggggaaaaacagggttagaaaaacaagtggaaaaaatggagtgatgttgtaatctaaacaagtgccttatgtttatt

SEQ ID NO: 507812 - DNA, 120 bp, Artificial Sequence
  ENSG00000164134_44 (sequence is synthesized)
gctaagaactggtgttaccaacccttttgagaagaaagggtctcttgacctgtattaacataggaaagtaaagttctttttgtttttctttatattcagctactcttgtcatttctcgtt

SEQ ID NO: 507813 - DNA, 120 bp, Artificial Sequence
  ENSG00000164134_45 (sequence is synthesized)
gaaaaactaaaatctgactaggttagtttactcagctttaattagatagttgagtcatatattttcaacatttttctgtatcgtatttattatgcacaaaaataaagtgtgatctctaat

SEQ ID NO: 507814 - DNA, 120 bp, Artificial Sequence
  ENSG00000164134_46 (sequence is synthesized)
agcatggctaaaggtaatgccaatattagtgaatagctttgctgtgggctttatcaggcccttgtttttcacagtgttgtttgtactccatggtgtattgctattagagctgtgaaatga

SEQ ID NO: 507815 - DNA, 120 bp, Artificial Sequence
  ENSG00000164134_47 (sequence is synthesized)
aagctgtgactttatgaagagatcaaaaaaagtgtggtccagattcaggtaggttgtggtaagttcagggaagtcttgtatgatttctaagaatatttcagttaccatgtatagtatttg

SEQ ID NO: 507816 - DNA, 120 bp, Artificial Sequence
  ENSG00000164134_48 (sequence is synthesized)
ggaaaagctgtaatgtaaaatattggactttgttgcaagataggtatatacttgtgtcagataattaaagccttaaattttgaaatgaatctttgagatttcaaagaaagactgaccttt

SEQ ID NO: 507817 - DNA, 120 bp, Artificial Sequence
  ENSG00000164134_49 (sequence is synthesized)
caaatagaaggcggtctttctattctagctaatgccccacttctttaagttataaacaaagtttcatgataccattctgctatcatctaaactttgctgaactctactgccaacctacat

SEQ ID NO: 507818 - DNA, 120 bp, Artificial Sequence
  ENSG00000164134_50 (sequence is synthesized)
taaaaacaaagtcccacgaaatggctgtgttacaccatagtgagcagaaacttaaattttgttctaattttgatggttgaaaaatttcaacctgtagcaataaaacatttttggaaaaga

SEQ ID NO: 507819 - DNA, 120 bp, Artificial Sequence
  ENSG00000164134_51 (sequence is synthesized)
taagggaaaagcagggcttttttctttatgatgaaggtttttattttaaggatacaagtattacctgattttgacatagaattattcagtccagatatttgagaatcatctttgtttctg

SEQ ID NO: 507820 - DNA, 120 bp, Artificial Sequence
  ENSG00000164134_52 (sequence is synthesized)
tttctaaaaagttacatgtaagttgaaattttgaaccatattttgttatgtaaaacttcttagtaaattgttttgaaattgaagaatctctttgaaattgactgttttctccttatttat

SEQ ID NO: 507821 - DNA, 120 bp, Artificial Sequence
  ENSG00000164134_53 (sequence is synthesized)
ctgtattgtagatctgaatttgcatgaattatgttttcttagcacaattcgagtcataaaattttttgttactttaaaacaattatctgtatcttcaaatattttgacaatcagatcagt

SEQ ID NO: 507822 - DNA, 120 bp, Artificial Sequence
  ENSG00000164134_54 (sequence is synthesized)
taaaaagctgccggttatttaaccccaatgcattttcctacatattttacaaatgtggaagaggttcaatgacttgcccaagaatatgcagcacttttgttgcagatctgtcagatgggg

SEQ ID NO: 507823 - DNA, 120 bp, Artificial Sequence
  ENSG00000164134_55 (sequence is synthesized)
cagaagcgagctatagagttggcaacaacacttgatgaatctctcactaacagaaacctccagtttgtcagaggaatggctgtgaatggatgcctggaaggaccatcctctaattttctc

SEQ ID NO: 507824 - DNA, 120 bp, Artificial Sequence
  ENSG00000164134_56 (sequence is synthesized)
agttgcctgttcattgtggcattggttggcagtgaatctactcatcctttatgtcttgagcaaccagccacccagagatgtggtcttgctatgttgcccaagctgatcttcaactcctgg

SEQ ID NO: 507825 - DNA, 120 bp, Artificial Sequence
  ENSG00000164134_57 (sequence is synthesized)
cctcaagggatcctcccgcttcagcctcccaaagcattgggcttacagtcacagcaggatttccaagctcctggagattgcctgtccagtggcagcaacaccaaagacttagactgtaaa

SEQ ID NO: 507826 - DNA, 120 bp, Artificial Sequence
  ENSG00000164134_58 (sequence is synthesized)
gaaagcctctaaaattcccagtgttcctggatttaaataacacatccagagttcttcccagtcacaactccagctggattttagaggcacaaagagctgaatgtgatcctggtaaatcta

SEQ ID NO: 507827 - DNA, 120 bp, Artificial Sequence
  ENSG00000164134_59 (sequence is synthesized)
cccccgacccatcacaatatccacctgctttataaactgcctaacagaacaattccaagagattataataacacgctacaaactgcttaaaagaacaatcccaagaggctataatgagac

SEQ ID NO: 507828 - DNA, 120 bp, Artificial Sequence
  ENSG00000164134_60 (sequence is synthesized)
ctttttttaaaaaaatagaaataaccccatcatacctcatttccctatttgcatcttttaaagtccattgtatagaattgtaacaccatcatgctttgctctaatatagcctaatttccc

SEQ ID NO: 507829 - DNA, 120 bp, Artificial Sequence
  ENSG00000164134_61 (sequence is synthesized)
attacaggcatgagcccctgtgcccaggctcccactcctcttaatctgtgttgacccttccactgtattgtcatcagtcaaatcccctaatccttaacaccttttctaaacattcctttc

SEQ ID NO: 507830 - DNA, 120 bp, Artificial Sequence
  ENSG00000164134_62 (sequence is synthesized)
ccctaatccttaacaccttttctaaacattcctttcattttcttactctaaccaaaacctaaccatctcctaataatattgctttccttgcaatactctcaaattgtgtctgcttttaaa

SEQ ID NO: 507831 - DNA, 120 bp, Artificial Sequence
  ENSG00000164134_63 (sequence is synthesized)
tccccactgccaattccagaccttttttctcctttgaaaattctagttcccttgaccatatcatccattctcctttttttttttacagtcgtctactgtcttcctggtctctcaccctca

SEQ ID NO: 507832 - DNA, 120 bp, Artificial Sequence
  ENSG00000164134_64 (sequence is synthesized)
tggtctctcaccctcattgcagaagagcttagcatgcagtgtcttgttttcctttccactgctactgctgtcattattcttttttttttagatggagtctcgctccgttgcccaggctgg

SEQ ID NO: 507833 - DNA, 120 bp, Artificial Sequence
  ENSG00000164134_65 (sequence is synthesized)
tgtcattatttttaacattaacaattcatctattaccttagctatggatggtgctatgtaatttgccctgcctgctccttcaccttcacatcctgccactctcccctgttaagtcagaaa

SEQ ID NO: 507834 - DNA, 120 bp, Artificial Sequence
  ENSG00000164134_66 (sequence is synthesized)
ctgtgaagtgtcttagagtttgtccttcttgcaagctaataggttagcttgccacagtttcatatacatatactgccagaagacaccagactgctgggctggtgccataaaagatttgct

SEQ ID NO: 507835 - DNA, 120 bp, Artificial Sequence
  ENSG00000164134_67 (sequence is synthesized)
actgaaagcacaaagcatttacaacaccttgtgtcatttccccatgccccatttcccgtaaggcaacagatgtttcctgtgcagtgggttgcatcacaggagaagaatcttaaatttaga

SEQ ID NO: 507836 - DNA, 120 bp, Artificial Sequence
  ENSG00000164134_68 (sequence is synthesized)
agcctccaagcttttatcaaagctgctggtgacctacccattcctcccattcaggagagaaattattcattatcttgaaatgtaagtgaatttcctctgggaagaggaagaaggcccctc

SEQ ID NO: 507837 - DNA, 120 bp, Artificial Sequence
  ENSG00000164134_69 (sequence is synthesized)
taggtttatcaccctggaatgtaacacactctggggtttgggaggtggatattaatatcattatgcgctttctcacctacagaagactagtctgaacttgtggcaggaacctagccagct

SEQ ID NO: 507838 - DNA, 120 bp, Artificial Sequence
  ENSG00000164134_70 (sequence is synthesized)
tgattgcctgctaaaacaaaaatatcaacattcttaataggatttaaataagatccagcatctcaaaacagaatattcaaaatatccatgatacggtccaaaattacaaagcaaacaaac

SEQ ID NO: 507839 - DNA, 120 bp, Artificial Sequence
  ENSG00000164134_71 (sequence is synthesized)
cacactgttttttaaatcattatgaatctgggtcagaaacaacttatcttaaaatttatttaggctgcttggcattcagtaactagtttcacatctgtagcttggaataactttttaaga

SEQ ID NO: 507840 - DNA, 120 bp, Artificial Sequence
  ENSG00000164134_72 (sequence is synthesized)
aatatgttttaataaaatcatatacattccatcgtcatttttggatttcatttcatatctctgcatttctgagcaagcagtggtctcagtggagattctaacatgtttaaaatgtatttt

SEQ ID NO: 507841 - DNA, 120 bp, Artificial Sequence
  ENSG00000164134_73 (sequence is synthesized)
ctctgtggttcctactatggcccgcgcgccagggaccacaggcttcttcattccatccccacgcttgaggccctggttccggactaggccccgacctcccggcttctagactgccggttc

SEQ ID NO: 507842 - DNA, 120 bp, Artificial Sequence
  ENSG00000164136_0 (sequence is synthesized)
actccgggtggcaggcgcccgggggaatcccagctgactcgctcactgccttcgaagtccggcgccccccgggagggaactgggtggccgcaccctcccggctgcggtggctgtcgcccc

SEQ ID NO: 507843 - DNA, 120 bp, Artificial Sequence
  ENSG00000164136_1 (sequence is synthesized)
ccaccctgcagccaggactcgatggaggtacagagctcggcttctttgccttgggaggggagtggtggtggttgaaagggcgatggaattttccccgaaagcctacgcccagggcccctc

SEQ ID NO: 507844 - DNA, 120 bp, Artificial Sequence
  ENSG00000164136_2 (sequence is synthesized)
ccagctccagcgttaccctccggtctatcctactggccgagctgccccgccttctcatggggaaaacttagccgcaacttcaatttttggtttttcctttaatgacacttctgaggctct

SEQ ID NO: 507845 - DNA, 120 bp, Artificial Sequence
  ENSG00000164136_3 (sequence is synthesized)
cctagccatcctcccgcttccggaggagcgcagatcgcaggtccctttgcccctggcgtgcgactccctactgcgctgcgctcttacggcgttccaggctgctggctagcgcaaggcggg

SEQ ID NO: 507846 - DNA, 120 bp, Artificial Sequence
  ENSG00000164136_4 (sequence is synthesized)
ccgggcaccccgcgctccgctgggagggtgagggacgcgcgtctggcggccccagccaagctgcgggtttctgagaagacgctgtcccgcagccctgagggctgagttctgcacccagtc

SEQ ID NO: 507847 - DNA, 120 bp, Artificial Sequence
  ENSG00000164136_5 (sequence is synthesized)
aagctcaggaaggccaagaaaagaatccattccaatatatggccatgtggctctttggagcaatgttccatcatgttccatgctgctgacgtcacatggagcacagaaatcaatgttagc

SEQ ID NO: 507848 - DNA, 120 bp, Artificial Sequence
  ENSG00000164136_6 (sequence is synthesized)
agatagccagcccatacaagatcgtattgtattgtaggaggcattgtggatggatggctgctggaaaccccttgccatagccagctcttcttcaatacttaaggatttaccgtggctttg

SEQ ID NO: 507849 - DNA, 120 bp, Artificial Sequence
  ENSG00000164136_7 (sequence is synthesized)
agtaatgagaatttcgaaaccacatttgagaagtatttccatccagtgctacttgtgtttacttctaaacagtcattttctaactgaagctggcattcatgtcttcattttgggctgttt

SEQ ID NO: 507850 - DNA, 120 bp, Artificial Sequence
  ENSG00000164136_8 (sequence is synthesized)
cagtgcagggcttcctaaaacagaagccaactgggtgaatgtaataagtgatttgaaaaaaattgaagatcttattcaatctatgcatattgatgctactttatatacggaaagtgatgt

SEQ ID NO: 507851 - DNA, 120 bp, Artificial Sequence
  ENSG00000164136_9 (sequence is synthesized)
tcaccccagttgcaaagtaacagcaatgaagtgctttctcttggagttacaagttatttcacttgagtccggagatgcaagtattcatgatacagtagaaaatctgatcatcctagcaaa

SEQ ID NO: 507852 - DNA, 120 bp, Artificial Sequence
  ENSG00000164136_10 (sequence is synthesized)
tattaaagaatttttgcagagttttgtacatattgtccaaatgttcatcaacacttcttgattgcaattgattctttttaaagtgtttctgttattaacaaacatcactctgctgcttag

SEQ ID NO: 507853 - DNA, 120 bp, Artificial Sequence
  ENSG00000164136_11 (sequence is synthesized)
acataacaaaacactcggcatttcaaatgtgctgtcaaaacaagtttttctgtcaagaagatgatcagaccttggatcagatgaactcttagaaatgaaggcagaaaaatgtcattgagt

SEQ ID NO: 507854 - DNA, 120 bp, Artificial Sequence
  ENSG00000164136_12 (sequence is synthesized)
aatatagtgactatgaacttctctcagacttactttactcatttttttaatttattattgaaattgtacatatttgtggaataatgtaaaatgttgaataaaaatatgtacaagtgttgt

SEQ ID NO: 507855 - DNA, 120 bp, Artificial Sequence
  ENSG00000164136_13 (sequence is synthesized)
tttttaagttgcactgatattttacctcttattgcaaaatagcatttgtttaagggtgatagtcaaattatgtattggtggggctgggtaccaatgctgcaggtcaacagctatgctggt

SEQ ID NO: 507856 - DNA, 120 bp, Artificial Sequence
  ENSG00000164136_14 (sequence is synthesized)
aggctcctgccagtgtggaaccactgactactggctctcattgacttccttactaagcatagcaaacagaggaagaatttgttatcagtaagaaaaagaagaactatatgtgaatcctct

SEQ ID NO: 507857 - DNA, 120 bp, Artificial Sequence
  ENSG00000164136_15 (sequence is synthesized)
tctttatactgtaatttagttattgatgtataaagcaactgttatgaaataaagaaattgcaataactggcatataatgtccatcagtaaatcttggtggtggtggcaataataaacttc

SEQ ID NO: 507858 - DNA, 120 bp, Artificial Sequence
  ENSG00000164136_16 (sequence is synthesized)
gtggtggtggcaataataaacttctactgataggtagaatggtgtgcaagcttgtccaatcacggattgcaggccacatgcggcccaggacaactttgaatgtggcccaacacaaattca

SEQ ID NO: 507859 - DNA, 120 bp, Artificial Sequence
  ENSG00000164136_17 (sequence is synthesized)
agctcatcagctatcattagcggtagtgtatttaaagtgtggcccaagacaattcttcttattccaatgtggcccagggaaatcaaaagattggatgcccctggtatagaaaactaatag

SEQ ID NO: 507860 - DNA, 120 bp, Artificial Sequence
  ENSG00000164136_18 (sequence is synthesized)
tgacagtgttcatatttcatgctttcccaaatacaggtattttattttcacattctttttgccatgtttatataataataaagaaaaaccctgttgatttgttggagccattgttatctg

SEQ ID NO: 507861 - DNA, 120 bp, Artificial Sequence
  ENSG00000164136_19 (sequence is synthesized)
acagaaaataattgtttatattttttgcactacactgtctaaaattagcaagctctcttctaatggaactgtaagaaagatgaaatatttttgttttattataaatttatttcaccttaa

SEQ ID NO: 507862 - DNA, 120 bp, Artificial Sequence
  ENSG00000164136_20 (sequence is synthesized)
agacagaactggcctcaaatcctggctgtcatgtacttgctatgggcctagagtagcttacctaaatgctactaaccttcctccataccattattgtaaagattaaaggtgatgcatctg

SEQ ID NO: 507863 - DNA, 120 bp, Artificial Sequence
  ENSG00000164136_21 (sequence is synthesized)
ttaagtaactaatagagtgcttattaaaaggtaggtgttcaataagtattaattccctccctttctttttcttactagtgcacttgtgtttttaatggatcatactttaccctagattgt

SEQ ID NO: 507864 - DNA, 120 bp, Artificial Sequence
  ENSG00000164136_22 (sequence is synthesized)
ttacgttcagtttgcttatatctctaggtactcagtatctgggggatagaaggcagactacagagatttagagaggtttggtaaacacctaactgagcatttttctacattgtggtaata

SEQ ID NO: 507865 - DNA, 120 bp, Artificial Sequence
  ENSG00000164136_23 (sequence is synthesized)
ggctgttgaatgcacagaagcaaggataacactgattttttcactggtcagaataaaaattattgattgctcttttgcttatagtattcatcaagatgaataggctccttcaaaatgctt

SEQ ID NO: 507866 - DNA, 120 bp, Artificial Sequence
  ENSG00000164136_24 (sequence is synthesized)
tgctgctgacgtcacatggagcacagaaatcaatgttagcagatagccagcccatacaagatcgttttcaactagtggccccactgtgtccggaattgatgggttcttggtctcactgac

SEQ ID NO: 507867 - DNA, 120 bp, Artificial Sequence
  ENSG00000164136_25 (sequence is synthesized)
catttgatgtgtccatcattcccttttgctggatatacttcccttgactgacttctagaatatgatactcttcattttccccttattcagtagtcattccttttgatttttctttcctgg

SEQ ID NO: 507868 - DNA, 120 bp, Artificial Sequence
  ENSG00000164136_26 (sequence is synthesized)
tccttcttttataatccttgacctaattaatactgaagtatcccatgctcaggttttggtccttttctctacctacatcactccctcatgagcactctgatgagttgcatatctatttcc

SEQ ID NO: 507869 - DNA, 120 bp, Artificial Sequence
  ENSG00000164136_27 (sequence is synthesized)
agttcagacacattcctgaactcgagatttatgtatccaatggcatatttgatatttccttgtgcatatctaatgagcctttcaaactcagcatgtccagaactgaaactcctgacctgt

SEQ ID NO: 507870 - DNA, 120 bp, Artificial Sequence
  ENSG00000164136_28 (sequence is synthesized)
cccctctcctcaaggcatcagctgtgtccaaggcttgcttttttcagttgatgtcagctccatcttctcaggtgttcagaggaaaagactcagagtcattctcattctctttttcctcct

SEQ ID NO: 507871 - DNA, 120 bp, Artificial Sequence
  ENSG00000164136_29 (sequence is synthesized)
gtaccctgcaatctgtctggaaattatattagtcctatcataaaaaatgattccagactctaaccacatgtatctatctccactgctaccccaagcagattcaggtcctcctctcctcca

SEQ ID NO: 507872 - DNA, 120 bp, Artificial Sequence
  ENSG00000164136_30 (sequence is synthesized)
cctttctgacctcatctcagactactcttgcccttgctcattccactggcttcttttctgtcccttagactcatagccacacagttgcctctgccctagctattccctctgcttcaaata

SEQ ID NO: 507873 - DNA, 120 bp, Artificial Sequence
  ENSG00000164136_31 (sequence is synthesized)
gtcttcactgagataccaccggggctcacaccctttctatctttaccctgactacccaaaatttcaacctcacccttcttaccttgtttcctttttcctagataatttttcactctctaa

SEQ ID NO: 507874 - DNA, 120 bp, Artificial Sequence
  ENSG00000164136_32 (sequence is synthesized)
taaaatacataattataataacttatttgtgcattttctatatggttcatctttctttctgaaatcaagattgtgttctgccatcattgatgtattccaaggtcataaaaaatgcctagc

SEQ ID NO: 507875 - DNA, 120 bp, Artificial Sequence
  ENSG00000164136_33 (sequence is synthesized)
ccataataaatattcagtgaatatttactaaatgaatcaaggaaagtgatgttgtcttatagtctctatattctattcagtctcggcttgtcttttctagtggtttgaatgaatggatga

SEQ ID NO: 507876 - DNA, 120 bp, Artificial Sequence
  ENSG00000164136_34 (sequence is synthesized)
tgcatttaacccagaaaaccaatacttgtaaatcttttattcttgtatgtttaattaattttaaatgtgtgattagacaagttaataagcagaacaaaacatcaagtatgttagatcatc

SEQ ID NO: 507877 - DNA, 120 bp, Artificial Sequence
  ENSG00000164136_35 (sequence is synthesized)
tttcctcactgggaagaactataatattggtatagaatgtaagatgtttacagttattttcacaagcaatgatttgcttgggaaatagcaatggtgtgagccccgacagtatctgggtga

SEQ ID NO: 507878 - DNA, 120 bp, Artificial Sequence
  ENSG00000164136_36 (sequence is synthesized)
agaatatttgaagcagaaggaaaatctagagcagaggcaactgtgtgactacgagtctaagggacagttttcactccagaatgaaaactatagagatgcctgcctgcgttaacttgctca

SEQ ID NO: 507879 - DNA, 120 bp, Artificial Sequence
  ENSG00000164136_37 (sequence is synthesized)
cctcactatgtattttccctgggcagtaccatcctgctaggatttcagtgctgccatgagtcagcagtcaccttgcagtgagatccaatcacaagattccaaacaattcctaccctgtga

SEQ ID NO: 507880 - DNA, 120 bp, Artificial Sequence
  ENSG00000164136_38 (sequence is synthesized)
gctccttgaggacagggctgggatttagtctcttttatttcacaggcccagagttctaggatggcagaatggtttcgggtgccaggccccacctggttgctctccatgggcatactgccc

SEQ ID NO: 507881 - DNA, 120 bp, Artificial Sequence
  ENSG00000164136_39 (sequence is synthesized)
agggctgccttgggacttggctccctacattttggtgcagcagtcttcagccaccccaactatggcttaagtggccccagctgcagcttgacccactgcttcacaagatacaggtggtaa

SEQ ID NO: 507882 - DNA, 120 bp, Artificial Sequence
  ENSG00000164136_40 (sequence is synthesized)
gccttggtgaaattcatgtagtgttaagcctgcagtctcacagaatacaagagctgagggggcatggcttcctccactttgatttcaaaagatgatgctgacttatttggggcacaggca

SEQ ID NO: 507883 - DNA, 120 bp, Artificial Sequence
  ENSG00000164136_41 (sequence is synthesized)
gagactttgcacaggggtagaaccaccacagagagcccccaacagggcggtgcctcatggagccaaggaaatggggttgccaccaaaatcctagaattatggttaacagtgtagagctgc

SEQ ID NO: 507884 - DNA, 120 bp, Artificial Sequence
  ENSG00000164136_42 (sequence is synthesized)
agtctggaaaagcttcaggcatgagactccaacccatgacagctgaagaataggctgagcctaggaaagctatgggagctgagctgcctgaggccttaggggtccaacccccacccagtg

SEQ ID NO: 507885 - DNA, 120 bp, Artificial Sequence
  ENSG00000164136_43 (sequence is synthesized)
tgcccaggatgcagaatatggagtgaaaggaaattattctccaactttaagatttaatattgttctccctgttgggttttggacttgtttcagatgagttatccctcttttcttgcctat

SEQ ID NO: 507886 - DNA, 120 bp, Artificial Sequence
  ENSG00000164136_44 (sequence is synthesized)
ttccccattttagaatgggaatgtctcttctataccttcgcacattgtattttggaagcagatagcttattttgatttcacaggctcgtggttgcagaacatttgccttcaggatgaagt

SEQ ID NO: 507887 - DNA, 120 bp, Artificial Sequence
  ENSG00000164136_45 (sequence is synthesized)
cacacccatatttgatttagataagtattacctagataactcgattaactagatttagataagtattaactaacagtattaagagttaatactggagtgacttttgagcctactaggatg

SEQ ID NO: 507888 - DNA, 120 bp, Artificial Sequence
  ENSG00000164136_46 (sequence is synthesized)
gaatgaatatattttgcattgtatgaaggatgtgaatttggcagagaggggagggtaggtgcagaatgctatggtttgaatgcctccaccaaaactcatgttgacatttaattgtgaatg

SEQ ID NO: 507889 - DNA, 120 bp, Artificial Sequence
  ENSG00000164136_47 (sequence is synthesized)
tgacagttttaagaagtgggatctttaacaggtaattaggtatctctttaggcactttcattagacagggccctcatgaatggattaatgcagttatggagggagtgagtttgttattgc

SEQ ID NO: 507890 - DNA, 120 bp, Artificial Sequence
  ENSG00000164136_48 (sequence is synthesized)
atgagtgggctccttattaaagggtgattttggctcagtttcctctctgtctcatgtgcttgctttcacttctacccttctgccacaggatgacccttagcagatgtcagtgccatgcac

SEQ ID NO: 507891 - DNA, 120 bp, Artificial Sequence
  ENSG00000164136_49 (sequence is synthesized)
ttgtacttcccagcctccagaactgtgagccaaatgagcttgtgtcccttgtaaattaagtttgtggtgttctcttatagcagcagaaaatggattcaggcagcaagcagagctataaaa

SEQ ID NO: 507892 - DNA, 90 bp, Artificial Sequence
  ENSG00000164136_50 (sequence is synthesized)
ggagtttcacttttgttgcccaggctgtagtgcaaaggcatgatctcggctcaccacaacctctttctcccgggttcaagcaattgtctg

SEQ ID NO: 507893 - DNA, 70 bp, Artificial Sequence
  ENSG00000164136_51 (sequence is synthesized)
agtagctgggattacaggcatgcactatcacacccggctgattttgtatttttttatcaggtgatcctcc

SEQ ID NO: 507894 - DNA, 120 bp, Artificial Sequence
  ENSG00000164136_52 (sequence is synthesized)
gattacaggcacgagccaccatgcccggccaatacttcttttcatctacactggcttccattatcatgattttgttagatacttttgaggacattttctattgcattcctccatgtttgg

SEQ ID NO: 507895 - DNA, 120 bp, Artificial Sequence
  ENSG00000164136_53 (sequence is synthesized)
atgtttggcaaccacactctatggtggagtcttctggctaagcacttagtcttcttttacttataccagcaggatgtagttgagcagggtagtgaaaatccattgtgacattgtaaagcc

SEQ ID NO: 507896 - DNA, 120 bp, Artificial Sequence
  ENSG00000164136_54 (sequence is synthesized)
tcactgctataagaggccaggaatgaaattttcattgtttacaaaagtagcttcgtaaggcctaattaagaattatatcacccatggcattgctcaatcccaagtcaatatttttttttt

SEQ ID NO: 507897 - DNA, 120 bp, Artificial Sequence
  ENSG00000164136_55 (sequence is synthesized)
ttgaaaaatgtggattcaaggataccacaactaaaagggatgtagggaatttaagaggctttggatgaaatgatgaagattacggtaaagttttataaaaaatttgaagcactgagataa

SEQ ID NO: 507898 - DNA, 120 bp, Artificial Sequence
  ENSG00000164136_56 (sequence is synthesized)
tatagacaaagggaataattataaaatgagagtgataaggaaggtttgctttaaataaaccaatcaatgagtgatttagatcatatgtaacaggaatattagatttgatatgttcttgtg

SEQ ID NO: 507899 - DNA, 120 bp, Artificial Sequence
  ENSG00000164136_57 (sequence is synthesized)
gacaaaaaggtatttctattggatacacctttgtatcttgcttaatacctaaataagtgttagctttttctttctatgagttatagacaatacattttaaagcagccattttttatattt

SEQ ID NO: 507900 - DNA, 120 bp, Artificial Sequence
  ENSG00000164136_58 (sequence is synthesized)
cagaaacatctgaaaagtataataatttaattctttgtgtttatggaacttaattcagtgaatatttatgtcatgggttgtggcagattttggttttttgtggaagaggtcaccatgtat

SEQ ID NO: 507901 - DNA, 120 bp, Artificial Sequence
  ENSG00000164136_59 (sequence is synthesized)
atactattttgaagggcagaaaatagttgtttctatttttgtatattttggttataaactgcttttaatggcatggagttgaatttagggatgtttaatcttcatattcttcacttgatt

SEQ ID NO: 507902 - DNA, 120 bp, Artificial Sequence
  ENSG00000164136_60 (sequence is synthesized)
tgagtgagaaaaaataaaattttcttggttataaaattctcaaatgattaacaatggtttctttaaaagactgaagatacatattcagtggctgtagaaatggctactgctattgtaaac

SEQ ID NO: 507903 - DNA, 120 bp, Artificial Sequence
  ENSG00000164136_61 (sequence is synthesized)
tggattaacaatcagtacttctacaaatctaagtatttgtttgtttttactttttactagtatgactctggaatttttcaattcagggaaataatagaatagaaaagctttgctaaggca

SEQ ID NO: 507904 - DNA, 120 bp, Artificial Sequence
  ENSG00000164142_0 (sequence is synthesized)
agtgacccacgcgcctcagcccgcggctgacgcaccttcgaaaagttgcgctccgaccttctcacgacctacattcttcccgggcactcctgagtttgagccgggcctggaggacctggg

SEQ ID NO: 507905 - DNA, 120 bp, Artificial Sequence
  ENSG00000164142_1 (sequence is synthesized)
ccaagactttcgagcggcggccgcccgaggtgcgaggagccagcccggctttcctcactgggtcccgcgcaggcgtccccgggaccgcagagcaaactttctggactatctgaggacact

SEQ ID NO: 507906 - DNA, 120 bp, Artificial Sequence
  ENSG00000164142_2 (sequence is synthesized)
tgtccagcgagccccactgctcggggaggaggagccacggccggggacaggtgatacacttgggtgttgaaggacatttttgaaatcatgagaactcaatgtttgactatgaatgtttcg

SEQ ID NO: 507907 - DNA, 120 bp, Artificial Sequence
  ENSG00000164142_3 (sequence is synthesized)
ttataactgcctggaaggttagcgtcaaagaagttgagatttttaaagtcttcttctaggggtttccagcagagccaaatgttagaaaaatctttccgctcctctgaagagtgaagtgag

SEQ ID NO: 507908 - DNA, 120 bp, Artificial Sequence
  ENSG00000164142_4 (sequence is synthesized)
caaatacaacccagcagtaggttattgaagacagcagccccaggttttggaaggtgacaatgaaatgtgaagaagttacatttctcaaacttgaaagttagtgacggcttaccaaatttt

SEQ ID NO: 507909 - DNA, 120 bp, Artificial Sequence
  ENSG00000164142_5 (sequence is synthesized)
aatgaaaattaaatatgacttagaagcattgatttatgaaggcttatgatgtcatcggtttcgacagaaagcaaactccagcaggctgtgagcctacagggagttgacccagaaacatgc

SEQ ID NO: 507910 - DNA, 120 bp, Artificial Sequence
  ENSG00000164142_6 (sequence is synthesized)
atgattgtatttaaaaaccactgggcacaggttgtgaaaatcttggagaagcacgaccccttgaagaacacccaggcaaaatatgggtctatccctccagatgaggccagtgccgtgcag

SEQ ID NO: 507911 - DNA, 120 bp, Artificial Sequence
  ENSG00000164142_7 (sequence is synthesized)
aattacgtagaacacatgctcttcttgttgattgaagagcaagccaaagatgctgcaatggggccgattctggaatttgtggtctctgagaacatcatggagaaacttttcctttggagc

SEQ ID NO: 507912 - DNA, 120 bp, Artificial Sequence
  ENSG00000164142_8 (sequence is synthesized)
ttgagaagggagtttactgatgagactaaaattgagcagctaaagatgtatgagatgttggtcacccagtcgcaccagcctctgctgcaccacaaacccattctgaagcctctgatgatg

SEQ ID NO: 507913 - DNA, 120 bp, Artificial Sequence
  ENSG00000164142_9 (sequence is synthesized)
ttgctgagctcttgttcaggaacaaccacccccactgtggaggagaagctggttgtcctactcaatcagctctgttccattcttgccaaagatccatccattttagaactcttcttccac

SEQ ID NO: 507914 - DNA, 120 bp, Artificial Sequence
  ENSG00000164142_10 (sequence is synthesized)
actagtgaagaccaaggcgctgccaacttcctcatcttctcccttctgattcccttcattcaccgagaggggtcagtaggccagcaagctcgggatgcattgctcttcatcatgtctctt

SEQ ID NO: 507915 - DNA, 120 bp, Artificial Sequence
  ENSG00000164142_11 (sequence is synthesized)
tctgctgagaacaccatggtggcccatcacatcgtggagaacacctacttttgtccagtacttgcaactgggctcagtggtctctactcttccctgcctacaaagctagaagagaaaggc

SEQ ID NO: 507916 - DNA, 120 bp, Artificial Sequence
  ENSG00000164142_12 (sequence is synthesized)
gaggaatggcactgccttctgaaagatgactggcttctacttccttctcttgtccagttcatgaactccctggagttttgcaatgcagtcatacaggtggctcaccccttgattcgaaat

SEQ ID NO: 507917 - DNA, 120 bp, Artificial Sequence
  ENSG00000164142_13 (sequence is synthesized)
cagcttgtcaattacatttacaatggatttttggtaccagtcttggctcctgctctccataaggtgactgtggaagaggtcatgaccacaactgcatatctggaccttttcctgcgtagc

SEQ ID NO: 507918 - DNA, 120 bp, Artificial Sequence
  ENSG00000164142_14 (sequence is synthesized)
atctccgagccagcactacttgagatcttcctccgttttatcctattgcaccagcacgagaatgtccacatcctagacactctcacgagtcgaatcaacaccccgtttcggctttgtgtg

SEQ ID NO: 507919 - DNA, 120 bp, Artificial Sequence
  ENSG00000164142_15 (sequence is synthesized)
gtgtctctggcattattcagaactctcattggtttacattgtgaagatgtgatgttacagctagttctaaggtatctgatcccctgcaatcacatgatgctgagtcagaggtgggctgtg

SEQ ID NO: 507920 - DNA, 120 bp, Artificial Sequence
  ENSG00000164142_16 (sequence is synthesized)
aaggagagagactgttactctgtttctgcggccaagcttctcgccttgactcctgtctgctgctccagcgggatcactctgacgctggggaaccaagagagggattatattctctggtca

SEQ ID NO: 507921 - DNA, 120 bp, Artificial Sequence
  ENSG00000164142_17 (sequence is synthesized)
aagtgtatgcatgacacttcagggcctgtggagcggccattccccgaagcgttctccgagtcagcctgcattgtggagtatgggaaagccctggacatcagctacctgcagtacctgtgg

SEQ ID NO: 507922 - DNA, 120 bp, Artificial Sequence
  ENSG00000164142_18 (sequence is synthesized)
gaggcccacaccaacatcctccgctgcatgagggactgccgtgtctggtccgccctgtatgatggcgactcccccgaccctgagatgtttctccagagtctgacggaggagggcagtgtg

SEQ ID NO: 507923 - DNA, 120 bp, Artificial Sequence
  ENSG00000164142_19 (sequence is synthesized)
agctcggcctgccctgtgttcgggctcccgcaacaactccccaggaagacaggacctcagctggctcccagaaaggacaagagccagacagagctggaatgggatgacagctatgacact

SEQ ID NO: 507924 - DNA, 120 bp, Artificial Sequence
  ENSG00000164142_20 (sequence is synthesized)
ggaatctcctcaggggctgacgtgggctccccagggccttatgatgatctggaggtttcaggccccccagcacccattgatccccccaaacacatccaggagatgaagaagaatgccctc

SEQ ID NO: 507925 - DNA, 120 bp, Artificial Sequence
  ENSG00000164142_21 (sequence is synthesized)
ctgctcttcaaagggtcctacatagaagagtcggactttcaggatgatgtgatggtgtacaggctgtgtgctgagaaggactccgaggacatgaaggattctcaggaggaagctgctagg

SEQ ID NO: 507926 - DNA, 120 bp, Artificial Sequence
  ENSG00000164142_22 (sequence is synthesized)
ccaccagctgaagcccaggctgaagttcagagtgtccccatcaacaacggccccctcctcagcacccagccagagacagattcagaggaggagtggaatagggacaattcagacccgttt

SEQ ID NO: 507927 - DNA, 120 bp, Artificial Sequence
  ENSG00000164142_23 (sequence is synthesized)
cacagtgagcccaaggagccaaagcaagagagggaacctgaagcagccccagaatccaactcagagttagcatcccctgcccctgaggcagagcacagctctaacctgacagccgcccac

SEQ ID NO: 507928 - DNA, 120 bp, Artificial Sequence
  ENSG00000164142_24 (sequence is synthesized)
ccggagagcgaggagctcattgcccagtatgaccaaatcattaaagagctggattccggcgccgagggcttgatggaacagaattaccccacacctgatcccttgcttctcactaaggag

SEQ ID NO: 507929 - DNA, 120 bp, Artificial Sequence
  ENSG00000164142_25 (sequence is synthesized)
gaagaagggaaggaagagagtaaaggagaaaaggagaaggaggggaagaaggagctagaagatgaggaggatgactttgactcttttatagcggagatgcctgctgtagagactgtgcct

SEQ ID NO: 507930 - DNA, 120 bp, Artificial Sequence
  ENSG00000164142_26 (sequence is synthesized)
tccccatttgtggggagagatgaggctgcctttgccagtcgccatcccgtgaggactcaaagcaccccattcacaggcccattcatcagcgtagtcctgtcaaagctggagaacatgctg

SEQ ID NO: 507931 - DNA, 120 bp, Artificial Sequence
  ENSG00000164142_27 (sequence is synthesized)
gagaactctttacatgttaatttgctgcttatcgggatcattactcagctagccagctacccccagccactcctgcgctcctttctgctcaacaccaacatggtcttccagccaagcgtc

SEQ ID NO: 507932 - DNA, 120 bp, Artificial Sequence
  ENSG00000164142_28 (sequence is synthesized)
cgctctctctatcaggtccttgcatctgtgaaaaacaagattgaacagtttgcttctgtggagagagacttcccagggctcctcattcaagctcagcagtacctgctcttccgtgtggac

SEQ ID NO: 507933 - DNA, 120 bp, Artificial Sequence
  ENSG00000164142_29 (sequence is synthesized)
atgtctgatatgacccctgcagcactaaccaaagatcccattcaggaggcttccaggacaggaagtggcaagaaccttttggatggacctccaagagtgcttcagcccttcctgacccac

SEQ ID NO: 507934 - DNA, 120 bp, Artificial Sequence
  ENSG00000164142_30 (sequence is synthesized)
agaaccaaggtggctgaggcaccccccaacctgcccctgccggtgaggaaccccatgctggctgctgccctcttcccagagttcctgaaggagctggcggccttggcccaggaacactcc

SEQ ID NO: 507935 - DNA, 120 bp, Artificial Sequence
  ENSG00000164142_31 (sequence is synthesized)
attctgtgctacaagatcttgggtgactttgaggactcctgctgttagcttttttttttttttttaatagaggttcttgttttgtaaggttttagtgtcttgactgaatgttaaatgcaa

SEQ ID NO: 507936 - DNA, 120 bp, Artificial Sequence
  ENSG00000164142_32 (sequence is synthesized)
agctgcttacaaagatttctactttaatgtttcctgacaatacttgatttgtggggaggggaattttctgtatctttcctctctctctctagccgggcctttccaccttatgttatatat

SEQ ID NO: 507937 - DNA, 120 bp, Artificial Sequence
  ENSG00000164142_33 (sequence is synthesized)
agaatgtaagtctcataagctggttgctcccttggcagttttctttgctctgtttttcctccttatatttttttggttgtcattctcctatccctttgagttactcttcttgcagctcag

SEQ ID NO: 507938 - DNA, 120 bp, Artificial Sequence
  ENSG00000164142_34 (sequence is synthesized)
atcacgtcaagcagatattggggttcagtgatgtctggtgatgtctggaagtgccccatgtcagaattccagctgttcagcagcacaggaagattgtacacctgcaactgtgcgaatggt

SEQ ID NO: 507939 - DNA, 120 bp, Artificial Sequence
  ENSG00000164142_35 (sequence is synthesized)
cctgttgcctcctgcattttggcctctgttctataaaggaagagtaaagatggagctcctcctgcctccatcacgaaagcacatatcatctgtccctttggattttacttccaggacgtg

SEQ ID NO: 507940 - DNA, 120 bp, Artificial Sequence
  ENSG00000164142_36 (sequence is synthesized)
tgtcgtccccagcgtgtgttgccttatggtgccggcagagcctcagctatctgcctgggaagtcggatgtccttggagagaatttggaatgcagataatttttcttatttcttgagagct

SEQ ID NO: 507941 - DNA, 120 bp, Artificial Sequence
  ENSG00000164142_37 (sequence is synthesized)
tactttaatcagcatgacactacctaaacactgaagatggccttatattagtaagatttgcacaaaattaagtatacctatgcaaactattactttggtttttaggagtttgatcagatg

SEQ ID NO: 507942 - DNA, 120 bp, Artificial Sequence
  ENSG00000164142_38 (sequence is synthesized)
aagaagtaatggtatcacatatatatgtaagaagacaaccatcattatttttgtaagtgttttataaaaacaaactgattaacttgtgaagccatttcatagtgggttttttcagggagg

SEQ ID NO: 507943 - DNA, 120 bp, Artificial Sequence
  ENSG00000164142_39 (sequence is synthesized)
gtatgctgggtgggatggggagataaactaaatgcagcctgtaaaaacactgatcattatttaaaattctattcccttttgctagtaagctgcactttgtagagaaacaggaactgtaca

SEQ ID NO: 507944 - DNA, 120 bp, Artificial Sequence
  ENSG00000164142_40 (sequence is synthesized)
gcccactttgggaccttggatgtaaatgcaaacaggtcacctggagccctgcaaagccaagtgcctgctggcgactcactctgcatggaaatgctgccttccgagtaatggggttcatta

SEQ ID NO: 507945 - DNA, 120 bp, Artificial Sequence
  ENSG00000164142_41 (sequence is synthesized)
gaaggccccaacgtgctgtatgagcgtccctctgctgctttgcagcctgctccaagaggcaggattatacttagagccacagccatgttaaaccaccaccaagaggggaaaacagaataa

SEQ ID NO: 507946 - DNA, 120 bp, Artificial Sequence
  ENSG00000164142_42 (sequence is synthesized)
ttgtgagctgaaaatgagaccataaacaactgatttttatggatattaaattccactcccctctattttgggcccagttctgcaggtgcgaagcaagtaacgagcttgagcctgcctgtt

SEQ ID NO: 507947 - DNA, 120 bp, Artificial Sequence
  ENSG00000164142_43 (sequence is synthesized)
tggaaggaaattggaaggtttgtctctctctgttctttgtgggcatctctgtggagccctgagggcagccacaggtctggtggttgtgcctcaggagcactggtttggtcttaatcaggc

SEQ ID NO: 507948 - DNA, 120 bp, Artificial Sequence
  ENSG00000164142_44 (sequence is synthesized)
ctttcatgcacaggcagggcagtggcggaagaaccacacctgcaatgctgtggagcagtggaggcccttttgtgcttcaggaatcttgaagcagctttgtattgagtgaatgagaaattg

SEQ ID NO: 507949 - DNA, 120 bp, Artificial Sequence
  ENSG00000164142_45 (sequence is synthesized)
agagctggcctgtgaaatgacaacaggagacctggcctgggcagggtgagctgttaggagccagccttgctttcgtgtttcatagtccaagcaagacaccaaagattcctactcactgta

SEQ ID NO: 507950 - DNA, 120 bp, Artificial Sequence
  ENSG00000164142_46 (sequence is synthesized)
catttctgtttgtcttgacaaatggtttgctcagctgtggtgcagcagccagaagggatgaagcacagcagactggtctgcttctggcttcctgatgtctggttgtatttgcacagccca

SEQ ID NO: 507951 - DNA, 120 bp, Artificial Sequence
  ENSG00000164142_47 (sequence is synthesized)
gtttggacttacaaagtcataaaatgccaacgccacatctgtaaatggaattctttagctttgtagtttgatttacacctttctccattatctggtggtggtgttgattcttcttgaatc

SEQ ID NO: 507952 - DNA, 120 bp, Artificial Sequence
  ENSG00000164142_48 (sequence is synthesized)
catatttctgcattgtagaataccatggtcccctttgtggaaagtttcctttgggaaaagattgattttgtgcctcttactgtttttttcaataggtactgaaataaacttactttatta

SEQ ID NO: 507953 - DNA, 120 bp, Artificial Sequence
  ENSG00000164142_49 (sequence is synthesized)
taggtactgaaataaacttactttattattttatttttttgagacaggatcttgcgctgcctgggctagagtggagtggtgtgatcacagctcattgtagcctcaacctcctgggctcaa

SEQ ID NO: 507954 - DNA, 120 bp, Artificial Sequence
  ENSG00000164142_50 (sequence is synthesized)
agctgggaatataggaacgtgccaccacacccagctaactttttggtatagtttgtagagatggggtttcaccttgttgcccaggctggtcttaaagtcctgggctcaagtgatcgtccc

SEQ ID NO: 507955 - DNA, 120 bp, Artificial Sequence
  ENSG00000164142_51 (sequence is synthesized)
tgggattacaggtgtgagccactgggtccagcctgaagtagacttactttaaatgaggacagagatgactggtgtgtgcagtgacaggcaggagaatgtaacttcccatgctggggtgct

SEQ ID NO: 507956 - DNA, 120 bp, Artificial Sequence
  ENSG00000164142_52 (sequence is synthesized)
acttcccatgctggggtgctggcagcaaactcacacgataacactaacttcctatttggatttggaaactggttcctgtttctgaatccattacagtcctcagaggtttttgtccatggt

SEQ ID NO: 507957 - DNA, 120 bp, Artificial Sequence
  ENSG00000164142_53 (sequence is synthesized)
tttgcaaaatgaagtcagaaaatggagctggatgtagagagaacaggaaaacccatgtggctgggtgaaataactgagagtgggttatttagggagtgacgtggacatgccaaagaaaaa

SEQ ID NO: 507958 - DNA, 120 bp, Artificial Sequence
  ENSG00000164142_54 (sequence is synthesized)
cagcagagaactgagtctatccacgggagaagagcaaatcctgcacgattcgggggagtgaacattgatctaggcggatatgaagaaaccagggagtgggtgggtgagaatgggaactcc

SEQ ID NO: 507959 - DNA, 120 bp, Artificial Sequence
  ENSG00000164142_55 (sequence is synthesized)
ttgtcaggaaaaaaatcattggcaatgaagtagaatattctggtcctaaagtaaatcggcaagcccttagaaatatctttttttataatgagttggggggaaaatcttaaatatgtttgg

SEQ ID NO: 507960 - DNA, 120 bp, Artificial Sequence
  ENSG00000164142_56 (sequence is synthesized)
catgcttaaagatatggtccgagagtgtggacacttctctatgtgacaggctcctacaccagtcgctgtgctccttgctggaagaatgtaggggaagagaaaccgtgggtaccgcccgct

SEQ ID NO: 507961 - DNA, 120 bp, Artificial Sequence
  ENSG00000164142_57 (sequence is synthesized)
ggcgcagcccctgagctggcgtcactgcgtctggcctgggcaggaaaggtgagggagccaagggttcctggagtatcacaacattaacctcaattcataattcagggcccgacttaaagt

SEQ ID NO: 507962 - DNA, 120 bp, Artificial Sequence
  ENSG00000164142_58 (sequence is synthesized)
tccagactgagtgacttctgtggttcaaaatatatgagagcactgggatatttaaaattgattttttggaaatggccaagtaaatgttttttaaaattttacacaaagaaattccaactt

SEQ ID NO: 507963 - DNA, 120 bp, Artificial Sequence
  ENSG00000164142_59 (sequence is synthesized)
aggttcagcctaaaacataatttcatgggtggtaaaatacaatttcccaaccatgaaatgggagtgctggaatagccagttagagatgtgatttttctttaccattagatacctcctttc

SEQ ID NO: 507964 - DNA, 120 bp, Artificial Sequence
  ENSG00000164142_60 (sequence is synthesized)
cctggtatttagaggaattgtgaagtggtccccattttgtggagtatcattttggaaaatgctttgatgtgctcgggttggagtggatgtctgtcaggtgttaggtaggacgcattcggt

SEQ ID NO: 507965 - DNA, 120 bp, Artificial Sequence
  ENSG00000164142_61 (sequence is synthesized)
atttttataggtcatcaggagtaccctttccttagcaggtggattttatttaggtcagatatagttagtttctgtccaggataagacatcatggagccagggtcttgtcaggaaagcatc

SEQ ID NO: 507966 - DNA, 120 bp, Artificial Sequence
  ENSG00000164142_62 (sequence is synthesized)
ctcttatgaacagaatctagaaacaggctacatgaatattggggttgcctgtttaatttgggcagccagtgggtactcagggtcgaaagttgtttccagtgtctccaaatcagcttggct

SEQ ID NO: 507967 - DNA, 120 bp, Artificial Sequence
  ENSG00000164142_63 (sequence is synthesized)
gtggccgtcatgtggactgattcccaggtctgtttgaggtttagggttgtggatgggctgctcttctgaatctggatcagtgtgtctaggttgtgttcaggagggaagcacagccgcagc

SEQ ID NO: 507968 - DNA, 120 bp, Artificial Sequence
  ENSG00000164142_64 (sequence is synthesized)
agtctggacaaatcaagtgctttaacgatggcatcgtcctctgggaataatcagtccttaatacagttttcacttgacataatagttttggtaaactgtctttatctggctgcaccccct

SEQ ID NO: 507969 - DNA, 120 bp, Artificial Sequence
  ENSG00000164142_65 (sequence is synthesized)
tttaagtaagcccttaattttaaatggtcccggcgtggtgttcagtatctgcatatgccccagttctcatttaagggcagttcaatgtaattgctaattaccagccctgtatttactgaa

SEQ ID NO: 507970 - DNA, 120 bp, Artificial Sequence
  ENSG00000164142_66 (sequence is synthesized)
atggctgtctgtcatgcttgccatttttatgaaacactttattgcaggtcagctattattgcacgtgctacttcaagtcactggctcaggctggtgtcatgtgtggtttgctgcaaacgg

SEQ ID NO: 507971 - DNA, 120 bp, Artificial Sequence
  ENSG00000164142_67 (sequence is synthesized)
cagcctgctttgcagtgtgagctcttcctggaaacagcagtctcttgtagctgatgccacatcagctttaagtcattaggaagatattctaggccccttgttgcttcagccatcagtcta

SEQ ID NO: 507972 - DNA, 120 bp, Artificial Sequence
  ENSG00000164142_68 (sequence is synthesized)
taaataacacaacactaattttccatcaagtaacagcttaaaacagaacactgtcaaaccactttatgttccacccttaaatcacatcactgaggaaacactgtaagagaatgcagttga

SEQ ID NO: 507973 - DNA, 120 bp, Artificial Sequence
  ENSG00000164142_69 (sequence is synthesized)
ctctttcccccccttctttttgaatgaacctcgtaaacctaatgctttagaaagagctctcagaagactgagaatggtttttaggataattttgcctcagtaaatcctctctacattcag

SEQ ID NO: 507974 - DNA, 120 bp, Artificial Sequence
  ENSG00000164142_70 (sequence is synthesized)
gcatttattaggccattacttgttttgggactacagattatcctggcagctcaataactggataaacaggactttagtgaaagattttcagaggttctttagggaaaagaatgaccagga

SEQ ID NO: 507975 - DNA, 120 bp, Artificial Sequence
  ENSG00000164142_71 (sequence is synthesized)
gaaggtgggtggaagccttcagttctttgacctcttgcacgtagaatcctaaaactgatcatgattttagctaggactgacctttcctagcttgtagggtcactgtgaattttgttcatg

SEQ ID NO: 507976 - DNA, 120 bp, Artificial Sequence
  ENSG00000164142_72 (sequence is synthesized)
tcttaaaaggtttaagttaacctagttcactgttacctacacaagtaacaagacggccaataggacctgtcagcatgacttcgacatgcattccaggcatctttcggggagtttagattt

SEQ ID NO: 507977 - DNA, 120 bp, Artificial Sequence
  ENSG00000164142_73 (sequence is synthesized)
actgtgtcatttcagaacccaacaaaggtgatggaagctcttaggccagattaaatttcatggaacggaggctgcagaagtctgtgctgcttagtgtgtcagctgactttttactgggac

SEQ ID NO: 507978 - DNA, 120 bp, Artificial Sequence
  ENSG00000164142_74 (sequence is synthesized)
aagtctatgaaaggcccacctgtaacaaggcccctttttgccctgtggatattttaaaagagggaatttggtgttgacaatcttacttacacgactcttgctaagctatttgactaaggg

SEQ ID NO: 507979 - DNA, 120 bp, Artificial Sequence
  ENSG00000164142_75 (sequence is synthesized)
tttcaatcagatgcttcccacctcacaagcaagggtcagctctatttgcaaataatccatgaatatgtttgtctaaaacctgctgaagaggcatggcagccacttccatgctgcttttgg

SEQ ID NO: 507980 - DNA, 120 bp, Artificial Sequence
  ENSG00000164142_76 (sequence is synthesized)
taatgggtaaagaatatggcctttcagatagatctggtggcttttccccaatagtcaccatgtggaaactatgcaactaaattcaatggaaatgaaagatacaatataaaatagcgggtc

SEQ ID NO: 507981 - DNA, 120 bp, Artificial Sequence
  ENSG00000164142_77 (sequence is synthesized)
atggccataagctgtgtcctgaactaaccaactccaagctgaaggagggtgtgtactttccgaaacttcgaggccatcttagtaattattttagcaataattactaaaatgtacatgggg

SEQ ID NO: 507982 - DNA, 120 bp, Artificial Sequence
  ENSG00000164142_78 (sequence is synthesized)
tgggggagctcagctaaaatatccttactttggtgcaataatgatctaggttctttttcctaggcctaggcctccaccttgaaagacaggaacagaagttcactgtgatgtgtgaccctg

SEQ ID NO: 507983 - DNA, 120 bp, Artificial Sequence
  ENSG00000164142_79 (sequence is synthesized)
gacagagatcaaacagctcctttctagacccagatgacccagaacgcagaagcctagtagttggtatcaccagtgtctcttcaaaagggccccacaaaaggctgtccattaatttgtttc

SEQ ID NO: 507984 - DNA, 120 bp, Artificial Sequence
  ENSG00000164142_80 (sequence is synthesized)
atacagtaagcgagcttttactgaatactccctctgttaggtagcatgcagagtgctagggctggcacattcctgccttcccaccagaaccctccaacctcctccccaggcaacagaaca

SEQ ID NO: 507985 - DNA, 120 bp, Artificial Sequence
  ENSG00000164142_81 (sequence is synthesized)
cagggtttgggcctgaccaggcagagctggttcaagccagcctggggcagagccagttttccagcacacttctaacttctagtcagagcctcagcattatacacccagcctacaggtgtg

SEQ ID NO: 507986 - DNA, 120 bp, Artificial Sequence
  ENSG00000164142_82 (sequence is synthesized)
tggattcctgagacagatggcaatggcatcacctgtggtgccaactcatacattttaatgagatttctccctgaagggtgaaccagtagaccagactaaacgcacactcatgcaagaatg

SEQ ID NO: 507987 - DNA, 120 bp, Artificial Sequence
  ENSG00000164142_83 (sequence is synthesized)
taaaattgtatttcactgaggcccctttataagcagagccatctttgcgaatttcttggggtgttaatgtaaacatatctttagaatatctcatcgggtttcagtcagagccatgctttg

SEQ ID NO: 507988 - DNA, 120 bp, Artificial Sequence
  ENSG00000164142_84 (sequence is synthesized)
ggtttttcctagcagcagtgatgatatcaacttacaaggtttggctttcaggatttcagaagctggcattcaagacaacaggcagtttgtcagagctgaatgagaatcagcctggacaaa

SEQ ID NO: 507989 - DNA, 120 bp, Artificial Sequence
  ENSG00000164142_85 (sequence is synthesized)
tcaagtgctttaacaagggcatcttcctctgggaataatcagtccttaatacagtttgcacttgacataatagttttggtaaatgtctttttctggctgcacccccttttaagtaagcct

SEQ ID NO: 507990 - DNA, 120 bp, Artificial Sequence
  ENSG00000164142_86 (sequence is synthesized)
ttaattttaaatggtctggaaagatcttcgatgctttctgtaaggtttagtcaccaagaagccagaacttttggtgaaaacagaatttataaaatgaaactgaaccttctcctttcttac

SEQ ID NO: 507991 - DNA, 120 bp, Artificial Sequence
  ENSG00000164142_87 (sequence is synthesized)
aaaataaagatcctgtcagactccagtctcagaccacctttgcccatttgtaattcagacttgcagagtgaggagagaactgcttcagccttactgtcttgtagagagatttggtgaaaa

SEQ ID NO: 507992 - DNA, 120 bp, Artificial Sequence
  ENSG00000164142_88 (sequence is synthesized)
tcatgttactttagacccagtagttttcaggaccgcaacaggatgcggggcacctggcttcccgggtaaggtcacatagtctcttaaaattctgtcactaatttttttaaacgacttttt

SEQ ID NO: 507993 - DNA, 120 bp, Artificial Sequence
  ENSG00000164142_89 (sequence is synthesized)
ttaaaaagccacctcctcatgcctgtccaaaatgaaccacgcaactggttacctttctctgcctaccttttgggctggggaagaggggcacctttctcatcactctcagggaagtcctga

SEQ ID NO: 507994 - DNA, 120 bp, Artificial Sequence
  ENSG00000164142_90 (sequence is synthesized)
ggaactgtgcaagccaggaagcatgagtcgctgaattggtgatggaggggtgtccacttttttctagttcctcagctgcttctggagcagtgttcacaacgggaatgtttttactgtcct

SEQ ID NO: 507995 - DNA, 120 bp, Artificial Sequence
  ENSG00000164142_91 (sequence is synthesized)
tggtaggctacaggttcacagcttcaaatcaaggcctccaaggattttattctcttacatcacagttttgacaagtatgcttttaaaaaacaacatttgcaaaactggtctttaagcgac

SEQ ID NO: 507996 - DNA, 120 bp, Artificial Sequence
  ENSG00000164142_92 (sequence is synthesized)
gtgagtcagaggtaacaaaggcatatatataccgaacaaaggtgctccggtgcagtggagagaacagtattagtgtcgcaagcacaggagtgcagacagccccgccttcatcgtgatgcc

SEQ ID NO: 507997 - DNA, 120 bp, Artificial Sequence
  ENSG00000164142_93 (sequence is synthesized)
tgcagcacaccacgattatcatgagaggtcaagattttgatttactaatttataatcttatttccaagcaaaacaagtcaatttcatgttacaacttttttcttgtttctttttatcttg

SEQ ID NO: 507998 - DNA, 120 bp, Artificial Sequence
  ENSG00000164142_94 (sequence is synthesized)
tttggcctgagggttgggggatttgggggagttgtcagctgcacaatctttgaagtgtaagttaatttttatgtgatatttcagtatatattttattgattaaatttattggaaaactta

SEQ ID NO: 507999 - DNA, 120 bp, Artificial Sequence
  ENSG00000164142_95 (sequence is synthesized)
agcaaagcttagagtccctctaagctgaacatctacaacacttctcttctggctctcattctaccttgtggctacagttactggtgatacacttgggtgttgaaggacatttttgaaatc

SEQ ID NO: 508000 - DNA, 120 bp, Artificial Sequence
  ENSG00000164142_96 (sequence is synthesized)
atacaacccagcagtaggttattgaagacagcagccccagtgaaattctagagaatccaagaacaagttaatcctcagtgttgattagcagcattagtgagcatggagaaaatggatcac

SEQ ID NO: 508001 - DNA, 120 bp, Artificial Sequence
  ENSG00000164142_97 (sequence is synthesized)
tagttattggagtttaaagcagtacaacttttgaggagtccgtttacatcaaaagccttcagatattcctactctttgagctgatgtttccacttctgggattctaattgaaggacaaaa

SEQ ID NO: 508002 - DNA, 120 bp, Artificial Sequence
  ENSG00000164142_98 (sequence is synthesized)
ttataactgcctggaaggttagcgtcaaagaagttgagtgaaattctagagaatccaagaacaagttaatcctcagtgttgattagcagcattagtgagcatggagaaaatggatcacta

SEQ ID NO: 508003 - DNA, 120 bp, Artificial Sequence
  ENSG00000164142_99 (sequence is synthesized)
actgggtcccgcgcaggcgtccccgggaccgcagagcaaactttctggactatctgaggacacttgtccagcgagccccactgctcggggaggaggagccacggccggggacagattttt

SEQ ID NO: 508004 - DNA, 120 bp, Artificial Sequence
  ENSG00000164144_0 (sequence is synthesized)
ctggttctggaggctgggttgagaggtcgccggtccgactgtcctcggcggttggtcagtgtgaatttgtgacagctgcagttgctccccgcccccgagcagccgaggtgcgtgggggaa

SEQ ID NO: 508005 - DNA, 120 bp, Artificial Sequence
  ENSG00000164144_1 (sequence is synthesized)
ggggaagaaggaaaaggtccgggtcgcgtttccgctcagtttttgccagggttgaggcgattccagagagcggcggaaaggataagcctcgacttagaagctaccgagttaccctaagaa

SEQ ID NO: 508006 - DNA, 120 bp, Artificial Sequence
  ENSG00000164144_2 (sequence is synthesized)
aggagtctaccatggctcaagaatctcccaaaaattcagcagcagaaattccagtgactagtaatggagaagttgatgactctcgtgaacatagctttaatagggatttgaagcattcat

SEQ ID NO: 508007 - DNA, 120 bp, Artificial Sequence
  ENSG00000164144_3 (sequence is synthesized)
taccatctggacttggtctctcagaaacccaaattacatctcatggctttgacaataccaaagagggtgttattgaagcaggagcatttcaaggtggccagagaacacagacaaaaagtg

SEQ ID NO: 508008 - DNA, 120 bp, Artificial Sequence
  ENSG00000164144_4 (sequence is synthesized)
gaccagttattctagcagatgaaattaaaaatcctgcaatggaaaagttagaacttgttagaaaatggagtctaaacacctataagtgtactcgacagattatctctgagaagctaggcc

SEQ ID NO: 508009 - DNA, 120 bp, Artificial Sequence
  ENSG00000164144_5 (sequence is synthesized)
cgacccagcttttccagatggtacatacccaaaggcaacttggagatgcatttgctgacctgagtttgaagtcactagaacttcatgaagaatttggctataatgccgatacccagaaac

SEQ ID NO: 508010 - DNA, 120 bp, Artificial Sequence
  ENSG00000164144_6 (sequence is synthesized)
tgctggctaaaaatggagagactcttcttggggccattaattttttcattgctagtgtgaacactttggtgaataaaaccattgaagatacattaatgactgtgaaacagtatgaaagtg

SEQ ID NO: 508011 - DNA, 120 bp, Artificial Sequence
  ENSG00000164144_7 (sequence is synthesized)
ccaggattgaatatgatgcatatcgcactgatttggaagaactgaatcttggaccacgtgacgcaaacactctgccaaagattgagcagtcacagcatctcttccaagcacataaggaaa

SEQ ID NO: 508012 - DNA, 120 bp, Artificial Sequence
  ENSG00000164144_8 (sequence is synthesized)
aatatgataaaatgcgcaatgatgtttctgtcaaattgaaatttctagaagaaaataaggttaaagtattgcacaatcagctggtccttttccacaatgccattgccgcttactttgctg

SEQ ID NO: 508013 - DNA, 120 bp, Artificial Sequence
  ENSG00000164144_9 (sequence is synthesized)
ggaatcagaagcagcttgaacagacacttaaacagttccatatcaaattgaaaacccctggagtggatgccccatcttggcttgaagaacagtaaaatcacagcggaaaataaaaagaaa

SEQ ID NO: 508014 - DNA, 120 bp, Artificial Sequence
  ENSG00000164144_10 (sequence is synthesized)
gaggggtgacaagcattatagtgattcttgcacaaacagctttaatttttccctttttcatactttaacaattgaactgttaagggtggttttaatgtaaacatagtttctataatctga

SEQ ID NO: 508015 - DNA, 120 bp, Artificial Sequence
  ENSG00000164144_11 (sequence is synthesized)
acacaataattttcctttttgagaaatccttttgtattgtgagggttgatggctatttctgtagtttgaaaacatctaatagagatttgcactgacaagataaaaattcaaggtttttgg

SEQ ID NO: 508016 - DNA, 120 bp, Artificial Sequence
  ENSG00000164144_12 (sequence is synthesized)
tcctggaaatgagggccgattgtaacttttccaaagggaggtttacatgatttgtatcaacatcagatattttatatgtgaatatattaaacatctttaagagattcattttcatgtatt

SEQ ID NO: 508017 - DNA, 120 bp, Artificial Sequence
  ENSG00000164144_13 (sequence is synthesized)
caaggttccccagcaccgccactgccatctgttatgtctcctagcagggttgcagctagtcgactggctcagcaaggaagtgatttaattgttcctgcaggtggccagagaacacagaca

SEQ ID NO: 508018 - DNA, 120 bp, Artificial Sequence
  ENSG00000164144_14 (sequence is synthesized)
actattttgcagagtaaagttatatggtgttcctgcagcgtccacacagaggcagcagctctaatgaatgattagcttgtggagttgtggcaaatacctttttaaaaatgaatctgtacc

SEQ ID NO: 508019 - DNA, 120 bp, Artificial Sequence
  ENSG00000164144_15 (sequence is synthesized)
actgtaattttatttagacttttttttaaagacacagaaatcacactgtcatttctgtgaggcttttaagcttatgaatttgcttcacccgaagtcattggacagttacatttgcaattt

SEQ ID NO: 508020 - DNA, 120 bp, Artificial Sequence
  ENSG00000164144_16 (sequence is synthesized)
cttttggttcataacaaaacctgcttaagagaatttttttttttgacaggtggacgtgggaatggaaattcttaatggtttctggagtagaaatctgtacttagaaaactagtttttggg

SEQ ID NO: 508021 - DNA, 120 bp, Artificial Sequence
  ENSG00000164144_17 (sequence is synthesized)
tcagttccattttgatagaagtgaatacatagacagcttttattgacttccatatgtaacaataccgtttaagccttaaatcacagatatgtgccttctcagatacagtaattcttgttc

SEQ ID NO: 508022 - DNA, 120 bp, Artificial Sequence
  ENSG00000164144_18 (sequence is synthesized)
aaccaatgtacaaaatccataaagaaacccctgttggataatgtttgatgtgtctattccttccatggaatggagcactatgtatgaatgttgggtttctttgtacttgttaagccacat

SEQ ID NO: 508023 - DNA, 120 bp, Artificial Sequence
  ENSG00000164144_19 (sequence is synthesized)
ttgaggtttatggtaaaaatcatcttttgagtttgctctttggtttttcttcattccttttgaggattgggaaaacagaaagattctttgatttgggtaatgaagaggtaatttgggaca

SEQ ID NO: 508024 - DNA, 120 bp, Artificial Sequence
  ENSG00000164144_20 (sequence is synthesized)
gtgtggtggtaccaggaagaaagaggattggaaaggccagtactgttttagttgctcggcactgttggttttgttttaatgtggttgccctgtccactacatggttctatcagtagtgta

SEQ ID NO: 508025 - DNA, 120 bp, Artificial Sequence
  ENSG00000164144_21 (sequence is synthesized)
atccattttcaatgtaaagctcttttagtttttgtcatagacataaattaatattttgagaggcatccctcacctgttcatttcttctgtgttgaaatgaagtacttaaaattaccgtta

SEQ ID NO: 508026 - DNA, 120 bp, Artificial Sequence
  ENSG00000164144_22 (sequence is synthesized)
tacatgaactttgtggactgtaagatttgttatatatgttcaaatgccttttagctggctttttaattaatatgcctgttttgagtgcttaatacaatgtaatgtgattgtaaatcatac

SEQ ID NO: 508027 - DNA, 120 bp, Artificial Sequence
  ENSG00000164144_23 (sequence is synthesized)
ctattttaaatcattccttcctgtatatttgtactcagagagccttattttattcttccagcagaattactacttgtgatagttcatttacattccccagaatgtgcctctagtgtgaat

SEQ ID NO: 508028 - DNA, 120 bp, Artificial Sequence
  ENSG00000164144_24 (sequence is synthesized)
tttgtattcttattaaacgtgtttgctgcagtaaatcgtttctctggaccttcatagtttaagaagtaactatttggaaattctgaagacacataatttgcgttttctgaaccttaaaaa

SEQ ID NO: 508029 - DNA, 120 bp, Artificial Sequence
  ENSG00000164144_25 (sequence is synthesized)
aaaaggtacttctgtcacttataattgttttagctcagtaagctattttttttcaatgtgaatctcttttgagagctgaacatgtccattcttaaccacatttcaataacagttactgta

SEQ ID NO: 508030 - DNA, 120 bp, Artificial Sequence
  ENSG00000164144_26 (sequence is synthesized)
gctaaggagctaaatagtttcatggattaatttttttcagaataaatttaaaatatccatgattctgatagtgggcacatgaccaaaagaaaaaagtaaatcaatatatttagccaatgg

SEQ ID NO: 508031 - DNA, 120 bp, Artificial Sequence
  ENSG00000164144_27 (sequence is synthesized)
tacatttactttgttaggaatgtaatttatgttcattatagaaaagaattagaagaaaatttcaagtaatagaagataagtaccttcccaagtgaataaatactgcatggaaccactcaa

SEQ ID NO: 508032 - DNA, 120 bp, Artificial Sequence
  ENSG00000164144_28 (sequence is synthesized)
ggaggctgggttgagaggtcgccggtccgactgtcctcggcggttggtcagtgtgaatttgtgacagctgcagttgctccccgcccccgagcagccgagttttgggttcttataaggaaa

SEQ ID NO: 508033 - DNA, 120 bp, Artificial Sequence
  ENSG00000164144_29 (sequence is synthesized)
gctgctaggagtacatgtctacaagattcaagaagctagttcccagccttcacttttttggttgtacaatatactagctctctaggtttggtacatgacgatgcctttagatcatctcca

SEQ ID NO: 508034 - DNA, 120 bp, Artificial Sequence
  ENSG00000164144_30 (sequence is synthesized)
tatatattggatttttaaagattgtttccaaagattcagctgtacagagtgtgtgcctaatacttttctaacttggaaataattcagtggtggctaaagctggcttgtactgcctgcaaa

SEQ ID NO: 508035 - DNA, 120 bp, Artificial Sequence
  ENSG00000164144_31 (sequence is synthesized)
agctgattggtaaattttcaagaatttgtaagccaactgttaaacacagccattattttaaaaattatgtaaagttattattaaatacatatattaaaaataaaagtaatacctcctcaa

SEQ ID NO: 508036 - DNA, 90 bp, Artificial Sequence
  ENSG00000164144_32 (sequence is synthesized)
tttctgaaccttaaaaaaaaagagacaggtttcgccatgttgcccaggctgggctcaagtgatcctctctagcctctttggaatcctgta

SEQ ID NO: 508037 - DNA, 120 bp, Artificial Sequence
  ENSG00000164144_33 (sequence is synthesized)
aagaaggaaaaggtccgggtcgcgtttccgctcagtttttgccagggttgaggcgattccagagagcggcggaaaggataagcctcgacttagaagctaccgagttaccctaagaaagtt

SEQ ID NO: 508038 - DNA, 120 bp, Artificial Sequence
  ENSG00000164151_0 (sequence is synthesized)
ggactgcgtcgcgctcgggggccgcgccgggtagcgtttctttttagtgcctgaggcagctctggctcggagagccttttgctagccccacggggacctctgtgcacggatggacccgcc

SEQ ID NO: 508039 - DNA, 80 bp, Artificial Sequence
  ENSG00000164151_1 (sequence is synthesized)
cggacctggcgggaagcggcctggcaggcggcggccccggcggcatcagcagagacaggacggggccgacgccgcgggcc

SEQ ID NO: 508040 - DNA, 120 bp, Artificial Sequence
  ENSG00000164151_2 (sequence is synthesized)
tgatgccgggcgagacccattcggcggcgcccgggacggcggcggacctgtcgcgatgtcagggctgcgcctctctgcagcagaatttgaatgaatatgttgaagcattaattaccttga

SEQ ID NO: 508041 - DNA, 120 bp, Artificial Sequence
  ENSG00000164151_3 (sequence is synthesized)
aacaaaaaattatcaatacagataatttgttaacagaatatcagaagaaatgtgatgagctgcagtttgcaagaagagagaatagtaatctgcatcaccaagtggaagagatgcttcaaa

SEQ ID NO: 508042 - DNA, 120 bp, Artificial Sequence
  ENSG00000164151_4 (sequence is synthesized)
aaatttctcctctacagaaatgtcaggaagaactgggatctttaaaagcagagctagaagagaaaaagagttctttaaagttgtatcaggatactcatcaggaatatgctcgtgtaaagg

SEQ ID NO: 508043 - DNA, 120 bp, Artificial Sequence
  ENSG00000164151_5 (sequence is synthesized)
aagaatgcttgaagagtgatgctcagaagaagaaactagaagctaaggtgaagaagctgcaagaggctgctgtcaagcaaactcaggacttcaagcaactgagaaatgaaaagaaaatac

SEQ ID NO: 508044 - DNA, 120 bp, Artificial Sequence
  ENSG00000164151_6 (sequence is synthesized)
ttgaaaaggaatttaagaagacacaggaaaggcttgacgaattttctaaacagaaaaatgaaaaggagttgagacatattggaacacaaatttcaagtgattcatatggaagcatagata

SEQ ID NO: 508045 - DNA, 120 bp, Artificial Sequence
  ENSG00000164151_7 (sequence is synthesized)
aaagaaaagtgaaactgcttctgaaggaactctggctctgtgtaaacacaacacacagactacctggtgaaggcagcaggtgtgtcccagaaaaacctgccaaagcaatcaccagctcca

SEQ ID NO: 508046 - DNA, 120 bp, Artificial Sequence
  ENSG00000164151_8 (sequence is synthesized)
gagtgcctggggaagatggtacgctacctccaacacagggcagccctctcaggacctcaaatgtgcagacatgcctcacaaaactgtccatggagataaaggaggactttttatgtcaaa

SEQ ID NO: 508047 - DNA, 120 bp, Artificial Sequence
  ENSG00000164151_9 (sequence is synthesized)
atgtggaaaaacagagctccagtggaacaaattgtagttctgaccatgtttttaatgagaatggaaatcttgaggttttagtacaaagtcatcgtgacggtggtagtactgaatttgttg

SEQ ID NO: 508048 - DNA, 120 bp, Artificial Sequence
  ENSG00000164151_10 (sequence is synthesized)
atcatgatcatttttttgatgaagatcttcaagctgcaattgacttcttcaaacttccccctcctcttctgtcaccagtgccctcgccccctccgatgtcatcacctcacccgggttcct

SEQ ID NO: 508049 - DNA, 120 bp, Artificial Sequence
  ENSG00000164151_11 (sequence is synthesized)
taccgtcttcatttgcacctgaaacctactttggagaatacacagattccagcgataatgactcagtccagcttagaaattctgctgagtgtgtttcagaagatgatacaactgaatcac

SEQ ID NO: 508050 - DNA, 120 bp, Artificial Sequence
  ENSG00000164151_12 (sequence is synthesized)
agaattattttggctcattgagaaaaaataaaggaagtggcacatgggaggaaaagcccaaatcacatgaagctatccaagctctgaatacatgggaagtaaataaagtgacaacttctg

SEQ ID NO: 508051 - DNA, 120 bp, Artificial Sequence
  ENSG00000164151_13 (sequence is synthesized)
gactcgagactttcacagcaacactgagagaatcttctgccacacactccttagttggtgaaaaacactggaccacagcatctcgatccatgagtgatagaaaaagagacattttacatg

SEQ ID NO: 508052 - DNA, 120 bp, Artificial Sequence
  ENSG00000164151_14 (sequence is synthesized)
agacaaaaacacaaatggaggttagggagatggataagtcagtacaaactgagaagaccattcataaactcactcgaggtctatgcattgagagattgtctgccagccctgcacaagaga

SEQ ID NO: 508053 - DNA, 120 bp, Artificial Sequence
  ENSG00000164151_15 (sequence is synthesized)
aggaagctgcccctgggaagtctgagttgtgttcttctccccttggcaaaaggccattaaatgaactcatggaatctgaaggaaaaaccgtattgtctaaaatgatgggatcgcccaaat

SEQ ID NO: 508054 - DNA, 120 bp, Artificial Sequence
  ENSG00000164151_16 (sequence is synthesized)
cagagtttactaagtggacacgaattaatgaaatcacttctgaaccagaccgtatcacagtttctggccattttcacagactatctagagaattggaaaaggaaaaagaagatactcaag

SEQ ID NO: 508055 - DNA, 120 bp, Artificial Sequence
  ENSG00000164151_17 (sequence is synthesized)
ggttcactttaggagaatcacctgaatcagaagatgatgactcaggtgatggaatggatgtagcagggcttgacattgaaaccagtttttcttcctcttctaccttggtagcattgtctg

SEQ ID NO: 508056 - DNA, 120 bp, Artificial Sequence
  ENSG00000164151_18 (sequence is synthesized)
ttggcagtaatccccagtcttcttctgggttagactgtggtaatgatacagatattactactaaagtattctctactgaaccgcatcattcagaacataaattgcaaactaaaactttaa

SEQ ID NO: 508057 - DNA, 120 bp, Artificial Sequence
  ENSG00000164151_19 (sequence is synthesized)
acacattacatctgcagtctgagccaccggagtgttctataggaggaaacaacttggagaatagcttgtgtgccttgagccctgaattgggagcatctaattttaatgatcagaagagca

SEQ ID NO: 508058 - DNA, 120 bp, Artificial Sequence
  ENSG00000164151_20 (sequence is synthesized)
gtgggatagaatatacaaaagtagtaaaaggcttgaccaaaatacattcacttcctcggtcagtatttatgaaagctacaaaagatgggcaatgtgaaagtcaagatccaagaattgagc

SEQ ID NO: 508059 - DNA, 120 bp, Artificial Sequence
  ENSG00000164151_21 (sequence is synthesized)
tcacactaaataagccagatttcacatcattaataggttctcaggctgccttgatcaagagtggtttgggttttgttaaaagtacttcatggcaccatagtgatttattaaggaaaggtg

SEQ ID NO: 508060 - DNA, 120 bp, Artificial Sequence
  ENSG00000164151_22 (sequence is synthesized)
gcgaagaaagtctgagagccaaatcagaacatgaacagaagactagccatcagttacaaaaggcaatgccattcctacaaaatagaggaccaacacccaagcctgatcttcttagagaaa

SEQ ID NO: 508061 - DNA, 120 bp, Artificial Sequence
  ENSG00000164151_23 (sequence is synthesized)
ataacaatcctgtagaattcaagaccactgcatcggtgttgcctaatcaagtatcagttatcacaaaacagacaagacctgaaaaggttcagagtgccaaattggaacacttgaggccac

SEQ ID NO: 508062 - DNA, 120 bp, Artificial Sequence
  ENSG00000164151_24 (sequence is synthesized)
atagggttgagcctaccttagtaacagaaaatagtggcaacaaaaccggtatgtcaactgtagcaaaatgtgatggggaaagagatgatacaacacaaaacatcacggaggtggctgctg

SEQ ID NO: 508063 - DNA, 120 bp, Artificial Sequence
  ENSG00000164151_25 (sequence is synthesized)
tgaaaagcatttcaccagaagtttctgcctctaggagaaaattagattttaattctccaggtggttcttcaccagtagaaaattctgattgttccacaaatagcagattatctttctctc

SEQ ID NO: 508064 - DNA, 120 bp, Artificial Sequence
  ENSG00000164151_26 (sequence is synthesized)
ctgaaaatatcctcatccaaaaccaagacattgtgagagaagctgcagtgcagggagatgggcagaagcaaaggcagcctcaggccacagatctggactccagtgggacacatggcagtg

SEQ ID NO: 508065 - DNA, 120 bp, Artificial Sequence
  ENSG00000164151_27 (sequence is synthesized)
agatgcttccagccacagaagtgactgtgtcaggagggttttctgttgaagaaaccagctgtggagacacagggagatctggtggtgaggccctggctgttgcaaatgattctaccagca

SEQ ID NO: 508066 - DNA, 120 bp, Artificial Sequence
  ENSG00000164151_28 (sequence is synthesized)
caccacaaaatgctaatggactttggaaattgaaatctacaactcccggtggtgctttgcctgagtgttttggcaccacagacactactttttcttcagcattttgcagaaaacatggag

SEQ ID NO: 508067 - DNA, 120 bp, Artificial Sequence
  ENSG00000164151_29 (sequence is synthesized)
agacacaggatacctcccaaagtagcctgcctggtaccttacattgttacacaggcattcgagaggggggagacgacactgaggtagagagtgaggcatttagctgcagtgaggggagcg

SEQ ID NO: 508068 - DNA, 120 bp, Artificial Sequence
  ENSG00000164151_30 (sequence is synthesized)
aacagcaagatgctcctgatgactcacagaaaaatttaggagacacagatgctgctgtagccgaggtgagaccttccttagaggtaggttatttgacgtcagctctgcaagattttaaca

SEQ ID NO: 508069 - DNA, 120 bp, Artificial Sequence
  ENSG00000164151_31 (sequence is synthesized)
taagtactttttctgagctggatagactttccacatcagaggttgtgatgtttcttgagagctgtcagttaggggattatagttcaggggactctgtttctgaatgttctagtaaaggaa

SEQ ID NO: 508070 - DNA, 120 bp, Artificial Sequence
  ENSG00000164151_32 (sequence is synthesized)
ccctaagtaaagaaatgaacaaagaattaaaggcaagtgaaataggagaaaaatacagaaagcaaccctgtgaggaagaaacacttggaacctgtgaagagtggattgaatcagaggaag

SEQ ID NO: 508071 - DNA, 120 bp, Artificial Sequence
  ENSG00000164151_33 (sequence is synthesized)
gttaaaaaatacaagtcagctcactcagtgttctttggaaactctgtctgaggttctgaccaagattaggcaagaacttcaaacaaattctgaagattgcaatggtaaagatactggcag

SEQ ID NO: 508072 - DNA, 120 bp, Artificial Sequence
  ENSG00000164151_34 (sequence is synthesized)
tttattgctcttaaatgtaaataacaacatgaccactgagaatttaaaagagaaaagtccatttcgggaaacgactggctcctcatcacatgcttcagaaccaaccccacaagcagctgc

SEQ ID NO: 508073 - DNA, 120 bp, Artificial Sequence
  ENSG00000164151_35 (sequence is synthesized)
cttggacactgagggcagctctcccatcagcggtatgcctcagaatgaaaaccctcagagcagaccagaggcccgttcagatgcaggcaggcaaaccgatggtggggaagaagacctgcc

SEQ ID NO: 508074 - DNA, 120 bp, Artificial Sequence
  ENSG00000164151_36 (sequence is synthesized)
agaacctgtggagccatcagccttgtgctctgactctgtgatggagccatccatagagcaaagttctaactgcgaggccgaaacaacatttcagtgtcagatagcaacagtgacctcaga

SEQ ID NO: 508075 - DNA, 120 bp, Artificial Sequence
  ENSG00000164151_37 (sequence is synthesized)
agttataaacgtacttataaataaggatcagaatctagtcattgaaaagggggacaactggacaatcatcagtggtgtagctgtcttgccacatgtggaccaggtcacactgtgtgacat

SEQ ID NO: 508076 - DNA, 120 bp, Artificial Sequence
  ENSG00000164151_38 (sequence is synthesized)
tcctggagacatccctatttctcaggatcaaggagagctggaagctggttgcatcccagtgacttctgctgagaagtccccagaggccagtcacactggccctgcatttcaggaggctcc

SEQ ID NO: 508077 - DNA, 120 bp, Artificial Sequence
  ENSG00000164151_39 (sequence is synthesized)
atgtggcaataatctttcatgtccccaagaggatgtttcaagcagtggtcagagcaccaactttgataagagtcgtttgcgaaatagacccgttaagcctagtatatggattagttctca

SEQ ID NO: 508078 - DNA, 120 bp, Artificial Sequence
  ENSG00000164151_40 (sequence is synthesized)
aatctatgatcaaaacttcgagactcagattgttgcgtctgatcacacatattataactcaaaactagagccatctggcaaaaataagaatcgatcaaagatttcaaacaaagatcagtc

SEQ ID NO: 508079 - DNA, 120 bp, Artificial Sequence
  ENSG00000164151_41 (sequence is synthesized)
aaacaaaccagtaaaaacttcagcgtcgagcagagttgaaactcatcagagtgaagttgctcagtcattttcaggggaaaaagctaatacaaaaactcaaagaagccaaactcagaccat

SEQ ID NO: 508080 - DNA, 120 bp, Artificial Sequence
  ENSG00000164151_42 (sequence is synthesized)
tttagcaaatgctgatacatccactcctacagattgttctcctgacacactgagtaaaatacggcaagaggtggggcctcctttgccgcctctgcttgctcctctgatagctacacctcc

SEQ ID NO: 508081 - DNA, 120 bp, Artificial Sequence
  ENSG00000164151_43 (sequence is synthesized)
aaggacttcacagccactgtctccactgatatcgagttctagtccttcctcaccagcctctcctgttggccaggtttctcccttccgtgaaaccccagtgcctcctgccatgtctccatg

SEQ ID NO: 508082 - DNA, 120 bp, Artificial Sequence
  ENSG00000164151_44 (sequence is synthesized)
gccagaggaccccagacgtgcctctcctccagatccttctccatctccatctgcagcttcagccagtgagagggtagtgccgtctcctctgcagttctgtgcggccacgccgaagcacgc

SEQ ID NO: 508083 - DNA, 120 bp, Artificial Sequence
  ENSG00000164151_45 (sequence is synthesized)
acttcctgtgcctggccgactcccaccctgtgcatctggccacgctgctgtgggagggcctcaggagaattctgtgaaaatccttgacaccatgtatccagagttatctgccagggcccg

SEQ ID NO: 508084 - DNA, 120 bp, Artificial Sequence
  ENSG00000164151_46 (sequence is synthesized)
gaccctcaacatcctcaaagggaatattcaactcacacgaggtccgcctgctgactgtaagaatttaccgggacctgccagtgctatgataggattcaaaacgatcacttcagcagcaac

SEQ ID NO: 508085 - DNA, 120 bp, Artificial Sequence
  ENSG00000164151_47 (sequence is synthesized)
tgcttttgtcaaaactgggagcagctctggtggtgactgtaaccaagacaagtcaagagatttggggactcagcaggattcaagcgggaaaagaacactgtcaacgtctacactgagaag

SEQ ID NO: 508086 - DNA, 120 bp, Artificial Sequence
  ENSG00000164151_48 (sequence is synthesized)
tgctaaaagactgcgcctggacactgggtccccagaaccagaaaccaggggagtcactgcagaaggaatccacaaaaacctcccagggaacctccctccagctgaagttgcaacaacaaa

SEQ ID NO: 508087 - DNA, 120 bp, Artificial Sequence
  ENSG00000164151_49 (sequence is synthesized)
tgaggaaagaagttgttctagtccagccgtcagtgcagtttcacagttgcctttaagcccaaaagaaactgtggagtcccatgataaagccatagctaatgccctgaagaaaattgcaga

SEQ ID NO: 508088 - DNA, 120 bp, Artificial Sequence
  ENSG00000164151_50 (sequence is synthesized)
gttttcttttgatctgttacctgtcattcgtagtcatgtgtatgtgggaaatatctccaaaaagcccgtaatgagagatcaagagaaggaagttgtttatgaatttagcacaacaaaaaa

SEQ ID NO: 508089 - DNA, 120 bp, Artificial Sequence
  ENSG00000164151_51 (sequence is synthesized)
gcatttagcagagtgcttgcttcactctattctctcagaactaaaaattcagaagatatctatggaccacaattacattcacgccctctgcagggtgtatgtgggtatttgtcggcaact

SEQ ID NO: 508090 - DNA, 120 bp, Artificial Sequence
  ENSG00000164151_52 (sequence is synthesized)
cggagacttggaaagagctcgtttgttttgctacagcctacttaaagaagattttccggagtctgaaaaattaactttgtttattgcaaacatgtggcatgatatatttctctctcaatc

SEQ ID NO: 508091 - DNA, 120 bp, Artificial Sequence
  ENSG00000164151_53 (sequence is synthesized)
ggtgattaataaagcaatgcagttagttgccaggcaacgtgctaaaggagaggttctgaactgcttgagagcttttcttaattgggaaaagaatgccccggtagatgttggcttcatggt

SEQ ID NO: 508092 - DNA, 120 bp, Artificial Sequence
  ENSG00000164151_54 (sequence is synthesized)
ttctaagctgcttttgaccatacagttatgtccaaaaacagaatttcaacctagtgaaaaatttggtgaagacctaagtgataacacttgggaatacatatttgccattgatctgctctg

SEQ ID NO: 508093 - DNA, 120 bp, Artificial Sequence
  ENSG00000164151_55 (sequence is synthesized)
ctgccatcagaaatggatctggacgcatgataacatcataagtaaggagctgtggcctgtgatggataaatggataaaatacagaaaaggacatgcaaacattgcgtatactcctgatat

SEQ ID NO: 508094 - DNA, 120 bp, Artificial Sequence
  ENSG00000164151_56 (sequence is synthesized)
tattatagcctcaatactgaggctgattggtcgtttaggccaattgggtttgaaagaaggatttccatctgctgtgaaaaatattagttcggttattggtatgtttatacagcatgctca

SEQ ID NO: 508095 - DNA, 120 bp, Artificial Sequence
  ENSG00000164151_57 (sequence is synthesized)
cgatgaagatataccatggggtatacagttagcagccgtgtatgctctttgtgacttgagtcccagcaatccagcagaaatttccaagatcctggaagcttggcggagagaggcctccaa

SEQ ID NO: 508096 - DNA, 120 bp, Artificial Sequence
  ENSG00000164151_58 (sequence is synthesized)
aagcgttccgtctgcgattgtcagctgcctagaggaagtcagtgccctgagcacagaggagcttggctgacctgggatgccactgaggcttgagaagtgccttgacacattttgaacaca

SEQ ID NO: 508097 - DNA, 120 bp, Artificial Sequence
  ENSG00000164151_59 (sequence is synthesized)
aatagtttgatcagctttcagaatacaaagggaggtttcaaaacaaaaagacataaaatagataaaacagaccagaggctctccttattgtttggcaaggagacaggagaaacaagcagt

SEQ ID NO: 508098 - DNA, 120 bp, Artificial Sequence
  ENSG00000164151_60 (sequence is synthesized)
cgcatagtcgtttttccctaaatctaatacgtttcacttaaggctgttgtgatctgtgacatatgggttatattattgtgtctttgtcaaacaacaaaaacttgaacttagccctttttt

SEQ ID NO: 508099 - DNA, 120 bp, Artificial Sequence
  ENSG00000164151_61 (sequence is synthesized)
tgctgcagaaagtgtccttttagtggcttcttaaaattgagtggcattttataatgaacttaccaatataaaaacatgatttggttcctgagctgttgttgttggacttgtgttccaatg

SEQ ID NO: 508100 - DNA, 120 bp, Artificial Sequence
  ENSG00000164151_62 (sequence is synthesized)
agtgactaggaaaaaataaattggcaaaaacctagagttttctgctatctttgctggaaatgagttgcaaaagtttttctcaagatgtagtgcgtaattgatcagagcaaaacatgcaga

SEQ ID NO: 508101 - DNA, 120 bp, Artificial Sequence
  ENSG00000164151_63 (sequence is synthesized)
gcccttagcagaaacccactttaatgcattttcttcatatccctaaagttccttaaaaatatgtgacaatgcatcaggaagaggagaactgaagagtagaagttcccttgcagatttttt

SEQ ID NO: 508102 - DNA, 120 bp, Artificial Sequence
  ENSG00000164151_64 (sequence is synthesized)
tatcagtgacatgtaatgagcaattcacagatgagcgcaggcagagctctgtgtgccgtgtacatatggaccgtgctatgatgtgtctcacattggatgatattccactttgggaatttt

SEQ ID NO: 508103 - DNA, 120 bp, Artificial Sequence
  ENSG00000164151_65 (sequence is synthesized)
agtatttgtatatagaaaatgggtttaataactcaccatggttttgatttgtcttatattcgttatttcttaaaactcttgtatgtgtttttataataaaaaataaaagtaagccatgga

SEQ ID NO: 508104 - DNA, 120 bp, Artificial Sequence
  ENSG00000164151_66 (sequence is synthesized)
ttactggctttttctgttgagttttggaactaacttatgtttaattcctgaaagagatgtgagaattgttcctcataggccttctggaagatagtacttaacaggcttcagtagggagca

SEQ ID NO: 508105 - DNA, 120 bp, Artificial Sequence
  ENSG00000164151_67 (sequence is synthesized)
agctttttagtgggtgggtttctcttaatttgtactgaggatgtggcatgttttttaggtttacgaataatgtgaaactgaatgtgatacttgctgaatgttatttttgaatctgcaaga

SEQ ID NO: 508106 - DNA, 120 bp, Artificial Sequence
  ENSG00000164151_68 (sequence is synthesized)
agtacagtatgggaaattcaaaatgttgggcaattgactttcattaattatttttgtgatttacagggaaatgtgtgtgtatatatatatctccaaaatcatagaaatagcgttgctgta

SEQ ID NO: 508107 - DNA, 120 bp, Artificial Sequence
  ENSG00000164151_69 (sequence is synthesized)
tattcatgaacgctgtgggcagtcagaagacaattcttggccttacagtcaccacttgttcggtagccatttaatgagctcggttgtggagttagtgtctggtcagctatttttttagca

SEQ ID NO: 508108 - DNA, 120 bp, Artificial Sequence
  ENSG00000164151_70 (sequence is synthesized)
gtgggaaaaagatgtgtataattgatccttccatgtcttgctgtggtaataccttgatttaaatctctcctgtaaaaacttaaagtttctctcataaaagtaaacatacgtatactcctt

SEQ ID NO: 508109 - DNA, 120 bp, Artificial Sequence
  ENSG00000164161_0 (sequence is synthesized)
atgagaggctgtgtgagaagctgcagccgccggcagaggagacctcagcatcatctagagcccagcgctggccctgcctccgcctgccccgccgccgccgtcgccgtttctgttcctgct

SEQ ID NO: 508110 - DNA, 120 bp, Artificial Sequence
  ENSG00000164161_1 (sequence is synthesized)
actgtcccacctaaacaactcccgttacacggacaagtgaacatctgtggctgtcctctccttttcttcctcctcttccaactccttctcctcctcccacttcccagccgcagcagaaag

SEQ ID NO: 508111 - DNA, 120 bp, Artificial Sequence
  ENSG00000164161_2 (sequence is synthesized)
cccccaacccaactgacactggcacaactgcaaacggtgtcatccgcacaactttatctcgctcctcgggctcccctaaggcattggacccatcgccgcgtcttttattttttgcaaagt

SEQ ID NO: 508112 - DNA, 120 bp, Artificial Sequence
  ENSG00000164161_3 (sequence is synthesized)
tgcatcgctgtacatatttttgtccccgccacctccctctgtctctggagtgccctacagccccgcaaactcctcctggagctgcgccctagtgcccctgctgggcagtggcgttccccc

SEQ ID NO: 508113 - DNA, 120 bp, Artificial Sequence
  ENSG00000164161_4 (sequence is synthesized)
ccatcctcccgcgcccagcccctgctgctctgggcagacgatgctgaagatgctctcctttaagctgctgctgctggccgtggctctgggcttctttgaaggagatgctaagtttgggga

SEQ ID NO: 508114 - DNA, 120 bp, Artificial Sequence
  ENSG00000164161_5 (sequence is synthesized)
aagaaacgaagggagcggagcaaggaggagaaggtgcctgaatgggaaccccccgaagcgcctgaaaaggagagacaggaggatgatgtcccagctggagctgctgagtgggggagagat

SEQ ID NO: 508115 - DNA, 120 bp, Artificial Sequence
  ENSG00000164161_6 (sequence is synthesized)
gctgtgcggtggcttctaccctcggctgtcctgctgcctgcggagtgacagcccggggctagggcgcctggagaataagatattttctgttaccaacaacacagaatgtgggaagttact

SEQ ID NO: 508116 - DNA, 120 bp, Artificial Sequence
  ENSG00000164161_7 (sequence is synthesized)
ggaggaaatcaaatgtgcactttgctctccacattctcaaagcctgttccactcacctgagagagaagtcttggaaagagacctagtacttcctctgctctgcaaagactattgcaaaga

SEQ ID NO: 508117 - DNA, 120 bp, Artificial Sequence
  ENSG00000164161_8 (sequence is synthesized)
attcttttacacttgccgaggccatattccaggtttccttcaaacaactgcggatgagttttgcttttactatgcaagaaaagatggtgggttgtgctttccagattttccaagaaaaca

SEQ ID NO: 508118 - DNA, 120 bp, Artificial Sequence
  ENSG00000164161_9 (sequence is synthesized)
agtcagaggaccagcatctaactacttggaccagatggaagaatatgacaaagtggaagagatcagcagaaagcacaaacacaactgcttctgtattcaggaggttgtgagtgggctgcg

SEQ ID NO: 508119 - DNA, 120 bp, Artificial Sequence
  ENSG00000164161_10 (sequence is synthesized)
gcagcccgttggtgccctgcatagtggggatggctcgcaacgtctcttcattctggaaaaagaaggttatgtgaagatacttacccctgaaggagaaattttcaaggagccttatttgga

SEQ ID NO: 508120 - DNA, 120 bp, Artificial Sequence
  ENSG00000164161_11 (sequence is synthesized)
cattcacaaacttgttcaaagtggaataaagggaggagatgaaagaggactgctaagcctcgcattccatcccaattacaagaaaaatggaaagttgtatgtgtcctataccaccaacca

SEQ ID NO: 508121 - DNA, 120 bp, Artificial Sequence
  ENSG00000164161_12 (sequence is synthesized)
agaacggtgggctatcgggcctcatgaccacattcttagggttgtggaatacacagtatccagaaaaaatccacaccaagttgatttgagaacagccagagtctttcttgaagttgcaga

SEQ ID NO: 508122 - DNA, 120 bp, Artificial Sequence
  ENSG00000164161_13 (sequence is synthesized)
actccacagaaagcatctgggaggacaactgctctttggccctgacggctttttgtacatcattcttggtgatgggatgattacactggatgatatggaagaaatggatgggttaagtga

SEQ ID NO: 508123 - DNA, 120 bp, Artificial Sequence
  ENSG00000164161_14 (sequence is synthesized)
tttcacaggctcagtgctacggctggatgtggacacagacatgtgcaacgtgccttattccataccaaggagcaacccacacttcaacagcaccaaccagccccccgaagtgtttgctca

SEQ ID NO: 508124 - DNA, 120 bp, Artificial Sequence
  ENSG00000164161_15 (sequence is synthesized)
tgggctccacgatccaggcagatgtgctgtggatagacatcccactgatataaacatcaatttaacgatactgtgttcagactccaatggaaaaaacagatcatcagccagaattctaca

SEQ ID NO: 508125 - DNA, 120 bp, Artificial Sequence
  ENSG00000164161_16 (sequence is synthesized)
gataataaaggggaaagattatgaaagtgagccatcacttttagaattcaagccattcagtaatggtcctttggttggtggatttgtataccggggctgccagtcagaaagattgtatgg

SEQ ID NO: 508126 - DNA, 120 bp, Artificial Sequence
  ENSG00000164161_17 (sequence is synthesized)
aagctacgtgtttggagatcgtaatgggaatttcctaactctccagcaaagtcctgtgacaaagcagtggcaagaaaaaccactctgtctcggcactagtgggtcctgtagaggctactt

SEQ ID NO: 508127 - DNA, 120 bp, Artificial Sequence
  ENSG00000164161_18 (sequence is synthesized)
ttccggtcacatcttgggatttggagaagatgaactaggtgaagtttacattttatcaagcagtaaaagtatgacccagactcacaatggaaaactctacaaaattgtagatcccaaaag

SEQ ID NO: 508128 - DNA, 120 bp, Artificial Sequence
  ENSG00000164161_19 (sequence is synthesized)
acctttaatgcctgaggaatgcagagccacggtacaacctgcacagacactgacttcagagtgctccaggctctgtcgaaacggctactgcacccccacgggaaagtgctgctgcagtcc

SEQ ID NO: 508129 - DNA, 120 bp, Artificial Sequence
  ENSG00000164161_20 (sequence is synthesized)
aggctgggagggggacttctgcagaactgcaaaatgtgagccagcatgtcgtcatggaggtgtctgtgttagaccgaacaagtgcctctgtaaaaaaggatatcttggtcctcaatgtga

SEQ ID NO: 508130 - DNA, 120 bp, Artificial Sequence
  ENSG00000164161_21 (sequence is synthesized)
acaagtggacagaaacatccgcagagtgaccagggcaggtattcttgatcagatcattgacatgacatcttacttgctggatctaacaagttacattgtatagtttctgggactgtttga

SEQ ID NO: 508131 - DNA, 120 bp, Artificial Sequence
  ENSG00000164161_22 (sequence is synthesized)
atattctattccaatgggcatttattttttatcctgtcattaaaaaaaaaagactgttatcctgctacacactcctgtgatttcattctcttttattaatttaaaaataatttccagaaa

SEQ ID NO: 508132 - DNA, 120 bp, Artificial Sequence
  ENSG00000164161_23 (sequence is synthesized)
tgtgcagatcctctgtgtgtatgtcagcatgtttgttcacatatgcacatacacatactcataacccctatatgcgttgttgcataacagatgattttttaaaatatatacttccttatg

SEQ ID NO: 508133 - DNA, 120 bp, Artificial Sequence
  ENSG00000164161_24 (sequence is synthesized)
caaagtaatttacacagaaattccattgtaaattgataatggattttttatgttactagaagagattatttgacttcccaggaattttctgtctgtaatcactaaagtcaactttaatag

SEQ ID NO: 508134 - DNA, 120 bp, Artificial Sequence
  ENSG00000164161_25 (sequence is synthesized)
agttttgaaacagtactgtgcaatccgatggatctaattaaaaaaaaggcaatatttttatattaaagtactatactaggagagaatgtttcagaactccctgatgaatttctaagtgag

SEQ ID NO: 508135 - DNA, 120 bp, Artificial Sequence
  ENSG00000164161_26 (sequence is synthesized)
caacttgatataaaattgtaatcttcatttttgtcagtgtatccagttacagaatgctacacacttacctttttattggctgagaaatctggttatttcatcttaatctcaagattgttt

SEQ ID NO: 508136 - DNA, 120 bp, Artificial Sequence
  ENSG00000164161_27 (sequence is synthesized)
tcaagtgttttataattaaatcataatagcatattttaaaatcaatcttcctaaaaggtctgcttttattgtatattttatttaacaataggcactgggtttgtgttacatatttatata

SEQ ID NO: 508137 - DNA, 120 bp, Artificial Sequence
  ENSG00000164161_28 (sequence is synthesized)
ttttattttatttttataatatagacatcacctagatgaaacacctttaccctgtcctgtaaaacactaaagttacatttttcaccaacttaattggaaagaaggggagtgagaaagcaa

SEQ ID NO: 508138 - DNA, 120 bp, Artificial Sequence
  ENSG00000164161_29 (sequence is synthesized)
acagtctttaatgtgctgtggatctaatctagcaaggtatccttgtgccaacatgtaatcattaacgacggatgaaaaagcaagaaaacagccaatccttataaaattccagcattaaac

SEQ ID NO: 508139 - DNA, 120 bp, Artificial Sequence
  ENSG00000164161_30 (sequence is synthesized)
atttgtaaagtgcttttcaccatagcaagactgtcagagtctatgttattagaatgttgcagatttccactgaatcgaacctcactggagaagagctcacttgtttttaaaaatcttggc

SEQ ID NO: 508140 - DNA, 120 bp, Artificial Sequence
  ENSG00000164161_31 (sequence is synthesized)
tatgtaagctgtcacctgtacaaatttttaacataataattcttgccaaatatgactttaaatgtacgtgttccttcagaactcaatgaaaatactctttggctaatgtatcaataaatt

SEQ ID NO: 508141 - DNA, 120 bp, Artificial Sequence
  ENSG00000164161_32 (sequence is synthesized)
ttctgtaaatgttctgttcagggttttacagagatgacatgttctgacttaaaactgcaaaaagtctagtagatatttttcttcatggttttcaaagccagctctccacgtttggatttt

SEQ ID NO: 508142 - DNA, 120 bp, Artificial Sequence
  ENSG00000164161_33 (sequence is synthesized)
aacaaaatataaggcctctttgcactagtgaaaaaacacgtctactcatgacaagtgcacacccactatggctgtccttcttctgtaaacatccattcctctagaatctaaattgtagag

SEQ ID NO: 508143 - DNA, 120 bp, Artificial Sequence
  ENSG00000164161_34 (sequence is synthesized)
cagtatagattatgcagcgccagctgactttctaaaccttctccttacctttaggaatacaagcctcaatttaaaaaatatattgtagctagtatttctctattgttttaaggtgagaga

SEQ ID NO: 508144 - DNA, 120 bp, Artificial Sequence
  ENSG00000164161_35 (sequence is synthesized)
tttgcaattaaagcccagtaagcatttatatagaagccacaatgtagaaagattggttaagtacactgctcttgtcttccatatatgattacttaagtttcaagtgacctcatgccaaat

SEQ ID NO: 508145 - DNA, 120 bp, Artificial Sequence
  ENSG00000164161_36 (sequence is synthesized)
ggaaatgggttgagaaatcttggttcagtgcttagtgaacaatagcctgcattaaaaagtgcatgcataattttgcacaatttagattcaattgacagtctattcaaagaagtctcagga

SEQ ID NO: 508146 - DNA, 120 bp, Artificial Sequence
  ENSG00000164161_37 (sequence is synthesized)
ttaaatgagcatggagaccaaattgccctcttaccccagaaaaggggtggtcccttctagtcacactaacacttcattggcccaacagtgtgacaaatcttgcaatgaaccatgcagtag

SEQ ID NO: 508147 - DNA, 120 bp, Artificial Sequence
  ENSG00000164161_38 (sequence is synthesized)
cctgcatctgtaggttaatagcaatcttttgtctccattgctttctcttcatagcccttttactgaattccatcacagaaagttttacaattaaaaaaaaatgtcctgacaaccattttt

SEQ ID NO: 508148 - DNA, 120 bp, Artificial Sequence
  ENSG00000164161_39 (sequence is synthesized)
gtaaatggaccttaccatctaattgtcccttattcaacgtgggtgacattaacaaaatgtgaacttcttgtgagggagccagctgtctaaatctgtcaaatcgtgcagttttattacaca

SEQ ID NO: 508149 - DNA, 120 bp, Artificial Sequence
  ENSG00000164161_40 (sequence is synthesized)
ttctccaattcttcctagtttccctgaaaacaataaggatactgctatatattcagtaaaatctaaaaaaatcaagcattacttcttacatctttaaactttccatctcctccccaaaat

SEQ ID NO: 508150 - DNA, 120 bp, Artificial Sequence
  ENSG00000164161_41 (sequence is synthesized)
attttcaagtgacttagaaaaacatatgtgccccaggtgtcattgccttttcttttgtgagtcattagaatgaaaggccaagttcttctcaagagaagatagcaagatccacggatatta

SEQ ID NO: 508151 - DNA, 120 bp, Artificial Sequence
  ENSG00000164161_42 (sequence is synthesized)
agccaagcaaagaaagtaaaatcattggagtcatttctttctgttcttaggagaaaagtagatagcactggctaattgatggcaacatattttaaattaagtggtcaattcaaaaattct

SEQ ID NO: 508152 - DNA, 120 bp, Artificial Sequence
  ENSG00000164161_43 (sequence is synthesized)
ctttgaccttttctttcaagtagatttttttaaatgcatgactggagaattatcttcaatgattcatgatgagaggcaggtaggaattggttaagaagtatgagcaggaaaaaattattg

SEQ ID NO: 508153 - DNA, 120 bp, Artificial Sequence
  ENSG00000164161_44 (sequence is synthesized)
tttaatcacatgaaaggcaacatctgttcagttcataaagcacacagtctcgaatggaagaaaaaaaggtccttcgtaagaatactgatgcataagataaagacgaaataatgaaaaaga

SEQ ID NO: 508154 - DNA, 120 bp, Artificial Sequence
  ENSG00000164161_45 (sequence is synthesized)
aaaatgtatattattattcccttgtccattctcaagtttaagctgcggttgtcagttgaatgtgaaatgatgttatagttgttttaaatggttggaaataacctttctactactgtttct

SEQ ID NO: 508155 - DNA, 120 bp, Artificial Sequence
  ENSG00000164161_46 (sequence is synthesized)
gccacactgttgtcctggttcatagaaccttgttttcttgacagttatttaaggtaataaaaggaacacaatttggcagatctttaagtgaaagagagaaaaaatttaagaaattgagtg

SEQ ID NO: 508156 - DNA, 120 bp, Artificial Sequence
  ENSG00000164161_47 (sequence is synthesized)
atggctaaaagtaagtgcttccatccataacttttcttcttggatttttttcaatgtaattattgtaaaatatatttttttattttatcatgaagaatactcggaaggtttctcagatta

SEQ ID NO: 508157 - DNA, 120 bp, Artificial Sequence
  ENSG00000164161_48 (sequence is synthesized)
atgagtatctcataaagagtagagaaaccaacacatacaatatatacacacaacctaaatagaaaactattttctttgtcatttgcatgccccagagaagttacttcttccctatttatt

SEQ ID NO: 508158 - DNA, 89 bp, Artificial Sequence
  ENSG00000164161_49 (sequence is synthesized)
atttgcatgccccagagaagttacttcttccctatttatttctttgaaaataattacaaaatagtatactaacaattttaatccatttg

SEQ ID NO: 508159 - DNA, 71 bp, Artificial Sequence
  ENSG00000164161_50 (sequence is synthesized)
ccatgttggccaggctgatttcaaactccagacttcaagtgatccagcccccctccatttgcttttgatat

SEQ ID NO: 508160 - DNA, 120 bp, Artificial Sequence
  ENSG00000164161_51 (sequence is synthesized)
atgcccagcttccatttgcttttgatattgtttttatctctgagttacaaactatacaagcttaccaggtataaggttagatgctacatctaggagcattcaagatatacattaatttaa

SEQ ID NO: 508161 - DNA, 120 bp, Artificial Sequence
  ENSG00000164161_52 (sequence is synthesized)
acttttattagtctaactttctgttaagtctcttagctttgaaacataaaagagaaatcaagcccaaatttttagaggaaggctaaggtatactattggcagttgtagttttaattgtaa

SEQ ID NO: 508162 - DNA, 120 bp, Artificial Sequence
  ENSG00000164161_53 (sequence is synthesized)
ttgactgattaaccaagtaatttataaaatgttacctatactgtcagtgttcacctcctctccctccctccttctctctctctctccccctctcgctctctcggctaatatatatgtgta

SEQ ID NO: 508163 - DNA, 120 bp, Artificial Sequence
  ENSG00000164161_54 (sequence is synthesized)
cacacacacacacatacatacatacatacatatattctttttccttttaaccacttccctctcctacattttctattggttttgcctaaatagacatgttctcaatacacccatgttgaa

SEQ ID NO: 508164 - DNA, 120 bp, Artificial Sequence
  ENSG00000164161_55 (sequence is synthesized)
aatagacatgttctcaatacacccatgttgaaggtatcctgggctagattgctgttgattttgctggttatgatcttttctttgtttttctgaaaaatagcctctcttgattccacattt

SEQ ID NO: 508165 - DNA, 120 bp, Artificial Sequence
  ENSG00000164161_56 (sequence is synthesized)
tctcaaattctatataacaaataatagtggatagtaaacaaatgacatactaggctgatctattacaatcattgaaagaaataaggaagagcagaaatcactaacagtccagaggctcca

SEQ ID NO: 508166 - DNA, 120 bp, Artificial Sequence
  ENSG00000164161_57 (sequence is synthesized)
attcagctgctctagcatagatacaggaaagacatggagaataacactggggttagctaacagcagggaaagttagtagctatttcctagccaaggaacaaccttctctatggaataatt

SEQ ID NO: 508167 - DNA, 120 bp, Artificial Sequence
  ENSG00000164161_58 (sequence is synthesized)
ttaagaaaattattccaaatctgtgaggaaaaaataagaagcagttcctcaatggagactttataaatcttaatttcctcacccctgggatgagatttgaagttgcagaggactcagacc

SEQ ID NO: 508168 - DNA, 120 bp, Artificial Sequence
  ENSG00000164161_59 (sequence is synthesized)
aaagtcccatggcagaaaatgtacatatttttaaactactcccaggaagtaaactagtactgtgaatgctggcaataccatcagaaagtttatctttaaaatacctaaaaataaatatat

SEQ ID NO: 508169 - DNA, 120 bp, Artificial Sequence
  ENSG00000164161_60 (sequence is synthesized)
atatataatatatatcttatatatatatatatcttaatacatatatataaccatggaacctgccaaacactaatcctagccaacttcaatccttctttctcttaactatcttctctgaat

SEQ ID NO: 508170 - DNA, 120 bp, Artificial Sequence
  ENSG00000164161_61 (sequence is synthesized)
ttctcttaactatcttctctgaataagttctggacttcaccttaaaataagtttttaggagagtaatatatattcatgggattgtgagggagcattgtagagctgttttcttctcagtca

SEQ ID NO: 508171 - DNA, 120 bp, Artificial Sequence
  ENSG00000164161_62 (sequence is synthesized)
tagtggtggttttcctagctgctatggaaaggtttgttcacttatgagattaggacttttcttaaattcctcattaaatatgaacctaaggcatacccatcatttaccttgattcccata

SEQ ID NO: 508172 - DNA, 120 bp, Artificial Sequence
  ENSG00000164161_63 (sequence is synthesized)
taatttgtataagtcatatataagtccattgacaaaataaaaaaataaataattggattccttgtatcaacagaaagccttgtgcttaaaacctgttattcttctttgagccagactaaa

SEQ ID NO: 508173 - DNA, 120 bp, Artificial Sequence
  ENSG00000164161_64 (sequence is synthesized)
cagtaacatttacaaaatggtatcagctcaacattaaatctaaggttacttctcacatacatcataaagtcagccatcatctttcatttaggatttcttggggttttctttttgcatata

SEQ ID NO: 508174 - DNA, 80 bp, Artificial Sequence
  ENSG00000164161_65 (sequence is synthesized)
ctttcatttaggatttcttggggttttctttttgcatatatagattatgtattacttaaatccaaaatacatgtgtgtat

SEQ ID NO: 508175 - DNA, 120 bp, Artificial Sequence
  ENSG00000164161_66 (sequence is synthesized)
aacatttaagtacataatataaaaagaactgaacattaacagtaatgggaaattcataatggctaaatatgaaataagctttgtctttgcagttacaaactaattcttgtacattttcct

SEQ ID NO: 508176 - DNA, 120 bp, Artificial Sequence
  ENSG00000164161_67 (sequence is synthesized)
tttcactaaaaaaataactaattgatagtttccattcacatgaacaagttataatcaggtttgggatagtatgcccaaaacctatgtttctttactttatattcttaaaatctgagacat

SEQ ID NO: 508177 - DNA, 120 bp, Artificial Sequence
  ENSG00000164161_68 (sequence is synthesized)
gatttttctggaacaaattaagatttcatgtacaatagagtccctttcctaatactgttatgaagaaaccaagttgactaccttatgagagatcagatatttcccttatctcattatatt

SEQ ID NO: 508178 - DNA, 120 bp, Artificial Sequence
  ENSG00000164161_69 (sequence is synthesized)
cacagcatatgtttggacatgcgtttcaccaagaaccatgtagtaataagataaatggtaactgaggtactatggaatttttagaacttgattccccaggacatgctacagtaaactaaa

SEQ ID NO: 508179 - DNA, 120 bp, Artificial Sequence
  ENSG00000164161_70 (sequence is synthesized)
ctatttattcaaaagtaacccaactaattaaagtgaaaaaaaattgttgaatcacaatgaacaaacataaaacaatacttaaatgagaattctgtgtcttttttggttttatctgtgatt

SEQ ID NO: 508180 - DNA, 120 bp, Artificial Sequence
  ENSG00000164161_71 (sequence is synthesized)
tattttgtccagtattaaggaatggttatctttatcattcttctaacatgttttggtttctctaatggttcattttcctttagcttgtgaaaattagggcagtttgtccagagccttact

SEQ ID NO: 508181 - DNA, 120 bp, Artificial Sequence
  ENSG00000164161_72 (sequence is synthesized)
cgcaggagacaccagacccaacccatgcttagatttctgttaataaaagggagaagggtatttgaataggtagtaaaggcaggtacaagtttaagggagcagggctatcatatgtactag

SEQ ID NO: 508182 - DNA, 120 bp, Artificial Sequence
  ENSG00000164161_73 (sequence is synthesized)
gtgagatttctataaatgtctgaaaagttacatgcatagtcattggctcaggtaatttctctgaatttgaacttatttgatttatttaaccaagttattataatatgcagttctctttaa

SEQ ID NO: 508183 - DNA, 120 bp, Artificial Sequence
  ENSG00000164161_74 (sequence is synthesized)
tcaatcttctattattcaatcatctatccatttattaattcaacaaatatttattaaagtgcctaccatgattatgtgctgtagaaaagacaaggacatttactagggggggattgtggg

SEQ ID NO: 508184 - DNA, 120 bp, Artificial Sequence
  ENSG00000164161_75 (sequence is synthesized)
cccaatcggcatcataagcatgtctgaagcaaaagacaataatcacatccaacggcaccagttcagctcaactttagaattcagcagtaacagtacagatggcctaaagtacatctgtgt

SEQ ID NO: 508185 - DNA, 120 bp, Artificial Sequence
  ENSG00000164161_76 (sequence is synthesized)
gtatctgtacgtgtgcacacacccatgtatatatatttatctatctgtacaaacactacatatgtatacacactatctatgtaaaatataatatatgtataatgcatataaattctaaca

SEQ ID NO: 508186 - DNA, 120 bp, Artificial Sequence
  ENSG00000164161_77 (sequence is synthesized)
agtgtatttgtgttatctttaaaatagaacaattgtatcttgaagtggtaaatgcagagaattggttttattgttgatctgtggatttaatgatttctaggtgaaaaggacgtttaagtg

SEQ ID NO: 508187 - DNA, 120 bp, Artificial Sequence
  ENSG00000164161_78 (sequence is synthesized)
tacaatttcttttcttaatttaatatatttatgtaaatgcatgcctgaaatttggttagattggctgtgttttgtgtcttttaacatgatcaaatgattaaactttatcttatgacttga

SEQ ID NO: 508188 - DNA, 120 bp, Artificial Sequence
  ENSG00000164161_79 (sequence is synthesized)
ttgaaaccaaagccagaatgatggctctatctatcttcaaataggtatttacactgcagacctcacacagagcaaaaatgttaccatcctgctgggccggaacagcatgaaactttaaaa

SEQ ID NO: 508189 - DNA, 120 bp, Artificial Sequence
  ENSG00000164161_80 (sequence is synthesized)
agaataatattatacttgatttcagataatttattgaatcctacttctgaaatgtttgatgagagatctgtgaccagaacacattccaaaaattgtaaaagacaaaattccttaggcact

SEQ ID NO: 508190 - DNA, 120 bp, Artificial Sequence
  ENSG00000164161_81 (sequence is synthesized)
ataaatacagcaatcttatcctctacttgttggaaatgtaatccacagcaaagatgacctactccagagattaagatagtccagttacatattctctaccagtaacttttccctgagagc

SEQ ID NO: 508191 - DNA, 120 bp, Artificial Sequence
  ENSG00000164161_82 (sequence is synthesized)
aggacaaaaaggggtcgacttatcctcctccccactaaactgctgcccacacacagagtcctgttgcttatggcaaaagaataacaacaacaccattgtatttgttagttggttcactaa

SEQ ID NO: 508192 - DNA, 120 bp, Artificial Sequence
  ENSG00000164161_83 (sequence is synthesized)
tgggtgaaactagagaacatcattctctttcagtccccagctctgtccaaatgttcatgccttttgagggagcatttgtccaactccttctattcccagatgagtgagaactgtcttgct

SEQ ID NO: 508193 - DNA, 120 bp, Artificial Sequence
  ENSG00000164161_84 (sequence is synthesized)
gcaggttttcagctgcaactctctttttattcttaccatatgcagcaggagcctgagattcagggaacagatattccaggattttattcaaagcaatgtctttaagctcctgtgttgcaa

SEQ ID NO: 508194 - DNA, 120 bp, Artificial Sequence
  ENSG00000164161_85 (sequence is synthesized)
ctgaattaagtttcaaaatagctatattcaggtcaccttaaaggttttatcaggagccctaaagaaccaggaaattcagagaaaagtttagaaatatttgccattaagtctcccttggtg

SEQ ID NO: 508195 - DNA, 120 bp, Artificial Sequence
  ENSG00000164161_86 (sequence is synthesized)
caatacgtactatgaatatactgatgatctagagacccctgcaatactcaactcttccagagacatgtggaatgaaaattttgttcttgactaaatgatattttctgttaccaacaacac

SEQ ID NO: 508196 - DNA, 120 bp, Artificial Sequence
  ENSG00000164161_87 (sequence is synthesized)
gatgtattttgctaaaagaagccaaatgctggaagaattgggagagagaaatgattccagagacatcttcatttgttccctattgcccaatgcatgaagaaatgtttccttcaaacaact

SEQ ID NO: 508197 - DNA, 120 bp, Artificial Sequence
  ENSG00000164161_88 (sequence is synthesized)
gtatttctttgtaataaaagaaagaatcttgcaggagaaaataagggggcaacataagaaacaataattatggcacctgaattaggacagtgacattaaatttctgttatttgttgacta

SEQ ID NO: 508198 - DNA, 120 bp, Artificial Sequence
  ENSG00000164161_89 (sequence is synthesized)
ttgtgcgctgcaatcgaattgatatttgacatgctttccccatgtaattgacacatttaaaggaatctttggctttataaagtattgtttaaatattgtttaatgggcataacacaggac

SEQ ID NO: 508199 - DNA, 120 bp, Artificial Sequence
  ENSG00000164161_90 (sequence is synthesized)
tgtacatcagcatttgctagtagaaacaaagaggtcttttggttattttggcaattgcaaatcattctttcaccatctctgtttttgagtctgtctcataaaaaatactacttatactac

SEQ ID NO: 508200 - DNA, 120 bp, Artificial Sequence
  ENSG00000164161_91 (sequence is synthesized)
gattccgttgtgtgttcctctggggtaagcaagtagcatttcctcccccagagtccgcggtcgggatgctgtgcaaacttgcctatctctgaaaacagacgtttctgcggtacccgcacc

SEQ ID NO: 508201 - DNA, 120 bp, Artificial Sequence
  ENSG00000164162_0 (sequence is synthesized)
attgagctgcgacccttgttcaacgccgttggcgaagccagctgctggaggtgccgagaatctgagtttcggcaagcagccagaatattttaaaaatgactacaccaaacaagacacctc

SEQ ID NO: 508202 - DNA, 120 bp, Artificial Sequence
  ENSG00000164162_1 (sequence is synthesized)
ctggtgctgaccccaagcagttggaaaggactggaacagtacgggaaattgggtcacaagctgtttggtcactctcatcttgcaaaccaggatttggagtggatcagttacgagatgaca

SEQ ID NO: 508203 - DNA, 120 bp, Artificial Sequence
  ENSG00000164162_2 (sequence is synthesized)
atctagaaacttattggcaatcagatggttcccagcctcatttagtgaacatccaattcagaagaaaaacaacagtgaagacattatgtatttatgcagactacaaatctgatgaaagct

SEQ ID NO: 508204 - DNA, 120 bp, Artificial Sequence
  ENSG00000164162_3 (sequence is synthesized)
aggaaataattttcacaaccttcaagaaattcggcaacttgagttggtggaaccaagtggctggattcatgttcccttaactgacaatcataagaagccaactcgtacattcatgataca

SEQ ID NO: 508205 - DNA, 120 bp, Artificial Sequence
  ENSG00000164162_4 (sequence is synthesized)
gattgctgttctagccaatcaccagaatggaagagacacccatatgagacaaattaaaatatacacaccagtagaagagagctccattggtaaatttcctagatgtacaactatagattt

SEQ ID NO: 508206 - DNA, 120 bp, Artificial Sequence
  ENSG00000164162_5 (sequence is synthesized)
catgatgtatcgttcaataaggtgactttaaaatgagacgaaaatcattaaacgtatctttgttttatcctgtatttaaataatatatcatgtacctttattgaacaaggcatccgttat

SEQ ID NO: 508207 - DNA, 120 bp, Artificial Sequence
  ENSG00000164162_6 (sequence is synthesized)
ggcatccgttatatctaattttgtatatgtttaaaaatattttattgtaactttgacaaataaatttggggtcatattatctttattttctttaacatgtaataaagctcacatatttta

SEQ ID NO: 508208 - DNA, 120 bp, Artificial Sequence
  ENSG00000164162_7 (sequence is synthesized)
gccgttggcgaagccagctgctggaggtgccgagaatctgagtttcggcaagcagccaggtctggaaactgtaacaggacattcagttagtaatgatggttgcaggttgaatagtctcgc

SEQ ID NO: 508209 - DNA, 120 bp, Artificial Sequence
  ENSG00000164162_8 (sequence is synthesized)
tataatagctaggtgattatttcattagtgttcatacattagagtaatggtttattgcatatttgagaacaagactgtgttttatcaatatatatcatctttaataggtcaaaattacta

SEQ ID NO: 508210 - DNA, 120 bp, Artificial Sequence
  ENSG00000164162_9 (sequence is synthesized)
ttttttctacccagaggaaggttattcttttaatactggatcttttaaaaaacagtgtcaaataagcttagtgttaggttgtctgatgagaaccaatctaatatggggagtataattaat

SEQ ID NO: 508211 - DNA, 120 bp, Artificial Sequence
  ENSG00000164162_10 (sequence is synthesized)
tgtctcatattcaccttcacggaatacttacagccctagggttgtctgtatcctaatgatattatgtaaagattgcctgtataatctagcagtacttatggaagagttctagcagtactt

SEQ ID NO: 508212 - DNA, 120 bp, Artificial Sequence
  ENSG00000164162_11 (sequence is synthesized)
atggaagagttattttcaaatttgtgtctgacattgtagcattccctgggcagtcatatatcccataaaatcgtaaaagtatgtgaaattttttatatatattaaaagattttaaagaaa

SEQ ID NO: 508213 - DNA, 120 bp, Artificial Sequence
  ENSG00000164162_12 (sequence is synthesized)
acgcgctgctgctgtctccgccacctaaggcctaaccaaaggctctcggagaacgtccctacattctttccaacctggcagatggcagctaacggccaaacctctccgggctattcacgt

SEQ ID NO: 508214 - DNA, 120 bp, Artificial Sequence
  ENSG00000164162_13 (sequence is synthesized)
acctggagaaaacgatccccttgcggaggggagcacagaggccaaatcagctcttgccttcacttttcagccacacagcgtgttctcacggccaccggccaaaatggcggtgcccagccg

SEQ ID NO: 508215 - DNA, 120 bp, Artificial Sequence
  ENSG00000164162_14 (sequence is synthesized)
ggaaataattttcacaaccttcaagaaattcgggtggcagcgttcctccctctgaaactaagacgtctaggccagcagaacgtaatgtcgtgggaacaggaagcaaaaatgttgccagtg

SEQ ID NO: 508216 - DNA, 120 bp, Artificial Sequence
  ENSG00000164162_15 (sequence is synthesized)
gatcaccaggggtgatggtggtaccattttcacttccaccccttgattcctggaactgtgaatcctggctatgggagaaactgtaccatatattggaccctgattcagagcatacacagc

SEQ ID NO: 508217 - DNA, 120 bp, Artificial Sequence
  ENSG00000164162_16 (sequence is synthesized)
cttctggagaactttgccccagtcctgcaaagtattgtcatctagttggcattgtgattgtgacttcaaaaggctattccaccattctgtctatccagctgcttcaggatgatggggaac

SEQ ID NO: 508218 - DNA, 120 bp, Artificial Sequence
  ENSG00000164162_17 (sequence is synthesized)
gccaggtctggaaactgtgagtgtgtgggcttttctccgacgtcgagcgtggtcctagcgtaaacagatgcattcgcctctccggtttcaatctttttttacgtttgcgctttcctcaag

SEQ ID NO: 508219 - DNA, 120 bp, Artificial Sequence
  ENSG00000164162_18 (sequence is synthesized)
gccggtgggtcaggagtggagccttagtcattctaacgctggaggtgtcagtaggaccaacagagtctggtgccgacacggcttactgttgcgcgctcttctaggcctcaacttcctctc

SEQ ID NO: 508220 - DNA, 120 bp, Artificial Sequence
  ENSG00000164162_19 (sequence is synthesized)
gtcattgagctgcgacccttgttcaacgccgttggcgaagccagctgctggaggtgccgagaatctgagtttcggcaagcagccaggtctggaaactgatttggagtggatcagttacga

SEQ ID NO: 508221 - DNA, 120 bp, Artificial Sequence
  ENSG00000164162_20 (sequence is synthesized)
ggcagttgaattctgccctaaagatgggctttatttctatctttttttaggtaacaggacattcagttagtaatgatggttgcaggttgaatagtctcgccctagatctcacctaacttg

SEQ ID NO: 508222 - DNA, 120 bp, Artificial Sequence
  ENSG00000164162_21 (sequence is synthesized)
attggcaatcagatggttcccagcctcatttagtgaacatccaattcaggtaattaatacattttcaaatttttcatctactgtaggttatagacaaataaatctattttattaacataa

SEQ ID NO: 508223 - DNA, 120 bp, Artificial Sequence
  ENSG00000164162_22 (sequence is synthesized)
tttttcacatatgaatagacttagtaaaattaacaaaagatgtgaaagatgaggtcaacctttttagaatgggccagttattcacttcaaaatcttgaagccattttcctgaccttatct

SEQ ID NO: 508224 - DNA, 120 bp, Artificial Sequence
  ENSG00000164162_23 (sequence is synthesized)
cattgagctgcgacccttgttcaacgccgttggcgaagccagctgctggaggtgccgagaatctgagtttcggcaagcagccaggtctggaaactaatattttaaaaatgactacaccaa

SEQ ID NO: 508225 - DNA, 120 bp, Artificial Sequence
  ENSG00000164162_24 (sequence is synthesized)
cttctaggctcaagccatctgcctgccttggcctcctaggattacagatggctaccttcttgctgtatcttcacatggtggaaagagtgagtgagcactggtctgtttctcttcttacaa

SEQ ID NO: 508226 - DNA, 120 bp, Artificial Sequence
  ENSG00000164162_25 (sequence is synthesized)
ggacactaatctcatcatgaagactctactctcacgacatcttctaaacctaattacctcccaaaggccccacctcctaataccatcacataagtgggtttcaacatgtgaatttggggg

SEQ ID NO: 508227 - DNA, 120 bp, Artificial Sequence
  ENSG00000164162_26 (sequence is synthesized)
catttgattcctttaaagagtgttgtagtttgttttgcgaagcccttttggttctttcaaattttgctcaggtggatttagagcagtctttagtcctaggttagccccactactgacatc

SEQ ID NO: 508228 - DNA, 120 bp, Artificial Sequence
  ENSG00000164162_27 (sequence is synthesized)
taacctttccgaggtctcttccaaatgttcttcatattatgaagtttctgtactctgatttgtgaactattcctagactcattctgggaatagttcagcctactgatttcctgctctcag

SEQ ID NO: 508229 - DNA, 120 bp, Artificial Sequence
  ENSG00000164162_28 (sequence is synthesized)
tctcaaggagttttatttcatggatgtgtaggttagtatactcttccaaacactccagaagattcctttgcagaatgtagagctgttgttttacagtttcaccatctctggaattctgct

SEQ ID NO: 508230 - DNA, 120 bp, Artificial Sequence
  ENSG00000164162_29 (sequence is synthesized)
gcataaattctagtcattttgacctccctgaattccaatctcttctcacctcaggagaaaataaagagaacgtataatccccttcttgagctgtgtaaaactaccacctggcagaaagcc

SEQ ID NO: 508231 - DNA, 120 bp, Artificial Sequence
  ENSG00000164162_30 (sequence is synthesized)
aggaaaattataggtttcatcttgtttgcttcctgcttctcaagtgtcacaagactatgttgcctattgttgaatatcttagaagcgttgtttcatattttgttcagttttgtggttatt

SEQ ID NO: 508232 - DNA, 120 bp, Artificial Sequence
  ENSG00000164162_31 (sequence is synthesized)
tacagtgggagggtaattctcataacctttttatgatatttttgttttctattaccatactttttattcatacatgttttattcttcccttcttttccagcaataaaattttctttgttc

SEQ ID NO: 508233 - DNA, 120 bp, Artificial Sequence
  ENSG00000164162_32 (sequence is synthesized)
aaagaattgtacagtgaatgccagtatactcacttcctagattcttcagttgttaatattttgctatatttgctttattacaatctgtccatctaatttttttgtgcatttaaaaataac

SEQ ID NO: 508234 - DNA, 120 bp, Artificial Sequence
  ENSG00000164162_33 (sequence is synthesized)
ttgtgcatatttgtccatttcaccccaaataccagtgtgatatattggtagagttatcaacatttgcttaattttcattttttaagataaaatttatgcacaattttgcataatcttaag

SEQ ID NO: 508235 - DNA, 120 bp, Artificial Sequence
  ENSG00000164162_34 (sequence is synthesized)
tatattacttggtgagttttgacaaacacatacatttatgtaatcccaactcctgttaaaatatagaacatttccaccactccagagaattccatcatatctgttcgcagttcagtcttc

SEQ ID NO: 508236 - DNA, 120 bp, Artificial Sequence
  ENSG00000164162_35 (sequence is synthesized)
aaccttcaagaaattcggcctcatgttttacatgtgaatgaagaatcaatgaatcttcaagtctcaggataaaggaatgagaatattgaagcagaaactgcaaataaaagacaatgcata

SEQ ID NO: 508237 - DNA, 120 bp, Artificial Sequence
  ENSG00000164163_0 (sequence is synthesized)
accgccattttggccggtggccgtgagaacacgctgtgtggctgaaaagtgaaggcaagagctgatttggcctctgtgctcccctccgcaaggggatcgttttctccagaagagctggat

SEQ ID NO: 508238 - DNA, 120 bp, Artificial Sequence
  ENSG00000164163_1 (sequence is synthesized)
attctttcgcccagttatggcagacaagttaacgagaattgctattgtcaaccatgacaaatgtaaacctaagaaatgtcgacaggaatgcaaaaagagttgtcctgtagttcgaatggg

SEQ ID NO: 508239 - DNA, 120 bp, Artificial Sequence
  ENSG00000164163_2 (sequence is synthesized)
aaaattatgcatagaggttacaccccagagcaaaatagcatggatttccgaaactctttgtattggttgtggtatctgtattaagaaatgcccctttggcgccttatcaattgtcaatct

SEQ ID NO: 508240 - DNA, 120 bp, Artificial Sequence
  ENSG00000164163_3 (sequence is synthesized)
accaagcaacttggaaaaagaaaccacacatcgatattgtgccaatgccttcaaacttcacaggttgcctatccctcgtccaggtgaagttttgggattagttggaactaatggtattgg

SEQ ID NO: 508241 - DNA, 120 bp, Artificial Sequence
  ENSG00000164163_4 (sequence is synthesized)
aaagtcaactgctttaaaaattttagcaggaaaacaaaagccaaaccttggaaagtacgatgatcctcctgactggcaggagattttgacttatttccgtggatctgaattacaaaatta

SEQ ID NO: 508242 - DNA, 120 bp, Artificial Sequence
  ENSG00000164163_5 (sequence is synthesized)
ctttacaaagattctagaagatgacctaaaagccatcatcaaacctcaatatgtagaccagattcctaaggctgcaaaggggacagtgggatctattttggaccgaaaagatgaaacaaa

SEQ ID NO: 508243 - DNA, 120 bp, Artificial Sequence
  ENSG00000164163_6 (sequence is synthesized)
gacacaggcaattgtatgtcagcagcttgatttaacccacctaaaagaacgaaatgttgaagatctttcaggaggagagttgcagagatttgcttgtgctgtcgtttgcatacagaaagc

SEQ ID NO: 508244 - DNA, 120 bp, Artificial Sequence
  ENSG00000164163_7 (sequence is synthesized)
tgatattttcatgtttgatgagccttctagttacctagatgtcaagcagcgtttaaaggctgctattactatacgatctctaataaatccagatagatatatcattgtggtggaacatga

SEQ ID NO: 508245 - DNA, 120 bp, Artificial Sequence
  ENSG00000164163_8 (sequence is synthesized)
tctaagtgtattagactatctctccgacttcatctgctgtttatatggtgtaccaagcgcctatggagttgtcactatgccttttagtgtaagagaaggcataaacatttttttggatgg

SEQ ID NO: 508246 - DNA, 120 bp, Artificial Sequence
  ENSG00000164163_9 (sequence is synthesized)
ctatgttccaacagaaaacttgagattcagagatgcatcacttgtttttaaagtggctgagacagcaaatgaagaagaagttaaaaagatgtgtatgtataaatatccaggaatgaagaa

SEQ ID NO: 508247 - DNA, 120 bp, Artificial Sequence
  ENSG00000164163_10 (sequence is synthesized)
aaaaatgggagaatttgagctagcaattgtagctggagagtttacagattctgaaattatggtgatgctgggggaaaatggaacgggtaaaacgacatttatcagaatgcttgctggaag

SEQ ID NO: 508248 - DNA, 120 bp, Artificial Sequence
  ENSG00000164163_11 (sequence is synthesized)
acttaaacctgatgaaggaggagaagtaccagttctaaatgtcagttataagccacagaaaattagtcccaaatcaactggaagtgttcgccagttactacatgaaaagataagagatgc

SEQ ID NO: 508249 - DNA, 120 bp, Artificial Sequence
  ENSG00000164163_12 (sequence is synthesized)
ttatactcacccacaatttgtgaccgatgtaatgaagcctctgcaaattgaaaacatcattgatcaagaggtgcagacattatctggtggtgaactacagcgagtagctttagccctttg

SEQ ID NO: 508250 - DNA, 120 bp, Artificial Sequence
  ENSG00000164163_13 (sequence is synthesized)
cttgggcaaacctgctgatgtctatttaattgatgaaccatctgcatatttggattctgagcaaagactgatggcagctcgagttgtcaaacgtttcatactccatgcaaaaaagacagc

SEQ ID NO: 508251 - DNA, 120 bp, Artificial Sequence
  ENSG00000164163_14 (sequence is synthesized)
ctttgttgtggaacatgacttcatcatggccacctatctagcggatcgcgtcatcgtttttgatggtgttccatctaagaacacagttgcaaacagtcctcaaacccttttggctggcat

SEQ ID NO: 508252 - DNA, 120 bp, Artificial Sequence
  ENSG00000164163_15 (sequence is synthesized)
gaataaatttttgtctcagcttgaaattacattcagaagagatccaaacaactataggccacgaataaacaaacttaattcaattaaggatgtagaacaaaagaagagtggaaactactt

SEQ ID NO: 508253 - DNA, 120 bp, Artificial Sequence
  ENSG00000164163_16 (sequence is synthesized)
ttaaaaggagtatttactagaattttttgtcatataaaacttgaatcaggattttatgccccacatactctggaacttgaagtataatatacttaatataacataaaaagccagttgggt

SEQ ID NO: 508254 - DNA, 120 bp, Artificial Sequence
  ENSG00000164163_17 (sequence is synthesized)
tctaaattgtagttgaaacacagaaaatgccacttttctgttcctgaagaggctcttttgtgcataatattctaaaatgaagacatttcaagctatacaaattacttccaagttttcatg

SEQ ID NO: 508255 - DNA, 120 bp, Artificial Sequence
  ENSG00000164163_18 (sequence is synthesized)
atgtatgggaagattttcagtaggtgtattatattcacggtaccaaatgctgaccagtgttgctccattttttaaatcttgaaaagggtttctgtacttacctggtttgccaagtatgcc

SEQ ID NO: 508256 - DNA, 120 bp, Artificial Sequence
  ENSG00000164163_19 (sequence is synthesized)
agtgtaatgaaactgcccttattttaaaagccagtcaaagattccactgattgacatttgataaataaacatcaggattatgtttattgtttgttttcagtctttgcactatattaccag

SEQ ID NO: 508257 - DNA, 120 bp, Artificial Sequence
  ENSG00000164163_20 (sequence is synthesized)
tatatggtttccgaggaagattatctactgcaaaacaccactgttggaaaaataggtatttttaaattgtttttaatcttttttggtgcttttaaacatgtttagcaaaaaccaattcag

SEQ ID NO: 508258 - DNA, 120 bp, Artificial Sequence
  ENSG00000164163_21 (sequence is synthesized)
ttccattccccgcaaaaaacccctaactttactctgaactttttttgtttttgcattccatgaggttctgtattcagtcattctctaggtaatgtcatttttgtacacatatatttatat

SEQ ID NO: 508259 - DNA, 120 bp, Artificial Sequence
  ENSG00000164163_22 (sequence is synthesized)
aatcactgattgagatttaggaaaaagcatttctaaagaatatttgcttcccttagaactacagactcgaaatctttaaagatggtgcctaagcatctatgtattttttttaagttccac

SEQ ID NO: 508260 - DNA, 120 bp, Artificial Sequence
  ENSG00000164163_23 (sequence is synthesized)
agatttttctgttgggcagccaaggattataaaccacttccctaaaggcaacattaatgcaaaagtccccagatggcaatacaaagtatcccctggtaccacatatattcatttgtgagt

SEQ ID NO: 508261 - DNA, 120 bp, Artificial Sequence
  ENSG00000164163_24 (sequence is synthesized)
ttggatatagagcacattatctaaaccattttgtagttccaaaaacccatctaaatttcttgagttcctgaattttgaacaggattacctggagcctggagccactttaagttgtacttc

SEQ ID NO: 508262 - DNA, 120 bp, Artificial Sequence
  ENSG00000164163_25 (sequence is synthesized)
tgactaaactggaattatgagtgaggaagagtgtttactaaataaatgactggggcaagcaaaattgaggaggaaattagaaactgtttgacaaactttaagagctacttgaaataacag

SEQ ID NO: 508263 - DNA, 120 bp, Artificial Sequence
  ENSG00000164163_26 (sequence is synthesized)
aagtcttgattaatatgcaaataatggctagaaagtatggtttaactggaccctattatgccttttaaaaataatttcagtaacccataaatacatgttgtaaaaaattcaaatatacag

SEQ ID NO: 508264 - DNA, 120 bp, Artificial Sequence
  ENSG00000164163_27 (sequence is synthesized)
aatggaataaaaaaatgatctccctttattaccctcccaaaggttaccagcgtttgaatttaataatgtatattctttcatgcttttttctgtgcacttacctaagtgtgaatatgtaaa

SEQ ID NO: 508265 - DNA, 120 bp, Artificial Sequence
  ENSG00000164163_28 (sequence is synthesized)
gggtttgttttgtatacaaatgggattatactaaaataagtaatgcctatttttaaggataggttaaatttgtgaatgatcatttcaaatatattgaataaaataagcaaaagctattgt

SEQ ID NO: 508266 - DNA, 120 bp, Artificial Sequence
  ENSG00000164163_29 (sequence is synthesized)
tatttactgatcctggattgtcttaaagaaagtacttgtgatataagagcacagttctacttactgctaatgacagaatatgtattaaacgtattttcatgtaaatgaaatctttaaaat

SEQ ID NO: 508267 - DNA, 120 bp, Artificial Sequence
  ENSG00000164163_30 (sequence is synthesized)
atgtatcttaaaattttacatagcaacagaaaggcctacaattgctaacacaagaaaaatacttataaaatcagtataaaatcaatgcagatgttagcaaaagaatgagactacttcata

SEQ ID NO: 508268 - DNA, 120 bp, Artificial Sequence
  ENSG00000164163_31 (sequence is synthesized)
tgtcctaattggaaaaagtctcaaatacttaaaaaaacaaaaaactggaacagtttattatactaccatttttgtgaaaatatacaaaatattgaaataaaggaatactcaagaaacaga

SEQ ID NO: 508269 - DNA, 120 bp, Artificial Sequence
  ENSG00000164163_32 (sequence is synthesized)
gagccatgaaagacttaagtatttttctatataaacttcagaattcaataatgtcagtgtatatctttaaaacaaatttctcagttaaaaccaaataggacatagtgatttactttaaac

SEQ ID NO: 508270 - DNA, 120 bp, Artificial Sequence
  ENSG00000164163_33 (sequence is synthesized)
gtcatatgttgtgttgccaggaacgggtaaaacgacatttatcagaatgcttgctggaagacttaaacctgatgaaggaggtacatttgtaactgttgagtctttttactctgttttaca

SEQ ID NO: 508271 - DNA, 120 bp, Artificial Sequence
  ENSG00000164163_34 (sequence is synthesized)
gccattttggccggtggccgtgagaacacgctgtgtggctgaaaagtgaaggcaagagctgatttggcctctgtgctcccctccgcaaggggatcgttttctccagggaagtgttcgcca

SEQ ID NO: 508272 - DNA, 120 bp, Artificial Sequence
  ENSG00000164163_35 (sequence is synthesized)
gcttgcgcgtgcggcggctgggcaccgccattttggccggtggccgtgagaacacgctgtgtggctgaaaagtgaaggcaagagctgatttggcctctgtgctcccctccgcaaggggat

SEQ ID NO: 508273 - DNA, 120 bp, Artificial Sequence
  ENSG00000164163_36 (sequence is synthesized)
aaaacatgtcatagatggtggatacacattgatatctgttggtggcaaattgatatacttttattctgaagcttaactttgtcaagattcataaatagaagagttctatagtgaaagttt

SEQ ID NO: 508274 - DNA, 120 bp, Artificial Sequence
  ENSG00000164163_37 (sequence is synthesized)
cattattttgcaggagaagtaccagttctaaatgtcagttataagccacagaaaattagtcccaaatcaactgtgagttattattttttatatggttactaaagaaaattttgtatatat

SEQ ID NO: 508275 - DNA, 120 bp, Artificial Sequence
  ENSG00000164163_38 (sequence is synthesized)
gcctatagctttcatcttttactatattaaaatttttctccaaattagattctatacagttttattgatagttgcaaacaaatgtattaagagtccaatccttgattcatatccactgct

SEQ ID NO: 508276 - DNA, 120 bp, Artificial Sequence
  ENSG00000164163_39 (sequence is synthesized)
ccactgctaagaaagtgctttaaagatatttgtcatctttggccgggtgcagtagctcacgcctgtaatgccaacacttcgggaggcctaggccagcagatcacgaggtcaggagatcga

SEQ ID NO: 508277 - DNA, 120 bp, Artificial Sequence
  ENSG00000164163_40 (sequence is synthesized)
aggcagagcttgcagtgagtggagattgcatcactacactctagcctgggcgacaaagcgagagtctgtctcaaaaaaaaataaaaaaataaagatgtttgtcatctttttgctaaataa

SEQ ID NO: 508278 - DNA, 120 bp, Artificial Sequence
  ENSG00000164163_41 (sequence is synthesized)
ataattaaaaacctaatgtattttgtgctgcaaattgacaacagcaagaaggtgaaaaggctttacccacaagatgggagaaacatttgcacatcatatatccaataaaggacttgtatc

SEQ ID NO: 508279 - DNA, 120 bp, Artificial Sequence
  ENSG00000164163_42 (sequence is synthesized)
cagcatgtataaagaactcttataattaaaaatgagcaaatgtcttttagttattcagccataaaaagaaatgaaatattaacaaatgccacagtccttgaaaccattctgttaaagtta

SEQ ID NO: 508280 - DNA, 120 bp, Artificial Sequence
  ENSG00000164163_43 (sequence is synthesized)
acctcctttgatttctgcgggtgttgtaatgaactcctcagtacctcaacattcaatttatgttttgtctacttggcttagcttaccataaaagttttgtcattgatgctctctataagc

SEQ ID NO: 508281 - DNA, 120 bp, Artificial Sequence
  ENSG00000164163_44 (sequence is synthesized)
ttagctttaaattctaaaattcagccttatcctgaaacagcaaggaaaagccatcttaggattcatccctagcacattatcatgcattttgtgttctcttactgattgcctaaggttgct

SEQ ID NO: 508282 - DNA, 120 bp, Artificial Sequence
  ENSG00000164163_45 (sequence is synthesized)
tgatacccactttgacctttggaatttctactcttaaatgatttttcctctgaaacattcattatttgcttattactttctaattttaaaattattgcaggggctgtggagtggaaaaaa

SEQ ID NO: 508283 - DNA, 85 bp, Artificial Sequence
  ENSG00000164163_46 (sequence is synthesized)
acccaagagtttaagaccagcctgaccaacagattccgcctccacaaaaacttaaaaattggttcagcatggtggtgcatgcctg

SEQ ID NO: 508284 - DNA, 120 bp, Artificial Sequence
  ENSG00000164163_47 (sequence is synthesized)
tggtggtgcatgcctgtagttccagctcctctagaggctgaagtgggaggatcgcttgagcttgggaggttgatgctgcagtgagccctgatcatgccattgcacacctgggcaatggag

SEQ ID NO: 508285 - DNA, 120 bp, Artificial Sequence
  ENSG00000164163_48 (sequence is synthesized)
ctgatggcagctcgagttgtcaaacggtaaatatcttgctcctagccatattttgattatgtatactgtcctacaagtgtgcttaatataacagtcgaatgttttatgatagaaagctat

SEQ ID NO: 508286 - DNA, 120 bp, Artificial Sequence
  ENSG00000164163_49 (sequence is synthesized)
gctagaaattctagacttgattctgtgactcctgagatcattggtattggggactggatgggaccatgtggaagagtagtgtttaggcttcagtgtggaatccctcaccaggaagataaa

SEQ ID NO: 508287 - DNA, 120 bp, Artificial Sequence
  ENSG00000164163_50 (sequence is synthesized)
aagctgtaggccacagcataaaaagctgtgggcccctcaccttttctcagcttaacttttgtttgctttattatttgaatttcccaaaaaagattgaaaactattgctttcatacatgat

SEQ ID NO: 508288 - DNA, 120 bp, Artificial Sequence
  ENSG00000164164_0 (sequence is synthesized)
gccgtcctctccgctgtcgggccgaaagcgaaaacaaattctgggctgcgaggtgctgttctctcccgggcgcccccacccgctccctgcccctccggcgccctccagcgaggtggggaa

SEQ ID NO: 508289 - DNA, 120 bp, Artificial Sequence
  ENSG00000164164_1 (sequence is synthesized)
acgaaaggccgcgtctttctttttggtttcctcggctcccggcgtggggagtgcgcgggggcgcaggccccgcttcacctgagccggcccagcgtgcgcgccaggggcgggggttttctc

SEQ ID NO: 508290 - DNA, 120 bp, Artificial Sequence
  ENSG00000164164_2 (sequence is synthesized)
gcttcacaccggtacggaggaggaaacttgtgggggcggcgacccccggcctgggtcctgagtcaggcagcgaggccgtcgggaagtgactactcactctcggggttttccttaatcccg

SEQ ID NO: 508291 - DNA, 120 bp, Artificial Sequence
  ENSG00000164164_3 (sequence is synthesized)
ctccccccgtttgtcgtgggcgcgtgttcgctccgaggaggcggccgcgtgcggacagccatgcattaggcagggcttccctatgcgcccggagagcgcggaccgctgcctcgggccgcc

SEQ ID NO: 508292 - DNA, 80 bp, Artificial Sequence
  ENSG00000164164_4 (sequence is synthesized)
ctgccccaggccggggcgtcgagcagccggcggcctggccatgtggggctagccctcgccgcgcctggcctgcagcagga

SEQ ID NO: 508293 - DNA, 120 bp, Artificial Sequence
  ENSG00000164164_5 (sequence is synthesized)
cagcaggaccagcaacatggaggctgccgtcggcgtccccgacggcggggaccagggcggcgcggggccccgcgaggacgcgacgcccatggacgcctatctgcggaaactgggcttgta

SEQ ID NO: 508294 - DNA, 120 bp, Artificial Sequence
  ENSG00000164164_6 (sequence is synthesized)
tcggaaactggtcgccaaggacgggtcgtgcctgttccgggccgtggcggagcaggtattgcactctcagtctcgccatgttgaagtcagaatggcctgtattcactatcttcgagagaa

SEQ ID NO: 508295 - DNA, 120 bp, Artificial Sequence
  ENSG00000164164_7 (sequence is synthesized)
cagagagaaatttgaagcgtttatagaaggatcatttgaagaatatttaaagcgtttggaaaatccacaggaatgggtaggacaagtggaaataagtgccctttctcttatgtacaggaa

SEQ ID NO: 508296 - DNA, 120 bp, Artificial Sequence
  ENSG00000164164_8 (sequence is synthesized)
agattttataatttatcgggaaccaaatgtttctccttcacaagtaacagaaaataattttcctgaaaaggtgttactgtgtttttcaaatggaaatcattatgatattgtgtatcccat

SEQ ID NO: 508297 - DNA, 120 bp, Artificial Sequence
  ENSG00000164164_9 (sequence is synthesized)
aaagtataaagaaagctctgctatgtgtcagtctctcctttatgaattgctgtatgagaaggtatttaaaactgatgttagtaaaattgtgatggaactagacacgttggaagtagctga

SEQ ID NO: 508298 - DNA, 120 bp, Artificial Sequence
  ENSG00000164164_10 (sequence is synthesized)
tgaagataacagtgaaatatcagattcagaggatgacagttgcaagagtaagactgctgctgctgctgctgatgtgaatggatttaaacctttgtcaggcaatgagcagctgaagaacaa

SEQ ID NO: 508299 - DNA, 120 bp, Artificial Sequence
  ENSG00000164164_11 (sequence is synthesized)
tgggaactctactagcctgcctttgtctagaaaggttcttaagtcactcaatcctgcagtctatagaaatgtggaatatgaaatttggctgaagtctaaacaagctcagcaaaaacgtga

SEQ ID NO: 508300 - DNA, 120 bp, Artificial Sequence
  ENSG00000164164_12 (sequence is synthesized)
ttattccattgctgctggcttacaatatgaagttggagacaaatgtcaagttaggttggatcacaatggaaaatttttgaatgcagatgttcaaggaattcattctgagaatggaccagt

SEQ ID NO: 508301 - DNA, 120 bp, Artificial Sequence
  ENSG00000164164_13 (sequence is synthesized)
tttggttgaagaactgggaaagaagcacacatcaaagaacctcaaggcacctcccccagaaagctggaacacagtgtcagggaagaagatgaaaaaaccttccacttctggacaaaattt

SEQ ID NO: 508302 - DNA, 120 bp, Artificial Sequence
  ENSG00000164164_14 (sequence is synthesized)
ccattctgatgtggattacagagggccaaagaatccaagcaagccaataaaagccccatcagcactacctcctcgactgcagcatccttcaggagtaagacaacatgcgttctctagtca

SEQ ID NO: 508303 - DNA, 120 bp, Artificial Sequence
  ENSG00000164164_15 (sequence is synthesized)
ttcttcagggtcacagtctcagaaattctccagtgagcacaaaaatcttagccggacaccttcacagatcataagaaaacctgatcgtgaaagagttgaggattttgatcacacaagtcg

SEQ ID NO: 508304 - DNA, 120 bp, Artificial Sequence
  ENSG00000164164_16 (sequence is synthesized)
agaatctaactatttcggcctttccccagaagagcgcagagagaagcaagctatagaagaatcccgtttactctatgagattcagaacagagatgaacaggctttcccagccctttccag

SEQ ID NO: 508305 - DNA, 120 bp, Artificial Sequence
  ENSG00000164164_17 (sequence is synthesized)
ctcatcagtcaatcagtcagcttctcagagtagcaatccatgtgtccagagaaaatcatcacatgtaggtgatagaaaaggaagcaggcggagaatggatacagaagaacgaaaagacaa

SEQ ID NO: 508306 - DNA, 120 bp, Artificial Sequence
  ENSG00000164164_18 (sequence is synthesized)
agactctattcatggacatagtcagttggataaaagacccgaaccaagcacattggagaatattactgatgataaatatgcaacagtttcatcaccatcaaagtcaaagaagttagagtg

SEQ ID NO: 508307 - DNA, 120 bp, Artificial Sequence
  ENSG00000164164_19 (sequence is synthesized)
cccttctcctgcggaacaaaagccagcagaacatgtgtctttgtcaaatccagctccccttctagtttctccagaggtacatctaactcctgcggtgccttctttaccagccactgtgcc

SEQ ID NO: 508308 - DNA, 120 bp, Artificial Sequence
  ENSG00000164164_20 (sequence is synthesized)
agcctggccaagtgaacctacaacttttggaccaacaggtgtccctgctccaattcccgttttgtcagtgacacagactttgaccactggacctgattcagctgtatcccaagctcattt

SEQ ID NO: 508309 - DNA, 120 bp, Artificial Sequence
  ENSG00000164164_21 (sequence is synthesized)
aacaccctctccagttcctgtgtcaatacaggcagttaaccagcccttgatgcctttgcctcagacattgagcctttatcaagacccactctatcctgggtttccttgtaatgaaaaggg

SEQ ID NO: 508310 - DNA, 120 bp, Artificial Sequence
  ENSG00000164164_22 (sequence is synthesized)
agatcgagccattgtaccaccttattcactgtgtcagactggggaggacctacctaaagataagaatattcttcgattcttcttcaatcttggtgtgaaggcatacagttgtcctatgtg

SEQ ID NO: 508311 - DNA, 120 bp, Artificial Sequence
  ENSG00000164164_23 (sequence is synthesized)
ggccccacattcttacctgtaccctctgcaccaggcctacctggcagcctgcaggatgtacccaaaggtccctgtccctgtttatcctcataatccctggttccaagaggctcctgctgc

SEQ ID NO: 508312 - DNA, 120 bp, Artificial Sequence
  ENSG00000164164_24 (sequence is synthesized)
tcagaatgaaagtgattgtacctgtactgatgcccactttcctatgcagactgaggccagtgttaatggtcaaatgccacagccagagattggaccgccgacattttcttcacctctggt

SEQ ID NO: 508313 - DNA, 120 bp, Artificial Sequence
  ENSG00000164164_25 (sequence is synthesized)
tatccctccatctcaggtgtctgaaagtcatggacaattgtcttaccaggctgatcttgaatctgagacccctgggcagcttctgcatgctgattatgaagagtcactaagtggcaagaa

SEQ ID NO: 508314 - DNA, 120 bp, Artificial Sequence
  ENSG00000164164_26 (sequence is synthesized)
tatgttcccccagccatcttttggacccaatccattcttaggcccagttcctattgcacctcctttctttcctcatgtttggtatgggtacccttttcagggattcatagaaaatccagt

SEQ ID NO: 508315 - DNA, 120 bp, Artificial Sequence
  ENSG00000164164_27 (sequence is synthesized)
aatgaggcagaatattgtcctgccctctgatgaaaaaggagaattggatctgtctctggaaaatctggatctgtctaaagattgtggttcagtttcaacagtagatgagtttccagaagc

SEQ ID NO: 508316 - DNA, 120 bp, Artificial Sequence
  ENSG00000164164_28 (sequence is synthesized)
caggggtgaacatgtacattctctccctgaagcaagtgtgagcagtaagccggacgaaggccggacagagcaatcttcccagacacgaaaggcagatacggcattggcttccatccctcc

SEQ ID NO: 508317 - DNA, 120 bp, Artificial Sequence
  ENSG00000164164_29 (sequence is synthesized)
tgtagcagagggaaaggctcatcctcccactcagattctaaacagagagagagaaactgtgcctgttgaacttgaacctaaaaggaccattcaaagcctgaaagaaaaaacagaaaaagt

SEQ ID NO: 508318 - DNA, 120 bp, Artificial Sequence
  ENSG00000164164_30 (sequence is synthesized)
aaaagatcctaagactgctgctgatgtggtcagccctggggccaactctgttgatagcagagtgcaaagaccaaaagaagagagttcagaagatgaaaatgaagtgtctaatattttgag

SEQ ID NO: 508319 - DNA, 120 bp, Artificial Sequence
  ENSG00000164164_31 (sequence is synthesized)
aagtggtagatccaagcagttctataatcaaacttatggaagcaggaagtacaaaagtgattggggctattctggtaggggtggatatcaacatgtgagaagtgaggagtcctggaaagg

SEQ ID NO: 508320 - DNA, 120 bp, Artificial Sequence
  ENSG00000164164_32 (sequence is synthesized)
tttaggggagataggaggagatcagggatgggagatggccataggggacagcacacttgatggttgttgccgaagtattttctaacagaaactcttaggtggaatgtttctgaaggcttt

SEQ ID NO: 508321 - DNA, 120 bp, Artificial Sequence
  ENSG00000164164_33 (sequence is synthesized)
aaaaaaaatacaataaagtaaaaaccgcagttggaactctttcctctccccagccccccttaccttcactcccatactggacaagacattttggacatgagttcaagggggcaggttaat

SEQ ID NO: 508322 - DNA, 120 bp, Artificial Sequence
  ENSG00000164164_34 (sequence is synthesized)
tcctggcattgccagttttcttcattcagaatctgtttgttgatcaagtgactgtccccgtaaaaagtagaagataagtttgttaaagtattttttataaacagcttaatataaaacatt

SEQ ID NO: 508323 - DNA, 120 bp, Artificial Sequence
  ENSG00000164164_35 (sequence is synthesized)
atagatttagtgtttggcttttttccttataagtttataagtttgatttcagatgttggaaatgtgtgctttatagtgtttactaaagtgacaagaaaatataccatttgacacactata

SEQ ID NO: 508324 - DNA, 120 bp, Artificial Sequence
  ENSG00000164164_36 (sequence is synthesized)
gattccaaacataacgttgcaccaaatagaaatgtatattttattatgcaatgccttagtcataaactgggctcaaacaattctcagcctaaaacactgttgtcttttaaaatgcttcca

SEQ ID NO: 508325 - DNA, 120 bp, Artificial Sequence
  ENSG00000164164_37 (sequence is synthesized)
acccaaaggcctttcatctcaatatctgtcaaacttgaataatgtcttctctttaatattcacataaggcagcctattaactgtgtcttagcaatgttgtatatagttcttttaatattc

SEQ ID NO: 508326 - DNA, 120 bp, Artificial Sequence
  ENSG00000164164_38 (sequence is synthesized)
ataaggtatatttttgaattttggtatttgttgagattgcatagaagaatagtaggaaatccaatgaaatggctgtttccaccaagaattcttagcactggtgtaaatatcatggtgcct

SEQ ID NO: 508327 - DNA, 120 bp, Artificial Sequence
  ENSG00000164164_39 (sequence is synthesized)
actcgaaagaaatgtagatgctatgcattttgaaaataatctgcatcagttagaactgcagaagtttttttaatgccactttaacactaatgcactgacagattctaaatattttgtgag

SEQ ID NO: 508328 - DNA, 120 bp, Artificial Sequence
  ENSG00000164164_40 (sequence is synthesized)
aagaaatgttaaaaatttttagcttgacaggtttctagagttgttttcttcctcccccccccccccgcaccattggttgtgtatcactttcactttacacttgcatgttctacttgtcag

SEQ ID NO: 508329 - DNA, 120 bp, Artificial Sequence
  ENSG00000164164_41 (sequence is synthesized)
ggctggaactattgtatagaagataatatgattgtgacttctagttcttttctagaggatgctgctagaaaatggttttgctttgtattttatagcttgttacccttaggtaggtaacat

SEQ ID NO: 508330 - DNA, 120 bp, Artificial Sequence
  ENSG00000164164_42 (sequence is synthesized)
cttacattctgttttcttccagtctttgcagtattcactagaggttccctttgcatgttgcactctgttctcatttggagattgaactctgaattaacacagtattcattcatctgtgtt

SEQ ID NO: 508331 - DNA, 120 bp, Artificial Sequence
  ENSG00000164164_43 (sequence is synthesized)
attttgtaaaaataactgtagcttatattctttatttgtgcataccaatgtgaaaatccactcttttattatgttgagattatcttctgatcaggaagtttgagtgctatgcaaataaca

SEQ ID NO: 508332 - DNA, 120 bp, Artificial Sequence
  ENSG00000164164_44 (sequence is synthesized)
tagtagtaatttctctttgcatgccatgtgtaatatacctagccaaaaccagatgcggtgactttctttttttgtaaagcaaattacttaagaaaatacaattcacttgaatttgacaaa

SEQ ID NO: 508333 - DNA, 120 bp, Artificial Sequence
  ENSG00000164164_45 (sequence is synthesized)
ctgaaacagatgggttttctgggttctctgataacctatgggaatgtttggatgccagttgggctagtgaatcgccactgtactgtaataatggttatttacctctgtgctgttttaatt

SEQ ID NO: 508334 - DNA, 120 bp, Artificial Sequence
  ENSG00000164164_46 (sequence is synthesized)
acctaacgtctgtgtaactgctgatttgagtagtgattagcatttagataatgtaacaggattttagagagcactttgaaagataacattttattatgatggtgctaggtaaaaaattgt

SEQ ID NO: 508335 - DNA, 120 bp, Artificial Sequence
  ENSG00000164164_47 (sequence is synthesized)
aaagactgggatggttgtgtggaaaacttttcttgagagaacctattgaaaggaatttgttgtcaccttcttaactagaatagttgttgaaggtaccgcttaagccatttttttcttaac

SEQ ID NO: 508336 - DNA, 120 bp, Artificial Sequence
  ENSG00000164164_48 (sequence is synthesized)
atcggtggctcagttaaggaatgagaagatagagggtcctccactttcagctcatgcttttttatgtaggactagcttacctgattttaatgaaaatcacattttgatacaaacaccaga

SEQ ID NO: 508337 - DNA, 120 bp, Artificial Sequence
  ENSG00000164164_49 (sequence is synthesized)
tttgaaagttcaatgtgtttgatctcaggagtccaaaataagttgttgcttctagtgtcctgcattttattgactggggtttgatctcagcttctgaaaatgtttaaaaattggaaggaa

SEQ ID NO: 508338 - DNA, 120 bp, Artificial Sequence
  ENSG00000164164_50 (sequence is synthesized)
atactactcatatcttcattgtcactttgtcttacctcaattgagtaacagaatatagctcctgaaggaaacactgatttgctttctgtttcccatatctcacctctaggatatgatgga

SEQ ID NO: 508339 - DNA, 120 bp, Artificial Sequence
  ENSG00000164164_51 (sequence is synthesized)
agaagtgcttgaaagagaattttagcagatggtacttttctcagtgacctctggaataaaagaactgacttttgatagttttaaaattaatctttgcatgaaggttggtttcgctttttt

SEQ ID NO: 508340 - DNA, 120 bp, Artificial Sequence
  ENSG00000164164_52 (sequence is synthesized)
tcctttaagtttgtttttaaatgtattagtccaggggattttgccttatgctgaggtcaaactaaggataagcaagcttttgtccttcattttaactgttatgtcatactgttatgttga

SEQ ID NO: 508341 - DNA, 120 bp, Artificial Sequence
  ENSG00000164164_53 (sequence is synthesized)
catatttctttataagagaatagaggcaaaagtatagaactgaggatcatttgtatttttgagttggaaattatgaaacttcaccatattatgatcatacatattttgaagaacagactg

SEQ ID NO: 508342 - DNA, 120 bp, Artificial Sequence
  ENSG00000164164_54 (sequence is synthesized)
accaaagctcacctgttttttgtgttaggtgctttggctgaacttgattccagcccccttttccctttggtgttgtgtatgtctcttcatttcctctcaaatcttcaactcttgccccat

SEQ ID NO: 508343 - DNA, 120 bp, Artificial Sequence
  ENSG00000164164_55 (sequence is synthesized)
gtctccttggcagcaggatgctggcatctgtgtagtcctcatactgtttactgataacccacaaattcattttcatggcagacctaagctcagaccctgccttgtcctggcaagcatagg

SEQ ID NO: 508344 - DNA, 120 bp, Artificial Sequence
  ENSG00000164164_56 (sequence is synthesized)
ttttcccagaccacaatgctgatatatcttatttaatgcagactgtattcttgcagcgtgttgtttcctttgtgactcaaggttgaattaaaatgcctgtgaactgcaaacttgcttatg

SEQ ID NO: 508345 - DNA, 120 bp, Artificial Sequence
  ENSG00000164164_57 (sequence is synthesized)
attgacttggtgcaataaagttcctttctaaccatttctggtttagaaaacattcagccatcctagaaactagcaatatttatttttgcctctttcgttttaccttcatttttagatgag

SEQ ID NO: 508346 - DNA, 120 bp, Artificial Sequence
  ENSG00000164164_58 (sequence is synthesized)
gtaaatgttttgtcttttacttaagggtactaagcaaggtccactctagtgtagctgaagagaatgcatatttggctacactatttctgtttactgtattttgcttcctactttatgtct

SEQ ID NO: 508347 - DNA, 120 bp, Artificial Sequence
  ENSG00000164164_59 (sequence is synthesized)
aaatgctattgtttgtttaaaatcctaataatgtctcatttccaatatgttattttcagataactaaggttttgctactaatgtcagccatttactctcccactaattgggattattttt

SEQ ID NO: 508348 - DNA, 120 bp, Artificial Sequence
  ENSG00000164164_60 (sequence is synthesized)
taaaagaggtctttctccccgaaatacaagttttagaaaatcttagaagaggggtgggtgcatgtcttaatgctgggaagcggcaactttggggttgaacttacttgaatggattaaaaa

SEQ ID NO: 508349 - DNA, 120 bp, Artificial Sequence
  ENSG00000164164_61 (sequence is synthesized)
ttgcattgtgttacagagctagaaaattttatgtatgaaaaacgataatagccttacactgagtacaaataatactttaagagcatgtgaagatgtgatcatttgtgatgttacttgtaa

SEQ ID NO: 508350 - DNA, 120 bp, Artificial Sequence
  ENSG00000164164_62 (sequence is synthesized)
aagtatatatacatatcttttgaagtgttaaaaggaaactagtactttatattctttatcatatcactttttgtaagtgttgaatatattcctgtttatttttctatgttctgttttgta

SEQ ID NO: 508351 - DNA, 120 bp, Artificial Sequence
  ENSG00000164164_63 (sequence is synthesized)
tgtagccttaagaagtgtttcaaacatatctgaatgtataaaataagagtaaatgccctacatggtgtgatgctgcattatatataaaactgtgtgcatatattaaattttgtctcttga

SEQ ID NO: 508352 - DNA, 120 bp, Artificial Sequence
  ENSG00000164164_64 (sequence is synthesized)
cccattgtaacgccggagtgggacgctgctttgcgtctgaaaggtgcaaattgaaactcgaaagcccgcaaattaacggggtgtctctctcctgatgaagaggtattgcactctcagtct

SEQ ID NO: 508353 - DNA, 120 bp, Artificial Sequence
  ENSG00000164164_65 (sequence is synthesized)
tggtgtgaagtggtgttttgcagtagataatcttcctcggaaaccatatactggtaatatagtgcaaagactgaaaacaaacaataaacataatcctgatgtttatttatcaaatgtcaa

SEQ ID NO: 508354 - DNA, 120 bp, Artificial Sequence
  ENSG00000164164_66 (sequence is synthesized)
tcagtggaatctttgactggcttttaaaataagggcagtttcattacactggcatacttggcaaaccagcagcatcacaactgaaaactctacaatacggatgaagataaacaaaaattg

SEQ ID NO: 508355 - DNA, 120 bp, Artificial Sequence
  ENSG00000164164_67 (sequence is synthesized)
taaagtaacctacatatcagctttctgtatgcaaacgacagcacaagcaaatctctgcaactctcctcctgaaagatcttcaacatttcgttcttttaggtgggttaaatctacaaagaa

SEQ ID NO: 508356 - DNA, 120 bp, Artificial Sequence
  ENSG00000164164_68 (sequence is synthesized)
catagaggcattgtgctcaatgtatttcacctcttccaggtaaaaagtatactgcatgtcatcatttgaagtttgaatgctatttcagttgaaaattgtttaaatataacaattactgga

SEQ ID NO: 508357 - DNA, 120 bp, Artificial Sequence
  ENSG00000164164_69 (sequence is synthesized)
aaattaacggggtgtctctctcctgatgaagagtgttgctgtggggtatgttcacagccacccactgcctccggtccttattgttagtaggtattgcactctcagtctcgccatgttgaa

SEQ ID NO: 508358 - DNA, 120 bp, Artificial Sequence
  ENSG00000164164_70 (sequence is synthesized)
atgaaatcctaaaatacctttcttagtgccatacaaggaaagttaagtaaatgtctttacatttcagtaaatgtctttctataacatatattgaggtattaatggtattcataaaataca

SEQ ID NO: 508359 - DNA, 120 bp, Artificial Sequence
  ENSG00000164164_71 (sequence is synthesized)
gcagtctgctgaagtttctttatccctgtcactaattttacctaatttctattatgggactgtttgttttgaaagttggtgtttttggttgatgagaatttacgtctgcaatctagatgc

SEQ ID NO: 508360 - DNA, 120 bp, Artificial Sequence
  ENSG00000164164_72 (sequence is synthesized)
atatttgtagaataaatttggtcctacctatatgtgtgtgtattgtaaaattttaaagttaacttgtcaattgttcacatacccagtaatgaaataaaatggccgtttggatttccttca

SEQ ID NO: 508361 - DNA, 120 bp, Artificial Sequence
  ENSG00000164164_73 (sequence is synthesized)
agtttttagattaagccatagttcccaagggtaaactaataatttttaaactctaaatactttaaagatcacatttttcacatttttcctatttttccttttcacatatttagtaatatc

SEQ ID NO: 508362 - DNA, 82 bp, Artificial Sequence
  ENSG00000164164_74 (sequence is synthesized)
ggatcatttgaagaatatttaaagcgtttggaaaatccacaggtggaatttaactccattgccaggctggagtgcagttcaa

SEQ ID NO: 508363 - DNA, 83 bp, Artificial Sequence
  ENSG00000164164_75 (sequence is synthesized)
tctcggctcactgcagcctccgcctcccgagttcaagcgatttgtctcccgagtatctgggactacaggcgtgcaccaccatg

SEQ ID NO: 508364 - DNA, 120 bp, Artificial Sequence
  ENSG00000164164_76 (sequence is synthesized)
catgcaggttcctatttccatgatcatctcgtgaagagggaagagactgttgagacagaaaaggatagcacttactcaccaactcctgctgctatactttttcagtcatgtttatgttaa

SEQ ID NO: 508365 - DNA, 120 bp, Artificial Sequence
  ENSG00000164164_77 (sequence is synthesized)
aaggatttttcttaatttttctgtttacaaaactaacgttctcactgtaaaaatccaagtatcttggaatgccatttagaatgttaaggtaaaaataacattggcaaagaaaaaagctaa

SEQ ID NO: 508366 - DNA, 120 bp, Artificial Sequence
  ENSG00000164167_0 (sequence is synthesized)
ccctgcctcggcgctttcggttttggctgggatcatccgcggcggccgggctcgtggggcgcctggagtgagggttctggttcccgccggcgaggattgttaaaatgagtcttcggaagc

SEQ ID NO: 508367 - DNA, 120 bp, Artificial Sequence
  ENSG00000164167_1 (sequence is synthesized)
aaacccctagtgacttcttaaagcaaatcatcggacgaccagttgtggtaaaattaaattctggagtggattatcgaggggtcctggcttgcctggatggctacatgaatatagccctgg

SEQ ID NO: 508368 - DNA, 120 bp, Artificial Sequence
  ENSG00000164167_2 (sequence is synthesized)
agcagacagaagaatatgtaaatggacaactgaagaataagtatggggatgcatttatccgaggaaacaatgtgttgtacatcagtacacagaagagacggatgtgaagacaccaagaga

SEQ ID NO: 508369 - DNA, 120 bp, Artificial Sequence
  ENSG00000164167_3 (sequence is synthesized)
gcaacgcttttcatagttggatatatttttttatgaattttttctaatttttgcttcttttgtgatacaatttgtcctctttttataatagttggtgatttttcactgacatgtgagtaa

SEQ ID NO: 508370 - DNA, 120 bp, Artificial Sequence
  ENSG00000164167_4 (sequence is synthesized)
gataaatgtatacaattgtggatttaattgtgaaatgttctttcacttgtaagtttcagtcattttcttttacctcgttgtcagtgtacagaatgctaaaataattaaaaaaagacaaaa

SEQ ID NO: 508371 - DNA, 120 bp, Artificial Sequence
  ENSG00000164167_5 (sequence is synthesized)
tatacctcttcctacaagattatttaacttaagtttcgagaagtgtcatttcatttgacttgcttttcttatccagctaaaatgatgcatatattttatatattgtatggacatataatt

SEQ ID NO: 508372 - DNA, 120 bp, Artificial Sequence
  ENSG00000164167_6 (sequence is synthesized)
aaaacattttggaggaatcctcctttattgcatccttttctgttcatacagaatccttgcgtgaatatgttctacaaaggcatccagtttcagtctgaagctacaaaaaggggccacagg

SEQ ID NO: 508373 - DNA, 120 bp, Artificial Sequence
  ENSG00000164167_7 (sequence is synthesized)
atcagaagttcagccactgattgagtcacctaaataaaaaacagaattggaaagccaagagtgccacttgcacataaggagtgggaattcgaactgaggtgctggagaaatcctaaagat

SEQ ID NO: 508374 - DNA, 120 bp, Artificial Sequence
  ENSG00000164167_8 (sequence is synthesized)
gaacaagatttcagtgaggagaaagccctcctgtcagtggtccccctgcatctccttatgcaattagactttttaggtttccctgctccctttcaggagcattggcatcaacgttattct

SEQ ID NO: 508375 - DNA, 120 bp, Artificial Sequence
  ENSG00000164167_9 (sequence is synthesized)
agcctagagtttgtaaacataattcaggttctaattgccgagctgagattgggaaagaatttttcctaactctggtctagcaagtggctgtagggaggcctttctcaaaaatcagctgta

SEQ ID NO: 508376 - DNA, 120 bp, Artificial Sequence
  ENSG00000164167_10 (sequence is synthesized)
tttgcctttgacattgtccaggagcagagcaccaggctttatgttgcttggcacaaggcagctcctctggttatgtgactcctgctgagaggattttcacaatttattaatgagctttcc

SEQ ID NO: 508377 - DNA, 120 bp, Artificial Sequence
  ENSG00000164167_11 (sequence is synthesized)
acaaccctgctttattctccaaacagttttacgctgtctctaggaacaacaaatatatctgggcactgtggttgaatgaataccagacaattgtgtgaatgttgtattggacttcctctt

SEQ ID NO: 508378 - DNA, 120 bp, Artificial Sequence
  ENSG00000164167_12 (sequence is synthesized)
ccctcccttcccaatctaaatagcattcctatttcaggagccgatggtgtgattcgaaacaactgcttggttgaaggatggggggcaggatcgagaaggagagagggaaggggcagtgct

SEQ ID NO: 508379 - DNA, 120 bp, Artificial Sequence
  ENSG00000164167_13 (sequence is synthesized)
gattctggagaggtgtatgtagtgttttgtcttggtttattttaaagatcagagagtaattggaaacaattattttttaattaataacttgggaaaggtgaacagaagcatttcacaggg

SEQ ID NO: 508380 - DNA, 120 bp, Artificial Sequence
  ENSG00000164167_14 (sequence is synthesized)
ttttaccgtgtgcacactgaaaataaaacactttatgctatgcttcaataatttatcacttcttgacaggggcttggaaaaggtccagtatgtaagtacaaatcaccaatttgctctttt

SEQ ID NO: 508381 - DNA, 120 bp, Artificial Sequence
  ENSG00000164167_15 (sequence is synthesized)
ataaatgagttcttttaaggagaaaatggatggctctccaagtggagcatacatgttctcatttgttttgtagaatatgtggggctgcaggttattgtgtcccttcattcacttatatca

SEQ ID NO: 508382 - DNA, 120 bp, Artificial Sequence
  ENSG00000164167_16 (sequence is synthesized)
gccacctctaaaagcaattccattgtagtctcccactaatctgtagcgtcctgttttttctaacttcttccctgacctcgcctttgatatataagtctttattttccccttgccatctct

SEQ ID NO: 508383 - DNA, 120 bp, Artificial Sequence
  ENSG00000164167_17 (sequence is synthesized)
ctagtttaatagctctacagtggagtactgttttcaaccatggaactacttttaatcaagatcaactttgggaagtgctgccatttttatggtaataaaggactgtattatgcacttgaa

SEQ ID NO: 508384 - DNA, 120 bp, Artificial Sequence
  ENSG00000164167_18 (sequence is synthesized)
cgctttcggttttggctgggatcatccgcggcggccgggctcgtggggcgcctggagtgagggttctggttcccgccggcgaggtgagccgcaccgctgcgcgggccgacgacggggccg

SEQ ID NO: 508385 - DNA, 120 bp, Artificial Sequence
  ENSG00000164167_19 (sequence is synthesized)
ggcgcagccccaggttcggtgccccagtgttcagtcgcgctgtggagcggcggctgcagcggccctaggccgggcgaggcagccccggaaagggcctgcggtgaacaggctggggctccg

SEQ ID NO: 508386 - DNA, 120 bp, Artificial Sequence
  ENSG00000164167_20 (sequence is synthesized)
ggaagggaccgctgggtggcgggtccccgcgaaatgccgcgtccaagctctccgcgcatggaatggctgggagaggtctgatggtgggcgccgggaccgccctcagcgaggcgcctagac

SEQ ID NO: 508387 - DNA, 120 bp, Artificial Sequence
  ENSG00000164167_21 (sequence is synthesized)
tgcgcggagaggagcggcaccgtcccggctcctaccgagttggcgtccgagatcaattcaggttgttgaagttccccagggagccccgacgctaatcccaagattcggcgggaaagcgga

SEQ ID NO: 508388 - DNA, 120 bp, Artificial Sequence
  ENSG00000164167_22 (sequence is synthesized)
tcccgaacccaggcctaggcttcgcctgtcttccaggagggcttcagggaattgcgaaccctctcctacatcggggtggctgcgcctgaccacaggaattaaaggctggactcgcctgtc

SEQ ID NO: 508389 - DNA, 120 bp, Artificial Sequence
  ENSG00000164167_23 (sequence is synthesized)
attaagatgatgcggattaccctgccccactgctcttagtaatacgtgactattgtagaaaattgcaaacatagaagactttagtgaagaaaataatattcactgaaccctttcacctac

SEQ ID NO: 508390 - DNA, 120 bp, Artificial Sequence
  ENSG00000164167_24 (sequence is synthesized)
gatcattttctcttgtatgtgctagcttctacttgaactaagagtgtacatgtttaatcacttaacagtgtagttttccacttccatttaaaaactcttcctaaatattattctaatttt

SEQ ID NO: 508391 - DNA, 120 bp, Artificial Sequence
  ENSG00000164167_25 (sequence is synthesized)
acttactgatatttattaacctcttaagtatacccaataggccaaaaaagtactggtcatcagtagtttttatgcatatatctttttctatctctgagatcattccttttagaaggacaa

SEQ ID NO: 508392 - DNA, 120 bp, Artificial Sequence
  ENSG00000164167_26 (sequence is synthesized)
atagctaggtattcctagtgaactcaggtatgaacaacacaactgaagaacatcttggtgcagcagcatttgtttttgcaggagtattcaagattggcaagcagctgttgagtatcattt

SEQ ID NO: 508393 - DNA, 85 bp, Artificial Sequence
  ENSG00000164167_27 (sequence is synthesized)
ttgcctttctgttcttggagagaatattatttttaagaggctgcagtgcttttgaaattaactttataggaagaatggttttaaa

SEQ ID NO: 508394 - DNA, 120 bp, Artificial Sequence
  ENSG00000164167_28 (sequence is synthesized)
gtgcttttgaaattaactttataggaagaatggttttaaattccgttttttaaagttactgaatttcttatcttccaagctaaggtatgttaagttacctgaaatatttggcaggtgtaa

SEQ ID NO: 508395 - DNA, 120 bp, Artificial Sequence
  ENSG00000164167_29 (sequence is synthesized)
tctatttataatccagatcaccaaagaggtttctagataatttaaaagtccacttttaggcttgattattttaaaatgcttatatgtcagatcttcagtttgaccagttattttgtagat

SEQ ID NO: 508396 - DNA, 120 bp, Artificial Sequence
  ENSG00000164168_0 (sequence is synthesized)
ggtttggccttgggttccgctgtaggggaggtcccgtgcgaaagaatgaggagatcctggggccttacctactagcggaatcgactgaagagacgcctgccagtgcgggaggtaggaagc

SEQ ID NO: 508397 - DNA, 120 bp, Artificial Sequence
  ENSG00000164168_1 (sequence is synthesized)
tcgatccccaaagaaaagagcgagtgggcaggcagctgcgagacagaaccggagtgtgcagggtccctagaggccggttcctggtctgtgctgctctcctggaagccatggtacaggcag

SEQ ID NO: 508398 - DNA, 120 bp, Artificial Sequence
  ENSG00000164168_2 (sequence is synthesized)
agctcagggcgatccccaggtgagggcagcggctctgcctgggattccaccgcagtacaaccgggtagatgcggggtggagaagaaaggatgttgcctgcactgctcgccaatagcaccc

SEQ ID NO: 508399 - DNA, 120 bp, Artificial Sequence
  ENSG00000164168_3 (sequence is synthesized)
tgagaggctacatttgcagaagcagcagcagcagaagacacagcgccggtccaggaggcggctcgagctgttcgtaaagtcgcccgacagctttttctccgtagtatgcgagttgacaaa

SEQ ID NO: 508400 - DNA, 120 bp, Artificial Sequence
  ENSG00000164168_4 (sequence is synthesized)
acagccagagaacagggctccccattacaatcttttcgagatcttttcccttgctaaccggatctgatttgtgcgaaaacatgccttgcacttgtacctggaggaactggagacagtgga

SEQ ID NO: 508401 - DNA, 120 bp, Artificial Sequence
  ENSG00000164168_5 (sequence is synthesized)
ttcgacctttagtagcggtcatctacctggtgtcaatagtggttgcggttcccctatgcgtgtgggaattacagaaactggaggttggaatacacaccaaggcttggtttattgctggaa

SEQ ID NO: 508402 - DNA, 120 bp, Artificial Sequence
  ENSG00000164168_6 (sequence is synthesized)
tctttttgctgttgactattcctatatcactgtgggtgatattgcaacacttagtgcattatacacaacctgaactacaaaaaccaataataaggattctttggatggtacctatttaca

SEQ ID NO: 508403 - DNA, 120 bp, Artificial Sequence
  ENSG00000164168_7 (sequence is synthesized)
gtttagatagttggatagctttgaaatatcccggaattgcaatatatgtggatacctgcagagaatgctatgaagcttatgtaatttacaactttatgggattccttaccaattatctaa

SEQ ID NO: 508404 - DNA, 120 bp, Artificial Sequence
  ENSG00000164168_8 (sequence is synthesized)
ctaaccggtatccaaatctggtattaatccttgaagccaaagatcaacagaaacatttccctcctttatgttgctgtccaccatgggctatgggagaagtattgctgtttaggtgcaaac

SEQ ID NO: 508405 - DNA, 120 bp, Artificial Sequence
  ENSG00000164168_9 (sequence is synthesized)
taggtgtattacagtacacagttgtcagacctttcaccaccatcgttgctttaatctgtgagctgcttggtatatatgacgaagggaactttagcttttcaaatgcttggacttatttgg

SEQ ID NO: 508406 - DNA, 120 bp, Artificial Sequence
  ENSG00000164168_10 (sequence is synthesized)
ttataataaacaacatgtcacagttgtttgccatgtattgtctcctgctcttttataaagtactaaaagaagaactgagcccaatccaacctgttggcaaatttctttgtgtaaagctgg

SEQ ID NO: 508407 - DNA, 120 bp, Artificial Sequence
  ENSG00000164168_11 (sequence is synthesized)
tggtttttgtttctttttggcaagcagtagttattgctttgttggtaaaagttggcgttatttctgaaaagcatacgtgggaatggcaaactgtagaagctgtggccaccggactccagg

SEQ ID NO: 508408 - DNA, 120 bp, Artificial Sequence
  ENSG00000164168_12 (sequence is synthesized)
attttattatctgtattgagatgttcctcgctgccattgctcatcattacacattctcatataaaccatatgtccaagaagcagaagagggctcatgctttgattcctttcttgccatgt

SEQ ID NO: 508409 - DNA, 120 bp, Artificial Sequence
  ENSG00000164168_13 (sequence is synthesized)
gggatgtctcagatattagagatgatatttctgaacaagtaaggcatgttggacggacagtcaggggacatcccaggaaaaaattgtttcccgaggatcaagatcaaaatgaacatacaa

SEQ ID NO: 508410 - DNA, 120 bp, Artificial Sequence
  ENSG00000164168_14 (sequence is synthesized)
gtttattatcatcatcatcacaagatgcaatttccattgcttcttctatgccaccttcacccatgggtcactaccaagggtttggacacactgtgactccccagactacacctaccacag

SEQ ID NO: 508411 - DNA, 120 bp, Artificial Sequence
  ENSG00000164168_15 (sequence is synthesized)
ctaagatatctgatgaaatccttagtgatactataggagagaaaaaagaaccttcagataaatccgtggattcctgaacagtatggaaaagcaaactgtgcaactactacattatatcat

SEQ ID NO: 508412 - DNA, 120 bp, Artificial Sequence
  ENSG00000164168_16 (sequence is synthesized)
tacctggtatcccatggattttgtgcttgggacagaccataaatgatggaaaatgtcaacacaaaaatagctgaaagccaggtacaactactgcatttatatatgtaagttttgtatatc

SEQ ID NO: 508413 - DNA, 120 bp, Artificial Sequence
  ENSG00000164168_17 (sequence is synthesized)
ggtatcgcatactcaaatggtagacaatgaccccaactaaatcttcctgatgttacactgctttatcaagaggatggacttttttttttttgagacagacagagtcttgctctgtcaccc

SEQ ID NO: 508414 - DNA, 65 bp, Artificial Sequence
  ENSG00000164168_18 (sequence is synthesized)
tccgccggaatggacattttttaaaaaaacatcagtacttcctaccactgctgcatgagtataat

SEQ ID NO: 508415 - DNA, 120 bp, Artificial Sequence
  ENSG00000164168_19 (sequence is synthesized)
aaaacatcagtacttcctaccactgctgcatgagtataatgctccggaattatcagaaagcataatgcagaaatacgaattagtggaacttaatcatgtgccatataagcttacctaaca

SEQ ID NO: 508416 - DNA, 120 bp, Artificial Sequence
  ENSG00000164168_20 (sequence is synthesized)
aacagttatatccctattcctcaactgaatgtctttcaataaataagaatttatcatttattttctgcaacttttttatgtctcattctttaaacattaaaaacccttaatattttaaca

SEQ ID NO: 508417 - DNA, 120 bp, Artificial Sequence
  ENSG00000164168_21 (sequence is synthesized)
aaaatttcttgattagaggcacagtgaaaaagaagtcaaaaaaaaaagttctacttttcatcagtgctattaaaggtggcagcaaatgtaaatcttggctgaatggtcttaattactcat

SEQ ID NO: 508418 - DNA, 120 bp, Artificial Sequence
  ENSG00000164168_22 (sequence is synthesized)
taaaccacagtcagaaagacatataggtgctatttgggaaaactttttattacctaggatggggtttctctaattgctaatcacaaccccactgggtcatgtttgacattttataatgaa

SEQ ID NO: 508419 - DNA, 120 bp, Artificial Sequence
  ENSG00000164168_23 (sequence is synthesized)
aataaaacagaaagtgccatagtatgttacagaaagcaaagatgagtattgtttctcaaagcctttgctttatgtatttatacacatactcattcatatctatctatatatatagagaga

SEQ ID NO: 508420 - DNA, 120 bp, Artificial Sequence
  ENSG00000164168_24 (sequence is synthesized)
gatagtggttcacagtaatcatacaaagtctttattccatccactattataaacatttctattaaaactaaaactgggctctatgtaaaaaccccaaagatacacacacaaaaaaaatct

SEQ ID NO: 508421 - DNA, 120 bp, Artificial Sequence
  ENSG00000164168_25 (sequence is synthesized)
tgcagaatacaaaatcaacatacaaaaagcattagcatttttatacataaataatgaaaataatgacctaactgaaaaattaagatgccatttatgatagcataaaaaaaatacttactt

SEQ ID NO: 508422 - DNA, 120 bp, Artificial Sequence
  ENSG00000164168_26 (sequence is synthesized)
catttatgatagcataaaaaaaatacttacttaggaataaatttaacaccaaggcagtaaaagatctgtatgtacactgaaaactatgaaacactgatgaaagaaagacacaaataaatg

SEQ ID NO: 508423 - DNA, 120 bp, Artificial Sequence
  ENSG00000164168_27 (sequence is synthesized)
gaaaggtatcccgtgctcatggatcagaataatactgttaaaatggtcacactacccaaagcaattcagaatcaatgcaatcctatcaaaattccaatggcattatttacacaaacagaa

SEQ ID NO: 508424 - DNA, 120 bp, Artificial Sequence
  ENSG00000164168_28 (sequence is synthesized)
aaaaatcctaaaattcatatgtaacgataaaagaccctgaataggcaaaagaatactgaggaaaaaatgttggagacatcacatttcctaattataaattatactacaaaactatagtaa

SEQ ID NO: 508425 - DNA, 120 bp, Artificial Sequence
  ENSG00000164168_29 (sequence is synthesized)
tcaagacagtatggtactggtataaaaacacatacacaggccagtgggacagaagaaagagtccagatataaatccaaacatacacagtcaactaatttttgacaaagacaccaagaaga

SEQ ID NO: 508426 - DNA, 120 bp, Artificial Sequence
  ENSG00000164168_30 (sequence is synthesized)
cacatcggggaaagaacagtcttcattaagtgttcttaatgaagatgctgggaaaactgcacttccacatgcaaaacaatgaaatcagacccttatcttagacctacacaacaatcaatt

SEQ ID NO: 508427 - DNA, 120 bp, Artificial Sequence
  ENSG00000164168_31 (sequence is synthesized)
caaaatggataaaagacctaaatgtaagaccagaaactatagaagagaacataggagaaaagttcctggacactgacccttggcaatgattttttggatatcacaccaaaagctcagtca

SEQ ID NO: 508428 - DNA, 120 bp, Artificial Sequence
  ENSG00000164168_32 (sequence is synthesized)
acaaaaacaaaaacaaatgtgactacatcaaaccaaaaagcttctgacagtaaaagaaacagtcaacaaaatgaaacagtagcctacagattgagtaaaaaatatttgtaaggcatatat

SEQ ID NO: 508429 - DNA, 120 bp, Artificial Sequence
  ENSG00000164168_33 (sequence is synthesized)
gccgtgtaaagacacaacaagaaagcagaatctgcaatccaggaagagaatcctcacaagaaaccaaacttgccaacaccttgatcatggtcttccagcctccagaactgtgagaaaata

SEQ ID NO: 508430 - DNA, 120 bp, Artificial Sequence
  ENSG00000164168_34 (sequence is synthesized)
tgttcctaatttttttaccattataagaaacactgaagtgaatattcttatgtatacaactatgaaagcatgtccatgtcattatttgctgtttaaattttacctggggccattatctct

SEQ ID NO: 508431 - DNA, 120 bp, Artificial Sequence
  ENSG00000164168_35 (sequence is synthesized)
agatttgcttgaaatgctcagcttgactccctatcttgagacaaaactactagaaaaatgaatttgtaaagcaaattaatatatttaacatagagtttcttcagcaatatgctgtaaagg

SEQ ID NO: 508432 - DNA, 120 bp, Artificial Sequence
  ENSG00000164169_0 (sequence is synthesized)
aggacggggcggagcttccgcctgggctggggttggcgagttcacccgcggcggagggtaactttgctgtgctgttttttgagcagttgtctggtccctggaagtgtagcatcgagagag

SEQ ID NO: 508433 - DNA, 120 bp, Artificial Sequence
  ENSG00000164169_1 (sequence is synthesized)
ttttctaattacgtttacaaaatatcttccctttggccatacaagtggtgactgccatgtcgaactcgcggcccaggtcccgccgagacgccgggggtggcgctggggcagccggccggg

SEQ ID NO: 508434 - DNA, 120 bp, Artificial Sequence
  ENSG00000164169_2 (sequence is synthesized)
acgagctggtgtcgcggtccttgcagagcgcagagcactgtctgggcgtccaggacttcggcactgcctatgcccactacctcctcgtgctcagcctggcgccggagctgaaacacgacg

SEQ ID NO: 508435 - DNA, 120 bp, Artificial Sequence
  ENSG00000164169_3 (sequence is synthesized)
tgaaggaaacttttcagtacacacttttcagatgggctgaagagcttgatgctctcagtcggatacaagacttacttggttgctatgagcaggccttggaactgtttcctgatgatgaag

SEQ ID NO: 508436 - DNA, 120 bp, Artificial Sequence
  ENSG00000164169_4 (sequence is synthesized)
tgatttgcaatagtatgggggagcatctcttcagaatgggctttagggatgaagcagctgggtattttcataaagcagtgaagctaaaccctgatttcagtgatgcaaaggagaattttt

SEQ ID NO: 508437 - DNA, 120 bp, Artificial Sequence
  ENSG00000164169_5 (sequence is synthesized)
atcgtgttgcaaactggttggtggaacgctggcactttatcatgcttaatgacaccaagaggaatacaatttataatgcagcaatccaaaaggcagtttgtttggggtccaaaagtgttt

SEQ ID NO: 508438 - DNA, 120 bp, Artificial Sequence
  ENSG00000164169_6 (sequence is synthesized)
tggacattggagcaggaactggaatactaagcatgtttgctaaaaaagctggagcacattccgtgtatgcctgtgagttatccaagaccatgtatgaacttgcctgtgatgtcgtggcag

SEQ ID NO: 508439 - DNA, 120 bp, Artificial Sequence
  ENSG00000164169_7 (sequence is synthesized)
caaacaagatggaagcagggatcaaactcttacatacgaagtcacttgacatagagattccaaaacatattcccgaaagagtgtccctagttgtaacagaaactgtcgatgcaggtttat

SEQ ID NO: 508440 - DNA, 120 bp, Artificial Sequence
  ENSG00000164169_8 (sequence is synthesized)
ttggagaaggaattgtggagagtttgattcatgcatgggagcatttacttttacagccaaagaccaaaggtgaaagtgctaattgtgaaaagtatgggaaagttataccagcaagtgctg

SEQ ID NO: 508441 - DNA, 120 bp, Artificial Sequence
  ENSG00000164169_9 (sequence is synthesized)
ttatatttgggatggcagtagaatgtgcagagataagaagacatcatagagtgggtattaaggacattgctggtatccatttgccaacaaatgtgaaatttcagagtccggcttattctt

SEQ ID NO: 508442 - DNA, 120 bp, Artificial Sequence
  ENSG00000164169_10 (sequence is synthesized)
ctgtagatactgaagaaacaattgaaccttatacaactgaaaagatgagtcgagttcctggaggatatttggctttgacagagtgctttgaaattatgacagtagatttcaacaaccttc

SEQ ID NO: 508443 - DNA, 120 bp, Artificial Sequence
  ENSG00000164169_11 (sequence is synthesized)
aggaattaaaaagtcttgcaactaaaaagcctgataagattggtattcctgttattaaagaaggcatactagatgctattatggtttggtttgtgctccagcttgatgatgaacatagtt

SEQ ID NO: 508444 - DNA, 120 bp, Artificial Sequence
  ENSG00000164169_12 (sequence is synthesized)
tatccacaagtcctagtgaggaaacatgttgggaacaggctgtctaccccgtacaggaccttgcagactactggataaagcctggagaccatgtgatgatggaagtatcttgtcaagact

SEQ ID NO: 508445 - DNA, 120 bp, Artificial Sequence
  ENSG00000164169_13 (sequence is synthesized)
gttacttaagaatccagagtattagtgtcttgggtttggaatgtgaaatggatgttgcaaaaagttttacccagaataaagacttgttatcgttaggaaatgaggctgaactttgtagtg

SEQ ID NO: 508446 - DNA, 120 bp, Artificial Sequence
  ENSG00000164169_14 (sequence is synthesized)
ggctttaaaatggcaatgagcaaagttttgtcttcactgactccagagaaactgtatcagaccatggatactcactgtcagaatgagatgagctctggaactggacagagtaatactgta

SEQ ID NO: 508447 - DNA, 120 bp, Artificial Sequence
  ENSG00000164169_15 (sequence is synthesized)
cagaacatccttgaacctttctacgtgttagatgtgtccgaaggcttctctgttctgcctgttattgctggcacacttgggcaggttaaaccatacagttctgtggagaaagaccagcat

SEQ ID NO: 508448 - DNA, 120 bp, Artificial Sequence
  ENSG00000164169_16 (sequence is synthesized)
cgtattgctctggacctcatatctgaagccaatcactttcctaaagaaacacttgagttttggctgagacatgtggaggatgaatctgctatgttacaaaggccaaaatcagacaagtta

SEQ ID NO: 508449 - DNA, 120 bp, Artificial Sequence
  ENSG00000164169_17 (sequence is synthesized)
tggagcataattatattggatgtcattgagccatctgggctcattcagcaggaaataatggaaaaagctgcaatatccaggtgtttactacaatctggaggcaagatctttcctcagtat

SEQ ID NO: 508450 - DNA, 120 bp, Artificial Sequence
  ENSG00000164169_18 (sequence is synthesized)
gtgctgatgtttgggttgcttgtggaatcacagacactcctagaggagaatgctgttcaaggaacagaacgtactcttggattaaatatagcaccttttattaaccagtttcaggtacct

SEQ ID NO: 508451 - DNA, 120 bp, Artificial Sequence
  ENSG00000164169_19 (sequence is synthesized)
atacgtgtatttttggacctatcctcattgccctgtatacctttaagcaagccagtggaactcttaagactagatttaatgactccgtatttgaacacctctaacagagaagtaaaggta

SEQ ID NO: 508452 - DNA, 120 bp, Artificial Sequence
  ENSG00000164169_20 (sequence is synthesized)
tacgtttgtaaatctggaagactgactgctattccattttggtatcatatgtaccttgatgaagagattaggttggatacttcaagtgaagcctcccactggaaacaagctgcagttgtt

SEQ ID NO: 508453 - DNA, 120 bp, Artificial Sequence
  ENSG00000164169_21 (sequence is synthesized)
ttagataatcccatccaggttgaaatgggagaggaacttgtactcagcattcagcatcacaaaagcaatgtcagcatcacagtaaagcaatgaagagcagttttccaatgaaaactgtgt

SEQ ID NO: 508454 - DNA, 120 bp, Artificial Sequence
  ENSG00000164169_22 (sequence is synthesized)
aaatagagcatcaacaagtacaaaattcttgtcttaattagtgggggtatataaaaattccttgtaatggtcaaatattttttaaaattgacattaataaagcatattttaaaagattct

SEQ ID NO: 508455 - DNA, 120 bp, Artificial Sequence
  ENSG00000164169_23 (sequence is synthesized)
aaataaaagggtagcattattatagaaatactgctgcagatttgctttctggaaaaggatacatcactagttttttaaattaggaaacttcttttgctcgattttacagaatagggattt

SEQ ID NO: 508456 - DNA, 120 bp, Artificial Sequence
  ENSG00000164169_24 (sequence is synthesized)
taaaagtcttatcgttattgacatgtgtaagtaaagcaaaactttacttttgtaggcatcttggccttttttcttaaatccaaacttgtaattgggaaacactgaaaggcttccactgaa

SEQ ID NO: 508457 - DNA, 120 bp, Artificial Sequence
  ENSG00000164169_25 (sequence is synthesized)
gactgagggttatggttacctgtaaattccaatcttgcttcctttaaatactcagtgtacatctgaaacatctcaggttttgttttgagaatgcaagcttgaaaaagaatttaagctata

SEQ ID NO: 508458 - DNA, 120 bp, Artificial Sequence
  ENSG00000164169_26 (sequence is synthesized)
agctaaatgtaattaaaacagtaaaggagttagggaatacatcttcaggaggcagcatttttcttggtctactttggcaaaagaacatttaaaagctggtaacaaaacaaagttaaattg

SEQ ID NO: 508459 - DNA, 120 bp, Artificial Sequence
  ENSG00000164169_27 (sequence is synthesized)
aaggaagacttaatcctatactatttttcaaagttttgatttggatgtacaataagtacattaattgatccaatttttacaaacttttgaaataaaggaagatcattattatgcctccta

SEQ ID NO: 508460 - DNA, 120 bp, Artificial Sequence
  ENSG00000164169_28 (sequence is synthesized)
tttttgtactggaacaatgaaagttctaatgaaagccagccttagcttgatgtgggaatataaaggaggtaatgtaaaaagcattctgtcaagtactattgagtcaagtacaaagcaatc

SEQ ID NO: 508461 - DNA, 120 bp, Artificial Sequence
  ENSG00000164169_29 (sequence is synthesized)
acaaatatcttagttgcttgctttttactttattacagggtgtttttttttttttttagtgagcagacattcttaattttattatagacctatttatagttgttttcctttatagttagt

SEQ ID NO: 508462 - DNA, 120 bp, Artificial Sequence
  ENSG00000164169_30 (sequence is synthesized)
ggttttatatgtgtgtgtattatgtagttatgtttaagaaatctttgctcatgaggttttatttcatttttgtatttttttctggactcagtattagatatgttacttgattctaaaaaa

SEQ ID NO: 508463 - DNA, 120 bp, Artificial Sequence
  ENSG00000164171_0 (sequence is synthesized)
agagaagccctctggacagcttctagagtgtgcaggttctcgtatccctcggccaagggtatcctctgcaaacctctgcaaacccagcgcaactacggtcccccggtcagacccaggatg

SEQ ID NO: 508464 - DNA, 120 bp, Artificial Sequence
  ENSG00000164171_1 (sequence is synthesized)
gggccagaacggacaggggccgcgccgctgccgctgctgctggtgttagcgctcagtcaaggcattttaaattgttgtttggcctacaatgttggtctcccagaagcaaaaatattttcc

SEQ ID NO: 508465 - DNA, 120 bp, Artificial Sequence
  ENSG00000164171_2 (sequence is synthesized)
ggtccttcaagtgaacagtttggctatgcagtgcagcagtttataaatccaaaaggcaactggttactggttggttcaccctggagtggctttcctgagaaccgaatgggagatgtgtat

SEQ ID NO: 508466 - DNA, 120 bp, Artificial Sequence
  ENSG00000164171_3 (sequence is synthesized)
aaatgtcctgttgacctatccactgccacatgtgaaaaactaaatttgcaaacttcaacaagcattccaaatgttactgagatgaaaaccaacatgagcctcggcttgatcctcaccagg

SEQ ID NO: 508467 - DNA, 120 bp, Artificial Sequence
  ENSG00000164171_4 (sequence is synthesized)
aacatgggaactggaggttttctcacatgtggtcctctgtgggcacagcaatgtgggaatcagtattacacaacgggtgtgtgttctgacatcagtcctgattttcagctctcagccagc

SEQ ID NO: 508468 - DNA, 120 bp, Artificial Sequence
  ENSG00000164171_5 (sequence is synthesized)
ttctcacctgcaactcagccctgcccttccctcatagatgttgtggttgtgtgtgatgaatcaaatagtatttatccttgggatgcagtaaagaattttttggaaaaatttgtacaaggc

SEQ ID NO: 508469 - DNA, 120 bp, Artificial Sequence
  ENSG00000164171_6 (sequence is synthesized)
ctggatataggccccacaaagacacaggtggggttaattcagtatgccaataatccaagagttgtgtttaacttgaacacatataaaaccaaagaagaaatgattgtagcaacatcccag

SEQ ID NO: 508470 - DNA, 120 bp, Artificial Sequence
  ENSG00000164171_7 (sequence is synthesized)
acatcccaatatggtggggacctcacaaacacattcggagcaattcaatatgcaagaaaatatgcttattcagcagcttctggtgggcgacgaagtgctacgaaagtaatggtagttgta

SEQ ID NO: 508471 - DNA, 120 bp, Artificial Sequence
  ENSG00000164171_8 (sequence is synthesized)
actgacggtgaatcacatgatggttcaatgttgaaagctgtgattgatcaatgcaaccatgacaatatactgaggtttggcatagcagttcttgggtacttaaacagaaacgcccttgat

SEQ ID NO: 508472 - DNA, 120 bp, Artificial Sequence
  ENSG00000164171_9 (sequence is synthesized)
actaaaaatttaataaaagaaataaaagcaatcgctagtattccaacagaaagatactttttcaatgtgtctgatgaagcagctctactagaaaaggctgggacattaggagaacaaatt

SEQ ID NO: 508473 - DNA, 120 bp, Artificial Sequence
  ENSG00000164171_10 (sequence is synthesized)
ttcagcattgaaggtactgttcaaggaggagacaactttcagatggaaatgtcacaagtgggattcagtgcagattactcttctcaaaatgatattctgatgctgggtgcagtgggagct

SEQ ID NO: 508474 - DNA, 120 bp, Artificial Sequence
  ENSG00000164171_11 (sequence is synthesized)
tttggctggagtgggaccattgtccagaagacatctcatggccatttgatctttcctaaacaagcctttgaccaaattctgcaggacagaaatcacagttcatatttaggttactctgtg

SEQ ID NO: 508475 - DNA, 120 bp, Artificial Sequence
  ENSG00000164171_12 (sequence is synthesized)
gctgcaatttctactggagaaagcactcactttgttgctggtgctcctcgggcaaattataccggccagatagtgctatatagtgtgaatgagaatggcaatatcacggttattcaggct

SEQ ID NO: 508476 - DNA, 120 bp, Artificial Sequence
  ENSG00000164171_13 (sequence is synthesized)
caccgaggtgaccagattggctcctattttggtagtgtgctgtgttcagttgatgtggataaagacaccattacagacgtgctcttggtaggtgcaccaatgtacatgagtgacctaaag

SEQ ID NO: 508477 - DNA, 120 bp, Artificial Sequence
  ENSG00000164171_14 (sequence is synthesized)
aaagaggaaggaagagtctacctgtttactatcaaagagggcattttgggtcagcaccaatttcttgaaggccccgagggcattgaaaacactcgatttggttcagcaattgcagctctt

SEQ ID NO: 508478 - DNA, 120 bp, Artificial Sequence
  ENSG00000164171_15 (sequence is synthesized)
tcagacatcaacatggatggctttaatgatgtgattgttggttcaccactagaaaatcagaattctggagctgtatacatttacaatggtcatcagggcactatccgcacaaagtattcc

SEQ ID NO: 508479 - DNA, 120 bp, Artificial Sequence
  ENSG00000164171_16 (sequence is synthesized)
cagaaaatcttgggatccgatggagcctttaggagccatctccagtactttgggaggtccttggatggctatggagatttaaatggggattccatcaccgatgtgtctattggtgccttt

SEQ ID NO: 508480 - DNA, 120 bp, Artificial Sequence
  ENSG00000164171_17 (sequence is synthesized)
ggacaagtggttcaactctggtcacaaagtattgctgatgtagctatagaagcttcattcacaccagaaaaaatcactttggtcaacaagaatgctcagataattctcaaactctgcttc

SEQ ID NO: 508481 - DNA, 120 bp, Artificial Sequence
  ENSG00000164171_18 (sequence is synthesized)
agtgcaaagttcagacctactaagcaaaacaatcaagtggccattgtatataacatcacacttgatgcagatggattttcatccagagtaacctccagggggttatttaaagaaaacaat

SEQ ID NO: 508482 - DNA, 120 bp, Artificial Sequence
  ENSG00000164171_19 (sequence is synthesized)
gaaaggtgcctgcagaagaatatggtagtaaatcaagcacagagttgccccgagcacatcatttatatacaggagccctctgatgttgtcaactctttggatttgcgtgtggacatcagt

SEQ ID NO: 508483 - DNA, 120 bp, Artificial Sequence
  ENSG00000164171_20 (sequence is synthesized)
ctggaaaaccctggcactagccctgcccttgaagcctattctgagactgccaaggtcttcagtattcctttccacaaagactgtggtgaggacggactttgcatttctgatctagtccta

SEQ ID NO: 508484 - DNA, 120 bp, Artificial Sequence
  ENSG00000164171_21 (sequence is synthesized)
gatgtccgacaaataccagctgctcaagaacaaccctttattgtcagcaaccaaaacaaaaggttaacattttcagtaacgctgaaaaataaaagggaaagtgcatacaacactggaatt

SEQ ID NO: 508485 - DNA, 120 bp, Artificial Sequence
  ENSG00000164171_22 (sequence is synthesized)
gttgttgatttttcagaaaacttgttttttgcatcattctccctgccggttgatgggacagaagtaacatgccaggtggctgcatctcagaagtctgttgcctgcgatgtaggctaccct

SEQ ID NO: 508486 - DNA, 120 bp, Artificial Sequence
  ENSG00000164171_23 (sequence is synthesized)
gctttaaagagagaacaacaggtgacttttactattaactttgacttcaatcttcaaaaccttcagaatcaggcgtctctcagtttccaagccttaagtgaaagccaagaagaaaacaag

SEQ ID NO: 508487 - DNA, 120 bp, Artificial Sequence
  ENSG00000164171_24 (sequence is synthesized)
gctgataatttggtcaacctcaaaattcctctcctgtatgatgctgaaattcacttaacaagatctaccaacataaatttttatgaaatctcttcggatgggaatgttccttcaatcgtg

SEQ ID NO: 508488 - DNA, 120 bp, Artificial Sequence
  ENSG00000164171_25 (sequence is synthesized)
cacagttttgaagatgttggtccaaaattcatcttctccctgaaggtaacaacaggaagtgttccagtaagcatggcaactgtaatcatccacatccctcagtataccaaagaaaagaac

SEQ ID NO: 508489 - DNA, 120 bp, Artificial Sequence
  ENSG00000164171_26 (sequence is synthesized)
ccactgatgtacctaactggggtgcaaacagacaaggctggtgacatcagttgtaatgcagatatcaatccactgaaaataggacaaacatcttcttctgtatctttcaaaagtgaaaat

SEQ ID NO: 508490 - DNA, 120 bp, Artificial Sequence
  ENSG00000164171_27 (sequence is synthesized)
ttcaggcacaccaaagaattgaactgcagaactgcttcctgtagtaatgttacctgctggttgaaagacgttcacatgaaaggagaatactttgttaatgtgactaccagaatttggaac

SEQ ID NO: 508491 - DNA, 120 bp, Artificial Sequence
  ENSG00000164171_28 (sequence is synthesized)
gggactttcgcatcatcaacgttccagacagtacagctaacggcagctgcagaaatcaacacctataaccctgagatatatgtgattgaagataacactgttacgattcccctgatgata

SEQ ID NO: 508492 - DNA, 120 bp, Artificial Sequence
  ENSG00000164171_29 (sequence is synthesized)
atgaaacctgatgagaaagccgaagtaccaacaggagttataataggaagtataattgctggaatccttttgctgttagctctggttgcaattttatggaagctcggcttcttcaaaaga

SEQ ID NO: 508493 - DNA, 120 bp, Artificial Sequence
  ENSG00000164171_30 (sequence is synthesized)
aaatatgaaaagatgaccaaaaatccagatgagattgatgagaccacagagctcagtagctgaaccagcagacctacctgcagtgggaaccggcagcatcccagccagggtttgctgttt

SEQ ID NO: 508494 - DNA, 120 bp, Artificial Sequence
  ENSG00000164171_31 (sequence is synthesized)
gcgtgaatggatttctttttaaatcccatattttttttatcatgtcgtaggtaaactaacctggtattttaagagaaaactgcaggtcagtttggaatgaagaaattgtggggggtgggg

SEQ ID NO: 508495 - DNA, 120 bp, Artificial Sequence
  ENSG00000164171_32 (sequence is synthesized)
ttttatatgatgggggaaaaaaagtaatctttaaactggctggcccagagtttacattctaatttgcattgtgtcagaaacatgaaatgcttccaagcatgacaacttttaaagaaaaat

SEQ ID NO: 508496 - DNA, 120 bp, Artificial Sequence
  ENSG00000164171_33 (sequence is synthesized)
atgatactctcagattttaagggggaaaactgttctctttaaaatatttgtctttaaacagcaactacagaagtggaagtgcttgatatgtaagtacttccacttgtgtatattttaatg

SEQ ID NO: 508497 - DNA, 120 bp, Artificial Sequence
  ENSG00000164171_34 (sequence is synthesized)
aatattgatgttaacaagaggggaaaacaaaacacaggttttttcaatttatgctgctcatccaaagttgccacagatgatacttccaagtgataattttatttataaactaggtaaaat

SEQ ID NO: 508498 - DNA, 120 bp, Artificial Sequence
  ENSG00000164171_35 (sequence is synthesized)
ttgttgttggttccttttagaccacggctgccccttccacaccccatcttgctctaatgatcaaaacatgcttgaataactgagcttagagtatacctcctatatgtccatttaagttag

SEQ ID NO: 508499 - DNA, 120 bp, Artificial Sequence
  ENSG00000164171_36 (sequence is synthesized)
gagagggggcgatatagagaataaggcacaaaattttgtttaaaactcagaatataacatgtaaaatcccatctgctagaagcccatcctgtgccagaggaaggaaaaggaggaaatttc

SEQ ID NO: 508500 - DNA, 120 bp, Artificial Sequence
  ENSG00000164171_37 (sequence is synthesized)
ctttctcttttaggaggcacaacagttctcttctaggatttgtttggctgactggcagtaacctagtgaatttctgaaagatgagtaatttctttggcaaccttcctcctcccttactga

SEQ ID NO: 508501 - DNA, 120 bp, Artificial Sequence
  ENSG00000164171_38 (sequence is synthesized)
accactctcccacctcctggtggtaccattattatagaagccctctacagcctgactttctctccagcggtccaaagttatcccctcctttacccctcatccaaagttcccactccttca

SEQ ID NO: 508502 - DNA, 120 bp, Artificial Sequence
  ENSG00000164171_39 (sequence is synthesized)
ggacagctgctgtgcattagatattaggggggaaagtcatctgtttaatttacacacttgcatgaattactgtatataaactccttaacttcagggagctattttcatttagtgctaaac

SEQ ID NO: 508503 - DNA, 120 bp, Artificial Sequence
  ENSG00000164171_40 (sequence is synthesized)
aagtaagaaaaataagctcgagtgaatttctaaatgttggaatgttatgggatgtaaacaatgtaaagtaagacatctcaggatttcaccagaagttacagatgaggcactggaagccac

SEQ ID NO: 508504 - DNA, 120 bp, Artificial Sequence
  ENSG00000164171_41 (sequence is synthesized)
caaattagcaggtgcaccttctgtggctgtcttgtttctgaagtacttaaacttccacaagagtgaatttgacctaggcaagtttgttcaaaaggtagatcctgagatgatttggtcaga

SEQ ID NO: 508505 - DNA, 120 bp, Artificial Sequence
  ENSG00000164171_42 (sequence is synthesized)
ttgggataaggcccagcaatctgcattttaacaagcaccccagtcactaggatgcagatggaccacactttgagaaacaccacccatttctactttttgcaccttattttctctgttcct

SEQ ID NO: 508506 - DNA, 120 bp, Artificial Sequence
  ENSG00000164171_43 (sequence is synthesized)
gagcccccacattctctaggagaaacttagaggaaaagggcacagacactacatatctaaagctttggacaagtccttgacctctataaacttcagagtcctcattataaaatgggaaga

SEQ ID NO: 508507 - DNA, 120 bp, Artificial Sequence
  ENSG00000164171_44 (sequence is synthesized)
ctgagctggagttcagcagtgatgcttttagttttaaaagtctatgatctggacttcctataatacaaatacacaatcctccaagaatttgacttggaaaaaaatgtcaaaggaaaacag

SEQ ID NO: 508508 - DNA, 120 bp, Artificial Sequence
  ENSG00000164171_45 (sequence is synthesized)
gttatctgcccatgtgcatatggacaaccttgactaccctggcctggcccgtggtggcagtccagggctatctgtactgtttacagaattactttgtagttgacaacacaaaacaaacaa

SEQ ID NO: 508509 - DNA, 120 bp, Artificial Sequence
  ENSG00000164171_46 (sequence is synthesized)
aaaaggcataaaatgccagcggtttatagaaaaaacagcatggtattctccagttaggtatgccagagtccaattcttttaacagctgtgagaatttgctgcttcattccaacaaaattt

SEQ ID NO: 508510 - DNA, 120 bp, Artificial Sequence
  ENSG00000164171_47 (sequence is synthesized)
tatttaaaaaaaaaaaaaaaagactggagaaactagtcattagcttgataaagaatatttaacagctagtggtgctggtgtgtacctgaagctccagctacttgagagactgagacagga

SEQ ID NO: 508511 - DNA, 120 bp, Artificial Sequence
  ENSG00000164171_48 (sequence is synthesized)
agacaggaagatcgcttgagcccaggagttcaagtccagcctaagcaacatagcaagaccctgtctcaaaaaaatgactatttaaaaagacaatgtggccaggcacggtggctcacacct

SEQ ID NO: 508512 - DNA, 120 bp, Artificial Sequence
  ENSG00000164171_49 (sequence is synthesized)
gtctcaaacaaacaaacaaaaaaaaagttagtactgtatatgtaaatactagcttttcaatgtgctatacaaacaattatagcacatccttccttttactctgtctcacctcctttaggt

SEQ ID NO: 508513 - DNA, 120 bp, Artificial Sequence
  ENSG00000164171_50 (sequence is synthesized)
gagtacttccttaaataagtgctaaacatacatatacggaacttgaaagctttggttagccttgccttaggtaatcagcctagtttacactgtttccagggagtagttgaattactataa

SEQ ID NO: 508514 - DNA, 120 bp, Artificial Sequence
  ENSG00000164171_51 (sequence is synthesized)
accattagccacttgtctctgcaccatttatcacaccaggacagggtctctcaacctgggcgctactgtcatttggggccaggtgattcttccttgcaggggctgtcctgtaccttgtag

SEQ ID NO: 508515 - DNA, 120 bp, Artificial Sequence
  ENSG00000164171_52 (sequence is synthesized)
gacagcagccctgtcctagaaggtatgtttagcagcattcctggcctctagctacccgatgccagagcatgctccccccgcagtcatgacaatcaaaaaatgtctccagacattgtcaaa

SEQ ID NO: 508516 - DNA, 120 bp, Artificial Sequence
  ENSG00000164171_53 (sequence is synthesized)
tgcctcctggggggcagtatttctcaagcacttttaagcaaaggtaagtattcatacaagaaatttagggggaaaaaacattgtttaaataaaagctatgtgttcctattcaacaatatt

SEQ ID NO: 508517 - DNA, 120 bp, Artificial Sequence
  ENSG00000164171_54 (sequence is synthesized)
tttgctttaaaagtaagtagagggcataaaagatgtcatattcaaatttccatttcataaatggtgtacagacaaggtctatagaatgtggtaaaaacttgactgcaacacaaggcttat

SEQ ID NO: 508518 - DNA, 120 bp, Artificial Sequence
  ENSG00000164171_55 (sequence is synthesized)
aaaatagtaagatagtaaaatagcttatgaagaaactacagagatttaaaattgtgcatgactcatttcagcagcaaaataagaactcctaactgaacagaaatttttctacctagcaat

SEQ ID NO: 508519 - DNA, 120 bp, Artificial Sequence
  ENSG00000164171_56 (sequence is synthesized)
ctacctagcaatgttattcttgtaaaatagttacctattaaaactgtgaagagtaaaactaaagccaatttattatagtcacacaagtgattatactaaaaattattataaaggttataa

SEQ ID NO: 508520 - DNA, 120 bp, Artificial Sequence
  ENSG00000164171_57 (sequence is synthesized)
tttacctgtcctgatatatagctataacccaatatatgaaaatctcaaaaattaagacatcatcatacagaaggcaggattccttaaactgagatccctgatccatctttaatatttcaa

SEQ ID NO: 508521 - DNA, 120 bp, Artificial Sequence
  ENSG00000164171_58 (sequence is synthesized)
tttgcacacataaaacaatgcccttttgtgtacattcaggcatacccattttaatcaatttgaaaggttaatttaaacctctagaggtgaatgagaaacatgggggaaaagtatgaaata

SEQ ID NO: 508522 - DNA, 120 bp, Artificial Sequence
  ENSG00000164171_59 (sequence is synthesized)
ggtgaaaatcttaactatttctttgaactctaaagactgaaactgtagccattatgtaaataaagtttcatatgtacctgtttattttggcagattaagtcaaaatatgaatgtatatat

SEQ ID NO: 508523 - DNA, 120 bp, Artificial Sequence
  ENSG00000164171_60 (sequence is synthesized)
tgcataactatgttagaattgtatatattttaaagaaattgtcttggatattttcctttatacataatagataagtcttttttcaaatgtggtgtttgatgtttttgattaaatgtgttt

SEQ ID NO: 508524 - DNA, 120 bp, Artificial Sequence
  ENSG00000164171_61 (sequence is synthesized)
tgcctctttccacaaaaactgtaaaaataaatgcatgtttgtacaaaaagttgcagaattcatttgatttatgagaaacaaaaattaaattgtagtcaacagttagtagtttttctcata

SEQ ID NO: 508525 - DNA, 120 bp, Artificial Sequence
  ENSG00000164171_62 (sequence is synthesized)
tccaagtataacaaacagaaaagtttcattattgtaacccacttttttcataccacattattgaatattgttacaattgttttgaaaataaagccattttctttgggcttttataagtta

SEQ ID NO: 508526 - DNA, 120 bp, Artificial Sequence
  ENSG00000164171_63 (sequence is synthesized)
gcaactacggtcccccggtcagacccaggatggggccagaacggacaggggccgcgccgctgccgctgctgctggtgttagcgctcagtcaaggttactggttggttcaccctggagtgg

SEQ ID NO: 508527 - DNA, 120 bp, Artificial Sequence
  ENSG00000164172_0 (sequence is synthesized)
gtgattcggtcccgctgtcctaggcgggatggtgccgctgtgccaggtaagggtggcgggtgtgcgtgcgggcctgggtgcggagccctcctcgacgtgtctctcccgccctttccctcc

SEQ ID NO: 508528 - DNA, 120 bp, Artificial Sequence
  ENSG00000164172_1 (sequence is synthesized)
acatacccagccttggtcagtcggacctccccactagcccccaacctggccggcgtcttgggttcgggggcgcccccgcccccgcccccgggcccttcctgtctccgggctttactgcga

SEQ ID NO: 508529 - DNA, 120 bp, Artificial Sequence
  ENSG00000164172_2 (sequence is synthesized)
ctgccccagcagaagtcgggtcctctccgagaactcttgtcagctcacggcagcaaggacggactcgttctgaaggcgcctccaccttttatgaccacctctttcccagattattcgttt

SEQ ID NO: 508530 - DNA, 120 bp, Artificial Sequence
  ENSG00000164172_3 (sequence is synthesized)
tgatgaagctaaaattttaatctaaaaagaaatgcacctcatggagaattcttgtgaagaactgtgcttcatctgtggatttctacacccttgatcatttgcaaacctgtaattatttcg

SEQ ID NO: 508531 - DNA, 120 bp, Artificial Sequence
  ENSG00000164172_4 (sequence is synthesized)
taaagagttgtttgcacggagtgacaggttgaagtattgtattttgcaaaaagtgctgaaataacaggagttcgttcagagaccatttctgtgcctcaagaaataaaagcgttgcagctg

SEQ ID NO: 508532 - DNA, 120 bp, Artificial Sequence
  ENSG00000164172_5 (sequence is synthesized)
tggaaggagatagaaactcgacatcctggattggctgatgttagaaatcagataatatttgctgttcgtcaagaatatgtcgagcttggagatcagctcctcgtgcttcagcctggagac

SEQ ID NO: 508533 - DNA, 120 bp, Artificial Sequence
  ENSG00000164172_6 (sequence is synthesized)
gaaattgccgttatcccccccattagtggaggatagtgcttttgagccatctaggaaagatatggatgaagttgaagagaaatctaaagatgttataaactttactgccgagaaactttc

SEQ ID NO: 508534 - DNA, 120 bp, Artificial Sequence
  ENSG00000164172_7 (sequence is synthesized)
agtagatgaagtctcacagttggtgatttctccgctctgtggtgcaatatccctatttgtagggactacaagaaataactttgaagggaaaaaagtcattagcttagaatatgaagcata

SEQ ID NO: 508535 - DNA, 120 bp, Artificial Sequence
  ENSG00000164172_8 (sequence is synthesized)
tctacccatggcggaaaatgaagtcagaaagatttgtagtgacattaggcagaaatggccagtcaaacacatagcagtgttccatagacttggcttggttccagtgtcagaagcaagcat

SEQ ID NO: 508536 - DNA, 120 bp, Artificial Sequence
  ENSG00000164172_9 (sequence is synthesized)
aatcattgctgtgtcctcagcccacagagctgcatctcttgaagctgtgagctatgccattgatactttaaaagccaaggtgcccatatggaaaaaggaaatatacgaagagtcatcaac

SEQ ID NO: 508537 - DNA, 120 bp, Artificial Sequence
  ENSG00000164172_10 (sequence is synthesized)
ttggaaaggaaacaaagagtgcttttgggcatccaacagttaatcacttatgtttttagagcatgcaatcttaactttgttaaactattattattgatcacattttgatttttttctctc

SEQ ID NO: 508538 - DNA, 120 bp, Artificial Sequence
  ENSG00000164172_11 (sequence is synthesized)
cacatcaggatagtttactgaagcacaatctcttatactagtgggacaaaagggagaaaaaggaagcaagataaatgggtatgtaggatgaagggttatttaaaatggaactaaagatag

SEQ ID NO: 508539 - DNA, 120 bp, Artificial Sequence
  ENSG00000164172_12 (sequence is synthesized)
aaggaggactgtaggaagaaatggaataatttaaatgtgaggaaagatatctgtggtagacatgtccttccatgactaatttctaattgtaactcaacacacattgaggtatgggccctc

SEQ ID NO: 508540 - DNA, 120 bp, Artificial Sequence
  ENSG00000164172_13 (sequence is synthesized)
ctcagtgactttaactagctcagaaacgtactcccccaccaaccccacctcaccgccccccatcccggttctgggagagcattgttattaaggatgcatgacaggaatgttggcagaact

SEQ ID NO: 508541 - DNA, 120 bp, Artificial Sequence
  ENSG00000164172_14 (sequence is synthesized)
aactggaaagtattaaaaaagcattatcagacagtcttgatattatacattttcagaaatatattaaaaataataaactaaaacccatgatttcaaaagtttaaaaagagtattttcttt

SEQ ID NO: 508542 - DNA, 120 bp, Artificial Sequence
  ENSG00000164172_15 (sequence is synthesized)
ttaaattgcctaaaatagttctcattatggagatttctgggatttcagaatctataatcttaccagaaaactttttgttgttttttattagttgttaattttgtatcaatatacaaatca

SEQ ID NO: 508543 - DNA, 120 bp, Artificial Sequence
  ENSG00000164172_16 (sequence is synthesized)
gcacaaaattgtcataaagctaactagcaacaaggtggtttgtgttgaaatgtttaggtaaacaatgccccaatttttaactggttaagctttatagtattttgatagacttgtacatat

SEQ ID NO: 508544 - DNA, 120 bp, Artificial Sequence
  ENSG00000164172_17 (sequence is synthesized)
gatttttgatacacatatacattgtgaggtgattaccataatccaactaattaacatattcctcagctcacatagtcccctcttctgtgtggtgagaatatttaaggtctactctcagca

SEQ ID NO: 508545 - DNA, 120 bp, Artificial Sequence
  ENSG00000164172_18 (sequence is synthesized)
aatttcaggtaaacacatagctcataaaataataaaatacaggcaaaatttgggcagtcggcatcatcacaaaatttgcattatgcatattaagaacaaaagctatactttcagacactt

SEQ ID NO: 508546 - DNA, 120 bp, Artificial Sequence
  ENSG00000164172_19 (sequence is synthesized)
agattgaaggatttttttcttatgtctgggacaaataagaaacgtagtaatcctatttgttatatgtagtgaaaacatcttttacctaaggaacccatttattcaacaaatatttattga

SEQ ID NO: 508547 - DNA, 120 bp, Artificial Sequence
  ENSG00000164172_20 (sequence is synthesized)
atgcctgttttgtgccaggcacccacccagtgatctttttctgccaacctaaaataccttgaggaacactctgcatcttatctgtggctgggacccataggacagccacactgactttag

SEQ ID NO: 508548 - DNA, 120 bp, Artificial Sequence
  ENSG00000164172_21 (sequence is synthesized)
gaatcacctggttacatcagttgatgcttgttcattagtccgtctggagagattgggccagaaggatactggaagggcagacaaaccctccgcctacttcctctgccgggttcgggttgc

SEQ ID NO: 508549 - DNA, 120 bp, Artificial Sequence
  ENSG00000164172_22 (sequence is synthesized)
ctgtttggtctcagccttaccttcacagttcagtgtcactctggcttgccatcgagcttccgcctgtccccattggagagaaggggtgggtgttggctgttgcattatatctaaaagcac

SEQ ID NO: 508550 - DNA, 120 bp, Artificial Sequence
  ENSG00000164172_23 (sequence is synthesized)
attatcatggggttactgggtcactggacatttctaggattttggacataggttgttaaatggatgttatgtcatatgcaatgttgataggtatatgtggatttcaagactttcctactt

SEQ ID NO: 508551 - DNA, 120 bp, Artificial Sequence
  ENSG00000164172_24 (sequence is synthesized)
agatatttctttagaagttccttattgagggtaatgatgtttttaaagaacatagaacattctttatgttttaaaagaatcatgccttcattaagtaggctttattctaagtttggaact

SEQ ID NO: 508552 - DNA, 120 bp, Artificial Sequence
  ENSG00000164172_25 (sequence is synthesized)
gagactgttatgcttttaaagtctccaacagagaggttaaggagttaacctggggcatgccagaactgggatggaatggccttgaaagattttagtgcattgcacttgacttagatagga

SEQ ID NO: 508553 - DNA, 120 bp, Artificial Sequence
  ENSG00000164172_26 (sequence is synthesized)
tctttactgacccttgcttacttaggagtggcagagttaattggtggttcagatattaaggggctactgtcactctgatatgtagcttttctatcatctctgtaacttagcttcaagtaa

SEQ ID NO: 508554 - DNA, 120 bp, Artificial Sequence
  ENSG00000164172_27 (sequence is synthesized)
ctagaagagtaatctaaaaaaaataattagcctttaatcagattgcctgcagtgtttcttggtcactttaaagccgtgactttgcatgattgctaggtaagttcacttaagaaataggaa

SEQ ID NO: 508555 - DNA, 120 bp, Artificial Sequence
  ENSG00000164172_28 (sequence is synthesized)
attcaaattatttatgtttcaagtatttttgaacaggtggtaaaatgaaattgatttttatcatctttgaatgaaagtaacagcagatattcaatgagtgacttattttgtggacatttt

SEQ ID NO: 508556 - DNA, 120 bp, Artificial Sequence
  ENSG00000164172_29 (sequence is synthesized)
tgtcctttggatatgatgtatagagtcacaatatattttcagccttttttgagaaataagtgatttagacatcttacacagttactgagcacctggtacagtgaagatctctcaagaatg

SEQ ID NO: 508557 - DNA, 120 bp, Artificial Sequence
  ENSG00000164172_30 (sequence is synthesized)
atttgtgtgatgtagttcggtggatcatccagcagagggcagtagagccagagccatagtaaaagttatagtaaagttgctcttagcaacttgagtcttacttagatttaattttgcata

SEQ ID NO: 508558 - DNA, 120 bp, Artificial Sequence
  ENSG00000164172_31 (sequence is synthesized)
gaaccaaaagttcagtttagtagccattttctttaaagtcaggctgtagtggttccgaaatgaaaattaggccctgattttatgtaagatgatgtccaatctttaattgacaccttaaaa

SEQ ID NO: 508559 - DNA, 120 bp, Artificial Sequence
  ENSG00000164172_32 (sequence is synthesized)
aaaaatattaaaagattatgataggatcaggaaggagtttttgaaaatgcaatttgtagtttttaacaagtgatgtagaataaataaaaagaagtactttttaaaaagtaagtataaaat

SEQ ID NO: 508560 - DNA, 120 bp, Artificial Sequence
  ENSG00000164172_33 (sequence is synthesized)
ttccagttaactatgggatataaatgattgctttaatacaggtcttcctaacctgtacagcatttcctaacctgctctgtgaaaaacaaagaaataaaacttagtgctctctttctctaa

SEQ ID NO: 508561 - DNA, 120 bp, Artificial Sequence
  ENSG00000164172_34 (sequence is synthesized)
ttgagtttttgtaatatttaattttttttctggttcttgaaaaacctataattttacttatgtcattcccacttcaagttctttttggaacaaaatataaaagtgacttatttgagggtg

SEQ ID NO: 508562 - DNA, 120 bp, Artificial Sequence
  ENSG00000164172_35 (sequence is synthesized)
attcaggaatattaatggtgttacttagcttgtataggtgtttaacctggaagtcctagttctgtgtaaaagatactccataataagtgtttaaaagcaaaccacttcatgatttcgtat

SEQ ID NO: 508563 - DNA, 120 bp, Artificial Sequence
  ENSG00000164172_36 (sequence is synthesized)
cttttaagttgctcttacagtggcctgataatcaataaaacacagtggggtctcccattctgctttacctggagggagacagcaggtcttgtatacgttttcactgtgcctgaaaagaaa

SEQ ID NO: 508564 - DNA, 120 bp, Artificial Sequence
  ENSG00000164172_37 (sequence is synthesized)
gcttaccattgttcaggtataaaggaacagctaataaagctgtgttgcaggtggctttatgacctatgctatctttttcatctttctaagcaacttaatccatattcgagtaggataatg

SEQ ID NO: 508565 - DNA, 120 bp, Artificial Sequence
  ENSG00000164172_38 (sequence is synthesized)
tgtacaggcatagtttgtgggcagttatacttgtgcttgaacacatggatagaaggaccctggaaaggccatgtactgattggaaacttttcttttgacctggtttgagtgttgcctcca

SEQ ID NO: 508566 - DNA, 120 bp, Artificial Sequence
  ENSG00000164172_39 (sequence is synthesized)
gtctggtgggttttttgtgcatttttttgttgtttaattccccaaggcatacaacatccaataaagagttgacagcagtttaacgtatctttgtggtgtataagtatgttcttcagtgga

SEQ ID NO: 508567 - DNA, 120 bp, Artificial Sequence
  ENSG00000164172_40 (sequence is synthesized)
tatgtcctttctccatatactatgtgtaaatttaattggtaattttgcaggtgatgctttatataattatatctatgtaatatctctaattgcagctgaagcgatttgaggtctatcata

SEQ ID NO: 508568 - DNA, 120 bp, Artificial Sequence
  ENSG00000164172_41 (sequence is synthesized)
attcatgtattatttttggaggacaatagggatggctgttagtacctttagggactgcctagtgagttttgatattgggagagctcttgttgcctctgttgctgtaacaaactgcagttg

SEQ ID NO: 508569 - DNA, 120 bp, Artificial Sequence
  ENSG00000164172_42 (sequence is synthesized)
tgccaagacttgcaggccctatgacaatctgtgacagattctttttgatataaatgcctcgaaagtcattagagtggtttgcctttttgtacccctaaaaagagaagagttcttggcttt

SEQ ID NO: 508570 - DNA, 120 bp, Artificial Sequence
  ENSG00000164172_43 (sequence is synthesized)
aaaaagaagccagtaattgagactgtatctatcatactctgttagttactagtttgttattaataaccagtagttttattaatggttattatcactcctattacttgatatgtattattt

SEQ ID NO: 508571 - DNA, 120 bp, Artificial Sequence
  ENSG00000164172_44 (sequence is synthesized)
taaattttgtattatactcgttaggacataactttgtatttctaggcattacttggcactgtgccttgttgagtcagatgtttgctctatcaatgaaaggattttccttggtgcccatca

SEQ ID NO: 508572 - DNA, 120 bp, Artificial Sequence
  ENSG00000164172_45 (sequence is synthesized)
ggagggtttagtggatagattctaacaaattagctgtagcatcagcctcatctactgcctctgctgaatgctactgcaattaattactcttttctaactgtatgtttacgtaaaatagaa

SEQ ID NO: 508573 - DNA, 120 bp, Artificial Sequence
  ENSG00000164172_46 (sequence is synthesized)
ctacagtataattctaagactgcatacctggattttttttcatctgtctagcagattctttaacacgtagattcagagatgatggtgatttttttttctcttcatcttgttaaagcttgg

SEQ ID NO: 508574 - DNA, 120 bp, Artificial Sequence
  ENSG00000164175_0 (sequence is synthesized)
atctctgttggttgctcggccaggctccacgtcaaatccagtttgaaacacagaccctaggaccacgcaggaggtggtgggctcgcaggaaggttcctctcccagtggccatgggtagca

SEQ ID NO: 508575 - DNA, 120 bp, Artificial Sequence
  ENSG00000164175_1 (sequence is synthesized)
acagtgggcaggctggccgccacatctataaatccctagctgatgatggcccctttgactctgtggagccgcctaaaagacccaccagcagactcatcatgcacagcatggccatgttcg

SEQ ID NO: 508576 - DNA, 120 bp, Artificial Sequence
  ENSG00000164175_2 (sequence is synthesized)
gaagagagttctgctacgcggtggaggcagcgtatgtgaccccagtcctgctcagcgtaggtctgcccagcagcctgtacagcattgtgtggttcctcagccccatcctgggattcctgc

SEQ ID NO: 508577 - DNA, 120 bp, Artificial Sequence
  ENSG00000164175_3 (sequence is synthesized)
tgcagcccgtggtcggatcggccagcgaccactgccggtccaggtggggccgccggagaccctacatcctcaccctgggagtcatgatgctcgtgggcatggctctgtacctcaatgggg

SEQ ID NO: 508578 - DNA, 120 bp, Artificial Sequence
  ENSG00000164175_4 (sequence is synthesized)
ctactgttgtagcagctttgattgctaacccaaggaggaagctggtttgggccataagtgtcaccatgataggtgtcgttctctttgattttgctgccgacttcattgatgggcccatca

SEQ ID NO: 508579 - DNA, 120 bp, Artificial Sequence
  ENSG00000164175_5 (sequence is synthesized)
aagcctacttatttgatgtctgctcccatcaggacaaggagaagggcctccactaccatgccctcttcacaggttttggaggtgccctgggttaccttttgggtgctatagactgggccc

SEQ ID NO: 508580 - DNA, 120 bp, Artificial Sequence
  ENSG00000164175_6 (sequence is synthesized)
atctggagctgggaagactgttgggtacagaattccaggtcatgttcttcttctctgcattggtgctcactttgtgttttactgttcatctgtgcagtatctctgaagccccacttacag

SEQ ID NO: 508581 - DNA, 120 bp, Artificial Sequence
  ENSG00000164175_7 (sequence is synthesized)
tgtcatcagatggaatgtacgagtatggttctatcgagaaagttaaaaatggttacgtaaatccagagctggcaatgcagggagcaaaaaacaaaaatcatgctgaacagactcgcaggg

SEQ ID NO: 508582 - DNA, 120 bp, Artificial Sequence
  ENSG00000164175_8 (sequence is synthesized)
caatgacattaaagtcactgctgagagcactggtgaacatgcctcctcactaccgctacctttgcatcagccacctcattggatggacagccttcctgtccaacatgctgttcttcacag

SEQ ID NO: 508583 - DNA, 120 bp, Artificial Sequence
  ENSG00000164175_9 (sequence is synthesized)
atttcatgggccagattgtgtaccgcggggatccctatagtgcacacaactccacagagtttctcatctacgaaagaggagtcgaggttggatgttggggcttgtgcatcaactccgtgt

SEQ ID NO: 508584 - DNA, 120 bp, Artificial Sequence
  ENSG00000164175_10 (sequence is synthesized)
tttcctcactttattcttactttcagaaagttttggtatcctacattggattaaagggtctttacttcacgggatatttgctgtttggcctggggacgggatttattgggctcttcccga

SEQ ID NO: 508585 - DNA, 120 bp, Artificial Sequence
  ENSG00000164175_11 (sequence is synthesized)
atgtctactccaccctggtcctgtgcagcctgtttggtgtaatgtccagcaccctgtacactgtgccctttaacctcattactgagtaccaccgcgaggaagaaaaggagaggcagcagg

SEQ ID NO: 508586 - DNA, 120 bp, Artificial Sequence
  ENSG00000164175_12 (sequence is synthesized)
ccccaggaggggacccagacaacagcgtgagagggaagggcatggactgcgccaccctcacatgcatggtgcagctggctcagatcctggtcggaggtggcctgggctttctggtcaaca

SEQ ID NO: 508587 - DNA, 120 bp, Artificial Sequence
  ENSG00000164175_13 (sequence is synthesized)
cagccgggaccgttgtcgtcgtggtgatcacagcgtctgcggtggcactgataggctgttgctttgtcgctctctttgttagatatgtggattaggtcaataaagagacaatgaccctaa

SEQ ID NO: 508588 - DNA, 120 bp, Artificial Sequence
  ENSG00000164175_14 (sequence is synthesized)
tctaaaagtttctggtctagcacaacttggatttgatatttctatgtgtatttcctactgtttaaaataccagattcttaataaatctatggacgtcaggaaaaactatcaccttaaaaa

SEQ ID NO: 508589 - DNA, 120 bp, Artificial Sequence
  ENSG00000164175_15 (sequence is synthesized)
agggttcttgaaacagcaacagtcaaatgcccaaccaactgcaaccatgatctggtacaggcatgctcaccagcccagcccagcccagctgtcctgtcctccttattctcaactcctgct

SEQ ID NO: 508590 - DNA, 120 bp, Artificial Sequence
  ENSG00000164175_16 (sequence is synthesized)
cacttagggagctgtagggcaagaagtgttactcccatttttctaattagaaaaaggcttggtgaggctgagaaaccagcccacaattacacaaagacaaaaaaagggggacccaggtct

SEQ ID NO: 508591 - DNA, 120 bp, Artificial Sequence
  ENSG00000164175_17 (sequence is synthesized)
tctgtaaccacctcataggtctccctggtgccacctgcagcatttctagataccgacaataagggtctccctatccccaactttcagaggtacatagtggaatttcttggcattatttgc

SEQ ID NO: 508592 - DNA, 120 bp, Artificial Sequence
  ENSG00000164175_18 (sequence is synthesized)
tgagggtaggaaagtcctaggcaatggagtccagattttagtaagtcagaccccatgtgtgagaaggaaagctggaatcatgggtggtaatccccactttgctgccctgagcgggacctg

SEQ ID NO: 508593 - DNA, 120 bp, Artificial Sequence
  ENSG00000164175_19 (sequence is synthesized)
tgccatttaaaccttggaacgcaactagtgaacaagcgcctatgcagtgcttataacagagttggtgtttccactctaaaattaccacctcttcttatcaaaatttgcaactttcttcct

SEQ ID NO: 508594 - DNA, 120 bp, Artificial Sequence
  ENSG00000164175_20 (sequence is synthesized)
gtgaaaataggcttatagttccttaactggagcaatgatataaaagctacagagataactccaagtttaatccagctcagcatgaaactgcaaaaacactgaacatataaccatcagact

SEQ ID NO: 508595 - DNA, 120 bp, Artificial Sequence
  ENSG00000164175_21 (sequence is synthesized)
ataattctggccatgtttttcatcatttgatctggcagcagggcagaggtgcaccaggagtaaaaacctttcaaaaaagaggtgtggctttcctcatcccctggcaaacattgtcaccaa

SEQ ID NO: 508596 - DNA, 120 bp, Artificial Sequence
  ENSG00000164175_22 (sequence is synthesized)
ggtgggatgttgctgctaatgggagagtcatcataaaaaactgtccctacaaggagagtgttacatggtgttgggggaagaaaacctacgcttcaggctcagagaaacctggattcaaat

SEQ ID NO: 508597 - DNA, 120 bp, Artificial Sequence
  ENSG00000164175_23 (sequence is synthesized)
cctgcctctctcacttggaagctgtgttacactggggatgttatttacttgtttattagttagcacttagaatgagttcatttttaggtgagataatatattcacaatgatacacaaaag

SEQ ID NO: 508598 - DNA, 120 bp, Artificial Sequence
  ENSG00000164175_24 (sequence is synthesized)
tgcacactgtgtgctccctttaccatttactatctccctccagccccaacgtgttaccactcttactagttttttgttaatctttccggcatttttaaataaaaaccaagcaaatgtaaa

SEQ ID NO: 508599 - DNA, 120 bp, Artificial Sequence
  ENSG00000164176_0 (sequence is synthesized)
acacgcacgccgcctctgtttgtacacagtgcgctcccggcggcccgctcgctcccctccagctcacgcttcattgttctccaagtcagaagccccgcagccgccgcgcggagaacagcg

SEQ ID NO: 508600 - DNA, 80 bp, Artificial Sequence
  ENSG00000164176_1 (sequence is synthesized)
agcgacagccgagcgcccggtccgcctgtctgccggtgggtctgcctgcccgcgcagcagacccggggcggccgcgggag

SEQ ID NO: 508601 - DNA, 120 bp, Artificial Sequence
  ENSG00000164176_2 (sequence is synthesized)
ggagggctgagcccgccggcggctccccggagctcacccacctccgcgcgccggagcgcaggcaaaaggggaggaaaggctcctctctttagtcaccactctcgccctctccaagaattt

SEQ ID NO: 508602 - DNA, 120 bp, Artificial Sequence
  ENSG00000164176_3 (sequence is synthesized)
gtttaacaaagcgctgaggaaagagaacgtcttcttgaattctttagtaggggcggagtctgctgctgccctgcgctgccacctcggctacactgccctccgcgacgacccctgaccagc

SEQ ID NO: 508603 - DNA, 120 bp, Artificial Sequence
  ENSG00000164176_4 (sequence is synthesized)
cggggtcacgtccgggagacgggatcatgaagcgctcggtagccgtctggctcttggtcgggctcagcctcggtgtcccccagttcggcaaaggtgatatttgtgatcccaatccatgtg

SEQ ID NO: 508604 - DNA, 120 bp, Artificial Sequence
  ENSG00000164176_5 (sequence is synthesized)
aaaatggaggtatctgtttgccaggattggctgatggttccttttcctgtgagtgtccagatggcttcacagaccccaactgttctagtgttgtggaggttgcatcagatgaagaagaac

SEQ ID NO: 508605 - DNA, 120 bp, Artificial Sequence
  ENSG00000164176_6 (sequence is synthesized)
caacttcagcaggtccctgcactcctaatccatgccataatggaggaacctgtgaaataagtgaagcataccgaggggatacattcataggctatgtttgtaaatgtccccgaggattta

SEQ ID NO: 508606 - DNA, 120 bp, Artificial Sequence
  ENSG00000164176_7 (sequence is synthesized)
atgggattcactgtcagcacaacataaatgaatgcgaagttgagccttgcaaaaatggtggaatatgtacagatcttgttgctaactattcctgtgagtgcccaggcgaatttatgggaa

SEQ ID NO: 508607 - DNA, 120 bp, Artificial Sequence
  ENSG00000164176_8 (sequence is synthesized)
gaaattgtcaatacaaatgctcaggcccactgggaattgaaggtggaattatatcaaaccagcaaatcacagcttcctctactcaccgagctctttttggactccaaaaatggtatccct

SEQ ID NO: 508608 - DNA, 120 bp, Artificial Sequence
  ENSG00000164176_9 (sequence is synthesized)
actatgcacgtcttaataagaaggggcttataaatgcgtggacagctgcagaaaatgacagatggccgtggattcagataaatttgcaaaggaaaatgagagttactggtgtgattaccc

SEQ ID NO: 508609 - DNA, 120 bp, Artificial Sequence
  ENSG00000164176_10 (sequence is synthesized)
aaggagccaagaggattggaagcccagagtatataaaatcctacaaaattgcctacagtaatgatggaaagacttgggcaatgtacaaagtgaaaggcaccaatgaagacatggtgtttc

SEQ ID NO: 508610 - DNA, 120 bp, Artificial Sequence
  ENSG00000164176_11 (sequence is synthesized)
gtggaaacattgataacaacactccatatgctaactctttcacaccccccataaaagctcagtatgtaagactctatccccaagtttgtcgaagacattgcactttgcgaatggaacttc

SEQ ID NO: 508611 - DNA, 120 bp, Artificial Sequence
  ENSG00000164176_12 (sequence is synthesized)
ttggctgtgaactgtcgggttgttctgagcctctgggtatgaaatcaggacatatacaagactatcagatcactgcctccagcatcttcagaacgctcaacatggacatgttcacttggg

SEQ ID NO: 508612 - DNA, 120 bp, Artificial Sequence
  ENSG00000164176_13 (sequence is synthesized)
aaccaaggaaagctcggctggacaagcaaggcaaagtgaatgcctggacctctggccacaatgaccagtcacaatggttacaggtggatcttcttgttccaaccaaagtgactggcatca

SEQ ID NO: 508613 - DNA, 120 bp, Artificial Sequence
  ENSG00000164176_14 (sequence is synthesized)
ttacacaaggagctaaagattttggtcatgtacagtttgttggctcctacaaactggcttacagcaatgatggagaacactggactgtataccaggatgaaaagcaaagaaaagataagg

SEQ ID NO: 508614 - DNA, 120 bp, Artificial Sequence
  ENSG00000164176_15 (sequence is synthesized)
ttttccagggaaattttgacaatgacactcacagaaaaaatgtcatcgaccctcccatctatgcacgacacataagaatccttccttggtcctggtacgggaggatcacattgcggtcag

SEQ ID NO: 508615 - DNA, 120 bp, Artificial Sequence
  ENSG00000164176_16 (sequence is synthesized)
agctgctgggctgcacagaggaggaatgaggggaggctacatttcacaaccctcttccctatttccctaaaagtatctccatggaatgaactgtgcaaaatctgtaggaaactgaatggt

SEQ ID NO: 508616 - DNA, 120 bp, Artificial Sequence
  ENSG00000164176_17 (sequence is synthesized)
ttttttttttttttcatgaaaaagtgctcaaattatggtaggcaactaacggtgtttttaagggggtctaagcctgccttttcaatgatttaatttgattttattttatccgtcaaatct

SEQ ID NO: 508617 - DNA, 120 bp, Artificial Sequence
  ENSG00000164176_18 (sequence is synthesized)
cttaagtaacaacacattaagtgtgaattacttttctctcattgtttcctgaattattcgcattggtagaaatatattagggaaagaaagtagccttctttttatagcaagagtaaaaaa

SEQ ID NO: 508618 - DNA, 120 bp, Artificial Sequence
  ENSG00000164176_19 (sequence is synthesized)
gtctcaaagtcatcaaataagagcaagagttgatagagcttttacaatcaatactcacctaattctgataaaaggaatactgcaatgttagcaataagtttttttcttctgtaatgactc

SEQ ID NO: 508619 - DNA, 120 bp, Artificial Sequence
  ENSG00000164176_20 (sequence is synthesized)
tccctgtgcctaccaaacactgtcaatgtttattacaaaattttaaagaagaatatgtaacatgcagtactgatattataattctcattttactttcattatttctaataagagattatg

SEQ ID NO: 508620 - DNA, 120 bp, Artificial Sequence
  ENSG00000164176_21 (sequence is synthesized)
tgacttctttttcttttagttctattctacattcttaatattgtatattacctgaataattcaatttttttctaattgaatttcctattagttgactaaaagaagtgtcatgtttactca

SEQ ID NO: 508621 - DNA, 120 bp, Artificial Sequence
  ENSG00000164176_22 (sequence is synthesized)
tatatgtagaacatgactgcctatcagtagattgatctgtatttaatattcgttaattaaatctgcagttttatttttgaaggaagccataactatttaatttccaaataattgcttcat

SEQ ID NO: 508622 - DNA, 120 bp, Artificial Sequence
  ENSG00000164176_23 (sequence is synthesized)
aaagaatcccatactctcagtttgcacaaaagaacaaaaaatatatatgtctctttaaatttaaatcttcatttagatggtaattacatatccttatatttactttaaaaaatcggctta

SEQ ID NO: 508623 - DNA, 120 bp, Artificial Sequence
  ENSG00000164176_24 (sequence is synthesized)
tttgtttattttataaaaaatttagcaaagaaatattaatatagtgctgcatagtttggccaagcatactcatcatttctttgttcagctccacatttcctgtgaaactaacatcttatt

SEQ ID NO: 508624 - DNA, 120 bp, Artificial Sequence
  ENSG00000164176_25 (sequence is synthesized)
gagatttgaaactggtggtagtttcccaggaaggcacaggtggagttatttgtgagaagcaaagtgtttactaatgacaaagtagtaaaccattttcaagatgaaaactgatttctattt

SEQ ID NO: 508625 - DNA, 120 bp, Artificial Sequence
  ENSG00000164176_26 (sequence is synthesized)
attttgcttcaaaggtcctgaaaaaataagcaattatcataacaatttgttattgatactggaggtttcattgacatgtctctcaaattaaagctcacactgcctccataaaagtcttca

SEQ ID NO: 508626 - DNA, 120 bp, Artificial Sequence
  ENSG00000164176_27 (sequence is synthesized)
acatctaatttataagctttacaagtatttattttataaggcttagacagaattattggagttttaaattaagtgtattggaaaagaaaggatggtatgtgtatgaaatgttaagatcct

SEQ ID NO: 508627 - DNA, 120 bp, Artificial Sequence
  ENSG00000164176_28 (sequence is synthesized)
acgcaacactgctatttttttcctttaatatttgtgctgcataacaaaagccactagactgttactgtcttgtctgtccatgtgttaacagcatttcttaatgatgtatatatggagtgg

SEQ ID NO: 508628 - DNA, 120 bp, Artificial Sequence
  ENSG00000164176_29 (sequence is synthesized)
tcttcaatcatagtgaagaatttaaagagaaagtcaattgtattggcatttttaataagaacaaaattagttcgtctaaggggactggctggccacatatttgttccttgcccatatgct

SEQ ID NO: 508629 - DNA, 120 bp, Artificial Sequence
  ENSG00000164176_30 (sequence is synthesized)
ttctacttcttgttcttattatgaaattatgaatttgaagcctctgaaatggtgatcagttttcaacatctttcaaaaacaaaattactatttcctccatattgccttttttagataact

SEQ ID NO: 508630 - DNA, 120 bp, Artificial Sequence
  ENSG00000164176_31 (sequence is synthesized)
ttaaagttaggattttaaaatatttgtaactggctaaattttaaagtcgtgacaaataattacttaggttcagaaatatacacacacttactctttagccagtttctttcaaggtttact

SEQ ID NO: 508631 - DNA, 120 bp, Artificial Sequence
  ENSG00000164176_32 (sequence is synthesized)
gtcccatcagatatctagccattttcctttgcaaattacataccttcttaagagtgtatttttaagattattacttacgctttatgatgatatagtttttcaaaattatttatagcttca

SEQ ID NO: 508632 - DNA, 120 bp, Artificial Sequence
  ENSG00000164176_33 (sequence is synthesized)
tatgatgttttgtaattttttctattgatacctgttttaaaaatattttccaaggaagttgattaaaattatatttgttaccttttagaaaaagcattgaaatgagtttctcttgctttt

SEQ ID NO: 508633 - DNA, 120 bp, Artificial Sequence
  ENSG00000164176_34 (sequence is synthesized)
tcattttccctctgctttatatgctcttcgcaatacatcatgtccaacgggatacctattgttctcatgacacccaaaattgatgagagcaaaggggtcgcaccatatggaaatgttgaa

SEQ ID NO: 508634 - DNA, 120 bp, Artificial Sequence
  ENSG00000164176_35 (sequence is synthesized)
aactattgtaaagtagtattatgaagtagcttttgtgtcattcatgtcgatgacatgaaagtgaagtaaatttattctatgtaaattcacactaaaaccagtacagtaccataagtagaa

SEQ ID NO: 508635 - DNA, 120 bp, Artificial Sequence
  ENSG00000164176_36 (sequence is synthesized)
tacatgtaagaatcacctagtcttcactatattgagtaaatataacatgctaattttacaattaatgaaactaaacttttaaacatctccattatatctacatccttttgaaggtattta

SEQ ID NO: 508636 - DNA, 120 bp, Artificial Sequence
  ENSG00000164176_37 (sequence is synthesized)
tcatagttgccaattttaattttaggattgactttctctttctgaatgacttcataaagtttggtgtgaattttgaagacttgggttactaatgattgtatctttgctagtcaacaactt

SEQ ID NO: 508637 - DNA, 120 bp, Artificial Sequence
  ENSG00000164176_38 (sequence is synthesized)
atgaaatatactcaatgcgtctgatgtgtcattaagtgcagaaataactaagacacaaataacctttgcaaaccttcaagctgtgtaatattccaatgttgtttttttctttgtatatat

SEQ ID NO: 508638 - DNA, 120 bp, Artificial Sequence
  ENSG00000164176_39 (sequence is synthesized)
acttatatcacgtaggatgtaaaaccagtatgaccttgtctagtctccaaacttaaaataaacttttgaaaagctgggattcttttgaagcagttgtaattaaacacatttataagaata

SEQ ID NO: 508639 - DNA, 120 bp, Artificial Sequence
  ENSG00000164176_40 (sequence is synthesized)
acactttcattagcagccacaggtactaaataatctgctgttactttctcaagtttaaaaatgaccatcagcccctcttctctaagtatgcaacttttgacggactgctcgttttagatt

SEQ ID NO: 508640 - DNA, 120 bp, Artificial Sequence
  ENSG00000164176_41 (sequence is synthesized)
gacctctgtattcaacattcctatcacttttgtaggtaactgtgctattgcataatatggccatacttaagtcattttccttgagaatagagaagtaaaggagaaaccaatgatttttcc

SEQ ID NO: 508641 - DNA, 120 bp, Artificial Sequence
  ENSG00000164176_42 (sequence is synthesized)
cccacttcagatctcacctgccagcactgatgtaagacttcacctccctatttcaaggcacattattatcatcagtctggataaatttgcaaaggaaaatgagagttactggtgtgatta

SEQ ID NO: 508642 - DNA, 120 bp, Artificial Sequence
  ENSG00000164176_43 (sequence is synthesized)
aggattattctgatttccaaatcacagttccaatatttctcatttatgaaggttcacctataaagaagatctaaaagaggtcaagtaatgaaacttgtatatgattgtgagacagcttcc

SEQ ID NO: 508643 - DNA, 120 bp, Artificial Sequence
  ENSG00000164176_44 (sequence is synthesized)
gttcttctatagtattgacatatgttggagtgtgctaagtgaatcgaaggatgctcacactttcctaggactataagtcatctttatgtattttttcatttttttaaaccacataccatg

SEQ ID NO: 508644 - DNA, 120 bp, Artificial Sequence
  ENSG00000164176_45 (sequence is synthesized)
aataagaaatctttttgatttttataattttatgatgtcaaagggaatccccactatccaattagaaaaaagaactttttataaacaaaacaaaattgaaaggacatttgtacagaaaat

SEQ ID NO: 508645 - DNA, 120 bp, Artificial Sequence
  ENSG00000164176_46 (sequence is synthesized)
acttaagtgcaaacaaaagtgcagccaatatcaatgtagtataaggagtgcataatttgaggtacaaaatatagatgtgagggctgacaaattatatcaatactctgagacttcaatatt

SEQ ID NO: 508646 - DNA, 120 bp, Artificial Sequence
  ENSG00000164176_47 (sequence is synthesized)
ctttctttttttatgtaaaatggagatactacaaaaaaagatcagccccagcctatcttctccttttaaaattcctcacacaagtaaaattctggtgtctaaatcatgactggacgaatc

SEQ ID NO: 508647 - DNA, 120 bp, Artificial Sequence
  ENSG00000164180_0 (sequence is synthesized)
ggcagagccggaagaccctctctttcgctgtttgagagtctctcggctcaaggaccgggaggtaagaggtttgggactgccccggcaactccagggtgtctggtccacgacctatcctag

SEQ ID NO: 508648 - DNA, 120 bp, Artificial Sequence
  ENSG00000164180_1 (sequence is synthesized)
gcgccatgggtgtgataggtatacagctggttgttaccatggtgatggccagtgtcatgcagaagattatacctcactattctcttgctcgatggctactctgtaatggcagtttgaggt

SEQ ID NO: 508649 - DNA, 120 bp, Artificial Sequence
  ENSG00000164180_2 (sequence is synthesized)
ggtatcaacatcctacagaagaagaattaagaattcttgcagggaaacaacaaaaagggaaaaccaaaaaagataggaaatataatggtcacattgaaagtaagccattaaccattccaa

SEQ ID NO: 508650 - DNA, 120 bp, Artificial Sequence
  ENSG00000164180_3 (sequence is synthesized)
aggatattgaccttcatctagaaacaaagtcagttacagaagtggatactttagcattgcattactttccagaataccagtggctggtggatttcacagtggctgctacagttgtgtatc

SEQ ID NO: 508651 - DNA, 120 bp, Artificial Sequence
  ENSG00000164180_4 (sequence is synthesized)
tagtaactgaagtctactacaattttatgaagcctacacaggaaatgaatatcagcttagtctggtgcctacttgttttgtcttttgcaatcaaagttctattttcattaactacacact

SEQ ID NO: 508652 - DNA, 120 bp, Artificial Sequence
  ENSG00000164180_5 (sequence is synthesized)
attttaaagtagaagatggtggtgaaagatctgtttgtgtcacctttggattttttttctttgtcaaagcaatggcagtgttgattgtaacagaaaattatctggaatttggacttgaaa

SEQ ID NO: 508653 - DNA, 120 bp, Artificial Sequence
  ENSG00000164180_6 (sequence is synthesized)
cagggtttacaaatttttcagacagtgcgatgcagtttcttgaaaagcaaggtttagaatctcagagtcctgtttcaaaacttactttcaaatttttcctggctattttctgttcattca

SEQ ID NO: 508654 - DNA, 120 bp, Artificial Sequence
  ENSG00000164180_7 (sequence is synthesized)
ttggggcttttttgacatttcctggattacgactggctcaaatgcatctggatgccctgaatttggcaacagaaaaaattacacaaactttacttcatatcaacttcttggcacctttat

SEQ ID NO: 508655 - DNA, 120 bp, Artificial Sequence
  ENSG00000164180_8 (sequence is synthesized)
ttatggttctgctctgggtaaaaccaatcaccaaagactacattatgaacccaccactgggcaaagaaagtatccctttaatgacagaagccacattcgatactctgcgactctggttaa

SEQ ID NO: 508656 - DNA, 120 bp, Artificial Sequence
  ENSG00000164180_9 (sequence is synthesized)
taatcctgctgtgtgctttgcggttggccatgatgcgtagtcacctgcaagcttatttaaatttagcccaaaaatgtgtggatcagatgaagaaagaagcggggcgaataagcacggttg

SEQ ID NO: 508657 - DNA, 120 bp, Artificial Sequence
  ENSG00000164180_10 (sequence is synthesized)
atgctgcttcacacaactctgcttttgaaaacactaggtaatcattcctggggtatttatccagaatctatctctaccttaccagtggataatagtctactgtccaattctgtttactct

SEQ ID NO: 508658 - DNA, 120 bp, Artificial Sequence
  ENSG00000164180_11 (sequence is synthesized)
gaattaccatcagctgaagggaaaatgaaggtaactgttacacaaataacagtggcactgagcagcttaaaaaatatttttactcctcttctttttcgaggacttctgtcttttctgacc

SEQ ID NO: 508659 - DNA, 120 bp, Artificial Sequence
  ENSG00000164180_12 (sequence is synthesized)
tggtggattgctgcttgcctcttttctacaagcctttttgggcttttctatcaccagtatctgactgtggcatgaatctcagttaacaaaaaagcatatccaaatcaccctttaaattaa

SEQ ID NO: 508660 - DNA, 120 bp, Artificial Sequence
  ENSG00000164180_13 (sequence is synthesized)
aatatctgtgcccttaaagggctgatgaaaaccagaagaaagcaaatacaatgggaaaaaaaaaacatatcagaatgtcttgtattaaatgtttcctctgtattctcagggtgaattaat

SEQ ID NO: 508661 - DNA, 120 bp, Artificial Sequence
  ENSG00000164180_14 (sequence is synthesized)
gtagtaatatttaaaattacaaaatagattgttaactgttacactgtggcattggaattttaactctttgtatttactggtatgagagggctatctacaagggtaatatttctgattacc

SEQ ID NO: 508662 - DNA, 120 bp, Artificial Sequence
  ENSG00000164180_15 (sequence is synthesized)
ctggtttacagaaacctccagcagtctttgaaacatctcacatgactctagttattgattgcttttaatggttttatggtactgttgatagtcatagtggctgcctatagaacaatcttc

SEQ ID NO: 508663 - DNA, 120 bp, Artificial Sequence
  ENSG00000164180_16 (sequence is synthesized)
aaactgagccatgctttaggggagggaaaggggctaaagtctcttctgttggtaatttattagttactcttgaaacaataaaatccaacagaaaggaagagatagctactgtatattaca

SEQ ID NO: 508664 - DNA, 120 bp, Artificial Sequence
  ENSG00000164180_17 (sequence is synthesized)
gtaaagaaagctgcatagttattttaaatttaatggagatgaatatggttaaaatatataactactgctgcttgagaatagcaagagtattgttttaaaacatattccacccaacttgag

SEQ ID NO: 508665 - DNA, 120 bp, Artificial Sequence
  ENSG00000164180_18 (sequence is synthesized)
agttcttttaaaatgattggccatatgaacatttgtaatcttgccattaggtttggacctgccatattttgttttattctgtgatcctaactagttccttttaataggctaaaatattta

SEQ ID NO: 508666 - DNA, 120 bp, Artificial Sequence
  ENSG00000164180_19 (sequence is synthesized)
tcctaactagttccttttaataggctaaaatatttatcaatactgatcagactttaaagaaattactttgtaaacctgctgactacctgtatgtattgtatatatattatatattaaata

SEQ ID NO: 508667 - DNA, 120 bp, Artificial Sequence
  ENSG00000164180_20 (sequence is synthesized)
aatccttataatattttaagttgcagaatgtatgttaaaaagtgacttgaatgagatgtatttgtatctagaaattttatttctttttggaatgagattaaaatacattttgaaagttca

SEQ ID NO: 508668 - DNA, 87 bp, Artificial Sequence
  ENSG00000164180_21 (sequence is synthesized)
tattattgttattttattttttgtagagacagggtctctctgtgtaaatcctcctgcatcacctcccaaagtattgggattacaggc

SEQ ID NO: 508669 - DNA, 120 bp, Artificial Sequence
  ENSG00000164180_22 (sequence is synthesized)
gtgagtcaccacgcccaaccagcttcagtttttgattcacctccatagttaggggcatttattaagatttaaacaacttttttctgttttaccttttatatatttttatattttccatag

SEQ ID NO: 508670 - DNA, 120 bp, Artificial Sequence
  ENSG00000164180_23 (sequence is synthesized)
tttgacttcaaatatgttcatgtagaatggggacttaatgtttttatttatgagggatttatgctcatatgtggctctgcctactattgttatttagttggatattttaggtagatgccc

SEQ ID NO: 508671 - DNA, 120 bp, Artificial Sequence
  ENSG00000164180_24 (sequence is synthesized)
catttaagaattatttttaaggaatctattttaatattctcacgttctaaaaacttgtcttcaaattgagcctttccaaagtcattttggggacatgtatcatgcagcacaacttactga

SEQ ID NO: 508672 - DNA, 120 bp, Artificial Sequence
  ENSG00000164180_25 (sequence is synthesized)
catttagcttccttcttgtgaaaggattatctcttaagtattttggtatggcaattatatgaaagtttaattcactcctaacatgtcagttgcattagacacttaagaatgttgttggtt

SEQ ID NO: 508673 - DNA, 120 bp, Artificial Sequence
  ENSG00000164180_26 (sequence is synthesized)
aattgccacctgtgaatagtgaagaaacttctcactatgagattccattgcccggaaggagggtagagctacggtacccactaaggcagggaacagaagcaacagacggacagggtcctc

SEQ ID NO: 508674 - DNA, 120 bp, Artificial Sequence
  ENSG00000164180_27 (sequence is synthesized)
gcaagcgcagccaccacgatccgcccgcccacgtacctgtgctgcgcctgcgcctcctccgctctctcaaggtcagcaccgcccccagcccacaacctggcacccacggaagttgcttta

SEQ ID NO: 508675 - DNA, 120 bp, Artificial Sequence
  ENSG00000164180_28 (sequence is synthesized)
atgaacccaccactgggcaaagaaagtatccctttgtaagtatgggcatttgagggctgatttttatcaccaaaactgctttactaaatgttatttactgtatttcgttttcagtgataa

SEQ ID NO: 508676 - DNA, 120 bp, Artificial Sequence
  ENSG00000164180_29 (sequence is synthesized)
aatcaggacactgtatttttcagacattaataggaatgctaaaagatgtgttagaaaattgaaactacagaccatcatgtaacatttttgtgatctttattagttaatgttaatgattat

SEQ ID NO: 508677 - DNA, 120 bp, Artificial Sequence
  ENSG00000164180_30 (sequence is synthesized)
taccttgcactaatattaccttacacactatttttttcctcctctttatgtccagtcgtcatcatttttctgttgtcattgtggctattgttcagataccttctggagttcttttgtttt

SEQ ID NO: 508678 - DNA, 120 bp, Artificial Sequence
  ENSG00000164180_31 (sequence is synthesized)
aattttgaaaattatggaggaaaaaagtataaatggaaactcatatactcaactcctatgtttgacagttgttaacattttccatatttgcttcatccattctttgttttgttttttgat

SEQ ID NO: 508679 - DNA, 120 bp, Artificial Sequence
  ENSG00000164180_32 (sequence is synthesized)
gaaggatttttgaagtaaattagagacataacagttttatcccttagtactttctttagtttgcacctctaaaaaaaataaggatattttcctatataacaataacatcatcgtacctaa

SEQ ID NO: 508680 - DNA, 120 bp, Artificial Sequence
  ENSG00000164180_33 (sequence is synthesized)
cagttatctaatactaataccttaatattattatctaatactagtttatatttctacagttaggcaactgtattttagcagaagaagatggtgaggaaacaaacagtttattaataggca

SEQ ID NO: 508681 - DNA, 120 bp, Artificial Sequence
  ENSG00000164180_34 (sequence is synthesized)
ttaataactagacttgatctgttagccttgtagaactgttagagtaatagaaagtttcagacagaactggttcaaactccagctctcctcctcactaaaatcttcatttgaggcaggtta

SEQ ID NO: 508682 - DNA, 120 bp, Artificial Sequence
  ENSG00000164180_35 (sequence is synthesized)
tttaacttcactgagcctctgtttccccatctggaagatgaagataatagtatctaactcacaaggttatcattggaataaatgaaagaacacatgtaatgcaaccagctggaattaagt

SEQ ID NO: 508683 - DNA, 120 bp, Artificial Sequence
  ENSG00000164180_36 (sequence is synthesized)
gcttaataaatgttcttttcactgctttgcctcatcagaattaaaatagaaatacttgactagtcattgactccgcagtgtaccttttgtattgtgtccttcttttagatcctggtacca

SEQ ID NO: 508684 - DNA, 120 bp, Artificial Sequence
  ENSG00000164180_37 (sequence is synthesized)
gtttgtcttggaatatatataaaatcagtgatgaccatgataatttctctttttagagttaatcctattgaacccaggaaatagccactgaaaaagtaatgcttccccgccgccgacaca

SEQ ID NO: 508685 - DNA, 120 bp, Artificial Sequence
  ENSG00000164180_38 (sequence is synthesized)
cactaattaccttaatggtaatttaacttgacagattccctaagtattgaaaagtaattctaaggatctaaggttctagaaaagtctcagagaaactactaattcatatctttgatactg

SEQ ID NO: 508686 - DNA, 120 bp, Artificial Sequence
  ENSG00000164180_39 (sequence is synthesized)
aaagcattcccaatccttccttgagattttggtcatggaaactggatttcatactcctgtaactatgttccctgatttttatatttgccttagttaaattgagaaaataaggaaactagc

SEQ ID NO: 508687 - DNA, 120 bp, Artificial Sequence
  ENSG00000164180_40 (sequence is synthesized)
atttataaaacacttatataccagttattatgtgagatattcatactttacatattgtatcttcttatggtaattgtccatttgttgctgttgtcatcctattttatacatgaaataaca

SEQ ID NO: 508688 - DNA, 120 bp, Artificial Sequence
  ENSG00000164180_41 (sequence is synthesized)
ggctcagaggttaaataatttgactaaggttattcagccagatcgcgtgtacataaaacacttggtagttataccaacattcacttcccacttccagtctgattaaacttcatgtggatt

SEQ ID NO: 508689 - DNA, 120 bp, Artificial Sequence
  ENSG00000164180_42 (sequence is synthesized)
tattagtaatgaatactttatttaatagaaatgggaataaggaacttttcccttgtgtgtatattaaattataggaaaaatattgtttgtatataaagacctgaggttctctttctatag

SEQ ID NO: 508690 - DNA, 120 bp, Artificial Sequence
  ENSG00000164180_43 (sequence is synthesized)
ctttttcccccctttgtcccatccccatttctgacctgtttcataagcattccaagcaaaattatagttttacctctgctctcttttattcttctttaatttgaattcgtggttaagtta

SEQ ID NO: 508691 - DNA, 120 bp, Artificial Sequence
  ENSG00000164180_44 (sequence is synthesized)
ttagaggcagtttttaatttttgttaaaaatctaaaatgcatgtgatagattgtgaaaaaatggctgcccatcaaagagggtaggatgaaggaaaaataaagtgacaggttcttcttctg

SEQ ID NO: 508692 - DNA, 120 bp, Artificial Sequence
  ENSG00000164180_45 (sequence is synthesized)
tcacagacaaattggtttgtggaaaggtctttgtaatcagaagcaaaaatatggtataatgtagtttcaacccagaaatgtgtttgagtccatcatgtgttctgataaagcattgaaaaa

SEQ ID NO: 508693 - DNA, 120 bp, Artificial Sequence
  ENSG00000164180_46 (sequence is synthesized)
aataaaatatggtaaacagagtccatgtgtgctcataatctcctaagaagaacacagcatatacaggaaagctcagaatggcatcaggaatttaaggtggtttcttctgcctgttctttc

SEQ ID NO: 508694 - DNA, 120 bp, Artificial Sequence
  ENSG00000164180_47 (sequence is synthesized)
cctatatactttaagctcctcctcatgctccttcttgagatactctatcagatcaacttcttcagatatttatgatggtatggaataatctaattagaaagtactatttaatgactatta

SEQ ID NO: 508695 - DNA, 120 bp, Artificial Sequence
  ENSG00000164180_48 (sequence is synthesized)
tcctaaatcctcaactcataaactgaacaaataattttctagttcactaccttattctgttcctttcattcacgttacctgttatcctcaaaggctgtgaaatagctgtcttcaggctgc

SEQ ID NO: 508696 - DNA, 120 bp, Artificial Sequence
  ENSG00000164180_49 (sequence is synthesized)
tcccagttagttgtccttgttgcacaactggagggagcacagtattgtttataggtccccaggaaagggtcaaggctgtgggtaggcttgtgtcttacgtactgttactctcacatgatg

SEQ ID NO: 508697 - DNA, 120 bp, Artificial Sequence
  ENSG00000164180_50 (sequence is synthesized)
gctcctaaatctcattgttcattgtagtggaaacatgttgataaaatgttatgcctttatctttcttagccaacattgcttttccattgaaattttatgtccatgtcccctcatgactta

SEQ ID NO: 508698 - DNA, 120 bp, Artificial Sequence
  ENSG00000164180_51 (sequence is synthesized)
catttcttacctccatttcataaacagttcgagcaaaattttacacttcaaattttcctatattgtagttttagttatgagggttttttttttaatcttttctcatttgttctttatatg

SEQ ID NO: 508699 - DNA, 120 bp, Artificial Sequence
  ENSG00000164180_52 (sequence is synthesized)
catccattctaccgtcatgttcttaagaatttcagggagacccttctgagttccaggttttatctggcaaatgagtctgtgcattacaatagtcattttaagtgcctgataggtactaga

SEQ ID NO: 508700 - DNA, 120 bp, Artificial Sequence
  ENSG00000164180_53 (sequence is synthesized)
tataagactagatgccaagggtggtctagtcactacattcaaattacttgcaatgtagttcttcatcagagcagaaacccatggtcttttaaaaacattaaacaccaaaaggacatcaga

SEQ ID NO: 508701 - DNA, 120 bp, Artificial Sequence
  ENSG00000164180_54 (sequence is synthesized)
agttatctcttctttctaaaaattctttaagcagccctcatcagtggtctggtttctgaaatggtgtccttccgttatgtattttcacctggaatcttaaccttaaccttgaggaattgc

SEQ ID NO: 508702 - DNA, 120 bp, Artificial Sequence
  ENSG00000164180_55 (sequence is synthesized)
tcagaaccgagccagcttcaacgcatagcaagttaaatgaattgttgtagaggaatctcaggcacctgatttcttcatgatatatcagaatttttgattttccagtggtcccaagtaaaa

SEQ ID NO: 508703 - DNA, 120 bp, Artificial Sequence
  ENSG00000164180_56 (sequence is synthesized)
gctcagcagattgaaagatcccatccaagtaggtatatgatcaggcaaagctgtaaccagtgatgctgggtgattgacttgattagtcccacaggcaatccctgcagttttctttctttc

SEQ ID NO: 508704 - DNA, 120 bp, Artificial Sequence
  ENSG00000164180_57 (sequence is synthesized)
cccaacttgtcttttcatgtcacagccagtttttatccatggaggagggtatatagagaaaaggatctcatgtattgctctacttttttcttctagatacctgttaacttcttacgcttt

SEQ ID NO: 508705 - DNA, 120 bp, Artificial Sequence
  ENSG00000164180_58 (sequence is synthesized)
catgatacatttatctagttctgttattcaagttaaagtattatacagttaagtctatggcagagtcagattcttttatgtgtctaactgttgcgaagtatagacttcttatatcttata

SEQ ID NO: 508706 - DNA, 120 bp, Artificial Sequence
  ENSG00000164180_59 (sequence is synthesized)
gctacagaaaatggtaagttttataccctagtcaaaatgaaaaatagcaaaaaccgcactgtaaaaaaaaaaaaaaattggtttcctttagtagatagtatttcaacccatcatattctt

SEQ ID NO: 508707 - DNA, 120 bp, Artificial Sequence
  ENSG00000164180_60 (sequence is synthesized)
attataaataaacagaacaatcttaagttgacagatatcaaagagaccttgatctgattttggtgccaagtgaggtcttaattcctcttcctgccttaagtgcttggtgtcatacagtgg

SEQ ID NO: 508708 - DNA, 120 bp, Artificial Sequence
  ENSG00000164180_61 (sequence is synthesized)
gtggtacaaagctgttttatgcctaatattgctaaatgggacccttctaattgatttgaaagacattataacatattgtccagactttaagacttaaagagtaggaaatactacttttag

SEQ ID NO: 508709 - DNA, 120 bp, Artificial Sequence
  ENSG00000164180_62 (sequence is synthesized)
tggctaaatttattcattttaatattactcaatttacttgaacatgaaatgtaagtatttaatttatttgaggcttccagagaataaaaggacaaggaatccatctgccactatagtgga

SEQ ID NO: 508710 - DNA, 64 bp, Artificial Sequence
  ENSG00000164180_63 (sequence is synthesized)
ctccaggtgtaccttctctgggtgggtggaggcttatccaacacgaactgagaaagcttgtgaa

SEQ ID NO: 508711 - DNA, 120 bp, Artificial Sequence
  ENSG00000164180_64 (sequence is synthesized)
ggtggaggcttatccaacacgaactgagaaagcttgtgaaataacccatgtgcttctttgagatcttattcctagatttggactgcccttacggatcggctcagataatgggctggcgtt

SEQ ID NO: 508712 - DNA, 120 bp, Artificial Sequence
  ENSG00000164180_65 (sequence is synthesized)
tgtggctgacttggtacagaagacggcaaaggtactggggatcacatggaaactgcatgctgcctactggcctcagagttccggaaaggtggagcggatgaatcagactatcaaaaatag

SEQ ID NO: 508713 - DNA, 80 bp, Artificial Sequence
  ENSG00000164180_66 (sequence is synthesized)
cttctaaaagagcaggatattccccttataaaatactatatcataggccccctcccatattgtggggacttccaggcact

SEQ ID NO: 508714 - DNA, 84 bp, Artificial Sequence
  ENSG00000164180_67 (sequence is synthesized)
cttctaaaagagcaggatattccccttataaaatactatatcataggccccctcccatattgtggggacttccaggcactcccc

SEQ ID NO: 508715 - DNA, 120 bp, Artificial Sequence
  ENSG00000164180_68 (sequence is synthesized)
ctctttcgctgtttgagagtctctcggctcaaggaccgggaggtaagaggtttgggactgccccggcaactccagggtgtctggtccacgacctatcctaggcgccatggttgcaaagaa

SEQ ID NO: 508716 - DNA, 120 bp, Artificial Sequence
  ENSG00000164180_69 (sequence is synthesized)
gaatgtaatcttgtagagtaccttgccttcccttccatacattcagcagacatagttcctttaagggattttactgctaggagaatttcataggtcatattcccatgttactgcttcaca

SEQ ID NO: 508717 - DNA, 120 bp, Artificial Sequence
  ENSG00000164180_70 (sequence is synthesized)
aactcctgacctcagcattgcattactttccagaataccagtggctggtggatttcacagtggctgctacagttgtgtatctagtaactgaagtctactacaattttatgaagcctacac

SEQ ID NO: 508718 - DNA, 120 bp, Artificial Sequence
  ENSG00000164180_71 (sequence is synthesized)
tttaggaggccttctaaaaaatgatgttgatgttttggactacactctggtagaagtaaaccagaatacctatgccacctgagatgcaaaggcattgcattactttccagaataccagtg

SEQ ID NO: 508719 - DNA, 120 bp, Artificial Sequence
  ENSG00000164180_72 (sequence is synthesized)
gtatttaaagttttatggacgcttaatggtttctcccaaattaaaattctttttctgtcatttccaaaaatcagaatctttccctctcaaatcaggtctacaggtatcatgtatgccttt

SEQ ID NO: 508720 - DNA, 120 bp, Artificial Sequence
  ENSG00000164180_73 (sequence is synthesized)
aatcagtcgcttctcactcaaatcagtctcactcagtcagttgagccatttcttccatgtagttggccttgcattaattaaactctttattgcagtgccgtgatctctgtaagttgattt

SEQ ID NO: 508721 - DNA, 120 bp, Artificial Sequence
  ENSG00000164180_74 (sequence is synthesized)
tgtctatgcagcagtcaggaagagcccatcaggcaattacacatttaggggcttgtccaagatctgcccttctgggtgcctgtctgctatctctcagccttccactggtacaatggaact

SEQ ID NO: 508722 - DNA, 120 bp, Artificial Sequence
  ENSG00000164181_0 (sequence is synthesized)
cagtcggcggccgggacagcgggggccgctgtgaggagctccgcgctcgcgctgccagtcgccgccctctctcccgcgcgcgcccggcgcttcggctccgctccctgtgcgaacccatta

SEQ ID NO: 508723 - DNA, 120 bp, Artificial Sequence
  ENSG00000164181_1 (sequence is synthesized)
attaaaagagccagtaaatcctgtggaaaatggccttcagtgatcttacatcgaggactgtgcatctttatgataattggatcaaagatgctgatccaagagttgaagattggctcctca

SEQ ID NO: 508724 - DNA, 120 bp, Artificial Sequence
  ENSG00000164181_2 (sequence is synthesized)
tgtcctcgcctctgccacaaaccatcctcctaggattctatgtctattttgtcacttccttgggaccaaagctcatggaaaatcgcaagccctttgaactcaagaaagcaatgataacgt

SEQ ID NO: 508725 - DNA, 120 bp, Artificial Sequence
  ENSG00000164181_3 (sequence is synthesized)
acaattttttcatagtactcttttctgtgtatatgtgttatgagtttgtgatgtctggctggggtataggttattcatttcgatgtgacattgttgactattcacggtcacccacagctt

SEQ ID NO: 508726 - DNA, 120 bp, Artificial Sequence
  ENSG00000164181_4 (sequence is synthesized)
tgaggatggcacgtacctgctggctttattacttctccaaatttattgagctattagatacgatcttttttgttctgcgcaagaaaaatagccaagtgactttccttcatgtattccatc

SEQ ID NO: 508727 - DNA, 120 bp, Artificial Sequence
  ENSG00000164181_5 (sequence is synthesized)
ataccatcatgccgtggacctggtggtttggagtcaaatttgctgcaggtggtttgggaacattccatgcccttctaaatacagctgtacatgtagtcatgtattcctactatggacttt

SEQ ID NO: 508728 - DNA, 120 bp, Artificial Sequence
  ENSG00000164181_6 (sequence is synthesized)
ctgcattggggccagcctaccagaagtatttgtggtggaaaaaatatttgacatcattacagcttgtccagtttgttattgtcgccatccacataagccagttctttttcatggaggatt

SEQ ID NO: 508729 - DNA, 120 bp, Artificial Sequence
  ENSG00000164181_7 (sequence is synthesized)
gcaagtatcagtttccagtctttgcgtgcatcattatgagttacagtttcatgtttctgctgctctttctccatttttggtaccgtgcttacaccaaaggtcagaggttgcccaaaactg

SEQ ID NO: 508730 - DNA, 120 bp, Artificial Sequence
  ENSG00000164181_8 (sequence is synthesized)
tgaaaaatggaacttgcaaaaacaaagataattgaagcccaacataagtctatgatcgaaactgatacattgtcttccttgacaatcaagagatatttacctatgcagtgcattttgtat

SEQ ID NO: 508731 - DNA, 120 bp, Artificial Sequence
  ENSG00000164181_9 (sequence is synthesized)
atttttcaaaactaagagcttgtatttttatggtaagttattgggatgtctgatatttgagagcccgaagcttccagataacagtcttctgataattagagcctacagcagccagaattt

SEQ ID NO: 508732 - DNA, 120 bp, Artificial Sequence
  ENSG00000164181_10 (sequence is synthesized)
gtttttgtttttgtttttgtttttttagctgcttttaaacctaatccaaaggttttgtttaaaacattttgttgcagtgaaaaaaagatatgaagcaatacagtactcttcaaagaagtc

SEQ ID NO: 508733 - DNA, 120 bp, Artificial Sequence
  ENSG00000164181_11 (sequence is synthesized)
caataaagatgaaaaatatcattaggtattttgagcacagacggagatccatgtgataaaatagattccttctgctgggtctggaaagtctggaaaccacctgtaggccctggctttgtc

SEQ ID NO: 508734 - DNA, 120 bp, Artificial Sequence
  ENSG00000164181_12 (sequence is synthesized)
atttattgactgtattcagaagatactatatttgctctagagttaactcccattttagcaagctagcacaggtgaaaattgagtgagtttttgataacttgtcatttaaaatcattaatg

SEQ ID NO: 508735 - DNA, 120 bp, Artificial Sequence
  ENSG00000164181_13 (sequence is synthesized)
ataattttcaatggatcttttcagtagccatcaccagttttgctgataagacttcctcacaacccatttgttgtacaaactgtttcaaagtagcaatcctttgggttagtacacttgata

SEQ ID NO: 508736 - DNA, 120 bp, Artificial Sequence
  ENSG00000164181_14 (sequence is synthesized)
ccaagtttcattcagttgattattttcaaaacaaggtgatttgttttaatgggttaatgaatactttgctattactgttttacaattaactttgtatatctctggaaagaggtgaatttg

SEQ ID NO: 508737 - DNA, 120 bp, Artificial Sequence
  ENSG00000164181_15 (sequence is synthesized)
atataggttagatacttaaatgttcatattattagcacactacaggtactacccttaaatcataaataatattacccattgtacacagtttccagatatgagttagagtggctgtgaagc

SEQ ID NO: 508738 - DNA, 120 bp, Artificial Sequence
  ENSG00000164181_16 (sequence is synthesized)
aactagaggcaaattgtggcacagagaatatccaggggaaaattgattatgtaagcaagggctgttctactttgagagagagacagacagactacataatagtaatatattatataatta

SEQ ID NO: 508739 - DNA, 120 bp, Artificial Sequence
  ENSG00000164181_17 (sequence is synthesized)
atgttatagatacactgaacaataaaacattttctggaattatgaattaattaacaacctggatttctgtttccagacctataaaccatgtaatgaaggactgaaattcgtttggcatac

SEQ ID NO: 508740 - DNA, 120 bp, Artificial Sequence
  ENSG00000164181_18 (sequence is synthesized)
actttgtttctttaaaattgctagtttctttctgttatttttacattttcttgtcagagaatcaaaactattagtcagtagagttttgtccatgaaataatatttggacatttgtgaatt

SEQ ID NO: 508741 - DNA, 120 bp, Artificial Sequence
  ENSG00000164181_19 (sequence is synthesized)
tttccctattttttttcttcttttatttatactcaattttgaagcactgtttatgtttgtaggactttaaacaattagtacttaaagccccagttaattttgaacacacagagatactta

SEQ ID NO: 508742 - DNA, 120 bp, Artificial Sequence
  ENSG00000164181_20 (sequence is synthesized)
ttgtactctgtgtacagtaagtatttttatgtttacacttaccagattcataaggttatttgcctttaagtgatcttttgtgattttacttgattacagcatgagaaggtaaaggttgat

SEQ ID NO: 508743 - DNA, 120 bp, Artificial Sequence
  ENSG00000164181_21 (sequence is synthesized)
cttgattacagcatgagaaggtaaaggttgataaatgggagtaattacatatatatatataatttattatttttttttctgaagcagagttttactcttgttgcccaggctagagtgcaa

SEQ ID NO: 508744 - DNA, 120 bp, Artificial Sequence
  ENSG00000164181_22 (sequence is synthesized)
cggcctcccaaagttctgggattacaggggtgagccactgtgcccggccataattttatatttttagaaaataaagaatgaaggacaaaagagcacagctaaatgaaactgctgctctaa

SEQ ID NO: 508745 - DNA, 120 bp, Artificial Sequence
  ENSG00000164181_23 (sequence is synthesized)
aagagcacagctaaatgaaactgctgctctaatttattccactggaaaggtctcaggactccttaactgttttccaggtttggctcttcatatctaacctgtgctaaaatgagaaggtat

SEQ ID NO: 508746 - DNA, 120 bp, Artificial Sequence
  ENSG00000164181_24 (sequence is synthesized)
gctaggtgctgttagaaatcacaccatttccaaagaacccaagtagtatagagaccaaaatgaggcaaaaataaaagagatgaaacaggagagtttatttcttgcatactttccgacctt

SEQ ID NO: 508747 - DNA, 120 bp, Artificial Sequence
  ENSG00000164181_25 (sequence is synthesized)
catcatacaacctctcctaacctccctgtagtctttaaaatgtttaacttgcctataagctaacatgtaataaaacacatactcaattatatgaatagaagtggagagccagaatgctac

SEQ ID NO: 508748 - DNA, 120 bp, Artificial Sequence
  ENSG00000164181_26 (sequence is synthesized)
aaaagaaatcacagctgctagaagtatcctccatagaaacatcaacatgattgtggatcaaaatgattttcactggatatggaatttgtatgggccatatttattaaaagagttctgtgt

SEQ ID NO: 508749 - DNA, 120 bp, Artificial Sequence
  ENSG00000164181_27 (sequence is synthesized)
ggtcacatagagttcctttgggatttcatcccacttttcaggacttaatttgtttgggtttgcttacctaacaagcaacaacaacaacaaaataaatagttccaaaatctagtttattac

SEQ ID NO: 508750 - DNA, 120 bp, Artificial Sequence
  ENSG00000164181_28 (sequence is synthesized)
ataaatctctatgaatccttgagggcctatatctatattataaataaatacaaatatagatttttaaatatctatgggactttgccatttacagccttaagtataaaattacgagattat

SEQ ID NO: 508751 - DNA, 120 bp, Artificial Sequence
  ENSG00000164181_29 (sequence is synthesized)
attctttccattaccctttatttctgctaactttttaaagactggaacattctgtggatgttgtcaaagtttgagtttgtttttccctgtgtattataataaatttgtggtattgcatgt

SEQ ID NO: 508752 - DNA, 120 bp, Artificial Sequence
  ENSG00000164181_30 (sequence is synthesized)
agtcggcggccgggacagcgggggccgctgtgaggagctccgcgctcgcgctgccagtcgccgccctctctcccgcgcgcgcccggcgcttcggctccgctccctgtgcggcatttaaac

SEQ ID NO: 508753 - DNA, 120 bp, Artificial Sequence
  ENSG00000164181_31 (sequence is synthesized)
gagccgcatcctgtcttggtggctgctgctggccgggaggaggctgatgaatacagagccgtggaacaggtcgtgccggagatggaaacaggaaagcctgttgttttgtcgtcccagata

SEQ ID NO: 508754 - DNA, 120 bp, Artificial Sequence
  ENSG00000164181_32 (sequence is synthesized)
taccaaattcaggaaggaaatgcacacctcttggcacctaccacagatgaaattatagtcaaatttacaacgatttcagcaaagatacactgtttcatcatttgcagctttctcagcaga

SEQ ID NO: 508755 - DNA, 120 bp, Artificial Sequence
  ENSG00000164181_33 (sequence is synthesized)
ctactaaagaccaaatttatctcactaaaagtgttcccaacagtttttcctttgaggaatgccaaggttctttcttcttcatttcattagtacttggaatcttaaagatgtactctttga

SEQ ID NO: 508756 - DNA, 120 bp, Artificial Sequence
  ENSG00000164181_34 (sequence is synthesized)
agtcggcggccgggacagcgggggccgctgtgaggagctccgcgctcgcgctgccagtcgccgccctctctcccgcgcgcgcccggcgcttcggctccgctccctgtgcgatacttagga

SEQ ID NO: 508757 - DNA, 120 bp, Artificial Sequence
  ENSG00000164182_0 (sequence is synthesized)
acccctactgcgggtcccgctgctggcagcgctggaaactgggtggacggcatgggttggtctcaggatttgttccgcgccttgtggagatcgctgtcaagggaagtgaaggagcacgtg

SEQ ID NO: 508758 - DNA, 120 bp, Artificial Sequence
  ENSG00000164182_1 (sequence is synthesized)
ggcacggaccaattcgggaacaaatactactacatcccgcagtacaagaactggagaggacaaactattcgagagaaaagaattgtagaagcagcaaataaaaaagaagtagactatgaa

SEQ ID NO: 508759 - DNA, 120 bp, Artificial Sequence
  ENSG00000164182_2 (sequence is synthesized)
gattagaagaacaagaaagactccacctactatggaggaaatactaaagaatgaaaaacacagagaagaaatcaaaataaaaagccaagatttttatgaaaaagaaaaactccttagtaa

SEQ ID NO: 508760 - DNA, 120 bp, Artificial Sequence
  ENSG00000164182_3 (sequence is synthesized)
agagaccagtgaggaactcctgcctccaccagttcaaactcaaattaaaggccatgcctctgctccatactttggaaaggaagaaccctcagtggctcccagcagcactggtaaaacctt

SEQ ID NO: 508761 - DNA, 120 bp, Artificial Sequence
  ENSG00000164182_4 (sequence is synthesized)
tcagccaggatcctggatgccacgagatggcaagagccacaatcaatgaatgcattatggtcaaatcttttcatgtatatggatgtgactattttaacaaataaaagaagtgaaaagtta

SEQ ID NO: 508762 - DNA, 120 bp, Artificial Sequence
  ENSG00000164182_5 (sequence is synthesized)
cagattatggccaaagtctaaatttgaatactgtgctgactgacccttttctactctattgttgcgcaaatgatactcttcaaggaaggattatggcagcctgagaaatcaggaaagcat

SEQ ID NO: 508763 - DNA, 120 bp, Artificial Sequence
  ENSG00000164182_6 (sequence is synthesized)
ggcttggaactggccaaaacaaaatccagcaagatctctttgaaggacaaactattcgagagaaaagaattgtagaagcagcaaataaaaaagaagtagactatgaagcaggggatattc

SEQ ID NO: 508764 - DNA, 120 bp, Artificial Sequence
  ENSG00000164185_0 (sequence is synthesized)
agcctcaaaaactcacaccagctcctgcaaggaatgtgaatcttggagctcccagctattctgttcctgtttctgtcagctccttccctgaaaactcagaggtgctcagcatgccatgct

SEQ ID NO: 508765 - DNA, 120 bp, Artificial Sequence
  ENSG00000164185_1 (sequence is synthesized)
aaaaggcaaaataaaaagatcttggagacatctcagctttaatgaggactttccaacattccagactgccgtcctgcaatgaagctctgagtcacggtctgtgaggctaaggtactggca

SEQ ID NO: 508766 - DNA, 120 bp, Artificial Sequence
  ENSG00000164185_2 (sequence is synthesized)
acggtgtgaaccccaggacaactaacctcactaaccttcactctaagcagaagcccaaagtgagtctggcctgaaatcagagcaagcactacagaaagacatctttgttaatggaaagag

SEQ ID NO: 508767 - DNA, 120 bp, Artificial Sequence
  ENSG00000164185_3 (sequence is synthesized)
gaaagaagaaaagaatttccaataagttacaacaaacttttcaccattctaaagaacccactttccttatcaaccaagctgggcttctctctagtgactcctattctagcctttccccag

SEQ ID NO: 508768 - DNA, 120 bp, Artificial Sequence
  ENSG00000164185_4 (sequence is synthesized)
aaacagagagtgttaatcctggtgaaaatataaagacagacactcagaaaaagagacctgggactgtgatactatcaaaactgtcaagtagaagaattatatcggaaagccagcttagcc

SEQ ID NO: 508769 - DNA, 120 bp, Artificial Sequence
  ENSG00000164185_5 (sequence is synthesized)
cccctgtgatcccggcccgcaggcctggattccgggtatgctatatctgtggccgagaatttgggtcccagtcaattgccattcatgaaccccagtgcttgcagaagtggcatattgaaa

SEQ ID NO: 508770 - DNA, 120 bp, Artificial Sequence
  ENSG00000164185_6 (sequence is synthesized)
acagcaagttgcccaagcatttgaggaggccagaaccctccaaaccacagtctctcagcagcagtgggtcctacagtcttcaggcaactaacgaggctgcatttcagagtgcccaggctc

SEQ ID NO: 508771 - DNA, 120 bp, Artificial Sequence
  ENSG00000164185_7 (sequence is synthesized)
agctgctgccctgtgaatcctgtggccgcacattcttgccagatcatcttcttgttcatcacagaagctgcaagccaaagggtgagggtcccagagcaccacactcaaacagttctgatc

SEQ ID NO: 508772 - DNA, 120 bp, Artificial Sequence
  ENSG00000164185_8 (sequence is synthesized)
gcctcaagaaagcttgtagtggaaccccagcccgaccaaggactgttatctgctacatatgtggtaaggaatttggcaccctgtcccttcctattcatgagcccaaatgcctggaaaagt

SEQ ID NO: 508773 - DNA, 120 bp, Artificial Sequence
  ENSG00000164185_9 (sequence is synthesized)
ggaaaatggaaaatgaccggctccctgtggagctccaccagccactcccacagaagcctcagccccttccgaatgcacagtccagccaagcgggaccaaatcaagctcagcttgtgttct

SEQ ID NO: 508774 - DNA, 120 bp, Artificial Sequence
  ENSG00000164185_10 (sequence is synthesized)
gcccacattgtagccgaatctttacctcagaccgcctcctggtacaccagagaagttgtaaaactcatccttatgggccaaaatatcagaatttgaatttagggagtaaaggaggcctaa

SEQ ID NO: 508775 - DNA, 120 bp, Artificial Sequence
  ENSG00000164185_11 (sequence is synthesized)
aagagtacactaattccaagcagcaaaggaacagggcagcacccagtgtaactgataaggtaattcatgccacacaagacgcattaggtgaacctggtggtgccctctgcctgtagggga

SEQ ID NO: 508776 - DNA, 120 bp, Artificial Sequence
  ENSG00000164185_12 (sequence is synthesized)
acaagagaaaactatccccagaatcagccacctcagcccctagtattttttctatcaatgccttgtatcagcctcaaagcagcctgttcaagttaactccctgttgaactccagggccta

SEQ ID NO: 508777 - DNA, 120 bp, Artificial Sequence
  ENSG00000164185_13 (sequence is synthesized)
tacctctcttggctgaatagatataagaacatccttgcctgatgggttcatattcctcttcaattctgctgtctaaaagaagaagagatggacttctttcttccctgatccctgatacaa

SEQ ID NO: 508778 - DNA, 120 bp, Artificial Sequence
  ENSG00000164185_14 (sequence is synthesized)
ataatccctgggagagacagtaatttgaaaatgagtcattaatgctgtgtctacattacagagatataattcccattccaacagccaatatttattgtcggtttattttagtcatctacc

SEQ ID NO: 508779 - DNA, 120 bp, Artificial Sequence
  ENSG00000164185_15 (sequence is synthesized)
ttaggaattcatttttggcaatgctgggttatgctgagtttatcttactaaaatagaatctgtgtcaaaaacccccaatgactttagcaacaattaaacactgaagcacttgcaaaaata

SEQ ID NO: 508780 - DNA, 120 bp, Artificial Sequence
  ENSG00000164185_16 (sequence is synthesized)
gctcctgcaaggaatgtgaatcttggagctcccagctattctgttcctgtttctgtcagctccttccctgaaaactcagaggtgctcagcatgccatgctaaaaggcaaaataaaaagag

SEQ ID NO: 508781 - DNA, 120 bp, Artificial Sequence
  ENSG00000164185_17 (sequence is synthesized)
aatggaaaaatggcatcatgttgataaaaggtgatgccttccaggacattctgtaaatgtcctatgtgcagatatggtcaaaacgaataattcaggccaactgagtgaacatttctccag

SEQ ID NO: 508782 - DNA, 120 bp, Artificial Sequence
  ENSG00000164187_0 (sequence is synthesized)
gactgggaaatgtcagccgctggactgtagacggattttcctttctcgggagcccgcaggccttctggtgatcgccagcgctgtcgtctctgagcgtggatcccagaacctggacagctg

SEQ ID NO: 508783 - DNA, 120 bp, Artificial Sequence
  ENSG00000164187_1 (sequence is synthesized)
tggcggccgccgtttcccggtcccgtccagacgctgtctggcgagatcggacggtgagcctaaggcggaacgcgtgaggcgcttttgagtctggggtccggggccgagagcaggcggaaa

SEQ ID NO: 508784 - DNA, 120 bp, Artificial Sequence
  ENSG00000164187_2 (sequence is synthesized)
gagaggggacccggcagaccccgagtggccgccgctgcggggcccaagtccttggctgctgagtggtgacagtagcccagcccgccggccagatatggtccagacctgtacatgaataac

SEQ ID NO: 508785 - DNA, 120 bp, Artificial Sequence
  ENSG00000164187_3 (sequence is synthesized)
tttggttagtcagagtgaaatattcaataatgagtggtgcagctttgggacttgagattgtttttgtcttttttctggcattatttctgcttcatcgatatggagactttaagaaacagc

SEQ ID NO: 508786 - DNA, 120 bp, Artificial Sequence
  ENSG00000164187_4 (sequence is synthesized)
atagacttgtgattattggaacactgcttgcttggtatctctgctttcttattgtcttcatactgcctctggatgttagtacgacaatatacaaccggtgcaagcatgctgctgcaaatt

SEQ ID NO: 508787 - DNA, 120 bp, Artificial Sequence
  ENSG00000164187_5 (sequence is synthesized)
caagccctcctgagaatagcaacattacaggattgtacgcaactgctaaccctgttccaagccagcatccttgtttcaagccatggagttacattcctgatggaatcatgccaattttct

SEQ ID NO: 508788 - DNA, 120 bp, Artificial Sequence
  ENSG00000164187_6 (sequence is synthesized)
ggagggtagtgtattggacgtcacaatttttaacatggattctcttaccttttatgcagtcatatgcaagatcaggagggttttccatcactggaaagatcaaaactgcactaattgaga

SEQ ID NO: 508789 - DNA, 120 bp, Artificial Sequence
  ENSG00000164187_7 (sequence is synthesized)
atgcaatctactatggcacctatttgctgatttttggagcatttttaatttatgtagctgtaaacccacatttacatttagaatggaaccagcttcagacaattgggatagctgctgcaa

SEQ ID NO: 508790 - DNA, 120 bp, Artificial Sequence
  ENSG00000164187_8 (sequence is synthesized)
atacatggggtctgtttcttcttgtgttgttgttggggtatggcttggtggaaattcctcgatcatactggaatggagcaaaaaggggttatctacttatgaaaacgtattttaaggcag

SEQ ID NO: 508791 - DNA, 120 bp, Artificial Sequence
  ENSG00000164187_9 (sequence is synthesized)
ccaaactgatgacagagaaagcagatgcagaagagaatttggaagatgccatggaggaggttcgtaaagtgaatgaaagcatcaagtataatcacccattgagaaaatgtgttgatacaa

SEQ ID NO: 508792 - DNA, 120 bp, Artificial Sequence
  ENSG00000164187_10 (sequence is synthesized)
tacttaaaaagtgccctacagagtatcaggaaaaaatgggtaggaacatggatgattatgaagattttgatgaaaagcatagtatctatccaagtgaaaaaagtctggtaaaactgcata

SEQ ID NO: 508793 - DNA, 120 bp, Artificial Sequence
  ENSG00000164187_11 (sequence is synthesized)
aacaggtgatttattcagttcagagacaccgtcgaactcaagtacaatggcagattcttttggaacaagcattttatctagaagatgtagcaaaaaatgaaactagtgctactcatcagt

SEQ ID NO: 508794 - DNA, 120 bp, Artificial Sequence
  ENSG00000164187_12 (sequence is synthesized)
ttgttcacacctttcaatcgccagagccagaaaatcgatttatccaatatttttataatcctacatttgaatggtactgggaatgtcttttgcgaccatggttttacaagatacttgctg

SEQ ID NO: 508795 - DNA, 120 bp, Artificial Sequence
  ENSG00000164187_13 (sequence is synthesized)
tggttctgtccatcttctctgtgattgttgtgtggtcagagtgcacattctttagcactactcctgtcttatccctctttgcggtcttcatacagctggcagaaaaaacatataattata

SEQ ID NO: 508796 - DNA, 120 bp, Artificial Sequence
  ENSG00000164187_14 (sequence is synthesized)
tttatatcgagattgcctgcttcctttccatcttcttcctaagtatctgtgtttattctactgtgttcaggattcgtgtatttaactattattatttggcctcacatcaccagactgatg

SEQ ID NO: 508797 - DNA, 120 bp, Artificial Sequence
  ENSG00000164187_15 (sequence is synthesized)
cttatagccttcttttcagtggcatgctattttgccgtttgacacctcctttatgtcttaatttcttgggtttgacccatatggattcatctatctctcacaagaatactcaaccaactg

SEQ ID NO: 508798 - DNA, 120 bp, Artificial Sequence
  ENSG00000164187_16 (sequence is synthesized)
cttatacatctattatgggttccatgaaagttttatcctttattgcagatggattctatatatattatcctatgttggtggtaattctctgcattgctacttattttagtttgggaaccc

SEQ ID NO: 508799 - DNA, 120 bp, Artificial Sequence
  ENSG00000164187_17 (sequence is synthesized)
gttgtttgaatctgctcggtttccagcagtttatgggagatgatgatatgacatcagacttagttaatgaaggaaaagaattaatcagaaaagagaagagaaaaaggcaaaggcaagaag

SEQ ID NO: 508800 - DNA, 120 bp, Artificial Sequence
  ENSG00000164187_18 (sequence is synthesized)
aaggtgaaaatcgaagaagagaatggaaagaacgttatggacacaatagagaagattccactaggaacagaaatattcatactgaccccaaagagtcaaacttctcagatgttaatacca

SEQ ID NO: 508801 - DNA, 120 bp, Artificial Sequence
  ENSG00000164187_19 (sequence is synthesized)
accgttctgcattcaaatataccagggctaataacaggactgaaagggaccggatagaacttctccaagatgcagaacctttggattttaatgcagaaacattcactgatgatcctcttg

SEQ ID NO: 508802 - DNA, 120 bp, Artificial Sequence
  ENSG00000164187_20 (sequence is synthesized)
aatctgaatcaggaaggtatcagcctggtggacgatatctctcgatgtctcgcagtgacatatttaatgatgtttaaagtctgaaaaagtttgtgggaccactaaccaaggtcaacacat

SEQ ID NO: 508803 - DNA, 120 bp, Artificial Sequence
  ENSG00000164187_21 (sequence is synthesized)
cagttcagtcttgatgaacatctgtgtaccctagaatttcctctatacacagtgaaaagtgtcaagataacaaaaaaggcactgagaattaattatatcttaggaataatagtttaatgt

SEQ ID NO: 508804 - DNA, 120 bp, Artificial Sequence
  ENSG00000164187_22 (sequence is synthesized)
gcattgaatagagtatcacctttttcaacaagatttattacatatcatttcctaagcatctgccttagaaatacagttacagtggaaggactttaagaaagatcaacatatgttaagaac

SEQ ID NO: 508805 - DNA, 120 bp, Artificial Sequence
  ENSG00000164187_23 (sequence is synthesized)
atgcagttcagtttgtttcagattaattttttttcaagagagttattttaaagattcaaggaagccataagtcatactaaataatattatatacagttttgttattgtgacttacatttt

SEQ ID NO: 508806 - DNA, 120 bp, Artificial Sequence
  ENSG00000164187_24 (sequence is synthesized)
tgttacttctaaaaagtatattcaacctgtatttcccaaagaaatgtaagtgaatggagacctcaaataataactgtattcataaaactcgtgtcttaaaacaaggcttacttactagac

SEQ ID NO: 508807 - DNA, 120 bp, Artificial Sequence
  ENSG00000164187_25 (sequence is synthesized)
ataactgaatgtaaaaagtgctttttcaaatctgtttgcaaactcgtgggggatttttgcatgtataagattaagattatacttcaagtgatgcgtgtctgtgtatttagcatgtgtact

SEQ ID NO: 508808 - DNA, 120 bp, Artificial Sequence
  ENSG00000164187_26 (sequence is synthesized)
ataatcaggtgatatagtattccttcagtctttgtagtaactggatttttttatgcttctggtattgctttataaaagattttcatttcagaaagctatgttcacatttatcatttaaca

SEQ ID NO: 508809 - DNA, 120 bp, Artificial Sequence
  ENSG00000164187_27 (sequence is synthesized)
tattgatttaaatgttgattatgatattcaaggataaatcctaggcattaatgaaaaatagtttttttttaagtagtcaaagagtccaacaaaatccttcagtatttaaaggtacctgct

SEQ ID NO: 508810 - DNA, 120 bp, Artificial Sequence
  ENSG00000164187_28 (sequence is synthesized)
tatactttttgagaaaaaaactggttattcaaaggtaaaaagtgaatccatttactgttattactgatacttaaatcgtggtttatagaaaacaaaactatattagaatggaaatgtgta

SEQ ID NO: 508811 - DNA, 120 bp, Artificial Sequence
  ENSG00000164187_29 (sequence is synthesized)
ataacttgttggttaaacattcttactaaatagactgtttttaacctttgtgtttaagataaatttatgtattatattttaaagcactagtgttttattgaaaagtgaacatgtttgatt

SEQ ID NO: 508812 - DNA, 120 bp, Artificial Sequence
  ENSG00000164187_30 (sequence is synthesized)
gcagcatgcttgcagagagttttcttatgtccctagaatatttgcaactcttactgaatccatgctacatttggtgaccatacttcagcttgcctaatacagtctcagtgtaacacctag

SEQ ID NO: 508813 - DNA, 120 bp, Artificial Sequence
  ENSG00000164187_31 (sequence is synthesized)
tatcctgtttattactagtgattactttcaccctcaagtatcccacccagtttgaagatgaattatatggttcccctaacttgaagttaatctttccccaagacataaatttaaaatttt

SEQ ID NO: 508814 - DNA, 120 bp, Artificial Sequence
  ENSG00000164187_32 (sequence is synthesized)
tatttttatttttaataaatattatcatgtaagtttttttttaaaacacagctctatgcagatattgaaaggaatagagcatcatcctcattatctgaaaattttgatctttgagttttt

SEQ ID NO: 508815 - DNA, 120 bp, Artificial Sequence
  ENSG00000164187_33 (sequence is synthesized)
tacacttaagaacacacacatacagtcttttcatgtgaagtgtggccagaaagcaataagccaggagcagagataatttgatcctctttgtaatttaatgattgactaattgaatacctt

SEQ ID NO: 508816 - DNA, 120 bp, Artificial Sequence
  ENSG00000164187_34 (sequence is synthesized)
tggcaaatcatgtagctcttcagtgcctcaagtgcttcattctgcactttcatttgcagaatgaagatgatacttgctatttacctgctgatctaccttacaaagccattgtgaggaagt

SEQ ID NO: 508817 - DNA, 120 bp, Artificial Sequence
  ENSG00000164187_35 (sequence is synthesized)
tgaattggtgtttatgtactggagtttataactgtgctatttttcctagtgatacttgaaggtattggatggggaaatgatcatcccagaaatgggtccagtttcttattattacagaaa

SEQ ID NO: 508818 - DNA, 120 bp, Artificial Sequence
  ENSG00000164187_36 (sequence is synthesized)
agtttacaagtacttaaagcaaaaacgcttttggactaattcatcaaaagtcctgtgaaagtagtgttgttttatttagtctttgggtttactttggaataatttcttaagtataatgtt

SEQ ID NO: 508819 - DNA, 120 bp, Artificial Sequence
  ENSG00000164187_37 (sequence is synthesized)
tctcatcaggttttgtcatgaaattaagatgctgttgttgaaacagaagcagaaaaggaaaagaaattagccaattacttttataactaacttttataatgccctaagataaattggtag

SEQ ID NO: 508820 - DNA, 120 bp, Artificial Sequence
  ENSG00000164187_38 (sequence is synthesized)
gaacgtgtaaggtaatgttaccactttcctttagtattaaattttttatggttataataattgaagtgtatacgtgcatacacttcacaaccggtatagattcctttatgactttcaagt

SEQ ID NO: 508821 - DNA, 120 bp, Artificial Sequence
  ENSG00000164187_39 (sequence is synthesized)
tatatttaaaatatttggttgtttcagtgattcagaatattcaactttaagcagaatttgtcttacagaatgttatatacaatcatataaaaatgttattttgttggataaatttgagtt

SEQ ID NO: 508822 - DNA, 120 bp, Artificial Sequence
  ENSG00000164187_40 (sequence is synthesized)
cagaaggcaatgacttgaccctggaagactcagtttattgctggggaaccaagttaatatttgtcaagccaccctgtgtaaaaaactgtaatgggtagaagttttctcttttgagaagct

SEQ ID NO: 508823 - DNA, 120 bp, Artificial Sequence
  ENSG00000164187_41 (sequence is synthesized)
tattgaaatataatgacatctactgcaaaataggactactaaatacatatactttacatgcaaagtacatttcttaaagaattatttctggtaatttttgatgactttattacttgataa

SEQ ID NO: 508824 - DNA, 120 bp, Artificial Sequence
  ENSG00000164187_42 (sequence is synthesized)
tttctggtaatttttgatgactttattacttgataataagtattagtttaaaattttccaaattattctttaaatagttgttaggtaagaatattcagtaagccagtaattcagaataac

SEQ ID NO: 508825 - DNA, 120 bp, Artificial Sequence
  ENSG00000164187_43 (sequence is synthesized)
aatcacctctaaattactaattaacttcttttacaacataaataacttgttatcaatagagcatttttgtaaaaaacaaaagaaagaataagtttaattattaaaatttgctctcttacc

SEQ ID NO: 508826 - DNA, 120 bp, Artificial Sequence
  ENSG00000164187_44 (sequence is synthesized)
aaatgaatacaagggcttttgaataatctcattgcataagaggccctcatttcacagaaatggtaagaactaaatcaaaagattcaagggttttccctttataaagaatagatcagaaaa

SEQ ID NO: 508827 - DNA, 120 bp, Artificial Sequence
  ENSG00000164187_45 (sequence is synthesized)
tttgacaatccagacattcaaaaaaacattctgccagttgatttttttggactactatttgattagatgatcagttctgaaatttaagctgcatgtatgcccaaattaaattagcatagg

SEQ ID NO: 508828 - DNA, 120 bp, Artificial Sequence
  ENSG00000164187_46 (sequence is synthesized)
aaagtcaatgtgtgtggttttttaaaagtatattttagcatattaatggagcaatttaatttacattcagttacaaacctcattcttattaataggtttagggaatgttcttgctggtgt

SEQ ID NO: 508829 - DNA, 120 bp, Artificial Sequence
  ENSG00000164187_47 (sequence is synthesized)
gctgattaccatattagagaaaaaataaactctccatattataattcacctgtttagtaaggtgagtttcttacttgtgatttgagtggattatgcctaaaaattacaagtatatttgca

SEQ ID NO: 508830 - DNA, 120 bp, Artificial Sequence
  ENSG00000164187_48 (sequence is synthesized)
ctaagcgacaaaatatgtccctgaaaaatcttagcgtacttgaatcatcaaatgtaatggattgtattgaattctaaatgttaagaagtaagtggatttagggttttgtctttcttttct

SEQ ID NO: 508831 - DNA, 120 bp, Artificial Sequence
  ENSG00000164187_49 (sequence is synthesized)
tatgtcctctctcattcctttatacctttcttcctttctgaggcctatgtttatagcatgacttttaatgtgctgaaagattttccttctgttttgtgtacagagttgtttttgatgagt

SEQ ID NO: 508832 - DNA, 120 bp, Artificial Sequence
  ENSG00000164187_50 (sequence is synthesized)
ggtacgctcagaaggaactagttctgactacaaatcccactacttgaaatagcaatattgtacctaaagtagtcaaacagattttgctagacaactaagcaacatctgaatacaaatgta

SEQ ID NO: 508833 - DNA, 120 bp, Artificial Sequence
  ENSG00000164187_51 (sequence is synthesized)
aagtatgctggctcagtgtatcttttaggtcactaaagaggacacatcagtaaataaattgttttcagtgtaatatttttacataaaaatagatttcccccccaaaatttaagatttatt

SEQ ID NO: 508834 - DNA, 120 bp, Artificial Sequence
  ENSG00000164187_52 (sequence is synthesized)
tagattcttgagacatctttttatgaaaaggaattaataacatacatcatcaaaacttttcttaggagcgttgaaacaatataagaaggttacagaaggccttctaaaatatgaattccc

SEQ ID NO: 508835 - DNA, 120 bp, Artificial Sequence
  ENSG00000164187_53 (sequence is synthesized)
atctgtatgaggtacttctttccaactcagtgactttttgcccagagacttggaagactgggcaatgttttctttcccctttcccaactcctggagacaaggccctaggagcaatttcct

SEQ ID NO: 508836 - DNA, 120 bp, Artificial Sequence
  ENSG00000164187_54 (sequence is synthesized)
ccagtagggcaggccgtagtcctgctctgtcttacttcccactgcagcaggaacatgtcctcgcctctgattccttctgtaccaagccattggtccattgaggtcaattgaggactcact

SEQ ID NO: 508837 - DNA, 120 bp, Artificial Sequence
  ENSG00000164187_55 (sequence is synthesized)
gtaaattttaaatctgttaataaagcaaggatattggcatgttcctcttctcatcaatatcctaaaagacatttattttttacacactccttgggaaaaattaactttttttcactgaaa

SEQ ID NO: 508838 - DNA, 120 bp, Artificial Sequence
  ENSG00000164187_56 (sequence is synthesized)
atatttccttttttggttatcttgatctcagattattttgtgaaagaattttactgtacttagttcaaaagagtagaaagaatgatttactattgcagacatatgtagggtaaaatcata

SEQ ID NO: 508839 - DNA, 120 bp, Artificial Sequence
  ENSG00000164187_57 (sequence is synthesized)
atttatttaaactgactgtacaacaccatttagagttgatattgacataaatgttattagcctactaatttggaactgcatttctcaacaatgctggcaagcatcttccgtacttagcat

SEQ ID NO: 508840 - DNA, 120 bp, Artificial Sequence
  ENSG00000164187_58 (sequence is synthesized)
accaagttgtaggggagagactgtgtatatattttttaaaagcaatccaatggatttgtttttgttcatattttgaaaacaactcgaaggatttttcttattttagaaggtagaaaatat

SEQ ID NO: 508841 - DNA, 120 bp, Artificial Sequence
  ENSG00000164187_59 (sequence is synthesized)
gtggacctgtgttttaaattaatatgtatttataaattataacattgaatgatacaacagagctctaatattgatgttctcactttctgatatttaatttttataaatgtttttgtaagt

SEQ ID NO: 508842 - DNA, 120 bp, Artificial Sequence
  ENSG00000164187_60 (sequence is synthesized)
aactaattgtagtattgcttttaaatagttttaaaatctatctcaaataagttctgcccagacctatttccttaggacagtattctaaagttcagtagtccagtgtgagcttgaaatact

SEQ ID NO: 508843 - DNA, 120 bp, Artificial Sequence
  ENSG00000164187_61 (sequence is synthesized)
cctagatcccgtcagtgatttttatatataccaatacacaagcaaattattaatataccaaaaacctaatttctgcattgcattaataaaatacttgttattttgcctttatccaattca

SEQ ID NO: 508844 - DNA, 120 bp, Artificial Sequence
  ENSG00000164187_62 (sequence is synthesized)
gttgattaggtgaaatagaaaattaatcttttcaaatgtgcatatgatcataatttttcaaaatgttactgtggtcatttttggtgcatgatgccaagtttatctttagttagccattgc

SEQ ID NO: 508845 - DNA, 120 bp, Artificial Sequence
  ENSG00000164187_63 (sequence is synthesized)
cacctgatatgtaatgacaaatgttttactatctgatcattgggttgtagattaaactattttttttctctgtagattctcactacattttcaaatatgtacttggaaaaagctgcaaag

SEQ ID NO: 508846 - DNA, 120 bp, Artificial Sequence
  ENSG00000164187_64 (sequence is synthesized)
tgctacctataagcaaattagtaactttggccttatctatgcatagtgttcgctcagtttggttttgataaattgattgacttgcagttcctttgtagtattttaacttattgtgatgta

SEQ ID NO: 508847 - DNA, 120 bp, Artificial Sequence
  ENSG00000164187_65 (sequence is synthesized)
atgaattttttgaaatgtttatttgattagctgttaaaatataggaaagaatgtagctttgcatgaaataaattacatttctacaagttaataagaattttgctgattgtttatatattt

SEQ ID NO: 508848 - DNA, 120 bp, Artificial Sequence
  ENSG00000164187_66 (sequence is synthesized)
tacttcatttgagattaaggttcttttaagtagattcaggcgttctttgttccttatcaatttattagcaaatatgacaaatgttttaaaataaatatgtgtactttagttttcacatta

SEQ ID NO: 508849 - DNA, 120 bp, Artificial Sequence
  ENSG00000164187_67 (sequence is synthesized)
gaaaaaaaaaaaaaaaagaataaagcatagccaagaaggtaagtttagatagatagatttataaactctgatgtcctttaagtacttggtaaccttttgattctcatttttaaaccatac

SEQ ID NO: 508850 - DNA, 120 bp, Artificial Sequence
  ENSG00000164188_0 (sequence is synthesized)
acagagggtaactcagatcaggcttagaaatcacttgacttaactcagcagcactttttcttttctttgtgtctgtattattttagcagccttctctaaatactggaggcattggatttc

SEQ ID NO: 508851 - DNA, 120 bp, Artificial Sequence
  ENSG00000164188_1 (sequence is synthesized)
atgtcgccaaaaggaatttaaaaatgacaaaagtgtaatctgttagaaatagttaatttgtagaattttactctataaggaggtttagtttcaatttgttttgaaatgaaggaattaagt

SEQ ID NO: 508852 - DNA, 120 bp, Artificial Sequence
  ENSG00000164188_2 (sequence is synthesized)
tgtgtttttaaccaaatgaattggcatctttatatttaggagaagtaacattggtgattatttatttcaagaatcatgactggaaaaagcttggaagtttagtagaggagtatatgttgt

SEQ ID NO: 508853 - DNA, 120 bp, Artificial Sequence
  ENSG00000164188_3 (sequence is synthesized)
acatgcaaagacaagatctgcatgaatctatgtatttctgggtgtctggtgaaggccactttaggtgactggccagagaaggaggtgccctagtgatccttgagtcacagccatactgct

SEQ ID NO: 508854 - DNA, 120 bp, Artificial Sequence
  ENSG00000164188_4 (sequence is synthesized)
aggaccatgactaccataccaagaaaaggcagcagccacctgcctggcagtttgcacacctgtaaactgaagctgcaggaggaccggcgacagcaagaaaaatctgtcattgctcaaccc

SEQ ID NO: 508855 - DNA, 120 bp, Artificial Sequence
  ENSG00000164188_5 (sequence is synthesized)
atatttgtttttgaaaagggagaacaaacttttaagagacctgcagaagacaccctgtatgaagcagcagaaccagaatgtaatggttttccaacaaagcgtgtacggtcttcatctttt

SEQ ID NO: 508856 - DNA, 120 bp, Artificial Sequence
  ENSG00000164188_6 (sequence is synthesized)
acttttcatattacagattctcagtcccagggagtgaggaaaaacaatgtttttatgacatcagctcttgtgcaaagtagtgttgatataaagagtgctgaacaaggtcctgtgaaacat

SEQ ID NO: 508857 - DNA, 120 bp, Artificial Sequence
  ENSG00000164188_7 (sequence is synthesized)
tctaaacatgttattagacctgctattttgcagctacctcaagctcgaagttgtgcaaaagtaagaaaaacatttggacacaaggcactggaatcttgcaagactaaagaaaaaacaaat

SEQ ID NO: 508858 - DNA, 120 bp, Artificial Sequence
  ENSG00000164188_8 (sequence is synthesized)
aataagatttctgagggaaattcctatttgttaagtgaaaatttatcaagggctagaatttcagtccagctgtctactaaccaggactttttaggtgcaacatcagtaggatgtcaacca

SEQ ID NO: 508859 - DNA, 120 bp, Artificial Sequence
  ENSG00000164188_9 (sequence is synthesized)
aatgaagataaatgttcttttaaaagctgcagttccaattttgtttttggagaaaacatggtagaaagagttttgggtactcaaaaactcacccagcctcaacttgaaaatgattcatat

SEQ ID NO: 508860 - DNA, 120 bp, Artificial Sequence
  ENSG00000164188_10 (sequence is synthesized)
gccaaggaaaaaccattcaaatccattccgaaatttcctgtcaactttttaagttcaagaacagactctattaaaaatacttccctaattgaatcagctgctgcattctcttcccaacca

SEQ ID NO: 508861 - DNA, 120 bp, Artificial Sequence
  ENSG00000164188_11 (sequence is synthesized)
tcacgaaaatgcttgctggagaaaattgatgttataacaggggaggaaacagaacataatgtgttaaagataaactgcaagcttttcatattcaacaaaacaacacaatcctggattgaa

SEQ ID NO: 508862 - DNA, 120 bp, Artificial Sequence
  ENSG00000164188_12 (sequence is synthesized)
caacagcaaactctgggcccaaatgaagattcaaagagcaaaccacaaaaatgtacgaataacagctactgatttagaagactatagcatcaaaatatttttaattcaggccagtgccca

SEQ ID NO: 508863 - DNA, 120 bp, Artificial Sequence
  ENSG00000164188_13 (sequence is synthesized)
agatacagcatatttgtatgcagcaatacatcatcgtcttgttgcacttcaaagcttcaataagcagagagatgtcaatcaagctgaaagcctgtcagaaacagcccaacaattgaactg

SEQ ID NO: 508864 - DNA, 120 bp, Artificial Sequence
  ENSG00000164188_14 (sequence is synthesized)
cgaaagctgtgatgagaatgaggatgatttcatccaagtcactaaaaatggatcagatccttctagttggactcacagacagtcggttgcctgttcatgaatactacctactataaacat

SEQ ID NO: 508865 - DNA, 120 bp, Artificial Sequence
  ENSG00000164188_15 (sequence is synthesized)
gacatctacaaaaagaggggtcaccctactgaaaatactaaaccaccctaactaatgagaagattctattcattccttgaagagtttttatagaaaagtttaagaaatgtaatttgttgc

SEQ ID NO: 508866 - DNA, 120 bp, Artificial Sequence
  ENSG00000164188_16 (sequence is synthesized)
aattaacatttttatgttttacattttacattttgattattgtgcagaaactgacagaatttaaaaaaatggacttcagaagttcaaaatttatcatttttgaagaagtttatttagaat

SEQ ID NO: 508867 - DNA, 120 bp, Artificial Sequence
  ENSG00000164188_17 (sequence is synthesized)
aggattttataactaatttggactcttcatcacattgatggatataatacttagaattataaattgctagatttgataaatacctaacaaaatgtttatttttttcagtcatacttgacc

SEQ ID NO: 508868 - DNA, 120 bp, Artificial Sequence
  ENSG00000164188_18 (sequence is synthesized)
acaaaacaaatattttactaaatttccagagtcatttctctgaaaaatagtataatggcatgataacatttcactaaatcctatttatcttctgggaaatattttaatttagcttttgga

SEQ ID NO: 508869 - DNA, 120 bp, Artificial Sequence
  ENSG00000164188_19 (sequence is synthesized)
tttcctaatatgataagcttatatattcatggtatgaattcctttaaaaagagcatctgctcttggacttgtatctgttgcatcttgtcaatgtttgactcatggtcagcatccaatagt

SEQ ID NO: 508870 - DNA, 120 bp, Artificial Sequence
  ENSG00000164188_20 (sequence is synthesized)
gcatccaatagttgttaaatgaataaataaaatataatacattacctatgtatcaaaaagcatgtgtaagaaagccaaatatgttaactgttctactttatttatgtaattatattttca

SEQ ID NO: 508871 - DNA, 120 bp, Artificial Sequence
  ENSG00000164188_21 (sequence is synthesized)
tagatggggctgtatagaaaaacaaatgtatcatatgtagccaaatgaatctttttcttaaatgatattattatagtaggctacagtaatttcaacaattttacaatagagttttgatcc

SEQ ID NO: 508872 - DNA, 120 bp, Artificial Sequence
  ENSG00000164188_22 (sequence is synthesized)
tcttctttgcgatttgtttcagagacacctcatgaatcacacaagaaaattagtctcagtacttatagccctatttcatttttcaattcagttttatcacaccatggcttcgaagtgact

SEQ ID NO: 508873 - DNA, 120 bp, Artificial Sequence
  ENSG00000164188_23 (sequence is synthesized)
ttgattgtgacccctaagcaattatctgattaggggataaaaattcataattccaagatgtttctgaaaatgttctgaacaatgacaacatatttggaatgagggcgtaatttcactaag

SEQ ID NO: 508874 - DNA, 120 bp, Artificial Sequence
  ENSG00000164188_24 (sequence is synthesized)
tgatgcttcgaagaacaatattcatttggatatgcaaacacacattttcaaaagttatattactgtgttaccatacctgttataaaataataaaaatatataagtatttattaagtcaaa

SEQ ID NO: 508875 - DNA, 120 bp, Artificial Sequence
  ENSG00000164188_25 (sequence is synthesized)
ttttcatattacagattctcagtcccagggagtgtcaaccttgtctcagaagcaaatgagatgttcatccgtcactaacctcccaaccttcccccattctgggccagtgaggaaaaacaa

SEQ ID NO: 508876 - DNA, 120 bp, Artificial Sequence
  ENSG00000164188_26 (sequence is synthesized)
ctggtagcatttacatacttggaataaagttaacatgagaagaggcatctttaaaaatacagacagaagtatagttttcatggagactaagttgcttaaataaaaatgttggatgctctc

SEQ ID NO: 508877 - DNA, 120 bp, Artificial Sequence
  ENSG00000164190_0 (sequence is synthesized)
attttgttctgagagggagagacggaacgagagagagacacacacagggctccttccccccgccctcccccccctccctccgtcggtaccgactcacccgacaccaccaagccgcaggga

SEQ ID NO: 508878 - DNA, 120 bp, Artificial Sequence
  ENSG00000164190_1 (sequence is synthesized)
gggacgcccccgccgacaggagaattggttcccgggcccgcggcgatgcccccccggtagctcgggcccgtggtcgggtgtttgtgagtgtttctatgtgggagaaggaggaggaggagg

SEQ ID NO: 508879 - DNA, 120 bp, Artificial Sequence
  ENSG00000164190_2 (sequence is synthesized)
aagaagaagcaacgatttgtcttctcggctggtctccccccggctctacatgttccccgcactgaggagacggaagaggagccgtagccaccccccctcccggcccggattatagtctct

SEQ ID NO: 508880 - DNA, 120 bp, Artificial Sequence
  ENSG00000164190_3 (sequence is synthesized)
cgccacagcggcctcggcctccccttggattcagacgccgattcgcccagtgtttgggaaatgggaagtaatgacagctggcacctgaactaagtacttttataggcaacaccattccag

SEQ ID NO: 508881 - DNA, 120 bp, Artificial Sequence
  ENSG00000164190_4 (sequence is synthesized)
aaattcaggatgaatggggatatgccccatgtccccattactactcttgcggggattgctagtctcacagacctcctgaaccagctgcctcttccatctcctttacctgctacaactaca

SEQ ID NO: 508882 - DNA, 120 bp, Artificial Sequence
  ENSG00000164190_5 (sequence is synthesized)
aagagccttctctttaatgcacgaatagcagaagaggtgaactgccttttggcttgtagggatgacaatttggtttcacagcttgtccatagcctcaaccaggtatcaacagatcacata

SEQ ID NO: 508883 - DNA, 120 bp, Artificial Sequence
  ENSG00000164190_6 (sequence is synthesized)
gagttgaaagataaccttggcagtgatgacccagaaggtgacataccagtcttgttgcaggccgtcctggcaaggagtcctaatgttttcagggagaaaagcatgcagaacagatatgta

SEQ ID NO: 508884 - DNA, 120 bp, Artificial Sequence
  ENSG00000164190_7 (sequence is synthesized)
caaagtggaatgatgatgtctcagtataaactttctcagaattccatgcacagtagtcctgcatcttccaattatcaacaaaccactatctcacatagcccctccagccggtttgtgcca

SEQ ID NO: 508885 - DNA, 120 bp, Artificial Sequence
  ENSG00000164190_8 (sequence is synthesized)
ccacagacaagctctgggaacagatttatgccacagcaaaatagcccagtgcctagtccatacgccccacaaagccctgcaggatacatgccatattcccatccttcaagttacacaaca

SEQ ID NO: 508886 - DNA, 120 bp, Artificial Sequence
  ENSG00000164190_9 (sequence is synthesized)
catccacagatgcaacaagcatcggtatcaagtcccattgttgcaggtggtttgagaaacatacatgataataaagtttctggtccgttgtctggcaattcagctaatcatcatgctgat

SEQ ID NO: 508887 - DNA, 120 bp, Artificial Sequence
  ENSG00000164190_10 (sequence is synthesized)
aatcctagacatggttcaagtgaggactacctacacatggtgcacaggctaagtagtgacgatggagattcttcaacaatgaggaatgctgcatcttttcccttgagatctccacagcca

SEQ ID NO: 508888 - DNA, 120 bp, Artificial Sequence
  ENSG00000164190_11 (sequence is synthesized)
gtatgctcccctgctggaagtgaaggaactcctaaaggctcaagaccacctttaatcctacaatctcagtctctaccttgttcatcacctcgagatgttccaccagatatcttgctagat

SEQ ID NO: 508889 - DNA, 120 bp, Artificial Sequence
  ENSG00000164190_12 (sequence is synthesized)
tctccagaaagaaaacaaaagaagcagaagaaaatgaaattaggcaaggatgaaaaagagcagagtgagaaagcggcaatgtatgatataattagttctccatccaaggactctactaaa

SEQ ID NO: 508890 - DNA, 120 bp, Artificial Sequence
  ENSG00000164190_13 (sequence is synthesized)
cttacattaagactttctcgtgtaaggtcttcagacatggaccagcaagaggatatgatttctggtgtggaaaatagcaatgtttcagaaaatgatattccttttaatgtgcagtaccca

SEQ ID NO: 508891 - DNA, 120 bp, Artificial Sequence
  ENSG00000164190_14 (sequence is synthesized)
ggacagacttcaaaaacacccattactccacaagatataaaccgcccactaaatgctgctcaatgtttgtcgcagcaagaacaaacagcattccttccagcaaatcaagtgcctgtttta

SEQ ID NO: 508892 - DNA, 120 bp, Artificial Sequence
  ENSG00000164190_15 (sequence is synthesized)
caacagaacacttcagttgctgcaaaacaaccccagacttctgtggtacagaatcaacaacagatatcacaacagggacctatatatgatgaagtggaattggatgcattggctgaaatt

SEQ ID NO: 508893 - DNA, 120 bp, Artificial Sequence
  ENSG00000164190_16 (sequence is synthesized)
gagcgaatagagagagaatcagctattgaaagggagcgcttctcaaaagaagttcaagataaagataagcctttgaaaaaaagaaaacaagattcttacccacaggaggctgggggtgct

SEQ ID NO: 508894 - DNA, 120 bp, Artificial Sequence
  ENSG00000164190_17 (sequence is synthesized)
acaggaggtaatagaccagcttctcaggagacgggttctacgggaaatgggtcaaggccagcattaatggttagcattgatcttcatcaggcaggaagagtggactctcaggcttctata

SEQ ID NO: 508895 - DNA, 120 bp, Artificial Sequence
  ENSG00000164190_18 (sequence is synthesized)
actcaggattcagactccataaaaaagcctgaagaaatcaaacaatgtaatgatgcacctgtttctgttcttcaggaagatattgttggaagtcttaaatctacaccagaaaaccatcct

SEQ ID NO: 508896 - DNA, 120 bp, Artificial Sequence
  ENSG00000164190_19 (sequence is synthesized)
gagacacctaaaaaaaagtctgatcctgagctttcaaagagtgaaatgaaacaaagtgaaagtagattagcagaatctaaaccaaatgaaaaccgattggtggagacaaaatcaagtgaa

SEQ ID NO: 508897 - DNA, 120 bp, Artificial Sequence
  ENSG00000164190_20 (sequence is synthesized)
aataagttagaaactaaagttgagacccaaacagaagaacttaaacagaatgagagcagaacaactgaatgcaaacaaaacgagagcaccatagttgagcctaaacaaaatgaaaataga

SEQ ID NO: 508898 - DNA, 120 bp, Artificial Sequence
  ENSG00000164190_21 (sequence is synthesized)
ctgtctgacacaaaaccaaatgacaacaaacaaaataatggcagatcagaaacaacaaaatcaaggcctgaaaccccaaagcaaaagggtgaaagccggcctgagactccaaaacaaaag

SEQ ID NO: 508899 - DNA, 120 bp, Artificial Sequence
  ENSG00000164190_22 (sequence is synthesized)
agtgatgggcatcctgaaaccccaaaacagaagggtgatggaaggcctgaaactccaaagcaaaaaggtgagagccgccctgaaactccaaagcaaaaaaatgaagggcgacctgaaaca

SEQ ID NO: 508900 - DNA, 120 bp, Artificial Sequence
  ENSG00000164190_23 (sequence is synthesized)
ccaaaacacaggcatgacaataggagggattctggaaagccatctacagagaaaaaacctgaagtgtctaaacataaacaagatactaaatctgactcacctcggttaaaatcagaacga

SEQ ID NO: 508901 - DNA, 120 bp, Artificial Sequence
  ENSG00000164190_24 (sequence is synthesized)
gctgaagccttaaagcagagacctgatgggcgatctgtttctgagtcactaagacgtgaccatgataataaacaaaaatcagatgacaggggtgaatcagagcgacatcgaggggatcag

SEQ ID NO: 508902 - DNA, 120 bp, Artificial Sequence
  ENSG00000164190_25 (sequence is synthesized)
tctagggttcgaagaccagaaacattgagatcctctagtagaaatgaacatggcattaaatctgatagttcaaaaactgataaactagaacgaaaacacaggcatgaatcaggggactca

SEQ ID NO: 508903 - DNA, 120 bp, Artificial Sequence
  ENSG00000164190_26 (sequence is synthesized)
agggaaagaccatcttctggggaacaaaaatcaagacctgacagtcctcgtgttaaacaaggagattctaataaatcaagatctgataaacttggttttaaatcaccaactagtaaagat

SEQ ID NO: 508904 - DNA, 120 bp, Artificial Sequence
  ENSG00000164190_27 (sequence is synthesized)
gacaaaaggacagagggtaacaagagtaaagtagacactaataaagcacaccctgacaataaggcagaatttccaagttatttgttggggggcaggtctggtgcgttgaaaaattttgtc

SEQ ID NO: 508905 - DNA, 120 bp, Artificial Sequence
  ENSG00000164190_28 (sequence is synthesized)
attccgaaaatcaagagggataaagatggcaatgttactcaggagacaaagaaaatggaaatgaaaggagagccgaaagacaaagtagaaaaaataggattagttgaagatctaaataaa

SEQ ID NO: 508906 - DNA, 120 bp, Artificial Sequence
  ENSG00000164190_29 (sequence is synthesized)
ggagctaagcctgtagttgtgctacaaaaactgtctttggatgatgttcagaaacttattaaagatagagaggacaaatcaagaagttcccttaaacctatcaagaataaaccatcaaag

SEQ ID NO: 508907 - DNA, 120 bp, Artificial Sequence
  ENSG00000164190_30 (sequence is synthesized)
tcaaataaaggtagtatagatcaatcagtgttaaaagaattaccccctgaactcctggcagaaattgagtccaccatgccactttgtgaacgtgtgaaaatgaacaaacgcaagcgtagc

SEQ ID NO: 508908 - DNA, 120 bp, Artificial Sequence
  ENSG00000164190_31 (sequence is synthesized)
acagttaatgaaaagccaaaatatgctgaaatcagttcagatgaagataatgatagtgatgaagcttttgaatcctctaggaaacgacataaaaaagatgatgataaagcttgggaatat

SEQ ID NO: 508909 - DNA, 120 bp, Artificial Sequence
  ENSG00000164190_32 (sequence is synthesized)
gaagagcgtgacagaagaagctctggggatcataggagaagtggccactctcatgaaggaagaaggagttcaggtggtggtcgttatcgaaaccgaagtccgtcagattctgacatggaa

SEQ ID NO: 508910 - DNA, 120 bp, Artificial Sequence
  ENSG00000164190_33 (sequence is synthesized)
gattattctcctcctcccagccttagtgaggttgctaggaaaatgaagaaaaaagaaaaacagaagaaaaggaaagcatatgaaccaaaactaacacctgaagaaatgatggactcttca

SEQ ID NO: 508911 - DNA, 120 bp, Artificial Sequence
  ENSG00000164190_34 (sequence is synthesized)
acttttaagagattcacagcctcaatagagaatattttggataatttggaagatatggattttactgcgtttggtgatgatgatgaaattcctcaggaactgctcttaggaaaacatcag

SEQ ID NO: 508912 - DNA, 120 bp, Artificial Sequence
  ENSG00000164190_35 (sequence is synthesized)
cttaatgaacttggcagtgaatctgctaaaataaaagcaatgggtataatggataagctttcaactgacaaaactgtgaaagtcttaaatatcttggagaagaatattcaggatgggtca

SEQ ID NO: 508913 - DNA, 120 bp, Artificial Sequence
  ENSG00000164190_36 (sequence is synthesized)
aagctttccactttgttaaatcataataacgatactgaagaagaagaaaggttatggagagaccttattatggagagagttacaaaatcagcggatgcttgtcttacaactatcaacatt

SEQ ID NO: 508914 - DNA, 120 bp, Artificial Sequence
  ENSG00000164190_37 (sequence is synthesized)
atgacatcccctaacatgccaaaagctgtgtacattgaggatgtaattgaaagagttatacagtacactaaatttcatttgcagaatacactttatcctcagtatgatcctgtttacaga

SEQ ID NO: 508915 - DNA, 120 bp, Artificial Sequence
  ENSG00000164190_38 (sequence is synthesized)
ttagatcctcatggaggaggcttattaagttcaaaagcaaaacgggctaaatgttctacccataagcagagagtaatagtaatgctttataacaaagtttgtgacattgttagcagctta

SEQ ID NO: 508916 - DNA, 120 bp, Artificial Sequence
  ENSG00000164190_39 (sequence is synthesized)
tcagaattgctagagatacaacttcttacagacacaacaattcttcaggtttcatctatgggaataacaccattttttgtggaaaatgtcagtgaactacagttgtgtgccattaagtta

SEQ ID NO: 508917 - DNA, 120 bp, Artificial Sequence
  ENSG00000164190_40 (sequence is synthesized)
gtcactgcagtattctcaagatatgaaaaacataggcagttaattttggaagaaatttttacttcacttgcaagattaccaaccagcaagaggagtttaaggaacttcaggttaaacagt

SEQ ID NO: 508918 - DNA, 120 bp, Artificial Sequence
  ENSG00000164190_41 (sequence is synthesized)
agtgatatggatggagaacctatgtatattcagatggttacagcactggttttacaacttattcagtgtgtggtacacttaccatcatcagagaaggactctaatgcagaagaagattca

SEQ ID NO: 508919 - DNA, 120 bp, Artificial Sequence
  ENSG00000164190_42 (sequence is synthesized)
aataaaaaaattgaccaggatgttgtcattactaactcttatgaaacagctatgcgaacagcccaaaacttcctctccatcttccttaaaaaatgtggtagtaagcaaggtgaagaagat

SEQ ID NO: 508920 - DNA, 120 bp, Artificial Sequence
  ENSG00000164190_43 (sequence is synthesized)
gttcatcagttcagtaacaagtcaacagagatggctttaagagtggcatctcttgattaccttggaactgttgctgcacggctaagaaaagatgctgttacaagcaaaatggatcaagga

SEQ ID NO: 508921 - DNA, 120 bp, Artificial Sequence
  ENSG00000164190_44 (sequence is synthesized)
tctatagaacgcattttaaaacaggtttcaggaggggaagatgaaatccaacaattacaaaaagcattgcttgattacttggatgaaaacactgagactgatccttcactagtgttttct

SEQ ID NO: 508922 - DNA, 120 bp, Artificial Sequence
  ENSG00000164190_45 (sequence is synthesized)
cgtaaattctatatagcccagtggtttcgagacacaactctggaaacagaaaaagcaatgaaatcacaaaaagatgaagaatcatctgaaggaacacatcatgcaaaggaaattgagaca

SEQ ID NO: 508923 - DNA, 120 bp, Artificial Sequence
  ENSG00000164190_46 (sequence is synthesized)
actggccaaattatgcatcgagctgaaaaccgaaaaaagtttcttagaagcattatcaaaaccacaccttctcagtttagcacattaaagatgaactctgatactgtggactatgatgat

SEQ ID NO: 508924 - DNA, 120 bp, Artificial Sequence
  ENSG00000164190_47 (sequence is synthesized)
gcttgcttgattgttcgatacttggcctccatgaggccgtttgcccagagctttgatatttatttgacacagatcctacgagttcttggtgaaaatgcaattgctgttcgaacaaaagcc

SEQ ID NO: 508925 - DNA, 120 bp, Artificial Sequence
  ENSG00000164190_48 (sequence is synthesized)
atgaagtgtttgtctgaggttgttgctgtagaccccagtattctagcaaggcttgatatgcaacgaggtgttcatggacgattgatggataattcgactagtgtccgagaagcagcagta

SEQ ID NO: 508926 - DNA, 120 bp, Artificial Sequence
  ENSG00000164190_49 (sequence is synthesized)
gaattactaggtcgatttgtcctttgtcgacctcagcttgctgaacagtattatgatatgctgattgaaagaatattggatactggtatcagtgtcaggaaaagagtaataaagattctc

SEQ ID NO: 508927 - DNA, 120 bp, Artificial Sequence
  ENSG00000164190_50 (sequence is synthesized)
agagacatttgtattgaacaaccaacatttccaaaaatcacagaaatgtgtgtaaaaatgattcgcagagtcaatgatgaagagggcattaagaaattagtaaatgaaacattccagaaa

SEQ ID NO: 508928 - DNA, 120 bp, Artificial Sequence
  ENSG00000164190_51 (sequence is synthesized)
ctctggtttactccaactccacacaatgacaaagaagcaatgacaaggaaaattttaaacattaccgatgtggttgcagcatgcagagatactggatatgactggtttgagcaactgctt

SEQ ID NO: 508929 - DNA, 120 bp, Artificial Sequence
  ENSG00000164190_52 (sequence is synthesized)
caaaacttgttgaagtccgaagaggattcctcatataaacctgtgaagaaagcttgtactcaacttgttgataacctagttgagcacattcttaaatatgaggaatctctagctgactct

SEQ ID NO: 508930 - DNA, 120 bp, Artificial Sequence
  ENSG00000164190_53 (sequence is synthesized)
gacaataaaggtgtgaattctggaagattggtagcttgcataaccactttgttcttattcagcaaaataagaccccagctcatggttaaacatgcaatgactatgcaaccataccttacc

SEQ ID NO: 508931 - DNA, 120 bp, Artificial Sequence
  ENSG00000164190_54 (sequence is synthesized)
actaaatgtagtacgcaaaatgatttcatggttatctgcaatgttgcaaaaatcctagagctagttgtaccactgatggagcatccaagtgaaacttttcttgccactattgaggaagat

SEQ ID NO: 508932 - DNA, 120 bp, Artificial Sequence
  ENSG00000164190_55 (sequence is synthesized)
ctaatgaagctcatcatcaaatatggcatgactgtagtgcaacattgtgtgagctgtcttggagctgttgtaaataaagtgacacaaaattttaaatttgtgtgggcttgtttcaataga

SEQ ID NO: 508933 - DNA, 120 bp, Artificial Sequence
  ENSG00000164190_56 (sequence is synthesized)
tactatggtgccatttcaaaattaaaaagtcaacaccaagaggacccaaataacacttcacttctaacaaacaaaccagcacttcttagatcccttttcaccgttggagcactatgtcgg

SEQ ID NO: 508934 - DNA, 120 bp, Artificial Sequence
  ENSG00000164190_57 (sequence is synthesized)
cattttgattttgatctggaagattttaaaggcaacagcaaggttaacataaaagataaagtacttgaactattgatgtattttacaaaacactcagatgaagaagtacaaacaaaagct

SEQ ID NO: 508935 - DNA, 120 bp, Artificial Sequence
  ENSG00000164190_58 (sequence is synthesized)
atcattggtctaggatttgcctttattcagcatccaagtctaatgttcgagcaagaagtgaagaatctatataataatattttatctgataagaactcctcagtcaatttaaaaatacaa

SEQ ID NO: 508936 - DNA, 120 bp, Artificial Sequence
  ENSG00000164190_59 (sequence is synthesized)
gtgttaaaaaacctccagacctacctacaagaagaagatacacgtatgcagcaggcagatagagactggaagaaagttgcaaaacaggaagacttaaaagaaatgggtgatgtttcctca

SEQ ID NO: 508937 - DNA, 120 bp, Artificial Sequence
  ENSG00000164190_60 (sequence is synthesized)
gggatgagtagttccatcatgcagctttatctcaaacaggtgcttgaggcattttttcacacccagtcaagtgtacgccactttgccctaaatgtcattgcattgactctaaatcaaggt

SEQ ID NO: 508938 - DNA, 120 bp, Artificial Sequence
  ENSG00000164190_61 (sequence is synthesized)
cttattcatccagttcagtgtgtgccatatttaattgctatgggcacagacccagaacctgctatgcggaacaaggctgatcagcaacttgtggaaatagacaaaaaatatgctggattc

SEQ ID NO: 508939 - DNA, 120 bp, Artificial Sequence
  ENSG00000164190_62 (sequence is synthesized)
attcatatgaaagcagtggctggtatgaagatgtcttaccaggtacaacaggcaatcaacacatgcctaaaagatcctgtaaggggtttcagacaagacgagtcctctagcgctttgtgt

SEQ ID NO: 508940 - DNA, 120 bp, Artificial Sequence
  ENSG00000164190_63 (sequence is synthesized)
tcacacctttactccatgatccgtggaaaccgccaacacagacgagcctttcttatttctttactcaacctctttgatgacacagcaaaaacagacgtgactatgctcttgtatatagca

SEQ ID NO: 508941 - DNA, 120 bp, Artificial Sequence
  ENSG00000164190_64 (sequence is synthesized)
gacaatctagcctgttttccataccagacacaggaagagccgttgtttataatgcatcatatagacattacactctcagtttctggtagtaacctactgcagtcattcaaggagtctatg

SEQ ID NO: 508942 - DNA, 120 bp, Artificial Sequence
  ENSG00000164190_65 (sequence is synthesized)
gtaaaggacaaaaggaaagagagaaaatcatcacctagtaaggaaaatgagtcaagcgacagtgaagaagaagtttccaggcctcggaagtcacggaaacgtgtagattcagattcagat

SEQ ID NO: 508943 - DNA, 120 bp, Artificial Sequence
  ENSG00000164190_66 (sequence is synthesized)
tcagattcagaagacgatataaattcagtgatgaaatgtttgccagaaaattcagctcctttaatcgaatttgcaaatgtgtcccagggtattttattacttctcatgttaaaacaacat

SEQ ID NO: 508944 - DNA, 120 bp, Artificial Sequence
  ENSG00000164190_67 (sequence is synthesized)
ttgaagaatctttgtggattttctgatagtaaaattcagaagtactctccatctgaatctgcaaaagtatatgataaagcgataaaccgaaaaacaggagttcattttcatccaaaacaa

SEQ ID NO: 508945 - DNA, 120 bp, Artificial Sequence
  ENSG00000164190_68 (sequence is synthesized)
acactggacttcctgcggagtgacatggctaattccaaaatcacagaagaggtgaaaaggagtatagtaaaacagtatctagatttcaaacttctcatggaacatctggaccctgatgaa

SEQ ID NO: 508946 - DNA, 120 bp, Artificial Sequence
  ENSG00000164190_69 (sequence is synthesized)
gaagaagaagaaggggaggtttcagctagcacaaatgctcggaacaaagcaattacctcactgcttggaggaggcagccctaaaaataatacagcagcagagacagaagatgatgaaagt

SEQ ID NO: 508947 - DNA, 120 bp, Artificial Sequence
  ENSG00000164190_70 (sequence is synthesized)
gatggggaggatagaggaggaggcacttcagggtcattgagaaggtcaaaacgaaattcagactctacggagttggcagcacagatgaatgaaagtgttgacgtcatggatgtcatcgct

SEQ ID NO: 508948 - DNA, 120 bp, Artificial Sequence
  ENSG00000164190_71 (sequence is synthesized)
atttgctgtccaaagtacaaagatcgaccacaaattgcaagagtagtgcagaaaaccagcagtggcttcagtgttcagtggatggcaggctcctacagtggctcctggactgaggctaag

SEQ ID NO: 508949 - DNA, 120 bp, Artificial Sequence
  ENSG00000164190_72 (sequence is synthesized)
cgccgtgatggccgcaaactggtgccttgggtagacactattaaagagtcagacattatttacaaaaaaattgctctaacgagtgctaataagctgactaataaagttgttcagacttta

SEQ ID NO: 508950 - DNA, 120 bp, Artificial Sequence
  ENSG00000164190_73 (sequence is synthesized)
cgatccctgtatgccgccaaggatgggacttccagctaatgaatttgtacatgcagccaaatttacaggaatttttttaaaaggcagaaaaacttgaaataccaacattctggcaaaaaa

SEQ ID NO: 508951 - DNA, 120 bp, Artificial Sequence
  ENSG00000164190_74 (sequence is synthesized)
aaatcagttttatgaagagtaagtggaacctgggatgcaggaacaaaagaaggaaatgttgggcaaacatttttgtgggagctcccttcgctgttgtgcagcagaaacagattctcagtt

SEQ ID NO: 508952 - DNA, 120 bp, Artificial Sequence
  ENSG00000164190_75 (sequence is synthesized)
catttttactcccactgtattatagtttaacaaaaattgtttatatcttggaaaaaaaactttctgtttaaaaaaaataaacaagtgaatgttggaaattagtctgttaatgttcttaat

SEQ ID NO: 508953 - DNA, 120 bp, Artificial Sequence
  ENSG00000164190_76 (sequence is synthesized)
aaagtgttcttggagtttaacctagcagcggatggctttctttagcttagcccagtttccagggaagcattgttttttccaggctgtaaaatggcagaatctcctggatatataatttat

SEQ ID NO: 508954 - DNA, 120 bp, Artificial Sequence
  ENSG00000164190_77 (sequence is synthesized)
tctgttgaaaaaaaaaaaagcatgcagtatctatgacctatctgcagaaggagtttttgtaaatgtagattttgatgtattaggtcaccctgaaaacaatacaagaaaagggatccccag

SEQ ID NO: 508955 - DNA, 120 bp, Artificial Sequence
  ENSG00000164190_78 (sequence is synthesized)
gtaatctggtggagcgaatactgcaataaatttttttacttctctttgttacttgtctgtttccatttgaatttcttattgtaaaaatctgtttaaatccatttatattattttacagtc

SEQ ID NO: 508956 - DNA, 120 bp, Artificial Sequence
  ENSG00000164190_79 (sequence is synthesized)
ttttatgtaaaatttattatatcactggttttcaaagcaaaacataaaatattgtttatacagtttgtataggctgacttctgaataattggtatctattattttcattcccataagagg

SEQ ID NO: 508957 - DNA, 120 bp, Artificial Sequence
  ENSG00000164190_80 (sequence is synthesized)
gtgtaaacaattaactccagggttttattgtatcctgcaatatttagtattaactatatatgatttagcactgtgccaaacacattttcaagagtacattttgatataaaaagaaactat

SEQ ID NO: 508958 - DNA, 120 bp, Artificial Sequence
  ENSG00000164190_81 (sequence is synthesized)
agtttattccttgtatgcttcaatttctttctagtgatgtcatgatgctgatatttattctttaaacctcgggtaaaggtaacctgttatttggaaaaccagcatttctcttggttaaaa

SEQ ID NO: 508959 - DNA, 120 bp, Artificial Sequence
  ENSG00000164190_82 (sequence is synthesized)
tgatgtccggttattttagaactagagttgagatgaatatgacacttcataattacactcactacatttttcacaaattattttttaatgctgaaaagagtaattttacttgttgagatg

SEQ ID NO: 508960 - DNA, 120 bp, Artificial Sequence
  ENSG00000164190_83 (sequence is synthesized)
tttattcattttctaatctatgctaaaagcttttatcataagtcttgggaacagttgtcatttacacattacttactgcagatatcttgactaaatcaggagggaggtgtttaatcattt

SEQ ID NO: 508961 - DNA, 120 bp, Artificial Sequence
  ENSG00000164190_84 (sequence is synthesized)
gatatgtatagttgacactcaggaatagtaatgcctaaaatttacagtggatgaggtctgtttcaagtttaattctttttaaaaatgttttacttatttttaaatcactttgaaaaaatt

SEQ ID NO: 508962 - DNA, 120 bp, Artificial Sequence
  ENSG00000164190_85 (sequence is synthesized)
gacctccagaatgctgttttatgaaattggcaaataaatgaaggtattcaatttttgaggaagaatgacattgccacaaaatacctttttgtgacacctattaaaccactatgaaaataa

SEQ ID NO: 508963 - DNA, 120 bp, Artificial Sequence
  ENSG00000164190_86 (sequence is synthesized)
tctttgcactagacttgctatacctcgcctgtcttcctactggtccactgaaaaagttcttctcttttatccctatcttccttcttctggagcaagagaattgagcctagccaagagggg

SEQ ID NO: 508964 - DNA, 120 bp, Artificial Sequence
  ENSG00000164190_87 (sequence is synthesized)
tcagcaaccttgtttgacttaaacggcattcagtggaaacagactatgggagatcttcacttgtgtgccaactgacttagtcataatgaccaaaagaagtgggaagaccaccagtgttct

SEQ ID NO: 508965 - DNA, 120 bp, Artificial Sequence
  ENSG00000164190_88 (sequence is synthesized)
actttttccacctagtgtccatagattgaggtgtgacaagcaagggcaggaaggacagatgcatgctgccatttttaaatgtatattgctgatggaagcccttcacctcctccaaagttt

SEQ ID NO: 508966 - DNA, 120 bp, Artificial Sequence
  ENSG00000164190_89 (sequence is synthesized)
ttaatgttaatttactgatttttttttaattgtgagctcttgagctatgagcagtagactatgaatactgaacaaatctgaaaaaagttttaaaattgaaataaaatatacagcaaactt

SEQ ID NO: 508967 - DNA, 120 bp, Artificial Sequence
  ENSG00000164190_90 (sequence is synthesized)
ggaggaggagtggtaagtgtcttccaacacttctcacttgtattgaggggtaacattagattcaaactacttcagacctacacaaaacaaaatttatgtactaccaagaatgtcaagtgt

SEQ ID NO: 508968 - DNA, 120 bp, Artificial Sequence
  ENSG00000164190_91 (sequence is synthesized)
acctcttaccacaaatccacttgctaatgtcagtgaatctctagtttcagaaagtttttagtcagtgcaaattgaaggcattatatcaaaaatgtattatataattacccttcattttta

SEQ ID NO: 508969 - DNA, 120 bp, Artificial Sequence
  ENSG00000164190_92 (sequence is synthesized)
ccttcatttttatggtggtgtcatgtttttaaagtcattacataattatatgtatatatgtacacatacatatatattaactatattgtcactttagggttaagagtattatagttgtgt

SEQ ID NO: 508970 - DNA, 120 bp, Artificial Sequence
  ENSG00000164190_93 (sequence is synthesized)
ggaggatagaggaggaggcacttcaggggtgaggcggaggaggagtcaacgtatttcgcagcgtattacgtaaaatgatttttatgtgcttatatatgtcagtctattaaatgtacacca

SEQ ID NO: 508971 - DNA, 120 bp, Artificial Sequence
  ENSG00000164190_94 (sequence is synthesized)
agtaatgtaatacttaaaagagaaaacattttgtagatagagattctctacttacccgtttatacatccttttgtagaaagtttaacataaaagacaataaaaaaacagaaatgagattt

SEQ ID NO: 508972 - DNA, 120 bp, Artificial Sequence
  ENSG00000164190_95 (sequence is synthesized)
ttacaggcatgagccaccgcacccaccttacagccttttttctttcctgattcgagatttaacatgatcatttctttcatttagtgccatgtctgtattttaaagttaggtttgttgttg

SEQ ID NO: 508973 - DNA, 120 bp, Artificial Sequence
  ENSG00000164190_96 (sequence is synthesized)
tgccatgtctgtattttaaagttaggtttgttgttgtttttctggccttcacattgctttttaattcagactcacttaacatagtagtactgttttttgactctagaagtacagtgaata

SEQ ID NO: 508974 - DNA, 120 bp, Artificial Sequence
  ENSG00000164190_97 (sequence is synthesized)
tgactgttatcaactctctgttcctcaaagccacatctgaaatcaactttgaaaaacaattatattttcgtagctttgagtatggaaaacaaattactgtttgccctatattatctttac

SEQ ID NO: 508975 - DNA, 120 bp, Artificial Sequence
  ENSG00000164190_98 (sequence is synthesized)
aaggcaaattcagtcaagctttaaaaactactggattatacatttgtagtctatatcataatcttaaatagatattcttagtgtgagaatgctttatgtttaaagaacctaaaatttaca

SEQ ID NO: 508976 - DNA, 120 bp, Artificial Sequence
  ENSG00000164190_99 (sequence is synthesized)
atgaaattgtttaaattttatcacgtcagtatttttgctggtgctccagtgctttctggatttaagctgaatctcaaaagatctgtcattttaaaaagaacactaaaacatagactttat

SEQ ID NO: 508977 - DNA, 120 bp, Artificial Sequence
  ENSG00000164190_100 (sequence is synthesized)
aggaaggcctataaggttaaattcatatatctcagatatatgaaaagttttgacatatgtctaaatagagaatttttactaccatgatatctcgtaatttttttttttatttccagtgtg

SEQ ID NO: 508978 - DNA, 120 bp, Artificial Sequence
  ENSG00000164197_0 (sequence is synthesized)
gaaccggcatcgccgccgccggagccgcagcgagtcctcagagcctggctgctggcggccgggagcgccgggacggggcgcgaagccggaggctccgggacgtggatacagatgaaaaga

SEQ ID NO: 508979 - DNA, 120 bp, Artificial Sequence
  ENSG00000164197_1 (sequence is synthesized)
agcaaagaattgataactaaaaatcatagtcaagaggaaacaagtattcttcgttgttggaaatgtagaaaatgtatagcaagctctggttgttttatggagtatcttgagaatcaagtg

SEQ ID NO: 508980 - DNA, 120 bp, Artificial Sequence
  ENSG00000164197_2 (sequence is synthesized)
attaaggataaagatgattcagttgatgctcaaaatatttgtcatgtgtggcacatgaatgtagaagcccttccagaatggataagctgcctaatccaaaaagcccagtggacagttgga

SEQ ID NO: 508981 - DNA, 120 bp, Artificial Sequence
  ENSG00000164197_3 (sequence is synthesized)
aaactgaattgtcctttctgtggggcccgtttagggggctttaattttgtcagcactccaaaatgttcctgtggccagcttgcagctgtacatctctccaagagccggactgattatcag

SEQ ID NO: 508982 - DNA, 120 bp, Artificial Sequence
  ENSG00000164197_4 (sequence is synthesized)
ccaacacaggcaggcagactaatgagaccatcagtgaaatacttgtcacatcctagagttcagtcaggttgtgacaaggaagctctgctgacaggtggtggctctgaaaacagaaatcac

SEQ ID NO: 508983 - DNA, 120 bp, Artificial Sequence
  ENSG00000164197_5 (sequence is synthesized)
aggcttttaaacatggcccgaaataataatgaccctggaagattaacagaagcactctgcctggaggtgcgaccaacatattttgagatgaagaacgaaaaactgctgtccaaagcatca

SEQ ID NO: 508984 - DNA, 120 bp, Artificial Sequence
  ENSG00000164197_6 (sequence is synthesized)
gaaccaaaataccagctttttgttccccagcttgtgactggcagatgcgctacaagagcttttcatagaaaatcacatagtttggatctgaacatcagtgagaaactgactttattaccc

SEQ ID NO: 508985 - DNA, 120 bp, Artificial Sequence
  ENSG00000164197_7 (sequence is synthesized)
actttatatgaaatacatagtaagactactgcctattccagactaaatgaaacacagcctattgacctttcaggcttgcctttacaatctagtaaaaatagctattcctttcagaatcca

SEQ ID NO: 508986 - DNA, 120 bp, Artificial Sequence
  ENSG00000164197_8 (sequence is synthesized)
tccagttttgatcctagtatgctgctgcaaagattttcagtggccccccatgagacccagacacaaagaggaggagaatttcagtgtggtctagaagctgcttcagtgtattctgaccat

SEQ ID NO: 508987 - DNA, 120 bp, Artificial Sequence
  ENSG00000164197_9 (sequence is synthesized)
actaatactaacaatctgactttcctgatggacctgccctcagctggcaggagcatgccggaggcctcagaccaggaagagcacctctcccctctggacttcctgcactcagccaatttt

SEQ ID NO: 508988 - DNA, 120 bp, Artificial Sequence
  ENSG00000164197_10 (sequence is synthesized)
tcattgggcagcattaatcagaggcttaataagagagaaaggagcaagttgaagaatctaagaaggaaacaacgaaggcgtgaaagatggctacagaagcagggtaaatactcaggagtg

SEQ ID NO: 508989 - DNA, 120 bp, Artificial Sequence
  ENSG00000164197_11 (sequence is synthesized)
ggattgctggatcatatgactttgaataatgagatgagtacagatgaagacaatgaatatgcagaagaaaaggatagctacatctgtgcagtgtgtctggacgtttatttcaacccttat

SEQ ID NO: 508990 - DNA, 120 bp, Artificial Sequence
  ENSG00000164197_12 (sequence is synthesized)
atgtgttacccttgccatcacatcttctgtgagccctgcttacggactctggccaaagacaatccttcaagcactccatgcccattgtgtcggacaattatttctagagtctttttccaa

SEQ ID NO: 508991 - DNA, 120 bp, Artificial Sequence
  ENSG00000164197_13 (sequence is synthesized)
acagaattgaacaatgccacaaaaactttctttactaaagaatatttgaaaataaaacaaagctttcagaaatccaactctgcaaaatggcccctaccaagctgcagaaaagcatttcat

SEQ ID NO: 508992 - DNA, 120 bp, Artificial Sequence
  ENSG00000164197_14 (sequence is synthesized)
ctttttggaggtttccgcagacatgcagctccagttacaagaaggcagttcccacacggtgcacacaggatggattacctgcactttgaggatgatagccgtggatggtggtttgacatg

SEQ ID NO: 508993 - DNA, 120 bp, Artificial Sequence
  ENSG00000164197_15 (sequence is synthesized)
gatatggtgatcatatatatttattcagtgaactgggtcattggattcattgttttctgctttctttgctattttttctttccgttttaggaatttcataccttactacaattgaccaat

SEQ ID NO: 508994 - DNA, 120 bp, Artificial Sequence
  ENSG00000164197_16 (sequence is synthesized)
cataaatgatgtaaataacaattgcttaaacatttttaaatgtgctttgaagtttttttaatgttgcattatacaaattgttgatgtttatagaaagcctgagaataatgaatttattta

SEQ ID NO: 508995 - DNA, 120 bp, Artificial Sequence
  ENSG00000164197_17 (sequence is synthesized)
ttaatgtttttcatgtaacaaactaaactttattcaagagctaacctacccagcacttagcaacaatgcactattaatttcatagttgttcttgggttaggatttggggctctgatttta

SEQ ID NO: 508996 - DNA, 120 bp, Artificial Sequence
  ENSG00000164197_18 (sequence is synthesized)
tggggctctgattttataatatcactttaatacttattttgattgtaaaaaactgaagttttctctccacttaaaaatagtaaaaatacaaaaagaaatgataatctaggtagatattat

SEQ ID NO: 508997 - DNA, 120 bp, Artificial Sequence
  ENSG00000164197_19 (sequence is synthesized)
tttagtcaatcaccacttattctcaggcaaattatatgtattaaagataaaccatattctctgggaactaatctagcagggtatattcagttttggtttctaattgtcactacttatatc

SEQ ID NO: 508998 - DNA, 120 bp, Artificial Sequence
  ENSG00000164197_20 (sequence is synthesized)
tattctttttgtacagatctaattagtacaacattttaaattattataaacagaatactaaatacaaatcatgagactaatccctaccaataaacactttagctagctataaacactttc

SEQ ID NO: 508999 - DNA, 120 bp, Artificial Sequence
  ENSG00000164197_21 (sequence is synthesized)
cagattgaaggattaatcaccagaagacatgaaaaatttaccgacttttagtagtctaaaagagcaatgcatggtccaaaatgtaatttagtgattcatttaagtaggagatggtcaaat

SEQ ID NO: 509000 - DNA, 120 bp, Artificial Sequence
  ENSG00000164197_22 (sequence is synthesized)
atattgtaaatgtgcaataaagagtggcttttaatttttttaatgtctgaataaagtattgttataaataggcttatcgattttagaaagaaaacctgacatttttaattacagtaatca

SEQ ID NO: 509001 - DNA, 120 bp, Artificial Sequence
  ENSG00000164197_23 (sequence is synthesized)
ttaatttttttcattattaaaatttaaaaataagagaactgaatcattagaacatggaattggggcaggtaacccaattcaaaaaaggaaaaactggagcagagacttaagcttatttat

SEQ ID NO: 509002 - DNA, 120 bp, Artificial Sequence
  ENSG00000164197_24 (sequence is synthesized)
tcagttattctggtggtctttgtgaaacctgggacaaagtttttattatgaattactaatccagtattactacactatgatgtcatatatctggtaattcaataagcaaacttttacata

SEQ ID NO: 509003 - DNA, 120 bp, Artificial Sequence
  ENSG00000164197_25 (sequence is synthesized)
aaataggtgactctctcgtggcactaaaaatactaccactatccaaaaacattgggatcaactgggctttaacagtttcaatctatgaaaagccaaaatttaagctaattgctactaact

SEQ ID NO: 509004 - DNA, 120 bp, Artificial Sequence
  ENSG00000164197_26 (sequence is synthesized)
gtatttcaataaaagcacttgactgttggtatgtgatgttctaagaaaactagaagaatggtactgatttctattctaatgctgttcttattattgtgttttaaattatatctattacag

SEQ ID NO: 509005 - DNA, 120 bp, Artificial Sequence
  ENSG00000164197_27 (sequence is synthesized)
aaaatagtatacactagacatcaaatccagaaatcagaacactaagtacaatttagaaacacagataaatttatacttataaatggatatttataattactaattgctcaaagtaaacat

SEQ ID NO: 509006 - DNA, 120 bp, Artificial Sequence
  ENSG00000164197_28 (sequence is synthesized)
aagggaaaatatcagctctcttaaaatatatagcaagattgaaaacacacatatgaggagttgcattattttaagaactttaaattgcagccatttcctaggcaacttctggtttataca

SEQ ID NO: 509007 - DNA, 120 bp, Artificial Sequence
  ENSG00000164197_29 (sequence is synthesized)
ctctagaaaatatatcttgattcattcctaaatcacaataaaggttttaattatgtataaactaaataagtattattatagatacagatctctcataggaacaaagttgattcccaatat

SEQ ID NO: 509008 - DNA, 120 bp, Artificial Sequence
  ENSG00000164197_30 (sequence is synthesized)
atatttgttaggtcagtgatacatatcagtttatagatctcagtctactaaatatttatgatacccttaaataaacatgaacctttaaatgaagaaagcataatctggaaaagcattcaa

SEQ ID NO: 509009 - DNA, 120 bp, Artificial Sequence
  ENSG00000164197_31 (sequence is synthesized)
acctttaaatgaagaaagcataatctggaaaagcattcaaaatggattgagtatatttatcttgactaataacttgatctgaaaattatagaatattaaaagaagtaaattcataaaatt

SEQ ID NO: 509010 - DNA, 120 bp, Artificial Sequence
  ENSG00000164197_32 (sequence is synthesized)
agtggagataaaaactgctaaatattaagaagtatagcatttcctagatctaccagcttataagaagccagataaaatctcagatggaaagaaaccagtttcttctggtatgtagcacac

SEQ ID NO: 509011 - DNA, 120 bp, Artificial Sequence
  ENSG00000164197_33 (sequence is synthesized)
agtagccattcaaaataaaatacatggatgagctttagagtaaaacaaaaaattataatgctcttcctaagcatctctcacagtaaaaactcactgtccaataaagagccaaagaaagga

SEQ ID NO: 509012 - DNA, 120 bp, Artificial Sequence
  ENSG00000164197_34 (sequence is synthesized)
aaagaagaaaaatgttaaagttaatgaagcatagtacttgtcccaagtaatattatttaataagcttaattttatgagttatcattatcaataatttctatttctaccaagcttaattat

SEQ ID NO: 509013 - DNA, 120 bp, Artificial Sequence
  ENSG00000164197_35 (sequence is synthesized)
ggtaaaggttaattttaaacatgttcacacattcttttttaaaaaaatgccctaattgaggtatatttctgaatagtttcagcaggttattttttaattttaaaaaagcaaattcacaaa

SEQ ID NO: 509014 - DNA, 120 bp, Artificial Sequence
  ENSG00000164197_36 (sequence is synthesized)
cctagacccatttattttatactcagcagaagacagggaaatttaaattagacaaagttgaaaaagaatcagaatttatattttacaaagcttctaccactctgaatcaacaaaatcagg

SEQ ID NO: 509015 - DNA, 120 bp, Artificial Sequence
  ENSG00000164197_37 (sequence is synthesized)
aatggaaaaaaaaatttctgtatctgctgaattattaatgccactatagtattatatgctaaatatgaaagcagtgctgccatcagtttcacttctgccttggaatcttgctcctaagtt

SEQ ID NO: 509016 - DNA, 120 bp, Artificial Sequence
  ENSG00000164197_38 (sequence is synthesized)
agctctgtggcataacaaaattccagttaataaaattttcatttaaatgtcttttgtatggctaaatgaatatacagattcttaaacatctaatttttatatggatttctcaaagaatgc

SEQ ID NO: 509017 - DNA, 120 bp, Artificial Sequence
  ENSG00000164197_39 (sequence is synthesized)
cttacagaagagcattctctgattaaatgcaattacagttggagtctttgattcttcacagaattctgtagttgaagccagaaaacactgtcatttaggaaagtgttcctaaaggtttga

SEQ ID NO: 509018 - DNA, 120 bp, Artificial Sequence
  ENSG00000164197_40 (sequence is synthesized)
atgctttaacatgctcaactcttacttcttgaagtgtttgattgtcagtaaattttcgaagaacattaaagttctaccaatgtagaagcatgaggaataaaagatggtctggatcaagaa

SEQ ID NO: 509019 - DNA, 120 bp, Artificial Sequence
  ENSG00000164197_41 (sequence is synthesized)
gtcaaattgttttccagaatggctgtaccattttgcattccaagcagcaaagacttccattttctgtgcgtccttgaaagcaagcactggtattctcagtgttttaaaattttagtcatt

SEQ ID NO: 509020 - DNA, 120 bp, Artificial Sequence
  ENSG00000164197_42 (sequence is synthesized)
caaatacatagacagttgtatcacatcatgactttaatttgcttttccttaaggatgctgaacatatgtgcttattttacatttgtatatattctttagttaagtgtcttcaaatctttt

SEQ ID NO: 509021 - DNA, 88 bp, Artificial Sequence
  ENSG00000164197_43 (sequence is synthesized)
atttgtatatattctttagttaagtgtcttcaaatcttttgggctggtgtggcagcttatgtctataatcccagcactttcaggagtt

SEQ ID NO: 509022 - DNA, 120 bp, Artificial Sequence
  ENSG00000164199_0 (sequence is synthesized)
ggtagtaagaatcagcagcgcgggcaaggagtacggacgggagtcagaggcagagcgagggtgtgtggagggccggcggggaccgccgggagcgcgcggatgtcggtgttcctggggcca

SEQ ID NO: 509023 - DNA, 120 bp, Artificial Sequence
  ENSG00000164199_1 (sequence is synthesized)
gggatgccctctgcatctttattagtaaatcttctttcagctttactcatcctatttgtgtttggagaaacagaaataagatttactggacaaactgaatttgttgttaatgaaacaagt

SEQ ID NO: 509024 - DNA, 120 bp, Artificial Sequence
  ENSG00000164199_2 (sequence is synthesized)
acaacagttattcgtcttatcattgaaaggataggagagccagcaaatgttactgcaattgtatcgctgtatggagaggacgctggtgacttttttgacacatatgctgcagcttttata

SEQ ID NO: 509025 - DNA, 120 bp, Artificial Sequence
  ENSG00000164199_3 (sequence is synthesized)
cctgccggagaaacaaacagaacagtgtacatagcagtatgtgatgatgacttaccagagcctgacgaaacttttatttttcacttaacattacagaaaccttcagcaaatgtgaagctt

SEQ ID NO: 509026 - DNA, 120 bp, Artificial Sequence
  ENSG00000164199_4 (sequence is synthesized)
ggatggccaaggactgttactgtgacaatattatcaaatgacaatgcatttggaattatttcatttaatatgcttccctcaatcgcagtgagtgagcccaagggcagaaatgagtctatg

SEQ ID NO: 509027 - DNA, 120 bp, Artificial Sequence
  ENSG00000164199_5 (sequence is synthesized)
cctcttactctcatcagggaaaagggaacctatggaatggtcatggtgacttttgaggtagagggtggcccaaatccccctgatgaagatttgagtccagttaaaggaaatatcaccttt

SEQ ID NO: 509028 - DNA, 120 bp, Artificial Sequence
  ENSG00000164199_6 (sequence is synthesized)
ccccctggcagagcaacagtaatttataacttgacagtactcgatgacgaggtaccagaaaatgatgaaatatttttaattcaactgaaaagtgtagaaggaggagctgagattaacacc

SEQ ID NO: 509029 - DNA, 120 bp, Artificial Sequence
  ENSG00000164199_7 (sequence is synthesized)
tctaggaattccattgagatcatcattaagaaaaatgatagtcccgtgagattccttcagagtatttatttggttcctgaggaagaccacatactcataattccagtagttcgtggaaag

SEQ ID NO: 509030 - DNA, 120 bp, Artificial Sequence
  ENSG00000164199_8 (sequence is synthesized)
gacaacaatggaaatctgattggatctgatgaatatgaggtttcaatcagttatgctgtcacaactgggaattccacagcacatgcccagcaaaatctggacttcattgatcttcagcca

SEQ ID NO: 509031 - DNA, 120 bp, Artificial Sequence
  ENSG00000164199_9 (sequence is synthesized)
aacacaactgttgtttttccaccttttattcatgaatctcacttgaaatttcaaatagttgatgacaccataccggagattgctgaatcgtttcacattatgttactaaaagatacctta

SEQ ID NO: 509032 - DNA, 120 bp, Artificial Sequence
  ENSG00000164199_10 (sequence is synthesized)
cagggagatgctgtgctaataagcccttctgttgtacaagtcaccattaagccaaatgataaaccttatggagtcctttcattcaacagtgttttgtttgaaaggacagttataattgat

SEQ ID NO: 509033 - DNA, 120 bp, Artificial Sequence
  ENSG00000164199_11 (sequence is synthesized)
gaagatagaatatcaagatatgaagaaatcacagtggttagaaatggaggaacccatgggaatgtctctgcgaattgggtgttgacacggaacagcactgatccctcaccagtaacagca

SEQ ID NO: 509034 - DNA, 120 bp, Artificial Sequence
  ENSG00000164199_12 (sequence is synthesized)
gatatcagaccgagctctggagttctccattttgcacaagggcagatgttggcaacaattcctcttactgtggttgatgatgatcttccagaagaggcagaagcttatctacttcaaatt

SEQ ID NO: 509035 - DNA, 120 bp, Artificial Sequence
  ENSG00000164199_13 (sequence is synthesized)
ctgcctcatacaatacgaggaggtgcagaagtgagcgagccagcggagcttttgttctacattcaggatagtgatgatgtctatggcctaataacattttttcctatggaaaaccagaag

SEQ ID NO: 509036 - DNA, 120 bp, Artificial Sequence
  ENSG00000164199_14 (sequence is synthesized)
attgaaagcagcccaggtgaacgatacttatccttgagttttacaagactaggagggactaaaggagatgtgaggttgctttattctgtactttacattcctgctggagctgtggacccc

SEQ ID NO: 509037 - DNA, 120 bp, Artificial Sequence
  ENSG00000164199_15 (sequence is synthesized)
ttgcaagcaaaagaaggcatcttaaatatatcaaggagaaatgacctcatttttccagagcaaaaaactcaagtcactacaaaattaccaataagaaatgatgcattccttcaaaatgga

SEQ ID NO: 509038 - DNA, 120 bp, Artificial Sequence
  ENSG00000164199_16 (sequence is synthesized)
gctcactttctagtacagttggaaactgtggagttgttaaacataattcctctaatcccacccataagccctagatttggggaaatctgcaatatttctttactggttactccagccatt

SEQ ID NO: 509039 - DNA, 120 bp, Artificial Sequence
  ENSG00000164199_17 (sequence is synthesized)
gcaaatggagaaattggctttctcagcaatcttccaattattttgcatgaaccagaagattttgctgctgaagtggtatacattcccttacatcgggatggaactgatggccaggctact

SEQ ID NO: 509040 - DNA, 120 bp, Artificial Sequence
  ENSG00000164199_18 (sequence is synthesized)
gtctactggagtttgaagccctctggctttaattcaaaagcagtgaccccggatgatataggcccctttaatggctctgttttgtttttatctgggcaaagtgacacaacaatcaacatt

SEQ ID NO: 509041 - DNA, 120 bp, Artificial Sequence
  ENSG00000164199_19 (sequence is synthesized)
actatcaaaggtgatgacataccggaaatgaatgaaactgtaacactttctctagacagggttaacgtggaaaaccaagtgctgaaatctggatatactagccgtgacctaattattttg

SEQ ID NO: 509042 - DNA, 120 bp, Artificial Sequence
  ENSG00000164199_20 (sequence is synthesized)
gaaaatgatgaccctgggggagtttttgaattttctcctgcttccagaggaccctatgttataaaagaaggagaatctgtagagctccacatcatccgatcaagggggtcccttgttaag

SEQ ID NO: 509043 - DNA, 120 bp, Artificial Sequence
  ENSG00000164199_21 (sequence is synthesized)
cagtttctacactaccgagtagagccaagagatagcaatgaattctatggaaacacgggagtactagaatttaaacctggagaaagggagatagtgatcaccttgctagcaagattggat

SEQ ID NO: 509044 - DNA, 120 bp, Artificial Sequence
  ENSG00000164199_22 (sequence is synthesized)
gggataccagagttggatgaacactactgggtggtcctcagcagccacggagaacgggaaagcaagttgggaagtgccaccattgtcaatataacgattctgaaaaatgatgatcctcat

SEQ ID NO: 509045 - DNA, 120 bp, Artificial Sequence
  ENSG00000164199_23 (sequence is synthesized)
ggcattatagaatttgtttctgatggtctaattgtgatgataaatgaaagcaaaggagatgctatctatagtgctgtttatgatgtagtaagaaatcgaggcaactttggtgatgttagt

SEQ ID NO: 509046 - DNA, 120 bp, Artificial Sequence
  ENSG00000164199_24 (sequence is synthesized)
gtatcatgggtggttagtccagactttacacaagatgtatttcctgtacaagggactgttgtctttggagatcaggaattttcaaaaaatatcaccatttactcccttccagatgagatt

SEQ ID NO: 509047 - DNA, 120 bp, Artificial Sequence
  ENSG00000164199_25 (sequence is synthesized)
ccagaagaaatggaagaatttaccgttatcctactgaatggcactggaggagctaaagtgggaaatagaacaactgcaactctgaggattagaagaaatgatgaccccatttattttgca

SEQ ID NO: 509048 - DNA, 120 bp, Artificial Sequence
  ENSG00000164199_26 (sequence is synthesized)
gaacctcgtgtagtgagggttcaggaaggtgagactgccaactttacagttctcagaaatggatctgttgatgtgacttgcatggtccagtatgctaccaaggatgggaaggctactgca

SEQ ID NO: 509049 - DNA, 120 bp, Artificial Sequence
  ENSG00000164199_27 (sequence is synthesized)
agagagagagatttcattcctgttgaaaaaggagaaacgctcatttttgaggttggaagtagacagcagagcatatccatatttgttaatgaagatggtatcccggaaacagatgagccc

SEQ ID NO: 509050 - DNA, 120 bp, Artificial Sequence
  ENSG00000164199_28 (sequence is synthesized)
ttttatataatcctcttgaattcaacaggtgatacagtagtatatcaatatggagtagctacagtaataattgaagctaatgatgacccaaatggcattttttctctggagcccatagac

SEQ ID NO: 509051 - DNA, 120 bp, Artificial Sequence
  ENSG00000164199_29 (sequence is synthesized)
aaagcagtggaagaaggaaagactaatgcattttggattttgaggcaccgaggatactttggtagtgtttctgtatcttggcagctctttcagaatgattctgctttgcagcctgggcag

SEQ ID NO: 509052 - DNA, 120 bp, Artificial Sequence
  ENSG00000164199_30 (sequence is synthesized)
gagttctatgaaacttcaggaactgttaacttcatggatggagaagaagcaaaaccaatcattctccatgcttttccagataaaattcctgaattcaatgaattttatttcctaaaactt

SEQ ID NO: 509053 - DNA, 120 bp, Artificial Sequence
  ENSG00000164199_31 (sequence is synthesized)
gtaaacatttcaggtggatccccaggtcctgggggccagctagcagaaaccaacctccaggtgacagtaatggttccattcaatgatgatccctttggagtttttatcttggatccagag

SEQ ID NO: 509054 - DNA, 120 bp, Artificial Sequence
  ENSG00000164199_32 (sequence is synthesized)
tgtttagagagagaagtggcagaagatgtcctgtctgaagatgatatgtcttatattaccaacttcaccattttgaggcagcagggtgtgtttggtgatgtacaactgggctgggaaata

SEQ ID NO: 509055 - DNA, 120 bp, Artificial Sequence
  ENSG00000164199_33 (sequence is synthesized)
ctgtccagtgagttccctgctggtttgccaccaatgatagattttttactggttggaattttccccaccaccgtgcatttacaacagcacatgcggcgtcaccacagtggaacggatgct

SEQ ID NO: 509056 - DNA, 120 bp, Artificial Sequence
  ENSG00000164199_34 (sequence is synthesized)
ttgtactttaccggactagagggtgcatttgggactgttaatccaaaataccatccctccaggaataatacaattgccaactttacattctcagcttgggtaatgcccaatgccaatacg

SEQ ID NO: 509057 - DNA, 120 bp, Artificial Sequence
  ENSG00000164199_35 (sequence is synthesized)
aatggattcattatagcgaaggatgacggtaatggaagcatctactacggggtaaaaatacaaacaaacgaatcccatgtgacactttcccttcattataaaaccttgggttccaatgct

SEQ ID NO: 509058 - DNA, 120 bp, Artificial Sequence
  ENSG00000164199_36 (sequence is synthesized)
acatacattgccaagacaacagtcatgaaatatttagaagaaagtgtttggcttcatctactaattatcctggaggatggtataatcgaattctacctggatggaaatgcaatgcccagg

SEQ ID NO: 509059 - DNA, 120 bp, Artificial Sequence
  ENSG00000164199_37 (sequence is synthesized)
ggaatcaagagtctgaaaggagaagccattactgacggtcctgggatactgagaattggagcagggataaatggcaatgacagatttacaggtctgatgcaggatgtgaggtcctatgag

SEQ ID NO: 509060 - DNA, 120 bp, Artificial Sequence
  ENSG00000164199_38 (sequence is synthesized)
cggaaactgacgcttgaagaaatttatgaacttcatgccatgcccgcaaaaagtgatttacacccaatttctggatatctggagttcagacagggagaaactaacaaatcattcattatt

SEQ ID NO: 509061 - DNA, 120 bp, Artificial Sequence
  ENSG00000164199_39 (sequence is synthesized)
tctgcaagagatgacaatgacgaggaaggagaagaattattcattcttaaactagtttctgtatatggaggagctcgtatttcggaagaaaatactactgcaagattaacaatacaaaaa

SEQ ID NO: 509062 - DNA, 120 bp, Artificial Sequence
  ENSG00000164199_40 (sequence is synthesized)
agtgacaatgcaaatggcttgtttggtttcacaggagcttgtataccagagattgcagaggagggatcaaccatttcttgtgtggttgagagaaccagaggagctctggattatgtgcat

SEQ ID NO: 509063 - DNA, 120 bp, Artificial Sequence
  ENSG00000164199_41 (sequence is synthesized)
gttttttacaccatttcacagattgaaactgatggcattaattaccttgttgatgactttgctaatgccagtggaactattacattccttccttggcagagatcagaggttctgaatata

SEQ ID NO: 509064 - DNA, 120 bp, Artificial Sequence
  ENSG00000164199_42 (sequence is synthesized)
tatgttcttgatgatgatattcctgaacttaatgagtatttccgtgtgacattggtttctgcaattcctggagatgggaagctaggctcaactcctaccagtggtgcaagcatagatcct

SEQ ID NO: 509065 - DNA, 120 bp, Artificial Sequence
  ENSG00000164199_43 (sequence is synthesized)
gaaaaggaaacgactgatatcaccatcaaagctagtgatcatccatatggcttgctgcagttctccacagggctgcctcctcagcctaaggacgcaatgaccctgcctgcaagcagcgtt

SEQ ID NO: 509066 - DNA, 120 bp, Artificial Sequence
  ENSG00000164199_44 (sequence is synthesized)
ccacatatcactgtggaggaggaagatggagaaatcaggttattggtcatccgtgcacagggacttctgggaagggtgactgcggaatttagaacagtgtccttgacagcattcagtcct

SEQ ID NO: 509067 - DNA, 120 bp, Artificial Sequence
  ENSG00000164199_45 (sequence is synthesized)
gaggattaccagaatgttgctggcacattagaatttcaaccaggagaaagatataaatacattttcataaacatcactgataattctattcctgaactggaaaaatcttttaaagttgag

SEQ ID NO: 509068 - DNA, 120 bp, Artificial Sequence
  ENSG00000164199_46 (sequence is synthesized)
ttgttaaacttggaaggaggagtagctgaactctttagggttgatggaagtggtagtggtgatggggacatggaattcttccttccaactattcacaaacgtgccagtctaggagtggct

SEQ ID NO: 509069 - DNA, 120 bp, Artificial Sequence
  ENSG00000164199_47 (sequence is synthesized)
tcccaaattctagtgacaattgcagcctctgaccacgctcatggcgtatttgaatttagccctgagtcactctttgtcagtggaactgaaccagaagatgggtatagcactgttacatta

SEQ ID NO: 509070 - DNA, 120 bp, Artificial Sequence
  ENSG00000164199_48 (sequence is synthesized)
aatgttataagacatcatggaactctgtctccagtgactttgcattggaacatagactctgatcctgatggtgatctcgccttcacctctggcaacatcacatttgagattgggcagacg

SEQ ID NO: 509071 - DNA, 120 bp, Artificial Sequence
  ENSG00000164199_49 (sequence is synthesized)
agcgccaatatcactgtggagatattgcctgacgaagacccagaactggataaggcattctctgtgtcagtcctcagtgtttccagtggttctttgggagctcatattaatgccacgtta

SEQ ID NO: 509072 - DNA, 120 bp, Artificial Sequence
  ENSG00000164199_50 (sequence is synthesized)
acagttttggctagtgatgatccatatgggatattcattttttctgagaaaaacagacctgttaaagttgaggaagcaacccagaacatcacactatcaataataaggttgaaaggcctc

SEQ ID NO: 509073 - DNA, 120 bp, Artificial Sequence
  ENSG00000164199_51 (sequence is synthesized)
atgggaaaagtccttgtctcatatgcaacactagatgatatggaaaaaccaccttattttccacctaatttagcgagagcaactcaaggaagagactatataccagcttctggatttgct

SEQ ID NO: 509074 - DNA, 120 bp, Artificial Sequence
  ENSG00000164199_52 (sequence is synthesized)
ctttttggagctaatcagagtgaggcaacaatagctatttcaattttggatgatgatgagccagaaaggtccgaatctgtctttatcgaactactcaactctactttagtagcgaaagta

SEQ ID NO: 509075 - DNA, 120 bp, Artificial Sequence
  ENSG00000164199_53 (sequence is synthesized)
cagagtcgttcaattccaaattctccacgtcttgggcctaaggtagaaactattgcgcaactaattatcattgccaatgatgatgcatttggaactcttcagctctcagcaccaattgtc

SEQ ID NO: 509076 - DNA, 120 bp, Artificial Sequence
  ENSG00000164199_54 (sequence is synthesized)
cgagtggcagaaaatcatgttggacccattatcaatgtgactagaacaggaggagcatttgcagatgtctctgtgaagtttaaagctgtgccaataactgcaatagctggtgaagattat

SEQ ID NO: 509077 - DNA, 120 bp, Artificial Sequence
  ENSG00000164199_55 (sequence is synthesized)
agtatagcttcatcagatgtggtcttgctagaaggggaaaccagtaaagccgtgccaatatatgtcattaatgatatctatcctgaactggaagaatcttttcttgtgcaactgatgaat

SEQ ID NO: 509078 - DNA, 120 bp, Artificial Sequence
  ENSG00000164199_56 (sequence is synthesized)
gaaacaacaggaggagccagactaggggctttaacagaggcagtcattattattgaggcctctgatgacccctatggattatttggttttcagattactaaacttattgtagaggaacct

SEQ ID NO: 509079 - DNA, 120 bp, Artificial Sequence
  ENSG00000164199_57 (sequence is synthesized)
gagtttaactcagtgaaggtaaacctgccaataattcgaaattctgggacactcggcaatgttactgttcagtgggttgccaccattaatggacagcttgctactggcgacctgcgagtt

SEQ ID NO: 509080 - DNA, 120 bp, Artificial Sequence
  ENSG00000164199_58 (sequence is synthesized)
gtctcaggtaatgtgacctttgcccctggggaaaccattcaaaccttgttgttagaggtcctggctgacgacgttccggagattgaagaggttatccaagtgcaactaactgatgcctct

SEQ ID NO: 509081 - DNA, 120 bp, Artificial Sequence
  ENSG00000164199_59 (sequence is synthesized)
ggtggaggtactattgggttagatcgaattgcaaatattattattcctgccaatgatgatccttatggtacagtagcctttgctcagatggtttatcgtgttcaagagcctctggaaaga

SEQ ID NO: 509082 - DNA, 120 bp, Artificial Sequence
  ENSG00000164199_60 (sequence is synthesized)
agttcctgtgctaatataactgtcaggcgaagcggagggcactttggtcggctgttgttgttctacagtacttccgacattgatgtagtggctctggcaatggaggaaggtcaagattta

SEQ ID NO: 509083 - DNA, 120 bp, Artificial Sequence
  ENSG00000164199_61 (sequence is synthesized)
ctgtcctactatgaatctccaattcaaggggtgcctgacccactttggagaacttggatgaatgtctctgccgtgggggagcccctgtatacctgtgccactttgtgccttaaggaacaa

SEQ ID NO: 509084 - DNA, 120 bp, Artificial Sequence
  ENSG00000164199_62 (sequence is synthesized)
gcttgctcagcgttttcatttttcagtgcttctgagggtccccagtgtttctggatgacatcatggatcagcccagctgtcaacaattcagacttctggacctacaggaaaaacatgacc

SEQ ID NO: 509085 - DNA, 120 bp, Artificial Sequence
  ENSG00000164199_63 (sequence is synthesized)
agggtagcatctctttttagtggtcaggctgtggctgggagtgactatgagcctgtgacaaggcaatgggccataatgcaggaaggtgatgaattcgcaaatctcacagtgtctattctt

SEQ ID NO: 509086 - DNA, 120 bp, Artificial Sequence
  ENSG00000164199_64 (sequence is synthesized)
cctgatgatttcccagagatggatgagagttttctaatttctctccttgaagttcacctcatgaacatttcagccagtttgaaaaatcagccaaccataggacagccaaatatttctaca

SEQ ID NO: 509087 - DNA, 120 bp, Artificial Sequence
  ENSG00000164199_65 (sequence is synthesized)
gttgtcatagcactaaatggtgatgcctttggagtgtttgtgatctacaatattagtcccaatacttccgaagatggcttatttgttgaagttcaggagcagccccaaaccttggtggag

SEQ ID NO: 509088 - DNA, 120 bp, Artificial Sequence
  ENSG00000164199_66 (sequence is synthesized)
ctgatgatacacaggacagggggcagcttaggtcaagtggcagtcgaatggcgtgttgttggtggaacagctactgaaggtttagattttataggtgctggagagattctgacctttgct

SEQ ID NO: 509089 - DNA, 120 bp, Artificial Sequence
  ENSG00000164199_67 (sequence is synthesized)
gaaggtgaaaccaaaaagacagtcattttaaccatcttggatgactctgaaccagaggatgacgaaagtatcatagttagtttggtgtacactgaaggtggaagtagaattttgccaagc

SEQ ID NO: 509090 - DNA, 120 bp, Artificial Sequence
  ENSG00000164199_68 (sequence is synthesized)
tccgacactgttagagtgaacattttggccaatgacaatgtggcaggaattgttagctttcagacagcttccagatctgtcataggtcatgaaggagaaattttacaattccatgtgata

SEQ ID NO: 509091 - DNA, 120 bp, Artificial Sequence
  ENSG00000164199_69 (sequence is synthesized)
agaactttccctggtcgaggaaatgttactgttaactggaaaattattgggcaaaatctagaactcaattttgctaactttagcggacaacttttctttcctgaggggtcgttgaataca

SEQ ID NO: 509092 - DNA, 120 bp, Artificial Sequence
  ENSG00000164199_70 (sequence is synthesized)
acattgtttgtgcatttgttggatgacaacattcctgaggagaaagaagtataccaagtcattctgtatgatgtcaggacacaaggagttccaccagccggaatcgccctgcttgatgct

SEQ ID NO: 509093 - DNA, 120 bp, Artificial Sequence
  ENSG00000164199_71 (sequence is synthesized)
caaggatatgcagctgtcctcacagtagaagccagtgatgaaccacatggagttttaaattttgctctttcatcaagatttgtgttactacaagaggctaacataacaattcagcttttc

SEQ ID NO: 509094 - DNA, 120 bp, Artificial Sequence
  ENSG00000164199_72 (sequence is synthesized)
atcaacagagaatttggatctctaggagctatcaatgtcacatataccacggttcctggaatgctgagtctgaagaaccaaacagtaggaaacctagcagagccagaagttgattttgtc

SEQ ID NO: 509095 - DNA, 120 bp, Artificial Sequence
  ENSG00000164199_73 (sequence is synthesized)
cctatcattggctttctgattttagaagaaggggaaacagcagcagccatcaacattaccattcttgaggatgatgtaccagagctagaagaatatttcctggtgaatttaacttacgtt

SEQ ID NO: 509096 - DNA, 120 bp, Artificial Sequence
  ENSG00000164199_74 (sequence is synthesized)
ggacttaccatggctgcttcaacttcatttcctcccagactagattcagaaggtttgactgcacaagttattattgatgccaatgatggggcccgaggtgtaattgaatggcaacaaagc

SEQ ID NO: 509097 - DNA, 120 bp, Artificial Sequence
  ENSG00000164199_75 (sequence is synthesized)
aggtttgaagtaaatgaaacccatggaagtttaacattggtagcccagaggagcagagaacctcttggccatgtttccttatttgtgtatgctcagaatttggaagcacaagtggggctg

SEQ ID NO: 509098 - DNA, 120 bp, Artificial Sequence
  ENSG00000164199_76 (sequence is synthesized)
gattatatcttcaccccaatgattcttcattttgctgatggagaaaggtataaaaatgtcaatatcatgattcttgatgatgacattccagaaggagatgaaaaatttcagctgatttta

SEQ ID NO: 509099 - DNA, 120 bp, Artificial Sequence
  ENSG00000164199_77 (sequence is synthesized)
acaaatccttctcctggactagagctagggaaaaatacaatagccttaattattgtccttgctaatgatgacggccctggagttctatcatttaacaacagtgagcactttttcctaaga

SEQ ID NO: 509100 - DNA, 120 bp, Artificial Sequence
  ENSG00000164199_78 (sequence is synthesized)
gagccaacagctctctacgtccaggagagtgttgcagtattgtacattgttcgggaacctgcacaaggattgtttggaacagtgacagttcagttcattgtgacagaagtgaattcctca

SEQ ID NO: 509101 - DNA, 120 bp, Artificial Sequence
  ENSG00000164199_79 (sequence is synthesized)
aatgaatctaaagatctgactccttccaaaggctatattgttttagaagaaggtgttcgattcaaggccctacaaatatctgccatattagacacggaaccagaaatggatgagtatttt

SEQ ID NO: 509102 - DNA, 120 bp, Artificial Sequence
  ENSG00000164199_80 (sequence is synthesized)
gtttgcaccttgtttaatccaactggaggtgctagactaggggtgcatgttcaaaccctgataacagttttgcaaaaccaggcccctttggggctattcagtatctctgcagttgaaaat

SEQ ID NO: 509103 - DNA, 120 bp, Artificial Sequence
  ENSG00000164199_81 (sequence is synthesized)
tttggcatgaggggaatggatgttgtgttttccgtatttcaaagttttttggatgaatcagcttctggctggtgtttctttactttggaaaatttaatatatggtataatgttaagaaaa

SEQ ID NO: 509104 - DNA, 120 bp, Artificial Sequence
  ENSG00000164199_82 (sequence is synthesized)
tcatctgttactgtttaccgatggcaggggatttttattccagttgaggatttaaatatagaaaatcctaaaacttgtgaggcctttaatattggtttttctccctactttgtgattact

SEQ ID NO: 509105 - DNA, 120 bp, Artificial Sequence
  ENSG00000164199_83 (sequence is synthesized)
catgaagaaagaaatgaagaaaagccttctcttaacagtgtgtttacattcacatctggatttaaattattcctggtacaaacaatcattattctggaaagttctcaagtaagatatttt

SEQ ID NO: 509106 - DNA, 120 bp, Artificial Sequence
  ENSG00000164199_84 (sequence is synthesized)
acttcagacagccaagattatttaatcattgcaagtcaaagagatgattccgaattaactcaggtcttcaggtggaatggaggaagcttcgtgttgcatcaaaaactccctgtccgaggt

SEQ ID NO: 509107 - DNA, 120 bp, Artificial Sequence
  ENSG00000164199_85 (sequence is synthesized)
gtgctgaccgtggccttgttcaacaagggaggctctgtgttcttagccatttcccaggctaatgccaggctaaactcccttttattcagatggtctggcagtgggtttattaactttcaa

SEQ ID NO: 509108 - DNA, 120 bp, Artificial Sequence
  ENSG00000164199_86 (sequence is synthesized)
gaggtgcctgtcagtgggacaacagaagttgaggctttgtcttcagccaatgatatttacctaatatttgccgaaaatgtctttctaggagatcagaattcaattgatattttcatctgg

SEQ ID NO: 509109 - DNA, 120 bp, Artificial Sequence
  ENSG00000164199_87 (sequence is synthesized)
gagatgggacagtcttccttcaggtattttcagtctgtagattttgctgctgttaacagaatccactccttcacaccagcctcaggaatagcccacatacttcttattggccaagatatg

SEQ ID NO: 509110 - DNA, 120 bp, Artificial Sequence
  ENSG00000164199_88 (sequence is synthesized)
tctgctctttactgctggaattcggagcgtaatcaattctcttttgttctggaagtaccttctgcttatgatgtggcttctgttacagtaaagtcccttaattcaagcaagaatttaata

SEQ ID NO: 509111 - DNA, 120 bp, Artificial Sequence
  ENSG00000164199_89 (sequence is synthesized)
gctctagtgggagctcattcacatatatatgagctagcctacatttccagccattctgactttattcctagttcaggtgaactgatatttgaacctggtgagagagaagctacaatagca

SEQ ID NO: 509112 - DNA, 120 bp, Artificial Sequence
  ENSG00000164199_90 (sequence is synthesized)
gtaaatatccttgatgatacagttccagaaaaagaagaatccttcaaagttcaacttaaaaatcccaaaggaggagcagagattggcattaatgattctgtaacaataaccattctgtct

SEQ ID NO: 509113 - DNA, 120 bp, Artificial Sequence
  ENSG00000164199_91 (sequence is synthesized)
aatgatgatgcctatggaattgttgcatttgctcagaattcattatataagcaagtggaagaaatggagcaagatagcctagtaaccttgaacgttgaacgcttaaaaggaacatatggc

SEQ ID NO: 509114 - DNA, 120 bp, Artificial Sequence
  ENSG00000164199_92 (sequence is synthesized)
cgtataaccatagcatgggaagctgatggaagtattagtgatatatttcctacctcaggagtgattttatttactgaaggccaggtactgtcaacaatcactctaactattcttgctgat

SEQ ID NO: 509115 - DNA, 120 bp, Artificial Sequence
  ENSG00000164199_93 (sequence is synthesized)
aatataccagagttatcagaggttgtgattgtaaccctcacccgtatcaccacagaaggggttgaggactcatacaaaggtgctactattgatcaggacagaagcaagtctgttataaca

SEQ ID NO: 509116 - DNA, 120 bp, Artificial Sequence
  ENSG00000164199_94 (sequence is synthesized)
actttgcccaatgactcaccttttggcttggtgggctggcgtgctgcgtctgtcttcattagagtagcagagcctaaagaaaacaccaccactcttcagttacaaatagctcgagataaa

SEQ ID NO: 509117 - DNA, 120 bp, Artificial Sequence
  ENSG00000164199_95 (sequence is synthesized)
ggactacttggggatattgccattcacttgagagctcaacccaatttcttactgcatgtcgataatcaagctactgagaatgaagattatgtattgcaagaaacaataataataatgaaa

SEQ ID NO: 509118 - DNA, 120 bp, Artificial Sequence
  ENSG00000164199_96 (sequence is synthesized)
gaaaacataaaagaagctcatgccgaagtttccattttgccggatgaccttcctgaattggaggaaggatttattgtcactatcactgaggtgaacctggtgaactctgacttctctaca

SEQ ID NO: 509119 - DNA, 120 bp, Artificial Sequence
  ENSG00000164199_97 (sequence is synthesized)
ggacagccaagtgtgcggaggcccggaatggaaatagctgagataatgatagaagaaaatgacgatcccagaggaatttttatgtttcatgttactagaggcgctggggaagttattact

SEQ ID NO: 509120 - DNA, 120 bp, Artificial Sequence
  ENSG00000164199_98 (sequence is synthesized)
gcctatgaggtgcctccacccttgaacgttcttcaagttcctgtagtccggctggctggaagctttggggcagtaaatgtttattggaaagcatcaccagacagtgctggcctggaagac

SEQ ID NO: 509121 - DNA, 120 bp, Artificial Sequence
  ENSG00000164199_99 (sequence is synthesized)
tttaaaccatctcatgggattcttgaatttgcagataaacaggttactgcaatgatagaaatcaccataattgatgatgctgaatttgaattgacagagacgttcaatatttccttgatc

SEQ ID NO: 509122 - DNA, 120 bp, Artificial Sequence
  ENSG00000164199_100 (sequence is synthesized)
agtgttgctggaggtggcagacttggtgatgatgttgtggtaactgttgttattccacaaaatgattctccatttggagtatttggatttgaagaaaagactgtaatgattgatgaatcc

SEQ ID NO: 509123 - DNA, 120 bp, Artificial Sequence
  ENSG00000164199_101 (sequence is synthesized)
ctttcatccgatgaccctgattcatatgtgacattgacggttgtccggtccccaggaggaaaaggaaccgtccgacttgagtggaccatagatgagaaggctaaacataaccttagtcct

SEQ ID NO: 509124 - DNA, 120 bp, Artificial Sequence
  ENSG00000164199_102 (sequence is synthesized)
ttgaatgggacccttcattttgatgagactgagtcccagaagaccattgtgttgcacacacttcaagacacagtgttggaggaggacaggcgtttcaccattcagctgatatcaattgat

SEQ ID NO: 509125 - DNA, 120 bp, Artificial Sequence
  ENSG00000164199_103 (sequence is synthesized)
gaggtagaaatatctccagtaaaaggtagtgcatcaataattattcggggtgataagcgagcatcaggagaagttgggatagctccgtcatctaggcacatcctcattggggaaccctca

SEQ ID NO: 509126 - DNA, 120 bp, Artificial Sequence
  ENSG00000164199_104 (sequence is synthesized)
gcaaaatataatggtaccgctattatcagccttgttcgaggcccagggattttgggggaggtcacagtgttctggaggatattccctccttccgtgggggaatttgctgaaacatcagga

SEQ ID NO: 509127 - DNA, 120 bp, Artificial Sequence
  ENSG00000164199_105 (sequence is synthesized)
aaactgacaatgcgagacgaacagtctgcagtcattgtagtaatacaggctttgaacgatgacattcccgaggaaaaaagcttctatgagtttcagctcactgcagtcagtgagggagga

SEQ ID NO: 509128 - DNA, 120 bp, Artificial Sequence
  ENSG00000164199_106 (sequence is synthesized)
gttctgagtgaatccagcagcactgccaacatcacggtggtggccagcgactctccctatggccgatttgccttttcacatgagcaacttcgagtgtcagaagcacagagggttaacatc

SEQ ID NO: 509129 - DNA, 120 bp, Artificial Sequence
  ENSG00000164199_107 (sequence is synthesized)
acaatcatccgttccagtggagattttggccatgtgcgactctggtacaagacgatgagcgggacagcggaagcaggcttggattttgttcctgcagcaggggagctcctctttgaagca

SEQ ID NO: 509130 - DNA, 120 bp, Artificial Sequence
  ENSG00000164199_108 (sequence is synthesized)
ggggagatgaggaaaagtctgcatgttgaaatccttgatgatgactatcctgaaggcccagaggaattttctctaacaattacaaaggtggaactccagggaagagggtatgattttacc

SEQ ID NO: 509131 - DNA, 120 bp, Artificial Sequence
  ENSG00000164199_109 (sequence is synthesized)
attcaagaaaatggacttcagatagatcaacctcctgaaataggaaacatctccattgttcgcatcataataatgaaaaatgataacgcagaaggcatcattgaatttgacccaaagtat

SEQ ID NO: 509132 - DNA, 120 bp, Artificial Sequence
  ENSG00000164199_110 (sequence is synthesized)
actgccttcgaagtggaggaagatgttgggctgatcatgatcccagtggtgaggctacatggaacttatggctatgtgacagctgatttcatctctcagagctcctctgccagtcccgga

SEQ ID NO: 509133 - DNA, 120 bp, Artificial Sequence
  ENSG00000164199_111 (sequence is synthesized)
ggtgttgattacattttgcatggcagtacagtcacctttcagcatgggcaaaacttaagttttataaatatctccatcattgatgacaatgaaagtgaatttgaggagcccattgaaatt

SEQ ID NO: 509134 - DNA, 120 bp, Artificial Sequence
  ENSG00000164199_112 (sequence is synthesized)
ctactcactggagctactggaggagcggtccttgggcgccacctagtgagcagaatcataatagctaagagtgactctccctttggagttataaggtttctcaatcaaagcaaaatttct

SEQ ID NO: 509135 - DNA, 120 bp, Artificial Sequence
  ENSG00000164199_113 (sequence is synthesized)
attgctaatcccaattccacaatgattttatcactggtgctggagcggactggaggactcttgggagagattcaggtgaactgggagacagtaggacccaactctcaagaagccttactg

SEQ ID NO: 509136 - DNA, 80 bp, Artificial Sequence
  ENSG00000164199_114 (sequence is synthesized)
tctgacaatctatcctcatgaagaaattgaagttgaagagacattcattattaaacttcatcttgtgaaaggagaagcta

SEQ ID NO: 509137 - DNA, 120 bp, Artificial Sequence
  ENSG00000164199_115 (sequence is synthesized)
acattcattattaaacttcatcttgtgaaaggagaagctaaattagactccagagctaaagatgttacattaaccatacaagagtttggtgacccaaatggagttgttcagtttgctcct

SEQ ID NO: 509138 - DNA, 120 bp, Artificial Sequence
  ENSG00000164199_116 (sequence is synthesized)
gaaactttgtctaagaagacttattcagagcctctggctctggaagggcccctgctcattaccttctttgtcagaagagtcaagggcacctttggagagattatggtttactgggaatta

SEQ ID NO: 509139 - DNA, 120 bp, Artificial Sequence
  ENSG00000164199_117 (sequence is synthesized)
agtagtgagtttgacattactgaagactttctttccaccagtggatttttcaccattgctgatggagagagtgaagctagctttgatgttcatttgctaccagatgaggtacctgagata

SEQ ID NO: 509140 - DNA, 120 bp, Artificial Sequence
  ENSG00000164199_118 (sequence is synthesized)
gaggaagattatgtgatccagcttgtttctgtagagggaggagccgaactggatctggagaagagtatcacatggttctctgtttatgcaaatgatgacccacatggagtatttgccctg

SEQ ID NO: 509141 - DNA, 120 bp, Artificial Sequence
  ENSG00000164199_119 (sequence is synthesized)
tattcggatcgccagtcaatacttattgggcagaaccttattagatccatccaaattaacataacccggcttgctggaacatttggagatgtggctgttgggcttcgaatatcatcggat

SEQ ID NO: 509142 - DNA, 120 bp, Artificial Sequence
  ENSG00000164199_120 (sequence is synthesized)
cataaagaacagccgattgttaccgaaaatgcagagaggcagctggtggtcaaagatggtgccacatataaagtggacgtggtgccaataaagaatcaggtcttcctatcactgggctct

SEQ ID NO: 509143 - DNA, 120 bp, Artificial Sequence
  ENSG00000164199_121 (sequence is synthesized)
aatttcactttgcaactggtgactgtgatgcttgtcggtggacgtttctatggaatgccaacaattcttcaggaagcaaaatctgctgtccttccagtctctgagaaagctgccaattct

SEQ ID NO: 509144 - DNA, 120 bp, Artificial Sequence
  ENSG00000164199_122 (sequence is synthesized)
caggtcggatttgaatccactgcttttcaactcatgaacatcactgctggcacaagccacgttatgatttctaggagaggcacatatggagctctctcggttgcctggaccactggatat

SEQ ID NO: 509145 - DNA, 120 bp, Artificial Sequence
  ENSG00000164199_123 (sequence is synthesized)
gctcctgggttagaaattcctgaattcattgttgttggcaacatgaccccaacactggggagcctttcattttcccacggtgaacaaaggaaaggagttttcctgtggacgtttcctagc

SEQ ID NO: 509146 - DNA, 120 bp, Artificial Sequence
  ENSG00000164199_124 (sequence is synthesized)
cctggttggccagaggcctttgttcttcacctatcaggagtgcagagcagtgctcctggcggagctcaactccgatcaggtttcattgttgctgaaattgaaccaatgggcgtcttccaa

SEQ ID NO: 509147 - DNA, 120 bp, Artificial Sequence
  ENSG00000164199_125 (sequence is synthesized)
ttttccactagctcaagaaatatcatagtgtcagaagatacacagatgatcagattacatgtacaaagactatttgggttccacagcgatcttattaaagtttcttatcagaccactgca

SEQ ID NO: 509148 - DNA, 120 bp, Artificial Sequence
  ENSG00000164199_126 (sequence is synthesized)
ggaagcgccaagccactggaagattttgagcctgttcagaatggggaactgttttttcaaaaattccaaactgaggttgattttgaaataaccattattaatgatcagctttctgagata

SEQ ID NO: 509149 - DNA, 120 bp, Artificial Sequence
  ENSG00000164199_127 (sequence is synthesized)
gaagaatttttttacattaaccttacttcagtagaaattaggggattacaaaagtttgatgttaattggagcccacgcctgaatctagatttcagtgttgcagtgattacaatattggat

SEQ ID NO: 509150 - DNA, 120 bp, Artificial Sequence
  ENSG00000164199_128 (sequence is synthesized)
aatgatgacctggcaggaatggatatttccttccccgagacaactgtggctgtagcagttgacacaactctcattcctgtagaaactgaatccaccacatacctcagcacaagcaagacg

SEQ ID NO: 509151 - DNA, 120 bp, Artificial Sequence
  ENSG00000164199_129 (sequence is synthesized)
actaccattctgcagccaaccaacgtggttgccattgttactgaggcaactggtgtatctgccatccctgagaaacttgtcacccttcatggcacacctgctgtgtctgaaaagcctgat

SEQ ID NO: 509152 - DNA, 120 bp, Artificial Sequence
  ENSG00000164199_130 (sequence is synthesized)
gtggccactgtaactgccaatgtttccattcatggaacattcagccttgggccatccattgtttatattgaagaggagatgaagaatggcacattcaacactgcagaagttcttatccga

SEQ ID NO: 509153 - DNA, 120 bp, Artificial Sequence
  ENSG00000164199_131 (sequence is synthesized)
agaactggtgggtttactggcaatgtcagcataacagttaaaactttcggtgaaagatgtgctcagatggaaccaaatgcattgccctttcgtggtatctatgggatttccaacctaaca

SEQ ID NO: 509154 - DNA, 120 bp, Artificial Sequence
  ENSG00000164199_132 (sequence is synthesized)
tgggcagttgaagaagaagactttgaagaacaaactcttacccttatattcctagatggagaaagagaacgtaaagtatcagttcaaattttggatgatgatgagcctgaggggcaggaa

SEQ ID NO: 509155 - DNA, 120 bp, Artificial Sequence
  ENSG00000164199_133 (sequence is synthesized)
ttcttctacgtgtttctcacaaaccctcaagggggagcacagattgtggaggagaaggatgatactggatttgcagcttttgccatggttattattacagggagtgaccttcacaatggc

SEQ ID NO: 509156 - DNA, 120 bp, Artificial Sequence
  ENSG00000164199_134 (sequence is synthesized)
atcataggattcagtgaggagtcccagagtggactagaactcagggaaggagctgttatgagaagattgcaccttattgtcacaagacagccaaacagggcctttgaagatgtcaaggtc

SEQ ID NO: 509157 - DNA, 120 bp, Artificial Sequence
  ENSG00000164199_135 (sequence is synthesized)
ttttggcgagtcacacttaacaaaacagtcgtcgtgctccagaaggatggggtaaacctggtggaggaacttcagtctgtgtcagggaccacaacctgtacaatgggtcaaacaaaatgc

SEQ ID NO: 509158 - DNA, 120 bp, Artificial Sequence
  ENSG00000164199_136 (sequence is synthesized)
tttatcagcattgaactcaaaccagaaaaggtaccacaggttgaagtgtatttttttgtggaactatatgaagctactgctggagcagcaataaacaacagtgccagattcgcacagatt

SEQ ID NO: 509159 - DNA, 120 bp, Artificial Sequence
  ENSG00000164199_137 (sequence is synthesized)
aaaatcttagaaagtgatgaatctcaaagccttgtgtatttttctgtgggttctcggctggcagtggctcacaagaaggccactttaatcagtctgcaggtggccagagattctgggaca

SEQ ID NO: 509160 - DNA, 120 bp, Artificial Sequence
  ENSG00000164199_138 (sequence is synthesized)
ggactaatgatgtctgttaactttagtacccaggagttgaggagtgctgaaacaattggtcgtaccatcatatctccagctatttctggaaaggattttgtgataactgaaggcacattg

SEQ ID NO: 509161 - DNA, 120 bp, Artificial Sequence
  ENSG00000164199_139 (sequence is synthesized)
gtctttgaacctggccagagaagcactgtattggatgtcatcctaacgccagagacaggatctttaaattcatttcctaaacgcttccagattgtcctttttgacccaaaaggtggtgcc

SEQ ID NO: 509162 - DNA, 120 bp, Artificial Sequence
  ENSG00000164199_140 (sequence is synthesized)
agaattgataaagtgtatgggactgccaacatcactcttgtctcagatgcagattcgcaggccatttgggggcttgcagatcagctacatcagcctgtgaatgatgatattctcaacaga

SEQ ID NO: 509163 - DNA, 120 bp, Artificial Sequence
  ENSG00000164199_141 (sequence is synthesized)
gtgctccataccatcagcatgaaagtggccacagaaaacacagatgaacaactcagtgccatgatgcatttaatagaaaagataactactgaaggaaaaattcaagctttcagtgttgcc

SEQ ID NO: 509164 - DNA, 120 bp, Artificial Sequence
  ENSG00000164199_142 (sequence is synthesized)
agccgaactcttttctatgagattctttgttctcttattaacccaaagcgcaaggacactaggggattcagtcactttgctgaagtgactgagaattttgccttttctctgctgactaat

SEQ ID NO: 509165 - DNA, 120 bp, Artificial Sequence
  ENSG00000164199_143 (sequence is synthesized)
gttacttgcggctctcctggtgaaaaaagcaaaaccatccttgatagttgcccatatttgtcaatattggctcttcactggtatcctcagcaaatcaatggacacaagtttgaaggaaag

SEQ ID NO: 509166 - DNA, 120 bp, Artificial Sequence
  ENSG00000164199_144 (sequence is synthesized)
gaaggagattacattcgaattccagagaggctactggatgtccaggatgcagaaataatggctgggaaaagtacatgtaaattagtccagtttacagagtatagcagccaacagtggttt

SEQ ID NO: 509167 - DNA, 120 bp, Artificial Sequence
  ENSG00000164199_145 (sequence is synthesized)
ataagtggaaacaatcttcctaccctaaaaaataaggtattatctttgagtgtgaaaggtcagagttcacaactcctgactaatgacaatgaggttctctacaggatttatgctgctgag

SEQ ID NO: 509168 - DNA, 120 bp, Artificial Sequence
  ENSG00000164199_146 (sequence is synthesized)
cctagaattattcctcagacatctctgtgtctcctttggaatcaggctgctgcaagctggttgtctgacagtcagttttgcaaagtggttgaggaaactgcagactatgtggaatgtgcc

SEQ ID NO: 509169 - DNA, 120 bp, Artificial Sequence
  ENSG00000164199_147 (sequence is synthesized)
tgttcacacatgtctgtgtatgctgtctatgctcggactgacaacttgtcttcatacaatgaagccttcttcacttctggatttatatgtatctcaggtctttgcttggctgttctttcc

SEQ ID NO: 509170 - DNA, 120 bp, Artificial Sequence
  ENSG00000164199_148 (sequence is synthesized)
catatcttctgtgccaggtactccatgtttgcagctaaacttctgactcacatgatggcagccagcttaggtacacagattctgtttctggcgtctgcatacgcaagtccccaactcgct

SEQ ID NO: 509171 - DNA, 120 bp, Artificial Sequence
  ENSG00000164199_149 (sequence is synthesized)
gaggagagctgttcagctatggctgctgtcacacattacctgtatctttgccagtttagctggatgctcattcagtctgtgaatttctggtacgtgctggtgatgaatgatgagcacaca

SEQ ID NO: 509172 - DNA, 120 bp, Artificial Sequence
  ENSG00000164199_150 (sequence is synthesized)
gagaggcgatatctgctgtttttccttctgagttggggactaccagcttttgtggtgattctcctcatagttattttgaaaggaatctatcatcagagcatgtcacagatctatggactc

SEQ ID NO: 509173 - DNA, 120 bp, Artificial Sequence
  ENSG00000164199_151 (sequence is synthesized)
attcatggtgacctgtgttttattccaaacgtctatgctgctttgttcactgcagctcttgttcctttgacgtgcctcgtggtggtgttcgtggtgttcatccatgcctaccaggtgaag

SEQ ID NO: 509174 - DNA, 120 bp, Artificial Sequence
  ENSG00000164199_152 (sequence is synthesized)
ccacagtggaaagcatatgatgatgtcttcagaggaaggacaaatgctgcagaaattccactgattttatatctctttgctctgatttccgtgacatggctttggggaggactacacatg

SEQ ID NO: 509175 - DNA, 120 bp, Artificial Sequence
  ENSG00000164199_153 (sequence is synthesized)
gcctacagacacttctggatgttggttctctttgtcattttcaacagtctgcagggactttatgttttcatggtttatttcattttacacaaccaaatgtgttgccctatgaaggccagt

SEQ ID NO: 509176 - DNA, 120 bp, Artificial Sequence
  ENSG00000164199_154 (sequence is synthesized)
tacactgtggaaatgaatgggcatcctggacccagcacagcctttttcacgcccgggagtggaatgcctcctgctggaggggaaatcagcaagtccacccagaatctcatcggtgctatg

SEQ ID NO: 509177 - DNA, 120 bp, Artificial Sequence
  ENSG00000164199_155 (sequence is synthesized)
gaggaggtgccacctgactgggagagagcatccttccaacagggcagtcaggccagccctgatttaaagccaagtccacaaaatggagccacgttcccgtcctctggaggatatggccag

SEQ ID NO: 509178 - DNA, 120 bp, Artificial Sequence
  ENSG00000164199_156 (sequence is synthesized)
gggtcactgatagccgatgaggagtcccaggagtttgatgatttaatatttgcattaaaaactggtgctggtctcagtgtcagtgataatgaatctggtcaaggcagccaggaggggggc

SEQ ID NO: 509179 - DNA, 120 bp, Artificial Sequence
  ENSG00000164199_157 (sequence is synthesized)
accttgactgactcccagatcgtggagctcaggaggatacccatcgccgacactcacctgtagcacctcactaaccattcgactgagcacactttcatatttgtatcagcttttgtgcta

SEQ ID NO: 509180 - DNA, 120 bp, Artificial Sequence
  ENSG00000164199_158 (sequence is synthesized)
aaactctctaagtacatccacctgtgtaataggaacctgtgaattgtactggatgattaatacaaacgtgattgttgtatttggagtataaattactgattgtatgtgacctgaaaattc

SEQ ID NO: 509181 - DNA, 120 bp, Artificial Sequence
  ENSG00000164199_159 (sequence is synthesized)
actgctataagaaaggtggagtcagtttgtatcagttaataggatgttcatattccaaggatattagttgtttttttaatcatcctatatggctaacattgtttaatgaaagtaataatc

SEQ ID NO: 509182 - DNA, 120 bp, Artificial Sequence
  ENSG00000164199_160 (sequence is synthesized)
aataaagcaatagaatctatttggtatcatccagcttcattattgataaagaaacattgtgcatgggcaaaaaaagctaactctatatgtagatgatgacaagcaccctgtgccatcttg

SEQ ID NO: 509183 - DNA, 120 bp, Artificial Sequence
  ENSG00000164199_161 (sequence is synthesized)
catgaatccaggtgatccagattcaagacttcactgcaactagaagactttaattctgaaaactgtaaaatggtctgtctgttgatgatcctgcacataaatgttgattggagtactgaa

SEQ ID NO: 509184 - DNA, 120 bp, Artificial Sequence
  ENSG00000164199_162 (sequence is synthesized)
aaatcacaaggttgtcttagatgtgaaccatctaccttgctgtgcatgttgagtcccatatctatgccttcaagggcccagtgaaaactcaagagcttataagatgcacagaaagagtgg

SEQ ID NO: 509185 - DNA, 120 bp, Artificial Sequence
  ENSG00000164199_163 (sequence is synthesized)
tatacattgtttgcaaagtaaatgaaacaggttaacttcctggatgcttacttttagcagaaatatatcagatagcaaacttgctgacagatgaatcacagctttgcccacctgtaatga

SEQ ID NO: 509186 - DNA, 120 bp, Artificial Sequence
  ENSG00000164199_164 (sequence is synthesized)
aaccaacaagagatcacctgcagattggagactgaagaagctggtggtgtatttcaaaagcctgagaggcagaggtgaatggtgtagatttcagttttagttcgaaagcctgaaaaccgg

SEQ ID NO: 509187 - DNA, 120 bp, Artificial Sequence
  ENSG00000164199_165 (sequence is synthesized)
gaatgctaagggcagaagaaggaatgttccagctcaagcagtcaagcagaagaaagaacttcaaacctacaaaggaagaaatagaatgagacaagatgagaagcagcaagaaattccact

SEQ ID NO: 509188 - DNA, 120 bp, Artificial Sequence
  ENSG00000164199_166 (sequence is synthesized)
ccctcgaaaatgtttagtaactactggataatacatttgcagattataataagtatattactatttggatggagataatagatttttgtgtagaaagtaacagacacttatttaatactt

SEQ ID NO: 509189 - DNA, 120 bp, Artificial Sequence
  ENSG00000164199_167 (sequence is synthesized)
acaaagttctaggaaatgtttccagtggtgtgcatatacacctgcacacccatggacatgtgtatgcacacgcacacacactgatacttgtcaaaggggagaaatttataggcttctttg

SEQ ID NO: 509190 - DNA, 120 bp, Artificial Sequence
  ENSG00000164199_168 (sequence is synthesized)
tgcttctagcaaagagtagtgcaatgaaatagattacatgaagaggatttgtgaatacagagactggtaactgcttctctttttgaaaagttgaaatgtaggaaattggctatgatattc

SEQ ID NO: 509191 - DNA, 120 bp, Artificial Sequence
  ENSG00000164199_169 (sequence is synthesized)
tctaatggtaatgaggagaaatcatagcaggctgctctgccaagatctggggtgggtgatcagaatgcatggatgtcctgtggctcaagcagacagcccagcagtctttctcagtctgaa

SEQ ID NO: 509192 - DNA, 120 bp, Artificial Sequence
  ENSG00000164199_170 (sequence is synthesized)
ccacagaaagtgattgagtgactttttttttaattcctcccaaggatggtacatgtcatatcatcctctgtgcatgcattatggcattcattgccactggatgcattatggcattgggat

SEQ ID NO: 509193 - DNA, 120 bp, Artificial Sequence
  ENSG00000164199_171 (sequence is synthesized)
taattatctcatgggcaagaaaggctgtccaagaagtagacagattggtgtcatcttgagaaaaacttgcagggtgaattatgtagctagagagaatgaaaaaggagaatatattctctc

SEQ ID NO: 509194 - DNA, 120 bp, Artificial Sequence
  ENSG00000164199_172 (sequence is synthesized)
tgtcgaggaatggtgaagaggggaattctgaagcctttgggaacacccaaatcaactccatgaaggcttgagcatttgggtgctgctttcatggaggtgtgttattcagccagtgtcagc

SEQ ID NO: 509195 - DNA, 120 bp, Artificial Sequence
  ENSG00000164199_173 (sequence is synthesized)
ttagtttcatataaacttgtgatccatagaaaataggctatcatttccggataagcaacaagcctattacactaatccatacttacagtgctaccttttgatgtgttgtgtactcgagcc

SEQ ID NO: 509196 - DNA, 120 bp, Artificial Sequence
  ENSG00000164199_174 (sequence is synthesized)
ttttgtagttgcttaataaagaaaacaaatggggtcttcttagtgagacatgggtttcatagctattcctacattcctgtacaatatgtcctcagttaatgtccacaggttcttggaaac

SEQ ID NO: 509197 - DNA, 120 bp, Artificial Sequence
  ENSG00000164199_175 (sequence is synthesized)
tgcagctttaagtgaaatgatgtacaatgtaaccaattttaccgtaagctaattgatataaaaaacaatagttaagttcctacagcatatttctggtcacaaaaacagcgccagacttat

SEQ ID NO: 509198 - DNA, 72 bp, Artificial Sequence
  ENSG00000164199_176 (sequence is synthesized)
tggaaatgcagaaatcacctggcttctgcattggctcctccccccagattctgtttctggcgtctgcatacg

SEQ ID NO: 509199 - DNA, 120 bp, Artificial Sequence
  ENSG00000164199_177 (sequence is synthesized)
aaattttagttctacaaatgaggttctggaaagacccatgaacaagtcatattaaatgccatttaacatattttgctttcatttaaccataattatgcttatctttttttggatgttgtt

SEQ ID NO: 509200 - DNA, 120 bp, Artificial Sequence
  ENSG00000164199_178 (sequence is synthesized)
cattcaaaagataacgttttgattaaaaaaagaaaaagctatcaactataacctaaataataaagtaaaataaattttaaagtctgagatgttatttcttaagcacttctctttaattca

SEQ ID NO: 509201 - DNA, 120 bp, Artificial Sequence
  ENSG00000164199_179 (sequence is synthesized)
gaatggaagtttatctttaatatttacaaaataaatttctcttagatgagcactcaagtcctagaatgaaaaaacaatacttccagcttaggtgttagacaaagacatgattcatttact

SEQ ID NO: 509202 - DNA, 120 bp, Artificial Sequence
  ENSG00000164199_180 (sequence is synthesized)
atgtgacaagtgctgtagttctatttactctgtataaagcgcaactggaaaaatttactattaatagggtaaaagaatatgcaaataataaagaaaatatatgtatggctattttaaatt

SEQ ID NO: 509203 - DNA, 120 bp, Artificial Sequence
  ENSG00000164199_181 (sequence is synthesized)
ttcagcacatttaaattgcatatgtcactttatattgtgtataaaccatataaaagaaaacccaagccaacttttgtaaacattaagtcccagccaatcatttccctttcaccacatttt

SEQ ID NO: 509204 - DNA, 120 bp, Artificial Sequence
  ENSG00000164199_182 (sequence is synthesized)
tgttgaacaaaatgtaactgcttacttcagactgcttgtttgacaacaagaatagtttattggagaaaaaaatgctggatttgggataaatatgatctatactcacagtttaccttccca

SEQ ID NO: 509205 - DNA, 120 bp, Artificial Sequence
  ENSG00000164199_183 (sequence is synthesized)
acagtttaccttcccaaacctctttttctatatattaacaattttctgttcctgctactaaactttattttttaaaacagtttaagtttaaaatgcagcacaccaacatggcacatgtac

SEQ ID NO: 509206 - DNA, 63 bp, Artificial Sequence
  ENSG00000164199_184 (sequence is synthesized)
gaacttaaagtataataaaaaaaaaagcaatttgcaagattatgttgcaaatgtgtcagtggc

SEQ ID NO: 509207 - DNA, 89 bp, Artificial Sequence
  ENSG00000164199_185 (sequence is synthesized)
tttttgaggtcagtggcgcaatctaggtttactgcaaactccacctcccaggttcaagtgattctggagtgcagtgacgcgatctcagc

SEQ ID NO: 509208 - DNA, 68 bp, Artificial Sequence
  ENSG00000164199_186 (sequence is synthesized)
tgagtggctacaggcgcccaccactacaggcgcccaccatcatgtctggctaattttttgtattttta

SEQ ID NO: 509209 - DNA, 87 bp, Artificial Sequence
  ENSG00000164199_187 (sequence is synthesized)
aactcctggtgcttgggattaaaggcatgaaccactgtgccgggcctgtgattattttgactcattttttattgtggaaaaatacgt

SEQ ID NO: 509210 - DNA, 120 bp, Artificial Sequence
  ENSG00000164199_188 (sequence is synthesized)
gtgattattttgactcattttttattgtggaaaaatacgtgtaatataagatttaccattttcaccatttttagtgaacgtttcagtggcattaattatattcacagcaatgtacaacca

SEQ ID NO: 509211 - DNA, 120 bp, Artificial Sequence
  ENSG00000164199_189 (sequence is synthesized)
tcaccaccatctatttccaaaatttttcatcattccaaggacaaactctgtgcccattaagtagtaactccctattactcctctccctagtaatctccagtctactttctgtctctatga

SEQ ID NO: 509212 - DNA, 120 bp, Artificial Sequence
  ENSG00000164199_190 (sequence is synthesized)
atttgcctattctagatatttcgcatatgtgaaattatacagtatttacccttttgtgtctgacttccttcgcttagcaaaatgttttcaaggtgcatctgtgttgttacaggtatcaga

SEQ ID NO: 509213 - DNA, 120 bp, Artificial Sequence
  ENSG00000164199_191 (sequence is synthesized)
acttcattcccttttcacagctagattatattttattgtatgtatataccgtaatttttaaatccagctatctgttgtttccaccttttgactcttgtcaataaagctcctattattgtg

SEQ ID NO: 509214 - DNA, 120 bp, Artificial Sequence
  ENSG00000164199_192 (sequence is synthesized)
agaaagagagaaagttctattgtgtagagattaatactgagctctaaagcagttctttccctactctttctcagatttgtgtgacattagaacaggacatacaagggaaattatgacaat

SEQ ID NO: 509215 - DNA, 120 bp, Artificial Sequence
  ENSG00000164199_193 (sequence is synthesized)
gactgagtttttttttttaattttgttaaatataacttccctctgaaaattgaaagtatgtgtttctattgtgtggactcactctgggtagccaggaagttgaatatgataacggcttct

SEQ ID NO: 509216 - DNA, 120 bp, Artificial Sequence
  ENSG00000164199_194 (sequence is synthesized)
aattggtgaagacacagcctaacagctctctaaatcagaggtcagctggtgtggctgaatttgcttcttttgatttccatacttgtgaaagggctgaagggagggatttctttcattggt

SEQ ID NO: 509217 - DNA, 120 bp, Artificial Sequence
  ENSG00000164199_195 (sequence is synthesized)
gcatctgaagtctgtatcgtcttctctgtgggtgaatgacatagatgcttgccccatagttttaaagtggggaaaaatttgagtgaaagctagttggccattaatgtgcaccatgttttc

SEQ ID NO: 509218 - DNA, 120 bp, Artificial Sequence
  ENSG00000164199_196 (sequence is synthesized)
aaggaagataatgaattaaccttaatgagtctctttcattccctgatttagtgaggcagatttgatgaggtggaaaaacatctttagcatgtttaagtactcacaggttctgcagctcac

SEQ ID NO: 509219 - DNA, 120 bp, Artificial Sequence
  ENSG00000164199_197 (sequence is synthesized)
aggttgagagagacctaccagcatctctgcccagatagcagataggtgggcccttcaactagagtaatgcctgcatttagaagaatcataaagacatttttcttgtgcatgaaaatattt

SEQ ID NO: 509220 - DNA, 120 bp, Artificial Sequence
  ENSG00000164199_198 (sequence is synthesized)
ttgcctttgtaatgtgaatatcatgctttaaaaactttttaaactaaaatatgttactcagtgacttaagtgtatatcatcccatctgggaaaaaaatattgtgggctcacatacccttc

SEQ ID NO: 509221 - DNA, 120 bp, Artificial Sequence
  ENSG00000164199_199 (sequence is synthesized)
aaattttagatttcccaaaaatgcttctatgcctggcaatgagagtgaatttgtactcctagtaaatatagtaaaaagtttgagctgatcactgactattttaattaaataaatgcaatt

SEQ ID NO: 509222 - DNA, 120 bp, Artificial Sequence
  ENSG00000164199_200 (sequence is synthesized)
gatcaatcaagagcagagaaaaaaattcacataattgctttcctatataattctttttctatgtaatatttgttttcgtttcacagcatgaacaaatgattttgtttagaatcatttctt

SEQ ID NO: 509223 - DNA, 81 bp, Artificial Sequence
  ENSG00000164199_201 (sequence is synthesized)
tcacagcatgaacaaatgattttgtttagaatcatttcttttttccttttttttttttgaggcagagtcttgcactgtcat

SEQ ID NO: 509224 - DNA, 120 bp, Artificial Sequence
  ENSG00000164199_202 (sequence is synthesized)
agtgctgggattacagtagtgagccactgcgcctggcctggaatcatttgtttatttctgaagataagttttttcagttgttaaatatttatgatttttgtttttgtacaccctatctat

SEQ ID NO: 509225 - DNA, 120 bp, Artificial Sequence
  ENSG00000164199_203 (sequence is synthesized)
tttttgtacaccctatctataaacataaatgtcacttgatttatgctttttctcttgattgctgtaattaacatcagttttacttgtcctaatactgtgttaaataagaatgatctatat

SEQ ID NO: 509226 - DNA, 120 bp, Artificial Sequence
  ENSG00000164199_204 (sequence is synthesized)
cgatgacgaggttggctaatgttacatacccaaatgggacaaggattctgtgttgcaggacacagtcctgtataaacttagtgtattgtggccagtcgcacctcagctataaatagctga

SEQ ID NO: 509227 - DNA, 120 bp, Artificial Sequence
  ENSG00000164199_205 (sequence is synthesized)
ctgttctggaatacatcttattactatttatcttacttaattcacattaaattacacatctaaaagctgatgaatctgaatataactggcaaccatacatcatacaaatatttaagcatt

SEQ ID NO: 509228 - DNA, 120 bp, Artificial Sequence
  ENSG00000164199_206 (sequence is synthesized)
ctttctttagctttatttttcccttgccattctaagtttctcacagtattagtgagattttagcaaatggtgccctgcctcctttttccccttcccacacttctttctgtgttgacaggg

SEQ ID NO: 509229 - DNA, 120 bp, Artificial Sequence
  ENSG00000164199_207 (sequence is synthesized)
ttaaacttggaaggaggagctctgctagatctatctacagatataacgctgtaaaatctggtccttttggatgatctataatgagttgattattaataaaagaagtcaacaataccttaa

SEQ ID NO: 509230 - DNA, 71 bp, Artificial Sequence
  ENSG00000164199_208 (sequence is synthesized)
aggctagcgtttcatgtaattttgagtagaaagtgtctcacatttttgttttggaagtcttcagcgggcag

SEQ ID NO: 509231 - DNA, 79 bp, Artificial Sequence
  ENSG00000164199_209 (sequence is synthesized)
cgaggtcaggagattgacaccatcctggccaatatggttgaattcccgtctctactgttcccagatacttgggaggctg

SEQ ID NO: 509232 - DNA, 120 bp, Artificial Sequence
  ENSG00000164199_210 (sequence is synthesized)
attactgtatatgtatgtattcagccgtgattcccaaaggttcattttatgacagcatctttctgatttcctcacagtttattatcttcccattgcccaagtttagtaactttatattag

SEQ ID NO: 509233 - DNA, 120 bp, Artificial Sequence
  ENSG00000164199_211 (sequence is synthesized)
ttttggcttcgtacaggcaccactcattgggagcaacacagaaatctgtttcaaaacatcatttcaggaaaaagagaatattttagcgttgaggatctttaaaagtattgcagtacttta

SEQ ID NO: 509234 - DNA, 120 bp, Artificial Sequence
  ENSG00000164199_212 (sequence is synthesized)
tagaactaagttgtaggagctaagaggatcttttaattcatgctatgcaattatgtattttttgttgttgttgtattttattttattttgatttgtatgactttggaagagggtatgatt

SEQ ID NO: 509235 - DNA, 120 bp, Artificial Sequence
  ENSG00000164199_213 (sequence is synthesized)
tcacgtgcacatctttggaatgtgggggagactggaacacttggagagacccatgcagatatggggagaatgtgcagactccacacggacagttgccctggctggcaattgatttttttc

SEQ ID NO: 509236 - DNA, 120 bp, Artificial Sequence
  ENSG00000164199_214 (sequence is synthesized)
tcatcaacattatatgaaacagcattgagtgaaactgtgtgatttgaagacctgttgtagttccttgggaaactgactcaatgtcatgaccttactttatcaatttctaacctgcatttc

SEQ ID NO: 509237 - DNA, 120 bp, Artificial Sequence
  ENSG00000164199_215 (sequence is synthesized)
ctgtatccgacagctctcaaggctaaacagtacaaaaatggaaaaagagaagtggattaagttaaccagagtatcattgtatcaagtctcacttacaaattagaaaaagtttaaaaaata

SEQ ID NO: 509238 - DNA, 61 bp, Artificial Sequence
  ENSG00000164199_216 (sequence is synthesized)
cttatcagaaggtaatggagtaagtggcttcacaccaatgcttaaacgataaagatgtggt

SEQ ID NO: 509239 - DNA, 89 bp, Artificial Sequence
  ENSG00000164199_217 (sequence is synthesized)
ggagtttgttccttctgagataactactgaaggaaaaattcaagctttcagtgttgccagccgaactcttttctatgagattctttgtt

SEQ ID NO: 509240 - DNA, 120 bp, Artificial Sequence
  ENSG00000164199_218 (sequence is synthesized)
agaagccattactgacggtgagggtcatcatcacaactaggacactgaaatttgcagtttctaaaatttttcattaaaatttagatttttaaaaaagtgctaacatgtatttgaaaactc

SEQ ID NO: 509241 - DNA, 120 bp, Artificial Sequence
  ENSG00000164199_219 (sequence is synthesized)
tacttatgcattggtttaatttctttaatcaaaactatgtgcctaccaagataatgagaaattctgtcctgagtgttacagaaatgaatcagagaattttgcccttaaagaacctggaat

SEQ ID NO: 509242 - DNA, 120 bp, Artificial Sequence
  ENSG00000164199_220 (sequence is synthesized)
aaaccctagcagagagatgtgtgatatatcacaatgacaccctgtaggaagacagaaaaaaatatgaaagaggaatgtttgtccttctgtgggtagtaggagagatggggagtgatattc

SEQ ID NO: 509243 - DNA, 120 bp, Artificial Sequence
  ENSG00000164199_221 (sequence is synthesized)
ctgcagaggaatgaacaaaggaatagaaatgtgaaacagcgtgttgcacctggggaactgctgctagttcagtattgctgaaggtagagggtggtgggcgtgaggttgaaaagaaagcag

SEQ ID NO: 509244 - DNA, 120 bp, Artificial Sequence
  ENSG00000164199_222 (sequence is synthesized)
gagagaagaatcacagtgaaaagtgattatagggttcatactatcagcaggtaacttggtgaattctacagagtgctttgaagagatattctttgttgtctttaaactagatcatatgct

SEQ ID NO: 509245 - DNA, 120 bp, Artificial Sequence
  ENSG00000164199_223 (sequence is synthesized)
gattcctcaagaagcacatttgtgtgtgtgtgcacacaaatactggttatatgcattatagtcaccattccctctcagcccctccatcttatgattttattcttttttatatttcgtgaa

SEQ ID NO: 509246 - DNA, 120 bp, Artificial Sequence
  ENSG00000164199_224 (sequence is synthesized)
agatagagtagagcttatatggctatagcttaatagagtattttcctctgaacctcttacattagttatttggttctattttttttcccagagggggaaaaaaagataggcaaaggaaaa

SEQ ID NO: 509247 - DNA, 120 bp, Artificial Sequence
  ENSG00000164199_225 (sequence is synthesized)
tgcacgtatctaccaatttcaatcccatggattttggttacaagcactttgtggtattatccactttttggctgtgtgaatacctacaagtatctgttagccttgattcttttggtgatg

SEQ ID NO: 509248 - DNA, 120 bp, Artificial Sequence
  ENSG00000164199_226 (sequence is synthesized)
gtagtggtggtggaatgagaatggaaacgattgggggaagtgggagctggtgttttttcctctgacttactgcagaggaacttgttatttttgtactttgtaatttggaaagataatttt

SEQ ID NO: 509249 - DNA, 120 bp, Artificial Sequence
  ENSG00000164199_227 (sequence is synthesized)
taaactatatgtaaagttattgaactgtagtgccctttatattataaaaatataaaagtatgcatattgtaagtgtacagataagtgaaatttttaaaacttaaattcatcagtttcagc

SEQ ID NO: 509250 - DNA, 120 bp, Artificial Sequence
  ENSG00000164199_228 (sequence is synthesized)
actcatgtgatcagcccccagaccaagaaacagcattccagaagccccctttgactcctccagttgctaactcaccaccctgcctactgactattggcatttttaagagcttaagattca

SEQ ID NO: 509251 - DNA, 120 bp, Artificial Sequence
  ENSG00000164199_229 (sequence is synthesized)
cttttcctatttttaaatttatataaatagaactgaacagtatgtacacttgagtgtccagcttcttttgctcagtattgtttgtgaagttcatccatatttttgcctgctgtagatatt

SEQ ID NO: 509252 - DNA, 120 bp, Artificial Sequence
  ENSG00000164199_230 (sequence is synthesized)
tcatgctcattaccatatagaattatcttatgtaactgtaacacaatttatttattagtgctactttcaatttctgttttggttgttttctgttctgcctactacatatagtacttctat

SEQ ID NO: 509253 - DNA, 120 bp, Artificial Sequence
  ENSG00000164199_231 (sequence is synthesized)
ggatactcttatacatgttttttgatgaacatatgcctgccatatgcatttctgttgagcacattcctggggatggaattgctgaatgacagtgtgtgcaaatattcggttttagtagat

SEQ ID NO: 509254 - DNA, 120 bp, Artificial Sequence
  ENSG00000164199_232 (sequence is synthesized)
aatgcctatcctttttccaaaacagttgaacctaattatactctcacctctagtgtatgagagttccacttaattaatgcttagcttcttccatctttacttttggtttgtagtggcatc

SEQ ID NO: 509255 - DNA, 120 bp, Artificial Sequence
  ENSG00000164199_233 (sequence is synthesized)
gtggcatctcacagtatcataaaaggtgtatttaaaaaaaaataatgctgtgttcaatatagaaaaattgtaaagtacacatatacaacaaaaatagaaatcatttacaataaaaatcat

SEQ ID NO: 509256 - DNA, 120 bp, Artificial Sequence
  ENSG00000164199_234 (sequence is synthesized)
ggacttgtatgcaaaataaatagttctggtaaatcaatgtattgaatctcctctctttatctcagattaataaaaaccacttttaaattttgactcgctaaagtaggtacaccataattc

SEQ ID NO: 509257 - DNA, 120 bp, Artificial Sequence
  ENSG00000164199_235 (sequence is synthesized)
agaggacagtttaggtctgtattatgtgaggagcctgattgtagtaacaaagatcccgccaagtctcagtttcttcatatggtaaatgtgcatttcttcttcacgcaggaatcctgcacc

SEQ ID NO: 509258 - DNA, 120 bp, Artificial Sequence
  ENSG00000164199_236 (sequence is synthesized)
agcgtgcccagttggctgatgcttatggacacctcttattcagctggcagctctcaggccctagactctgtccatcttggggttatgtcctcttctaggtcctgggcctcctctctattc

SEQ ID NO: 509259 - DNA, 120 bp, Artificial Sequence
  ENSG00000164199_237 (sequence is synthesized)
acctgccaaatggaaaagtagaggatgtggggtcttgtgtgggtgtttatggcaagagtattagcagcataaatcatttctgcctctattctctgggtcagaattcagtcacatgctcta

SEQ ID NO: 509260 - DNA, 120 bp, Artificial Sequence
  ENSG00000164199_238 (sequence is synthesized)
cctaattgcaagagaagacaggaaatgccaactagttgagcatctaggaatagaaagtgggatttggtaaaaaaaatttttctgccacatgataattacatgtaacattctaaattataa

SEQ ID NO: 509261 - DNA, 120 bp, Artificial Sequence
  ENSG00000164199_239 (sequence is synthesized)
gtataacccttgttatgctttatgcttgttaatatttctgtgctgtacaagaaccaaagaatttggtcatacacatcaactttatgtttagtttgaagggacaggaaaaacactggcttt

SEQ ID NO: 509262 - DNA, 120 bp, Artificial Sequence
  ENSG00000164199_240 (sequence is synthesized)
gcaaatgatagttttcttactcagtattccttctgaaaataaatattttaccctctaaaaaattccacaaactgtgatttaggaatatttccaaatctgtttttggttcatcttttgctc

SEQ ID NO: 509263 - DNA, 120 bp, Artificial Sequence
  ENSG00000164199_241 (sequence is synthesized)
tagttttgttaagaacttcttaaggcactttttgcaaatgacggaagtagaatgccttcagacctcctaatttctaaactctttaacttgtatgctactgttttgagagacattgtttat

SEQ ID NO: 509264 - DNA, 120 bp, Artificial Sequence
  ENSG00000164199_242 (sequence is synthesized)
gagagaaaatataaagatcagtttccaaacttcaataatatgttttgaaaagtttttgcaggattatttaaaatggaacaaagtatttctgttcatagctatcaaatttctttaatttaa

SEQ ID NO: 509265 - DNA, 120 bp, Artificial Sequence
  ENSG00000164199_243 (sequence is synthesized)
taattatcctatggtgatttgttaacacctaagtaattgaaatactttgtaatttatattttattaagcttcaagaagtgaagctatcactctatattaatttctttttgtcttatgctt

SEQ ID NO: 509266 - DNA, 120 bp, Artificial Sequence
  ENSG00000164199_244 (sequence is synthesized)
gctgagataatgatagaagaaaatgacgatcccagaggaatttttatgtttcatgttactagagtgagatgaactttcatttgtttacagtcatacagaggcctctccctgctgatttgg

SEQ ID NO: 509267 - DNA, 120 bp, Artificial Sequence
  ENSG00000164199_245 (sequence is synthesized)
ccagtgttttatgtttagctttgcctgtatttatttttaaatagataaataaccaaatttgtcttataaactaattcttaggtctctttgggctagaccaaaggattcaacaagtttact

SEQ ID NO: 509268 - DNA, 120 bp, Artificial Sequence
  ENSG00000164199_246 (sequence is synthesized)
ttcattaaatataagagttcagaagaccttttatgcatacttatatctgactattaatttctactttaaagggtgaaatatagaaagttaagtagaaacaataactttagaaagatgact

SEQ ID NO: 509269 - DNA, 120 bp, Artificial Sequence
  ENSG00000164199_247 (sequence is synthesized)
gtgctttcaattttgagcaagaacaatactaacctagaataaatattttaccataaaagcaaagaaaaattctactgcagttggtattcttttgtttttatttttttgttgttgtttaga

SEQ ID NO: 509270 - DNA, 120 bp, Artificial Sequence
  ENSG00000164199_248 (sequence is synthesized)
caggcatgagccaccgcacccggcttgtttggatatttttaatgttcacatttatgggaagatttttattatttttatatttcacattggaactagcaaggatagagatacatgatacac

SEQ ID NO: 509271 - DNA, 120 bp, Artificial Sequence
  ENSG00000164199_249 (sequence is synthesized)
tacatgatacacctagcttaattgctaagaatgaatctgaacaataatgtgcaaggatgtcccccacatgagctaaacgagagaaaacatgactttttataaaagaaactaagttttgcc

SEQ ID NO: 509272 - DNA, 120 bp, Artificial Sequence
  ENSG00000164199_250 (sequence is synthesized)
agaaaagaaaacaaaaagaaaatagctggcaatttgtaaccctccctctaccctcctacaaaaattctgaaactaaatcacaagaaaactcaagagaagggaaaaaatgtattagagtat

SEQ ID NO: 509273 - DNA, 120 bp, Artificial Sequence
  ENSG00000164199_251 (sequence is synthesized)
tagaagacattattagaaaagaatttttctcttgaaaaaaaatgaaatatttggaagcattgatatctccagttcctctggttctggaagcaagcaaaaaaacctttttgttttaagatc

SEQ ID NO: 509274 - DNA, 120 bp, Artificial Sequence
  ENSG00000164199_252 (sequence is synthesized)
tcagagcattgaacgggctataatttggggagatgattaattatacattttgattgtaaatttgaaagatcaatcgaatcataacattttatttttaagataaatagctttgctttttat

SEQ ID NO: 509275 - DNA, 120 bp, Artificial Sequence
  ENSG00000164199_253 (sequence is synthesized)
attgctgctgatggaggtaaaagcatgcatttttttcacttttatttctaaaatagagtttatggtgaatgaaaagctcacacagcacagtggagattaaccccaagatttctctgcagc

SEQ ID NO: 509276 - DNA, 120 bp, Artificial Sequence
  ENSG00000164199_254 (sequence is synthesized)
tattattccagatttaagttttgtggtgttggacacaacaatgaactgttagaatatgtgtcattttttcccacaaagtttcatgacaaactcagaaaagacacacacacacacacacac

SEQ ID NO: 509277 - DNA, 120 bp, Artificial Sequence
  ENSG00000164199_255 (sequence is synthesized)
accacacctgtggccgaggctcagcgcctcccgtgaggacgcagctggggctcaaccccgccctcctggaccgggctaccctcacctcctgccaccatctttacctgtccccgttagcag

SEQ ID NO: 509278 - DNA, 120 bp, Artificial Sequence
  ENSG00000164199_256 (sequence is synthesized)
attaaaataatcgtaattttggttaaccttcaagtgtactaacctgtgtgaaagaattaactgaacattattttgaccttgttattttgccgtcatttatatgttgttactaaaagttgt

SEQ ID NO: 509279 - DNA, 120 bp, Artificial Sequence
  ENSG00000164199_257 (sequence is synthesized)
ttaggtagtcggaagagagattatgcctgctcctaaggtatataagtataaataagacaagaatttttaccaaagttaatattttaattaagtgacattaaaagtacaccagacgtgaaa

SEQ ID NO: 509280 - DNA, 120 bp, Artificial Sequence
  ENSG00000164199_258 (sequence is synthesized)
tgccagtcatgcaagtcagactgtcatggatgacatagtagagtaacttacaaactattacaggggagggcgagagaaagagaggctaaccatgctttgaattgatttgggaaaatatga

SEQ ID NO: 509281 - DNA, 120 bp, Artificial Sequence
  ENSG00000164199_259 (sequence is synthesized)
atgacataggaataggatttgtaggataagtatgttttcataatgaatattgcaaggaaaatatttcagaaacaaagcaatatgagatatatattttttctttttttttgagacagggtc

SEQ ID NO: 509282 - DNA, 78 bp, Artificial Sequence
  ENSG00000164199_260 (sequence is synthesized)
tttagtagagacggggttttcccatatgcgcctgagcctcctaaagtgctgtgattacaggtgtaagccaccacgcct

SEQ ID NO: 509283 - DNA, 120 bp, Artificial Sequence
  ENSG00000164199_261 (sequence is synthesized)
ttacaggtgtaagccaccacgcctggcccaagaaaaattttataaatacttttaaataatatactcaaaaatcaatttctttgtctaggtagactctctggaccttcaactgtttagtaa

SEQ ID NO: 509284 - DNA, 120 bp, Artificial Sequence
  ENSG00000164199_262 (sequence is synthesized)
agtccccatgacgtatccttccattttatacatttcatttcttctgttaaccaaaatattatttttatggccaaagtataaaatatctgcactcatttatgatactgttgttgttttcca

SEQ ID NO: 509285 - DNA, 120 bp, Artificial Sequence
  ENSG00000164209_0 (sequence is synthesized)
agaatttacccctgacgcggcggcggccgacgggaagctgtgtgtgcttaggtcgtggtggccccggtggtggtgggctccgggcgggctcgcgtcatcctgcccccgctgcgatgcatc

SEQ ID NO: 509286 - DNA, 120 bp, Artificial Sequence
  ENSG00000164209_1 (sequence is synthesized)
cgcggcgcccggacggatttgatggcttgggctaccggggtggtgcccgggacgagcagggctttggcggcgccttccctgcaaggtccttcagcaccgggtcggacctgggccactggg

SEQ ID NO: 509287 - DNA, 120 bp, Artificial Sequence
  ENSG00000164209_2 (sequence is synthesized)
tgacgactcccccagatatccccggcagccgcaacctgcactggggcgagaagagcccgccctacggcgtgcccaccacctccaccccgtacgaaggccccacggaggaacccttttcca

SEQ ID NO: 509288 - DNA, 120 bp, Artificial Sequence
  ENSG00000164209_3 (sequence is synthesized)
gtggcggcggcggcagtgtgcaggggcagagcagtgaacagctgaatagatttgctggatttggtattggacttgcaagtctctttacagaaaatgtattggcacatccttgcattgttc

SEQ ID NO: 509289 - DNA, 120 bp, Artificial Sequence
  ENSG00000164209_4 (sequence is synthesized)
tacgccgccaatgtcaggttaattaccatgctcagcattaccatctcactccatttacagtcatcaatattatgtacagtttcaacaaaactcagggacctagagccctgtggaaaggaa

SEQ ID NO: 509290 - DNA, 120 bp, Artificial Sequence
  ENSG00000164209_5 (sequence is synthesized)
tgggaagtacatttattgtccagggagtcacacttggagcagaaggcataattagtgaatttacacctttgccaagggaggttttacataaatggagtcctaaacaaataggagaacacc

SEQ ID NO: 509291 - DNA, 120 bp, Artificial Sequence
  ENSG00000164209_6 (sequence is synthesized)
ttctactgaaatccctaacttacgtggtggcaatgcctttttattcagcaagtctgattgaaacagtgcagagtgagataattcgagataatactggcattttggagtgtgttaaagaag

SEQ ID NO: 509292 - DNA, 120 bp, Artificial Sequence
  ENSG00000164209_7 (sequence is synthesized)
gaattggaagagtgataggcatgggagtgcctcatagcaaacgacttcttccgcttctttccttgatcttccctacggtgcttcatggagttcttcattacatcatcagctcagttattc

SEQ ID NO: 509293 - DNA, 120 bp, Artificial Sequence
  ENSG00000164209_8 (sequence is synthesized)
agaagtttgtcctactaattctaaagagaaagacttacaatagccacctagctgagagcactagccctgtgcagagtatgttggatgcttattttccagaacttattgctaactttgctg

SEQ ID NO: 509294 - DNA, 120 bp, Artificial Sequence
  ENSG00000164209_9 (sequence is synthesized)
ccagtctttgttctgacgttatactttacccattggaaacagttttgcaccgccttcacattcaaggaacacgcacaataattgacaatacagaccttggctatgaagtgcttccaatta

SEQ ID NO: 509295 - DNA, 120 bp, Artificial Sequence
  ENSG00000164209_10 (sequence is synthesized)
atacacaatatgagggaatgagagactgtatcaataccataaggcaggaggaaggagtgtttggtttttataaagggtttggtgctgttataatacagtacacactgcatgcagctgttt

SEQ ID NO: 509296 - DNA, 120 bp, Artificial Sequence
  ENSG00000164209_11 (sequence is synthesized)
tacagattaccaaaattatttactctacacttcttcaaaataacatttgagatttaggttccttcactgagtagtctggaagatataatctggataatttgctatgaagttatgagggat

SEQ ID NO: 509297 - DNA, 120 bp, Artificial Sequence
  ENSG00000164209_12 (sequence is synthesized)
acaagtgaaatactggggaagaaaatggattggaaagtaaaattggtactaaagcccatactgattatcttgactttgttttttaaggcataggtatatattttggatcaaaatccttcc

SEQ ID NO: 509298 - DNA, 120 bp, Artificial Sequence
  ENSG00000164209_13 (sequence is synthesized)
aaatttgaaaactcaataaaaataacacttattaaattctagttagtgtagcactcatgctgaagtaaacatgatcgtaggcagaagcaaaattttattataaaatctaaaacaaaactt

SEQ ID NO: 509299 - DNA, 120 bp, Artificial Sequence
  ENSG00000164209_14 (sequence is synthesized)
tatagagttgaatctattccatctgacttcaatatttgccaaacgtttattttacctcctagattgatgttggtatagtatccttaatacagtgtagtatattaatgtccttaatacaat

SEQ ID NO: 509300 - DNA, 120 bp, Artificial Sequence
  ENSG00000164209_15 (sequence is synthesized)
caggaggtttttacctttaagcaaataaattatgtcattattgaaaaagacttaagggatgattagacttggcaatctgtaagcaggagtataaatgttttaaattgcattgtccctatg

SEQ ID NO: 509301 - DNA, 120 bp, Artificial Sequence
  ENSG00000164209_16 (sequence is synthesized)
taactatcttaatggctatatatatgtattttataaagccatttatgtatacacatgtaacttggaatttccttcatccctacacattttctacacttacatcaccttattgcataaaac

SEQ ID NO: 509302 - DNA, 120 bp, Artificial Sequence
  ENSG00000164209_17 (sequence is synthesized)
aaagtcacgcgctttctgcttgaacatcaaaatatcaaaaaccaaggtacccaaaagatacaagtcagagacaacatccttgtccatatccaaacccagtgtttcagtgctagcaactta

SEQ ID NO: 509303 - DNA, 120 bp, Artificial Sequence
  ENSG00000164209_18 (sequence is synthesized)
atttctcatacatttatagagtttggtttgctttgctagttgtgtgaatcattgggctgtttttagagccactgttaagagagaatataaaataatcatgacaattactactgtttccac

SEQ ID NO: 509304 - DNA, 120 bp, Artificial Sequence
  ENSG00000164209_19 (sequence is synthesized)
gaaacaaaattaaaattcatctgggaatttgtgcctcttgtctagtatatagtcaccactaaataatggcttccgtttttattttctttcaggttttgctttaaattttgttttccaaaa

SEQ ID NO: 509305 - DNA, 120 bp, Artificial Sequence
  ENSG00000164209_20 (sequence is synthesized)
tagatgtacgtggagggaaaagcaattattcttatcaccttttatttaaacttctttagatgaatactgaagaaaaatccaaaccttaaaggaaatgtgcccttgtattttatgggtgag

SEQ ID NO: 509306 - DNA, 120 bp, Artificial Sequence
  ENSG00000164209_21 (sequence is synthesized)
gggaaaaagtacatttgtacatttcaacatataataagcaaaaaaattactaatcagtttaataaaaacattttgtctattcctaaatgtaatttggtgggttaagcactttgtgtagta

SEQ ID NO: 509307 - DNA, 120 bp, Artificial Sequence
  ENSG00000164209_22 (sequence is synthesized)
aaatgatatgtgtctgctctatcattagacattttaaagtttcatgtcttcacgtgaataatcacagttgtatcatgaaccatttagcgctctgaagcacagtgactttgcactgatatt

SEQ ID NO: 509308 - DNA, 120 bp, Artificial Sequence
  ENSG00000164209_23 (sequence is synthesized)
gtccaaccaagaatgcatacgaatagaaattcattttacttgctaaatgtcacagaaatggttactttttgcaaatagtagtgttggaacaaaaaagtgatatccaaaaagtgtaaaaac

SEQ ID NO: 509309 - DNA, 120 bp, Artificial Sequence
  ENSG00000164209_24 (sequence is synthesized)
agtaataagtagcaaatctctcgtgtgtgtgtgtgtgtagttactgaaacacctacattttccatttttaaattccaccaaaagggggaaaataaaattaaacaccactgatcacatttt

SEQ ID NO: 509310 - DNA, 120 bp, Artificial Sequence
  ENSG00000164209_25 (sequence is synthesized)
atattttatggtgactattttagattaaggtttactttgtccaaccaatagcatttaaattgttttcaattaggatagtttcagataagagtaaaccagaaaatttcaagtttgaaaaat

SEQ ID NO: 509311 - DNA, 120 bp, Artificial Sequence
  ENSG00000164209_26 (sequence is synthesized)
ttctagaaaagaatctgaatagaatcaagtatttactagtgaaaatctgtaggatcctttgtttagctaaaaattaaatatttcaggatattttttggaagttagcatgaaaatagttag

SEQ ID NO: 509312 - DNA, 120 bp, Artificial Sequence
  ENSG00000164209_27 (sequence is synthesized)
ttacataaattcattttattgtagaataattataagactgataggctgaaccatacacaaataaggttgatcttgttttcctttttggagaaagagaatacaaattaacattaaaattga

SEQ ID NO: 509313 - DNA, 120 bp, Artificial Sequence
  ENSG00000164209_28 (sequence is synthesized)
aatgtagaaagtaaaatatgaataattttttacaaccactccaaattagttgaaacaaaatcttgaacggtcacgcacttaaatttaagctagccaaatatgttgcactgaattttgaaa

SEQ ID NO: 509314 - DNA, 120 bp, Artificial Sequence
  ENSG00000164209_29 (sequence is synthesized)
agaatgagtgagataactgtaagatacgctcgttcccttttaaaaattgttatttttctttaacatgggtgccaaatcaaatatccatgggctatacttcttaagataataacagctcaa

SEQ ID NO: 509315 - DNA, 120 bp, Artificial Sequence
  ENSG00000164209_30 (sequence is synthesized)
aataatattttttaattcagtagaactaatagcattatggaaaagattctattaaatgttccacaggcccactggtcctcttatataagccaaattttggccatggagcttgtgatacac

SEQ ID NO: 509316 - DNA, 120 bp, Artificial Sequence
  ENSG00000164209_31 (sequence is synthesized)
ttgccttacattgtagggtttcttaatttgagtcaagtacactgaaagcaattaaaaactggtaaatattaatttactatgtaaagtgaacttacgaattaacttactaaatacatatat

SEQ ID NO: 509317 - DNA, 120 bp, Artificial Sequence
  ENSG00000164209_32 (sequence is synthesized)
gtagaccttcccgaaatgccattctcaattttattttatgggctccaaaaaaaattatctgggttaataaggttatctattaaagcccccagaatctcagcactagatgtcataaatatg

SEQ ID NO: 509318 - DNA, 120 bp, Artificial Sequence
  ENSG00000164209_33 (sequence is synthesized)
aaatagtaaaaacaaggtcacttgaaaatgggtatttaataccttagctggtgttttcagaagcatacagaactggaaaggtaagaacttgcttactattgcagatatacctgaccactc

SEQ ID NO: 509319 - DNA, 120 bp, Artificial Sequence
  ENSG00000164209_34 (sequence is synthesized)
acaactgtctttttagcagcagctttgttaaaactgcacaaagcattcactttattgattgagtacaaatgctttagtgtttctacctaagtattagtacatctgttcaggaaatggaaa

SEQ ID NO: 509320 - DNA, 120 bp, Artificial Sequence
  ENSG00000164209_35 (sequence is synthesized)
aaaaaaatgctgcttaaatttgttttatcagctgaggttgtggaggatttttgtccactgatcttttgcaacagaaaagcatactttgtcagcttctaataagatagccaggtttgaatt

SEQ ID NO: 509321 - DNA, 120 bp, Artificial Sequence
  ENSG00000164209_36 (sequence is synthesized)
atttgcaaaatttatataagcaaataagatctcttggtaacaattgacattgcactagaatttgaatgatactgttgttggcatttctgtttctctttcaagtagttgtaaataatctct

SEQ ID NO: 509322 - DNA, 120 bp, Artificial Sequence
  ENSG00000164209_37 (sequence is synthesized)
ttttctcatataaacggaatgcataatgtcttactcttgagtcatttagtatcattgatatggtaccaagttgtatagcagagtaacaaaatcatgatttgacaatgaaatttacatatt

SEQ ID NO: 509323 - DNA, 120 bp, Artificial Sequence
  ENSG00000164209_38 (sequence is synthesized)
gcctcacctagagatgttttgtctgtatgacttttttttttttaagtttgtcttactgttactttaaatgttttgggtaaattgtgtaatatgaaaagttcaataaaatgtcgaaataaa

SEQ ID NO: 509324 - DNA, 120 bp, Artificial Sequence
  ENSG00000164209_39 (sequence is synthesized)
acagtttttgaaatagttgtccaggactttaaaattggaagcttttatataaaatgagaatatctttttttgaaaaaattacaacttcaaaaccctgggcccacactctaatgtggcaac

SEQ ID NO: 509325 - DNA, 120 bp, Artificial Sequence
  ENSG00000164209_40 (sequence is synthesized)
aatgaattggagtgaaagcgtaattgtgctttaaacactctacaccttgcaatttgccacagaccccagcagagtccttcattcatttaaattatttacctggcccctatcagaatttga

SEQ ID NO: 509326 - DNA, 120 bp, Artificial Sequence
  ENSG00000164209_41 (sequence is synthesized)
ctttgaggtttaaatgaacagcaggttaataaaataaattttttaaaattgttttgagactaaacctaaattgtcagtaattggttatcagtaatcttatttttttatttctattttttt

SEQ ID NO: 509327 - DNA, 120 bp, Artificial Sequence
  ENSG00000164209_42 (sequence is synthesized)
ttttaatcctgttctttgtttccatatctattctctttcttttaaccaatcatcttaattttcttcctttaatttctcatgtttactttcataatcagttgtgcctcttgcttctctgcc

SEQ ID NO: 509328 - DNA, 120 bp, Artificial Sequence
  ENSG00000164209_43 (sequence is synthesized)
agccccttctatcagcacgtatgaaaacaccttgtatttttttctctcaaaccatcacagttgtttacactgtgttctagaaaagaaaatgttcaccattagaatatatttctcctacag

SEQ ID NO: 509329 - DNA, 120 bp, Artificial Sequence
  ENSG00000164209_44 (sequence is synthesized)
attgaaaaaaattagaagttgattactgttttgaaaattgggctaattccagatgttttaaataacatggcttttgttttatttaagtttatttttatgttttagggaggttttacataa

SEQ ID NO: 509330 - DNA, 120 bp, Artificial Sequence
  ENSG00000164209_45 (sequence is synthesized)
atggagtcctaaacaaataggagaacaccttctactgaaatcattgtgaattggaaatcccccagcttgctggctccctcagtgggacattccagcacattattacttagtgatgttcca

SEQ ID NO: 509331 - DNA, 120 bp, Artificial Sequence
  ENSG00000164209_46 (sequence is synthesized)
gaaggaacataggatgaaaccatggaagtcttcctcagatctggggagggagcctggcccaagagcccgtggagctaatgaaaacagaacagctgaatagatttgctggatttggtattg

SEQ ID NO: 509332 - DNA, 120 bp, Artificial Sequence
  ENSG00000164209_47 (sequence is synthesized)
ctctgtaaagtaatgcttcctgtatttgttagctgttagagttcaaaacagtataaatcattataaattaatctgttcatgcttagcactgaaaagtatgtatacagaaataccattaaa

SEQ ID NO: 509333 - DNA, 120 bp, Artificial Sequence
  ENSG00000164209_48 (sequence is synthesized)
gtagcattgactgtatgtgccacagaacagtgtatttcagatatatattttacattgtagtaatattaacatggagatccaatggatacattacatataagtaacaaatatattattttt

SEQ ID NO: 509334 - DNA, 120 bp, Artificial Sequence
  ENSG00000164209_49 (sequence is synthesized)
aaatgttttatgaaataataccattagaatgtaatacattctaatattttattgtttcacataataaatattgttttgacactcccccagttgatttcatataccagtcagttgccaagt

SEQ ID NO: 509335 - DNA, 120 bp, Artificial Sequence
  ENSG00000164209_50 (sequence is synthesized)
acagtttgaaaaatgcttgcctaaaatgaacatgagttgggagatgtaattcagttgtttaaggcaaaccaaatatcaaataagaccctctttattatatagtctacagtactgtgtgta

SEQ ID NO: 509336 - DNA, 120 bp, Artificial Sequence
  ENSG00000164209_51 (sequence is synthesized)
ttatgcattggtcttcagattgtatttatataaccatacatactgtacttttaataggttatttaaagcacttttaagagtaattttgcttatgtgtaatttatgttgactttggaatta

SEQ ID NO: 509337 - DNA, 120 bp, Artificial Sequence
  ENSG00000164209_52 (sequence is synthesized)
ttttttttttttttttttaattaggatagctatttgaccatttgaaaattaaagactgctgagacagagttattttagaattttattgccttttttgtgttgattatgcataggagtatg

SEQ ID NO: 509338 - DNA, 120 bp, Artificial Sequence
  ENSG00000164209_53 (sequence is synthesized)
tgttttgatttgttaaatgaaaaactagactgttttgagaaaagcaaggtactcgaataaattttattaattttttcgttcattagggagggcattttttgcttggaaatagataattta

SEQ ID NO: 509339 - DNA, 120 bp, Artificial Sequence
  ENSG00000164209_54 (sequence is synthesized)
gatatatttacatgtttggtatttgataatgaattataaaaaggtttagtgactgaagcttttaagtatgcttatttaaatttctagagctgtaacagtaaattttacccattttataaa

SEQ ID NO: 509340 - DNA, 120 bp, Artificial Sequence
  ENSG00000164209_55 (sequence is synthesized)
gtagtagagaacagatacaaagaagagtcccaaaagcatttttttaaatacttggttttaagtctccttttatcttaatgatcttaagaattggcagtagtcatcaaaggggaggtaact

SEQ ID NO: 509341 - DNA, 120 bp, Artificial Sequence
  ENSG00000164209_56 (sequence is synthesized)
cagaattgacattgtatttaaaggggaggctacccagtcctaagtgtttaccacagtttcatacttaaaattggtgtcgtcataaactgtggtaatactttgtgaggccatgagtattag

SEQ ID NO: 509342 - DNA, 120 bp, Artificial Sequence
  ENSG00000164209_57 (sequence is synthesized)
ctgtgccaagatgatttacaaagcatgtaacgtattttgttttataatcataaagtaactttcagtaagatgggaggcctaatctattttttatatttttcgacttaatcattgaataat

SEQ ID NO: 509343 - DNA, 120 bp, Artificial Sequence
  ENSG00000164209_58 (sequence is synthesized)
atgatttcagctacattgtgttgttcaggccaaataaatatcctaatagtaatttaatcagagttcggcccagaaggtgctctaaggtcttagaaatcgggggtagttgctctattgtct

SEQ ID NO: 509344 - DNA, 120 bp, Artificial Sequence
  ENSG00000164209_59 (sequence is synthesized)
gaaagtctctgatgtatgtatatgctgttgtttttcaaattcagtcatgtgaaatagaaaatgtttatctagattcctgctgtagccatagccatgatggaatgagtacccattccatca

SEQ ID NO: 509345 - DNA, 90 bp, Artificial Sequence
  ENSG00000164209_60 (sequence is synthesized)
tgtagccatagccatgatggaatgagtacccattccatcagagaaactgttggtagcaagtcttatctttattttgcacttccctttctg

SEQ ID NO: 509346 - DNA, 120 bp, Artificial Sequence
  ENSG00000164209_61 (sequence is synthesized)
tctttttttttcttttcttttttttttaccctctataatcttgactctttttggacttttctcttgatagaacttactcccttttttcacctttggttctatttcatttcagcttgcctc

SEQ ID NO: 509347 - DNA, 120 bp, Artificial Sequence
  ENSG00000164209_62 (sequence is synthesized)
cctccctccctcccttccttctttctttcttttttttttcttccttccttttttttctttcttttcttgttttccaaaggtaaccaaactagcagacagaatgcacaaaatcctacacct

SEQ ID NO: 509348 - DNA, 120 bp, Artificial Sequence
  ENSG00000164209_63 (sequence is synthesized)
tggttccagacctggcatttttgcctgtttcctttgaacattttcctgtgatctttttgaccctgatttttctcatcagtaagacaagtgtgacaatatctgctctgcttatctcacaag

SEQ ID NO: 509349 - DNA, 120 bp, Artificial Sequence
  ENSG00000164209_64 (sequence is synthesized)
gttcttctttgtatcaaataagatgagaggcagtacaggcagagagtaccggggtttagaacagagttccacactaactggttacttggctttggatgagttattaatcccctctgatcc

SEQ ID NO: 509350 - DNA, 120 bp, Artificial Sequence
  ENSG00000164209_65 (sequence is synthesized)
tatctcctcatctatgaaatggagaaaatagggttattatgaagattagaaatagttcatgcaaagcactttgcatagtcatggcatttagtaggtgctcacaaagataatagaatataa

SEQ ID NO: 509351 - DNA, 120 bp, Artificial Sequence
  ENSG00000164209_66 (sequence is synthesized)
tggtcacaaaattatgtaattgtactaagtaaagataattcagaaattaggtactacataaatgtaatgtgtcagcctgcattagagttacttaacttttttaaaaaattgtcattctta

SEQ ID NO: 509352 - DNA, 120 bp, Artificial Sequence
  ENSG00000164211_0 (sequence is synthesized)
agttggctgcgaccagcggtgacttacaagttggctgctgtcgcctgcgcatcggcgggccgggaggctgagcagtactgttgagagcggtgtgaggtgcttggtagcgcgccgtagctg

SEQ ID NO: 509353 - DNA, 120 bp, Artificial Sequence
  ENSG00000164211_1 (sequence is synthesized)
cttccacgtccttgcttcacctcaggtaaagagagaagtaatggaaggcctgtctgatgttgcttcttttgcaactaaacttaaaaacactctcatccagtaccatagcattgaagaaga

SEQ ID NO: 509354 - DNA, 120 bp, Artificial Sequence
  ENSG00000164211_2 (sequence is synthesized)
taagtggcgagttgctaagaaaacgaaagatgtaactgtttggagaaaaccctcagaagaatttaatggatatctctacaaagcccaaggtgttatagatgaccttgtctatagtataat

SEQ ID NO: 509355 - DNA, 120 bp, Artificial Sequence
  ENSG00000164211_3 (sequence is synthesized)
agaccatatacgcccagggccttgtcgtttggattgggacagcttgatgacttctttggatattctggagaactttgaagagaattgctgtgtgatgcgttacactactgctggtcagct

SEQ ID NO: 509356 - DNA, 120 bp, Artificial Sequence
  ENSG00000164211_4 (sequence is synthesized)
ttggaatataatttccccaagagaatttgttgatttctcctatactgtgggctataaagaagggcttttatcttgtggaataagtcttgactgggatgaaaagagaccagaatttgttcg

SEQ ID NO: 509357 - DNA, 120 bp, Artificial Sequence
  ENSG00000164211_5 (sequence is synthesized)
aggatataaccatccctgtggttggttttgtgttccacttaaagacaacccaaaccagagtcttttgacaggatatattcagacagatctgcgtgggatgattcctcagtctgcggtaga

SEQ ID NO: 509358 - DNA, 120 bp, Artificial Sequence
  ENSG00000164211_6 (sequence is synthesized)
tacagccatggcaagcactttaaccaacttctatggtgatttacgaaaagctttatgagaggcaaaatacattcaaacttgtagtactacagatcaactctctcagctacatggcctgta

SEQ ID NO: 509359 - DNA, 120 bp, Artificial Sequence
  ENSG00000164211_7 (sequence is synthesized)
aaaatcattgattccacttttctgcatagccggtagaaaaatttgaaatgtttttggttcactagtacaatgtttggttttattcctaaagtaaatagctatctaagagagggcattttc

SEQ ID NO: 509360 - DNA, 120 bp, Artificial Sequence
  ENSG00000164211_8 (sequence is synthesized)
acttttttttttttaaattttgagacaggctctcactctgttgcccatgctggagggcagtggtatgatcacagctcactgcagctttgatctgaccgctcaaggggttattctacctca

SEQ ID NO: 509361 - DNA, 120 bp, Artificial Sequence
  ENSG00000164211_9 (sequence is synthesized)
tattctacctcagcctcctgaatagctgggaatacaggtgcacgccactatgcatggctaatttttgtttaattttttgtagagatgtggtcacactgtgttgcccaggctggtcttgaa

SEQ ID NO: 509362 - DNA, 120 bp, Artificial Sequence
  ENSG00000164211_10 (sequence is synthesized)
ccttagcctcccaaagtgttgggattataagcgtgagccaccatgcctggccccaatttaaaatgtggaattcagttggtgtccaagacttatcttgagactcttaaaagcatcagtctg

SEQ ID NO: 509363 - DNA, 120 bp, Artificial Sequence
  ENSG00000164211_11 (sequence is synthesized)
agcatcagtctgtaactagaacaaatacagtcttagatttacccaagtgcctagatatcattttataatgattagaattgagtattgtgggtcccctaattctgtgggtgccttaagtga

SEQ ID NO: 509364 - DNA, 120 bp, Artificial Sequence
  ENSG00000164211_12 (sequence is synthesized)
gaatttctaaatgattttcacattctaaatgactttgggttttgaactctccatctagtttacttctaaaatgggaacttgaggcaattcaggtatccaggcaaatctttgtatatattt

SEQ ID NO: 509365 - DNA, 120 bp, Artificial Sequence
  ENSG00000164211_13 (sequence is synthesized)
ttttgtgtacatgcacacatctcgaaatccatttccgtgtttaatgttagttgtttatgtgttagtattcctgtgtctactgttttgttgttgttaatatgggtaaagtgagccctgaaa

SEQ ID NO: 509366 - DNA, 120 bp, Artificial Sequence
  ENSG00000164211_14 (sequence is synthesized)
tacatgctaaacaagacatgaaatgcagaaaggtacatagtgtttcaagtgcatggtagtttgatctgtgttttactttattgtgttttcttgagtgtaaagaaagaataaatcaaagtt

SEQ ID NO: 509367 - DNA, 120 bp, Artificial Sequence
  ENSG00000164211_15 (sequence is synthesized)
cttcatacccattttgacaaagtggaacagtggagctgttttttgcttttgtttttatttattttttgccactggtgatgatagatttcaaaaaacaaaaggtggcagcagcacaatgtt

SEQ ID NO: 509368 - DNA, 120 bp, Artificial Sequence
  ENSG00000164211_16 (sequence is synthesized)
catggtgaattatctcatagtatctagattgatcaagatctgacagaaggaatgcacaaaggattctatattcttaatgatttattaattaccaggatccttttctaaattgaatgtact

SEQ ID NO: 509369 - DNA, 120 bp, Artificial Sequence
  ENSG00000164211_17 (sequence is synthesized)
tttgaattactaggtttcttctttttttttgttctgcaatagtgaaagaaaactcagtagtttagtttcagtttctcatggaaattggtaaatgttagttttgacttcatctatttttta

SEQ ID NO: 509370 - DNA, 120 bp, Artificial Sequence
  ENSG00000164211_18 (sequence is synthesized)
tttgtttttattagcgtagagtaggaagtctcatattctactgttctatctaggatggtgaaattccaaaggtgcctaacttgagtaagggatttgtgacaagatagtacacattactat

SEQ ID NO: 509371 - DNA, 120 bp, Artificial Sequence
  ENSG00000164211_19 (sequence is synthesized)
ctctttgtccttatcaacatatacctccaataagtaattacataattcaccgttaaacatggacccactctaggtaaaattaccctcatggaaacattttcactgtgagaatgatgaatt

SEQ ID NO: 509372 - DNA, 120 bp, Artificial Sequence
  ENSG00000164211_20 (sequence is synthesized)
taaaaattatgtttgaatcacctaaaatgtatgtgcagcttctagatggccccttagatctgctgggctctagctgtgtactttaaaaaaacaaaaacagctttattgatatataattta

SEQ ID NO: 509373 - DNA, 120 bp, Artificial Sequence
  ENSG00000164211_21 (sequence is synthesized)
catattatgtaatttacccacttttaagtatctaattcagtgatgttttaatacatatgtagaactatgcagccatcagcacaatctggatttagaacgtttccatcattccaaaagatt

SEQ ID NO: 509374 - DNA, 120 bp, Artificial Sequence
  ENSG00000164211_22 (sequence is synthesized)
ccttttgtcttttttgcagactcatacctaacacaaatctaaagtttatcactgttgccaggataattacagcaggttatgtttggtttcatttttaagagtggaggtgttcatgattct

SEQ ID NO: 509375 - DNA, 120 bp, Artificial Sequence
  ENSG00000164211_23 (sequence is synthesized)
aagctcaggaatcttgtgatcatgtattaaatatgttatctcatactataatgataaaaaagcttaatgatgtgggttgggatggatattaacataaataattgagtccgctgcttctat

SEQ ID NO: 509376 - DNA, 120 bp, Artificial Sequence
  ENSG00000164211_24 (sequence is synthesized)
agcaatgctgtaggatagaacaataatgtaagtgatatatgtaattaaaaaattctagaagccacattaaaaaataaaaataaacagctgaagttaattttaatattttatttaactcaa

SEQ ID NO: 509377 - DNA, 120 bp, Artificial Sequence
  ENSG00000164211_25 (sequence is synthesized)
tacatccaaaatgttatcattttaacatgtaattgatgtaaagatttattctgatagtttgtactatttcttgtactaattttttgaaatctggtatgcattttacaaatttgggcaagc

SEQ ID NO: 509378 - DNA, 120 bp, Artificial Sequence
  ENSG00000164211_26 (sequence is synthesized)
cacattttaagtgctcattagccacatgaggccagtggatactgtattgaatagcacagtcctatagcatatttattaatttgtcttgtagtaagatgaaatagacaataatacggaata

SEQ ID NO: 509379 - DNA, 120 bp, Artificial Sequence
  ENSG00000164211_27 (sequence is synthesized)
atatcttaaatggaaatctttgttagtctctagagccttcattgcttgataaataggacatctaaactttagatataaatcagttgtcaatgagataaaattattgccagcaaatatttt

SEQ ID NO: 509380 - DNA, 120 bp, Artificial Sequence
  ENSG00000164211_28 (sequence is synthesized)
ccttcaaagataagtaacttttgatatggcagttggtgaaatgaaagaatataatctgccttcttgttaaatggttgactattctgtagcttgtaggtagtacgtattagaaacttgtgt

SEQ ID NO: 509381 - DNA, 120 bp, Artificial Sequence
  ENSG00000164211_29 (sequence is synthesized)
atgtgggaaatatttggcataatactgttttcagtatatagtagctattttttaaggaaattagtttcatacaagaaaaagattattataaaagtgatacttttgcatgaaatattagtt

SEQ ID NO: 509382 - DNA, 120 bp, Artificial Sequence
  ENSG00000164211_30 (sequence is synthesized)
tgtgttgataactcttagttaacccttaaagtttaaaacagtactcaaaaaaaaataatgagaatctagtattctgtagttaactaatctataagataaattgctaaagtactagggagc

SEQ ID NO: 509383 - DNA, 120 bp, Artificial Sequence
  ENSG00000164211_31 (sequence is synthesized)
ttgtaaatcttaaaaatctttttatttcagtgttcattcaggttggatatatttgaaattgtagatttctatctgtacaacatctcctagttaatagaatttttttccttcccctccctt

SEQ ID NO: 509384 - DNA, 120 bp, Artificial Sequence
  ENSG00000164211_32 (sequence is synthesized)
ctctctcctcctccttttctaaccaaagggcattttatcaacaatcatgctgaattcaattaatatctcaagctaaaaaactatgtaattgaggttgtatctggagaagatgggaaaaca

SEQ ID NO: 509385 - DNA, 120 bp, Artificial Sequence
  ENSG00000164211_33 (sequence is synthesized)
ttgtataatttaagcccttaattgtctgttgagcttttagggctgagtaattgcctttcatacaaataaaagctttaactcttttctcaagagtgtaccaccgtccttagaatcaggtgt

SEQ ID NO: 509386 - DNA, 120 bp, Artificial Sequence
  ENSG00000164211_34 (sequence is synthesized)
tttaaatccagtttcttttaattaaatgggactgtagtgatccctaccctgtagagaaatcaacagaactagagaagctaagggcttgatcaggtttcccctagaacctgtgttgcctgc

SEQ ID NO: 509387 - DNA, 120 bp, Artificial Sequence
  ENSG00000164211_35 (sequence is synthesized)
ctgctgtatcttccatgtctttcttattcaacttctagaagtagagaaggttgggacttgagtgtagaagaaacatcagaataatttcaaaaaacaggaagttggaactataatttttaa

SEQ ID NO: 509388 - DNA, 120 bp, Artificial Sequence
  ENSG00000164211_36 (sequence is synthesized)
aacaggaagttggaactataatttttaaattattgtattgtttttacggattttacatgtatagttaaatattaaaattcatctcttgcagttcaataaaagctatagtatagattttat

SEQ ID NO: 509389 - DNA, 120 bp, Artificial Sequence
  ENSG00000164211_37 (sequence is synthesized)
aatatcaaaagagttttgaaacccttctgataagtttttgttcccagttacacagtatcctctaggtcagaggtagcaaatgtggatcacatgactgcctctaagaaagggttctagtaa

SEQ ID NO: 509390 - DNA, 120 bp, Artificial Sequence
  ENSG00000164211_38 (sequence is synthesized)
atggattttcttctaagccactctcagaaaacagtttcttggtcatacacagagaagtactagatttggtgtgtcttagaatattcttccttccttgagctgtgttgtatttttcttttc

SEQ ID NO: 509391 - DNA, 120 bp, Artificial Sequence
  ENSG00000164211_39 (sequence is synthesized)
aagattaaaaatactgccattggaaggctcctgttttctaaaacgtacctataggtaaattaatattattttgtatatagtgtatacttaagttagcagttgtaagtaaacatctacttg

SEQ ID NO: 509392 - DNA, 120 bp, Artificial Sequence
  ENSG00000164211_40 (sequence is synthesized)
tttattcttaactagccagtaccaaactataatatggtagtcgctgtggggaatagttacggtaccatggatttgatttttggcacctcaaggcctggatactacaaccaagatttgtag

SEQ ID NO: 509393 - DNA, 120 bp, Artificial Sequence
  ENSG00000164211_41 (sequence is synthesized)
cttccaaggagtactaagatgatatgatgtcatgtattctgaaaggattaaaagtttccccattacctatctgccaacctcttgtcagaattctccttggtaagtctctttttcactctg

SEQ ID NO: 509394 - DNA, 120 bp, Artificial Sequence
  ENSG00000164211_42 (sequence is synthesized)
tatggtttaaatatttgtgttttcttggctggatgtctctttccttgtgagatatattttcaactctgactctgtaatcactaacattttttgcaagtgctaaactctagggagtaaaat

SEQ ID NO: 509395 - DNA, 120 bp, Artificial Sequence
  ENSG00000164211_43 (sequence is synthesized)
atatctgtaagtaactttttatagacttacacagctcttaagacatttcaaaacttatatccattgtcactaagtagtcattgctagtaagatttagctttttaagagttctttaacttt

SEQ ID NO: 509396 - DNA, 120 bp, Artificial Sequence
  ENSG00000164219_0 (sequence is synthesized)
gcggcggacgtcgcttccggagcagcatggcggccactgaggatgagaggctagcagggagcggtgagggagagcggctggatttcttacgggatcggcacgtgcgatttttccagcgct

SEQ ID NO: 509397 - DNA, 120 bp, Artificial Sequence
  ENSG00000164219_1 (sequence is synthesized)
gcctccaggttttgccggagcgctattcttcactcgagacaagcaggttgacaattgcattttttgcactctccgggctggatatgttggattccttagatgtggtgaacaaagatgata

SEQ ID NO: 509398 - DNA, 120 bp, Artificial Sequence
  ENSG00000164219_2 (sequence is synthesized)
taatagagtggatttattccctgcaggtccttcccacagaagacagatcaaatctaaatcgctgtggtttccgaggctcttcatacctgggtattccgttcaatccatcaaaggctcctg

SEQ ID NO: 509399 - DNA, 120 bp, Artificial Sequence
  ENSG00000164219_3 (sequence is synthesized)
gaacagctcatccttatgatagtggccacattgcaatgacctacactggcctctcatgcttagttattcttggagacgacttaagccgagtaaataaagaagcttgcttagcgggcttga

SEQ ID NO: 509400 - DNA, 120 bp, Artificial Sequence
  ENSG00000164219_4 (sequence is synthesized)
gagcccttcagctggaagatgggagtttttgtgcagtacctgaaggcagtgaaaatgacatgcgatttgtgtactgtgcttcctgtatttgctatatgctcaacaactggtcaggcatgg

SEQ ID NO: 509401 - DNA, 120 bp, Artificial Sequence
  ENSG00000164219_5 (sequence is synthesized)
atatgaaaaaagccatcacctatattagaaggagtatgtcctatgacaatggactggcacagggagctggacttgaatctcatggaggatcaactttttgtggcattgcctcactatgtc

SEQ ID NO: 509402 - DNA, 120 bp, Artificial Sequence
  ENSG00000164219_6 (sequence is synthesized)
tgatgggtaaactagaagaagttttttcagaaaaagaattgaacaggataaagaggtggtgtataatgaggcaacaaaatggttatcatggaagacctaataagcctgtagacacctgtt

SEQ ID NO: 509403 - DNA, 120 bp, Artificial Sequence
  ENSG00000164219_7 (sequence is synthesized)
attctttttgggtgggagcaactctgaagcttctaaaaattttccaatacactaactttgagaaaaatagaaattacatcttatcaactcaagatcgccttgtagggggatttgccaagt

SEQ ID NO: 509404 - DNA, 120 bp, Artificial Sequence
  ENSG00000164219_8 (sequence is synthesized)
ggccagacagtcatccagatgctttgcatgcatactttgggatctgtggcctgtcactaatggaggaaagtggaatttgtaaagttcatcctgctctgaatgtaagcacacggacttctg

SEQ ID NO: 509405 - DNA, 120 bp, Artificial Sequence
  ENSG00000164219_9 (sequence is synthesized)
aacgccttctagatctccatcaaagctggaaaaccaaggactctaaacaatgctcagagaatgtacatatctccacatgactgattttagattgggagggtggggggatttgtagcataa

SEQ ID NO: 509406 - DNA, 120 bp, Artificial Sequence
  ENSG00000164219_10 (sequence is synthesized)
ctgtagctcaagtttaaaagccatgtataaccaagtgtgctctttttttaaaaggtagagtcttacaatcaaatctcctgctgatttcactttgggatatggtcttgagccagtaatctt

SEQ ID NO: 509407 - DNA, 120 bp, Artificial Sequence
  ENSG00000164219_11 (sequence is synthesized)
tatactgggtttcaagaaaatctttgttgaagtttgaaccacaactttgtcgtggttcttaaatgtttatactgtatttctaagaagttgtttgaggcaaattaactgtatgtgtgtagg

SEQ ID NO: 509408 - DNA, 120 bp, Artificial Sequence
  ENSG00000164219_12 (sequence is synthesized)
ttatctttttaaaaactcttcagtgcaaattgtatcttattataaaatggacacaaattttcaagtttacacttcatatagcattgataatcttcaggtgaacacttagtgatcatttaa

SEQ ID NO: 509409 - DNA, 120 bp, Artificial Sequence
  ENSG00000164219_13 (sequence is synthesized)
aaagctcactgctgatcgtagaaaatttgctttaattaattaagtatctgggattattctttgaaaacagatgaccataattttttttaaagaagagtgacttattttgtcttattctta

SEQ ID NO: 509410 - DNA, 120 bp, Artificial Sequence
  ENSG00000164219_14 (sequence is synthesized)
agtaaagtgtgccaattaaacctgtgtggcctatataaatgaagttaataacttcatagtaagaataaataggtttaactaatgtgatagttttctaaaaggagattgtttgaagacaac

SEQ ID NO: 509411 - DNA, 120 bp, Artificial Sequence
  ENSG00000164219_15 (sequence is synthesized)
tattatgtaactgagggaaaagcaacttaactgtatgtgattgtgaatgagaaagttttgtgctatgtgggtcatttatctagacattgctgtggtgaataccagttatgtttgatttta

SEQ ID NO: 509412 - DNA, 120 bp, Artificial Sequence
  ENSG00000164219_16 (sequence is synthesized)
tttttttttttttttttttgctttctaggaagaaaacaatcttttttatctagaaggaaagatactttgtgttttcatttttagccatttgaagtttttaatttattgcccccagtgtgt

SEQ ID NO: 509413 - DNA, 120 bp, Artificial Sequence
  ENSG00000164219_17 (sequence is synthesized)
tttaatttattgcccccagtgtgttagctgctctaatttcaaactaatacttttctaatttttttcaaattaaataagtaaaaaatacaaaaacagaaccattcaaacagattcagtggt

SEQ ID NO: 509414 - DNA, 120 bp, Artificial Sequence
  ENSG00000164219_18 (sequence is synthesized)
gtaactcaatacatggtcatttttattctcatattttcaggtaagtgaaagggaaatgcgaccatttagagggtaagaaatagggttttgtttttgttcattgttttgttttaagtctat

SEQ ID NO: 509415 - DNA, 120 bp, Artificial Sequence
  ENSG00000164219_19 (sequence is synthesized)
gaactagctaattataaaggaggtagtataaaaactcttcattagtaattaatttatcaataactcatatccgttacttgctcagtgacattcagaactattgcgtctagtactgaaatg

SEQ ID NO: 509416 - DNA, 120 bp, Artificial Sequence
  ENSG00000164219_20 (sequence is synthesized)
gggaaagaaatctcttcactaaaggagttggctttaagttagtcttggtgataataaatgttgaaatacaagtatcagtataaaaactggattactggtatcactgtttaggcattgtaa

SEQ ID NO: 509417 - DNA, 120 bp, Artificial Sequence
  ENSG00000164219_21 (sequence is synthesized)
tactttaaatgttatctttttttctaaatcagagggaaaaaaatgttgtgaaataacagtccttcccaagggaaacactgtgtacttggagaaatgattgatttattattggcatgctta

SEQ ID NO: 509418 - DNA, 120 bp, Artificial Sequence
  ENSG00000164219_22 (sequence is synthesized)
gttttaaacctgagtttgccaactgtatgttttttaattagaaataaaataaatcttctgatggtgggggaaaaagtaagcttaataacagatgttatccgtctatgggttattccagtt

SEQ ID NO: 509419 - DNA, 120 bp, Artificial Sequence
  ENSG00000164219_23 (sequence is synthesized)
gctactatttaaatcctggcagattaagacatccatatctcaaactaagtcatctcttagacattggaagttaaagtagcatatatataatggctttaggactatataaaaagcccaaat

SEQ ID NO: 509420 - DNA, 120 bp, Artificial Sequence
  ENSG00000164219_24 (sequence is synthesized)
tgttttttctgtatcaccaagaaaggttagaaggcaataaaggtagtaacagtgattttattcataaatgttagagaaaaattccaatctaaaagtatttcataaggctaaatattttct

SEQ ID NO: 509421 - DNA, 120 bp, Artificial Sequence
  ENSG00000164219_25 (sequence is synthesized)
aactcctgataatttaataccataagattataaattttagtatgcttctaattgatacacttgtgggagactttcttgtgaaactttatggactagtaaatgttcacattccacagcaac

SEQ ID NO: 509422 - DNA, 120 bp, Artificial Sequence
  ENSG00000164219_26 (sequence is synthesized)
tgaattgaccagaaaatagcagcccagtgtgaattgtggagaaactatttctaacttttctaaatagttatttacaagaaaagcatttatcgattaaataaattataagcaatatttcac

SEQ ID NO: 509423 - DNA, 120 bp, Artificial Sequence
  ENSG00000164219_27 (sequence is synthesized)
atatacactttattccttaacaggagcgatgtaatgagggaaaatacgaagtccgaaatctcaaaaagctctgttacctactctatacttgtctccttcccgccccctaattttgtggca

SEQ ID NO: 509424 - DNA, 120 bp, Artificial Sequence
  ENSG00000164219_28 (sequence is synthesized)
ttttttttttagaaggtaggaggaggagctttattttgagcatctgtgtacaaatgagattaatcagatcatatggcctaatttaacctgtttatcatttcagtgtttttagatttgatc

SEQ ID NO: 509425 - DNA, 120 bp, Artificial Sequence
  ENSG00000164219_29 (sequence is synthesized)
tataatatatatgtgttattagatctttagttatttatatttaatctaaattcatatagaaatcttgctgacagtggtatataatttgaaaactgttggacctgatcatttttgagagac

SEQ ID NO: 509426 - DNA, 120 bp, Artificial Sequence
  ENSG00000164219_30 (sequence is synthesized)
agttaatgaggaggtgctctggaatcagatgacctgggtttaaatcccagatttgccagttcagcagcatgatcttggaccctaactctgccgtggataaaataagggtaaaacctaaca

SEQ ID NO: 509427 - DNA, 120 bp, Artificial Sequence
  ENSG00000164219_31 (sequence is synthesized)
cacagggtttaggattaaatgagataatacagataaagcacttaggatagtacctggaatacagcaaatttcaaattataggttctttataatgatcataaaattatttttgtaattaaa

SEQ ID NO: 509428 - DNA, 120 bp, Artificial Sequence
  ENSG00000164219_32 (sequence is synthesized)
acctctcttctacaacagaaagaggtcttaacagtttaacctcagggaaaatgatgacaacagtgttgttttctaatctccccataagaatacagagcaactaggatagccacagacact

SEQ ID NO: 509429 - DNA, 120 bp, Artificial Sequence
  ENSG00000164219_33 (sequence is synthesized)
attacaacgctagatgacaaggtatctctatgaacttcaaaatacaactaagtgaggacaaaccactgaaccacatagtttcagtatctgtgggaggaagtagaaggaaggcagctggtt

SEQ ID NO: 509430 - DNA, 120 bp, Artificial Sequence
  ENSG00000164219_34 (sequence is synthesized)
tctgacagctctgcaaattggagaactacaacactgcccacagtttctcaactacaaagtgcagcgggccaatctaagaacagacactgaaactgggaagtgactacagaatctcatttg

SEQ ID NO: 509431 - DNA, 120 bp, Artificial Sequence
  ENSG00000164219_35 (sequence is synthesized)
cagatgaatgttaaagcaatatgataaggtctgctgattgcattagagctgtctgggttttacgctgtgtacctcttgaagcttatgagacaaagcccagcactgaggacaaacttctag

SEQ ID NO: 509432 - DNA, 120 bp, Artificial Sequence
  ENSG00000164219_36 (sequence is synthesized)
aattagaatccaaatgggcaggatgggtaaaataggacaaaggaaagaagatctagataagtattgggaagaaaggccaagacacagagacattatatatgtgtattttcatatatatat

SEQ ID NO: 509433 - DNA, 120 bp, Artificial Sequence
  ENSG00000164219_37 (sequence is synthesized)
atattcttttaaatcactgtgaaaatgggagctctaaggctgtgaagtcatcctagagccactccttcctcctaaaagtacagaaaaactcatttcagttaaggggaaaaaaagagtaag

SEQ ID NO: 509434 - DNA, 120 bp, Artificial Sequence
  ENSG00000164219_38 (sequence is synthesized)
tgagccaggattacagtccaactccagtcaaagttagtataagaaataagagaataaatagatcaacatcctcacagacaatgaaagcacaccggaaggacatgaccacaagacagataa

SEQ ID NO: 509435 - DNA, 120 bp, Artificial Sequence
  ENSG00000164219_39 (sequence is synthesized)
ataaaagtaggaaaaggggaaaattaaccaagtaccaaacacttggagtaaaaagcaaaataaagcagaaggaaggaattaataaaagcaaaaaagaattactagtagaaaaccaaaaca

SEQ ID NO: 509436 - DNA, 120 bp, Artificial Sequence
  ENSG00000164219_40 (sequence is synthesized)
atagaggcaataataaatccaagttggtgatgggtagtgcggggagttgagtcagataaactaccagctaacctatttaagaaaaaaaggaggaagcacaaatacaaaaatttaaatgac

SEQ ID NO: 509437 - DNA, 120 bp, Artificial Sequence
  ENSG00000164219_41 (sequence is synthesized)
aagggggaaatagtaaaacaggaaatttgtttaaattgactattttgagcaattttacacaataaattcaaaaactattttgagaaaaatgcaaattgccaaaatttactctaggtagat

SEQ ID NO: 509438 - DNA, 120 bp, Artificial Sequence
  ENSG00000164219_42 (sequence is synthesized)
aaagtcacaacaaaccaattaccgtagaagaaacaaatagttaaaagtaccccttaccaaaagaagcatcaagcccagattgtttcaaggggatttctaccaaaccttttaagattaaat

SEQ ID NO: 509439 - DNA, 120 bp, Artificial Sequence
  ENSG00000164219_43 (sequence is synthesized)
ggggatttctaccaaaccttttaagattaaataatcccattcttgcttaaacaattgcagagactaggaaaagaatcttgaacctcaaagtgccaaaaaaagaaaaaaaacaaataaaga

SEQ ID NO: 509440 - DNA, 120 bp, Artificial Sequence
  ENSG00000164219_44 (sequence is synthesized)
taatagcattgattcaaaaacctgacaaagatggtaccaaaaagaaaatatagagcaatctcatgaatattaataaaaagttttaatgataacattagcaaacaatccaacagcactttc

SEQ ID NO: 509441 - DNA, 120 bp, Artificial Sequence
  ENSG00000164219_45 (sequence is synthesized)
aaaaggtaatcatgactaagttgggtttattgtaagaatgcaagggtagttcaatactagataatctgttactattcatattaagagttaaaaaatatcttcatctttgcagaaaagaca

SEQ ID NO: 509442 - DNA, 120 bp, Artificial Sequence
  ENSG00000164219_46 (sequence is synthesized)
tgatagaattgagcactcacttatgttaactatactaagtagaaattgatgaataatctattaacattgtacctctacctaaaagccagcatcttaaatttcaaagcaaaggagactttc

SEQ ID NO: 509443 - DNA, 120 bp, Artificial Sequence
  ENSG00000164219_47 (sequence is synthesized)
cagctgaagtcaggaacaagacatgcccactaactcctctgctacttaacaatgtgttgagagttatagccaatgaagttagacaaaataaagacgtgaattggaaaggaagaggtaaaa

SEQ ID NO: 509444 - DNA, 120 bp, Artificial Sequence
  ENSG00000164219_48 (sequence is synthesized)
ctatttgcagatatgaatatgtatctagaaagcccaaaggaacttgttgaaaaactaaacaataaaagaacttagtaaagtagctattaaatacaatttacataaaaatatcagtaggct

SEQ ID NO: 509445 - DNA, 120 bp, Artificial Sequence
  ENSG00000164219_49 (sequence is synthesized)
tcaccagacacaagtgcatactttgattccatttcggtgaagttcaaaacagacagcatctatgtatggtgtcagaaatcagcaccctctttcagtcactacctctcttcccaaaggtaa

SEQ ID NO: 509446 - DNA, 120 bp, Artificial Sequence
  ENSG00000164219_50 (sequence is synthesized)
gtgctgtcaaaattaccatcaattagttttgtctgtttttgaattttatatgagtggaaccatatagtatacattatttttcaactggctttaactcagtaggactgaaagagggtacaa

SEQ ID NO: 509447 - DNA, 120 bp, Artificial Sequence
  ENSG00000164219_51 (sequence is synthesized)
gggagactctgcggtgctggtaatgttctgtttcatgatctaggtgctggttacgtaggtgcattcaccttatgaatatttatcaagctgtatatgatttgtgcacttttctgtatgtat

SEQ ID NO: 509448 - DNA, 85 bp, Artificial Sequence
  ENSG00000164219_52 (sequence is synthesized)
agacatgcaaacctaaactagttagaagatacttgaagagaagaccacctttgtgatagcaaaagtaaaaagaaaacttaatgtg

SEQ ID NO: 509449 - DNA, 120 bp, Artificial Sequence
  ENSG00000164219_53 (sequence is synthesized)
cacctttgtgatagcaaaagtaaaaagaaaacttaatgtgtaaatttaagacacatctaaaatctgtatgaggaaaactaaaaaaactcttgagaggcaaaaatgtagattccaccaaat

SEQ ID NO: 509450 - DNA, 120 bp, Artificial Sequence
  ENSG00000164219_54 (sequence is synthesized)
ggaaagatacatgatattcttagatagacaacatcaaaacatgtctttccccacttaggttcatttataaattcagtgccattccaataaaaattatattgttatttgagagaacatact

SEQ ID NO: 509451 - DNA, 120 bp, Artificial Sequence
  ENSG00000164219_55 (sequence is synthesized)
agaataaccatggaaactgaaaagaattagaggggaccagccatatccgacactaaaacatactctaaatcctccatggcagaagctatcagaattttttaaagtgtgcacactttttgg

SEQ ID NO: 509452 - DNA, 120 bp, Artificial Sequence
  ENSG00000164219_56 (sequence is synthesized)
cccagatactctctatctatagatttagcataaagaaacatgcaaataggcaatgatacattttcaaggatctcacagccacatttttgtaattgtgaaaaataagacacattatgatac

SEQ ID NO: 509453 - DNA, 120 bp, Artificial Sequence
  ENSG00000164219_57 (sequence is synthesized)
atttatgtaactcaatactatgcaactgttaaagtatggatattggaaggcattcgtaatgttgaataaatgaaaagttttgtattggcacataaataggaagtccaatggaacagaaga

SEQ ID NO: 509454 - DNA, 120 bp, Artificial Sequence
  ENSG00000164219_58 (sequence is synthesized)
ggaattccagaaatagactcagtggcatttagaatacagtaaaggcagcatctcaagttagtgagaaaatgaacttttaagtaagtgctattgagattactggtgcttaattattcagat

SEQ ID NO: 509455 - DNA, 120 bp, Artificial Sequence
  ENSG00000164219_59 (sequence is synthesized)
atttacaattttaaaaaatatatagcttatttcactttgaacctttttttaaaatggtcatttagttttataatttaaagaaaaatgatagttctctccccatcccagcctatactatac

SEQ ID NO: 509456 - DNA, 120 bp, Artificial Sequence
  ENSG00000164219_60 (sequence is synthesized)
ccacagcctatacttcctggaggtaaacaccactgttgcatacatctttcagacctttaatctctgtatatagagatatagaaatagagaatattctttaaatatctgaacatttaagta

SEQ ID NO: 509457 - DNA, 120 bp, Artificial Sequence
  ENSG00000164219_61 (sequence is synthesized)
ttactcatcccaatacaatatatacttatacaaatagatatatgtatgtatactatacataaagatctgaggtactaaatattccatggttttttttcattcaacaatgtattatgaatg

SEQ ID NO: 509458 - DNA, 120 bp, Artificial Sequence
  ENSG00000164219_62 (sequence is synthesized)
cctttcaatagccatactttaatagttgcatagtatcacgttgcataaacatattaggtcagtgcataagtaattgcactttttaccattttaatggcaaatgaggcactgattaatcag

SEQ ID NO: 509459 - DNA, 120 bp, Artificial Sequence
  ENSG00000164219_63 (sequence is synthesized)
tgccttatttttcacaactacaaaaatattgctgtgagatccttgaaaatgtataattgcccatttgcatgtttctttaaatttatagataaggaattactggggcaaaaagtgtgcaca

SEQ ID NO: 509460 - DNA, 120 bp, Artificial Sequence
  ENSG00000164219_64 (sequence is synthesized)
atttaaatttgatgtttttgtttttgccaagctgctttttaagaaggttgtactaatgcacacttttatcttgacactaagattttaaatatgatcagaaaatgggtttctgatagtaaa

SEQ ID NO: 509461 - DNA, 120 bp, Artificial Sequence
  ENSG00000164219_65 (sequence is synthesized)
actgtctacttgtaataattgtggcattagaaaagacctttgtggcttcgttcctcaaactcatttacgaattataaatctgaattccaaatatgaattaactcacacaagataaagctt

SEQ ID NO: 509462 - DNA, 120 bp, Artificial Sequence
  ENSG00000164219_66 (sequence is synthesized)
taacagttagtagcagtactgtaactagagtgcatgttttctgtctccagaaataacattctttttatgccacatttttttaactgaggtgatcattctccaccctcttctttccatgtt

SEQ ID NO: 509463 - DNA, 120 bp, Artificial Sequence
  ENSG00000164219_67 (sequence is synthesized)
tttccatgtttgttcaaacttttcattaaatatcttgaggctctaactaaattaagggtggccattaaaattgtatgtgggattccctgaaccaactggtaatgcactaccagcatataa

SEQ ID NO: 509464 - DNA, 120 bp, Artificial Sequence
  ENSG00000164219_68 (sequence is synthesized)
ggtgtcctcattaaagcagttggtgattggtacatgggacctcactcatgtatgtttgcatctacttgtgagtcaaaaagttttcttaaagtataggtgggatcatgaaagacatacaat

SEQ ID NO: 509465 - DNA, 120 bp, Artificial Sequence
  ENSG00000164219_69 (sequence is synthesized)
tcactggagaaattgtgaaaaagtaaaagattatgaatttaggctcaaagccaatttccctctcatttaattctacatgagcaagtcaaggagtttggtagagctttatgaaatctctaa

SEQ ID NO: 509466 - DNA, 120 bp, Artificial Sequence
  ENSG00000164219_70 (sequence is synthesized)
agattgaaggaaaacaatcactaaaatcgatttgataaagtgcaactaagtagtatgctagcctgttaatggattttcatcttgtcatttaagtttcagcaattgagtaccacactagaa

SEQ ID NO: 509467 - DNA, 120 bp, Artificial Sequence
  ENSG00000164219_71 (sequence is synthesized)
cacccacaaatgagattctgttacagagtatcttttttctactacagaacatactgtagacagttattcagtggttaacttgtggaaataatcagaagatgcttttcacttttatgactg

SEQ ID NO: 509468 - DNA, 120 bp, Artificial Sequence
  ENSG00000164219_72 (sequence is synthesized)
gatatattttaatatttatcatattaagagaaacttaggttacttacagctcataaacgttgctatgaacatcattcatttattcacttatttatttttatggtgttcctagaaagaatt

SEQ ID NO: 509469 - DNA, 120 bp, Artificial Sequence
  ENSG00000164219_73 (sequence is synthesized)
tcctggactaaaggatttatgctttaaaaatattggtagttactgccaagaattgccatccagaaacagtgtagccattcataaactcaacaacaaggtatgagagtgcctgtttcctca

SEQ ID NO: 509470 - DNA, 120 bp, Artificial Sequence
  ENSG00000164219_74 (sequence is synthesized)
tatcctttgtgacaccggattttatcaagcttaaagttttttcattctaggtgggtgaaaatggtattccgttattgataatgtgtggaaatcaagttctaataagtttggggggaggtt

SEQ ID NO: 509471 - DNA, 120 bp, Artificial Sequence
  ENSG00000164219_75 (sequence is synthesized)
aattctttatatgtgctgtatgaattaatgccaactgtatgcctttgagagtgaaatcagaataatgtctctccactaaagcaggacttagagcactagttttccaaatgttgtctacag

SEQ ID NO: 509472 - DNA, 120 bp, Artificial Sequence
  ENSG00000164219_76 (sequence is synthesized)
atggaaacactagcatcacctgggtactcgttagaaagtgcagattctctggcggtaccttagacctcctgaattagaaactctgggggtagggttagacatttgtgttttaaacaagcc

SEQ ID NO: 509473 - DNA, 120 bp, Artificial Sequence
  ENSG00000164219_77 (sequence is synthesized)
ctccaagtggtttcaatgcacattcaaagttgagaaccaatcactgatagagaaaaagcagcttgggtagaaacagttgattatttgcaaatttatattttaaaaagataggattcttaa

SEQ ID NO: 509474 - DNA, 120 bp, Artificial Sequence
  ENSG00000164219_78 (sequence is synthesized)
cagtaagctctttataattcaacaatgtgatctttactcctacccccgaaaaactaatatgattttagtgtgtggtagctggatcgaaaacataataaatactcagatatgcaaagaaaa

SEQ ID NO: 509475 - DNA, 120 bp, Artificial Sequence
  ENSG00000164219_79 (sequence is synthesized)
gtgcataagagaactgtgcaaagtgagaactgcctgtatttctcatatttagggtggactttctcttaggcagtgattttagatcaatctcagaactactgttagctcccctcctctcat

SEQ ID NO: 509476 - DNA, 120 bp, Artificial Sequence
  ENSG00000164219_80 (sequence is synthesized)
gatttttcataaatcacccttgctctctgcaaaggtgtgtagagttgcaatagacggcttgctgggatttgatgtttctttttctgtagacagtcctatgacaatggactggcacaggga

SEQ ID NO: 509477 - DNA, 120 bp, Artificial Sequence
  ENSG00000164219_81 (sequence is synthesized)
tgaatctcatgcttctaaaaattttccaatacactaactttgagaaaaatagaaattacatcttatcaactcaagatcgccttgtagggggatttgccaagtggccagacagtcatccag

SEQ ID NO: 509478 - DNA, 120 bp, Artificial Sequence
  ENSG00000164219_82 (sequence is synthesized)
tagaaaatcttagtacttgtatactgttaacatattttatttatctgtgattttgttgtaatgcagcattgccattctgttgaaatacagtacttaacaaatctgatcataatctcaaga

SEQ ID NO: 509479 - DNA, 120 bp, Artificial Sequence
  ENSG00000164219_83 (sequence is synthesized)
aaacaatttagagttatctggaatttaatagagattcacagttgtggcaccatactatgttgtatacttccactttgatgactacttgttgattatttatagtcagtatttatgtttgat

SEQ ID NO: 509480 - DNA, 120 bp, Artificial Sequence
  ENSG00000164220_0 (sequence is synthesized)
ctttccctgcggaggaccagggcaagtttcctgcctgcacggcacaggagagcaaacttctacagacagaccaaggcttccatttgctgctgacacatggaactgaggtgaaattgtgct

SEQ ID NO: 509481 - DNA, 120 bp, Artificial Sequence
  ENSG00000164220_1 (sequence is synthesized)
ccatgattttacagatttcataacgtttaagagacgggactcaggtcatcaaaatgaaagccctcatctttgcagctgctggcctcctgcttctgttgcccactttttgtcagagtggca

SEQ ID NO: 509482 - DNA, 120 bp, Artificial Sequence
  ENSG00000164220_2 (sequence is synthesized)
tggaaaatgatacaaacaacttggcaaagccaaccttacccattaagacctttcgtggagctcccccaaattcttttgaagagttccccttttctgccttggaaggctggacaggagcca

SEQ ID NO: 509483 - DNA, 120 bp, Artificial Sequence
  ENSG00000164220_3 (sequence is synthesized)
cgattactgtaaaaattaagtgccctgaagaaagtgcttcacatctccatgtgaaaaatgctaccatggggtacctgaccagctccttaagtactaaactgatacctgccatctacctcc

SEQ ID NO: 509484 - DNA, 120 bp, Artificial Sequence
  ENSG00000164220_4 (sequence is synthesized)
tggtgtttgtagttggtgtcccggccaatgctgtgaccctgtggatgcttttcttcaggaccagatccatctgtaccactgtattctacaccaacctggccattgcagattttctttttt

SEQ ID NO: 509485 - DNA, 120 bp, Artificial Sequence
  ENSG00000164220_5 (sequence is synthesized)
gtgttacattgccctttaagatagcttatcatctcaatgggaacaactgggtatttggagaggtcctgtgccgggccaccacagtcatcttctatggcaacatgtactgctccattctgc

SEQ ID NO: 509486 - DNA, 120 bp, Artificial Sequence
  ENSG00000164220_6 (sequence is synthesized)
tccttgcctgcatcagcatcaaccgctacctggccatcgtccatcctttcacctaccggggcctgcccaagcacacctatgccttggtaacatgtggactggtgtgggcaacagttttct

SEQ ID NO: 509487 - DNA, 120 bp, Artificial Sequence
  ENSG00000164220_7 (sequence is synthesized)
tatatatgctgccatttttcatactgaagcaggaatattatcttgttcagccagacatcaccacctgccatgatgttcacaacacttgcgagtcctcatctcccttccaactctattact

SEQ ID NO: 509488 - DNA, 120 bp, Artificial Sequence
  ENSG00000164220_8 (sequence is synthesized)
tcatctccttggcattctttggattcttaattccatttgtgcttatcatctactgctatgcagccatcatccggacacttaatgcatacgatcatagatggttgtggtatgttaaggcga

SEQ ID NO: 509489 - DNA, 120 bp, Artificial Sequence
  ENSG00000164220_9 (sequence is synthesized)
gtctcctcatccttgtgatttttaccatttgctttgctccaagcaatattattcttattattcaccatgctaactactactacaacaacactgatggcttatattttatatatctcatag

SEQ ID NO: 509490 - DNA, 120 bp, Artificial Sequence
  ENSG00000164220_10 (sequence is synthesized)
ctttgtgcctgggtagtcttaatagttgcttagatccattcctttattttctcatgtcaaaaaccagaaatcactccactgcttaccttacaaaatagtgaaatgatcttagagaacaag

SEQ ID NO: 509491 - DNA, 120 bp, Artificial Sequence
  ENSG00000164220_11 (sequence is synthesized)
gacagccatcacagagaacgtctgttttcaagaacaacataagcatagtgcaaggagctccatttccgagctcctaagaaatatgcttcaaaggtcaaacattacaaaagcattagtagt

SEQ ID NO: 509492 - DNA, 120 bp, Artificial Sequence
  ENSG00000164220_12 (sequence is synthesized)
caaaggtcaaacattacaaaagcattagtagtttgtttgtttgtttttgagactgagtctcactttatcacccagactggcgtgcagtggcactatcttggctcattgcaacctctgcct

SEQ ID NO: 509493 - DNA, 66 bp, Artificial Sequence
  ENSG00000164220_13 (sequence is synthesized)
ctctgcctcccaggtcagcctcccaagtagctgggattacaccaccatgcccagctactaaaaata

SEQ ID NO: 509494 - DNA, 120 bp, Artificial Sequence
  ENSG00000164220_14 (sequence is synthesized)
attagtaatttttaaaaacactttatcagtattttaaaaatgttaatgcaggagaaaagatatcacaactctatggaaaatgacatttccatttgccttattgctacttcaagctcttta

SEQ ID NO: 509495 - DNA, 120 bp, Artificial Sequence
  ENSG00000164220_15 (sequence is synthesized)
aatcaccatcttccctatttctgtgagtggtattgccatccttgacatttgacatcattttttattctttggtctcttttgactctcatgctggtggctgcctcatcaactgattctatc

SEQ ID NO: 509496 - DNA, 120 bp, Artificial Sequence
  ENSG00000164220_16 (sequence is synthesized)
tttgtagggtccctcaccagggtcttttatctagtttcacctttgccttcttttttcctttttttaatagagacagtgtctcgcttcgtcacctggctgaagtgcagtagcctgatcata

SEQ ID NO: 509497 - DNA, 120 bp, Artificial Sequence
  ENSG00000164220_17 (sequence is synthesized)
ctccaactcctgggctcaagcaatcctgctgtctcagcctcccaagtaactaagactacaggcatgcaccaccatacccaactaattttattttttattttttgcagagatggagtctca

SEQ ID NO: 509498 - DNA, 78 bp, Artificial Sequence
  ENSG00000164220_18 (sequence is synthesized)
ggtctcgagtgatcttcctaacgtccaggccacctctaccttctaaccattctctccactgccagcctaccctccacc

SEQ ID NO: 509499 - DNA, 120 bp, Artificial Sequence
  ENSG00000164220_19 (sequence is synthesized)
ccttctaaccattctctccactgccagcctaccctccaccacttcacaagtcctgccagattaatcttccttagatatcagttaggatacatcactaaaacatttccactaactccactg

SEQ ID NO: 509500 - DNA, 120 bp, Artificial Sequence
  ENSG00000164220_20 (sequence is synthesized)
tttctataataaatcataaatctttagcctggcattcaaggctaacttgctaatcacacttcccattaaaccttgcttatgatataggcaccaaccaaacctcttgctctgctatatctc

SEQ ID NO: 509501 - DNA, 120 bp, Artificial Sequence
  ENSG00000164220_21 (sequence is synthesized)
cactctgcctcagactgaaaagctagtcctaacgtctttgccttaattctgttcattttttcaagtccttgaaggaccattcttccctgattctcaggctagaagtgtcacttttcttat

SEQ ID NO: 509502 - DNA, 120 bp, Artificial Sequence
  ENSG00000164220_22 (sequence is synthesized)
ctgtacttccaaagcactttcgtatatttttattatggcatttatatatagttcatttatatttaaattttaattccatgaacaatcaagtaccaagtataatggagaaggtgctcatcc

SEQ ID NO: 509503 - DNA, 120 bp, Artificial Sequence
  ENSG00000164220_23 (sequence is synthesized)
tctgccttccttgagcttctgggtgatgccaggcccaagtctttgtggcacccagctccatgctttgaatactatgtggctgaatgaatttttaaaatctcaaagcagttaaacagcagg

SEQ ID NO: 509504 - DNA, 120 bp, Artificial Sequence
  ENSG00000164220_24 (sequence is synthesized)
aaagcccattaacttcgtactgaaaaagcaacatactgtgatgatacgggatgacatcatttcaggttgggcatacaaaaaagtaaggaagctaaactaagactatactcaccaggccat

SEQ ID NO: 509505 - DNA, 120 bp, Artificial Sequence
  ENSG00000164220_25 (sequence is synthesized)
ttagaagttttaaataatgcctccactattttttttcttagacatagcttttaatggggaaatggaattttgttattaatacccattatattcctgtaagtaaatgactatttttccctt

SEQ ID NO: 509506 - DNA, 120 bp, Artificial Sequence
  ENSG00000164220_26 (sequence is synthesized)
aactcagtgattagacaggaaggaagacattagtgattagacaggagggaagatattagtgattagacagcagggaagatattagtggtaaagagtgaatgatagtagtgaatataaatg

SEQ ID NO: 509507 - DNA, 120 bp, Artificial Sequence
  ENSG00000164220_27 (sequence is synthesized)
gggctgaggaaactttaagcataaaagattcctgagatgactttacaagtctgtacgaatctgccttgactgtatatttcatactgcccaacaaaacaataaaaaacaattttaaatgca

SEQ ID NO: 509508 - DNA, 120 bp, Artificial Sequence
  ENSG00000164220_28 (sequence is synthesized)
ggattacatcctttccctgcggaggaccagggcaagtttcctgcctgcacggcacaggagagcaaacttctacagacagaccaaggcttccatttgctgctgacacatggaactgaggca

SEQ ID NO: 509509 - DNA, 120 bp, Artificial Sequence
  ENSG00000164221_0 (sequence is synthesized)
gtttaacagcttttgcagagccgcctccatgtggtttcggagtcgaggaagacctgggtgggaacccggctctgccgcttcctagccgcgtgataagaacatatgctgtcggcgactcac

SEQ ID NO: 509510 - DNA, 120 bp, Artificial Sequence
  ENSG00000164221_1 (sequence is synthesized)
tttcttctctaaaaattgggaatagtaacatgcacctcccgagctttggactaacgttatgtctggggagcccctggcacagtgcttgattggagggggactctgtgctcagtaattggt

SEQ ID NO: 509511 - DNA, 120 bp, Artificial Sequence
  ENSG00000164221_2 (sequence is synthesized)
ggcagctctgttactgtaccggcgctgggaacacaaggagaaagacaatatgggatggtcggaggcagaggtgtttccagtgatcggcttaggaccgctttctaggtggtgaggacaaga

SEQ ID NO: 509512 - DNA, 120 bp, Artificial Sequence
  ENSG00000164221_3 (sequence is synthesized)
gtgatggctgttttagtacttcaggtggaattcgtccttttcatcttcagaactggaagcagaaagttaatcagactaagaaagcagaatttgtacgcacagcagaaaaatttaaaaatc

SEQ ID NO: 509513 - DNA, 120 bp, Artificial Sequence
  ENSG00000164221_4 (sequence is synthesized)
aagtaattaacatggaaaaagataaacacagtcatttctacaaccaaaaaagtgacttcagaattgagcatagtatgctagaagaattggaaaataaattgattcacagcaggaaaacag

SEQ ID NO: 509514 - DNA, 120 bp, Artificial Sequence
  ENSG00000164221_5 (sequence is synthesized)
aaagagcaaaaatccagcaacaattggccaaaatacataataatgtaaagaaacttcagcatcaattaaaagatgtgaagcctacacctgattttgttgagaagctcagagaaatgatgg

SEQ ID NO: 509515 - DNA, 120 bp, Artificial Sequence
  ENSG00000164221_6 (sequence is synthesized)
aagaaattgaaaatgcaattaacacttttaaagaagagcagaggttgatatatgaagagctaattaaagaagagaagacaactaataatgagttgagtgccatatcaagaaaaattgaca

SEQ ID NO: 509516 - DNA, 120 bp, Artificial Sequence
  ENSG00000164221_7 (sequence is synthesized)
catgggctttgggtaattcagaaacagagaaagctttcagagcaatctcaagcaaagttcctgtagacaaagtaacaccaagtactcttccagaagaggtactagattttgaaaaattcc

SEQ ID NO: 509517 - DNA, 120 bp, Artificial Sequence
  ENSG00000164221_8 (sequence is synthesized)
tgggatgattatgatcaccagaactttgtaaaggtgagaaacaaacataaagggaagccaacatttatggaagaagttctagaacaccttcctggaaaaacacaagatgaagttcaacag

SEQ ID NO: 509518 - DNA, 120 bp, Artificial Sequence
  ENSG00000164221_9 (sequence is synthesized)
catgaaaaatggtatcaaaagtttctggctctagaagaaagaaaaaaagagtcaattcagatttggaaaactaaaaagcagcaaaaaagggaggaaattttcaagttaaaggaaaaggca

SEQ ID NO: 509519 - DNA, 120 bp, Artificial Sequence
  ENSG00000164221_10 (sequence is synthesized)
gacaacacacctgtgctttttcataataaacaagaggataatcaaaagcaaaaagaggaacaaagaaagaaacagaaattggcagttgaagcttggaagaaacagaaaagtatagaaatg

SEQ ID NO: 509520 - DNA, 120 bp, Artificial Sequence
  ENSG00000164221_11 (sequence is synthesized)
tcaatgaaatgtgcttcccagttaaaagaagaagaagagaaagagaaaaaacatcagaaagaacgccagcgccagtttaagttaaaattactactagaaagttatacccagcagaagaaa

SEQ ID NO: 509521 - DNA, 120 bp, Artificial Sequence
  ENSG00000164221_12 (sequence is synthesized)
gaacaggaagaatttttgaggcttgaaaaggagataagggaaaaggcagaaaaggcagaaaaaaggaaaaatgctgctgatgaaatttccagatttcaagaaagagatttacataaactt

SEQ ID NO: 509522 - DNA, 120 bp, Artificial Sequence
  ENSG00000164221_13 (sequence is synthesized)
gaactgaaaattctagatagacaggcaaaggaagatgaaaagtcacaaaaacaaagaagactggcaaaattaaaagaaaaggttgaaaacaatgttagtagagatccctctaggctttac

SEQ ID NO: 509523 - DNA, 120 bp, Artificial Sequence
  ENSG00000164221_14 (sequence is synthesized)
aaacccaccaaaggttgggaagaacgaaccaaaaagataggaccaacaggctctgggccacttctacatatcccacatagggctattccaacctggagacaaggaatacagagaagagta

SEQ ID NO: 509524 - DNA, 120 bp, Artificial Sequence
  ENSG00000164221_15 (sequence is synthesized)
tgagataatcaaattgctactcagttgataagaatgttaacatactaagttataccagggagagagtgactaaccacattctttaaatatcaatagcttagtcagattgattattgtgct

SEQ ID NO: 509525 - DNA, 120 bp, Artificial Sequence
  ENSG00000164221_16 (sequence is synthesized)
atattgtgaattgagaggtattaagtttcatgaggctttgtcattagtattcctgcttctaccaagaaggtatttaatatatgtgttggcctattattgatgtaaaagttatttaaataa

SEQ ID NO: 509526 - DNA, 120 bp, Artificial Sequence
  ENSG00000164221_17 (sequence is synthesized)
caaagagattttgtttttgttatagcatagcaaagtaaattggaacaatcatacaatgacattttttaaaccaaaattttgtaacttttataacttggagttaagttagcttgagtaaca

SEQ ID NO: 509527 - DNA, 120 bp, Artificial Sequence
  ENSG00000164221_18 (sequence is synthesized)
aaaaggtaaagtggtttttgtttagagttacgaaatgttagtactttttctatgtttaacaaattggcagtttgtcagttatgacatttttgtgtaataaatattttgtatttgtttgaa

SEQ ID NO: 509528 - DNA, 120 bp, Artificial Sequence
  ENSG00000164221_19 (sequence is synthesized)
atcccggccaagcccgcagcgcagggagctgtctgcagaggccagggtgcgcctgccacgaatccccaggcaccggtggccgccgcggcccgagtagctcggcgggtaaacatggccgca

SEQ ID NO: 509529 - DNA, 120 bp, Artificial Sequence
  ENSG00000164221_20 (sequence is synthesized)
tctcatataccctattaattgtattattgatataatctttttggtttccttcagcaattccaaattttccttcagcctttctggatttcacagatttataaaatctttgtgtctttcaca

SEQ ID NO: 509530 - DNA, 120 bp, Artificial Sequence
  ENSG00000164221_21 (sequence is synthesized)
aaaattaaaagaaaaggtactctgcaccgagattattttcattgttattatcctaattccttgatttgtaaggatactgacatcaaatctatttcctttatatctcaccttatttctata

SEQ ID NO: 509531 - DNA, 120 bp, Artificial Sequence
  ENSG00000164221_22 (sequence is synthesized)
ataaatatcttttgttctttatttaattgctcttggcttttactaacagtgatcagtcttacatgtagattcctgaattgtaaccacatttgtcacagaattattttaaagtgcatactt

SEQ ID NO: 509532 - DNA, 120 bp, Artificial Sequence
  ENSG00000164236_0 (sequence is synthesized)
agtgattgcttctgcttctcccgcgccagctgtccccagctctggggcaacgctgccaggtgcccagtccccgcgctcgagagagcgcctgcctggctctgaactctggccaggaagggg

SEQ ID NO: 509533 - DNA, 120 bp, Artificial Sequence
  ENSG00000164236_1 (sequence is synthesized)
cgcgaggggaaggccccgggggaaggcgtgtccccgcgccccgccccgccccgcctcggaaagcccccgcggtcccgcccaccccaggggctcgctcagcctccggagacttttttcttt

SEQ ID NO: 509534 - DNA, 120 bp, Artificial Sequence
  ENSG00000164236_2 (sequence is synthesized)
gagcgcagccgcctggtgccggtttccgccgagctggagcgcgcgggccacggcttctctggggacgcagaagcgagaagcggggacctcggcgcgcgccccgcgtcccgctcttcctgc

SEQ ID NO: 509535 - DNA, 120 bp, Artificial Sequence
  ENSG00000164236_3 (sequence is synthesized)
gcatggtgctgctggccgggaccgggccggagggcggcggggcgcgctgcatgaccccaccaccgccgtccccaccccggggcgcgcaggtcgaggaggaccccgctgactacgaagagt

SEQ ID NO: 509536 - DNA, 120 bp, Artificial Sequence
  ENSG00000164236_4 (sequence is synthesized)
cgcaggtcgaggaggaccccgctgactacgaagagtttgaggacttctcgagtctgccagacacccgcagcatcgcctcggacgactctttctaccctttcgaggacgaggaggagcacg

SEQ ID NO: 509537 - DNA, 120 bp, Artificial Sequence
  ENSG00000164236_5 (sequence is synthesized)
gcgtcgagagcgcggagagcgtcccggagggcgtcccggaaagcgtcccggagacggcgaccctcctgcgcgccgcctgcgccaacaacgtggggctgctgcggacgctggtgcggcgcg

SEQ ID NO: 509538 - DNA, 120 bp, Artificial Sequence
  ENSG00000164236_6 (sequence is synthesized)
gggtgagcgtcgaggaggcgcaggagactgaccgcaacggcaggaccggccttattgtcgcctgctaccacggctttgtggataccgtggtggccttagcagagtgcccccacgttgacg

SEQ ID NO: 509539 - DNA, 120 bp, Artificial Sequence
  ENSG00000164236_7 (sequence is synthesized)
tcaactggcaggacagcgaggggaacacagccctaatcacagctgcacaggcagggcacgctatcatcactaactacttgttgaactatttccctggtcttgaccttgaaaggaggaacg

SEQ ID NO: 509540 - DNA, 120 bp, Artificial Sequence
  ENSG00000164236_8 (sequence is synthesized)
cgttcgggttcaccgccctgatgaaagccgccatgcagggtcgaacggactgcatccgagccctgatgctagcaggggcggatgtccacgcgagggacccccgccgtgggatgtcgccgc

SEQ ID NO: 509541 - DNA, 120 bp, Artificial Sequence
  ENSG00000164236_9 (sequence is synthesized)
aggagtgggccacttacacgggccgcgtggatgccgtccgtctcatgcagaggctgctggagcgcccctgcccggagcagttctgggagaagtaccggcccgagctgccgccgccccctg

SEQ ID NO: 509542 - DNA, 120 bp, Artificial Sequence
  ENSG00000164236_10 (sequence is synthesized)
aagcggcgcggaagcccgcgggctccaagaactgcctgcagaggctcacagactgcgtgctgtccgtgctgacgccgcgctccgtgcggggcccggaggacgggggcgtcctggaccaca

SEQ ID NO: 509543 - DNA, 120 bp, Artificial Sequence
  ENSG00000164236_11 (sequence is synthesized)
tggtccggatgaccacgagcctctacagccccgccgtggccatcgtgtgccagaccgtgtgccctgagagccctccgagcgtggggaagaggcggctggcggtgcaggagatcctggcgg

SEQ ID NO: 509544 - DNA, 80 bp, Artificial Sequence
  ENSG00000164236_12 (sequence is synthesized)
cgcgggctgcacggggcccccaggcgcaggaggaggatgaggtggggggcgcggggcagcgcgggcggaccggacaggag

SEQ ID NO: 509545 - DNA, 80 bp, Artificial Sequence
  ENSG00000164236_13 (sequence is synthesized)
gcggaaggccagcctcctgcccctgcagcgcctgcggcggagaagcgtgcggcccggtgtggtggtgccccgggtccgag

SEQ ID NO: 509546 - DNA, 120 bp, Artificial Sequence
  ENSG00000164236_14 (sequence is synthesized)
tcagcaaggcgcccgcgcccaccttccagcccgagcggccggcgcggaagggcagcaccaaggacagcggccacctgcagatccccaagtggcggtacaaggaggccaaggaggagaaga

SEQ ID NO: 509547 - DNA, 120 bp, Artificial Sequence
  ENSG00000164236_15 (sequence is synthesized)
ggaaggcagaggaggccgaaaagaagcgccaggccgaggcgcagaaggagaggcgcactgcgccctggaagaagaggacgtgagggcccgtgtgcctggcgctggggccggggctggggc

SEQ ID NO: 509548 - DNA, 120 bp, Artificial Sequence
  ENSG00000164236_16 (sequence is synthesized)
cggggcggggccgcagggctgggcgcggagaaggaggcggccccgttgcgcatcgcaccacttccgctccatggaccacggggctgcgcgcatttccaggctgtttgtccaggctgcttc

SEQ ID NO: 509549 - DNA, 120 bp, Artificial Sequence
  ENSG00000164236_17 (sequence is synthesized)
caagagagggctgagggagccacatggattcgcttgtcgccagccctcctagcaatcagtacacctagcgggcacgttgcctaaaaggctccctttagagaacctcaattaagatttttt

SEQ ID NO: 509550 - DNA, 120 bp, Artificial Sequence
  ENSG00000164236_18 (sequence is synthesized)
ttaaagatcaatttatcaaagggcgttttctccgtaattttgtatttttaatcattatttatcaaatttgcaacgttttacaagtgatagggccccttatatccaaggcagttttaatac

SEQ ID NO: 509551 - DNA, 120 bp, Artificial Sequence
  ENSG00000164236_19 (sequence is synthesized)
acttgcctgaagaccttttgtttaagatactgtttctagcaataagtatccatgatacctgtatgagttcacacagacatcatgggattctcccctttttggctgtttggtcttttctcc

SEQ ID NO: 509552 - DNA, 120 bp, Artificial Sequence
  ENSG00000164236_20 (sequence is synthesized)
tcatcgtgggtgtaggtgcacactggatgttcttagtcattagattaagtgttgccggatatttctatttgacggaggcattggctcgttgagccacatgatcaagtgagacagaggatc

SEQ ID NO: 509553 - DNA, 120 bp, Artificial Sequence
  ENSG00000164236_21 (sequence is synthesized)
agatgttactgtatctttttaaaactcttatccatatagtaatatattgaggaaaaacatattgtcaaattataaaacaatggagcgataaacatgtatttattgctagaattaaactca

SEQ ID NO: 509554 - DNA, 120 bp, Artificial Sequence
  ENSG00000164236_22 (sequence is synthesized)
ttttaagcaaggggttttaggtaaactggatacgaaatctttaacattaaaaatagatatgagaaaaaaactgtcattcgataaaatgaggcaaatttaataataaatgattaccagaaa

SEQ ID NO: 509555 - DNA, 120 bp, Artificial Sequence
  ENSG00000164236_23 (sequence is synthesized)
tacaaaattaagccatatgtgctcttaagtaattcgaatccagatatccttaaaatgtcaaaaagatgcaacaagagtcaggagcccagaatgacgcaaattacaggaatggggaggagg

SEQ ID NO: 509556 - DNA, 120 bp, Artificial Sequence
  ENSG00000164236_24 (sequence is synthesized)
tgatttttagaagaggtgagagaatggaatggggaacagacttgttttcggcaaattctcctggagtagactgggcagccccctcctccaggctcagttccaaagagtccgttgtgtgga

SEQ ID NO: 509557 - DNA, 120 bp, Artificial Sequence
  ENSG00000164236_25 (sequence is synthesized)
tatttcttttatttttcctttgaggactgcgcttggtgtttagttcatccttatgccgacctcttagaatttccaagatgcagggccttgggcagggcagggcatgggtgtgatttgcct

SEQ ID NO: 509558 - DNA, 120 bp, Artificial Sequence
  ENSG00000164236_26 (sequence is synthesized)
tgggccacaagctcttggtgagagtcttatgtccacacttttatctccaaagtgacatggagatcacttttctcagtgatcaaatttgaatttatcaaagggggttttctgcataatttt

SEQ ID NO: 509559 - DNA, 120 bp, Artificial Sequence
  ENSG00000164236_27 (sequence is synthesized)
gtatttgtaatcattatcagatttgcagcattctaattcggcagggcagggtatgaaagctggaaactcaggctggagtttctagttctaatggctctctggccatgtgggttgtagagt

SEQ ID NO: 509560 - DNA, 120 bp, Artificial Sequence
  ENSG00000164236_28 (sequence is synthesized)
gtctgtcacatatgcactttatttcagtattaattgaaatacttggacacgcacgatcacaggcctatttggaggctctgtactatgaccctaataaccctagatacatcatgatacatg

SEQ ID NO: 509561 - DNA, 120 bp, Artificial Sequence
  ENSG00000164236_29 (sequence is synthesized)
gtgtctgtctcaggatgcaggcagggctggtgcaggcttctccatactcccttccacttggcaccagcaggcatcgagcaaccagggatcttaaactggcctctccaaatactccattga

SEQ ID NO: 509562 - DNA, 120 bp, Artificial Sequence
  ENSG00000164236_30 (sequence is synthesized)
acaggactgcaggctgcacccaggctaatgggagattggtgtgttgatgatacagtgtttaagatgagattgcagtgagttcctccttaatcccagaagggcaccatgatgaatgccaca

SEQ ID NO: 509563 - DNA, 120 bp, Artificial Sequence
  ENSG00000164236_31 (sequence is synthesized)
ggagactggaccctctttgagaactgcagatattagttgactgtgggtcaccctcgtggccaaggagttgggattggccatgtcttcttcgaggaggtggagactgtaactgacactggt

SEQ ID NO: 509564 - DNA, 120 bp, Artificial Sequence
  ENSG00000164236_32 (sequence is synthesized)
tatctttggggttgtctttcctgaatcctttggcatgtggcaccttcctgccacatgtagataattcacggcattaccaagtcaccacgagccccaccctcacctctgtcaaccgaggac

SEQ ID NO: 509565 - DNA, 120 bp, Artificial Sequence
  ENSG00000164236_33 (sequence is synthesized)
ccagccaggcagtgccatgtggtctcccaggcacgcttctcaacaccggctacccctgctgtgaaggttctcaaggccctggtccggggagccaagccctgggagcgccctaaagctccg

SEQ ID NO: 509566 - DNA, 120 bp, Artificial Sequence
  ENSG00000164236_34 (sequence is synthesized)
caggtaactgcactgcagcccgcattgagaaccgcagctctaacacagtgattgcgagaggacacccattctgagctcccacagagggctccacctccccaagaatgtctcattgtcatt

SEQ ID NO: 509567 - DNA, 120 bp, Artificial Sequence
  ENSG00000164236_35 (sequence is synthesized)
ggaacagccagggtcaggcagcttctgctcggactgacgtggcgtctgacccttggtgggttgccagacattcctgcctgtttccaccatgggaagctgtcactgggaatggtatggagc

SEQ ID NO: 509568 - DNA, 120 bp, Artificial Sequence
  ENSG00000164236_36 (sequence is synthesized)
cctcacttctaccccaagcctgggtgtctgctgcctccatgtcaaaaatggacatttctggtcctgcccagctgctacctcaccacaacccatgctcagagttgtcagggatgcgtggaa

SEQ ID NO: 509569 - DNA, 120 bp, Artificial Sequence
  ENSG00000164236_37 (sequence is synthesized)
cagcaatgatgggacagcaaatgactggcaatttccccaggtcccacgctgttctggagtggacgtgttgcggccctgcccccgatgtgttccagcctcatccaggtgcacaggatactc

SEQ ID NO: 509570 - DNA, 120 bp, Artificial Sequence
  ENSG00000164236_38 (sequence is synthesized)
tggggccagcacagggattgtccagtgatgctcctggtgtccacaaaacagctctagagatacctgcattttgaaaagcctgctgagccaacaagcttggggcaggacacggatttcttt

SEQ ID NO: 509571 - DNA, 120 bp, Artificial Sequence
  ENSG00000164236_39 (sequence is synthesized)
tgacctcccggggagctttattgtggcctcagtggaaagattggattttgaaacctgccagacccaactgaaagaagggtcattcctgattgagttggagactctccccagtccctctct

SEQ ID NO: 509572 - DNA, 120 bp, Artificial Sequence
  ENSG00000164236_40 (sequence is synthesized)
ctggactcattctagctgtggcctgcctgtggacagcccttccctttggcccatgcggcgggtccaggcagctcctgcagctgtgctcatggctgctggcccagaacttctcatttttgc

SEQ ID NO: 509573 - DNA, 120 bp, Artificial Sequence
  ENSG00000164236_41 (sequence is synthesized)
catgtggaagcagatttgctagtagaggaattttccaagtcaagggaagtgttgccaaacctcttgcctcgacctgtggggggccttctgctcttgttttctcattctctttggagtggg

SEQ ID NO: 509574 - DNA, 120 bp, Artificial Sequence
  ENSG00000164236_42 (sequence is synthesized)
cacagaggggacaagtcggcccccagtgaggctcagggagtgcaggagaccagggagggaagcccagatgatggggaaacagagccaccttgagggggtgtcatggggtcagtgtcaggg

SEQ ID NO: 509575 - DNA, 120 bp, Artificial Sequence
  ENSG00000164236_43 (sequence is synthesized)
tgatctgacgggtcagttcatacttaagcaacattattctgttcgtttcttttgggtaaggaattcctcatgggaggtgtggtcatctggtcgtagaggtggacagaaacaccccctcgt

SEQ ID NO: 509576 - DNA, 120 bp, Artificial Sequence
  ENSG00000164236_44 (sequence is synthesized)
cttcctgagccatttggaagccctttcctctagccctaggtactggtgacacaggcccctcggtctcaggatgtggacagggctgggaggtgcaggcttcttgtcccatccccactcagt

SEQ ID NO: 509577 - DNA, 120 bp, Artificial Sequence
  ENSG00000164236_45 (sequence is synthesized)
atcatcgggtatctggtagtcaggggtctcacagtggcctctccaaaagcctggtgtccttggagaacatttttcattttgtctgttttcgttgctttgaacagctgcattcactcaccg

SEQ ID NO: 509578 - DNA, 120 bp, Artificial Sequence
  ENSG00000164236_46 (sequence is synthesized)
agggctcgccctccctggatctgccatgtggttcagggaggaggggaccgatgagcaccgaccccttctcttcacctgtcagtggccaccacagtgccccctctggctttgccaccacgt

SEQ ID NO: 509579 - DNA, 120 bp, Artificial Sequence
  ENSG00000164236_47 (sequence is synthesized)
tctcctgcccccgtcaccttgtctcttctaactcattagcctttccttcctttgtctgttttcttctcccagctggtttaagttcttgatcatccctggcaccacctaccctaaggtctt

SEQ ID NO: 509580 - DNA, 120 bp, Artificial Sequence
  ENSG00000164236_48 (sequence is synthesized)
ccaagaacagaaaagccagggcctgtgtggggcaatgtgttgtccctgtcgggttatggtgggacctcctagaccccagagtgaatgaatggcaggcctgccagtgactgtgctgatggc

SEQ ID NO: 509581 - DNA, 120 bp, Artificial Sequence
  ENSG00000164236_49 (sequence is synthesized)
ttagaattcctacacggctgtgcctctcccaccccgtcctctttgctcggaagggagacctggtttgctctcctccatgacagcccagcccctgctgtgcacaggggtggggctcgggat

SEQ ID NO: 509582 - DNA, 120 bp, Artificial Sequence
  ENSG00000164236_50 (sequence is synthesized)
ccctccctgcaccctgatgtttattaactgtagatagtgaatttcaagttgacaggtaccttctcagggatttatatataaatatagttagaggaaaagttgaagtctattttactactt

SEQ ID NO: 509583 - DNA, 120 bp, Artificial Sequence
  ENSG00000164236_51 (sequence is synthesized)
tttagtgtttgagtaaattatgctttaactggacagaagaaatatttctcagacaatgtcgatgctgctgatgacaactgagatgcctggagctcacccttgatggagacttccttggtg

SEQ ID NO: 509584 - DNA, 120 bp, Artificial Sequence
  ENSG00000164236_52 (sequence is synthesized)
attggagatgggggactctggtggcagaaatggctttggggtaggtgtgaagttgcttcagtccctctgagttgcctcttctggatggaacgtgtgtatcaacaacaatgaaatgcacct

SEQ ID NO: 509585 - DNA, 120 bp, Artificial Sequence
  ENSG00000164236_53 (sequence is synthesized)
ccgtgtgcatggaggcggctgatgagaatacagataggccagtcctcgctcttccctccagaaccggccgctcccggtctgacgttggagcacgtgaactaagagtgacaattttttcta

SEQ ID NO: 509586 - DNA, 120 bp, Artificial Sequence
  ENSG00000164236_54 (sequence is synthesized)
cttgcttctgtgaataaagtgttctacagtcagcccagcactaaactcaccagaaaagaggagggaacagcacggagccattcatctggaattactcgatgtgcagaggctgccccttgg

SEQ ID NO: 509587 - DNA, 120 bp, Artificial Sequence
  ENSG00000164236_55 (sequence is synthesized)
ccgcacttgggaacatcgtggacatcttccttcctctcaggctcctcctgacagactcctggcagcactggagacctcaggactatggagatcagaattgtaatggctttgtcatctcag

SEQ ID NO: 509588 - DNA, 120 bp, Artificial Sequence
  ENSG00000164236_56 (sequence is synthesized)
tgtggccactcctgaggcaagaggctcctcctgggagcaggagagagagagtttgtgatgttggttggaaaataggatttatggatgcaggagggccgtgctaggcccctctgcccgctt

SEQ ID NO: 509589 - DNA, 120 bp, Artificial Sequence
  ENSG00000164236_57 (sequence is synthesized)
ctctccctgctgttggcggtgaccaggtctcaggagcggagacgaggctgttgtgagtgaaacagaagcccctggcatagggccagaccctaggcctgaaaaggatgcaaagcctgctgt

SEQ ID NO: 509590 - DNA, 120 bp, Artificial Sequence
  ENSG00000164236_58 (sequence is synthesized)
tttcaggctgttgggaagaatcgtgcgtaccgagtgattatgatgaaacgtatcccagagaggaaatgaatgggacctgaaaagtgggtctgccacatccctggtagcccgcctccaaga

SEQ ID NO: 509591 - DNA, 120 bp, Artificial Sequence
  ENSG00000164236_59 (sequence is synthesized)
gcactacactccccccagccccaccggccacactacatgacgtgggaaggctgtccgttcatccttaccctggggactcaagtgtgctctgcggagtgagtcacagccctgatgtgcacc

SEQ ID NO: 509592 - DNA, 120 bp, Artificial Sequence
  ENSG00000164236_60 (sequence is synthesized)
ctgcactactctttccccaggtgcgccggagacgcaggcttgctcatttccgtcctgacacagctcgctgttcctgcggtggtcagagtccccctgtgctgtgtcagctcctggacacta

SEQ ID NO: 509593 - DNA, 120 bp, Artificial Sequence
  ENSG00000164236_61 (sequence is synthesized)
ctagtctttcacatgataaagcgcgagcactttttcgcttttgcagtatttggggaaattctaacacatttcccggggatttgcccaggtccctccacctcccacggtgggtaactgtgt

SEQ ID NO: 509594 - DNA, 120 bp, Artificial Sequence
  ENSG00000164236_62 (sequence is synthesized)
ggattctgcacctggcaatcggcgctcccctttggaaacacctgggggccctgtttcttccagcctggtccttggtttctaccccagccgctttcagccggcacctgcatgggactgcct

SEQ ID NO: 509595 - DNA, 120 bp, Artificial Sequence
  ENSG00000164236_63 (sequence is synthesized)
ggagggccacggtccagggaaggacaggtgggaccctgaccatgacagatctttctaaaacaataaagtcccattgatgacaactgcagtgggatgaatgccattgcagcggtcatgctg

SEQ ID NO: 509596 - DNA, 120 bp, Artificial Sequence
  ENSG00000164236_64 (sequence is synthesized)
ggagctgccgagagcttacaacaaaagcagttcctctcaagacactgcttgcatcttccctccacgcctctcggtgcatttggaacttgtttatgcgctggtataactcgagtcagctgc

SEQ ID NO: 509597 - DNA, 120 bp, Artificial Sequence
  ENSG00000164236_65 (sequence is synthesized)
ttatttctgtgcccttgcactcacaggttccttcattaacattttaaataagtggctaaaaaaactcctctggaggttgtttttgaaagagacaggaaaaagaaacacacagtacctgga

SEQ ID NO: 509598 - DNA, 120 bp, Artificial Sequence
  ENSG00000164236_66 (sequence is synthesized)
ttgttttgacttattttcaagcgactcagctgaaagccggtgttgcatacacaatttcctcacgctgacccagcctgactaagacttgataaaaggcacagcccttggcagcaggcagtg

SEQ ID NO: 509599 - DNA, 120 bp, Artificial Sequence
  ENSG00000164236_67 (sequence is synthesized)
ccaatgtggacagtgtacactaagctgtgagtgtgtgcacgggcgagcacatgtatgtgtactcatacatccagatgaactaaagggacactgggctttgtgctggcaaaggttacgatg

SEQ ID NO: 509600 - DNA, 120 bp, Artificial Sequence
  ENSG00000164236_68 (sequence is synthesized)
ctgctgtagcttggctgtgggccccaggcagtgtcagatggaacctgctttgatggcgtgttgttcagtgtactcagtggggtctcacatggcccgaggacccactgtgagcactccgcc

SEQ ID NO: 509601 - DNA, 120 bp, Artificial Sequence
  ENSG00000164236_69 (sequence is synthesized)
cgctgtggcacagaacacggctggggtcatcacagcccaggtctttattgaaaggcggctcatatagaacccatttggccaggtctgggccatctctctgcctctgccctatcttggctg

SEQ ID NO: 509602 - DNA, 120 bp, Artificial Sequence
  ENSG00000164236_70 (sequence is synthesized)
cctggaggggcccaggcccaagaggattctttacccctggaagagctccccaggcattcagcctatggcccttgacatttggctgcaggttaccgtcagaatcaacaccatatcctgagg

SEQ ID NO: 509603 - DNA, 120 bp, Artificial Sequence
  ENSG00000164236_71 (sequence is synthesized)
aagccctggtatttccccaagtctgcctatgtattagacactctaatcaatgctaacacagttcagtttttgagggaactagttttgtcataatactacacccctctattgtttttaaat

SEQ ID NO: 509604 - DNA, 120 bp, Artificial Sequence
  ENSG00000164236_72 (sequence is synthesized)
aagaaaaaaaaaaaccccacgaaactttccatcaaagcaatggtccgtgttggcctgatgctttaagaagtttgaggaggtaggtatggaggcaccttaacaccagtttttgagcagaag

SEQ ID NO: 509605 - DNA, 120 bp, Artificial Sequence
  ENSG00000164236_73 (sequence is synthesized)
ttctagaagctgatttagaactacacagctatggatacacctgatgaaaaccgcaaaaggcgatgacaggcccagaaatatgaccagcaagcccgtgagcctttggggcatccgactgaa

SEQ ID NO: 509606 - DNA, 120 bp, Artificial Sequence
  ENSG00000164236_74 (sequence is synthesized)
tttgaaaataataccccattcagatgaacattaaaagccaatgtactggaattctctttgttctgcccgacatttgggggtgtccaaggacctgtgtttttaacaaagatgactttatga

SEQ ID NO: 509607 - DNA, 120 bp, Artificial Sequence
  ENSG00000164236_75 (sequence is synthesized)
ccgttctaaggattgaacagattcctgcacagggtgccaggtttcaagttaggtcctcttagtataagctctctttttttctgaatgtaaacctatttgcattgtcatttctaataatcc

SEQ ID NO: 509608 - DNA, 120 bp, Artificial Sequence
  ENSG00000164236_76 (sequence is synthesized)
agtaggtttctggatattgtaaagatactgagtacagatataactgtgtaaatttcatagtgttttattttgaggtgagagttttgttatagtttataaaagatattttcctattcagac

SEQ ID NO: 509609 - DNA, 120 bp, Artificial Sequence
  ENSG00000164236_77 (sequence is synthesized)
ctcagggctattttgggacctacaaataaatgtgattcccagcagcttcaatttttgatattcaaaaagttaataatctttaagctaaatataatgtgatatgattcagaaaaaaatgtt

SEQ ID NO: 509610 - DNA, 120 bp, Artificial Sequence
  ENSG00000164236_78 (sequence is synthesized)
tttcccttttaacttctaacaaattatgtatctaatgtttaaaaaatatggaaaaaagggataatgtaaaaatgtgggagaattgtggctaaagaataaaaaatcacttgttaaaacgca

SEQ ID NO: 509611 - DNA, 120 bp, Artificial Sequence
  ENSG00000164236_79 (sequence is synthesized)
gggaacacagccctaatcacagctgcacaggcaggggctgcccctgtccccatgggcatagtttccttagacactggctcccaatcttgcgcctccggcgtcagcatcacctgggctggc

SEQ ID NO: 509612 - DNA, 120 bp, Artificial Sequence
  ENSG00000164236_80 (sequence is synthesized)
acacagactgccaggccctgcccctggagtctttctttgaataggcctggggtggggcccaagaatgagcagatcaacaggtttcctggtgaggctgatgccactggcccagggacccca

SEQ ID NO: 509613 - DNA, 120 bp, Artificial Sequence
  ENSG00000164236_81 (sequence is synthesized)
cattgaggatggagagctttgaagattttatgcctgatgacggcaaaggacccctctcagtgggcactgaagaccagcagagtcacagaccccacgagagatgttgtcagacagacacag

SEQ ID NO: 509614 - DNA, 120 bp, Artificial Sequence
  ENSG00000164236_82 (sequence is synthesized)
aggcatcacggaattaaagtgaaaatgaggaaggcaggtgagcatgtgttcatgactttcctgtgctgttttgccaaagaggctgtttaggcccaatcagggcacgctatcatcactaac

SEQ ID NO: 509615 - DNA, 120 bp, Artificial Sequence
  ENSG00000164237_0 (sequence is synthesized)
ctctcgtctcctccccactgcgcctccctccctcctggccttccttcccttccccgactttgcagatttctcttcccccaggcctccctcctccacctctccgccccctccgggcttggc

SEQ ID NO: 509616 - DNA, 120 bp, Artificial Sequence
  ENSG00000164237_1 (sequence is synthesized)
tctcccaggaggctacgactggagccactggtcccgcaggatccccgcgtcctcggtcgccgcgtccacgtccctctcgcgtccccgcccggcgccacgccgcctcctctgggttcggcc

SEQ ID NO: 509617 - DNA, 120 bp, Artificial Sequence
  ENSG00000164237_2 (sequence is synthesized)
tccgcgcggtgcagcgcagtctcaggccgcgggacaagcccgacttaaatctctgcaatggctaacgaagcttatccttgtccgtgtgacattggccacagacttgagtatggagggcta

SEQ ID NO: 509618 - DNA, 120 bp, Artificial Sequence
  ENSG00000164237_3 (sequence is synthesized)
ggccgtgaagttcaagtcgagcacatcaaggcttatgtcaccaaatcccccgttgatgcaggcaaagctgtgattgtcattcaagatatatttggctggcagttgcccaataccagatat

SEQ ID NO: 509619 - DNA, 120 bp, Artificial Sequence
  ENSG00000164237_4 (sequence is synthesized)
atagctgacatgatctcaggaaatggatacacaaccattgttccagacttctttgtagggcaagagccttgggacccctctggcgactggtctatcttccctgagtggctgaaaacaaga

SEQ ID NO: 509620 - DNA, 120 bp, Artificial Sequence
  ENSG00000164237_5 (sequence is synthesized)
aatgcccagaagatcgatagagagatcagtgctatcttgaagtatctgaaacaacagtgtcatgcccagaaaattggcatcgtgggattctgctggggtggaactgctgtccatcatttg

SEQ ID NO: 509621 - DNA, 120 bp, Artificial Sequence
  ENSG00000164237_6 (sequence is synthesized)
atgatgaaatactcagaattcagggcaggggtgtccgtctatggcattgtcaaggattctgaagacatttacaatttaaagaaccccactttgttcatttttgctgaaaatgatgttgtg

SEQ ID NO: 509622 - DNA, 120 bp, Artificial Sequence
  ENSG00000164237_7 (sequence is synthesized)
attccactcaaggacgtatctttgctgactcagaagttgaaagaacactgcaaagttgaatatcaaattaaaacattttctgggcagactcatgggttcgtgcatcggaagagagaagat

SEQ ID NO: 509623 - DNA, 120 bp, Artificial Sequence
  ENSG00000164237_8 (sequence is synthesized)
tgctcacctgcagacaagccctacattgacgaggccagaaggaatttaattgagtggctgaacaagtacatgtagcaagaatcaagggcaagccttcctagaatagctttcatcccaaaa

SEQ ID NO: 509624 - DNA, 120 bp, Artificial Sequence
  ENSG00000164237_9 (sequence is synthesized)
tttgcttggaaatagttagatcatttgatttaattttcacttttataaaataagtgtaggaatcctaaaattgattatttcatttgaaacacaaattcagtaggacgtaatgcatgaaat

SEQ ID NO: 509625 - DNA, 120 bp, Artificial Sequence
  ENSG00000164237_10 (sequence is synthesized)
aaattcagtaggacgtaatgcatgaaataatttaatttttgacatgtacatcgaatcataatttaaaaacaaggtctgaccaggtgtagtgcctcatgcctgtaattccagcactttggg

SEQ ID NO: 509626 - DNA, 78 bp, Artificial Sequence
  ENSG00000164237_11 (sequence is synthesized)
aagattgtgccactactgtactctgtaaataaataaataaataaaataaaaaccaggtcagtacctggagaatttgaa

SEQ ID NO: 509627 - DNA, 120 bp, Artificial Sequence
  ENSG00000164237_12 (sequence is synthesized)
aaataaataaataaaataaaaaccaggtcagtacctggagaatttgaatgatagagaatgatagagtaataccctaattattagttaaaacctacaggccgggtgcggtggctcacgcct

SEQ ID NO: 509628 - DNA, 79 bp, Artificial Sequence
  ENSG00000164237_13 (sequence is synthesized)
cccagctactcaggagtctgagtcgaggttgcgctactgcactccagcctggacaacagagggagactctgtctcaaaa

SEQ ID NO: 509629 - DNA, 120 bp, Artificial Sequence
  ENSG00000164237_14 (sequence is synthesized)
tcaagtgtggccttttctggtctttgaacacatcatagaaagtgacaaatgctgcaaagccatgaagaacatgaactataaacgggtagactaactgcccagcttagacacttatctatg

SEQ ID NO: 509630 - DNA, 120 bp, Artificial Sequence
  ENSG00000164237_15 (sequence is synthesized)
ccacaaaacagctgaatttgtcacatttatatattgcaatatgggaagtattgagatcaaaacaggattccattgacctaattatattaagctaataaactaattttttgaatttttgaa

SEQ ID NO: 509631 - DNA, 120 bp, Artificial Sequence
  ENSG00000164237_16 (sequence is synthesized)
tttgcagcttttttaaaaagatagcagagaacggtgggctagagttgtcacccagctgttgtctcctaagcagtggatttccaagcactggcatttttgggtcccagggcctgaggctac

SEQ ID NO: 509632 - DNA, 120 bp, Artificial Sequence
  ENSG00000164237_17 (sequence is synthesized)
ctcagaaatatctcctgtgtttctggtggtggcgtaaaggggagagccggtgagaaactctgcacctgcacctacggggtgcgtacatgtgactttgggcaagtgacttgatgttgtagt

SEQ ID NO: 509633 - DNA, 120 bp, Artificial Sequence
  ENSG00000164237_18 (sequence is synthesized)
ttttttcctaattttgtcttgacgtccttctcaggagagagtggctgtaaactctagccctgccctgacggggatcctggggatgtggtcgtgggtgtttcccatgtgcctttcatggga

SEQ ID NO: 509634 - DNA, 120 bp, Artificial Sequence
  ENSG00000164237_19 (sequence is synthesized)
tccttctttgacctcacagacggcctgattcctgagtgtccaacctgtggccaggtgtccctctcgcaggaagcttgtttatcctggcacatgaccttgtggctctcatctgacctgtgt

SEQ ID NO: 509635 - DNA, 120 bp, Artificial Sequence
  ENSG00000164237_20 (sequence is synthesized)
ccagtttattcctactgagacagccactctcccggagagccctgaccgggaaagaagttaggatggggtagaggaggcaactcatcagaacccaagaaatgacagaagcagtttattgct

SEQ ID NO: 509636 - DNA, 120 bp, Artificial Sequence
  ENSG00000164237_21 (sequence is synthesized)
tacagatccagagaacagagggcagcacgcttcacagggccagcaaaaagggggagccattcaggacacatgggctcaaccagaaggtggagaacgagagagagagggagctatgagcca

SEQ ID NO: 509637 - DNA, 120 bp, Artificial Sequence
  ENSG00000164237_22 (sequence is synthesized)
aagccttcactggggcccagggtgtcatctatgcaggtttcccctggaggttctaactggggggtttagagcaagcaggcatgagccccggggactcacgctgtgactgagaggggtcgg

SEQ ID NO: 509638 - DNA, 120 bp, Artificial Sequence
  ENSG00000164237_23 (sequence is synthesized)
tgtgggtaggatatcggcatggtccatgtgggtgtgggggtcagtgggacaagtcaagcaggtggtatccagctgtccatgggaaggtggtcccaggaggcggttttgtaaggcagatgt

SEQ ID NO: 509639 - DNA, 120 bp, Artificial Sequence
  ENSG00000164237_24 (sequence is synthesized)
ctggatcgaccaccttggggaacagtgagaagttgtataactggaaactgtgttactaatccctgcttctagtatgagaaagtccaacttacattcaaatagatgctcaggaaacataaa

SEQ ID NO: 509640 - DNA, 120 bp, Artificial Sequence
  ENSG00000164237_25 (sequence is synthesized)
attcaaagaattcccaaacttgagcttcctgagcctcagtttttgcatctgtcaaatgggtatggggagaccctttgcctaatgttgagagaatccaagcctgagcagggctggtctact

SEQ ID NO: 509641 - DNA, 120 bp, Artificial Sequence
  ENSG00000164237_26 (sequence is synthesized)
gtggacacttagttgtggaccccaacaggccaaagcccttgcctgctgagggctgctcccaggaggcctcacacattcatccggcctcccaggaaacccctgagatgtgctgggcttttg

SEQ ID NO: 509642 - DNA, 120 bp, Artificial Sequence
  ENSG00000164237_27 (sequence is synthesized)
ccgtggaacggtgtcggtgagcatgtggccagtagccagagtcttcaacataggtgggaggtctgaaattcgtgcgagaatgaaccaagggtgtggctgtatccttcatggtgagcttgg

SEQ ID NO: 509643 - DNA, 120 bp, Artificial Sequence
  ENSG00000164237_28 (sequence is synthesized)
ggcctgggcagccttccctctgctgagtcctttggtcaaatgtcatggtgttctgaaccagcactgcagatagaagtataatgtaagtcacacacgtacttctttaaaaagatatgttct

SEQ ID NO: 509644 - DNA, 120 bp, Artificial Sequence
  ENSG00000164237_29 (sequence is synthesized)
tcagtgactattagacaaacagataaatgaaggtaaagggaaaaaatggcaactttagcttttttccccatgtatgtaattttaaattttcttatagccccattaaaaaaaggaaagaga

SEQ ID NO: 509645 - DNA, 120 bp, Artificial Sequence
  ENSG00000164237_30 (sequence is synthesized)
acacaagcccacacaagcccgggccccgctcctctgaactcccgcgtgtgttctgactatggcaaagaaggtctttgccgcgtgcacggcccgacttaaatctctgcaatggctaacgaa

SEQ ID NO: 509646 - DNA, 120 bp, Artificial Sequence
  ENSG00000164237_31 (sequence is synthesized)
caggggtgtccgtctatggtaaatctgccttgtgcatttttactccatgcagaagggaggggtggaagagtgacaacaatcacaagcctccccatccagtgtaacacaacccccaataat

SEQ ID NO: 509647 - DNA, 120 bp, Artificial Sequence
  ENSG00000164237_32 (sequence is synthesized)
gtgaagactgcccatcttatggaaatgggttttaagaatctgaaaatagaggtggaggtttgtcatgcagttaaccagaggatgtcaccgggagtcaagaggtctgggtcccagtggtgt

SEQ ID NO: 509648 - DNA, 120 bp, Artificial Sequence
  ENSG00000164237_33 (sequence is synthesized)
tggccatttagcacggaggagcctttccaccatgccgttaaatactccttgtaactctcttcctgcagtgagacattctggttgtagcgtttttactaatataaaactattaaaaaactg

SEQ ID NO: 509649 - DNA, 120 bp, Artificial Sequence
  ENSG00000164237_34 (sequence is synthesized)
gtttaaattcatacaaatttcagtggtttattttgttccctttaaaaaataaaaccacagcggtctgactatacagtatctactgtacattagaaacttccctatctcactgccgtgaag

SEQ ID NO: 509650 - DNA, 120 bp, Artificial Sequence
  ENSG00000164237_35 (sequence is synthesized)
gcattgtcaaggattctgaagacatttacaatttaaagaaccccactttgttcatttttgctgaaaatgatgttgtgattccactcaaggacccctgcagctggttgtgaaagaaaatag

SEQ ID NO: 509651 - DNA, 120 bp, Artificial Sequence
  ENSG00000164237_36 (sequence is synthesized)
acagacagctgcaatgtcacaaccctgtgttagagcctcgtccgtaagccaggatcccacaaccatggaaggccacacatctccccagatggcctccctcccaaagcgctcacacagaaa

SEQ ID NO: 509652 - DNA, 120 bp, Artificial Sequence
  ENSG00000164237_37 (sequence is synthesized)
ttccttgtgagcagctagatctttcaggctatatccaccccctataaactagccctgaaacaagttttttggatctcaccctgacgatgtcaattaccaggtgatcctcacagagaggac

SEQ ID NO: 509653 - DNA, 120 bp, Artificial Sequence
  ENSG00000164241_0 (sequence is synthesized)
ggcgcagggcggaagcagaggcgttggcggcgtgaggctcaggactgtacatcagaggaagccaaaagccagctggaatacttcctgaatacagttttaatcttgtttgcaattatttcg

SEQ ID NO: 509654 - DNA, 120 bp, Artificial Sequence
  ENSG00000164241_1 (sequence is synthesized)
aaggggagaaatcatctggatcagaattaagatgctctggtttcaaggaaatagcatgcaacttgccagatcctcctttggactcttcttgagaaattgctctgcctctaagacaactct

SEQ ID NO: 509655 - DNA, 120 bp, Artificial Sequence
  ENSG00000164241_2 (sequence is synthesized)
gcctgtgttgaccttattcacaaaggacccatgccccctttgtgatgaagccaaggaagtactcaagccttatgaaaacaggttcattttacaggaggtgaacatcacacttccagaaaa

SEQ ID NO: 509656 - DNA, 120 bp, Artificial Sequence
  ENSG00000164241_3 (sequence is synthesized)
ctctgtctggtatgaaaggtataaatttgatattcctgtctttcacttgaatggccagtttctgatgatgcatcgagtaaacacctcaaaacttgaaaaacagctcctgaaacttgagca

SEQ ID NO: 509657 - DNA, 120 bp, Artificial Sequence
  ENSG00000164241_4 (sequence is synthesized)
tactggaggctgactgatgccctcatgattttccaccctctcttcccataaagcatcttcctaaggaaatgaccatggcctgatactcattttgtcacttgtacagagccctaaggatgt

SEQ ID NO: 509658 - DNA, 120 bp, Artificial Sequence
  ENSG00000164241_5 (sequence is synthesized)
tctgaattcagtggtgccaaataaatgttgacattccccttttggttgatggaagtatcagtgtgggaactgtttgcttaatggcattttataaaataagaagagcatattagcagggag

SEQ ID NO: 509659 - DNA, 120 bp, Artificial Sequence
  ENSG00000164241_6 (sequence is synthesized)
ggagatgatggagggagggagaagtccatttgtcttatttatcctttttgtattaatagagaagcacttcacagtcactgggcaatgccatttataggaagaaggttctgcattcctgct

SEQ ID NO: 509660 - DNA, 120 bp, Artificial Sequence
  ENSG00000164241_7 (sequence is synthesized)
gctgccccggagggcttaactttttaatgaaagaataaatgctcttccactcagtagataaagtgaaatgtgaattgttaataactgtgcacggtcaataaagcgatgttttaaggaata

SEQ ID NO: 509661 - DNA, 71 bp, Artificial Sequence
  ENSG00000164241_8 (sequence is synthesized)
gaaattgctctgcctctaagacaactctgcctgtgttgaccttattcacaaaggagtttctcagcacaagg

SEQ ID NO: 509662 - DNA, 120 bp, Artificial Sequence
  ENSG00000164241_9 (sequence is synthesized)
tcccacccccacatggcttctcagtcggggaaaagatacaacttaactttaaaccaagtcttaagttttgattatgacatgggattagatgcaccaaaaacaatttcaagtgactgtggg

SEQ ID NO: 509663 - DNA, 120 bp, Artificial Sequence
  ENSG00000164241_10 (sequence is synthesized)
gcattctattgcctgagaatgttcaagagtcctgatatgacctgttgtttttatcctaaacagtgaaaaattcatccaccaaatatataggaatagagggagacagaaagatgctttctg

SEQ ID NO: 509664 - DNA, 120 bp, Artificial Sequence
  ENSG00000164241_11 (sequence is synthesized)
aaggtatcccatatttagagtattggttacatatacctaatgttggttttaacctatagctcttcaataaacttactcatcaattcttatttcagagaggaatatggtcatgtgactagg

SEQ ID NO: 509665 - DNA, 120 bp, Artificial Sequence
  ENSG00000164241_12 (sequence is synthesized)
aatcctgcagatcttcagcaaacccatgggtcccaacagctggcaaaatgaaaggtagatacctacaaacatggcatctaaaaggtggtttgattatcccactgtcaagtatcagtgtta

SEQ ID NO: 509666 - DNA, 120 bp, Artificial Sequence
  ENSG00000164241_13 (sequence is synthesized)
tgtcacctattactgtgattttcatgtgatgtttgtagcagcaattacttttcctttctgaaattatgtttgcaaagatcaatttgtttttatataaagattaactttgatataagaagc

SEQ ID NO: 509667 - DNA, 120 bp, Artificial Sequence
  ENSG00000164241_14 (sequence is synthesized)
tcatcattcacctccaaaggaaaaggtgatacaagcttcctttttttcccccttcaagctaatgccttatgaaggagtggaatagtttgggacttcatattgctgctctagaatagtgcc

SEQ ID NO: 509668 - DNA, 120 bp, Artificial Sequence
  ENSG00000164241_15 (sequence is synthesized)
tctttcttccacatgtctcttcataacattatgagcttactggaacacatagctctttggccagtttattgcacgaaacaagggtatactcagactggggttttttaaataatgcagcaa

SEQ ID NO: 509669 - DNA, 120 bp, Artificial Sequence
  ENSG00000164241_16 (sequence is synthesized)
tctcatggacatctgacagtaggaatcacaatacagccaggcttcagaagtacaattaaagaaccacccaaaactgaaacatcacccttctcacagtgccttggcttattttcttccttg

SEQ ID NO: 509670 - DNA, 120 bp, Artificial Sequence
  ENSG00000164241_17 (sequence is synthesized)
cagcaatacagcaccctgagcctctcaggcttctctattctgaaatcctaaaaggaattttactcagcttatattttacaaccaggcacccatgacctaagttggctgaccaaatctata

SEQ ID NO: 509671 - DNA, 120 bp, Artificial Sequence
  ENSG00000164241_18 (sequence is synthesized)
gaaggagccacctttaggacagaagcctatccctgggccaactggctatggaagcggtatgcaaatcacagtcactgcccactggcagaggccagaagcaggacaggcaatgaccagcaa

SEQ ID NO: 509672 - DNA, 120 bp, Artificial Sequence
  ENSG00000164241_19 (sequence is synthesized)
ctctggcacgcctccaaaaagcttaagaatgtgacattctaccatactcaagagaagtcaggagggacacattggtaagttcacttatatcctactccataggagtaataaggacatgaa

SEQ ID NO: 509673 - DNA, 120 bp, Artificial Sequence
  ENSG00000164241_20 (sequence is synthesized)
ccaaagcaatgggagtcagacagaaagagatatcaggagatatttaggagtgaggttgacaaaacttcatgactgactggatgggtcggtagtgatgtggagaggggagtagagagaaag

SEQ ID NO: 509674 - DNA, 120 bp, Artificial Sequence
  ENSG00000164241_21 (sequence is synthesized)
catggattctgggataactcccagttttcttgcttacactactgggtgaattctgatactttttattccctgaggcagagaatgtaagaggaaggaaaagttagttttgggctgtgcttg

SEQ ID NO: 509675 - DNA, 120 bp, Artificial Sequence
  ENSG00000164241_22 (sequence is synthesized)
gtggatgggaaaggtaagacatggtgaattctccatgcttgtgggatatcaaggtaaagataaaagttagaagtgcaaaacaaaggtctggggttaaggtatacatttgagagcccactg

SEQ ID NO: 509676 - DNA, 120 bp, Artificial Sequence
  ENSG00000164241_23 (sequence is synthesized)
agtatggttggaaatgtggccacctggcatataaggagaaaagcaagctattcccaaaccatggagaatactaatcttgacccatgagaatagaggaagttgctagtgaaggaaaatgag

SEQ ID NO: 509677 - DNA, 120 bp, Artificial Sequence
  ENSG00000164241_24 (sequence is synthesized)
agagtggtggtggaactaggaatgggagaagctcatccaatttacattacgtgatgccttttgtgatttgatagtggcaggtattattccaagcactggggataaaacaacaaacaagat

SEQ ID NO: 509678 - DNA, 120 bp, Artificial Sequence
  ENSG00000164241_25 (sequence is synthesized)
agccaggattcctactctcagagtcttgcattttaagggagagacagacaataaagatatcgtatcagaggaaaataatcatgaaagtcagggaggagcttttcccagagtaactgacag

SEQ ID NO: 509679 - DNA, 120 bp, Artificial Sequence
  ENSG00000164241_26 (sequence is synthesized)
tatcaaatagcaagagagttaggatgaggactgaacagaagacatcagatttgaaaattagaaaatcagtgctgctataggaagaatagtccccaaagatacccaggtcctaattcctgg

SEQ ID NO: 509680 - DNA, 120 bp, Artificial Sequence
  ENSG00000164241_27 (sequence is synthesized)
aacctgtcacttatatgcataaaggactttgcagatttaagttaaggatcttgagatgggaaaattatattgcattatctaagcaggtcctaatgtaatcacaggtgtctctataagagg

SEQ ID NO: 509681 - DNA, 120 bp, Artificial Sequence
  ENSG00000164241_28 (sequence is synthesized)
gagtcagaaggagatttgactagggtaaagagagtaggaaattcgacaatggaagcaaaaggttggagtgatacaagaaagcagccatgagccaaggaatgtgaatggcctccagaagct

SEQ ID NO: 509682 - DNA, 120 bp, Artificial Sequence
  ENSG00000164241_29 (sequence is synthesized)
aagacaactctgcctgtgttgaccttattcacaaaggacccatgccccctttgtgatgaagccaaggaagtactcaagccttatgaaaacaggtttctgatgatgcatcgagtaaacacc

SEQ ID NO: 509683 - DNA, 120 bp, Artificial Sequence
  ENSG00000164241_30 (sequence is synthesized)
gcgcaggctggcgggggttcgctgtgccgcgtgctgcccatttggatagtcgttatacggaatttaattaaaccgggagccataaatccatgaactacttgggggagattataaacgcgt

SEQ ID NO: 509684 - DNA, 120 bp, Artificial Sequence
  ENSG00000164241_31 (sequence is synthesized)
gtgtgtgtgtctgtgatagcgctctgggaagtaaataaatgacgggcgggaaaaggaagctttttttttttttaagagaaagcagaaaacatctcgagaaagcagaaaacatctcaactt

SEQ ID NO: 509685 - DNA, 120 bp, Artificial Sequence
  ENSG00000164241_32 (sequence is synthesized)
catactcctccagtgattcgccgatgccccgtcccgggtttaattgaattctatgaagtgcagtagccacatgccaaggaaggatcaatatttttttgtctccttcatcagaggaatatg

SEQ ID NO: 509686 - DNA, 120 bp, Artificial Sequence
  ENSG00000164241_33 (sequence is synthesized)
gaaaaagtaaaattgttgggtgaagaaagttgtacatttaagaaaaagggacaaagttgaaaggaaaggcaatggaataagctttcttcagacctgctcttcaatttttctatcagcaca

SEQ ID NO: 509687 - DNA, 120 bp, Artificial Sequence
  ENSG00000164241_34 (sequence is synthesized)
gaaggagcaagccctgctgacacgtttactttagttctgtgaaactgatttctgacttctggcctatagaactatgagagaataaatttgtgttgttttaagccaagtttgtgataattt

SEQ ID NO: 509688 - DNA, 120 bp, Artificial Sequence
  ENSG00000164241_35 (sequence is synthesized)
ggtacagcagcaatagaaaatgaatacaaatgtttccttgaccttattgagaacaacttttgtggagagggaagaggtaaactaaaagaaaattgtggtgggatgataactgaaagatac

SEQ ID NO: 509689 - DNA, 120 bp, Artificial Sequence
  ENSG00000164241_36 (sequence is synthesized)
agaaaagacagcaaagtatccattttttaggaagtttttatatatctcatttgacccactaagaaacgacatccagaaaggagctaaagaccagaggtaattgattagctcagcacccaa

SEQ ID NO: 509690 - DNA, 90 bp, Artificial Sequence
  ENSG00000164241_37 (sequence is synthesized)
gagctaaagaccagaggtaattgattagctcagcacccaaaaatggcaggcagtgttggggcagtactagaatgaggtagcgccagctct

SEQ ID NO: 509691 - DNA, 88 bp, Artificial Sequence
  ENSG00000164241_38 (sequence is synthesized)
cgaatgaggtagccataacattctacctggcttttggctgaattgtggggaggagagttcagaggcctcaaaagtgaccctgacactg

SEQ ID NO: 509692 - DNA, 120 bp, Artificial Sequence
  ENSG00000164241_39 (sequence is synthesized)
ggaggagagttcagaggcctcaaaagtgaccctgacactggagagtaaaccatagtaacccattatagtccacagatatgcgcaccagacccatgactcttgttcaccatagagacagga

SEQ ID NO: 509693 - DNA, 120 bp, Artificial Sequence
  ENSG00000164241_40 (sequence is synthesized)
tactttgatgctgtgacccaaaatcctgcacctggaacagatttggtacctctctattgacacagaaattcatgttgagcatggagacataatcaagagagaatggcctcattcgatcgg

SEQ ID NO: 509694 - DNA, 120 bp, Artificial Sequence
  ENSG00000164241_41 (sequence is synthesized)
tcttcagcttaggcactgacattttgcattttacctcctctctcaggttcaaagatgactaccaaagctaaacctctgaattctaaagtctacaaggacataaagcttcagggaaagggg

SEQ ID NO: 509695 - DNA, 120 bp, Artificial Sequence
  ENSG00000164241_42 (sequence is synthesized)
aaatattaatattaatattaatgtcatacaaaagaggagaagcagcacataggagtgccagctaatagactagtagtaataagaagaatccaaccataggcctatattgagagtcatggg

SEQ ID NO: 509696 - DNA, 120 bp, Artificial Sequence
  ENSG00000164241_43 (sequence is synthesized)
catcccttctttatgctgaaatggtatatttgaacggaattcctgatggaaaactttctatccttagaaatactgtaggccaaatattaattggaacttttgttaatgatttgagaacac

SEQ ID NO: 509697 - DNA, 120 bp, Artificial Sequence
  ENSG00000164241_44 (sequence is synthesized)
caaaaagtttagatgatacaagttaaaggcaaattgagcccatggcctcattgtgctacttagaataccctgtgacccagctctcctcagaaaccctgatggctttgttgcagcattgca

SEQ ID NO: 509698 - DNA, 120 bp, Artificial Sequence
  ENSG00000164241_45 (sequence is synthesized)
ttgcacagaagacctcagtggtggtcctgagtcctcacaacaaggtcaacccgtggcctggccactaaggcaacagagagggaaataaattttagaaaacgcttcccttaaaaatgagtt

SEQ ID NO: 509699 - DNA, 120 bp, Artificial Sequence
  ENSG00000164241_46 (sequence is synthesized)
aaaatgtacatttgcatcatgagactaggttaactgtcacctgagaaagtcctatattcagaaagacttaatcctggaccaggtaaatgaggcatttgctgtatgttctttgttatgaat

SEQ ID NO: 509700 - DNA, 120 bp, Artificial Sequence
  ENSG00000164241_47 (sequence is synthesized)
ttaatgctacaaagagaaaatgggcattgatgcataatctgggtaaaaaagagatgtcagaagttgggaaagaactgccagaagagctatgttttaggatttcactccaccttaccctgt

SEQ ID NO: 509701 - DNA, 120 bp, Artificial Sequence
  ENSG00000164241_48 (sequence is synthesized)
gttttcttgtaaagatattctcaaaattaggccaatttcactcttttaaggtcagaggagattaagatatttagaaatcagattgtgggattgattcccattgtgattgctgacttttag

SEQ ID NO: 509702 - DNA, 120 bp, Artificial Sequence
  ENSG00000164241_49 (sequence is synthesized)
tatcagccttttgttctgcatggattctctcatcttgcaaactagcaagactcctgaatttggcaatgatcctgctctgtgaagcattctcaagttagggttcttatcaatgtcagattt

SEQ ID NO: 509703 - DNA, 120 bp, Artificial Sequence
  ENSG00000164241_50 (sequence is synthesized)
cactaagccagtaataaaggaaaggttgagagagcaaaggatgtcactgagttgacacctaacagcacaaaacaacttgtcagctggcaggacaagccagcatgttcagggtggtcacag

SEQ ID NO: 509704 - DNA, 120 bp, Artificial Sequence
  ENSG00000164241_51 (sequence is synthesized)
cctttgagttggaaagatagtcttttaaacattcttacctcaccaaataactttaatagataaaatttagttactccctcccacttttgttctattcatttaaagcagtgttttttaaaa

SEQ ID NO: 509705 - DNA, 120 bp, Artificial Sequence
  ENSG00000164241_52 (sequence is synthesized)
atttatgtatatgtgactacatgaaaaatacattactgtgtttcttgatgttttatgacctgtacacaaagtgagaccagcagatgccttcaagagaaataaaggacactgctgtcattc

SEQ ID NO: 509706 - DNA, 120 bp, Artificial Sequence
  ENSG00000164241_53 (sequence is synthesized)
taactaaattgtccagaggaggaaagaagagtacaaaaatgattatgaatacttaagaagaggcatgactttgtcattggtgtggagcctataattatgtgcaattccctacttaagact

SEQ ID NO: 509707 - DNA, 120 bp, Artificial Sequence
  ENSG00000164241_54 (sequence is synthesized)
ttttagttatgctgaacattgaaaaaaaactaaacagcggagaggagaaaagaaaaggggaaatttaaacatttaatggaacacattcattaaatggagacatcgcttcaccataagggg

SEQ ID NO: 509708 - DNA, 120 bp, Artificial Sequence
  ENSG00000164241_55 (sequence is synthesized)
gcagttaagggtttggtagtcctactcacttgctattgtcaaatcatttgttttatcatggatttgagatccttataagtcttcattattattttgaattcaagaatgattccttctgct

SEQ ID NO: 509709 - DNA, 120 bp, Artificial Sequence
  ENSG00000164241_56 (sequence is synthesized)
cacaaaacatgatcacttttcattgatttttttttttaatattctgactggttttgcatatctggaaaagataaatcttcaaaatttggaaataaatatttttcctccctgccaaatcca

SEQ ID NO: 509710 - DNA, 120 bp, Artificial Sequence
  ENSG00000164241_57 (sequence is synthesized)
gaaaacagggtaatataatacagtgtggcttttatgtatatggattgcatattagatgtggtataaagtatctgcctggatccttcctttaggaaaagagattaaatgatttttctttta

SEQ ID NO: 509711 - DNA, 120 bp, Artificial Sequence
  ENSG00000164241_58 (sequence is synthesized)
aattttctttctgttcttcagagagagagtttagtgcttattaccataaaactcattacacctaagtgttttcctctgagcagtactggttttcttactctggctcttactgagtcaaag

SEQ ID NO: 509712 - DNA, 120 bp, Artificial Sequence
  ENSG00000164244_0 (sequence is synthesized)
gcagccgcaggagcatgcgccgcccgtggccatcttgtaggcggggacacgccgaggtaacttccagggtgcgccttcgttgtcttctccaagctgtagttctacgtcccgacctcccta

SEQ ID NO: 509713 - DNA, 120 bp, Artificial Sequence
  ENSG00000164244_1 (sequence is synthesized)
tcataccacactcttcagcgaccacgcaggcactttcccggtccccagtataccataattgaagaaaaatgatggaagagagtggaatagagacaacaccacctgggactcctccaccaa

SEQ ID NO: 509714 - DNA, 120 bp, Artificial Sequence
  ENSG00000164244_2 (sequence is synthesized)
atcctgcagggctggctgctactgctatgtcttctacccctgttccattagcggcaaccagttctttttcttctccaaatgtatcctccatggagtccttcccaccactcgcatactcta

SEQ ID NO: 509715 - DNA, 120 bp, Artificial Sequence
  ENSG00000164244_3 (sequence is synthesized)
ctcctcagccgccccttcctcctgtgaggccttcagcaccattaccttttgtgcctcctcctgcagttccttctgtcccaccacttgttacttctatgccacctcctgtttctccatcaa

SEQ ID NO: 509716 - DNA, 120 bp, Artificial Sequence
  ENSG00000164244_4 (sequence is synthesized)
ctgctgctgccttcggtaatcctcctgtatctcacttcccaccttcaacttctgccccaaacactcttttacctgcacccccttcgggtcctcctatatcaggattttctgttggttcaa

SEQ ID NO: 509717 - DNA, 120 bp, Artificial Sequence
  ENSG00000164244_5 (sequence is synthesized)
cttatgacattacaaggggacatgctgggagagctccccagacacccctgatgccatcattttctgcaccttcaggaacaggtcttttgccaactcctattactcagcaagccagtttga

SEQ ID NO: 509718 - DNA, 120 bp, Artificial Sequence
  ENSG00000164244_6 (sequence is synthesized)
catctctggcacagggaactggaaccacatcagccattactttcccagaggagcaagaagaccctagaattactagaggtcaggatgaagcatctgctggtggaatctggggttttatta

SEQ ID NO: 509719 - DNA, 120 bp, Artificial Sequence
  ENSG00000164244_7 (sequence is synthesized)
agggtgtggctgggaatcctatggtgaagtctgtgcttgataagacaaaacattcagtagaaagcatgattacaacgctggaccctggcatggctccctatatcaaatctggaggtgaac

SEQ ID NO: 509720 - DNA, 120 bp, Artificial Sequence
  ENSG00000164244_8 (sequence is synthesized)
tggatattgtagtgacctcaaataaagaagtaaaagttgctgctgtccgagatgccttccaggaggtctttggcttagctgtggttgtaggggaagctggacagtccaatattgccccac

SEQ ID NO: 509721 - DNA, 120 bp, Artificial Sequence
  ENSG00000164244_9 (sequence is synthesized)
aaccagtgggctatgcagctggattaaaaggtgctcaggaacggatagatagcttgcgtcgaactggggtgatccatgaaaaacagacagctgtgtcagtagaaaacttcattgcagaat

SEQ ID NO: 509722 - DNA, 120 bp, Artificial Sequence
  ENSG00000164244_10 (sequence is synthesized)
tgctgcctgacaaatggtttgacattggttgtttggtggttgaagatcctgtccatggcattcatctagaaacatttacacaagccacaccagtgcctttggaatttgtacagcaggctc

SEQ ID NO: 509723 - DNA, 120 bp, Artificial Sequence
  ENSG00000164244_11 (sequence is synthesized)
aaagtctaactccccaggactataatctgaggtggtcaggccttttggtgacagtgggtgaagtcctggaaaagagtttactgaatgtcagccggactgattggcacatggcatttactg

SEQ ID NO: 509724 - DNA, 120 bp, Artificial Sequence
  ENSG00000164244_12 (sequence is synthesized)
ggatgtcccgtcggcagatgatctacagtgcagccagagcgatagcgggcatgtataaacagcgcctgccacccaggacagtgtgagaggagacctacctgggagactgagactttcccc

SEQ ID NO: 509725 - DNA, 120 bp, Artificial Sequence
  ENSG00000164244_13 (sequence is synthesized)
cacttttagcttgatgttaaagaagtggttgtaccttcctaaatcgaatagtctaaatgaatccagtagtttttatcattttcctgtagcctgcaatttttctttctctagaaaggcatc

SEQ ID NO: 509726 - DNA, 120 bp, Artificial Sequence
  ENSG00000164244_14 (sequence is synthesized)
atgtcattccaggagacaaaaagaaacaaatcctttttatagtcataccatttcacctatcatagtactcaaaaaagaaaatatacaaatctatttacagcacaatttaatataccagat

SEQ ID NO: 509727 - DNA, 120 bp, Artificial Sequence
  ENSG00000164244_15 (sequence is synthesized)
ttataaggtggaaattcatgtgcagagacatttaacttaatgccatgtacttgattattttgttctttaaagaagacattattaaagaacatgttggttgaatgtttataaaagcatgat

SEQ ID NO: 509728 - DNA, 120 bp, Artificial Sequence
  ENSG00000164244_16 (sequence is synthesized)
ttgctttggcttcatctcttttctgtcagtctttgactacttttgtatgtgcacacgatctcagggctggtgctgagcagcctgctcaacagtcactataagacacctacttgtcgggag

SEQ ID NO: 509729 - DNA, 120 bp, Artificial Sequence
  ENSG00000164244_17 (sequence is synthesized)
atgttccacatttctgtgcatgttttcagtaatatgggccaaaataatggaattgattattttcctttttggccatcacgtacacatgtaatctggaaaatcatacctttgtcaatttta

SEQ ID NO: 509730 - DNA, 120 bp, Artificial Sequence
  ENSG00000164244_18 (sequence is synthesized)
aacataacttttggcatttcccagatttatactatgaacattggggtaatacattttattttttcattgctatatgacagctaaggggcaaatgattcaagtatattttaaatcagaagt

SEQ ID NO: 509731 - DNA, 120 bp, Artificial Sequence
  ENSG00000164244_19 (sequence is synthesized)
aatactgttcagtacttccaagaataagctctgacaacagccattgtttctgcttccactcatattctctacacattttaatacagaaatttttgagagggggttactttattgcttgtg

SEQ ID NO: 509732 - DNA, 120 bp, Artificial Sequence
  ENSG00000164244_20 (sequence is synthesized)
ggttagtatgtctcttacttcaattaaggttacttatttggtttgccttaagcattacttttttaactttgtgccatttggtctttactttttatggatgttttcaaagaaactatttta

SEQ ID NO: 509733 - DNA, 120 bp, Artificial Sequence
  ENSG00000164244_21 (sequence is synthesized)
tttatttagtctactgtatttctatttcgtggaagccttttcccctcaaataatatattatatcatttttggacttatataaatgataattaaataaatttttttcttaatactgttgga

SEQ ID NO: 509734 - DNA, 120 bp, Artificial Sequence
  ENSG00000164244_22 (sequence is synthesized)
aatactgttggactttgtatatacaagttcaaataactttttcgaagatagtttcttatataaatgtaatttaatttttttactcttctatacagttctttagatgtaaaagaattagca

SEQ ID NO: 509735 - DNA, 120 bp, Artificial Sequence
  ENSG00000164244_23 (sequence is synthesized)
caatctctggcagttttataaaagctgttgaagctcttgtcctgcactgtctttaggtatcataggtatcaggtttgctttgtgttaatgccacttcaagtcattatttggtttctgcta

SEQ ID NO: 509736 - DNA, 120 bp, Artificial Sequence
  ENSG00000164244_24 (sequence is synthesized)
tttttttacctgaggataagaagaatgaatattaaatttgaatattaaatatatgttactttccaagcactgtataatgactgttcagtgaatatcagacttccgtgtcattaaaagtca

SEQ ID NO: 509737 - DNA, 120 bp, Artificial Sequence
  ENSG00000164244_25 (sequence is synthesized)
tgagagacagcacagagaggttataggttgccttggtgtacttttgtccaggagtaacagggacagaatactttctttctttccttcaagtacaagaaggctttctctaccatttgcgtc

SEQ ID NO: 509738 - DNA, 120 bp, Artificial Sequence
  ENSG00000164244_26 (sequence is synthesized)
tacactttattttaaaagctatccttttctagtagtattttatcatggcaatggcatgatgacaacaacagtctttcattacagactgaagggaagcatgtccttacttaaaatagttct

SEQ ID NO: 509739 - DNA, 120 bp, Artificial Sequence
  ENSG00000164244_27 (sequence is synthesized)
gctactttccctcctattataaggaaatcttacagattctaaaaataccttaatttttctttgatttttattttaccaagtcacaaatgtctttttgatgttttgagaattgttctcata

SEQ ID NO: 509740 - DNA, 120 bp, Artificial Sequence
  ENSG00000164244_28 (sequence is synthesized)
gaatcacaaatactgacatttcattagatgattattttcctagaatccccaaagagcagtggcagtccatggcttggttgaagctagaaattttcctgcccctggtgacctggtaagcct

SEQ ID NO: 509741 - DNA, 120 bp, Artificial Sequence
  ENSG00000164244_29 (sequence is synthesized)
cctgctcggaaccgtgtgagtgggtgaggaagatgagagatggtcagatggaagagagaaatacatgaactgctctggcctctctggttctgttcttggcccagagtttttgaaaagcag

SEQ ID NO: 509742 - DNA, 120 bp, Artificial Sequence
  ENSG00000164244_30 (sequence is synthesized)
cggagcatgactgacttcacatgctcagctttctcagccttttgtttattttgttgtccttagatttccctgttgtaaaaggggcaagaaaagtaactcatcatctctaacacaccatgg

SEQ ID NO: 509743 - DNA, 120 bp, Artificial Sequence
  ENSG00000164244_31 (sequence is synthesized)
cagcttagccaggtagtcttagtggtggtgtttaggcataagatatgctgatcatcagtctcaggccacagtttccttcactaatcgtccagcttgagtgttctgttctcttcctgccca

SEQ ID NO: 509744 - DNA, 120 bp, Artificial Sequence
  ENSG00000164244_32 (sequence is synthesized)
tttccttgaacctcctgctctagccttggcggagggagagtgctatttgcttttgttctccctctgtcttaggaaaagccatctttaatatagttcttcaccactgttggggttgttttg

SEQ ID NO: 509745 - DNA, 120 bp, Artificial Sequence
  ENSG00000164244_33 (sequence is synthesized)
tgattttttttttcttccgaagaactcctggttgttattggattttgtattttaatacaaattattgaattttataagcttgtacacaatatttaattagtgtgaaaggaaacaaagaat

SEQ ID NO: 509746 - DNA, 120 bp, Artificial Sequence
  ENSG00000164244_34 (sequence is synthesized)
gcaggaaaaataatttaatatcaacctcagttgacaaggtgctcagattattcaattcgggatcctccttttgttaggtttttgagacaaccctagacctaaactgtgtcacagacttct

SEQ ID NO: 509747 - DNA, 120 bp, Artificial Sequence
  ENSG00000164244_35 (sequence is synthesized)
gaatgtttaggcagtgctagtaatttcctcgtaatgattctgttattactttcctattctttattcctctttcttctgaagattaatgaagttgaaaattgaggtggataaatacaaaaa

SEQ ID NO: 509748 - DNA, 120 bp, Artificial Sequence
  ENSG00000164244_36 (sequence is synthesized)
ggtagtgtgatagtataagtatctaagtgcagatgaaagtgtgttatatacatccattcaaaattatgcaagttagtaattactcagggttaactaaattactttaatatgctgttgaat

SEQ ID NO: 509749 - DNA, 120 bp, Artificial Sequence
  ENSG00000164244_37 (sequence is synthesized)
ctactctgttccttggctagaaaaaattataaacaggactttgtagtttgggaagccaaattgataatattctatgttctaaaagttgggctatacataaattattaagaaatatggatt

SEQ ID NO: 509750 - DNA, 120 bp, Artificial Sequence
  ENSG00000164244_38 (sequence is synthesized)
tttattcccaggatatggtgttcattttatgatattacgcaggatgatgtattgagtaaaatcagttttgtaaatatgtaaatatgtcataaataaacaatgctttgacttatttccaaa

SEQ ID NO: 509751 - DNA, 120 bp, Artificial Sequence
  ENSG00000164244_39 (sequence is synthesized)
actattgttttcagaataaaaatttgttcggtttttttgttagaaatatgttcttgattttgtttcagtcatttttcttttagtatttttctttgctttttaatttcctgatccttccat

SEQ ID NO: 509752 - DNA, 120 bp, Artificial Sequence
  ENSG00000164244_40 (sequence is synthesized)
gttgttttagtaccttcctccttttgttttccaggtgtctttgaaaggtaatacattacatggttaatcattatttctctcatttttttctttgtttttactctgagttctggaaaagat

SEQ ID NO: 509753 - DNA, 120 bp, Artificial Sequence
  ENSG00000164244_41 (sequence is synthesized)
ttaccttttctagttgttttatgtccgcctttcgtttgctttcccttttatctcacatttcatttccactgttatctccatttcccttttccttgattgattgtcctcctgttcatcttt

SEQ ID NO: 509754 - DNA, 120 bp, Artificial Sequence
  ENSG00000164244_42 (sequence is synthesized)
agtgaaatcaacattagaaaccttataggcacgtgtctttaggtttttggctgaaaaatggacctaatagtgtacctatccacacagtttccaggagaatgtaagtataaatgataatcc

SEQ ID NO: 509755 - DNA, 120 bp, Artificial Sequence
  ENSG00000164244_43 (sequence is synthesized)
ttattcctctttttttttttttttggtgtgttttctctaatcctttcatgaacaaaatggaatataaatatatacttgcattggaatctctgtgctcttaagtggtattctattgacttt

SEQ ID NO: 509756 - DNA, 120 bp, Artificial Sequence
  ENSG00000164244_44 (sequence is synthesized)
tttctgtcaatttcataaaatttttgttacagttgtagtttgtacattgttaaatatcatttcaaaactgcctttcaaacttatttgggacatgaagacatttgagaatctaagaaaact

SEQ ID NO: 509757 - DNA, 120 bp, Artificial Sequence
  ENSG00000164244_45 (sequence is synthesized)
attgggctgtctcccaagaaaaatgcgtgtatgtgtactttcatagaactttggcatatgtgttcacataatccctaaaagtaacctctggcctacttattacagtttagaaagggggct

SEQ ID NO: 509758 - DNA, 120 bp, Artificial Sequence
  ENSG00000164244_46 (sequence is synthesized)
aagaattgatgcttggaatttgaaattttactgaaacttttatttataccgtaatttcttttcataagttcaagaaaacctttttatagatattaacattacactcatttcaatatgaag

SEQ ID NO: 509759 - DNA, 120 bp, Artificial Sequence
  ENSG00000164244_47 (sequence is synthesized)
gtgattaaaagactgtaagtgaatactatgcatactgttatgccaataaattagaaaaattaggtgaaagagtggattttctaggaaaatagaagttttgccatagttaagagtattagg

SEQ ID NO: 509760 - DNA, 120 bp, Artificial Sequence
  ENSG00000164244_48 (sequence is synthesized)
ttgaaccaaatgacgttgttgcctttgatggtcagaaatagttatatattgtcagtttcatatgattcagcttaattgaagcattaaaatggaagaactttatgtaactaaaaaaaaaaa

SEQ ID NO: 509761 - DNA, 120 bp, Artificial Sequence
  ENSG00000164244_49 (sequence is synthesized)
aatcactgagtaccaatggtgttacaagtgagttctacaaaatgttcagagatgatttgctgtatgaggtatcaaaaatagaggtagagagttttccagttcattctgtgagactagcct

SEQ ID NO: 509762 - DNA, 120 bp, Artificial Sequence
  ENSG00000164244_50 (sequence is synthesized)
gaccatgaaaaatttgtcccaagaacagcagaatggttcaacaatagtaaatttatgtaattcagtacatgaacatctgcattgaaaggagaaaaaagattttgataagagttgaaggta

SEQ ID NO: 509763 - DNA, 120 bp, Artificial Sequence
  ENSG00000164244_51 (sequence is synthesized)
tttgctagaaataatcatactaatagctcttagtattagacgggtatgtgtgtactacaaaatcaaagcaaacttcagatctaataaataaaacactgaaaacgttataattatgaggat

SEQ ID NO: 509764 - DNA, 120 bp, Artificial Sequence
  ENSG00000164244_52 (sequence is synthesized)
gctcctgtcactgccactgttaacattgctgtagatctggggtcagcaaacagtggctcacagccaaatctggcctgtcatctttttgtaattaagtttattggaacacacccatgccag

SEQ ID NO: 509765 - DNA, 120 bp, Artificial Sequence
  ENSG00000164244_53 (sequence is synthesized)
tttgcttacttattgtttatagctgcttttgtactatagcagcagaaatgaatagttgcaacagagaatgtctggcccacaaagcctaaaatatttaccatctggctcttttcagaaaaa

SEQ ID NO: 509766 - DNA, 120 bp, Artificial Sequence
  ENSG00000164244_54 (sequence is synthesized)
gtttgctgacccctgtgttagatatctgaccattgcaaaggacaatttttatgttgtttttaggaatatatactggaaagaagtagacatgaaagaatgaagtggactcgtgtgtaccag

SEQ ID NO: 509767 - DNA, 120 bp, Artificial Sequence
  ENSG00000164244_55 (sequence is synthesized)
taccaaaagatagctattacatattgctgagtaaaagtcaaaaacagcacatctagtatgatcccatttactagcaggcgtgtgtatgtgtgtgctttaaaattttaataagaataggga

SEQ ID NO: 509768 - DNA, 120 bp, Artificial Sequence
  ENSG00000164244_56 (sequence is synthesized)
aaaaggcctggaaagataacacagcaaactgttaatagtggttaattctgaataatggtatttaaagggtgttatttgctttttactttgctttttattctgtttgttttattttgtgtc

SEQ ID NO: 509769 - DNA, 120 bp, Artificial Sequence
  ENSG00000164244_57 (sequence is synthesized)
atttggttttaaaatttagaagatacaaaactgtgtgcattgaaatgtcttctttttatcctcagctattcagctctcctccctgtttctttttattcattctaaaatgttttatgcttt

SEQ ID NO: 509770 - DNA, 120 bp, Artificial Sequence
  ENSG00000164244_58 (sequence is synthesized)
tttattgttggaattttttaatttaaggtaatggaaatcagcccttcaggtaattagaattatcagtatatattagtaaaaatctggaaataaatttcatacaatttgtacttgttaaac

SEQ ID NO: 509771 - DNA, 120 bp, Artificial Sequence
  ENSG00000164244_59 (sequence is synthesized)
ttaaatataaatgattcctcacccccataaaaaaccccagctgttctggatttttgccaataatatagaataccttgtttctaaaaagtgtggtccttggcttaacatcataagcagcac

SEQ ID NO: 509772 - DNA, 120 bp, Artificial Sequence
  ENSG00000164244_60 (sequence is synthesized)
ctagaaatttgttaaaatgcagattctcgggtcctaacacaggactagtgaatcaggagctgcattttaacaagatattcaggggattcataggcatgccataatttgagaagcacagtg

SEQ ID NO: 509773 - DNA, 120 bp, Artificial Sequence
  ENSG00000164244_61 (sequence is synthesized)
ttactggtgtctctgaggacgttagtagtatatctgctgtttctctttgaaatatagtgaaatactgatactgtagtatacacattggaagagagtacttagagcaggggttcccaagtg

SEQ ID NO: 509774 - DNA, 120 bp, Artificial Sequence
  ENSG00000164244_62 (sequence is synthesized)
ctggactgtttgcatcagattgacttggaagctattttacgtacgtaatactgtactgtttctcttggaaccagctgtagagtttccaattcagttatcttggtgtctcagttatcttag

SEQ ID NO: 509775 - DNA, 120 bp, Artificial Sequence
  ENSG00000164244_63 (sequence is synthesized)
tgggatgtgagaaactggatatcgttaaaaaagaaaaaagaaacaagagctcctcaggtgattgtaatacatggcacatttggtagtcatgtataactgtatagatccgttctagatgtg

SEQ ID NO: 509776 - DNA, 120 bp, Artificial Sequence
  ENSG00000164244_64 (sequence is synthesized)
gctatacttctctggactatacctaacaccctaaaacagaaaaaccacatcagtcttggatatcaagcaatgagtttattcttctgtcattcctttgtagatgaataaatgatttgaata

SEQ ID NO: 509777 - DNA, 120 bp, Artificial Sequence
  ENSG00000164244_65 (sequence is synthesized)
ggagcaaatatgagttgggtcaattaggaatgttgcatcagtggttgatgttgtccaggactggatattacttgatacatattaacatgtgaatcacatttccagagagaatttccataa

SEQ ID NO: 509778 - DNA, 120 bp, Artificial Sequence
  ENSG00000164244_66 (sequence is synthesized)
ttgagcaattcttttctgaatggatttaagccttaattttcagttttcctctttctggttgaaattttactactataaaagataactttagcactgattttagtaccaatcttattatta

SEQ ID NO: 509779 - DNA, 120 bp, Artificial Sequence
  ENSG00000164244_67 (sequence is synthesized)
acctgaagtgacacttaatttagaactagaactcaaaccttccgactgttagcctcgttaatggggatattttttaaaaaatagatgtgtgtaatgttacattgattgtgttctagcctt

SEQ ID NO: 509780 - DNA, 120 bp, Artificial Sequence
  ENSG00000164244_68 (sequence is synthesized)
gtaagttgatatagttggcagcctagctgtatttctcagagtttgtcataatctatatttaaaataacatgaaacactttgaaatgtcacttatagctagttccaatgatatttttaaat

SEQ ID NO: 509781 - DNA, 120 bp, Artificial Sequence
  ENSG00000164244_69 (sequence is synthesized)
tgtatttaaagtaagaaaacatcagtgttttgctttaggtggacttttgttctttatgttcataattttaccatcatttatattatggcagaaatatcctaaaaagcatgtgttagcttt

SEQ ID NO: 509782 - DNA, 79 bp, Artificial Sequence
  ENSG00000164244_70 (sequence is synthesized)
tattatggcagaaatatcctaaaaagcatgtgttagctttgtcttctgttctttttcttttttttgagacggagtttca

SEQ ID NO: 509783 - DNA, 120 bp, Artificial Sequence
  ENSG00000164251_0 (sequence is synthesized)
gaaacctaacccgccctggggaggcgcgcagcagaggctccgattcggggcaggtgagaggctgactttctctcggtgcgtccagtggagctctgagtttcgaatcggcggcggcggatt

SEQ ID NO: 509784 - DNA, 120 bp, Artificial Sequence
  ENSG00000164251_1 (sequence is synthesized)
ccccgcgcgcccggcgtcggggcttccaggaggatgcggagccccagcgcggcgtggctgctgggggccgccatcctgctagcagcctctctctcctgcagtggcaccatccaaggaacc

SEQ ID NO: 509785 - DNA, 120 bp, Artificial Sequence
  ENSG00000164251_2 (sequence is synthesized)
agtagatcctctaaaggaagaagccttattggtaaggttgatggcacatcccacgtcactggaaaaggagttacagttgaaacagtcttttctgtggatgagttttctgcatctgtcctc

SEQ ID NO: 509786 - DNA, 120 bp, Artificial Sequence
  ENSG00000164251_3 (sequence is synthesized)
actggaaaactgaccactgtcttccttccaattgtctacacaattgtgtttgtggtgggtttgccaagtaacggcatggccctgtgggtctttcttttccgaactaagaagaagcaccct

SEQ ID NO: 509787 - DNA, 120 bp, Artificial Sequence
  ENSG00000164251_4 (sequence is synthesized)
gctgtgatttacatggccaatctggccttggctgacctcctctctgtcatctggttccccttgaagattgcctatcacatacatggcaacaactggatttatggggaagctctttgtaat

SEQ ID NO: 509788 - DNA, 120 bp, Artificial Sequence
  ENSG00000164251_5 (sequence is synthesized)
gtgcttattggctttttctatggcaacatgtactgttccattctcttcatgacctgcctcagtgtgcagaggtattgggtcatcgtgaaccccatggggcactccaggaagaaggcaaac

SEQ ID NO: 509789 - DNA, 120 bp, Artificial Sequence
  ENSG00000164251_6 (sequence is synthesized)
attgccattggcatctccctggcaatatggctgctgattctgctggtcaccattcctttgtatgtcgtgaagcagaccatcttcattcctgccctgaacatcacgacctgtcatgatgtt

SEQ ID NO: 509790 - DNA, 120 bp, Artificial Sequence
  ENSG00000164251_7 (sequence is synthesized)
ttgcctgagcagctcttggtgggagacatgttcaattacttcctctctctggccattggggtctttctgttcccagccttcctcacagcctctgcctatgtgctgatgatcagaatgctg

SEQ ID NO: 509791 - DNA, 120 bp, Artificial Sequence
  ENSG00000164251_8 (sequence is synthesized)
cgatcttctgccatggatgaaaactcagagaagaaaaggaagagggccatcaaactcattgtcactgtcctggccatgtacctgatctgcttcactcctagtaaccttctgcttgtggtg

SEQ ID NO: 509792 - DNA, 120 bp, Artificial Sequence
  ENSG00000164251_9 (sequence is synthesized)
cattattttctgattaagagccagggccagagccatgtctatgccctgtacattgtagccctctgcctctctacccttaacagctgcatcgacccctttgtctattactttgtttcacat

SEQ ID NO: 509793 - DNA, 120 bp, Artificial Sequence
  ENSG00000164251_10 (sequence is synthesized)
gatttcagggatcatgcaaagaacgctctcctttgccgaagtgtccgcactgtaaagcagatgcaagtatccctcacctcaaagaaacactccaggaaatccagctcttactcttcaagt

SEQ ID NO: 509794 - DNA, 120 bp, Artificial Sequence
  ENSG00000164251_11 (sequence is synthesized)
atttcctaatcaaaaaggtctcaccacataccatgtggatgcagcacctctcaggattgctaggagctcccctgtttgcatgagaaaagtagtcccccaaattaacatcagtgtctgttt

SEQ ID NO: 509795 - DNA, 120 bp, Artificial Sequence
  ENSG00000164251_12 (sequence is synthesized)
cagaatctctctactcagatgaccccagaaactgaaccaacagaagcagacttttcagaagatggtgaagacagaaacccagtaacttgcaaaaagtagacttggtgtgaagactcactt

SEQ ID NO: 509796 - DNA, 120 bp, Artificial Sequence
  ENSG00000164251_13 (sequence is synthesized)
ctcagctgaaattatatatatacacatatatatattttacatctgggatcatgatagacttgttagggcttcaaggccctcagagatgatcagtccaactgaacgaccttacaaatgagg

SEQ ID NO: 509797 - DNA, 120 bp, Artificial Sequence
  ENSG00000164251_14 (sequence is synthesized)
aaaccaagataaatgagctgccagaatcaggtttccaatcaacagcagtgagttgggattggacagtagaatttcaatgtccagtgagtgaggttcttgtaccacttcatcaaaatcatg

SEQ ID NO: 509798 - DNA, 61 bp, Artificial Sequence
  ENSG00000164251_15 (sequence is synthesized)
ccagtgagtgaggttcttgtaccacttcatcaaaatcatggatctttcacttgaggtcagg

SEQ ID NO: 509799 - DNA, 87 bp, Artificial Sequence
  ENSG00000164251_16 (sequence is synthesized)
gaaacctcatctctactaaaaatacaaaagttaaccaggtgtgtggtgcacgtaagaattgagtatcactttaactcaggaggcaga

SEQ ID NO: 509800 - DNA, 120 bp, Artificial Sequence
  ENSG00000164251_17 (sequence is synthesized)
gcaccactgcactccagcttgggtgataaaataaaataaaatagtcgtgaatcttgttcaaaatgcagattcctcagattcaataatgagagctcagactgggaacagggcccaggaatc

SEQ ID NO: 509801 - DNA, 120 bp, Artificial Sequence
  ENSG00000164251_18 (sequence is synthesized)
caggaatctgtgtggtacaaacctgcatggtgtttatgcacacagagatttgagaaccattgttctgaatgctgcttccatttgacaaagtgccgtgataatttttgaaaagagaagcaa

SEQ ID NO: 509802 - DNA, 120 bp, Artificial Sequence
  ENSG00000164251_19 (sequence is synthesized)
acaatggtgtctcttttatgttcagcttataatgaaatctgtttgttgacttattaggactttgaattatttctttattaaccctctgagtttttgtatgtattattattaaagaaaaat

SEQ ID NO: 509803 - DNA, 120 bp, Artificial Sequence
  ENSG00000164251_20 (sequence is synthesized)
gcaatcaggattttaaacatgtaaatacaaattttgtataacttttgatgacttcagtgaaattttcaggtagtctgagtaatagattgttttgccacttagaatagcatttgccactta

SEQ ID NO: 509804 - DNA, 120 bp, Artificial Sequence
  ENSG00000164251_21 (sequence is synthesized)
gtattttaaaaaataattgttggagtatttattgtcagttttgttcacttgttatctaatacaaaattataaagccttcagagggtttggaccacatctctttggaaaatagtttgcaac

SEQ ID NO: 509805 - DNA, 120 bp, Artificial Sequence
  ENSG00000164251_22 (sequence is synthesized)
atagtttgcaacatatttaagagatacttgatgccaaaatgactttatacaacgattgtatttgtgacttttaaaaataattattttattgtgtaattgatttataaataacaaaatttt

SEQ ID NO: 509806 - DNA, 120 bp, Artificial Sequence
  ENSG00000164252_0 (sequence is synthesized)
gccgttgtttccggctcaactggggagctgctggagctcttctggcctctggttttccgactgcttatccgacgctcctccctctgtctctgtagctggagaaggtagtttccaggaaag

SEQ ID NO: 509807 - DNA, 120 bp, Artificial Sequence
  ENSG00000164252_1 (sequence is synthesized)
ttttccggtttgcaggccgcgcacatcgggcaggggccatcctcggtccccttgctcgttgctcgcagccccgttcggctacaagtgagtttcagggcgtcatggccaggggccaccgcg

SEQ ID NO: 509808 - DNA, 120 bp, Artificial Sequence
  ENSG00000164252_2 (sequence is synthesized)
gccagccgggtgtgaggctgcctttcgctgcccgcgcgctccagtggtctctgggtccgccggcgtccgtttcggcctgaacgcagcccctccgcggcgacgagcagtctcgcgccggag

SEQ ID NO: 509809 - DNA, 120 bp, Artificial Sequence
  ENSG00000164252_3 (sequence is synthesized)
ctcatggcctcggaggcgccgtccccgccgcggtcgccgccgccgcccacctcccccgagcctgagctggcccagctaaggcggaaggtggagaagttggaacgtgaactgcggagctgc

SEQ ID NO: 509810 - DNA, 120 bp, Artificial Sequence
  ENSG00000164252_4 (sequence is synthesized)
aagcggcaggtgcgggagatcgagaagctgctgcatcacacagaacggctgtaccagaacgcagaaagcaacaaccaggagctccgcacgcaggtggaagaactcagtaaaatactccaa

SEQ ID NO: 509811 - DNA, 120 bp, Artificial Sequence
  ENSG00000164252_5 (sequence is synthesized)
cgtgggagaaatgaagataataaaaagtctgatgtagaagtacaaacagagaaccatgctccttggtcaatctcagattatttttatcagacgtactacaatgacgttagtcttccaaat

SEQ ID NO: 509812 - DNA, 120 bp, Artificial Sequence
  ENSG00000164252_6 (sequence is synthesized)
aaagtgactgaactgtcagatcaacaagatcaagctatcgaaacttctattttgaattctaaagaccatttacaagtagaaaatgatgcttaccctggtaccgatagaacagaaaatgtt

SEQ ID NO: 509813 - DNA, 120 bp, Artificial Sequence
  ENSG00000164252_7 (sequence is synthesized)
aaatatagacaagtggaccattttgcctcaaattcacaggagccagcatctgcattagcaacagaagatacctccttagaaggctcatcattagctgaaagtttgagagctgcagcagaa

SEQ ID NO: 509814 - DNA, 120 bp, Artificial Sequence
  ENSG00000164252_8 (sequence is synthesized)
gcggctgtatcacagactggatttagttatgatgaaaatactggactgtattttgaccacagcactggtttctattatgattctgaaaatcaactctattatgatccttccactggaatt

SEQ ID NO: 509815 - DNA, 120 bp, Artificial Sequence
  ENSG00000164252_9 (sequence is synthesized)
tattactattgtgatgtggaaagtggtcgttatcagtttcattctcgagtagatttgcaaccttatccgacttctagcacaaaacaaagtaaagataaaaaattgaagaagaaaagaaaa

SEQ ID NO: 509816 - DNA, 120 bp, Artificial Sequence
  ENSG00000164252_10 (sequence is synthesized)
gatccagattcttctgcaacaaatgaggaaaaggatttgaactcagaggatcaaaaagccttcagtgttgaacatacaagctgcaatgaggaagaaaatttcgcaaatatgaaaaagaag

SEQ ID NO: 509817 - DNA, 120 bp, Artificial Sequence
  ENSG00000164252_11 (sequence is synthesized)
gccaaaataggcattcatcacaaaaatagtccccccaaagtcactgttccaactagtggaaatactatagagtctcctcttcatgaaaacatctctaattcaacatcatttaaagatgag

SEQ ID NO: 509818 - DNA, 120 bp, Artificial Sequence
  ENSG00000164252_12 (sequence is synthesized)
aaaatcatggagactgatagtgaaccagaggaaggtgaaattacagactctcagactgaggatagttatgacgaagccattaccagtgaaggcaatgtaactgcagaagatagtgaggat

SEQ ID NO: 509819 - DNA, 120 bp, Artificial Sequence
  ENSG00000164252_13 (sequence is synthesized)
gaagatgaagacaaaatttggcccccatgtattagagtaattgtcattagatcacctgtgttgcagataggatcactctttatcattactgctgtaaaccctgctacaattggaagagaa

SEQ ID NO: 509820 - DNA, 120 bp, Artificial Sequence
  ENSG00000164252_14 (sequence is synthesized)
aaggatatggaacatactctccgaatccctgaagttggtgtcagtaagtttcatgcagaaatttattttgaccatgacttacaaagttatgtccttgtggatcaaggcagtcaaaatggc

SEQ ID NO: 509821 - DNA, 120 bp, Artificial Sequence
  ENSG00000164252_15 (sequence is synthesized)
acaattgttaatggaaaacagattcttcagccgaaaactaaatgtgacccttacgtacttgagcatggagatgaagtcaaaattggagaaactgtcttatcctttcacattcatcctggc

SEQ ID NO: 509822 - DNA, 120 bp, Artificial Sequence
  ENSG00000164252_16 (sequence is synthesized)
agtgatacctgtgatggctgtgaaccagggcaggttagagcccaccttcgccttgataagaaagatgaatcttttgttggtccaacactaagtaaggaggaaaaagagttggaaagaaga

SEQ ID NO: 509823 - DNA, 120 bp, Artificial Sequence
  ENSG00000164252_17 (sequence is synthesized)
aaagaattaaagaaaatacgagtaaaatatggtttacagaatacagaatacgaagatgaaaagacattgaagaatccaaaatataaagatagagctggaaaacgtagggagcaggttgga

SEQ ID NO: 509824 - DNA, 120 bp, Artificial Sequence
  ENSG00000164252_18 (sequence is synthesized)
aattactgatagcaacaaaggtcggaagatgttggagaagatgggttggaagaaaggagagggcctggggaaggatggtggaggaatgaaaacgccgatccagcttcagcttcggcgaac

SEQ ID NO: 509825 - DNA, 120 bp, Artificial Sequence
  ENSG00000164252_19 (sequence is synthesized)
acatgcaggcttggggacaggcaaaccatcctcatttgaagatgttcaccttctccaaaacaagaacaaaaaaaactgggacaaagcacgagagcggtttactgaaaacttcccagaaac

SEQ ID NO: 509826 - DNA, 120 bp, Artificial Sequence
  ENSG00000164252_20 (sequence is synthesized)
taagcctcaaaaagatgacccagggaccatgccttgggtaaaagggactttagagtgaaggctaatcatagaaaaaaaacctctagtttttttaaaaatagaatttggaaacttattttt

SEQ ID NO: 509827 - DNA, 120 bp, Artificial Sequence
  ENSG00000164252_21 (sequence is synthesized)
tctccccaaaagaatcagcagcacaggggaactatgtcacagtttacctcttcctgattcagaaatgtgtatggtttgcagcttttaaaaaccatttttttaaaactaataaatagtgac

SEQ ID NO: 509828 - DNA, 120 bp, Artificial Sequence
  ENSG00000164252_22 (sequence is synthesized)
tgaaccaatttatgcagtaaatagactaaagttcacagggcacggatgagtttatcaaacttcgttattttatcttgtcatttacaacatccatataagcaactagccatataagcaaaa

SEQ ID NO: 509829 - DNA, 120 bp, Artificial Sequence
  ENSG00000164252_23 (sequence is synthesized)
ttcatagaactactaatgacttaagtgtacatctgttcttgtctccatatattcatgtaagatgcacaacaaaagaaacatcagaagtttataaaaataaatctgactatatgcatcctc

SEQ ID NO: 509830 - DNA, 120 bp, Artificial Sequence
  ENSG00000164252_24 (sequence is synthesized)
atttattccctttagaacctaggtaaaaaatgttgcgaaaacatgggtagtggcgcatacattttgttatccttgaaatagcctaagtaatgttattgaagaactaatgaacaggtaaca

SEQ ID NO: 509831 - DNA, 120 bp, Artificial Sequence
  ENSG00000164252_25 (sequence is synthesized)
tattgtagaaaattagtctttcattgttttcttctgtgaagaatctgttgctatgtactgtatattcagcatttatatttggtttgtttcatagctaatgaggtatttagatatgaacaa

SEQ ID NO: 509832 - DNA, 120 bp, Artificial Sequence
  ENSG00000164252_26 (sequence is synthesized)
ctgaatacatattgaaatagtgtgctggcttttgtagttttgataaagaccattgcaggcaatggaattgtgccagagaaatctgatttctagtacaaaaggaatacttagccagggcct

SEQ ID NO: 509833 - DNA, 120 bp, Artificial Sequence
  ENSG00000164252_27 (sequence is synthesized)
caagctcaagatacttattgaaaacatcctcaattgcaataaaaacattataacatgaaaaagagtgattttttgaaccggtgatttaaatgtattgatctgctttgaattttcaagcag

SEQ ID NO: 509834 - DNA, 120 bp, Artificial Sequence
  ENSG00000164252_28 (sequence is synthesized)
ccagaattttctagtttaaattggcagagttataacaaaggagagcctcaaatattagacaattgcagtgcggctttctgggcacaggtgtcactgctctgccacctatcactattcttt

SEQ ID NO: 509835 - DNA, 120 bp, Artificial Sequence
  ENSG00000164252_29 (sequence is synthesized)
ttctgttcagtttttctctcaggtgtttgctgggaaattaacactggaactgacccttttctggcagtgaatgtaagctctagctcccccatctactataaagaaatgtcttcgagatgt

SEQ ID NO: 509836 - DNA, 120 bp, Artificial Sequence
  ENSG00000164252_30 (sequence is synthesized)
agaaataaggaatattctgaaaataaaaattatacagtagtaaagataattcagaaagaaaaagctacctgttagaatttccagtctaaatggcacagggtagttacggagaaaagggga

SEQ ID NO: 509837 - DNA, 120 bp, Artificial Sequence
  ENSG00000164252_31 (sequence is synthesized)
tggagaaggagaaactatgactaaagatgagaggtatgaacgagttgtcaggttcctatgggcttaagctaggacaatcaggccctaaactccaaatttggataaaatatctctttgcat

SEQ ID NO: 509838 - DNA, 120 bp, Artificial Sequence
  ENSG00000164252_32 (sequence is synthesized)
tcttcttggccacctgcatagtctgacacatacgtatgtacagttagacttgcaggctgcaggagtgccctgcattgttttcttttaattagaaataaaaagtattagtctaaatgtggt

SEQ ID NO: 509839 - DNA, 120 bp, Artificial Sequence
  ENSG00000164252_33 (sequence is synthesized)
tctggtgctggtgccctgtatatatgtaacaatataggacccctccaaataggttttgcttctggtgaatcttggtcattgggttagtatatgactgtctataatattttccatttgtat

SEQ ID NO: 509840 - DNA, 120 bp, Artificial Sequence
  ENSG00000164252_34 (sequence is synthesized)
tattatattggggaaaacattttttatcattttctattaagaaaatggaaaacttaaatatggtgttaaaaatggaaatatatgtgatatttgcattattaaacccctttgcagatctaa

SEQ ID NO: 509841 - DNA, 120 bp, Artificial Sequence
  ENSG00000164252_35 (sequence is synthesized)
agtctcagggttccactattagtggttaaagtactgaataatgtctgggtctatttccatctgtaaaataagaatatttgtctcacgtgtctgtcatgaatagcaaatgagaaaatgtat

SEQ ID NO: 509842 - DNA, 120 bp, Artificial Sequence
  ENSG00000164252_36 (sequence is synthesized)
ataaaagcactttgtaaattgtaaaagtagtacagatgtgagcttctatttgtttagaagcataaatgtgaattatatacagtttgaattttgcataaattttttgtgtctaattttaaa

SEQ ID NO: 509843 - DNA, 120 bp, Artificial Sequence
  ENSG00000164252_37 (sequence is synthesized)
gacttctttggtccgtcacagcatatataagggttataaacattcttatgtgtaattatgcaaagaatgttgtagtttttccaaaaccagaattagaacttcttcatatatgtagtggtt

SEQ ID NO: 509844 - DNA, 120 bp, Artificial Sequence
  ENSG00000164252_38 (sequence is synthesized)
ttcctactacattgtgttccaaaattttgtgatctacataaactaaaacaaaatttgtccagatattttgactgaacaaaagaactgtggacaacaataccacatttacacctaaaaaaa

SEQ ID NO: 509845 - DNA, 120 bp, Artificial Sequence
  ENSG00000164252_39 (sequence is synthesized)
atttgggtgctgcagccaaggagaataggaaatcagtctcaaatccatctcctcaaccaactaaaattagaggtttatatggcaagggagaaatgtgactacatgtgagaaaacaggaat

SEQ ID NO: 509846 - DNA, 120 bp, Artificial Sequence
  ENSG00000164252_40 (sequence is synthesized)
tagtgagcggtaaggatgaggacttgttcaacaggcagcaggtggctggttaggcaatcatgatgggtgaggggtatggtgcctcattgtccagatgcagtgatctggtggaagaactca

SEQ ID NO: 509847 - DNA, 120 bp, Artificial Sequence
  ENSG00000164253_0 (sequence is synthesized)
agttgcgctgcagccggggaggaaggaggaggccgagcctggggcggagtttgggctgactggggctggaccgggcaagacgccgccgctgcccggatgttgcgatggctgatcggggga

SEQ ID NO: 509848 - DNA, 120 bp, Artificial Sequence
  ENSG00000164253_1 (sequence is synthesized)
ggccgagaaccgcagggactggccgagaaatctcctttacagacaataggtgaagaacaaacccagaatccctacactgaactgctagtactgaaggctcatcatgatattgtacgattt

SEQ ID NO: 509849 - DNA, 120 bp, Artificial Sequence
  ENSG00000164253_2 (sequence is synthesized)
ctggtacagttagatgactacagatttgcatctgctggtgatgatggaattgtagttgtgtggaatgcccagacaggggaaaaacttttagaactgaatggacacactcaaaagataaca

SEQ ID NO: 509850 - DNA, 120 bp, Artificial Sequence
  ENSG00000164253_3 (sequence is synthesized)
gctattattacatttccttccttggaatcttgtgaagagaaaaatcaactcatcttgacagcctctgctgatagaacagttattgtgtgggatggtgatactaccagacaagttcagaga

SEQ ID NO: 509851 - DNA, 120 bp, Artificial Sequence
  ENSG00000164253_4 (sequence is synthesized)
atatcatgcttccagtctactgtaaagtgtttaactgttcttcagagactagatgtttggctttctggtgggaatgacctgtgtgtgtggaaccgaaaattagatctcctgtgtaagact

SEQ ID NO: 509852 - DNA, 120 bp, Artificial Sequence
  ENSG00000164253_5 (sequence is synthesized)
agccacctttctgatacaggtattagtgctttggttgaaatacctaagaactgtgttgtggcagcagttggcaaagaactgataattttcaggttggtagcacccacagaaggatcacta

SEQ ID NO: 509853 - DNA, 120 bp, Artificial Sequence
  ENSG00000164253_6 (sequence is synthesized)
gaatgggatattcttgaagttaagcgcctccttgatcaccaggataatattctctcattgattaatgtcaatgatttgagttttgtcaccggctcccacgtcggagagctgatcatctgg

SEQ ID NO: 509854 - DNA, 120 bp, Artificial Sequence
  ENSG00000164253_7 (sequence is synthesized)
gatgccctggactggaccatgcaggcctatgaacgcaacttctgggacccatctccacaactggacacccaacaagaaataaaactctgtcaaaaatcaaatgacatttctattcatcat

SEQ ID NO: 509855 - DNA, 120 bp, Artificial Sequence
  ENSG00000164253_8 (sequence is synthesized)
ttcacatgtgatgaagagaatgtatttgctgcagttggaaggggtttatacgtgtatagccttcaaatgaagcgtgtgattgcctgccagaaaactgcacatgactccaatgtcctgcac

SEQ ID NO: 509856 - DNA, 120 bp, Artificial Sequence
  ENSG00000164253_9 (sequence is synthesized)
gttgccagacttccaaacaggcagttaatctcatgctcagaagatggcagtgtacgcatttgggagttaagagaaaaacagcagcttgcagctgagcctgtaccaacaggtttttttaac

SEQ ID NO: 509857 - DNA, 120 bp, Artificial Sequence
  ENSG00000164253_10 (sequence is synthesized)
atgtggggatttggaagagtcagcaaacaagccagccaacctgttaaaaagcagcaagaaaatgctacttcatgttcactggagcttattggagatttgattggacactcatcatctgtg

SEQ ID NO: 509858 - DNA, 120 bp, Artificial Sequence
  ENSG00000164253_11 (sequence is synthesized)
gagatgtttctatactttgaagatcatggactagtgacgtgctccgctgatcatctcattattttgtggaaaaatggagagcgagaatctggattgcgcagtttaagattatttcaaaaa

SEQ ID NO: 509859 - DNA, 120 bp, Artificial Sequence
  ENSG00000164253_12 (sequence is synthesized)
ttagaggagaatggtgacttataccttgctgtctagtttaaggaattaaaaatacacatgcatgaaccttgaacatcaaatatcgggtactactctgaaaaccattaatatattgatcac

SEQ ID NO: 509860 - DNA, 120 bp, Artificial Sequence
  ENSG00000164253_13 (sequence is synthesized)
ttaaattggtaattttttttgtcagtccataaaattctacatgtttaaattttttgtggacctaccaaccaggaacatgttgcttctcaggtcctagtatatcctccaaagaatatacca

SEQ ID NO: 509861 - DNA, 120 bp, Artificial Sequence
  ENSG00000164253_14 (sequence is synthesized)
caagtttttccatttgactttgagctgctgttgaagtggtgagtgctgtgttttgagcttattttgaacctagatccttgtgaaaggtacaaatagaggtaatagttaagttatggcatt

SEQ ID NO: 509862 - DNA, 120 bp, Artificial Sequence
  ENSG00000164253_15 (sequence is synthesized)
agtctttagtaactgttagtgttctatatagcacaaacttgaatctctcagccaaaaaagggaacatatatactgtttaagtatggcaagttttctttggtaccaatttgtttagataat

SEQ ID NO: 509863 - DNA, 120 bp, Artificial Sequence
  ENSG00000164253_16 (sequence is synthesized)
tttaaaaatgttttttagttctagctactaaaacctgtatgaactcaaatggataggcatcttgtgagggtgtgtttttcccagtgtgaattggcttgaagagccatgggctaaatgggt

SEQ ID NO: 509864 - DNA, 120 bp, Artificial Sequence
  ENSG00000164253_17 (sequence is synthesized)
actagaacaacaactgcccctcatgtacgccaaggatgagctctagatcatttgagaggcacagtgtttccggagtcagggactgcagctgagcgcaactgccccatctgaccactgact

SEQ ID NO: 509865 - DNA, 120 bp, Artificial Sequence
  ENSG00000164253_18 (sequence is synthesized)
caaatacgaactgcttgagacagacttcttttatgtagttctttgcagtgtccattgagacactataaccagccttgtaacaatatgttttctccttttggtgctaaaaaatgaaaatat

SEQ ID NO: 509866 - DNA, 120 bp, Artificial Sequence
  ENSG00000164253_19 (sequence is synthesized)
tagaaagtagtctacacattaaagattgaaattcttaaactactgatgaagaaagggcaacgtgacagatgttagcagactgacccttcttacagaaaacctacagatttatttgttcat

SEQ ID NO: 509867 - DNA, 120 bp, Artificial Sequence
  ENSG00000164253_20 (sequence is synthesized)
tatacaaatatactacaaatataccctaaagggaatctccataagttcttttactagttttagctttgacagttgcttccacaactacctacaaagactggaagagttaaggtcatctga

SEQ ID NO: 509868 - DNA, 120 bp, Artificial Sequence
  ENSG00000164253_21 (sequence is synthesized)
gtagaccagtggcataatgttacaaatgaggaaactgaggcccagtgcagtaaggccttgcaattaaatctgtagtgcccagtatcaccaagcagctctaaaaacaggaactgaagactg

SEQ ID NO: 509869 - DNA, 120 bp, Artificial Sequence
  ENSG00000164253_22 (sequence is synthesized)
aatgagaaaaggcttatatgactactttaaatccaaacaacattgagtcatgaaaagttctatggagaaatattaaaacttaagctacctcaattacagaagactttctcccattattca

SEQ ID NO: 509870 - DNA, 120 bp, Artificial Sequence
  ENSG00000164253_23 (sequence is synthesized)
cgtgctttttcctttagaaattctgcattggcccatacatttgtaaagttgttttctgaagttgtatgacacaagggagccatagacttaactgttttacttcctagcctgttctaggct

SEQ ID NO: 509871 - DNA, 120 bp, Artificial Sequence
  ENSG00000164253_24 (sequence is synthesized)
agtattttgtgatagtaatctattcaaatggagtggtagaaatcacatgaattttggaagcaaatggtaccgtaagtaccacagcaaattccttctggtcattatacaggcgtacctcag

SEQ ID NO: 509872 - DNA, 120 bp, Artificial Sequence
  ENSG00000164253_25 (sequence is synthesized)
agatactacaggttaggtttcagaccacatcaaaaaagcaactattgcaaatagagtgagtcacatctagtttttggtttcccagtgcctataaaacttgtgtttatactacagtcttaa

SEQ ID NO: 509873 - DNA, 88 bp, Artificial Sequence
  ENSG00000164253_26 (sequence is synthesized)
cgagtcataatctttttgctggtggagggtcttgatactgctggctgttgactaaggtggttactgaaggttggggtggctgtggcag

SEQ ID NO: 509874 - DNA, 120 bp, Artificial Sequence
  ENSG00000164253_27 (sequence is synthesized)
tgactaaggtggttactgaaggttggggtggctgtggcagttccttaaaataagatagcgatgaagttttccaaatcaattgacttcctttcacaaatgagatctctgtaacatgtaata

SEQ ID NO: 509875 - DNA, 88 bp, Artificial Sequence
  ENSG00000164253_28 (sequence is synthesized)
tacccacagtagaacttctttcaaaatttagagtctgtcatctcaaatcctgatgctcctttatgaactaagtttatatatgtttaca

SEQ ID NO: 509876 - DNA, 120 bp, Artificial Sequence
  ENSG00000164253_29 (sequence is synthesized)
ttcaactatgtttacagcatcttcactgtggaaatgactgtctccagaaaccactttctatacacattcttaagcaacttctcatctattaaagtttgatcatgagattacagcaattca

SEQ ID NO: 509877 - DNA, 120 bp, Artificial Sequence
  ENSG00000164253_30 (sequence is synthesized)
aattgctccacctctggtgccagttagtggaagggtagaaagatgggaaaaaacaggtctgggtttggatgcactcttttgcagcatgagctctaccgaatggagaggaagtctcccttc

SEQ ID NO: 509878 - DNA, 120 bp, Artificial Sequence
  ENSG00000164253_31 (sequence is synthesized)
ccttagagttttggctcctgcagtctcctgttggtagccactgtaacagctgccaccattactgtgggatattttggagtctgaggcataagagaatggacaaaaaggagaggaaaagac

SEQ ID NO: 509879 - DNA, 120 bp, Artificial Sequence
  ENSG00000164253_32 (sequence is synthesized)
gcagccgcccccgccgtcggccgccgcaccccaagcgactgcccaaactaagcctccgtggctgggtacgggagcgctttggggacaaaaattctccctcaactgtggtctgcattcctt

SEQ ID NO: 509880 - DNA, 120 bp, Artificial Sequence
  ENSG00000164253_33 (sequence is synthesized)
tggtgacttataccttgctgtctagtttaaggaattaaaaatacacatgcatgaaccttgaacatcaaatatcggataaatctgttcagataagctccttatgaatccttcagatcgatg

SEQ ID NO: 509881 - DNA, 120 bp, Artificial Sequence
  ENSG00000164253_34 (sequence is synthesized)
gatgagctcacaggcaccaaggctttgcttcctgtggcctgctagttacagtgaaccagctccatggattgacaagggtacacaggatgacagcagagcaaaggagtttgccaagtattt

SEQ ID NO: 509882 - DNA, 120 bp, Artificial Sequence
  ENSG00000164253_35 (sequence is synthesized)
gttctgtcattaagtattcaaaagaacatatatttttcttcatggaacataactttctaagaatgaaatttggggacttgaatgattcaaggtcaaatattaaacattagctccttcacc

SEQ ID NO: 509883 - DNA, 120 bp, Artificial Sequence
  ENSG00000164253_36 (sequence is synthesized)
gggagccggagctcctcagacccggcgggaccccaggcgcaccctggagctgcagacccccggccccgtcccacggctagctgaatcgtgagatcctggctcagggacgctcagctggtc

SEQ ID NO: 509884 - DNA, 120 bp, Artificial Sequence
  ENSG00000164253_37 (sequence is synthesized)
gtaaaatgttgaaattggggctgaaaagaatcttctgtgtgttcctggaaatagccacctcttattgcagtctccctttgttttgcaagttatgtttaagtactatatattaaatcatta

SEQ ID NO: 509885 - DNA, 120 bp, Artificial Sequence
  ENSG00000164253_38 (sequence is synthesized)
caatactgccatttatcagtgtctcaagagttaacagaaggctttgagggtatctatgggaaagccttgagaaggccatgggttactattggtgagctgttcatcatttgggttttccaa

SEQ ID NO: 509886 - DNA, 120 bp, Artificial Sequence
  ENSG00000164253_39 (sequence is synthesized)
attactggaggccagattgttaatagtgttattagatccttatgtcatgatgtcctttcataagccctgcttgatttatggactggtggagcttttacaagcagttattctgtgtttgga

SEQ ID NO: 509887 - DNA, 120 bp, Artificial Sequence
  ENSG00000164253_40 (sequence is synthesized)
aataagcaaagacaatcttagtcaatgtgatacaatggaaggagccctggactaaaacacagggcatccgtgtcctttccagtaatatgttttgtgattctgagtattaggttgctacat

SEQ ID NO: 509888 - DNA, 120 bp, Artificial Sequence
  ENSG00000164253_41 (sequence is synthesized)
ctggattgttgggcttctagtattttcacatataatttagtgaaagatttttaaacaagctgttttctgcatttagaattcttctcttgctatccaccctgctgttctcccatgtcctct

SEQ ID NO: 509889 - DNA, 120 bp, Artificial Sequence
  ENSG00000164253_42 (sequence is synthesized)
gccttctctgtaccattcctttgccttccttgcagcaccatttcctccttcttgtacatgggaaaatacaaaacctactgttaaaatatgcctatgtggagaaaaatcttggccagaaat

SEQ ID NO: 509890 - DNA, 120 bp, Artificial Sequence
  ENSG00000164253_43 (sequence is synthesized)
actatccaaatcacaacagtcagtcctttgatggatgggaaggataagcaaatgactagaccgttttctacacttgcatatatattataaattacatatatatcataatggaaaaattaa

SEQ ID NO: 509891 - DNA, 120 bp, Artificial Sequence
  ENSG00000164253_44 (sequence is synthesized)
acaggtttttttttttgccaacacgtggtggttctaatttatcaactcttttattcatactgacagaagcaaaattgtaacatgccttgtagaagttatagttacgctaaaatcattaac

SEQ ID NO: 509892 - DNA, 120 bp, Artificial Sequence
  ENSG00000164253_45 (sequence is synthesized)
ctctttacttaaataagtgaagtgtgttagaatgttgaatctgattctttcattaatagaagaaaaattttacatgtattagtggatcacaaacatgctatttgaaggctgctttcttag

SEQ ID NO: 509893 - DNA, 120 bp, Artificial Sequence
  ENSG00000164253_46 (sequence is synthesized)
ctgctgactgttggctagttcattcaatgccagggagcctgctcaggcttctaaagtttacatgaaggaaaaccccaattttacatcacttttgagctagccatcttgtaaatgggtgat

SEQ ID NO: 509894 - DNA, 120 bp, Artificial Sequence
  ENSG00000164253_47 (sequence is synthesized)
ggtgattatcttaagggatccctggtaaataagtgtgaattgctgaatctaccactttatcacaatagtaaaaaaaagtacaaaaaaacccaaccccatattctgctcttaataaatcaa

SEQ ID NO: 509895 - DNA, 120 bp, Artificial Sequence
  ENSG00000164253_48 (sequence is synthesized)
taatgtcttccaaaagtctcagaaacctacatttaacaatcattttccattagtaagcaagcaaggaagtgtgtgtggagctagttctgtgtgctttatcttctttatggaaaacgactg

SEQ ID NO: 509896 - DNA, 120 bp, Artificial Sequence
  ENSG00000164253_49 (sequence is synthesized)
ttttgtgggtcttatgaattatttctttccacacacttgtagtcatttgcttcgtgtaagatcagatttttgagagcacatgtattaagtgttagaatgtttcaatttgaaattagagca

SEQ ID NO: 509897 - DNA, 120 bp, Artificial Sequence
  ENSG00000164253_50 (sequence is synthesized)
gcaatgatgacttttatgagttttcctccaacgacagaaaaacactgcagtaagctttggcagcgtgtcctttgaagaggcagagactcgtttatccagctatcaaaaatccatcaagtc

SEQ ID NO: 509898 - DNA, 120 bp, Artificial Sequence
  ENSG00000164253_51 (sequence is synthesized)
ttctgcacacaagcttctgtgccagctgctggggatgcaaagaatgcaccccaccccacttggccacaaaaagctgacagccacatttttaaaaatatattttgtttacctttaggctca

SEQ ID NO: 509899 - DNA, 120 bp, Artificial Sequence
  ENSG00000164253_52 (sequence is synthesized)
ggtgagcgcaggtacacagaccaggaagtatctctgctcctaacctctctttatgtatgcatgaagctaattgttcaagtccaggggaaactggtgagagacggagtttcaccatgttgc

SEQ ID NO: 509900 - DNA, 120 bp, Artificial Sequence
  ENSG00000164253_53 (sequence is synthesized)
agaatgaaaagaatgggcagcctagtggttgctcaggtgagcgcaggtacacagaccaggaagtatctctgctcctaacctctctttatgtatgcatgaagctaattgttcaagtccagg

SEQ ID NO: 509901 - DNA, 120 bp, Artificial Sequence
  ENSG00000164256_0 (sequence is synthesized)
ctctgagagaacgcccggccagggtgaacgccgcggcaggagagcacgggagattgtgaagagcatggggagcctttgtcgtgcagcgtgaaacccttgagcctttggcctaggagctgg

SEQ ID NO: 509902 - DNA, 120 bp, Artificial Sequence
  ENSG00000164256_1 (sequence is synthesized)
gagactcagggcccttctcacactcagaattggagcagggccttctagacagtcccagcaccatgagccctgaaaagtcccaagaggagagcccagaagaagacacagagagaacagagc

SEQ ID NO: 509903 - DNA, 120 bp, Artificial Sequence
  ENSG00000164256_2 (sequence is synthesized)
ggaagcccatggtcaaagatgccttcaaagacatttccatatacttcaccaaggaagaatgggcagagatgggagactgggagaaaactcgctataggaatgtgaaaaggaactataatg

SEQ ID NO: 509904 - DNA, 120 bp, Artificial Sequence
  ENSG00000164256_3 (sequence is synthesized)
cactgattactataggtctcagagccactcgaccagctttcatgtgtcaccgaaggcaggccatcaaactccaggtggatgacacagaagattctgatgaagaatggacccctaggcagc

SEQ ID NO: 509905 - DNA, 120 bp, Artificial Sequence
  ENSG00000164256_4 (sequence is synthesized)
aagtcaaacctccttggatggccttaagagtggaacagcgtaaacaccagaagggaatgcccaaggcgtcattcagtaatgaatctagtttgaaagaattgtcaagaacagcaaatttac

SEQ ID NO: 509906 - DNA, 120 bp, Artificial Sequence
  ENSG00000164256_5 (sequence is synthesized)
tgaatgcaagtggctcagagcaggctcagaaaccagtgtccccttctggagaagcaagtacctctggacagcactcaagactaaaactggaactcaggaagaaggagactgaaagaaaga

SEQ ID NO: 509907 - DNA, 120 bp, Artificial Sequence
  ENSG00000164256_6 (sequence is synthesized)
tgtatagcctgcgagaaagaaagggtcatgcatacaaagaggtcagcgagccgcaggatgatgattacctctattgtgagatgtgtcagaacttcttcattgacagctgtgctgcccatg

SEQ ID NO: 509908 - DNA, 120 bp, Artificial Sequence
  ENSG00000164256_7 (sequence is synthesized)
ggccccctacatttgtaaaggacagtgcagtggacaaggggcaccccaaccgttcagccctcagtctgcccccagggctgagaattgggccatcaggcatccctcaggctgggcttggag

SEQ ID NO: 509909 - DNA, 120 bp, Artificial Sequence
  ENSG00000164256_8 (sequence is synthesized)
tatggaatgaggcatctgatctgccgctgggtctgcactttggcccttatgagggccgaattacagaagacgaagaggcagccaacaatggatactcctggctgatcaccaaggggagaa

SEQ ID NO: 509910 - DNA, 120 bp, Artificial Sequence
  ENSG00000164256_9 (sequence is synthesized)
actgctatgagtatgtggatggaaaagataaatcctgggccaactggatgaggtatgtgaactgtgcccgggatgatgaagagcagaacctggtggccttccagtaccacaggcagatct

SEQ ID NO: 509911 - DNA, 120 bp, Artificial Sequence
  ENSG00000164256_10 (sequence is synthesized)
tctatagaacctgccgagtcattaggccaggctgtgaactgctggtctggtatggggatgaatacggccaggaactgggcatcaagtggggcagcaagtggaagaaagagctcatggcag

SEQ ID NO: 509912 - DNA, 120 bp, Artificial Sequence
  ENSG00000164256_11 (sequence is synthesized)
ggagagaaccaaagccagagatccatccatgtccctcatgctgtctggccttttcaagtcagaaatttctcagtcaacatgtagaacgcaatcactcctctcagaacttcccaggaccat

SEQ ID NO: 509913 - DNA, 120 bp, Artificial Sequence
  ENSG00000164256_12 (sequence is synthesized)
ctgcaagaaaactcctccaaccagagaatccctgcccaggggatcagaatcaggagcagcaatatccagatccacacagccgtaatgacaaaaccaaaggtcaagagatcaaagaaaggt

SEQ ID NO: 509914 - DNA, 120 bp, Artificial Sequence
  ENSG00000164256_13 (sequence is synthesized)
ccaaactcttgaataaaaggacatggcagagggagatttcaagggccttttctagcccacccaaaggacaaatggggagctgtagagtgggaaaaagaataatggaagaagagtccagaa

SEQ ID NO: 509915 - DNA, 120 bp, Artificial Sequence
  ENSG00000164256_14 (sequence is synthesized)
caggccagaaagtgaatccagggaacacaggcaaattatttgtgggggtaggaatctcaagaattgcaaaagtcaagtatggagagtgtggacaaggtttcagtgttaaatcagatgtta

SEQ ID NO: 509916 - DNA, 120 bp, Artificial Sequence
  ENSG00000164256_15 (sequence is synthesized)
ccagaggatacacacaggggagaagccctatgtctgcagggagtgtgggcggggctttagctggcagtcagtcctcctcactcaccagaggacacacacaggggagaagccctatgtctg

SEQ ID NO: 509917 - DNA, 120 bp, Artificial Sequence
  ENSG00000164256_16 (sequence is synthesized)
cagggagtgtgggcggggctttagccggcagtcagtcctcctcactcaccagaggagacacacaggggagaagccctatgtctgcagggagtgtgggcggggctttagccggcagtcagt

SEQ ID NO: 509918 - DNA, 120 bp, Artificial Sequence
  ENSG00000164256_17 (sequence is synthesized)
cctcctcactcaccagaggagacacacaggggagaagccctatgtctgcagggagtgtgggcggggctttagctggcagtcagtcctcctcactcaccagaggacacacacaggggagaa

SEQ ID NO: 509919 - DNA, 120 bp, Artificial Sequence
  ENSG00000164256_18 (sequence is synthesized)
gccctatgtctgcagggagtgtgggcggggctttagctggcagtcagtcctcctcactcaccagaggacacacacaggggagaagccctatgtctgcagggagtgtgggcggggctttag

SEQ ID NO: 509920 - DNA, 120 bp, Artificial Sequence
  ENSG00000164256_19 (sequence is synthesized)
caataagtcacacctcctcagacaccagaggacacacacaggggagaagccctatgtctgcagggagtgtgggcggggctttcgcgataagtcacacctcctcagacaccagaggacaca

SEQ ID NO: 509921 - DNA, 120 bp, Artificial Sequence
  ENSG00000164256_20 (sequence is synthesized)
cacaggggagaagccctatgtctgcagggagtgtgggcggggctttagagataagtcaaacctcctcagtcaccagaggacacacacaggggagaagccctatgtctgcagggagtgtgg

SEQ ID NO: 509922 - DNA, 120 bp, Artificial Sequence
  ENSG00000164256_21 (sequence is synthesized)
gcggggctttagcaataagtcacacctcctcagacaccagaggacacacacaggggagaagccctatgtctgcagggagtgtgggcggggctttcgcaataagtcacacctcctcagaca

SEQ ID NO: 509923 - DNA, 120 bp, Artificial Sequence
  ENSG00000164256_22 (sequence is synthesized)
ccagaggacacacacaggggagaagccctacgtctgcagggagtgtgggcggggctttagcgataggtcaagcctctgctatcaccagaggacacacacaggggagaagccctacgtctg

SEQ ID NO: 509924 - DNA, 120 bp, Artificial Sequence
  ENSG00000164256_23 (sequence is synthesized)
cagggaggatgagtaagtcattagtaataaaacctcatctcaatagccacaaaaagacaaatgtggtcaccacacacttgcacaccccagctgtgaggtggcttcagcggaagtctgctg

SEQ ID NO: 509925 - DNA, 120 bp, Artificial Sequence
  ENSG00000164256_24 (sequence is synthesized)
accccttatattccccgagagtataaagagatcggaaataactgattaaacaaatccgccactttcatgactagagatgaggaagaacaagggatagttctgtaagtgttcgggggacat

SEQ ID NO: 509926 - DNA, 120 bp, Artificial Sequence
  ENSG00000164256_25 (sequence is synthesized)
cagcatgtgtggttctttcccgcactgatcccctccattttttgtttgtttttttgcctcctgttctaataaattttgtctccatacaaatctgaaccccaagtgtgtacctcattcttc

SEQ ID NO: 509927 - DNA, 120 bp, Artificial Sequence
  ENSG00000164256_26 (sequence is synthesized)
ccttatcactgaaggcaagaagagtccagaagggccacagagaactcatgtgttcagctcaagactccacaggaattcaacccccagaaagacataaacttggagtccgtctggtttaat

SEQ ID NO: 509928 - DNA, 120 bp, Artificial Sequence
  ENSG00000164256_27 (sequence is synthesized)
tattggagaatcgattcccaagtccaggaagagaaatgtaagattctagaaagtcgcagcaggaaagggagttccctggtctcctgggaagtgtggcttcttctcctaatggacacctct

SEQ ID NO: 509929 - DNA, 120 bp, Artificial Sequence
  ENSG00000164256_28 (sequence is synthesized)
cctctgctgccatactctcccttggctccccagtctcctctcctgatctcctccaatctctgtagcccaagatgtgaaagccagacaagaacacgcgtgtgtgtatatatgtgttcgggt

SEQ ID NO: 509930 - DNA, 120 bp, Artificial Sequence
  ENSG00000164256_29 (sequence is synthesized)
gtgggggtatgtgccctccgtgtaggtaactgtgtgagtgtggggggtttcaagggtgtgttaggaacaacgctcaaaatcctaaggaaactgaacactcgaacgaaggattcttagcaa

SEQ ID NO: 509931 - DNA, 120 bp, Artificial Sequence
  ENSG00000164256_30 (sequence is synthesized)
gactggaagtttcctgaggtctcccagccatgcagaactagatctggacagtatcaagaggactcacaagaacgttgaaatatccagggcatataaaaaatgtgaagctttttataccac

SEQ ID NO: 509932 - DNA, 120 bp, Artificial Sequence
  ENSG00000164256_31 (sequence is synthesized)
ccttaggcctgcagaggcaggaagcaaacatcttgttactagatcgtgaagtaagagacagtgtctgctgctctgttgccagagctggatcacattggcaccatcacggctcactgcagc

SEQ ID NO: 509933 - DNA, 120 bp, Artificial Sequence
  ENSG00000164256_32 (sequence is synthesized)
aacttacaccacagttaaaggaacaccaaccctcccagatgagaatcagtgcaagaactctggcaattcaaaaagacacagtgtccccttggaagacccaggcctgcggagggacgtgag

SEQ ID NO: 509934 - DNA, 120 bp, Artificial Sequence
  ENSG00000164258_0 (sequence is synthesized)
atcctggcgtttgcctgcagcaagatggcggcggtgtcaatgtcagtggtactgaggcagacgttgtggcggagaagggcagtggctgtagctgccctttccgtttccagggttccgacc

SEQ ID NO: 509935 - DNA, 120 bp, Artificial Sequence
  ENSG00000164258_1 (sequence is synthesized)
aggtcgttgaggacttccacatggagattggcacaggaccagactcaagacacacaactcataacagttgatgaaaaattggatatcactactttaactggagttccagaagagcatata

SEQ ID NO: 509936 - DNA, 120 bp, Artificial Sequence
  ENSG00000164258_2 (sequence is synthesized)
aaatggaagatggagtttgataccagagagcgatgggaaaatcctttgatgggttgggcatcaacggctgatcccttatccaacatggttctaaccttcagtactaaagaagatgcagtt

SEQ ID NO: 509937 - DNA, 120 bp, Artificial Sequence
  ENSG00000164258_3 (sequence is synthesized)
tcctttgcagaaaaaaatggatggagctatgacattgaagagaggaaggttccaaaacccaagtccaagtcttatggtgcaaacttttcttggaacaaaagaacaagagtatccacaaaa

SEQ ID NO: 509938 - DNA, 120 bp, Artificial Sequence
  ENSG00000164258_4 (sequence is synthesized)
taggttggcactgactatatctctgcttgactgtgaataaagtcagctgtgcagtatttatagtccatgtataataaatacatctcttaatctcctaataaattggacctttaaactaca

SEQ ID NO: 509939 - DNA, 120 bp, Artificial Sequence
  ENSG00000164258_5 (sequence is synthesized)
ttcttaaccttaattaaaaccaattaagtatacagaatttgagttggaatccagtggtttcattgtatctaatccagtggtttcagactttaactacatcagaacacccacctccaaaaa

SEQ ID NO: 509940 - DNA, 120 bp, Artificial Sequence
  ENSG00000164258_6 (sequence is synthesized)
aagcctggaacttgctactctttttcctgcttcaaggcatttggagttcctgttcactctacctggatgcattttaactaatcctgaggacttcatccggtcaccatctacctattcttc

SEQ ID NO: 509941 - DNA, 120 bp, Artificial Sequence
  ENSG00000164265_0 (sequence is synthesized)
acactttgtatggcaagtggaaccactggcttggtggattttgctagatttttctgatttttaaactcctgaaaaatatcccagataactgtcatgaagctggtaactatcttcctgctg

SEQ ID NO: 509942 - DNA, 120 bp, Artificial Sequence
  ENSG00000164265_1 (sequence is synthesized)
gtgaccatcagcctttgtagttactctgctactgccttcctcatcaacaaagtgccccttcctgttgacaagttggcacctttacctctggacaacattcttccctttatggatccatta

SEQ ID NO: 509943 - DNA, 120 bp, Artificial Sequence
  ENSG00000164265_2 (sequence is synthesized)
caccttgtggaggggctaaggaagtgtgtaaatgagctgggaccagaggcttctgaagctgtgaagaaactgctggaggcgctatcacacttggtgtgacatcaagataaagagcggagg

SEQ ID NO: 509944 - DNA, 120 bp, Artificial Sequence
  ENSG00000164265_3 (sequence is synthesized)
tggatggggatggaagatgatgctcctatcctccctgcctgaaacctgttctaccaattatagatcaaatgccctaaaatgtagtgacccgtgaaaaggacaaataaagcaatgaataca

SEQ ID NO: 509945 - DNA, 88 bp, Artificial Sequence
  ENSG00000164265_4 (sequence is synthesized)
gaaaagaaggtaatgtggagtgggtagcttccatattgattaacacggggacggacttaccttccagtgtgagagttacccgaagctc

SEQ ID NO: 509946 - DNA, 120 bp, Artificial Sequence
  ENSG00000164266_0 (sequence is synthesized)
ttcacctttcttacacaggtgacattcccagaacctggaggccaggctatgacacagagtcaatcaataaccagggagatctgtgatatagcccagtaggtggggccttgctgccatctg

SEQ ID NO: 509947 - DNA, 120 bp, Artificial Sequence
  ENSG00000164266_1 (sequence is synthesized)
ccatatgacccttccagtcccaggcttctgaagagacgtggtaagtgcggtgcagttttcaactgacctctggacgcagaacttcagccatgaaggtaacaggcatctttcttctcagtg

SEQ ID NO: 509948 - DNA, 120 bp, Artificial Sequence
  ENSG00000164266_2 (sequence is synthesized)
tgttacaatgaacttaatggatgcaccaagatatatgaccctgtctgtgggactgatggaaatacttatcccaatgaatgcgtgttatgttttgaaaatcggaaacgccagacttctatc

SEQ ID NO: 509949 - DNA, 120 bp, Artificial Sequence
  ENSG00000164266_3 (sequence is synthesized)
ctcattcaaaaatctgggccttgctgagaaccaaggttttgaaatcccatcaggtcaccgcgaggcctgactggccttattgttgaataaatgtatctgaatatcccctgttgtttccat

SEQ ID NO: 509950 - DNA, 120 bp, Artificial Sequence
  ENSG00000164266_4 (sequence is synthesized)
ttttgaaaatcggtgagtacaaacttgagtttcttttaaactatatattttaagttagttatcttcaagtgtactgataatatgaatctcaccccgagaaaagcaaactatttacttttt

SEQ ID NO: 509951 - DNA, 120 bp, Artificial Sequence
  ENSG00000164266_5 (sequence is synthesized)
ccaaaaacagttatctctttcttattctcccttttatatatttagcattaaatattattttttagaagtcacttgtatgataaaagcctatattttttacagcaaaatagtcgatagctt

SEQ ID NO: 509952 - DNA, 120 bp, Artificial Sequence
  ENSG00000164266_6 (sequence is synthesized)
ttatataaccaaaaatatatttttacttatggatatgaaagccagtttcagtaaagcttcatttcctcagtgaccataagtaggtgatgtgatacagagaaatagattcaacacagattt

SEQ ID NO: 509953 - DNA, 120 bp, Artificial Sequence
  ENSG00000164266_7 (sequence is synthesized)
cctatctcactcagcaactgaaaccttagcatgtctcaagcatcatgctaatattccctgtcttacttgtgcttatgactaagaaaacatcatgagcatgtataggatggcttcttataa

SEQ ID NO: 509954 - DNA, 120 bp, Artificial Sequence
  ENSG00000164266_8 (sequence is synthesized)
cttggggcaaatgccagaagatgaggtgtaaataaagtgcaacaggagtgaagcagagatacatattttttattaaaaggggccaagaaaggatccatgaaaagaatagaatgccagccg

SEQ ID NO: 509955 - DNA, 120 bp, Artificial Sequence
  ENSG00000164270_0 (sequence is synthesized)
gcggcagcggcggcagcagaagctcggctcagcggctgggggtggccgctcgaatctgccagggcacctcgctccctcgcctctggcagcgggaccctgtgggcattgaaatccaactca

SEQ ID NO: 509956 - DNA, 120 bp, Artificial Sequence
  ENSG00000164270_1 (sequence is synthesized)
ctcatgcttatttcctgtaatggacaaacttgatgctaatgtgagttctgaggagggtttcgggtcagtggagaaggtggtgctgctcacgtttctctcgacggttatcctgatggccat

SEQ ID NO: 509957 - DNA, 120 bp, Artificial Sequence
  ENSG00000164270_2 (sequence is synthesized)
cttggggaacctgctggtgatggtggctgtgtgctgggacaggcagctcaggaaaataaaaacaaattatttcattgtatctcttgcttttgcggatctgctggtttcggtgctggtgat

SEQ ID NO: 509958 - DNA, 120 bp, Artificial Sequence
  ENSG00000164270_3 (sequence is synthesized)
gccctttggtgccattgagctggttcaagacatctggatttatggggaggtgttttgtcttgttcggacatctctggacgtcctgctcacaacggcatcgatttttcacctgtgctgcat

SEQ ID NO: 509959 - DNA, 120 bp, Artificial Sequence
  ENSG00000164270_4 (sequence is synthesized)
ttctctggataggtattacgccatctgctgccagcctttggtctataggaacaagatgacccctctgcgcatcgcattaatgctgggaggctgctgggtcatccccacgtttatttcttt

SEQ ID NO: 509960 - DNA, 120 bp, Artificial Sequence
  ENSG00000164270_5 (sequence is synthesized)
tctccctataatgcaaggctggaataacattggcataattgatttgatagaaaagaggaagttcaaccagaactctaactctacgtactgtgtcttcatggtcaacaagccctacgccat

SEQ ID NO: 509961 - DNA, 120 bp, Artificial Sequence
  ENSG00000164270_6 (sequence is synthesized)
cacctgctctgtggtggccttctacatcccatttctcctcatggtgctggcctattaccgcatctatgtcacagctaaggagcatgcccatcagatccagatgttacaacgggcaggagc

SEQ ID NO: 509962 - DNA, 120 bp, Artificial Sequence
  ENSG00000164270_7 (sequence is synthesized)
ctcctccgagagcaggcctcagtcggcagaccagcatagcactcatcgcatgaggacagagaccaaagcagccaagaccctgtgcatcatcatgggttgcttctgcctctgctgggcacc

SEQ ID NO: 509963 - DNA, 120 bp, Artificial Sequence
  ENSG00000164270_8 (sequence is synthesized)
attctttgtcaccaatattgtggatcctttcatagactacactgtccctgggcaggtgtggactgctttcctctggctcggctatatcaattccgggttgaacccttttctctacgcctt

SEQ ID NO: 509964 - DNA, 120 bp, Artificial Sequence
  ENSG00000164270_9 (sequence is synthesized)
cttgaataagtcttttagacgtgccttcctcatcatcctctgctgtgatgatgagcgctaccgaagaccttccattctgggccagactgtcccttgttcaaccacaaccattaatggatc

SEQ ID NO: 509965 - DNA, 120 bp, Artificial Sequence
  ENSG00000164270_10 (sequence is synthesized)
cacacatgtactaagggatgcagtggagtgtggtggccagtgggagagtcagtgtcacccgccagcaacttctcctttggtggctgctcagcccagtgacacttaggcccctgggacaat

SEQ ID NO: 509966 - DNA, 120 bp, Artificial Sequence
  ENSG00000164270_11 (sequence is synthesized)
gacccagaagacagccatgcctccgaaagagggccaggtcctaagctgctgcttgtgcgcgactgcacccggtattctcttcacctgaggctttccgtccgccagtgcaggaacccggtg

SEQ ID NO: 509967 - DNA, 120 bp, Artificial Sequence
  ENSG00000164270_12 (sequence is synthesized)
atttcccaacactccctcttcccagattctctgcttttgccgcgtggtctctggtgtctctgacatgttcccgtcactcactgtgtctgatctgtctcactcacgttctaagcacgatag

SEQ ID NO: 509968 - DNA, 120 bp, Artificial Sequence
  ENSG00000164270_13 (sequence is synthesized)
cttgctgcgtcctatctcggtcactgatgtctccaaatacgccttctttgctgtgtgggcttccagatatcaacaaaatactccctctctgttcctgtcttagccagaggcgtcgctcct

SEQ ID NO: 509969 - DNA, 120 bp, Artificial Sequence
  ENSG00000164270_14 (sequence is synthesized)
gtcttgcttacttgcttggtcacgtccgtcacagccatgttcaagctatcccctgcctcttcttcgccctgttctgtgccagacgctaacacacttttctccctgtgtctgggtccaaac

SEQ ID NO: 509970 - DNA, 120 bp, Artificial Sequence
  ENSG00000164270_15 (sequence is synthesized)
gtgcatcctcttggttggcccccttgtcagtcccagacgtccacttgctcttccttatgtccaatgtctgtcctcctcttcaggacatgctccatttattttccatggaagacacagggt

SEQ ID NO: 509971 - DNA, 120 bp, Artificial Sequence
  ENSG00000164270_16 (sequence is synthesized)
cagagatctgtcagaggaaaatggtctccacagcaactctggagggaagctgaagacagatagcttcctcctggtgtcctggccgctggcgtgtctgccctgagatgctcgctctcctgc

SEQ ID NO: 509972 - DNA, 120 bp, Artificial Sequence
  ENSG00000164270_17 (sequence is synthesized)
tgggctagaacgggacgtcttctaaaaagccttgggcagggctagcaacatcgtaggtgtttattaggcttcaggatctttcccatgaacttgtgatatcattttgaaacccttcaatct

SEQ ID NO: 509973 - DNA, 120 bp, Artificial Sequence
  ENSG00000164270_18 (sequence is synthesized)
ggctttgttgctgccaaaggagataactgttggaagttcacactggggaaactcattttcccctgcagctcccccaaggtgcaggagggcaggatccagcagcactggggatgccgaggc

SEQ ID NO: 509974 - DNA, 120 bp, Artificial Sequence
  ENSG00000164270_19 (sequence is synthesized)
aatgctgtacttgaagccagaggacccaaattgccgccctggctgtgctgcaaacaagctgtgagatcttgaatagtgttctttcatctctggaccccactttccacatctgtgcactca

SEQ ID NO: 509975 - DNA, 120 bp, Artificial Sequence
  ENSG00000164270_20 (sequence is synthesized)
agcttggactagaggacctttaagttttctttctgtttctaagacaacagtatgctgctatagccgtctgctacctcgagaagccatggcctgcctgccttttggctttgtttcaaagga

SEQ ID NO: 509976 - DNA, 120 bp, Artificial Sequence
  ENSG00000164270_21 (sequence is synthesized)
acgaccctcctcatttgggccttttagacccctgacctttccagctttgtccttcagattaatctggatgtcttttattcaaagctgagtcagtggctcttgcgaatgccccatagcaga

SEQ ID NO: 509977 - DNA, 120 bp, Artificial Sequence
  ENSG00000164270_22 (sequence is synthesized)
agtcccgggaaggtaaatgccaaacccagagccatgtgagattctgactttgatcttggctgtggtttaatagcatctcaggattatttatcatattctctttttttcttattgcttata

SEQ ID NO: 509978 - DNA, 120 bp, Artificial Sequence
  ENSG00000164270_23 (sequence is synthesized)
aggtgtcagttattgtttccattgttgtttactttagttctggaactgaaaccgacaggaagaaactttggaataaggaagagaagattgaccaaaccatccaaatgccaaaaagaaaaa

SEQ ID NO: 509979 - DNA, 120 bp, Artificial Sequence
  ENSG00000164270_24 (sequence is synthesized)
tacaccgttctgcacaggggacatcatcaggaactcgagaaactgcccatacacaatgacccagaatccctggaatcatgcttctgattgaggacatggctcacaacttagccattcatt

SEQ ID NO: 509980 - DNA, 120 bp, Artificial Sequence
  ENSG00000164270_25 (sequence is synthesized)
cgcattcatgtttgcatgaacaggtcaccctggcatcacttctgaacctcatcaccaccagtgaggcatcaggtagtaggggctgagagcccagaggaggtacatggaggacagtgttgg

SEQ ID NO: 509981 - DNA, 120 bp, Artificial Sequence
  ENSG00000164270_26 (sequence is synthesized)
gtgcagaagggcactagccctgagtatgtgccacctcgtacgcctctcacatgcttctccgttttccctacttcactttcctgggttcattccaagacggagaatggaagaaaccagagc

SEQ ID NO: 509982 - DNA, 120 bp, Artificial Sequence
  ENSG00000164270_27 (sequence is synthesized)
taaacttgtgtgcctgcagtccagctgtcgtgcctggagagacctctcttccatgatcatccagggtgaattagaccaggtcctcctgagaccagcagcgtggatgttgtatatccaaaa

SEQ ID NO: 509983 - DNA, 120 bp, Artificial Sequence
  ENSG00000164270_28 (sequence is synthesized)
ggaccctgtgggcattgaaatccaactcactcatgcttatttcctgtaatggacaaacttgatgctaatgtgagcttccatggacttggacacagttctgtttgggaattggagcatctg

SEQ ID NO: 509984 - DNA, 120 bp, Artificial Sequence
  ENSG00000164270_29 (sequence is synthesized)
ggttaagatcttgtgtctctttgactcctggtcttgtgctggattccatacagccagctctcctttatatgcaatcattcccttgattggtgacccctgtttacaagaaaatacccctga

SEQ ID NO: 509985 - DNA, 120 bp, Artificial Sequence
  ENSG00000164270_30 (sequence is synthesized)
cttatttctttctgctattgtatttgtcagtgtccaggcaggaaaatggaaactgttgtatatattttaagcaaacggagatttagtgcaggtcacagagctccatggcagagcagggag

SEQ ID NO: 509986 - DNA, 120 bp, Artificial Sequence
  ENSG00000164270_31 (sequence is synthesized)
aaggagatgttaaagaggtcaagaagcctcatgatcctccttgctgttatgggtctgctggaggcacaaccattgccacatttctggaaccatttgctgttgctcttactgcttaaagca

SEQ ID NO: 509987 - DNA, 120 bp, Artificial Sequence
  ENSG00000164270_32 (sequence is synthesized)
cctccaaatagagaagaaatatactcctctttctcacctcatcgcccaaatttccatgttgaatctctcatttggaaaacataacctgaagccagtgggcaagaaagtctgaaaaatata

SEQ ID NO: 509988 - DNA, 120 bp, Artificial Sequence
  ENSG00000164270_33 (sequence is synthesized)
gttttcaggcttctggctctcattgattgatataagtgcataaaaactgtggcaaataacagatacagcttccccactatataagcttggtttcttctggaacttactgctgtggaggct

SEQ ID NO: 509989 - DNA, 120 bp, Artificial Sequence
  ENSG00000164270_34 (sequence is synthesized)
gcttcacccggcttcagaaacctgagggtgcagatgtgacggcattaatataagcatctgagtctcaatctgcttgactgcaggaagctcagtcttttgtgcagtttaccttgtccacct

SEQ ID NO: 509990 - DNA, 120 bp, Artificial Sequence
  ENSG00000164270_35 (sequence is synthesized)
tactttgaattacagcctgctaaatgagcagtctgtaggcctcaaagcttccccctggactttagtaaagcagaagctccttgataatgaaaatccacatcatttcacctgtgaagtgag

SEQ ID NO: 509991 - DNA, 120 bp, Artificial Sequence
  ENSG00000164270_36 (sequence is synthesized)
aagagtatgccttccatgtcatgcttgatcaaagtgggccccatactaaaattgcttgagatagaagtatttcagaagcaagcattgtagcatttcaaattctcagacctaatcttgttc

SEQ ID NO: 509992 - DNA, 120 bp, Artificial Sequence
  ENSG00000164270_37 (sequence is synthesized)
cctggaacacacagagggtagtgttatgatgaattttagtatcaacagttacatgttctcagaattattattgacctgcatcgttctgggtctgttgctcagtcaaccctggtgtatctg

SEQ ID NO: 509993 - DNA, 120 bp, Artificial Sequence
  ENSG00000164270_38 (sequence is synthesized)
gcttcttttcttatgacaccttgttattcctccctgcagtttgcttcttttattaccaatctttatttaaatgtcacattttaatgagattttttacatagtttattaggacttgtgcaa

SEQ ID NO: 509994 - DNA, 120 bp, Artificial Sequence
  ENSG00000164270_39 (sequence is synthesized)
atcagcggatgcaaatagcttggcaagggtagagatattgcctaattaaaaaaaaaattgcaagatctttatgactctcagctcaagcccagtcagaattacctctgtacctaataggat

SEQ ID NO: 509995 - DNA, 120 bp, Artificial Sequence
  ENSG00000164270_40 (sequence is synthesized)
tacagcatggtctagatggaagggtcacttggattcctgtaagactgtgtctttttgtctcactttgcaagcacaggctgtgatgagattcaagaaacgtgattgaagctgtgaattatt

SEQ ID NO: 509996 - DNA, 120 bp, Artificial Sequence
  ENSG00000164270_41 (sequence is synthesized)
tacaatttcttagaagctcctttctataatttggagccttgcctatgacttgtagcttcttgcagtcctacaaagcacaatttttgtaaataaagaaataaatatctttatttacaaaag

SEQ ID NO: 509997 - DNA, 120 bp, Artificial Sequence
  ENSG00000164270_42 (sequence is synthesized)
aaataaaaagagtttcagaggattaagtgatttttcctcagcctacacagctaataagtgattaacctgagactaaaatccaagtctttgcttccggaatcactgattttttcaaattat

SEQ ID NO: 509998 - DNA, 120 bp, Artificial Sequence
  ENSG00000164270_43 (sequence is synthesized)
ctcccaactctccaaagacaaactatctcctaaggtatatataatttagattaaaatgtcactcaaccatgacaatatctatgaaaatggatttcgacaataaaaggaaaatatcaaatc

SEQ ID NO: 509999 - DNA, 120 bp, Artificial Sequence
  ENSG00000164270_44 (sequence is synthesized)
atgtactaagattttgagctccttgaggactgtggccaattcttattgctcatttttttttcttagtgcccaacacaggtttttgtacactgaagttatcaaataaattcattggatgta

SEQ ID NO: 510000 - DNA, 120 bp, Artificial Sequence
  ENSG00000164270_45 (sequence is synthesized)
ttcccatgggaacctagagaaggactttccctatattccccacctctttgggcttcagcaaaagaaaatggacctcaagggagtcttcaagagctgcttcaaaatttactgttcatcaaa

SEQ ID NO: 510001 - DNA, 120 bp, Artificial Sequence
  ENSG00000164270_46 (sequence is synthesized)
gcacttgctgaagactggcttcatttcagaggctgtgctgtgttatggagaaggaggtgaaggagatacggtgcttaccatgaaggagaggtggccacatgaatgcatcgttttaataca

SEQ ID NO: 510002 - DNA, 120 bp, Artificial Sequence
  ENSG00000164270_47 (sequence is synthesized)
gtgcaataagtgaggtccatagagagacccaagtgatgatagcaaccaaccattcaagagggagaggaaagtggccaaatgtgaagctttatgattgaaggtactttatgccccgggctg

SEQ ID NO: 510003 - DNA, 120 bp, Artificial Sequence
  ENSG00000164270_48 (sequence is synthesized)
gaagagaagattgaccaaaccatccaaatgccaaaaagaaaaagaaaaaaaaaagcctctctgtcctatgaagacttaattctgttggggagaaagtcatgttttagggaaggaaaatag

SEQ ID NO: 510004 - DNA, 120 bp, Artificial Sequence
  ENSG00000164270_49 (sequence is synthesized)
cacacatgtactaaggacagattttctgtttgacagagacattttagcaaggtattggacaaagcctgccagagcgggtccattctcaggcacattgagcattagatgtttgactgcaag

SEQ ID NO: 510005 - DNA, 120 bp, Artificial Sequence
  ENSG00000164270_50 (sequence is synthesized)
agatgagcagcgctccggccagggagggcgcgtgctggccagcccggaacgggtgagatcgctccagcccgcctctgtgcccactcccctgtgcgccctgccggcagagcggcacccccg

SEQ ID NO: 510006 - DNA, 120 bp, Artificial Sequence
  ENSG00000164270_51 (sequence is synthesized)
ctgtccctggcgcccagtgggggcggcagcgggcagggcagcggggaccaccggggctgggggctgttgagcccgtggagtccggctcggttggggagaaggacgatgcgcggcgagccc

SEQ ID NO: 510007 - DNA, 80 bp, Artificial Sequence
  ENSG00000164270_52 (sequence is synthesized)
gcgagcccaggtgatccggggctggggtcctgcgcccgcagcccctggcccgcgcctcacgctcgccggctccccagcgc

SEQ ID NO: 510008 - DNA, 120 bp, Artificial Sequence
  ENSG00000164270_53 (sequence is synthesized)
atgtatttcagcacaaaatggaatggattgccttactagggagttcctagtaaagttgaaggagacaattggatgaccatcagtcaattaaaagtgttgattgaccgaatatcagtaact

SEQ ID NO: 510009 - DNA, 120 bp, Artificial Sequence
  ENSG00000164270_54 (sequence is synthesized)
cctgtctccagcttcctcctgctcttctgcaatagaccagttcctgtctaactctgaaagtgctctatttctactttaattccactgtggcctgagagcagacattgtgtaatttctatt

SEQ ID NO: 510010 - DNA, 120 bp, Artificial Sequence
  ENSG00000164270_55 (sequence is synthesized)
cttttacatttgttaaggtacaccgttctgcacaggggacatcatcaggaactcgagaaactgcccatacacaatgacccagaatccctggaatcatgcttctgattgaggacatggctc

SEQ ID NO: 510011 - DNA, 120 bp, Artificial Sequence
  ENSG00000164270_56 (sequence is synthesized)
gaccagttcctgtctaactctgaaagtgctctgtacaccgttctgcacaggggacatcatcaggaactcgagaaactgcccatacacaatgacccagaatccctggaatcatgcttctga

SEQ ID NO: 510012 - DNA, 120 bp, Artificial Sequence
  ENSG00000164270_57 (sequence is synthesized)
tcattgatttggttgatttgtattactcagaaggggtaatgctccagttttctgtttccaaaggggttatccctgaaacctgcatagagtttgcaaagattataaaagattctactatct

SEQ ID NO: 510013 - DNA, 120 bp, Artificial Sequence
  ENSG00000164283_0 (sequence is synthesized)
agctaccagtttggacggctgcttcccaccagcaaagaccacgactggagagccgagccggaggcagctgggaaacatgaagagcgtcttgctgctgaccacgctcctcgtgcctgcaca

SEQ ID NO: 510014 - DNA, 120 bp, Artificial Sequence
  ENSG00000164283_1 (sequence is synthesized)
cctggtggccgcctggagcaataattatgcggtggactgccctcaacactgtgacagcagtgagtgcaaaagcagcccgcgctgcaagaggacagtgctcgacgactgtggctgctgccg

SEQ ID NO: 510015 - DNA, 120 bp, Artificial Sequence
  ENSG00000164283_2 (sequence is synthesized)
agtgtgcgctgcagggcggggagaaacttgctaccgcacagtctcaggcatggatggcatgaagtgtggcccggggctgaggtgtcagccttctaatggggaggatccttttggtgaaga

SEQ ID NO: 510016 - DNA, 120 bp, Artificial Sequence
  ENSG00000164283_3 (sequence is synthesized)
gtttggtatctgcaaagactgtccctacggcaccttcgggatggattgcagagagacctgcaactgccagtcaggcatctgtgacagggggacgggaaaatgcctgaaattccccttctt

SEQ ID NO: 510017 - DNA, 120 bp, Artificial Sequence
  ENSG00000164283_4 (sequence is synthesized)
ccaatattcagtaaccaagtcttccaacagatttgtttctctcacggagcatgacatggcatctggagatggcaatattgtgagagaagaagttgtgaaagagaatgctgccgggtctcc

SEQ ID NO: 510018 - DNA, 120 bp, Artificial Sequence
  ENSG00000164283_5 (sequence is synthesized)
cgtaatgaggaaatggttaaatccacgctgatcccggctgtgatttctgagagaaggctctattttcgtgattgttcaacacacagccaacattttaggaactttctagattatagcata

SEQ ID NO: 510019 - DNA, 120 bp, Artificial Sequence
  ENSG00000164283_6 (sequence is synthesized)
aggacatgtaatttttgaagaccaaatgtgatgcatggtggatccagaaaacaaaaagtaggatacttacaatccataacatccatatgactgaacacttgtatgtgtttgttaaatatt

SEQ ID NO: 510020 - DNA, 120 bp, Artificial Sequence
  ENSG00000164283_7 (sequence is synthesized)
cgaatgcatgtagatttgttaaatgtgtgtgtatagtaacactgaagaactaaaaatgcaatttaggtaatcttacgtggagacaggtcaaccaaagagggagctaggcaaagctgaaga

SEQ ID NO: 510021 - DNA, 120 bp, Artificial Sequence
  ENSG00000164283_8 (sequence is synthesized)
aatgaagacttaagagcaggagaagatggggagggggtgggagtgggaaataaaatatttagcccttccttggtaggtagcttctctagaatttaattgtgcttttttttttttttttgg

SEQ ID NO: 510022 - DNA, 120 bp, Artificial Sequence
  ENSG00000164283_9 (sequence is synthesized)
ctttgggaaaagtcaaaataaaacaaccagaaaacccctgaaggaagtaagatgtttgaagcttatggaaatttgagtaacaaacagctttgaactgagagcaatttcaaaaggctgctg

SEQ ID NO: 510023 - DNA, 120 bp, Artificial Sequence
  ENSG00000164283_10 (sequence is synthesized)
atgtagttcccgggttacctgtatctgaaggacggttctggggcataggaaacacatacacttccataaatagctttaacgtatgccacctcagagataaatctaagaagtattttaccc

SEQ ID NO: 510024 - DNA, 120 bp, Artificial Sequence
  ENSG00000164283_11 (sequence is synthesized)
actggtggtttgtgtgtgtatgaaggtaaatatttatatatttttataaataaatgtgttagtgcaagtcatcttccctacccatatttatcatcctcttgaggaaagaaatctagtatt

SEQ ID NO: 510025 - DNA, 120 bp, Artificial Sequence
  ENSG00000164283_12 (sequence is synthesized)
atttgttgaaaatggttagaataaaactatgactctataaggttttcaaacatctgaggcatgataaatttattatccataattatagtaataataaccttaataagcataagaaaaaca

SEQ ID NO: 510026 - DNA, 120 bp, Artificial Sequence
  ENSG00000164283_13 (sequence is synthesized)
gagtcactctggatttcaaaaatgtcaaaaaatgagcaacagagggtccttatttaaacataagtgctgtgacttaggtgaattttcaatttaaggtagaaaataagtttttaggaggtt

SEQ ID NO: 510027 - DNA, 120 bp, Artificial Sequence
  ENSG00000164283_14 (sequence is synthesized)
tgtaaaagaagaatcaattttcagcagaaaacatgtcaactttaaaatatagtttattttcatatttttttcttttaaacttggttgataagtggaattaggagtatatttgaaagaatc

SEQ ID NO: 510028 - DNA, 120 bp, Artificial Sequence
  ENSG00000164283_15 (sequence is synthesized)
ttagcacaaacaggactgttgtactagatgttcttaggaaatatctcagaagtattttatttgaagtgaagaacttatttaagaattatttcagtatttacctgtattttattcttgaag

SEQ ID NO: 510029 - DNA, 120 bp, Artificial Sequence
  ENSG00000164283_16 (sequence is synthesized)
ttggccaacagagttgtgaatgtgtgtgggaaggcctttgaatgtaaagctgcataagctgttaggttttgttttaaaaggacatgtttattattgttcaataaaaaagaacaagataca

SEQ ID NO: 510030 - DNA, 120 bp, Artificial Sequence
  ENSG00000164283_17 (sequence is synthesized)
gaacaaaaccaacgcagagcagtgacttcctgtcagagcagaagaggctctgagacaaagctacacctcaagtgatatgccagggtcagaacaattcccgtcctgaaggagggtgtgcaa

SEQ ID NO: 510031 - DNA, 120 bp, Artificial Sequence
  ENSG00000164283_18 (sequence is synthesized)
ccttctttatccctccttcacagacgtccttgagcccttgagacggatgtgagtgagtttttcagtcctcatgcaaaacaaccatctaaacataacagatgacatcagcttgggcttttc

SEQ ID NO: 510032 - DNA, 120 bp, Artificial Sequence
  ENSG00000164283_19 (sequence is synthesized)
aattcctggatggcagcagcgtgttaatccagccttcatcctggatttcataaaccaaaacaagagagcctggcaggaggacagcgctgctgctgggttgaggaaattgatgacgggaaa

SEQ ID NO: 510033 - DNA, 120 bp, Artificial Sequence
  ENSG00000164283_20 (sequence is synthesized)
gaacaaaaccaacgcagagcagtgacttcctgtcagagcagaagaccagctttctagactaggccacatgaaggttgaaaattttatttgctgtctggagaacactctgaatagagaaag

SEQ ID NO: 510034 - DNA, 120 bp, Artificial Sequence
  ENSG00000164283_21 (sequence is synthesized)
ctcaaagcaccttggattcctttcattcttcgggtcattgtttggtgttttattcaatgagtacttcctaaatatgtttacagaggaagacaggctcagcatgttatctagcatgacatg

SEQ ID NO: 510035 - DNA, 120 bp, Artificial Sequence
  ENSG00000164284_0 (sequence is synthesized)
agcaagtgcgcgtgcgctgcctctcagcccaaattggaaacatggccgtacggtcgctgtgggcgggccggctgcgggtgcagcgcctactggcctggagtgccgcgtgggagagcaagg

SEQ ID NO: 510036 - DNA, 120 bp, Artificial Sequence
  ENSG00000164284_1 (sequence is synthesized)
gatggccgcttccattcagcactgccacccagagaactgctggtgaggactgccgttctgaggaccctcctgatgagcttgggccccctcttgctgaacgagccttaagggtaaaagctg

SEQ ID NO: 510037 - DNA, 120 bp, Artificial Sequence
  ENSG00000164284_2 (sequence is synthesized)
ttaaactggagaaagaagtccaagatttaacagtgagataccagagagctatagctgattgtgaaaacataaggaggcgaacccagagatgtgtggaagacgccaagatatttggaatcc

SEQ ID NO: 510038 - DNA, 120 bp, Artificial Sequence
  ENSG00000164284_3 (sequence is synthesized)
agagtttctgtaaggacttggtggaggtggctgacattttggagaagactacagagtgcatttctgaagaatcggagcctgaggaccaaaagctcactctggagaaggtcttccgagggt

SEQ ID NO: 510039 - DNA, 120 bp, Artificial Sequence
  ENSG00000164284_4 (sequence is synthesized)
tgttgcttttagaagcaaagctgaaaagtgtgtttgccaagcatggcctggagaaactgacacccattggtgacaaatatgacccccatgagcatgaactcatctgtcatgtgccagctg

SEQ ID NO: 510040 - DNA, 120 bp, Artificial Sequence
  ENSG00000164284_5 (sequence is synthesized)
gtgttggggtgcagcctggcaccgtggcattagtaagacaagatggctacaaacttcatggccgcaccattaggcttgcccgagtggaagtggcagtggagtctcagagaagactgtgaa

SEQ ID NO: 510041 - DNA, 120 bp, Artificial Sequence
  ENSG00000164284_6 (sequence is synthesized)
gaggccatcaggaactggatgttctcccagagcgcagtcacctatgtttcttttatttattaaactaggtttgtattgtacatgaggtacttcatgtgatatgttttggatttagtcata

SEQ ID NO: 510042 - DNA, 120 bp, Artificial Sequence
  ENSG00000164284_7 (sequence is synthesized)
ttggctttatttctaagatattctattgatttaatgtgacctgtttggtctcatcagaagtcttaccattgggcatttgaacagtgtgacaggtgttccaatggcctttatcaaaacatg

SEQ ID NO: 510043 - DNA, 120 bp, Artificial Sequence
  ENSG00000164284_8 (sequence is synthesized)
tttaggaaaattggtactgtgataaatttgaatccaaaatccttttaactatgggttttcaactacatgtttcttcctagcggtctctataacaggaattgtgtagtatcttgtattttg

SEQ ID NO: 510044 - DNA, 120 bp, Artificial Sequence
  ENSG00000164284_9 (sequence is synthesized)
tggaaaaaggagatggtagggattggttcaacatttgggtacttagaggataaagcttcgtggtcgtataaatttagatcatttggattgatttttatacacatagattttcaggacttt

SEQ ID NO: 510045 - DNA, 120 bp, Artificial Sequence
  ENSG00000164284_10 (sequence is synthesized)
accttttgttttgtttttttccttttagccatcttttgttcttgtaatcccaactagataggctttatgctcacatcattgtcccatacccacccctttctcatccccatttgcaggggc

SEQ ID NO: 510046 - DNA, 120 bp, Artificial Sequence
  ENSG00000164284_11 (sequence is synthesized)
taaaggtctagatgagacttggaaggcaaggagcatcgaaatttgagatacccaggaccctttcaagcaagaatggccaaaaagccttgtgctgtctttgctcttcaaattattttcagc

SEQ ID NO: 510047 - DNA, 120 bp, Artificial Sequence
  ENSG00000164284_12 (sequence is synthesized)
ctccttgtcatataatcatttcaggcaaactgaggcaacactaacagctaatgacccagatggctctatttgggtaatttacctacaacttattccaccagcctttactcctctgccctt

SEQ ID NO: 510048 - DNA, 120 bp, Artificial Sequence
  ENSG00000164284_13 (sequence is synthesized)
ttgtcaattttaccttataatcctttattaaatgatgggaggtggtgatcaggacaaaagtgttaggttcccatgatttctcatttcatttattaatagttaatgctgaattttttttta

SEQ ID NO: 510049 - DNA, 120 bp, Artificial Sequence
  ENSG00000164284_14 (sequence is synthesized)
agtttcctctggctctatttatgttactttttgcgataagaacacttaacataagtattctctcctcttggcaattttttttttttttcctgtgttgcccaggctgacctccaactcctg

SEQ ID NO: 510050 - DNA, 120 bp, Artificial Sequence
  ENSG00000164284_15 (sequence is synthesized)
ggcccaagcaatcctgcctcagcctgccaagtagctaggactacaggcgttcaccactgcgcccgcaaagtttttttgttgtttttttttttaagttggtactcacaaatcactacctct

SEQ ID NO: 510051 - DNA, 120 bp, Artificial Sequence
  ENSG00000164284_16 (sequence is synthesized)
attgagctcaccttttatatattaacctctagaattaatgggcctatgtggttttttttcagtcttatagctggtgttctgtaaaagatttgtccaataaacgacttaatgaatgataca

SEQ ID NO: 510052 - DNA, 120 bp, Artificial Sequence
  ENSG00000164284_17 (sequence is synthesized)
tcagtcagattttaggaaggcagtcaattatggatattttaatgttggaagaggccttaatgatcaaatctcaccctttctgcttctgaagtatgaaaatctagtctttttaggactgga

SEQ ID NO: 510053 - DNA, 120 bp, Artificial Sequence
  ENSG00000164284_18 (sequence is synthesized)
cacaaggaaaataatctctaaactattgactaaattccagtgagagtatgaatgaagaacaactagatattaatgtcaatcatttaagattaatgggcatgcaattaagtctccatttaa

SEQ ID NO: 510054 - DNA, 120 bp, Artificial Sequence
  ENSG00000164284_19 (sequence is synthesized)
gattaatgggcatgcaatgaagtctccagcagacaatcagatgttgttggatgtctagattatataggtttaggttgaagttataaaataaaataaaattcattttccactggaactcta

SEQ ID NO: 510055 - DNA, 120 bp, Artificial Sequence
  ENSG00000164284_20 (sequence is synthesized)
tgacattcagtggagtggtggaaagttaacctcttatacattatagataattctaagacagcacacaaacttatcaataaagccatctccttgtgggccttaccatcttcatcagattta

SEQ ID NO: 510056 - DNA, 120 bp, Artificial Sequence
  ENSG00000164284_21 (sequence is synthesized)
gacccttaaaaaacaagtaaatatgcacttttaaaatgcaatcaaaagactggtggttaagcttgtaaaaccagaacatcttttggcattccactaagtatatattgtaaatttaatgaa

SEQ ID NO: 510057 - DNA, 120 bp, Artificial Sequence
  ENSG00000164284_22 (sequence is synthesized)
caatcaaggttcacaataggaagttgtctttttttgccttccattctgtgagatttgacagatggtgacaataagaaaatgagctgattgtaattactctctgtgtgtttttttattgct

SEQ ID NO: 510058 - DNA, 120 bp, Artificial Sequence
  ENSG00000164284_23 (sequence is synthesized)
agctatcattaccagttagaattaacattaattacaattaacaataattttaggtatggaatgttatgattacctaaagagatgtctctacctaatgagctcaagtgatcctcccacctc

SEQ ID NO: 510059 - DNA, 120 bp, Artificial Sequence
  ENSG00000164284_24 (sequence is synthesized)
agcctaccaagtagccaggaccacaggcaagtgcaccaccatgactggctagttttgttttttggtttttggtttttggtttttggttttttttttttggttggttggttgttttttaca

SEQ ID NO: 510060 - DNA, 120 bp, Artificial Sequence
  ENSG00000164284_25 (sequence is synthesized)
ggcggggtctcactatattgtccaggctagaagaattttctaatggtctattacacctcccgttttggcaagtaaattcagaataattttaggttcttttgttattcagtagttttgcag

SEQ ID NO: 510061 - DNA, 120 bp, Artificial Sequence
  ENSG00000164284_26 (sequence is synthesized)
acttaaaagtgtaaatttagaattagaagatgaagctatagtagtaagaatctcaagctgaagggctttggggagccaaagcagcatattagagcataggcttgaacttaaatctcagct

SEQ ID NO: 510062 - DNA, 120 bp, Artificial Sequence
  ENSG00000164284_27 (sequence is synthesized)
cagtcacctgcaggactttaggcaccagtgatttcacccttctgagcctgtttctttattcgtaaaatgattataataattctttcacagcgttgtgaggattaagtgaaatgtgttaaa

SEQ ID NO: 510063 - DNA, 120 bp, Artificial Sequence
  ENSG00000164284_28 (sequence is synthesized)
tgcctactacagtaggtgctcagatatttatttttatttttttattatgcacattgtttttcctgcctttttatggctgtctaaagtctagggaaaagggaagactggttaatgatgagt

SEQ ID NO: 510064 - DNA, 120 bp, Artificial Sequence
  ENSG00000164284_29 (sequence is synthesized)
agaaaaaacttgtaagctaatcattcactgacttattttccttccattttctggtttttaaaattagccacaccacaggaaacccacatttttagatggaaagagcaagaaaattgtgtc

SEQ ID NO: 510065 - DNA, 120 bp, Artificial Sequence
  ENSG00000164284_30 (sequence is synthesized)
agtgctcttagttattttcatcttaatggtatagtgaaaagacattgacttgagatgatactaaggaagctttggctcactctcacttgaagaggggatcttggtgttgtagtacttgga

SEQ ID NO: 510066 - DNA, 120 bp, Artificial Sequence
  ENSG00000164284_31 (sequence is synthesized)
ctgtacaaatgttttactgacttttcttactgctgtaaaggaatcaggcagttgggtattgatatgttatttggtgctctcattcatggcaaaggatttgataaataaaagttctttaaa

SEQ ID NO: 510067 - DNA, 120 bp, Artificial Sequence
  ENSG00000164284_32 (sequence is synthesized)
cactaaagcaaaatcaaatgagcaaaactaaggatgaaatgtaatattcatcagaacaaggatcactgagaaaaaatattcagaaacaactttaataaaacctgaattgaaataactgca

SEQ ID NO: 510068 - DNA, 120 bp, Artificial Sequence
  ENSG00000164284_33 (sequence is synthesized)
aagcattgcaggcggggagtcgggagcgtgaggactctgaggggctagcgagccagccggggtggttgtgggctggaaggcgagagctatctgagcgtaggccaggggaccaagcttctc

SEQ ID NO: 510069 - DNA, 77 bp, Artificial Sequence
  ENSG00000164284_34 (sequence is synthesized)
cgaacccagagatgtgtggaagacgccaagatatttggtgagagatttatttacaataaaaatgtctttggtctaag

SEQ ID NO: 510070 - DNA, 120 bp, Artificial Sequence
  ENSG00000164287_0 (sequence is synthesized)
agcggcggtgggaggagtgggggacctggagggaggtggtgaaatagaatggtcctgggggacgggactccaggggtttgacgattaggcgtcaagactgacttagacctgggaagaaaa

SEQ ID NO: 510071 - DNA, 120 bp, Artificial Sequence
  ENSG00000164287_1 (sequence is synthesized)
ccagaggcagtcgagcagagaggccaaacgccaggcagggcgaagtcagccggagatggagtggaaactggagcgcaccgcgcctcggagggtccgcacggaagaggagatgctgtggga

SEQ ID NO: 510072 - DNA, 120 bp, Artificial Sequence
  ENSG00000164287_2 (sequence is synthesized)
aagtatcatgcgtgtgctctccaaagacttgaagcagaagagaagtcaagattccgccaacgtactcgattcagttaatgctacgtattctgactttaagagcaactttgcgaagaggct

SEQ ID NO: 510073 - DNA, 120 bp, Artificial Sequence
  ENSG00000164287_3 (sequence is synthesized)
gtccgcagaggttcctgttgcgagtagccccattaccacaaggtggcagcaaagtcaaactagggctctgtcctctgattcctttggggaagagcagtcaaccacctacctcccagaagc

SEQ ID NO: 510074 - DNA, 120 bp, Artificial Sequence
  ENSG00000164287_4 (sequence is synthesized)
ttccggatcagtgctgaagacaccgcctgagaaagagaccttgactctaggatcccgcaaagaacaactgaagacccccagcaaaggaatttctgaaacaagtaactctgctctccattt

SEQ ID NO: 510075 - DNA, 120 bp, Artificial Sequence
  ENSG00000164287_5 (sequence is synthesized)
ttgcaaggcacctcatgcaatggacagagactggaaagaaagtgttgcctcaaaagggcagaaatgcctaaaacaactctttgtaacccagaacgtggttcagcaggctaatggaaaaat

SEQ ID NO: 510076 - DNA, 120 bp, Artificial Sequence
  ENSG00000164287_6 (sequence is synthesized)
gcagctctgtgagcaatccgaatgtgtttggaaaggctgcaaagatggagtcagagatgaatccttccatcttaaaagttctggtgatataaacgattccatactccaaccagaggtgaa

SEQ ID NO: 510077 - DNA, 120 bp, Artificial Sequence
  ENSG00000164287_7 (sequence is synthesized)
gattcatattactggtcttcgaaatgactactatctgaatatcctagattggagttttcagaatcttgttgccatagccctgggctctgctgtatacatctggaatggggagaaccacaa

SEQ ID NO: 510078 - DNA, 120 bp, Artificial Sequence
  ENSG00000164287_8 (sequence is synthesized)
tgggattgaaaacatagacttaagtctcacttgtaactatatctcttctgtgtcctggataaaagagggaacttgcctggcagttggcaccagcgagggagaagtgcaattatgggatgt

SEQ ID NO: 510079 - DNA, 120 bp, Artificial Sequence
  ENSG00000164287_9 (sequence is synthesized)
ggtaactaaaaagcggctgagaaatatgcttggtcatttgtcagtagttggggctctgagctggaatcactttatcctcagcagtgggtcaagactggggcgtgtttatcatcacgatgt

SEQ ID NO: 510080 - DNA, 120 bp, Artificial Sequence
  ENSG00000164287_10 (sequence is synthesized)
tcgggtagcccagcatcatgttggaacacttcgccacaagcaagctgtgtgtgctctgaagtggtcaccggatggcaggctgctttccagcggctgcagtgatggactgctgacaatatg

SEQ ID NO: 510081 - DNA, 120 bp, Artificial Sequence
  ENSG00000164287_11 (sequence is synthesized)
gccccacgatccaggtgccagtgcacagggccaaccgctgaaagtcataacccagtctacggcagtcaaggccatggattggtgtccctggcagtctggggtccttgccattggaggagg

SEQ ID NO: 510082 - DNA, 120 bp, Artificial Sequence
  ENSG00000164287_12 (sequence is synthesized)
aaactcacagatttgttccttaatctggctacctaagacaaaggagattgcaactggtcaaggtactcccaagaatgatgtgactgtgtggacctgtcccactgtgtccaggtcaggcca

SEQ ID NO: 510083 - DNA, 120 bp, Artificial Sequence
  ENSG00000164287_13 (sequence is synthesized)
caggggcagagtgctgcacctgtctttgagtccagaccagacccgggtgttttctgctgcagctgatgggacggcctctgtatggaattgctactagcacccagcccctctaggtttcag

SEQ ID NO: 510084 - DNA, 120 bp, Artificial Sequence
  ENSG00000164287_14 (sequence is synthesized)
tttccttatttctgagtgaagatgatgatgttggctatgtcttctccatggggtttttatgagtatcaaacaagttgaaatactcttcttgatgtgaatgcctgttctcctgttcttctt

SEQ ID NO: 510085 - DNA, 120 bp, Artificial Sequence
  ENSG00000164287_15 (sequence is synthesized)
ttgcagattgctttacttgctctgcttcccagagatccgcttcttttcttctctgctttcttctttctgcccctcttcctccccctcctcttcttcctcccattcttacccctttctaga

SEQ ID NO: 510086 - DNA, 120 bp, Artificial Sequence
  ENSG00000164287_16 (sequence is synthesized)
gattcattttcactactttattcagaataacatctatagcaaagatttctacttctttcccgtatgacttttctccccagctccaaacctcatatttctgattgcctcaggatagttccc

SEQ ID NO: 510087 - DNA, 120 bp, Artificial Sequence
  ENSG00000164287_17 (sequence is synthesized)
ttttgagatactttcctgtctttagctcaatctcaacacattgaaaacacaactcattcacttgaaaaacacttactaaaatctcactatatgctaggcagtatgttaagcatgcatatt

SEQ ID NO: 510088 - DNA, 120 bp, Artificial Sequence
  ENSG00000164287_18 (sequence is synthesized)
gctctctctaaaaatcagttctgtaggaatccctttcccctcctgatggtctcatccttatcctggtctcccactcagggaacctcctgattattctgctctgtgcttcctcagttcacc

SEQ ID NO: 510089 - DNA, 120 bp, Artificial Sequence
  ENSG00000164287_19 (sequence is synthesized)
ctttgctctcttttcttttgcttcacctagtcacatcctgtgtgcctgacagccagtctgctgtaattgtcttagaactgatcctcttgactccacaccactgctaggttgaacatctaa

SEQ ID NO: 510090 - DNA, 120 bp, Artificial Sequence
  ENSG00000164287_20 (sequence is synthesized)
aagtcctgtgctgatcctctcagtcccctgctcatcaactctcaaggacaacctattaccaaacacctttgacctcaacctctggagtcctcagcccaggacttgaagttaggagatctt

SEQ ID NO: 510091 - DNA, 120 bp, Artificial Sequence
  ENSG00000164287_21 (sequence is synthesized)
tttttgccttggctctgccataaatacaccctgtaaccttggatgtgttgcaacatctgcaaggataggaatttgatcactgctaaggttccttcaaacttgatcagttcgctgttctgt

SEQ ID NO: 510092 - DNA, 120 bp, Artificial Sequence
  ENSG00000164287_22 (sequence is synthesized)
cttttgaatgttaattcacattcatctcctatattaagactttggctaagtcttgtgatttcttgccttattggagcttttcttctaatctgaattcttgcttctctctccttttccttt

SEQ ID NO: 510093 - DNA, 120 bp, Artificial Sequence
  ENSG00000164287_23 (sequence is synthesized)
acacacccacacaagtcctaacctctccaggaagtgttttgaaatgatgttacctgggtttgagttcttggcattagcctgtatcatctatttggtattattatactattatagctgttt

SEQ ID NO: 510094 - DNA, 120 bp, Artificial Sequence
  ENSG00000164287_24 (sequence is synthesized)
atgttggtggcaaagactaattgagaggccctctgaatactctatgcaaggctctgttgttgattcttttaagggaacttaaactatgaaacagatcccacataagccaagtaattgctc

SEQ ID NO: 510095 - DNA, 120 bp, Artificial Sequence
  ENSG00000164287_25 (sequence is synthesized)
atcagtggatcacggggacaaatgttatccaaatgctgtgtatataaagcaattctttatgccttgtccatatctaatgactctgaaaccttacagcaggcagcccctgtaaactttcag

SEQ ID NO: 510096 - DNA, 120 bp, Artificial Sequence
  ENSG00000164287_26 (sequence is synthesized)
gttatcagggaagctctgtagccatgcagtggggagataattgcctgtggcaatttctagaaggtcctgttccatgctacatttggagctctcagtgctttctttctttttttttttttt

SEQ ID NO: 510097 - DNA, 90 bp, Artificial Sequence
  ENSG00000164287_27 (sequence is synthesized)
agactggtctccaactcctgacctcagatgctccacccgcctcagccttccaaaatactgatcccaaagtcttttgaccctgagccccat

SEQ ID NO: 510098 - DNA, 120 bp, Artificial Sequence
  ENSG00000164287_28 (sequence is synthesized)
cccaaagtcttttgaccctgagccccatgtgttttcattcctactttctgttgccatcatggacgtttttgtgttattcatgagattattgtcatggctggaaaataattgtttgggagc

SEQ ID NO: 510099 - DNA, 120 bp, Artificial Sequence
  ENSG00000164287_29 (sequence is synthesized)
cagaattctgtgtgagaatcctcttgagagaactagcgtggttcatttcataaatgccaaggaaacttgcctgctacatttcccctctggaataagttctggtaagcatatccatggggt

SEQ ID NO: 510100 - DNA, 120 bp, Artificial Sequence
  ENSG00000164287_30 (sequence is synthesized)
gggtgctttggcaaggtctcaaaaataaatgtgaacaaggagacagaaatcctcaatgctaaagtagacttctatttttatggcttgtcctattttttttttttttttttgagatgaagt

SEQ ID NO: 510101 - DNA, 120 bp, Artificial Sequence
  ENSG00000164287_31 (sequence is synthesized)
ttttttttttgagatgaagtcttgctctatcgtccaggctggagtgcagtagtgtgatcttggctcatggcaacctccacctcccgggagaattgcttgaaccagggaggcggaagttgc

SEQ ID NO: 510102 - DNA, 120 bp, Artificial Sequence
  ENSG00000164287_32 (sequence is synthesized)
gtgagactctgtctcaaaaaaaaaaatattttttttggaaattttcttttaaaaattatgtagataacacatagatacacacttttaacttctaaatacagaggtgtccaatcttttggc

SEQ ID NO: 510103 - DNA, 76 bp, Artificial Sequence
  ENSG00000164287_33 (sequence is synthesized)
gattgttttgggccacatatagaatacactaatactaaagatagctgatgagctaaaaaaaaaaaaaaaaaaaaaa

SEQ ID NO: 510104 - DNA, 120 bp, Artificial Sequence
  ENSG00000164291_0 (sequence is synthesized)
gtgcgcgctctccgcctgataggagttgtagttctgcgggtgaagctcggcgttactatcaagcaaccaaactgcaagctttgggagttgttcgctgtccctgccctgctctgctaggga

SEQ ID NO: 510105 - DNA, 120 bp, Artificial Sequence
  ENSG00000164291_1 (sequence is synthesized)
gagaacgccagagggaggcggctggcccggcggcaggctctcagaaccgctaccggcgatgctactgctgtgggtgtcggtggtcgcagccttggcgctggcggtactggcccccggagc

SEQ ID NO: 510106 - DNA, 120 bp, Artificial Sequence
  ENSG00000164291_2 (sequence is synthesized)
aggggagcagaggcggagagcagccaaagcgcccaatgtggtgctggtcgtgagcgactccttcgatggaaggttaacatttcatccaggaagtcaggtagtgaaacttccttttatcaa

SEQ ID NO: 510107 - DNA, 120 bp, Artificial Sequence
  ENSG00000164291_3 (sequence is synthesized)
ctttatgaagacacgtgggacttcctttctgaatgcctacacaaactctccaatttgttgcccatcacgcgcagcaatgtggagtggcctcttcactcacttaacagaatcttggaataa

SEQ ID NO: 510108 - DNA, 120 bp, Artificial Sequence
  ENSG00000164291_4 (sequence is synthesized)
ttttaagggtctagatccaaattatacaacatggatggatgtcatggagaggcatggctaccgaacacagaaatttgggaaactggactatacttcaggacatcactccattagtaatcg

SEQ ID NO: 510109 - DNA, 120 bp, Artificial Sequence
  ENSG00000164291_5 (sequence is synthesized)
tgtggaagcgtggacaagagatgttgctttcttactcagacaagaaggcaggcccatggttaatcttatccgtaacaggactaaagtcagagtgatggaaagggattggcagaatacaga

SEQ ID NO: 510110 - DNA, 120 bp, Artificial Sequence
  ENSG00000164291_6 (sequence is synthesized)
caaagcagtaaactggttaagaaaggaagcaattaattacactgaaccatttgttatttacttgggattaaatttaccacacccttacccttcaccatcttctggagaaaattttggatc

SEQ ID NO: 510111 - DNA, 120 bp, Artificial Sequence
  ENSG00000164291_7 (sequence is synthesized)
ttcaacatttcacacatctctttattggcttgaaaaagtgtctcatgatgccatcaaaatcccaaagtggtcacctttgtcagaaatgcaccctgtagattattactcttcttatacaaa

SEQ ID NO: 510112 - DNA, 120 bp, Artificial Sequence
  ENSG00000164291_8 (sequence is synthesized)
aaactgcactggaagatttacaaaaaaagaaattaagaatattagagcattttattatgctatgtgtgctgagacagatgccatgcttggtgaaattattttggcccttcatcaattaga

SEQ ID NO: 510113 - DNA, 120 bp, Artificial Sequence
  ENSG00000164291_9 (sequence is synthesized)
tcttcttcagaaaactattgtcatatactcctcagaccatggagagctggccatggaacatcgacagttttataaaatgagcatgtacgaggctagtgcacatgttccgcttttgatgat

SEQ ID NO: 510114 - DNA, 120 bp, Artificial Sequence
  ENSG00000164291_10 (sequence is synthesized)
gggaccaggaattaaagccggcctacaagtatcaaatgtggtttctcttgtggatatttaccctaccatgcttgatattgctggaattcctctgcctcagaacctgagtggatactcttt

SEQ ID NO: 510115 - DNA, 120 bp, Artificial Sequence
  ENSG00000164291_11 (sequence is synthesized)
gttgccgttatcatcagaaacatttaagaatgaacataaagtcaaaaacctgcatccaccctggattctgagtgaattccatggatgtaatgtgaatgcctccacctacatgcttcgaac

SEQ ID NO: 510116 - DNA, 120 bp, Artificial Sequence
  ENSG00000164291_12 (sequence is synthesized)
taaccactggaaatatatagcctattcggatggtgcatcaatattgcctcaactctttgatctttcctcggatccagatgaattaacaaatgttgctgtaaaatttccagaaattactta

SEQ ID NO: 510117 - DNA, 120 bp, Artificial Sequence
  ENSG00000164291_13 (sequence is synthesized)
ttctttggatcagaagcttcattccattataaactaccctaaagtttctgcttctgtccaccagtataataaagagcagtttatcaagtggaaacaaagtataggacagaattattcaaa

SEQ ID NO: 510118 - DNA, 120 bp, Artificial Sequence
  ENSG00000164291_14 (sequence is synthesized)
tagcaaatcttaggtggcaccaagactggcagaaggaaccaaggaagtatgaaaatgcaattgatcagtggcttaaaacccatatgaatccaagagcagtttgaacaaaaagtttaaaaa

SEQ ID NO: 510119 - DNA, 120 bp, Artificial Sequence
  ENSG00000164291_15 (sequence is synthesized)
aaagtttaaaaatagtgttctagagatacatataaatatattacaagatcataattatgtattttaaatgaaacagttttaataattaccaagttttggccgggcacagtggctcacacc

SEQ ID NO: 510120 - DNA, 80 bp, Artificial Sequence
  ENSG00000164291_16 (sequence is synthesized)
tacaaaaattagctgggcgcggtggtgcacacctatagtctcagctactccagttgcagtgagctgagattgcgccactg

SEQ ID NO: 510121 - DNA, 120 bp, Artificial Sequence
  ENSG00000164291_17 (sequence is synthesized)
cagagtgagactgtgtcgcaaaaaaataaaaataaaataataataattaccaatttttcattattttgtaagaatgtagtgtattttaagataaaatgccaatgattataaaatcacata

SEQ ID NO: 510122 - DNA, 120 bp, Artificial Sequence
  ENSG00000164291_18 (sequence is synthesized)
ttatttaggcctttgtacaatttctaacaatttagtggaagtatcaaaagaattgaagcaaatactgtaacagttatgttcctttaaataatagagaatataaaatattgtaataatatg

SEQ ID NO: 510123 - DNA, 120 bp, Artificial Sequence
  ENSG00000164291_19 (sequence is synthesized)
tatcataaaatagttgtatgtgagcatttgatggtgctcgatgagttacttgtatttgatgggattgtttggatgtatttaatgggagtatttggagtatttaacgggatgtaaaccctg

SEQ ID NO: 510124 - DNA, 120 bp, Artificial Sequence
  ENSG00000164291_20 (sequence is synthesized)
gatgtacctgattttgttactgttttattttaataggtaatatatatacagggtaaaagcttcaaatggtacaaaagggttaacagtgatcgtgaagtctctgtcctttccctcttccct

SEQ ID NO: 510125 - DNA, 120 bp, Artificial Sequence
  ENSG00000164291_21 (sequence is synthesized)
gccatccagttccccctccaagaagcaagtaccgaaaccacctgcttacgcatttttagagattggccacaaatttataaacaaatgtatatattcctttccccctacacaaacggtaac

SEQ ID NO: 510126 - DNA, 120 bp, Artificial Sequence
  ENSG00000164291_22 (sequence is synthesized)
atactgcacacattgttctgcatgttgcttctttttccttttttttttcacttaacagtagatatctagaggtgaaattactgagtcaagactatatttagcaaaattacactagatact

SEQ ID NO: 510127 - DNA, 120 bp, Artificial Sequence
  ENSG00000164291_23 (sequence is synthesized)
acaaattacctctaaagaaggtatactaactgataatctcaccatcaatgcatgtcttcttatcctttgccaacctaacagataaaaatgttctatttttatttttctttttatgagtaa

SEQ ID NO: 510128 - DNA, 120 bp, Artificial Sequence
  ENSG00000164291_24 (sequence is synthesized)
cgtagagcatattttcatgtatttaacagccactggaatctgctttaccatggcctttcctatttctattctttgcctatttttctgttggttgttggtctttgttttgtattacaggtg

SEQ ID NO: 510129 - DNA, 120 bp, Artificial Sequence
  ENSG00000164291_25 (sequence is synthesized)
tgctttagatattagctttttgtaagagatcctgcaaatatcttctttccagtttgtcattgtcatttgtcttttgactttgttctggtattttttgatatgtagaaatttttattttca

SEQ ID NO: 510130 - DNA, 120 bp, Artificial Sequence
  ENSG00000164291_26 (sequence is synthesized)
tgtaagcaaatttatgaatctttgtacaccataagtatatacaattatgatttgtcaattaaaaatattagtacaaaatttacagatctttgcttttgtggcttttgggattttgtatca

SEQ ID NO: 510131 - DNA, 120 bp, Artificial Sequence
  ENSG00000164291_27 (sequence is synthesized)
tcctgatgattaaaattacatagtctggatgtgcccatgggattttttgaaaatattacttaaagttatctttgtgatttaaacttagagaatgggcagtactggaaattgactagatgg

SEQ ID NO: 510132 - DNA, 120 bp, Artificial Sequence
  ENSG00000164291_28 (sequence is synthesized)
cattttattacagagtgctcttgtaatcaaaggcaaatgaaggaagcaggattgtgcagaggagaagctgaattttgttgccatcttatgaatgacagttctcaaactagtatggtgctt

SEQ ID NO: 510133 - DNA, 120 bp, Artificial Sequence
  ENSG00000164291_29 (sequence is synthesized)
ctttccaataggagtgaggagaacagacctttccacctgcatgttggatggccactggttgtgggctgctcctagaatggggcatggtgttgggcaaagcagctgtcttcagcagaggca

SEQ ID NO: 510134 - DNA, 120 bp, Artificial Sequence
  ENSG00000164291_30 (sequence is synthesized)
attgttcattcctaaaagggaatccgaatgtggatcacaacatcccagaaacttccaaagatgactgagatatataggtttgttattttttttagtgtagtatgaatgcatagatttttc

SEQ ID NO: 510135 - DNA, 120 bp, Artificial Sequence
  ENSG00000164292_0 (sequence is synthesized)
agcaggaggcgacagctgccagccgaggaggcgcggcggagaggggactgcggtcagctgcgtccacttggggctgtgcggcggtcccgcgcccggcgatgttcccgggcactccctgag

SEQ ID NO: 510136 - DNA, 120 bp, Artificial Sequence
  ENSG00000164292_1 (sequence is synthesized)
cgatgttcccgggcactccctgagtagcggcagcttatcccccgcccgctagcccgccctggtccccggctcgctcgctggctggcgcggccccggccccgctctgcgtcggccccgccg

SEQ ID NO: 510137 - DNA, 120 bp, Artificial Sequence
  ENSG00000164292_2 (sequence is synthesized)
cggccggggatgagcggattgcgggtgaactcgccgcccgggggccccgcgaagccgtgagccgctgcttttctccgagtcgccgccctgcccttggatttgagatcatgtccatccaca

SEQ ID NO: 510138 - DNA, 120 bp, Artificial Sequence
  ENSG00000164292_3 (sequence is synthesized)
tcgtggcgctggggaacgagggggacacattccaccaggacaaccggccgtcggggcttatccgcacttacctggggagaagccctctggtctccggggacgagagcagcttgttgctga

SEQ ID NO: 510139 - DNA, 120 bp, Artificial Sequence
  ENSG00000164292_4 (sequence is synthesized)
acgcggccagcacggtcgcgcgtccggtgttcaccgagtatcaggccagtgcgtttgggaatgtcaagctggtggtccacgactgtcccgtctgggacatatttgacagtgattggtaca

SEQ ID NO: 510140 - DNA, 120 bp, Artificial Sequence
  ENSG00000164292_5 (sequence is synthesized)
cttctcgaaatctaattgggggcgctgacatcattgtgatcaaatacaacgttaatgacaagttttcattccatgaagtaaaggataattatattccagtgataaaaagagcattaaatt

SEQ ID NO: 510141 - DNA, 120 bp, Artificial Sequence
  ENSG00000164292_6 (sequence is synthesized)
cagttccagtaattattgctgctgttggtaccagacaaaatgaagagttaccttgtacatgcccactatgtacctcagacagagggagctgtgttagtacaactgaagggatccaacttg

SEQ ID NO: 510142 - DNA, 120 bp, Artificial Sequence
  ENSG00000164292_7 (sequence is synthesized)
caaaagaactaggagcgacctatcttgaactccacagccttgatgacttctacataggaaagtattttggaggagtgttggagtattttatgattcaagccttaaatcagaagacaagtg

SEQ ID NO: 510143 - DNA, 120 bp, Artificial Sequence
  ENSG00000164292_8 (sequence is synthesized)
aaaaaatgaagaaaagaaaaatgagcaactcctttcatggaattagaccacctcaacttgaacaaccagaaaaaatgcctgtcttaaaggctgaagcgtcacattataactctgacttaa

SEQ ID NO: 510144 - DNA, 120 bp, Artificial Sequence
  ENSG00000164292_9 (sequence is synthesized)
ataacttgctgttctgctgccagtgtgtggacgtggtattttacaaccccaatttaaagaaagttgtagaggcccacaagatcgttctctgcgctgtaagccatgttttcatgctgcttt

SEQ ID NO: 510145 - DNA, 120 bp, Artificial Sequence
  ENSG00000164292_10 (sequence is synthesized)
tcaatgtgaagagtcccactgacattcaggattccagtatcatccgaactacccaggatctttttgctataaacagagatactgcatttccaggtgctagccatgaatcttcaggcaacc

SEQ ID NO: 510146 - DNA, 120 bp, Artificial Sequence
  ENSG00000164292_11 (sequence is synthesized)
caccattacgagtcattgttaaagacgccctcttctgttcttgtttatcagacatccttcgcttcatttattcaggtgcttttcagtgggaagaattggaagaagatatcaggaagaagt

SEQ ID NO: 510147 - DNA, 120 bp, Artificial Sequence
  ENSG00000164292_12 (sequence is synthesized)
tgaaagattctggggatgtttcaaatgtaatcgagaaagttaaatgcattttaaaaacaccaggaaagattaattgcctaaggaattgcaaaacctatcaagccagaaaacctttgtggt

SEQ ID NO: 510148 - DNA, 120 bp, Artificial Sequence
  ENSG00000164292_13 (sequence is synthesized)
tttataacacttccctcaagtttttccttaataagccgatgcttgccgatgttgtcttcgaaattcaaggtacgacagtgccagcccacagggccatcctggtggcccgttgtgaagtga

SEQ ID NO: 510149 - DNA, 120 bp, Artificial Sequence
  ENSG00000164292_14 (sequence is synthesized)
tggcagccatgtttaatggtaattacatggaagcaaagagtgtcctgattcccgtttatggtgtttccaaagagactttcttgtcatttttagaatacctgtacacagactcctgctgcc

SEQ ID NO: 510150 - DNA, 120 bp, Artificial Sequence
  ENSG00000164292_15 (sequence is synthesized)
cagctggcatattccaggccatgtgtctcctgatctgtgccgagatgtaccaagtgtccagactgcagcacatctgtgagctgttcatcattacccagctgcagagcatgccaagcaggg

SEQ ID NO: 510151 - DNA, 120 bp, Artificial Sequence
  ENSG00000164292_16 (sequence is synthesized)
aactggcatccatgaaccttgatatagttgacctgcttaaaaaggccaagtttcaccactctgattgcctttcaacctggctacttcatttcattgctactaactacctcatcttcagtc

SEQ ID NO: 510152 - DNA, 120 bp, Artificial Sequence
  ENSG00000164292_17 (sequence is synthesized)
aaaagcctgaatttcaggatctttcagtggaagaacgcagttttgttgaaaagcacagatggccgtcgaatatgtacttgaagcagcttgcggaatacaggaagtatattcactcccgga

SEQ ID NO: 510153 - DNA, 120 bp, Artificial Sequence
  ENSG00000164292_18 (sequence is synthesized)
aatgtcgttgcttagtaatgtaacctggagcttttatacactacatttcttttttattattatgaagaatgggatacctccaggttccagtaaaattcttctgaccgaaaccaatgtggg

SEQ ID NO: 510154 - DNA, 120 bp, Artificial Sequence
  ENSG00000164292_19 (sequence is synthesized)
tgttagaaaaattaccatatagcttaatatgtttattagttctctttggaaaaaaactaccactgtggtcttaaaagggaacaaaatataccataggctaaaactaaggctttcactcta

SEQ ID NO: 510155 - DNA, 120 bp, Artificial Sequence
  ENSG00000164292_20 (sequence is synthesized)
gaatgcaaagctgttttgcagctgttttcccttaaagatgtcctgttgctttagtgatatttagacccctctcagttaagaaatgcttagattaaaaaaaaaaaattacgtaggattaat

SEQ ID NO: 510156 - DNA, 120 bp, Artificial Sequence
  ENSG00000164292_21 (sequence is synthesized)
acagaaatttaatcatgtctgattaattgctctattaaaataaggggcatttaaagacccagcataaccatttgtataatgagaaatctaggggaaaaccaatcagtccaacatgagatt

SEQ ID NO: 510157 - DNA, 120 bp, Artificial Sequence
  ENSG00000164292_22 (sequence is synthesized)
cctgcttttcatctggacaacccaattgagccactttatctccttttggcaatctgagtaggcggggaacctaggcagggctggctttcttagcgtgtaacttgtgtagcagcacagggc

SEQ ID NO: 510158 - DNA, 120 bp, Artificial Sequence
  ENSG00000164292_23 (sequence is synthesized)
ccacacttagaaggaccccacacttggttcaaggctctgctatagcggaaattcttaataatgtttgaagaagggccccatgatttcattttgtgctgagccctcaaaattatgtctgtt

SEQ ID NO: 510159 - DNA, 120 bp, Artificial Sequence
  ENSG00000164292_24 (sequence is synthesized)
tcgtggtgggaaatatcctatgttttcttgctcaaacacctttctctctgaaagcagaaaaaggcactgatataaagggaagagaaggaggctcaccggagggaagagaacatagtgaag

SEQ ID NO: 510160 - DNA, 120 bp, Artificial Sequence
  ENSG00000164292_25 (sequence is synthesized)
attcccgcctttggggaggtctggaccacccagggcctccactgccaccttggctggcaagggagaaatgtgttgtgttgtcttagctttaaaacagtcacagttcttgctctatcatag

SEQ ID NO: 510161 - DNA, 120 bp, Artificial Sequence
  ENSG00000164292_26 (sequence is synthesized)
atgaacaaatactttcttgatcattctgtaagaccaggaggttggtaagagtgactaaccagcctaactttaatacacatgtataaagatgttcacagagaaagatgctctgtagagaat

SEQ ID NO: 510162 - DNA, 120 bp, Artificial Sequence
  ENSG00000164292_27 (sequence is synthesized)
ttgctaccgaagttggctcaagaatttgtttttagtgttatttaccaagattaggacgtcagtggcttaaattctttgaattcttttcaaggactgcaagattatttgataaagagtagc

SEQ ID NO: 510163 - DNA, 120 bp, Artificial Sequence
  ENSG00000164292_28 (sequence is synthesized)
atgaatcttgtgctctaatattacacagtaagttcaaagaaaggatgtaagtcaaagacttgttacatagagggaaaatggactgggatagaggacagactgatagtttctttctttcat

SEQ ID NO: 510164 - DNA, 120 bp, Artificial Sequence
  ENSG00000164292_29 (sequence is synthesized)
atcacatgtatagagaaataattatatcagaaactcacaaacctagacatggaaaaacagattactgtctattgtcagcatcattttcatctgtaagtcactactggaatatatttttct

SEQ ID NO: 510165 - DNA, 120 bp, Artificial Sequence
  ENSG00000164292_30 (sequence is synthesized)
tttaatttccagtgactttagaatacacacagtttttccgacttttcaaaaatttgattaaatggttttatagtataatattgggaccccataccgttagcccttgtatgtataccaaca

SEQ ID NO: 510166 - DNA, 71 bp, Artificial Sequence
  ENSG00000164292_31 (sequence is synthesized)
agtggataacttgaggtcatgagttcgaaaccagcctggccaaaacagtgaaaccccgtctctactaaaaa

SEQ ID NO: 510167 - DNA, 83 bp, Artificial Sequence
  ENSG00000164292_32 (sequence is synthesized)
ccaaagtgaaacactaaaaattccctatagatatattccaggaaatattttaattgggctgattttaattaggctgtatcatt

SEQ ID NO: 510168 - DNA, 120 bp, Artificial Sequence
  ENSG00000164292_33 (sequence is synthesized)
aatattttaattgggctgattttaattaggctgtatcattgatgattactggaatcgattttatgtcttttgtattttaatcacttgagttaatcaaccactggcaaatcccatttgaca

SEQ ID NO: 510169 - DNA, 120 bp, Artificial Sequence
  ENSG00000164292_34 (sequence is synthesized)
aagattagcattgtaaaaaacagatactgtggtagatttctagaaattcattcacatttaagacttctaaaatggaataatagccttttgtttttcatgagcatattcgcacccctatat

SEQ ID NO: 510170 - DNA, 120 bp, Artificial Sequence
  ENSG00000164292_35 (sequence is synthesized)
gaattacagcatttaaagttcaaaatcagtaacttttaatctaggaaattgaaaaatattaagttgcaaagcaaaaaaaggtattttcttgaaaatactatttaatgtttaactagacta

SEQ ID NO: 510171 - DNA, 120 bp, Artificial Sequence
  ENSG00000164292_36 (sequence is synthesized)
taggtagttccttaaggttgtttgacctgaagtggagttgggtttggaagctggtgcccagttggtgtggagtgtgtagttttgttatgaaagttctctaccacctacctgtgtgagtga

SEQ ID NO: 510172 - DNA, 120 bp, Artificial Sequence
  ENSG00000164292_37 (sequence is synthesized)
caccaacatccagatgtcacagctctccagagctagtcagaagagaaatcaaattagtgtttaaacccatttgcatattgacttgtcagtacctttaactcaatttaatataacaagaaa

SEQ ID NO: 510173 - DNA, 120 bp, Artificial Sequence
  ENSG00000164292_38 (sequence is synthesized)
tcgtaaaatacttataacctatcttagagaaatgagtgctggttttgagagttgttttttaactgaaagattatttctagatgggtagtgctttgtgctggtttctgcttccatatattt

SEQ ID NO: 510174 - DNA, 120 bp, Artificial Sequence
  ENSG00000164292_39 (sequence is synthesized)
cccagtcattttaattagagaagatactctatggtagaactaaggcctttcctttcttggccaaagtctttaccctatttaaccctttgtatatttctgactgctcactgttcatattat

SEQ ID NO: 510175 - DNA, 120 bp, Artificial Sequence
  ENSG00000164292_40 (sequence is synthesized)
aggggaccagatttgtaatatagaattctccataacatgaatgaaattaattctgtccaagccagcatggtggcttcatattaagtagtaacagaagtctgaacaattggataaatttga

SEQ ID NO: 510176 - DNA, 120 bp, Artificial Sequence
  ENSG00000164292_41 (sequence is synthesized)
cttccaagacagctaaacttttcaactgcaattttaaaaactacactacactgttatagttaatctgacaaaaatgtcctcaaagagtactttattttatttaaagcatctgtttaattc

SEQ ID NO: 510177 - DNA, 120 bp, Artificial Sequence
  ENSG00000164292_42 (sequence is synthesized)
aacctttaataattttgcaaagaagggtatgtgtgtattttaatatagcctgacctgaatttatatgtttttagctttagtatttaactttttgtaacaaataaaccttttttaaaacaa

SEQ ID NO: 510178 - DNA, 120 bp, Artificial Sequence
  ENSG00000164292_43 (sequence is synthesized)
actaagtaacaaattgttgtcttgacttgcaaattgttggtttcaaggtcaacatctgaactttctttattgctccctttaaaattaagaagtttctggattaatggtagttatcactcc

SEQ ID NO: 510179 - DNA, 120 bp, Artificial Sequence
  ENSG00000164292_44 (sequence is synthesized)
caaattcagattctgcatatcagcctagctgtccctaatgtggtagtctaattagaaggaaaattgctggaataaccctgcaggtttatctcacttgtttcttgtttcccttttgaacct

SEQ ID NO: 510180 - DNA, 120 bp, Artificial Sequence
  ENSG00000164292_45 (sequence is synthesized)
aaaagaagaagaagaaaggaaagaaaaaaaagataaaatggaataaaagtgcagaatgctgactccctcgaggcttttcctaaccattctattctatggtggatgctacggtcagcatgt

SEQ ID NO: 510181 - DNA, 120 bp, Artificial Sequence
  ENSG00000164292_46 (sequence is synthesized)
aagactcatagggtttcaggaccttgcagcttctcagcaatggagctgagttttcacttaggcaatttgtttactgctgtgaatgccaaagagagcagtgttgttcactgacaggcagcc

SEQ ID NO: 510182 - DNA, 120 bp, Artificial Sequence
  ENSG00000164292_47 (sequence is synthesized)
gttcttagatttgagacataagttgtagaagtagtacttttagcaaaataagaatagtcaatgtaataaatttcttgtaaattatgcagtgtggtaattgaggaaacaatttatagtcac

SEQ ID NO: 510183 - DNA, 120 bp, Artificial Sequence
  ENSG00000164292_48 (sequence is synthesized)
ctgtgttacataagtgccttaacctgtgttacacaagaagttttctaatgattattttatagctccatccgtttttaaatgcattttctttccctgaaatagataaggtgacaaaatgtg

SEQ ID NO: 510184 - DNA, 120 bp, Artificial Sequence
  ENSG00000164292_49 (sequence is synthesized)
tcctcaggtgacatttggttgtgaaaagtgatatcttagttctaactacctaagtcagcagcaaagtttaaacagtacagatttaaaaattttttataaaggaatttaactcttgttaac

SEQ ID NO: 510185 - DNA, 120 bp, Artificial Sequence
  ENSG00000164292_50 (sequence is synthesized)
tatattatatttagctttattgtactggatatctgtatttactgagtatacctatatgggagtcccttatattactttggaataacagtttttcatatataaaaaatgttgtgaaactta

SEQ ID NO: 510186 - DNA, 120 bp, Artificial Sequence
  ENSG00000164292_51 (sequence is synthesized)
ctacctcatcttcagtcaaaagcctgaatttcaggatctttcaggaagttttatggtgaaaccagagtatcttcaaagaggcggggccaaggccagagctggacaccacgactgccacgt

SEQ ID NO: 510187 - DNA, 120 bp, Artificial Sequence
  ENSG00000164292_52 (sequence is synthesized)
aagaggaatcccaagcatactgcgatcaagggaagggaagaaaatccactcccagaagcagctttttactgtgactctcatcgttactagaattaaaatggcaaaatgagaaagccagat

SEQ ID NO: 510188 - DNA, 120 bp, Artificial Sequence
  ENSG00000164292_53 (sequence is synthesized)
cctccaaagtaggctctgccacagagtctgagcctcctctcttttttcattcttttacctcagaaccctgtggccaggctccttccagaggcccctgccaggaggtccagggtctgtttc

SEQ ID NO: 510189 - DNA, 120 bp, Artificial Sequence
  ENSG00000164292_54 (sequence is synthesized)
agggccctcaggctgttgccttaagttccctcagcctgaggtttatccacacgacttgcacctgctactcactcagagcctttctcttctccggtctgttgttggctcctcccttcctgg

SEQ ID NO: 510190 - DNA, 80 bp, Artificial Sequence
  ENSG00000164292_55 (sequence is synthesized)
cgcgcgggcggctcctttgtgtccagccgccgccaccggagctcccggggcctccgcggggagcgcgtcccccgcatccg

SEQ ID NO: 510191 - DNA, 120 bp, Artificial Sequence
  ENSG00000164292_56 (sequence is synthesized)
ccttctgcccacttccgtgagtgtggagtgtccgcgttacatgggtcaaatttttaaacatttttgagaaaatctttggtcctttgtttcactgggcagggaacagccctgtcagagaac

SEQ ID NO: 510192 - DNA, 120 bp, Artificial Sequence
  ENSG00000164292_57 (sequence is synthesized)
actcttaggaagatagaaggccccagtgggaatgtggagcacttactggtacacttcacgactgtgggttgacccttggtaggcagcagacagttgaatgtgccaactccaagggacggg

SEQ ID NO: 510193 - DNA, 120 bp, Artificial Sequence
  ENSG00000164292_58 (sequence is synthesized)
gtcactaagtttcatcagcaaaaagcagtgtttttttatgtctaccctatgggtgatagtgtaatattggtgttctaaaaatacatccctctcaaagctcaacacaggcaaaaatacttt

SEQ ID NO: 510194 - DNA, 120 bp, Artificial Sequence
  ENSG00000164292_59 (sequence is synthesized)
tcactgggacagttcagaaatagttcctctggaaagcggaggaaaagacagggactgggagttaattttaaatgactcatttatagcactattaattgatctctgaaaacttaattttaa

SEQ ID NO: 510195 - DNA, 120 bp, Artificial Sequence
  ENSG00000164292_60 (sequence is synthesized)
taatgcaaatactctttatgtgttagccatttgtcttagtgactcataaatcagaaataacattactaatgttgtttggaaaacttttaaaaaattaaaatttgtaataattgaacaaaa

SEQ ID NO: 510196 - DNA, 120 bp, Artificial Sequence
  ENSG00000164292_61 (sequence is synthesized)
accttctgccatgattggaaatttcctgaggcctccccagaagcagaatcctgtacagcctgcagaattataactcagctaatacagttggtgacaaaggagactctgaaggggaggagc

SEQ ID NO: 510197 - DNA, 120 bp, Artificial Sequence
  ENSG00000164292_62 (sequence is synthesized)
caggggaagaaaatatcctgtctcattctgctgcctctgatctctgcattgactaaacctaactagaagccagaggccaaaggaatctgtcgatatacaagctagcttcccagtggatgg

SEQ ID NO: 510198 - DNA, 120 bp, Artificial Sequence
  ENSG00000164292_63 (sequence is synthesized)
gcgtgccgtgcgccccagggacaggggctggtgcccatcctcgccgcgcgctgtcccccgcacttcctgttccgaggagagacccgcgcgctgaccgtgcttcccttctcccctcgcccc

SEQ ID NO: 510199 - DNA, 120 bp, Artificial Sequence
  ENSG00000164292_64 (sequence is synthesized)
accttctgccatgattggaaatttcctgaggcctccccagaagcagaatcctgtacagcctgcagaattgtgagccattaaatctcttttctttataaattacctagtcgcaggtatgtc

SEQ ID NO: 510200 - DNA, 120 bp, Artificial Sequence
  ENSG00000164292_65 (sequence is synthesized)
tttatagtgtgtgagaagagactaacacaccagtagataatctaaggtagatctcctttacatcagacagataactcagctaatacagttggtgacaaaggagactctgaaggggaggag

SEQ ID NO: 510201 - DNA, 120 bp, Artificial Sequence
  ENSG00000164292_66 (sequence is synthesized)
tcagacatccttcgcttcatttattcaggtatcttgtcaagtggttctggttacttacaatctcataagctttggaaatgaaatgtgcctgtgacactcaagggtactggttagttttac

SEQ ID NO: 510202 - DNA, 120 bp, Artificial Sequence
  ENSG00000164292_67 (sequence is synthesized)
agtggtctttacctaccatctgagattaagattatacatgaaatattatttgctttatatataagaattggtccaagctttctgttttccttacaaatgtacttgcctcatcttttccct

SEQ ID NO: 510203 - DNA, 120 bp, Artificial Sequence
  ENSG00000164292_68 (sequence is synthesized)
atcaatttcattttattgtggtaaaatacatagaacataaattttaccatcttaaccatttttaagaacacagttcagtggaattaaacacattcataatgttgtgtaactatcaccacc

SEQ ID NO: 510204 - DNA, 120 bp, Artificial Sequence
  ENSG00000164294_0 (sequence is synthesized)
cttccctctagaatcctccaacatggagcctcttgcagcttacccgctaaaatgttccgggcccagagcaaaggtatttgcagttttgctgtctatagttctatgcacagtaacgctatt

SEQ ID NO: 510205 - DNA, 120 bp, Artificial Sequence
  ENSG00000164294_1 (sequence is synthesized)
tcttctacaactaaaattcctcaaacctaaaatcaacagcttttatgcctttgaagtgaaggatgcaaaaggaagaactgtttctctggaaaagtataaaggcaaagtttcactagttgt

SEQ ID NO: 510206 - DNA, 120 bp, Artificial Sequence
  ENSG00000164294_2 (sequence is synthesized)
aaacgtggccagtgactgccaactcacagacagaaattacttagggctgaaggaactgcacaaagagtttggaccatcccacttcagcgtgttggcttttccctgcaatcagtttggaga

SEQ ID NO: 510207 - DNA, 120 bp, Artificial Sequence
  ENSG00000164294_3 (sequence is synthesized)
atcggagccccgcccaagcaaggaagtagaatcttttgcaagaaaaaactacggagtaactttccccatcttccacaagattaagattctaggatctgaaggagaacctgcatttagatt

SEQ ID NO: 510208 - DNA, 120 bp, Artificial Sequence
  ENSG00000164294_4 (sequence is synthesized)
tcttgttgattcttcaaagaaggaaccaaggtggaatttttggaagtatcttgtcaaccctgagggtcaagttgtgaagttctggaagccagaggagcccattgaagtcatcaggcctga

SEQ ID NO: 510209 - DNA, 120 bp, Artificial Sequence
  ENSG00000164294_5 (sequence is synthesized)
catagcagctctggttagacaagtgatcataaaaaagaaagaggatctatgagaatgccattgcgtttctaatagaacagagaaatgtctccatgagggtttggtctcattttaaacatt

SEQ ID NO: 510210 - DNA, 120 bp, Artificial Sequence
  ENSG00000164294_6 (sequence is synthesized)
tcacccaggctggagtgcagtagtgcgttctcagctcattgcaacctctgcctttttaaacatgctattaaatgtggcaatgaaggatttttttttaatgttatcttgctattaagtggt

SEQ ID NO: 510211 - DNA, 120 bp, Artificial Sequence
  ENSG00000164294_7 (sequence is synthesized)
ttttaatgttatcttgctattaagtggtaatgaatgttcccaggatgaggatgttacccaaagcaaaaatcaagagtagccaaagaatcaacatgaaatatattaactacttcctctgac

SEQ ID NO: 510212 - DNA, 120 bp, Artificial Sequence
  ENSG00000164294_8 (sequence is synthesized)
catactaaagaattcagaatacacagtgaccaatgtgcctcaatatcttattgttcaacttgacattttctaggactgtacttgatgaaaatgccaacacactagaccactctttggatt

SEQ ID NO: 510213 - DNA, 120 bp, Artificial Sequence
  ENSG00000164294_9 (sequence is synthesized)
caagagcactgtgtatgactgaaatttctggaataactgtaaatggttatgttaatggaataaaacacaaatgttgaaaaatgtaaaatatatatacatagattcaaatccttatatatg

SEQ ID NO: 510214 - DNA, 120 bp, Artificial Sequence
  ENSG00000164294_10 (sequence is synthesized)
tatgcttgttttgtgtacaggattttgttttttctttttaagtacaggttcctagtgttttactataactgtcactatgtatgtaactgacatatataaatagtcatttataaatgaccg

SEQ ID NO: 510215 - DNA, 120 bp, Artificial Sequence
  ENSG00000164294_11 (sequence is synthesized)
tattataacatttgaaaaagtcttcatcattttcagtatttctctctgcattattttttagaagcaactcaaattctgtaatcataatattaccaagtaagtcagtctttatttttgcgt

SEQ ID NO: 510216 - DNA, 120 bp, Artificial Sequence
  ENSG00000164294_12 (sequence is synthesized)
gaaaatcccaagtgtagaaaaaaggacatgagtataagatcatttaacttgattccttataggctgatttgggttgctaatgtattcgtactagattagccacttgggaggaattcaatg

SEQ ID NO: 510217 - DNA, 120 bp, Artificial Sequence
  ENSG00000164294_13 (sequence is synthesized)
ctgcatcattctgatagctgaaatagtaaaagtcaactccaaacagcctaaattctagtataaaaagggggtgatcatacaagtcctaaagtgtagatcagcagtcactgaacctcttag

SEQ ID NO: 510218 - DNA, 120 bp, Artificial Sequence
  ENSG00000164294_14 (sequence is synthesized)
agtcacaaggcatttcttctcccaaagtcatgacctttatattttgttagccttataattgactaacaaagcaacctgccaagttggtgaaggttaattattgcctcatgaaatatacat

SEQ ID NO: 510219 - DNA, 120 bp, Artificial Sequence
  ENSG00000164294_15 (sequence is synthesized)
aagaattaaataggaagatggccaaaaatgtaaaaaagtcgtataaatttgtctaagaagaaaaagacccaatttaagtagtctgtgacttgactcccaaattctgacctgatggatgaa

SEQ ID NO: 510220 - DNA, 120 bp, Artificial Sequence
  ENSG00000164294_16 (sequence is synthesized)
agtgaagatgtttcgtatggcaaattcagtaatgctacctcagtatatagttctgtatacgtatttggaccaaagttattagataaaccaaaaatatttcatgaagcatcttctgcttca

SEQ ID NO: 510221 - DNA, 120 bp, Artificial Sequence
  ENSG00000164294_17 (sequence is synthesized)
gagtccatatccagccacccagctatgaatgtatttagaaagatatttggtggaggtggaatttctaccagaggtcaagaggatttgtagggatagcctcaagaatgccagatgagtgtg

SEQ ID NO: 510222 - DNA, 120 bp, Artificial Sequence
  ENSG00000164294_18 (sequence is synthesized)
tcagaaagcctgctcctacctctcgccagctgcgtgactttaggcaagtcacttaagtaccttatttcagtttcctcacctgtaaattgaacaggggttgaatggaataaaaagcccttt

SEQ ID NO: 510223 - DNA, 120 bp, Artificial Sequence
  ENSG00000164294_19 (sequence is synthesized)
gcaactctaaaagtcaattaacacacttactaaggtgttttaagtgaccaggaaggaaatcagaactaacctggattgttagcgaagaaaacagaagccaccaacaagcctatctgtcct

SEQ ID NO: 510224 - DNA, 120 bp, Artificial Sequence
  ENSG00000164294_20 (sequence is synthesized)
ttgcaattttgctccaagagcctattagcaatttgaattctgagcctctaagaaaacttatgctcaggtggcccctccaagtgttggtgccagagcactcttgccttgtatcctcaccta

SEQ ID NO: 510225 - DNA, 120 bp, Artificial Sequence
  ENSG00000164294_21 (sequence is synthesized)
cgccttccatgaactcatagcagtgctgtggcactgcaggggtgttttatgcattcacgttaggagcatgagcagaactgcatatgccagcaccacatgggcagcagagactccccactg

SEQ ID NO: 510226 - DNA, 120 bp, Artificial Sequence
  ENSG00000164294_22 (sequence is synthesized)
ccagatggatgataatggagctgcactgggaacaaccaggactgtcccagtcaacatgatacagatgaacatcctgccttaagtcactagctctctccaaagccagataaagtgggtttc

SEQ ID NO: 510227 - DNA, 120 bp, Artificial Sequence
  ENSG00000164294_23 (sequence is synthesized)
ttcacttacatctctctaatcttggctgccttattcaacctacagactctatgtcagtgctggattttctccccttgccctttaggtaagcagagtaggcaggaggagatttgaaagcgt

SEQ ID NO: 510228 - DNA, 120 bp, Artificial Sequence
  ENSG00000164294_24 (sequence is synthesized)
gtcatacatattgccttgaaagaaaggacattcaggtgtcccttcggggttctgtaacaattaggctatgtgtgctgagagagggagcggagtcatttgctgatgtgctgctacctgtaa

SEQ ID NO: 510229 - DNA, 120 bp, Artificial Sequence
  ENSG00000164294_25 (sequence is synthesized)
ctcaaatgcctcataggaataccagcggacaaacacatagaggaaaagttgaatctttcctatattggacaatcttccttcagtcttgtttctgcatcaaaaagtctgggacacagagtg

SEQ ID NO: 510230 - DNA, 120 bp, Artificial Sequence
  ENSG00000164294_26 (sequence is synthesized)
cttgtttctgcatcaaaaagtctgggacacagagtgctacaggatgcctgggctaaggactgtaacagaaaaatatcaacatcagagcctggcacagtggctcacaccggtaatcccagc

SEQ ID NO: 510231 - DNA, 76 bp, Artificial Sequence
  ENSG00000164294_27 (sequence is synthesized)
cccatcttaaagaccctgtctcaaaaaagagagaaaaagaaaaagaaaaatatcaggcatcacatgaaagagtatt

SEQ ID NO: 510232 - DNA, 120 bp, Artificial Sequence
  ENSG00000164294_28 (sequence is synthesized)
aagaaaaagaaaaatatcaggcatcacatgaaagagtattcagctgtcgttcttgtgaaaaaggaaaaggacaaaatcaaatgcattttaactgtggtaactaattcactgacttgaagt

SEQ ID NO: 510233 - DNA, 120 bp, Artificial Sequence
  ENSG00000164294_29 (sequence is synthesized)
ttgctttgtttgttttctttggtgcgtagagaagaatacttcatactaactcctgatcatcttacagcagacataacaacagagtgttagagactggaataaatatgaatttggctgaaa

SEQ ID NO: 510234 - DNA, 120 bp, Artificial Sequence
  ENSG00000164294_30 (sequence is synthesized)
ggagcctcttgcagcttacccgctaaaatgttccgggcccagagcaaagcttttatgcctttgaagtgaaggatgcaaaaggaagaactgtttctctggaaaagtataaaggcaaagtaa

SEQ ID NO: 510235 - DNA, 120 bp, Artificial Sequence
  ENSG00000164294_31 (sequence is synthesized)
aattttttgctgttacatggtcataagttggaatttagtcttcagagtaatggtattagtacatcactttagttattacagttctgatagtttgcttctaaataataaattccgattatc

SEQ ID NO: 510236 - DNA, 120 bp, Artificial Sequence
  ENSG00000164294_32 (sequence is synthesized)
tcgttttctttaaaatgctttaattttgtgctgaattgacatgtaaagttgtttggaaaatacttatagttagtaatgtgaacatgatgacatttattaataaaagtattggttctataa

SEQ ID NO: 510237 - DNA, 120 bp, Artificial Sequence
  ENSG00000164296_0 (sequence is synthesized)
gcaacagcccagccctagcttgggagcggacccacacgaactgctcaaaggcttggagcgggtctagtaaggcgaacggactgcttccggccagaggtcccgggcggaggaggaagctgt

SEQ ID NO: 510238 - DNA, 120 bp, Artificial Sequence
  ENSG00000164296_1 (sequence is synthesized)
ggctgccggcggtgggacgccccggccgctcagcccccgggcactgctgtggggcgttcagctttccacacttggggcaaagcaagccgcgaggaggaaccagacagtcctgttagttgt

SEQ ID NO: 510239 - DNA, 120 bp, Artificial Sequence
  ENSG00000164296_2 (sequence is synthesized)
ggccagccctcattccctggaaatggcaaacaaggggaacaagaagcgtcggcagttctctctggaggagaaaatgaaagttgtgggagctgtagactcaggcaagaggaaaggtgatgt

SEQ ID NO: 510240 - DNA, 120 bp, Artificial Sequence
  ENSG00000164296_3 (sequence is synthesized)
ggcaaaagaatttggtatcactccctctactttatctacattcttaaaggatcgcaccaaatttgaagaaaaggtgcgggaggcatccgtgggaccccagcggaaaaggatgaggagcgc

SEQ ID NO: 510241 - DNA, 120 bp, Artificial Sequence
  ENSG00000164296_4 (sequence is synthesized)
tctttatgatgacattgataaggctgtttttgcttggtttcaagaaatccatgccaaaaacattcttgtgactggttctgtcattcggaaaaaagcactaaacttggccaacatgcttgg

SEQ ID NO: 510242 - DNA, 120 bp, Artificial Sequence
  ENSG00000164296_5 (sequence is synthesized)
ctatgacaattttcaagcaagtgtgggctggctgaacagatttagagatcgccacggaattgctttgaaagcagtctgtagagaagatagtgacaggttaatgaatggtctaggaataga

SEQ ID NO: 510243 - DNA, 120 bp, Artificial Sequence
  ENSG00000164296_6 (sequence is synthesized)
taagattaatgagtggcatgcaggggaaattataaaactgattgctgactacagcccagatgatatctttaatgctgatgagacaggagtgtttttccagttgcttccccagcacacact

SEQ ID NO: 510244 - DNA, 120 bp, Artificial Sequence
  ENSG00000164296_7 (sequence is synthesized)
tgctgctaaaggagaccactgtagagggggcaagaaagcaaagcagcggttgacagcactcttttgttgcaatgcctcggggactgaaaaaatgagaccattgattgttggtaggtcagc

SEQ ID NO: 510245 - DNA, 120 bp, Artificial Sequence
  ENSG00000164296_8 (sequence is synthesized)
cagcccacactgcctcaagaacattcattccctcccttgtgattaccgagccaaccagtgggcttggatgacaagggatctgtttaatgagtggctgatgcaagtggatgccaggatgaa

SEQ ID NO: 510246 - DNA, 120 bp, Artificial Sequence
  ENSG00000164296_9 (sequence is synthesized)
gagggcggaacgccggatcctcttgctcatagacaactgctctgctcataacatgcttccacacttggaaaggattcaggttgggtatctgccctccaactgtactgctgtcctgcagcc

SEQ ID NO: 510247 - DNA, 120 bp, Artificial Sequence
  ENSG00000164296_10 (sequence is synthesized)
actgaatcttggcataattcacaccatgaaagtactgtaccagagccaccttctaaaacagatcctcctcaagctcaacagcagtgaggatcaagaagaggtggacatcaagcaggccat

SEQ ID NO: 510248 - DNA, 120 bp, Artificial Sequence
  ENSG00000164296_11 (sequence is synthesized)
cgacatgattgctgcagcgtggtggtcagtcaagccatccacagtggtgaaatgttggcagaaggcaggcatcgtccctatggaatttgcagaatgtgacacagaatcagcagccagtga

SEQ ID NO: 510249 - DNA, 120 bp, Artificial Sequence
  ENSG00000164296_12 (sequence is synthesized)
accagacattgccattgaaaagttgtggcacacagtggctattgccacctgtgtcccaaatgaagtaaatttccaggactttgttactgcagatgatgatctcattatctctcaggacac

SEQ ID NO: 510250 - DNA, 120 bp, Artificial Sequence
  ENSG00000164296_13 (sequence is synthesized)
agacatcatccaggacatggtggctggcgaaaataccagtgaagcaggaagtgaagatgaaggggaggtatctttaccagagcaaccaaaagtcaccatcacagaagccatatcaagtgt

SEQ ID NO: 510251 - DNA, 120 bp, Artificial Sequence
  ENSG00000164296_14 (sequence is synthesized)
cagttcctttccacttgtgtagacattcctgatgccatttttggacaattaaatggcatagatgaatatttaatgaaaagagtgacacaaacccttattgattccaaaattacagatttc

SEQ ID NO: 510252 - DNA, 120 bp, Artificial Sequence
  ENSG00000164296_15 (sequence is synthesized)
ctccaaacaaaataatgcaggaatttatttcagaaaatgtagtttacaagaataaagatttctttagataggttgttgagccaatttaagtaaagcaatgttattgtgacaacattccag

SEQ ID NO: 510253 - DNA, 120 bp, Artificial Sequence
  ENSG00000164296_16 (sequence is synthesized)
tactctgaaatagccaggaaacttctttgaatggaatttgactaatatgtgtgttttcttttcttttgtttttggctgtctctggtccttgattcaagatgtattttgattcatccaagg

SEQ ID NO: 510254 - DNA, 120 bp, Artificial Sequence
  ENSG00000164296_17 (sequence is synthesized)
gtttccaaacttgtctgcaaattaggatcacttgagaatcctttaaaaattccaaagctcaggccatatcccaggcctattaaatcacaatctttggtgacgggtcacaggcattggtag

SEQ ID NO: 510255 - DNA, 120 bp, Artificial Sequence
  ENSG00000164296_18 (sequence is synthesized)
ttttgaagctctccaggtgattccaatgtgcagacaaatttgaaaactgaaccaaccacaggaacatcaagtacactgtgggcctgggtccagcttctttccagtaagtgtatctcaggg

SEQ ID NO: 510256 - DNA, 120 bp, Artificial Sequence
  ENSG00000164296_19 (sequence is synthesized)
gcttccaaatttagcttacatcagaatcacttggaaggcttgttaaaacccaaggctgctaggcccacccccagagtttgatacagtagacctcaggtgggacccaaaaatttgcatttc

SEQ ID NO: 510257 - DNA, 120 bp, Artificial Sequence
  ENSG00000164296_20 (sequence is synthesized)
taacacattctcagctgatgcagtccaggctccatgctttgaaaaccactggtctagctttagataggatattgagccaatttaaataaagcaatatactggtctagctgagttctagaa

SEQ ID NO: 510258 - DNA, 120 bp, Artificial Sequence
  ENSG00000164296_21 (sequence is synthesized)
cttctctctttagctggccatctgaatactcccccatcactaattgttaaaaaaagaatcaactgttcttactctagagctcttttttcctttctgctgatttgctggaagcactacaag

SEQ ID NO: 510259 - DNA, 120 bp, Artificial Sequence
  ENSG00000164296_22 (sequence is synthesized)
acttctgtttgttcgttcgtttgtttgtttgtttgtttttaaagatggggtcttgttatattgcctaggctggaatgcagtggttattcacaggcatgattataacacactactctctct

SEQ ID NO: 510260 - DNA, 120 bp, Artificial Sequence
  ENSG00000164296_23 (sequence is synthesized)
aactcctggcctcaagccatcctcccaaatagatgggactactgatgcacactgccatgctggccttacgaaatgttttaataggcatttcactaatagggatctggagtacaaggaaat

SEQ ID NO: 510261 - DNA, 120 bp, Artificial Sequence
  ENSG00000164296_24 (sequence is synthesized)
catgcctgtaatcccagcacattgggaagatcacttgaggcaaggagtttgagaccagactggccaacacagcgagacccccatctctaaaaaaaaaaaaattaataagacatggataca

SEQ ID NO: 510262 - DNA, 120 bp, Artificial Sequence
  ENSG00000164296_25 (sequence is synthesized)
ctctaaaaaaaaaaaaattaataagacatggatacaaccagggagggaggttataataatagagcatcctgttaatcagaatcatgggggagaacatacagcccagcgtgcctctcactt

SEQ ID NO: 510263 - DNA, 120 bp, Artificial Sequence
  ENSG00000164296_26 (sequence is synthesized)
tccagaaagggtgagaggatcattagagagttcattagagagtatttattcctaataagtcagataaatgtcagtttcatttttagaagtttcacacaatacctgctaatggtgtgatgt

SEQ ID NO: 510264 - DNA, 120 bp, Artificial Sequence
  ENSG00000164296_27 (sequence is synthesized)
catttttccccctgcttcaggttaattttttggatatttcagaaacccatagcaattcagtgatttttctttttgtagtagctcagtcaaaacaggtaacagcagattaatcatagaaaa

SEQ ID NO: 510265 - DNA, 120 bp, Artificial Sequence
  ENSG00000164296_28 (sequence is synthesized)
tgttgcttccacattaacaaaacaatcactgaaaaacagcagatgtttaaatagattattttatagcttattttggatattttttcttttaataaactaatatgatcatttgaattaaaa

SEQ ID NO: 510266 - DNA, 120 bp, Artificial Sequence
  ENSG00000164296_29 (sequence is synthesized)
gccacgtcgggcgctgggaagcctacaataccaccctctcctcagcacgacgttcaaggcctgacctcagcctgtctcagtctttccctctcattcaggatcgggttcatacgtagtgcc

SEQ ID NO: 510267 - DNA, 120 bp, Artificial Sequence
  ENSG00000164296_30 (sequence is synthesized)
gcatcaagtagcgccttcatcactccagtgatctgccctcaatccgtctctcccactggcccacgaatagtgatggtagtgagttcctggagtgactcaagctgagctgaatgaccgtat

SEQ ID NO: 510268 - DNA, 120 bp, Artificial Sequence
  ENSG00000164296_31 (sequence is synthesized)
ggagagcttccgtaaatcaaatagggattggattggattgtcctttctctccagtgtcacaagttgtccacatttgtacaagttcccgcacaaccctcactgtattccagtctgcctact

SEQ ID NO: 510269 - DNA, 120 bp, Artificial Sequence
  ENSG00000164296_32 (sequence is synthesized)
tctctgcatctaccgccatcaccaaccttctagccaccatcatctcctgcctggactgatgtagttctccccacatcccctctacaatccattctccacgaagcagtcagattgatcatt

SEQ ID NO: 510270 - DNA, 120 bp, Artificial Sequence
  ENSG00000164299_0 (sequence is synthesized)
atggagccccagccttggtcccctttcccacccttcctccccacaaggctgtctgagatgccaccttccacctaaacatcatctcccaaattttaatccttaactttggtctctgacttc

SEQ ID NO: 510271 - DNA, 120 bp, Artificial Sequence
  ENSG00000164299_1 (sequence is synthesized)
tgcttgattccacagtctccacccacatttgcacaaaggaccatcacctgtccttcctggaatctctaaagttttctgctttccttctgtcctgatggccagctctgctaagtcagctga

SEQ ID NO: 510272 - DNA, 120 bp, Artificial Sequence
  ENSG00000164299_2 (sequence is synthesized)
gatgcccaccatctccaaaaccgttaaccctactcctgatcctcatcaagaatatctggaccctaggattaccattgccttattcgaaattggatcacattccccttcctcctggggctc

SEQ ID NO: 510273 - DNA, 120 bp, Artificial Sequence
  ENSG00000164299_3 (sequence is synthesized)
tctccctttcctaaagaatagcagccatcaagttacagaacaacagactgcacagaagtttaacaatctcttaaaagaaattaaagatattcttaaaaatatggcaggttttgaagagaa

SEQ ID NO: 510274 - DNA, 120 bp, Artificial Sequence
  ENSG00000164299_4 (sequence is synthesized)
gatcacagaagcaaaagaactttttgaggaaaccaatattactgaggatgtgtcagcccacaaagaaaatatcagaggacttgacaaaatcaatgaaatgttatcaacaaacctgcctgt

SEQ ID NO: 510275 - DNA, 120 bp, Artificial Sequence
  ENSG00000164299_5 (sequence is synthesized)
tagtttagccccagagaaagaagacaatgaaaagaaacaggagatgatattggaaaccaatattactgaggatgtgtcagcccacaaagaaaatatcagaggacttgacaaaatcaatga

SEQ ID NO: 510276 - DNA, 120 bp, Artificial Sequence
  ENSG00000164299_6 (sequence is synthesized)
aatgttatcaacaaacctgcctgttagtttagccccagagaaagaagacaatgaaaagaaacagcagatgataatggaaaaccagaactctgagaacaccgcacaagtttttgcaagaga

SEQ ID NO: 510277 - DNA, 120 bp, Artificial Sequence
  ENSG00000164299_7 (sequence is synthesized)
ctcaacaaagtcaggaaaaagcaaaaaacagacttaatgttcaagaagaaactatgaaaattaggaacaacatggagcagttactacaggaagcagaacactggagtaaacaacatactg

SEQ ID NO: 510278 - DNA, 120 bp, Artificial Sequence
  ENSG00000164299_8 (sequence is synthesized)
agctcagtaaactgataaaatcctatcagaaatctcagaaagacataagtgaaactcttggaaataatggagtcggtttccaaacccagccaaataatgaagtgtcggctaagcatgagc

SEQ ID NO: 510279 - DNA, 120 bp, Artificial Sequence
  ENSG00000164299_9 (sequence is synthesized)
tggaggaacaggtgaagaaactgagccatgacacctattcattgcagttgatggcagctttgctagagaatgaatgccaaatcttacagcagagagtagagattctcaaggaactccatc

SEQ ID NO: 510280 - DNA, 120 bp, Artificial Sequence
  ENSG00000164299_10 (sequence is synthesized)
atcagaaacagggaactctgcaagagaagccaattcagataaactataaacaggacaagaaaaatcagaagccatcagaagcaaagaaagtagaaatgtataagcagaacaagcaagcaa

SEQ ID NO: 510281 - DNA, 120 bp, Artificial Sequence
  ENSG00000164299_11 (sequence is synthesized)
tgaagggtacattttggaaaaaagacagatcctgtagaagcctggatgtttgtcttaataagaaagcttgcaatacccagttcaatattcatgttgcaagaaaagctcttaggggaaaaa

SEQ ID NO: 510282 - DNA, 120 bp, Artificial Sequence
  ENSG00000164299_12 (sequence is synthesized)
tgaggtcagctagcagcctaagatagaaaataccaaaagcagatgaaaaggtgaatccttaaaaaactacatctgttacctccaacttgtcagtcatgatcaatcatcaaaccttgggca

SEQ ID NO: 510283 - DNA, 120 bp, Artificial Sequence
  ENSG00000164299_13 (sequence is synthesized)
gatctgctggttcaaccaagaaagagctatagaataaggagattgacacttatattactcattacttcagcagttatgtaagtctggtctttaatgaccattgtgtctacatcaagttca

SEQ ID NO: 510284 - DNA, 120 bp, Artificial Sequence
  ENSG00000164299_14 (sequence is synthesized)
taacttttcacctttacaatctgcttgttttttttgtaattattagatagacagcctagagtgagaagttaaaggtccaattaagtaaagatctaaataaaaaccagaatacaagggaaa

SEQ ID NO: 510285 - DNA, 120 bp, Artificial Sequence
  ENSG00000164300_0 (sequence is synthesized)
tcgccgaggctgatcttcgttcaagtgtgagctgcggctgagcccagcgctcgaggcgcgaggcagccaggagggcccgtgcggcgcggggagccagcgagcgcgccttcggcattggcc

SEQ ID NO: 510286 - DNA, 120 bp, Artificial Sequence
  ENSG00000164300_1 (sequence is synthesized)
gccgcgatgtcagctcagtgctgtgcgggccagctggcctgctgctgtgggtctgcaggctgctctctctgctgtgattgctgccccaggattcggcagtccctcagcacccgcttcatg

SEQ ID NO: 510287 - DNA, 120 bp, Artificial Sequence
  ENSG00000164300_2 (sequence is synthesized)
tacgccctctacttcattctggtcgtcgtcctctgctgcatcatgatgtcaacaaccgtggctcacaagatgaaagagcacattcctttttttgaagatatgtgtaaaggcattaaagct

SEQ ID NO: 510288 - DNA, 120 bp, Artificial Sequence
  ENSG00000164300_3 (sequence is synthesized)
ggtgacacctgtgagaagctggtgggatattctgccgtgtatagagtctgttttggaatggcttgtttcttctttatcttctgtctactgaccttgaaaatcaacaacagcaaaagttgt

SEQ ID NO: 510289 - DNA, 120 bp, Artificial Sequence
  ENSG00000164300_4 (sequence is synthesized)
agagctcatattcacaatggcttttggttctttaaacttctgctgttgggggccatgtgctcaggagctttcttcattccagatcaggacacctttctgaacgcctggcgctatgtggga

SEQ ID NO: 510290 - DNA, 120 bp, Artificial Sequence
  ENSG00000164300_5 (sequence is synthesized)
gccgtcggaggcttcctcttcattggcatccagctcctcctgctcgtggagtttgcacataagtggaacaagaactggacagcaggcacagccagtaacaagctgtggtacgcctccctg

SEQ ID NO: 510291 - DNA, 120 bp, Artificial Sequence
  ENSG00000164300_6 (sequence is synthesized)
gccctggtgacgctcatcatgtattccattgccactggaggcttggttttgatggcagtgttttatacacagaaagacagctgcatggaaaacaaaattctgctgggagtaaatggaggc

SEQ ID NO: 510292 - DNA, 120 bp, Artificial Sequence
  ENSG00000164300_7 (sequence is synthesized)
ctgtgcctgcttatatcattggtagccatctcaccctgggtccaaaatcgacagccacactcggggctcttacaatcaggggtcataagctgctatgtcacctacctcaccttctcagct

SEQ ID NO: 510293 - DNA, 120 bp, Artificial Sequence
  ENSG00000164300_8 (sequence is synthesized)
ctgtccagcaaacctgcagaagtagttctagatgaacatgggaaaaatgttacaatctgtgtgcctgactttggtcaagacctgtacagagatgaaaacttggtgactatactggggacc

SEQ ID NO: 510294 - DNA, 120 bp, Artificial Sequence
  ENSG00000164300_9 (sequence is synthesized)
agcctcttaatcggatgtatcttgtattcatgtttgacatcaacaacaagatcgagttctgacgctctgcaggggcgatacgcagctcctgaattggagatagctcgctgttgtttttgc

SEQ ID NO: 510295 - DNA, 120 bp, Artificial Sequence
  ENSG00000164300_10 (sequence is synthesized)
ttcagtcctggtggagaggacactgaagagcagcagccggggaaggagggaccacgggtcatttatgacgagaagaaaggcaccgtctacatctactcctacttccacttcgtgttcttc

SEQ ID NO: 510296 - DNA, 120 bp, Artificial Sequence
  ENSG00000164300_11 (sequence is synthesized)
ctagcttccctgtatgtgatgatgaccgtcaccaactggttcaactacgaaagtgccaacatcgagagcttcttcagcgggagctggtccatcttctgggtcaagatggcctcctgctgg

SEQ ID NO: 510297 - DNA, 120 bp, Artificial Sequence
  ENSG00000164300_12 (sequence is synthesized)
atatgcgtgctgttgtacctgtgtacgctggtcgctcccctctgctgccccacccgggagttctctgtgtgatgatatcggcggtcccctgggctttgtgggcctacagcctggaaagtg

SEQ ID NO: 510298 - DNA, 120 bp, Artificial Sequence
  ENSG00000164300_13 (sequence is synthesized)
ccatcttttgaacagtgtccccggggcagggactggcgccctgtgcctgagtgggtctgaaaaagctttgagagagaaaaaaaaaaatctcctgattagctttttacttttgaaattcaa

SEQ ID NO: 510299 - DNA, 120 bp, Artificial Sequence
  ENSG00000164300_14 (sequence is synthesized)
aaagaaactaccagtttgtcccaaaggaattgaaattttcaaccaaactgatcatggttgaaatatcttacccctaggaactggataccagttatgttgacttccttctgcatgtttttg

SEQ ID NO: 510300 - DNA, 120 bp, Artificial Sequence
  ENSG00000164300_15 (sequence is synthesized)
ccaaaacagaatttggggcacagcatcttttcacagggataaaaatatcttgtggggccagtcattctcatcctcggaatagaaaaacatgccaaaatcttgagtccccagcgcctaaca

SEQ ID NO: 510301 - DNA, 120 bp, Artificial Sequence
  ENSG00000164300_16 (sequence is synthesized)
gaatccagacccctctcactcacttccgcctcttagagccttgtccccagggggctttgaggacaggactcagcctgcagggcccctggtatttatagggtccaagaggaggcacctgct

SEQ ID NO: 510302 - DNA, 120 bp, Artificial Sequence
  ENSG00000164300_17 (sequence is synthesized)
tttcaactgcaccctcagtgctgcctcttcacggcccctaaacgtttccctttgaggttgtgatgctgggaatcacagacttcactctctgcctgcacccttccccgaggtctcatcttt

SEQ ID NO: 510303 - DNA, 120 bp, Artificial Sequence
  ENSG00000164300_18 (sequence is synthesized)
tctgggtcccacatctttgtaataatgtgaaaaagcacaatttgtctgatcaccccccaggtggttccccaccttattatcactacctgatccgagttactgcaataagtacggcgctta

SEQ ID NO: 510304 - DNA, 120 bp, Artificial Sequence
  ENSG00000164300_19 (sequence is synthesized)
tttatggtgttattcacatgattatagaacaagattcatgttttctctgcctaagcaatggagggctatcattcttacttgtttgtgctgttgataatgataatacttttaggaccttaa

SEQ ID NO: 510305 - DNA, 120 bp, Artificial Sequence
  ENSG00000164300_20 (sequence is synthesized)
ctgaaaagctgcttcgtgttgaagcctgctgcatgcactgctctttcagttgttgaggtcagcccctcagttttttctccaccttgaggcctttgaaactgtaaaagcggaagtcgtttt

SEQ ID NO: 510306 - DNA, 120 bp, Artificial Sequence
  ENSG00000164300_21 (sequence is synthesized)
gtgttctggatctgtaacgtgaccataccgttcaggttcatgctggcatccttggagtaggtttgctaatgtgagaatttctgaggtgaggatctcagacacactgaccagaagaagctt

SEQ ID NO: 510307 - DNA, 86 bp, Artificial Sequence
  ENSG00000164300_22 (sequence is synthesized)
ctgaggtgaggatctcagacacactgaccagaagaagcttgttaggcaatgtgtggaagtggccgaatatacttaaaaagaggtgc

SEQ ID NO: 510308 - DNA, 69 bp, Artificial Sequence
  ENSG00000164300_23 (sequence is synthesized)
accctgtctctattaaaaatagaaaaattagccgggcatggtagcgtgtgcctgtaatgccagctactc

SEQ ID NO: 510309 - DNA, 120 bp, Artificial Sequence
  ENSG00000164300_24 (sequence is synthesized)
gctgcacaggaatttccaaaatacgtacttgcaaagtaatacagaaacgtgactttcggcagctacccaagatgatgcctattttcagtgttgatgtattcaggcagggaaaaggtttac

SEQ ID NO: 510310 - DNA, 120 bp, Artificial Sequence
  ENSG00000164300_25 (sequence is synthesized)
ttggtggaaactcctgttagaatttcattcggggtggaaagaatcttctcgagctctctgtaagtgaggatctaagaataaaaggctcagcctagtcatttttttctgtgccctactgta

SEQ ID NO: 510311 - DNA, 120 bp, Artificial Sequence
  ENSG00000164300_26 (sequence is synthesized)
ttcctttgcccttctcccaagaaaacccatggggaaacaaattacaggggatgaattcctttagaactttccctacttagagtgtttgagattcagtttcaaaaggcactccatctgtgt

SEQ ID NO: 510312 - DNA, 120 bp, Artificial Sequence
  ENSG00000164300_27 (sequence is synthesized)
gtgtggtttagagagccttgttttgtaaattccattaaatttccttttttagggcaggagctctgtactcagcagttaaaagattcatctggagtcgcaaaatgaaaagccgtgttctaa

SEQ ID NO: 510313 - DNA, 120 bp, Artificial Sequence
  ENSG00000164300_28 (sequence is synthesized)
cctgaggaatcagttaggggacaggagttccgtgggccaggaatgggctcagggagtggggctgcgtgtcacacacagtagctgtgttgcagtggcctagggccttgggggttgtcttta

SEQ ID NO: 510314 - DNA, 120 bp, Artificial Sequence
  ENSG00000164300_29 (sequence is synthesized)
ggaaacaccctgaggggaagcaggtaaagagcctgggcagtattgtgactagtttcattgttttcctcctgctgaggtctagcagagcccttgctttgtcctctcggctgggtctggctg

SEQ ID NO: 510315 - DNA, 120 bp, Artificial Sequence
  ENSG00000164300_30 (sequence is synthesized)
ccagctggtgtgatttgagaaactgaccttacgcgcagtcaaggtccagctgacaaggccttgtattccttggctggccgtgattggccctttcctctgcagaaagcagcttagggaagc

SEQ ID NO: 510316 - DNA, 120 bp, Artificial Sequence
  ENSG00000164300_31 (sequence is synthesized)
ccaagcaagggagtgtggccggtagaaggccctcgtcgcttccttctggagccagcccagccacacaacgttttccagatgcgtgagtctggtttgtgacatcccgttcccttctgccgg

SEQ ID NO: 510317 - DNA, 120 bp, Artificial Sequence
  ENSG00000164300_32 (sequence is synthesized)
ttggtctgatgcaagaggaagagttacagttgctctgaattttattctcagctgaaaatgttagcacgtgtatctggatgaacaaaacagatgtggatgtatctgaggattgagggacta

SEQ ID NO: 510318 - DNA, 120 bp, Artificial Sequence
  ENSG00000164300_33 (sequence is synthesized)
tcaatgcagagttaatgttaatggttattaattgtgatatacaatactcaggtgaggagtcaacattcctggatttaaagaatctacagttttgtgcaattgtgatttgagaaactggaa

SEQ ID NO: 510319 - DNA, 120 bp, Artificial Sequence
  ENSG00000164300_34 (sequence is synthesized)
acattgtgccaatggctttgagttcctataacaacggtgttaatttgattaactcactgatatcttttaaaaataatagacatttgcttcctacacctttttgtacatgacctaaagagt

SEQ ID NO: 510320 - DNA, 120 bp, Artificial Sequence
  ENSG00000164300_35 (sequence is synthesized)
atattcccagaagctgctggtcagacacatttagggatgacagttgaagaggacttttttaaagctgcatgtgaatatttcctctgtgtgatttgtctgatgtagaaaagttttcccctc

SEQ ID NO: 510321 - DNA, 120 bp, Artificial Sequence
  ENSG00000164300_36 (sequence is synthesized)
atttttatgagtaaaaacactaagtgggtggcaggggggtgggggttcttatgggagtgtcataccgcggcatgttacctgactggagactagagactatttccattataagccttcaga

SEQ ID NO: 510322 - DNA, 120 bp, Artificial Sequence
  ENSG00000164300_37 (sequence is synthesized)
aacccaaccacgtctttactgtgtctagctttttaaatactgattggttagttttatttttgcccacagtttcttgggcaaaaaggttcttcattttgtctgaaaaagaaattatttgcc

SEQ ID NO: 510323 - DNA, 120 bp, Artificial Sequence
  ENSG00000164300_38 (sequence is synthesized)
agaggtatttggagcctctttgaaggggagatagagtgggggtgggttgtggggagggtggagttattggggttttggggttctgtttccatacaacattgtttatttccgattcctcag

SEQ ID NO: 510324 - DNA, 120 bp, Artificial Sequence
  ENSG00000164300_39 (sequence is synthesized)
cattgtttatttccgattcctcagaagatcctttattatgaataacctcagtgtaatgttaatttcctgtccccatgtcaaaattgtcaccctaagcctttttttttttttttttttttt

SEQ ID NO: 510325 - DNA, 120 bp, Artificial Sequence
  ENSG00000164300_40 (sequence is synthesized)
cagccacgctggagtgcagtgacatgatcttgactcatggcaggcttgacctcctgggctcaaggaccacctcccaagtagctgagaccacaggtttgccccatcacacctggccgattt

SEQ ID NO: 510326 - DNA, 80 bp, Artificial Sequence
  ENSG00000164300_41 (sequence is synthesized)
gctgagaccacaggtttgccccatcacacctggccgatttttatttttttgtagagatgggtgcccgccttggcttccca

SEQ ID NO: 510327 - DNA, 120 bp, Artificial Sequence
  ENSG00000164300_42 (sequence is synthesized)
accctctgcctttttaagatgatgtatttatttaatttttgccatcattggtgcttcaccttcctgcgaaggaaattccagagcctgtatttaagctacctaggcttttacactcccttt

SEQ ID NO: 510328 - DNA, 120 bp, Artificial Sequence
  ENSG00000164300_43 (sequence is synthesized)
attgcctttccaaatagtatctcatttggtgtactctagtgtcctatacctcttggaaacgaaagagggcccaacctacaactaagaagggacaaaccttgaactaagtaagaccttaca

SEQ ID NO: 510329 - DNA, 120 bp, Artificial Sequence
  ENSG00000164300_44 (sequence is synthesized)
cacccagaaagaacactgggccctccttcttcagggacaatgcagtagccacttggcttgtggaatttactgaaggctatttcctgtaacttgctagttaacttagttttgtatttcagg

SEQ ID NO: 510330 - DNA, 120 bp, Artificial Sequence
  ENSG00000164300_45 (sequence is synthesized)
cagaggtgcgctctgtaatgttgggcctttgacttcacagtactggagagctgttcacacagatgtttagacctttctctctctctctcttttcttctttctcaacaactctttcacaga

SEQ ID NO: 510331 - DNA, 120 bp, Artificial Sequence
  ENSG00000164300_46 (sequence is synthesized)
ggcagtcattttgaaaggttgaaatatttggcctttaccaaagagctttttttttccttaagcaaaatcctttcagaaagaaacaaatggggaagggcagattaagaatgcatatgtccc

SEQ ID NO: 510332 - DNA, 120 bp, Artificial Sequence
  ENSG00000164300_47 (sequence is synthesized)
aatccacttctataggagtttaatcatattcacatgagtaaaatgatggaagaactctttaaggtaatcctttgggataaaggatcctgggaagttctctcaggtaaagaaagcttacag

SEQ ID NO: 510333 - DNA, 120 bp, Artificial Sequence
  ENSG00000164300_48 (sequence is synthesized)
cagatttgtaatatatgtctggagagctatttataagaaatttaagaggattgttttgttttcctttattaaagatttaagcctttttactttgcaaaaagaaaactacaaaagttttat

SEQ ID NO: 510334 - DNA, 120 bp, Artificial Sequence
  ENSG00000164300_49 (sequence is synthesized)
agatataactttgctaattttttaaacttttctgaaacgattagctgtagccaaattatgtggttacgttttgctacattagaatttgaaaatgcaatatgtgtggtaaatctactgttt

SEQ ID NO: 510335 - DNA, 120 bp, Artificial Sequence
  ENSG00000164300_50 (sequence is synthesized)
gaaatttataatggtctctgatatgattcgaattttggtaacttttgaaagttattttccccctttagtcatggatttctatttgttttttaatgttaatttttctagaaagcatctgaa

SEQ ID NO: 510336 - DNA, 120 bp, Artificial Sequence
  ENSG00000164300_51 (sequence is synthesized)
ttgactaggcttttcctatataaaaaactcaaaacttgttaactctgtactttaataaaatttaaaattaaaactgtgttgtttttttctcttctgctagatacatatataattaaagta

SEQ ID NO: 510337 - DNA, 120 bp, Artificial Sequence
  ENSG00000164300_52 (sequence is synthesized)
ctcaagttagttgttttgcagagatgttgccttcagatgttaatcaggtctctcaagtttcatggagtctatgctgatcctttaattgacaaataaaagatatatatctgtggtgtgcaa

SEQ ID NO: 510338 - DNA, 65 bp, Artificial Sequence
  ENSG00000164300_53 (sequence is synthesized)
cgtgttcttcctagcttccctgtatgtgatgatgaccgtcaccaactggttcactgagaaacctg

SEQ ID NO: 510339 - DNA, 120 bp, Artificial Sequence
  ENSG00000164300_54 (sequence is synthesized)
aggggatggaaacatctctggccccaactccgacaggaaagcctggttttagcattgaaaagatgattgaatacagcttgccttttctccagggaagagagacaagatggagtgccagag

SEQ ID NO: 510340 - DNA, 62 bp, Artificial Sequence
  ENSG00000164300_55 (sequence is synthesized)
aggcctacggctgagaaacctgaacggactccatttggctccttcatttgcaagacatcaag

SEQ ID NO: 510341 - DNA, 120 bp, Artificial Sequence
  ENSG00000164300_56 (sequence is synthesized)
atgatgtcttaaaacattatgtctcctaccagttactgcatcagtgtagaattagtacgtcttagccctgtaatgctggtttcactccttcctgcagagttagaaaaaacgaagtagctg

SEQ ID NO: 510342 - DNA, 64 bp, Artificial Sequence
  ENSG00000164300_57 (sequence is synthesized)
catgtgccaccactgagaaacctgaacggactccatttggctccttcatttgcaagacatcaag

SEQ ID NO: 510343 - DNA, 120 bp, Artificial Sequence
  ENSG00000164300_58 (sequence is synthesized)
gggtgacgaaataatctatatgacaaacccctgtggcaattttccccttacaacaaacctgcacatacacccctaaacctaaaataaaagttaaaaataaatgaataaataaataaataa

SEQ ID NO: 510344 - DNA, 120 bp, Artificial Sequence
  ENSG00000164300_59 (sequence is synthesized)
ccttaaagccattctcccagtgaatgctgagccccatagccttcctctttagccaagagcagttcttgtattctgtccccaaaagctttttgatcattggcaggtaagagctttttgccc

SEQ ID NO: 510345 - DNA, 120 bp, Artificial Sequence
  ENSG00000164300_60 (sequence is synthesized)
tgtcatagactgtagtatgtgatgaccttgtagaatccagaatacatcccctatgaaatctggtttaccacttactcccctccccaattaagctatgtggttttatcaacaactatggta

SEQ ID NO: 510346 - DNA, 120 bp, Artificial Sequence
  ENSG00000164300_61 (sequence is synthesized)
attttttttctgatcttgtgatttaagaactaatgttacaaacctcagggagactagttagtgtgttttaagtgtagccataggcttgataaagtattggtagataacttggcagaacct

SEQ ID NO: 510347 - DNA, 120 bp, Artificial Sequence
  ENSG00000164300_62 (sequence is synthesized)
gatgtctttgaagtagcaatgttcagttcagcgtgtaactctctcccccttaatatctttttagttttatctgagaaacatactacatttttttctcttttctttcctttaaaggtggat

SEQ ID NO: 510348 - DNA, 120 bp, Artificial Sequence
  ENSG00000164300_63 (sequence is synthesized)
gctcaagtttgaggactgtcatggggactatcaggttttttaggcatgtgctttctttttcttcaaattaaaacctgttgtctgtctcttgtcacttttcaggacagccacactcggggc

SEQ ID NO: 510349 - DNA, 120 bp, Artificial Sequence
  ENSG00000164300_64 (sequence is synthesized)
gactttaaaattacaggaaaagaattgaaataactttcagtagctgtgaggctgcaaccatttgaggaggggggaaaataaccacaagtaaaaaggcgaagagcgtgaactcatatttga

SEQ ID NO: 510350 - DNA, 120 bp, Artificial Sequence
  ENSG00000164300_65 (sequence is synthesized)
acttcgttcaccttacttgtttttatttggggtaaataaagcaaatatatggtatgtaaatatttgaacttcgtttaccttacttgtttttatttggggtaaataaagcaaatatatggc

SEQ ID NO: 510351 - DNA, 120 bp, Artificial Sequence
  ENSG00000164300_66 (sequence is synthesized)
atgttgcagcaccgttgcctaaccccctttaaaagatggtcgaatagtagtttgctatacctttactggagggcaggggagcacaaagtgaagaagagatagaatgtgccagcatgtcct

SEQ ID NO: 510352 - DNA, 120 bp, Artificial Sequence
  ENSG00000164300_67 (sequence is synthesized)
ttctgatccaaaggaaatagctttcttctgctgttgatggaaagagtacagagtgctgtgtgcgtggtcattctgtgcagacaagaaatgttcattctcttttctgctaaacccacaatg

SEQ ID NO: 510353 - DNA, 120 bp, Artificial Sequence
  ENSG00000164300_68 (sequence is synthesized)
ctgttgttcactcggcaaagcagctcctccaaaagtagatgtgatatatgagtgggctgtgtttcagatgcttgtggtgggggttattccacctttaaaaggtttaaaaggttgctagag

SEQ ID NO: 510354 - DNA, 120 bp, Artificial Sequence
  ENSG00000164300_69 (sequence is synthesized)
ggagaaaagtcaaggatagaaatggctagttaatctggatatatatttcgctgataactaagcttccctttaacagtaaccttttcacatttagcctttacttctgtgtttacattttgt

SEQ ID NO: 510355 - DNA, 120 bp, Artificial Sequence
  ENSG00000164300_70 (sequence is synthesized)
taatgttcagtataaaaattcaattccattgaattcagccataggcacattgtaaacttcctttttgctgaaacgaaatactcctggtggtgatagcttgtataaatataatgtctttct

SEQ ID NO: 510356 - DNA, 120 bp, Artificial Sequence
  ENSG00000164300_71 (sequence is synthesized)
gagcatgttggcattttctcttacctcctttaacaacttctactattagaaagggaccaacggggacacagaccttttagagtctatttgctcagggtcacacatcaagcaataaaatgc

SEQ ID NO: 510357 - DNA, 120 bp, Artificial Sequence
  ENSG00000164300_72 (sequence is synthesized)
ttgttgttttacaggtaggtgttaagatgatggtgacatacattcattcttggcctgtgtgacatagtgacagagtctccttgttgttgcagaatggactgtggtaacttctttctggcc

SEQ ID NO: 510358 - DNA, 120 bp, Artificial Sequence
  ENSG00000164300_73 (sequence is synthesized)
aatggactgtggtaacttctttctggcctttcaattttattaattcctaagttgttcgcagagtacctacaatataggaagcaggctgcgtggtgcagtggctcacgcctataatcccag

SEQ ID NO: 510359 - DNA, 120 bp, Artificial Sequence
  ENSG00000164300_74 (sequence is synthesized)
ggcaggaggatcacttgaacccaggaatttgagaccagcctagacaacatagcagaccctgtttctacgaaaaaaaaaaaaaatcaggcgtgatggcacgtgcctgtggtcccagctact

SEQ ID NO: 510360 - DNA, 120 bp, Artificial Sequence
  ENSG00000164300_75 (sequence is synthesized)
atgggaggatcacttgaacccaggtgtctaaggctgcagtgagctaggggtgtctccactccagcctaagcaaccgagtgagaccctgtcttttgaaaaaccaaccatgaagatatttga

SEQ ID NO: 510361 - DNA, 120 bp, Artificial Sequence
  ENSG00000164300_76 (sequence is synthesized)
cctgtcttttgaaaaaccaaccatgaagatatttgatagaataaaatcatgtttttgtgggttactgggtacccaatgaaaaaaaatatttgcccttggccaggcgcggtggctcacgct

SEQ ID NO: 510362 - DNA, 120 bp, Artificial Sequence
  ENSG00000164303_0 (sequence is synthesized)
agtctttgcaaggcgacagctgtgccagccgggctctggcaggctcctggcagcatggcagtgaagcttgggaccctcctgctggcccttgccctgggcctggcccagccagcctctgcc

SEQ ID NO: 510363 - DNA, 120 bp, Artificial Sequence
  ENSG00000164303_1 (sequence is synthesized)
cgccggaagctgctggtgtttctgctggatggttttcgctcagactacatcagtgatgaggcgctggagtcattgcctggtttcaaagagattgtgagcaggggagtaaaagtggattac

SEQ ID NO: 510364 - DNA, 120 bp, Artificial Sequence
  ENSG00000164303_2 (sequence is synthesized)
ttgactccagacttccctagtctctcgtatcccaattattataccctaatgactggccgccattgtgaagtccatcagatgatcgggaactacatgtgggaccccaccaccaacaagtcc

SEQ ID NO: 510365 - DNA, 120 bp, Artificial Sequence
  ENSG00000164303_3 (sequence is synthesized)
tttgacattggcgtcaacaaagacagcctaatgcctctctggtggaatggatcagaacctctgtgggtcactctgaccaaggccaaaaggaaggtctacatgtactactggccaggctgt

SEQ ID NO: 510366 - DNA, 120 bp, Artificial Sequence
  ENSG00000164303_4 (sequence is synthesized)
gaggttgagattctgggtgtcagacccacctactgcctagaatataaaaatgtcccaacggatatcaattttgccaatgcagtcagcgatgctcttgactccttcaagagtggccgggcc

SEQ ID NO: 510367 - DNA, 120 bp, Artificial Sequence
  ENSG00000164303_5 (sequence is synthesized)
gacctggcagccatataccatgagcgcattgacgtggaaggccaccactacgggcctgcatctccgcagaggaaagatgccctcaaggctgtagacactgtcctgaagtacatgaccaag

SEQ ID NO: 510368 - DNA, 120 bp, Artificial Sequence
  ENSG00000164303_6 (sequence is synthesized)
tggatccaggagcggggcctgcaggaccgcctgaacgtcattattttctcggatcacggaatgaccgacattttctggatggacaaagtgattgagctgaataagtacatcagcctgaat

SEQ ID NO: 510369 - DNA, 120 bp, Artificial Sequence
  ENSG00000164303_7 (sequence is synthesized)
gacctgcagcaagtgaaggaccgcgggcctgttgtgagcctttggccggcccctgggaaacactctgagatatataacaaactgagcacagtggaacacatgactgtctacgagaaagaa

SEQ ID NO: 510370 - DNA, 120 bp, Artificial Sequence
  ENSG00000164303_8 (sequence is synthesized)
gccatcccaagcaggttctattacaagaaaggaaagtttgtctctcctttgactttagtggctgatgaaggctggttcataactgagaatcgagagatgcttccgttttggatgaacagc

SEQ ID NO: 510371 - DNA, 120 bp, Artificial Sequence
  ENSG00000164303_9 (sequence is synthesized)
accggcaggcgggaaggttggcagcgtggatggcacggctacgacaacgagctcatggacatgcggggcatcttcctggccttcggacctgatttcaaatccaacttcagagctgctcct

SEQ ID NO: 510372 - DNA, 120 bp, Artificial Sequence
  ENSG00000164303_10 (sequence is synthesized)
atcaggtcggtggacgtctacaatgtcatgtgcaatgtggtgggcatcaccccgctgcccaacaacggatcctggtccagggtgatgtgcatgctgaagggccgcgccagcactgccccg

SEQ ID NO: 510373 - DNA, 120 bp, Artificial Sequence
  ENSG00000164303_11 (sequence is synthesized)
cctgtctggcccagccactgtgccctggcactgattcttctcttcctgcttgcataactgatcatattgcttgtctcagaaaaaaacaccatcagcaaagtgggcctccaaagccagatg

SEQ ID NO: 510374 - DNA, 120 bp, Artificial Sequence
  ENSG00000164303_12 (sequence is synthesized)
attttcattttatgtgtgaataatagcttcattaacacaatcaagaccatgcacattgtaaatacattattcttggataattctatacataaaagttcctacttgttaaaaaagatacaa

SEQ ID NO: 510375 - DNA, 120 bp, Artificial Sequence
  ENSG00000164303_13 (sequence is synthesized)
accttgtttttccagaaggtaggaaaatcctagctttccatttgtgcagttatatgtcattttctcctttcttttcacgttactcaggatgaactctctgagcagggacctgctcctgca

SEQ ID NO: 510376 - DNA, 120 bp, Artificial Sequence
  ENSG00000164303_14 (sequence is synthesized)
gcaaccaaacttggagtggttattgcagacagacgtggctctgggcccctctctgtcccaccttgcacaaaggaccccctcagaccaggcccttgtctgtgccctgtccacacccaggag

SEQ ID NO: 510377 - DNA, 120 bp, Artificial Sequence
  ENSG00000164303_15 (sequence is synthesized)
ccatcctcagtgtctgtggccacaatcctgtactgttccttccatccctgataaaaggaggtctacatgaaagcaaaagctactgtctatttctgacccagctcatggaattttttcatc

SEQ ID NO: 510378 - DNA, 120 bp, Artificial Sequence
  ENSG00000164303_16 (sequence is synthesized)
agctccagaaaggacgtaacttagcatggatcaccaatcaatcaaaaaataaataaatcactaaggattggagaactcatagaacaaggtgaaagacatgagtgccctcccaaagtctga

SEQ ID NO: 510379 - DNA, 120 bp, Artificial Sequence
  ENSG00000164303_17 (sequence is synthesized)
gtgcacgaaaatttctctcttgccttgaggagcagaaaagcttctgatggacatgggcttctgtgagacttatcacacatagtgtatcgtggcatgaagcccggcacatagcaggccctg

SEQ ID NO: 510380 - DNA, 120 bp, Artificial Sequence
  ENSG00000164303_18 (sequence is synthesized)
catattgatggacaaatggatggcctgcctgccttccctgtccgttcacctgtgcaaaggcttcctcagacatgccactctgtggctcccaatatagggtgcagacaagagcaatccctg

SEQ ID NO: 510381 - DNA, 120 bp, Artificial Sequence
  ENSG00000164303_19 (sequence is synthesized)
acatgacattatagcctgggaaagggctggctcactgatgagaatgtggaggcatcagcaaggatctcggtgggttgctcagagaggtgatgcactaagccttaatcctggacaccagta

SEQ ID NO: 510382 - DNA, 120 bp, Artificial Sequence
  ENSG00000164303_20 (sequence is synthesized)
cccctgcagcatggcttgctcaacaacagtctttgagtggcatagaattccaaagaaaatggtgctgggtggagaatggagagagcatgatggagcagagtcccagtcactgaccaacta

SEQ ID NO: 510383 - DNA, 120 bp, Artificial Sequence
  ENSG00000164303_21 (sequence is synthesized)
actggtcgtttgattaggaaacagtttggccaaagtaccacctttgagacctaagttcttttgatacctttgagaagagccactgagcctgagttgaaatatttttagcttagtcatctg

SEQ ID NO: 510384 - DNA, 120 bp, Artificial Sequence
  ENSG00000164303_22 (sequence is synthesized)
tgtttgctataggagaaattgtaacacaagaaataactcctttttacatgatcatttatatctatatacatatatatacttgcatacactatcactgcattaaaaaatgagtttgggctg

SEQ ID NO: 510385 - DNA, 120 bp, Artificial Sequence
  ENSG00000164303_23 (sequence is synthesized)
ggctcacacctataatcccaacactttcggaggccaaggagggacaaacgaacccttgaggccaggagttccagactaacttgggcaacacagggcgacccccatctctacaaaacataa

SEQ ID NO: 510386 - DNA, 120 bp, Artificial Sequence
  ENSG00000164303_24 (sequence is synthesized)
cctgggcaacagagcaagaccccatcctccaccccccccaaaaaatagaaagaaaaaaaaagtttgcactaattgaggtacatctgcaagtgagactttttgtcaggaaaaggcaatata

SEQ ID NO: 510387 - DNA, 120 bp, Artificial Sequence
  ENSG00000164303_25 (sequence is synthesized)
tttttgtcaggaaaaggcaatatatcaggtctcctcaggacgatggaggccttatatggtgtgttaccttgaaaactgaatatcaacgttcaccttgattcaggaaagctgggtgctgtc

SEQ ID NO: 510388 - DNA, 120 bp, Artificial Sequence
  ENSG00000164303_26 (sequence is synthesized)
tccatgccatgaatcatgagagcaaaggatcactgcttaaaaatactgaatttaccttcacaaaagatttctaaagatttatgtaatgtgttttaaaagcgccagtaaaccatcggatca

SEQ ID NO: 510389 - DNA, 120 bp, Artificial Sequence
  ENSG00000164303_27 (sequence is synthesized)
attggaaagaaggcaactcttcagcctttgttatctagctgaaaacaaatgacaactttcaaaacattggcagtagttgttgaaaaagacgtctattgttcaaagtttctttctccttaa

SEQ ID NO: 510390 - DNA, 120 bp, Artificial Sequence
  ENSG00000164303_28 (sequence is synthesized)
aggacggtgttccaatgaattcagtagagcccactttcctccactgtggaggaagaatccctaagagatactcaaatgattaaattaaaattggatcatcaaactcaagagaggcataaa

SEQ ID NO: 510391 - DNA, 120 bp, Artificial Sequence
  ENSG00000164303_29 (sequence is synthesized)
cttagacacagtcttgcatttttgtctttcctgaactcttctgccattttcctccttcactcgtcctgaaaatctgcaagttacataataaaactttagatatttgtctgacaaagtgta

SEQ ID NO: 510392 - DNA, 120 bp, Artificial Sequence
  ENSG00000164303_30 (sequence is synthesized)
attactcaactgaataaatgactgagaacaagttacaaaaggaatcatgaatcctggtaaacaataaagaagattcagacactgagggaaaaaaataaagctttttacttaaataatgca

SEQ ID NO: 510393 - DNA, 120 bp, Artificial Sequence
  ENSG00000164303_31 (sequence is synthesized)
ctaggttagacggttcaagacctggagactggctttgagcaaccctaggattaccttggcttgaattccatccaatacgtctctttcttcatatattggagaggagattaggacccagac

SEQ ID NO: 510394 - DNA, 120 bp, Artificial Sequence
  ENSG00000164303_32 (sequence is synthesized)
gggcacagagggaagaccacatatagacacagggggaaggcggctgcctgcagaccaaggagagaggcctcagaagaaatcaaccctgatgacatcttgatctcaaactcccagcctcca

SEQ ID NO: 510395 - DNA, 120 bp, Artificial Sequence
  ENSG00000164303_33 (sequence is synthesized)
actggtaaaatgatacggagaagaaaaagcttgtgtcgttcaggttccccatttgtgatttgcagcatctacaaaagaccaaccagcaaaaactccacaaaacaaacaaaaacctcggct

SEQ ID NO: 510396 - DNA, 120 bp, Artificial Sequence
  ENSG00000164303_34 (sequence is synthesized)
gaacctgagcctctatccgtgcgataatagaatgtgcagccctctctctgctcacagagttggattcccagtttctggtttgtttttcagctataacctttgtaaaggcagcgagaggct

SEQ ID NO: 510397 - DNA, 120 bp, Artificial Sequence
  ENSG00000164303_35 (sequence is synthesized)
ctcagaaagaatttagcaaactatccagggaggctgctaagaatgcactgttattgctggttatgcgggactcagctatgcactctgagcacagagagagctctgctaattatgttaaca

SEQ ID NO: 510398 - DNA, 120 bp, Artificial Sequence
  ENSG00000164304_0 (sequence is synthesized)
tggatgttctgtgctctcaggaaggcgtgttgagtagccggcacggcgaggcccgtgctggccgtttcttcccggagttttcgtttctgtaccccactttgtgtttactgcggcaggagg

SEQ ID NO: 510399 - DNA, 120 bp, Artificial Sequence
  ENSG00000164304_1 (sequence is synthesized)
cgccagctagcccacaggctgttcggcctagggggtcgtaccttcctaacttcaccactctctgggaagacaccgcacccacagtagggtcgctcgggcctcgcgggctgcacctgtctc

SEQ ID NO: 510400 - DNA, 120 bp, Artificial Sequence
  ENSG00000164304_2 (sequence is synthesized)
tgcggagttcccccggcgcgggcggacgtcacacaggggcgttccagcactccgggagcccgattgcgagtttgtgagagtccttggtggaggaggttggaaagcgttctccctcccaca

SEQ ID NO: 510401 - DNA, 120 bp, Artificial Sequence
  ENSG00000164304_3 (sequence is synthesized)
aaacccggtgcagagggagggagagccaggtccgtagcgtgggtccaagaaactatggatcctggaagtgagcacacttttgtgtcttaaaaagtttggtgtctcgttttgaggtgaaaa

SEQ ID NO: 510402 - DNA, 120 bp, Artificial Sequence
  ENSG00000164304_4 (sequence is synthesized)
atgaatgagataagtgctttttaaaaagaacgaaataaagaattttgaaagggaaaatgagtatgaatccacactttgtgaagatgcttatggcacactagacaatttgttaaatgataa

SEQ ID NO: 510403 - DNA, 120 bp, Artificial Sequence
  ENSG00000164304_5 (sequence is synthesized)
caacattgaaaattactcaacgaatgcactaattcagccagttgacaccatcagcatatcttccttgagacaatttgaaaccgtttgcaaatttcactgggtagaagcatttgatgatga

SEQ ID NO: 510404 - DNA, 120 bp, Artificial Sequence
  ENSG00000164304_6 (sequence is synthesized)
aatgacagagaagccagaatttcaaagtcaagtgtataattatgcaaaagacaacaatataaagcaagactcatttaaggaagaaaatccaatggaaactagtgtttctgcaaatacaga

SEQ ID NO: 510405 - DNA, 120 bp, Artificial Sequence
  ENSG00000164304_7 (sequence is synthesized)
ccaacttggtaacgagtattttagacagcctcctcctagaagcccgcctctaatccactgcagtggagagatgctgaaatttacagaaaagtcactggctaaaagtattgccaaggaatc

SEQ ID NO: 510406 - DNA, 120 bp, Artificial Sequence
  ENSG00000164304_8 (sequence is synthesized)
tgccctcaaccctagccaacctccaagcttcttatgtaagactgcagttccttcaaaagaaatacagaattatggggagattcctgagatgtcagtcagttatgaaaaggaagtcacagc

SEQ ID NO: 510407 - DNA, 120 bp, Artificial Sequence
  ENSG00000164304_9 (sequence is synthesized)
agagggtgtggagaggccagaaattgtctcaacttggtcttcggcaggcatttcctggaggagtgaagcatgtcgggagaactgtgagatgcctgactgggagcaaagtgctgaaagctt

SEQ ID NO: 510408 - DNA, 120 bp, Artificial Sequence
  ENSG00000164304_10 (sequence is synthesized)
acaacctgttcaagaggacatggctttaaatgaagtcttgcagaaattaaaacatactaacagaaagcaggaagtgcgaatccaagaactccagtgtagtaacctgtatttagagaagag

SEQ ID NO: 510409 - DNA, 120 bp, Artificial Sequence
  ENSG00000164304_11 (sequence is synthesized)
ctaaaggagaatgttgaagaattaattgaagacaaatacaaaataatcctagagaagaatgatactaaaaagacattgcagaatttggaagaggttttagctaacacgcaaaaacatctt

SEQ ID NO: 510410 - DNA, 120 bp, Artificial Sequence
  ENSG00000164304_12 (sequence is synthesized)
caggaatccaggaatgacaaggaaatgttacagcttcaatttaagaagatcaaggctaattatgtgtgtttacaggaaaggtacatgactgaaatgcaacaaaaaaataaatctgtaagt

SEQ ID NO: 510411 - DNA, 120 bp, Artificial Sequence
  ENSG00000164304_13 (sequence is synthesized)
cagtatttagagatggacaaaaccttaagcaagaaagaagaagaggtagagagactacaacaactcaaaaaagaactggaaaaggccacagcttctgctttggacttgttgaaacgggaa

SEQ ID NO: 510412 - DNA, 120 bp, Artificial Sequence
  ENSG00000164304_14 (sequence is synthesized)
aaagaggcccaagaacaagagttcttgtctttacaggaggaattccagaaacttgaaaaggaaaacctggaagaaagacagaaactgaaatctagacttgagaaattgctcactcaagtt

SEQ ID NO: 510413 - DNA, 120 bp, Artificial Sequence
  ENSG00000164304_15 (sequence is synthesized)
agaaatttgcaatttatgtctgaaaatgaaagaacgaagaatataaaacttcagcagcaaatcaacgaagtaaaaaatgagaatgcaaaacttaaacagcaggttgcaaggagtgaagag
